United States Patent Application Publication US 2012/0017292 A1 - sequence listing, part 17

SEQ ID NO: 79989 - protein, 942 aa, Zea mays
  Coding DNA Sequence Number=SeqID_36614
MPRTGKTSAEVVELVPCARNKWGNWYDYWFYVSGGEVEDLPGLPAAVMFSHYYVAFPPFEVAEDDRDEGALRCAARMSSGCDLVEEFIGYGVWPLAHGWALGEVCPRQMPSPGKQQLRSPAFTLDLRGHDPAAFVREVEDGAVRIVGRVFELNRLPYDGYPGDDTVVVVDRHGKKPVAAVGEGSSREAAPAMKKRKLGTAAEGLGVSDRFAVELMGTCAALGGRMSSHEIRESSAQMLRVTGGRWPRNIPIPRAAGEDIFTSRMARELKIFPYGRNIVAVVSAVMEKDRQDAARKRWAVTRARDPFREVKKARGGAKSAAPSSSKPPPAAKPAAPGPSKSSVGAMAAASGAGKLPSAKPVKERRLPSPARTDVVAVRVADIDMDICVGDYLVGSDVGHLDVVLTPVAATSPTAAVSAKGASQDPWSTFCASGEISSAAAAKDVAGSMSHQMRHASQQLKHAADFADHVASGALTLEFAAEIEHLRTQHTDAVREKSAVENKSHRLTERLDAAEAEKGDLRRQLVEERRDANKAIADAQAAQAEAKLARAEASLARQHAEELEARLNSLRNRVDKTEASMHAEVERTHAQLVDAYRELGARTTAFEAPGQEVGLRFLEWLQEELGVLPIIVTGLMSFASLVTCEGAMNALSREGCGHFEVFDQSDEGFEREIFQVEDPALKRSVGALFDRMWGPHGRETVWGRSDRAIDQMAHDKEVEDLGDLDSTLPEASGVELAPPSDAGKGPSTTPAPTAPTGAGEDPAPAPALTGGDASKAIGEPAAEDPAAAAGPSQVPTFGPAQASAADNTDFVAASTVVPADDSLFGSVSECFESDGESGSSFPWTEESLDEGLDYFVALDVAAAETSPRVEGARDLPSASTRCRRRSVMGKHSVGEFSRSGRRRRMGMERDHLRVDRVGKRELLSSPTGASIGEGIFGSFLRVSN

SEQ ID NO: 79990 - protein, 160 aa, Zea mays
  Coding DNA Sequence Number=SeqID_36615
MGIDSHLSTCVCTQSPKYLEKAQGHISLSVTPGLAHFRHLEGFLPAGGSVYGTLLGSVLAIGLDPDPRFPTMHEPLVVSGCLVATCISGRCLPSAFVDGVHILTLWPPLHRLIKRLDPWLAARWGAVLGRLLAPPDDALRELDDLATLRGAMATVGVYWA

SEQ ID NO: 79991 - protein, 177 aa, Zea mays
  Coding DNA Sequence Number=SeqID_36616
MEDDSWAWAPVSETGLLVSAEVKRRTTADGGVLLTRRFAFSAHEDRRPRSMTHGPGPPCQRLGRCFRRRRRGALPQIVACSSRGGLPSLRMEVDAQGHSGGRMFTSLMKVDSGLSSDSIPHAPTLWGGKRAVLRLHLFGFDGFGAASNGGRTRRRTSWRWRPHASSTTPLMSSRSYL

SEQ ID NO: 79992 - protein, 120 aa, Zea mays
  Coding DNA Sequence Number=SeqID_36617
MWPTARDISQRAEPDVRPLGRAFIAEEARRLSSWQVMCRLSIKYTMSTPMTSDVLPQHLMCLVHSADGQWPGHPADGVPVRSGGRQYVCAAAYTVLIITHMLLVKLLSHADTTQAANIRA

SEQ ID NO: 79993 - protein, 85 aa, Zea mays
  Coding DNA Sequence Number=SeqID_36618
MKQPKIVLLIFVSGKIVPTRAKIISNLFSFQPKVGRGGDSSEVEVEAEPWGWARRRPSSEVEVEPEPWGRAKRRSSSEVEAGAEP

SEQ ID NO: 79994 - protein, 148 aa, Zea mays
  Coding DNA Sequence Number=SeqID_36619
MAIALLIQPLKGTIRGAYYSGSNPTWASRSGEDVGWRDFVVGLRLAVRRTKGGPRRSSCLRWCSEVTKIFKSAHGVWMELEDFYGDSSTFDDGNFVEEDDHKEEIELEDDDHIDDKEVIDGCSTSSENSSDDDKSTTSSLELMEDDDC

SEQ ID NO: 79995 - protein, 30 aa, Zea mays
  Coding DNA Sequence Number=SeqID_36620
MANKVATTDRVEGHHYRAELAAIATRACVR

SEQ ID NO: 79996 - protein, 157 aa, Zea mays
  Coding DNA Sequence Number=SeqID_36621
MKDAKAIKTPIRTNGYLDLDKEGKSVDQKGWTIQARSVDRPWRNLAKQVADHAKHILRICNEKLPFGKGLTAFEVKELREALEFVAEGLDQDSLFCQEELDATVKEEQLEHDEKVALERIESPLPSRDSDCFLSLEEHIEKFWGVDYNSDQMPSYSD

SEQ ID NO: 79997 - protein, 171 aa, Zea mays
  Coding DNA Sequence Number=SeqID_36622
MEAPDCPVHQWLQDCNGQLRHFWKEIGHRTVSGGAPDSVRWCTGLSVLTSALHCLLVATSRSCSRAKGTFNWYDNHYDDLSSHCTHLNSRVESLEQQVKELKQEKASLQECLDIAEGEEANTREAYRTLKMDYDKKLKKLAPKKKIQKKTTNRGCQTEKKKKTPPAPPPPG

SEQ ID NO: 79998 - protein, 195 aa, Zea mays
  Coding DNA Sequence Number=SeqID_36623
  Gene Ontology: Mol. function=spermidine synthase activity; Cellular component=cytosol; Biological process=spermidine biosynthetic process
  Homolog annotation: Hit_ID=A2YKH0; Match level="QueryCoverage=76%, HitCoverage=42%, E-value=4e-35, Identity=57%"; Hit description =Putative uncharacterized protein
  Pfam annotation: Domain name=Spermine_synth; Domain location=61-195; Score=-77.6; E_value=0.00097; Accession=PF01564.8; Description =Sperminespermidine synthase
  Subcellular localization annotation: CTP_CleavageSite=51; ConfidenceScore=5.51e-01
KANAAASAAPLSHSHSPAAASPHTPPSRAQGFGMEAEAAAKRTRQSGEDVVAAGISAVIPGWFSEISPMWPGASCCSAPPIRTAPLLRIVMLSCPVDHTHSPFEARIFFFRRCLLMRIHVIERDECAYQEIITHLPLCSIKDPKKVLVIGGGDGGVLPEVSRHSYVEQIDICEIDKMVVDPFVSRNVAMPKLPGW

SEQ ID NO: 79999 - protein, 206 aa, Zea mays
  Coding DNA Sequence Number=SeqID_36624
MAPPVDVVGPCPRLGDVEASPRSRSSLSSEAEVESEPLGRARRRPSAEARAESEPWGRAKRRPSAEASGAAKPLQLCADGGYQLRIRSLEGDQPFLVTFCSGGCARAHPPGVAPEASEEWFDSSEAGMLTLSTVWPEPGLREQSPSLCIGREDGQGQTRLFYIRSCVAFPQGGGGESAMLPSEGAEHGVSGELLAGNPSGHPCPIC

SEQ ID NO: 80000 - protein, 251 aa, Zea mays
  Coding DNA Sequence Number=SeqID_36625
MAERYQLPRRCVPPTTRRKDCGCPPSGGSEGGKTRCIREHEDMVAFQGGHPPFKGNSPYLRPQPSWAESSPTRSKVLPLRHGGWVPRVMQAGPEQKKPNRRARCMQPPSGYEHSSTFAQTSGRKGGQPCRRHATAPSGRAPPTSNAPSMGAHAHASCNRDRERGIPRKRILLREGNRLRASLLIKGSKAGPSEGFNSRLRARGLHTHYWSEVRRSAPWKGSTAASGHSGSAPTTDQGFVGWPSKGSQPPQT

SEQ ID NO: 80001 - protein, 84 aa, Zea mays
  Coding DNA Sequence Number=SeqID_36626
MDRSRFRRPMCWVITPLAPVESVRLAENSVAVEVEEDEPNHGSHMVVTRRASRKRPSEIDGNADNVGPGGHQKTSSVQTVRNMT

SEQ ID NO: 80002 - protein, 73 aa, Zea mays
  Coding DNA Sequence Number=SeqID_36627
MAHTHRMLRARLLSFPCQNLGAALRSRRSRAHLVEAPHFAVFAGVCDVRREIPRVFDSEEKHSSNNAHLVFSE

SEQ ID NO: 80003 - protein, 97 aa, Zea mays
  Coding DNA Sequence Number=SeqID_36628
MAWQAAQDGRSDRRKHHRPRSSSDGRHRFDVVDFQVNHAKEFHYIKSQRGVTSEIALARIGATSEKPSGLAPQPAASARSLRPLSALILGSGSQYSV

SEQ ID NO: 80004 - protein, 124 aa, Zea mays
  Coding DNA Sequence Number=SeqID_36629
MCQLAYPLRTGAVDGAKASVDAGGEVALAFARERVVDSPQKSAIFSMQETKGCHDAAQTGGQRNEWMWGMELEALRHHEDMGGRRGVGHRRAPTRKEASRHCDDGGRRWLSVGDGATRSFPTCC

SEQ ID NO: 80005 - protein, 196 aa, Zea mays
  Coding DNA Sequence Number=SeqID_36630
MSESTRSRDFDEAIRFEPFIKHHERTASGHEETTIAGSELVARHDVTVVAGELGNHDARSRRTAGASSTGNSRASDARELGMVEHATKANDNDDGVAASSLGDVMLMLEESLWPGHGKKRVAGDDSAHRQQCARPANRSKIRAGAGITRKSAAAKEPSSAGDPAGRHGSYADLAKSEQGGSAVGKSRSAGEKKELG

SEQ ID NO: 80006 - protein, 134 aa, Zea mays
  Coding DNA Sequence Number=SeqID_36631
  Subcellular localization annotation: CTP_CleavageSite=35; ConfidenceScore=5.38e-01
MISGVQRPSKSITLSLSGTLPSGVAEGLNLKYYPRRSTSSTRGVIVSPVGEGNPRLSSMVNLVDVLNTELDHALDELGKARAEITELCAERAERHHYEDGSPTPVGTQHPYRWPLRGHHAYGTPDCRTKIDSEP

SEQ ID NO: 80007 - protein, 119 aa, Zea mays
  Coding DNA Sequence Number=SeqID_36632
MLEDYTVVLDGPSVSVEGLTHQGVENVVEMTTASNGLLQQLGCPMVVQGSPLAEAQRRAASQTPPPAEARGKSPTAPAPRAGGGAVSPGDSIVMSPCGAVDAPQGERARKGSSIYEQCI

SEQ ID NO: 80008 - protein, 164 aa, Zea mays
  Coding DNA Sequence Number=SeqID_36633
MAMMNPPSSFIFENIPPTFATSYLQASEKDFKKHQGRWQMHRGLPSLTVPDGVQARPRSGEQLRRPIEAKTGANLRLRPNPSPHERFPQLNCTIGGLGSSGHGGRKKSGNKVVFPTTHGGLARFNGSAPRTAAGEFQGDARRSEVTKVIGFATTCLPPWRAHRP

SEQ ID NO: 80009 - protein, 84 aa, Zea mays
  Coding DNA Sequence Number=SeqID_36634
  Pfam annotation: Domain name=LEA_1; Domain location=1-73; Score=41.9; E_value=2.2e-09; Accession=PF03760.6; Description=Late embryogenesis abundant (LEA) group 1
MSAIKATAEDAASSAKAGVAKAKATADEKVEKAKTRDPLKKREVEEDKEDRKLQIESDERVEKAAHGPERTVAHTAEFKIEIAE

SEQ ID NO: 80010 - protein, 73 aa, Zea mays
  Coding DNA Sequence Number=SeqID_36635
MGVLSSATLRLWAVLTTLVAPPDDDPVGVMGMGEARRQMDSLEELDETKHRLRACSTEKRACLREKVAEDYKD

SEQ ID NO: 80011 - protein, 152 aa, Zea mays
  Coding DNA Sequence Number=SeqID_36636
  Gene Ontology: Mol. function=1-phosphatidylinositol-4-phosphate 5 -kinase activity; Cellular component=plasma membrane; Biological process=phosphatidylinositol metabolic process
  Homolog annotation: Hit_ID=A5BK15; Match level="QueryCoverage=48%, HitCoverage=10%, E-value=6e-18, Identity=56%"; Hit description =Putative uncharacterized protein
MSEASPCMMCKTYPQQASTVCKNDFIIIKNRPCKVSFGSRGGSDPDAYAVVLKRKLDLYYATVGKSMVWNLRELFHIDATDYMMSICVDDNLKELSSPRKSGNIFYLSHDECFVTKTLRKTEMKVEEDGSIVKISHEEKRDDYMKFFDSLPG

SEQ ID NO: 80012 - protein, 216 aa, Zea mays
  Coding DNA Sequence Number=SeqID_36637
MVTSSLMVGESEPGCGLCPSLSLKDFHHQGWGGDYSVPGFRARVASEPLAAPASATTAGRGSSADEIARVAHGPTSNSTVFCPSLPHKFGHGRGPPGSCTRPEVSAAAVRPPRAEVVVVAAARAGDGAPFVGLLLLRRPSPMEWGCSYLRRGNRSSVCNGTLNANSPVGCLNRFTKHESPRVKVTSEARGSDISTNRGRVGSKMKPGWPEPSRVVR

SEQ ID NO: 80013 - protein, 164 aa, Zea mays
  Coding DNA Sequence Number=SeqID_36638
  Homolog annotation: Hit_ID=Q6J9V9; Match level="QueryCoverage=73%, HitCoverage=35%, E-value=2e-10, Identity=39%"; Hit description =Putative uncharacterized protein
MAERYQLPWSCIPPTMRRKDGGYPPSGGLEGGKTRCIREREDMGPRKGDTPKRILPHEGTRLRASLLIRGSKAGPPKGSTAASDRVGPTPTTSQRFEGRPPEGLHGRLRLLGLHRGSKAGPRRVHSRLRRRARDDHGYIRYITKARVALPRYPRTFPRPAGAIL

SEQ ID NO: 80014 - protein, 126 aa, Zea mays
  Coding DNA Sequence Number=SeqID_36639
MALECLSNGEDTTRALVDGGGDTTVRQEVRCIEKNSLPLTLNLLIPLMGNTFSLPSPCSPEHFLRSRSPPLSTRGSTAAPSYPKRSGVRTRDNEQSVVPKCVAEDLPEQQPGEGKCPLTYYVLHTS

SEQ ID NO: 80015 - protein, 331 aa, Zea mays
  Coding DNA Sequence Number=SeqID_36640
  Homolog annotation: Hit_ID=A2YGC2; Match level="QueryCoverage=54%, HitCoverage=76%, E-value=2e-07, Identity=26%"; Hit description =Putative uncharacterized protein
MAHLRCTARKSVIPFLTSRLAERPLRRTVLGQSSHLERLHRRLREEQERRCQEQEQQDSSPSPQQEVESGRSSSPTPQPEMPPAPPQGIPAAGGYLDGDGDDDDAGGSSSHGTEFSKESEPEGWIARPITHDAACGCHFHDALDTLLCRAFDRHTWSVEYRCVVYQHRHGLYPDQWEATCLVRHPDDDLRGAEAFSEHYYITERDIAEAAMQDAARHALSQYCSLFSGVADGLDLKYYSRCSTSSARGVIVSLVGEGNPRLNSMVHLAAVLNTELDHALDELGKMSENRRRGARRAQPEQQAPQEDVAQQQLPPPPPMTIEQMFLMQTQAV

SEQ ID NO: 80016 - protein, 39 aa, Zea mays
  Coding DNA Sequence Number=SeqID_36641
MGLGVCGSLYQGVDENDGFGIDFGNGKWYSFRLERENSA

SEQ ID NO: 80017 - protein, 137 aa, Zea mays
  Coding DNA Sequence Number=SeqID_36642
  Gene Ontology: Mol. function=double-stranded RNA binding; Cellular component=intracellular
  Homolog annotation: Hit_ID=Q6H5U8; Match level="QueryCoverage=88%, HitCoverage=12%, E-value=6e-34, Identity=61%"; Hit description =Double-stranded RNA-binding domain (DsRBD)-containing protein-like
MTELQGLTSSLLPQDDKYLSSDPNKLNDMKQDVFGSYRNIFGYSRNTRDDMLPLSSTSEESRFMKMLENNSRKTRNSVTTLKELCTVEGYNLVFQACPSPADGLVGKESYAQIQIGRQILGKGDAGSGIFAARGETE

SEQ ID NO: 80018 - protein, 239 aa, Zea mays
  Coding DNA Sequence Number=SeqID_36643
MPMLTLCRLVKKLRRAVIREFIRACHLGVLDDDRIGFAIQSAIMQMSADDFTGVWLPTLRRTARREPPRRGSMPRHARAPAVAVVPPSSTPVEATPTSNPYPPGYCPVHGYGQCVLRDAGILDTTIISATSTVLPTPTQAAEERPRWRPPTPAPPGFGRRPTMAARTGCPPFFSNAVVNFPPPSALPMPSPALLPPRRHAGVAAARRPGLRPVKNEADLPNGSSRGWFSSDEEKADSIS

SEQ ID NO: 80019 - protein, 120 aa, Zea mays
  Coding DNA Sequence Number=SeqID_36644
  Gene Ontology: Mol. function=transferase activity; Cellular component= chloroplast; Biological process=biosynthetic process
  Homolog annotation: Hit_ID=A9UKC3; Match level="QueryCoverage=43%, HitCoverage=14%, E-value=5e-20, Identity=82%"; Hit description =Chloroplast phytoene synthase 3
MAAPREEGATELNQESRWPILDEIEANDYDNFTRRAYVPKTKKLMALPKAYLRSLVPVWEKLSKFSGHAAGGFSIESLMKMSEPAVLSHFKPADYVSILAQIHKELECRPPDDKASLYLL

SEQ ID NO: 80020 - protein, 584 aa, Zea mays
  Coding DNA Sequence Number=SeqID_36645
  Gene Ontology: Mol. function=transporter activity; Cellular component= membrane; Biological process=oligopeptide transport
  Homolog annotation: Hit_ID=A3A0M3; Match level="QueryCoverage=51%, HitCoverage=77%, E-value=2e-79, Identity=57%"; Hit description =Putative uncharacterized protein
  Pfam annotation: Domain name=PTR2; Domain location=165-440; Score= -7.1; E_value=1.2e-05; Accession=PF00854.12; Description=POT family
MDTFVKKVTELNRKMNEVDEESKQVSYPVIRDDNGNDKLDCPALGKQFAAEEISAQNVRNTNMPMDTFVKKVTELNLYLVLLPLDGQSVPKLEKPYHSCLPTLSIRHLCQCSLHNLADPDASGEATGVRVDRDWLHSRHVPGPHCVQRTNHLQKCPIDCCRYGRKTTIIGGVVVDVPLTDSSSATVEEISQPNPKDGSPGAASAIPETDLPEIAQVIRSCRDGIHKVVELLQHKFPNVSKTQLNRKVREISDFVDNHWKFLDKAAVETADDKSRRRPASAWCLCTVKQVEELKCVLRLLPVWASDIVFAAAYTQMTTTFVLQGDTLDPHVGGGFRVPAAALSVFDTLSVMLWVPLYDRLVVPLARRATGHRRGFTQLARMGAGLLVLAVAMLAAGAMEVPQYVVVGASEVFTLIGQIEFFYDQAPDFVWSICSGLSITSFTLGNYVSSALVAVIARATARAGQVDGWIPDDINRAHLDYFWLLTMLCVGNFGVYLLIARCAHEFCNVGDDACLILWDARTGTAPPVKVEKAHNGDVHCVDWNPLDFNYILIGYDGIKVQFSIIVETNSISISSLYVQVMNLSID

SEQ ID NO: 80021 - protein, 89 aa, Zea mays
  Coding DNA Sequence Number=SeqID_36646
MPGSRSEERRRAEGVLDPLADIIGVTPGGRSLGASGVRGGSGVEAGCGTTLGSAYGDWGPRGLPAGTIGLALERQAEAGLGWSGPHEGP

SEQ ID NO: 80022 - protein, 292 aa, Zea mays
  Coding DNA Sequence Number=SeqID_36647
  Homolog annotation: Hit_ID=Q6J9V9; Match level="QueryCoverage=39%, HitCoverage=40%, E-value=1e-50, Identity=84%"; Hit description =Putative uncharacterized protein
MAGDRERGHFEGALGSKRNGPRALLLIRGSKVAPYGVRQPPQSTRALSPLLIRGSKAGPSEGFDSRPRTCRVRDDPGYVRYMAKARATLSRYPKTFPRPAGTVCNGIPPKGGTEPLDPIKWVRVQRITCRDHLTPYPDTRASVGKENNTIHPVPTTVPTTRVRLTTVSHGLSRVWPQAHQGAPPRLTLGLGLSLGLGRRSLPRPTPGLALSLGLGRRSPPRPTSASDRLRYKGYIITLPLASRLRLRRNKTGVTSRLLRQQLSMKAKKRQQDPGPHRQLRFYKAQALLRRPR

SEQ ID NO: 80023 - protein, 153 aa, Zea mays
  Coding DNA Sequence Number=SeqID_36648
MERVAISGARLMPDKSLARVLASSVRLGLARCWEATPVVVPDGLMQVKHERGDEAYIILHQGARSRGYKLRGRGFGLEDKVSGDPRIKCVCDTVGGKAIWPRLLYDKVFPSLASGEPRVRPLPEEALGQGVNPSGTTVLARGRARARRDRVPW

SEQ ID NO: 80024 - protein, 63 aa, Zea mays
  Coding DNA Sequence Number=SeqID_36649
MNTGDLFYRGSALEGLVPVEESTQGRVLGTFGVRRAEGVEQESFGVTAESETDLKMKRLFRPQ

SEQ ID NO: 80025 - protein, 69 aa, Zea mays
  Coding DNA Sequence Number=SeqID_36650
MAKDLLAIAILDGGNRVMSVLNCCVGMEDFHVCISTGGRFDGPSLFPVDFLEIQESLQSVQEETRVGIN

SEQ ID NO: 80026 - protein, 294 aa, Zea mays
  Coding DNA Sequence Number=SeqID_36651
  Homolog annotation: Hit_ID=Q5Z9B4; Match level="QueryCoverage=50%, HitCoverage=55%, E-value=4e-44, Identity=61%"; Hit description =Putative uncharacterized protein P0485D10.5
  Pfam annotation: Domain name=Hin1; Domain location=63-201; Score =35.7; E_value=1.6e-07; Accession=PF07320.4; Description=Harpin -induced protein 1 (Hin1)
  Subcellular localization annotation: CTP_CleavageSite=30; ConfidenceScore=5.48e-01
MDSDAAVLPTHTATTPGSSNHSKNQADELRSQIRRRRRRCVCVCLLVSLGAALLLGITLLVLFLTVLRVRDPTTRLVSSRVIGFVPGPGPEFQFNLTMLLTVDVHNPNLASFSYASGSVQLLYRGVLVAVAAVDPGRIPSKGDGTMELVMTVMSGSFGAELTQLVKDMEAGAVPLDASARVPGKVAIFSVLKLSAVAYSDCHIIFGVPEMKVQSQAHTTQILVDLATSKKHNLSAANFFHKIMRLATELTAVPLHDEEVLAYLMVGIPTNYEKLRAGVWRSQGRITSQVPSCDS

SEQ ID NO: 80027 - protein, 156 aa, Zea mays
  Coding DNA Sequence Number=SeqID_36652
  Subcellular localization annotation: CTP_CleavageSite=40; ConfidenceScore=5.17e-01
MTNTTIQDTHKGNSSNSRLLKKYDCKESSTGKNDASSVVSLNRGSGGNVAFKGVVSVLGRGHKDDQVTWWLYCGRVASRGPHRRRNEATGNEALRRGGVGARRRGGRSNIGVGTQTTDQAKDGGKKSFEVPSAQEKVKVAEEPKANGEEEDLLSQG

SEQ ID NO: 80028 - protein, 206 aa, Zea mays
  Coding DNA Sequence Number=SeqID_36653
MGDFWTNIRADLAKMQATLQKVEHGLLHIKAAVQHEQHQLALSARLQTSAAVGIQVAALGFLARQRVREMRRQMLETALVMVDHGTRGHDLTLSNGHQQWHQAAISKCEHGTCPAGDELQLYGSGGREGTSLVIGKGALFSATTFHYRLPRGRLCWLLLRPTPGARPCASLSSRWRPWDPGGCTCASPMRGGCPPYLMGSKKSDSE

SEQ ID NO: 80029 - protein, 64 aa, Zea mays
  Coding DNA Sequence Number=SeqID_36654
MSMKIYIRAEYWLEKHGNAAFQDSWAFTELDSSVRRRQKRDAEGLYEQDQGIDKDGSVVTQCNP

SEQ ID NO: 80030 - protein, 96 aa, Zea mays
  Coding DNA Sequence Number=SeqID_36655
MPFGWLGSMIEVVFGLLPNTISTIDSPPLHCAEESKRPVCGVARRQHECAVVFDIADSQRSNFDGPDELNIKNVGTVELNIKNVDTVELNIKNVRF

SEQ ID NO: 80031 - protein, 121 aa, Zea mays
  Coding DNA Sequence Number=SeqID_36656
MAATSSRDCATVLLSIHKRHRCSSHGLSALAPSADARWPTPASTYARLLFQLLNHQWAMDFDTNLHNVRESIARAKAAVLAHRSLAARRRRSTVTTRKRNRGLLQSIEGLLQFPKPVNPKP

SEQ ID NO: 80032 - protein, 93 aa, Zea mays
  Coding DNA Sequence Number=SeqID_36657
MQQWSMAGKTIETYCIVILCNEIGLQTATVRRLKNNSPVSLPRGDRAPASPRRQTPVRQHGSLGARDGLPDIVEEEHSPLPWIGNRAATVVGP

SEQ ID NO: 80033 - protein, 141 aa, Zea mays
  Coding DNA Sequence Number=SeqID_36658
MSALLHSMPKEMWQSLGACKTVKEAWEAVKVMRIGTDRVKECAAAARLGCRTVRVHAIGGKRTYCPVKDCSAKMLVDNDSDFAESECPSCACAVARRRYLHRVQEQKGGFRLSSSDSSPHADFADRCLNSSGGATNNNSMS

SEQ ID NO: 80034 - protein, 102 aa, Zea mays
  Coding DNA Sequence Number=SeqID_36659
MRRVREKKQRKHQHNKHIGTGEGRLVYDFFLSFQNTWAVILQFLLLRQVIFRFFPAASRLHLRRSNPGSQKGANMLHLKRDFREQSEARPVHRAVPESKHIY

SEQ ID NO: 80035 - protein, 47 aa, Zea mays
  Coding DNA Sequence Number=SeqID_36660
EEKEMIRDQQEKAQLERNMRERDAANTRKEYHLVSNISKFRKHFCFL

SEQ ID NO: 80036 - protein, 173 aa, Zea mays
  Coding DNA Sequence Number=SeqID_36661
  Gene Ontology: Mol. function=ATP-dependent helicase activity; Cellular component=nucleus; Biological process=RNA-mediated posttranscriptional gene silencing
  Homolog annotation: Hit_ID=Q6YUI7; Match level="QueryCoverage=85%, HitCoverage=12%, E-value=3e-60, Identity=79%"; Hit description=RNA helicase-like
MALEQPLVCLCDMLLPVEVWYAERNRKFSRQAYLQKRRDKKIEEIRDEILDHQYIFQDLKLTEAEEKELRYKMKIYDLVKEHVETPDDVGAYKMPEAYDMGENVNQEKRFAVAMQRYNRDPKANDKMNPFAEQEAWEEHQIETDSEEIYVLVPGKSKLQFGSKDKKPSSDEYQ

SEQ ID NO: 80037 - protein, 269 aa, Zea mays
  Coding DNA Sequence Number=SeqID_36662
  Gene Ontology: Mol. function=aspartic-type endopeptidase activity; Biological process=proteolysis
  Homolog annotation: Hit_ID=Q2R4R1; Match level="QueryCoverage=41%, HitCoverage=13%, E-value=9e-14, Identity=36%"; Hit description =Transposon protein, putative, CACTA, En/Spm sub-class
HAWKDFKWKLNINYVKKNKTPFEDYPELKKEWWPNFVECVTSAEYIALGEKGKKSQSMNKFRQKLGRQSYTVQKRKWAKEDAQALTEGKSIPFQDMPDGRHKDWARVRNPSGDGWVLLKVMGTSKKKRKTTKEYVKRIVDEYEEDEVPDYSASDTDFLLVDYSDGTATDAEVTVSRIVADVDAGSCADIPEGHAALAGYASLLGAYGQTSAEGIHTSELILPSFSIRKEVWSSFVLSTAARLTVLLNLGLPSPTGETITPPIRLVEQRG

SEQ ID NO: 80038 - protein, 61 aa, Zea mays
  Coding DNA Sequence Number=SeqID_36663
MADLGEGCCVRRSCGPWEPCIMGIYVNDLAMRDLEEPATEDPGEQQIEVAEQELIEGKLCP

SEQ ID NO: 80039 - protein, 249 aa, Zea mays
  Coding DNA Sequence Number=SeqID_36664
  Homolog annotation: Hit_ID=Q9DUM3; Match level="QueryCoverage=47%, HitCoverage=13%, E-value=2e-07, Identity=24%"; Hit description =Latent nuclear antigen
MAGDARGAPSSISPPIPEEPEEREDFKEDLEKLFGREREVTQKEKRLVKKEEHLDQREAVVTEFHEKLKAYNVMLEKQRDEQTATEAALQKLRRELDDRASNISLAKENLKAKDASLEERAMDLVWQEKDLTWREEMRERRDKLLAEHELKAEEKEKKLEEKERTLEEWVHRFQAMQAAQVAQTAQAAPGSQAVEAMKKMLEDLRIEHRTGVQRIAAWANEASSALVPLGVSPIPVSKQSVSSPTCSRC

SEQ ID NO: 80040 - protein, 63 aa, Zea mays
  Coding DNA Sequence Number=SeqID_36665
MGKCRTLAYIARTSRYDPGPPRSPGWDQTPLSEVRATHDKAIAEEAKARYDKAVFKVVEIWAN

SEQ ID NO: 80041 - protein, 249 aa, Zea mays
  Coding DNA Sequence Number=SeqID_36666
MEDEASRGAASAWVGCPFLPPASRGEWHPPVSRRLPPAMPGWVGRHHSARAQHYALRPDDGCAASREGGAHALGGSDQGKDLSARFEASPAGDGFSTDEIANSASSPGSPSPGLNGWLSSSAGESPPVATPAPKPLPKLLRRPGRGWLPLLPERAAAGRPSVRDRSTGSPILWGYSYPRGWNWSSVGNGTLNASVFVHCGCRGLNMGNRPSRLLGPDSRRSPRTASSSEAGSDLTEGVVDAEGASPLPA

SEQ ID NO: 80042 - protein, 112 aa, Zea mays
  Coding DNA Sequence Number=SeqID_36667
MQAACIRARWTRFSDSQRASMEAQAHASRNRRAGCCMQGPGKGDTPKRILPCEGTGLRAPLLIRGSKAGPPRGSTVASDRVGPTPTTGQRFEGRPPEGLHGRLRLLGLRAHY

SEQ ID NO: 80043 - protein, 159 aa, Zea mays
  Coding DNA Sequence Number=SeqID_36668
  Subcellular localization annotation: CTP_CleavageSite=79; ConfidenceScore=5.36e-01
MPPPPRHPFPTEGVGADTSSPYSSDTSPDTDPRSGYCMSTRVFHSMHAPSFSPSSDVTFVFLAFALFFLPNLLPLPTVGAASRPTLVDAGLEGTRILSAFRDRGVPKPTSECTACPSPDGSSEWESAKGEGEVAGDGRERGGNPAAFVFVPRPGRVRLQ

SEQ ID NO: 80044 - protein, 85 aa, Zea mays
  Coding DNA Sequence Number=SeqID_36669
  Subcellular localization annotation: CTP_CleavageSite=64; ConfidenceScore=5.12e-01
MRNKLKKKMIKFKTMSNLKMMALIKGGMKLSKKRRMSQRFRIKYHLTQGSIKKFNETTLSTPFSVTLKRGYQMGIPESTYRGVNR

SEQ ID NO: 80045 - protein, 107 aa, Zea mays
  Coding DNA Sequence Number=SeqID_36670
MTLAGFSRVLAIALLIWPLTGTVRGARYNGPDHTWASELDEAARWDDDVAGLRLVPNQAKGVLARFVSVGPATAAKASSEGWRLCLRPNICPPRDQFDKVTWCRRRR

SEQ ID NO: 80046 - protein, 23 aa, Zea mays
  Coding DNA Sequence Number=SeqID_36671
MAPLCRPAHHPPEAQPATIINGL

SEQ ID NO: 80047 - protein, 72 aa, Zea mays
  Coding DNA Sequence Number=SeqID_36672
MSHESLRGDRRGKEWAYVWCEEWAGNERVLCALAGQVRIGMGCVGETGWDIGMAPRDMGMRMAEPGMGQPTP

SEQ ID NO: 80048 - protein, 615 aa, Zea mays
  Coding DNA Sequence Number=SeqID_36673
MGVSDNFAVDLMRTCAAPGGRMSSPELLESSARMLEVTGGRWPKNVPIPRAAGEDFYTSRMARDLRVFPYGRNIAAVVSTVMNKDRQDAAQKRRAIVRMADPAREAKRARGSVKATASGSSKPVASAKATAPRPSKASASAKAAASSGGRPPLGEATKGQELPSPGRRVADFGTNIIVEDYLVGKFFFDRRYVAGSGEGQLVVVPPSVATTSPSAVVRAKGVTQDPWAAFCASGEIPTAAASKDVADTMSQRLREVSQQLMQQLKQAADFTDRVASGVLTADVAADVKRLRTQHADAVRENRVDKAEASTRSEVERTHAQFVGSYRELGARTADFEIPDGEAGLRFLEWLQEELLVLPTIVEGFMYFASLVTCEGAMNALSCEGCRHYEVFDQSDENFERDIFKAKDPVVKQSAGALFDRMWGPHGRESVRERSDRAREQMERAEDVEDLGDLVGAPPKAEVNPVPPSSAGEGSSAAPVPTMAGEGPLPALVPTAEDPPKVVAEPAAEDPMVAAEPSQVQDFGPAHATATVNANFVAASTVVAEDDSDDSVSKCFESDDSGSSIVWTEESSDEDLDYFAALDVATMEASPRVMGDDDPPGASVGHRRRRAVAKRR

SEQ ID NO: 80049 - protein, 78 aa, Zea mays
  Coding DNA Sequence Number=SeqID_36674
  Subcellular localization annotation: CTP_CleavageSite=36; ConfidenceScore=5.10e-01
MVKFSVTWRSSPTKLQRRNDTESGSSPARRIPQSPNEAHSSSLRPVLNLECNHAIHVAPRRSVGRAAGLVDGYEFNEM

SEQ ID NO: 80050 - protein, 78 aa, Zea mays
  Coding DNA Sequence Number=SeqID_36675
MNSMVFEVAELDEATMICHTNSKMKDSFTQCLSPLFHQGIVKGKCALGPFLSILVIECKHKGLNVNLCTWMNKVKIMK

SEQ ID NO: 80051 - protein, 149 aa, Zea mays
  Coding DNA Sequence Number=SeqID_36676
MANNRQVSPDNGDGARVGHDTRQCGPVSELRRGIVGLLVVFSLRRGHDHQQSRPVKLSGHLPKCLRWRNGVASAAAVFSSRRSMISSTPSVHVLSIFGVAEEGTDVGLAFMLGVEPGWVAFGWGGGSSGLRWLLSSIWEGRVLSARSHV

SEQ ID NO: 80052 - protein, 37 aa, Zea mays; identical to SEQ ID NO: 55685
  Coding DNA Sequence Number=SeqID_36677

SEQ ID NO: 80053 - protein, 181 aa, Zea mays
  Coding DNA Sequence Number=SeqID_36678
  Gene Ontology: Mol. function=carbonate dehydratase activity; Cellular component=chloroplast; Biological process=carbon utilization
  Homolog annotation: Hit_ID=Q41728; Match level="QueryCoverage=93%, HitCoverage=63%, E-value=5e-72, Identity=81%"; Hit description =Carbonic anhydrase
  Pfam annotation: Domain name=Pro_CA; Domain location=23-176; Score =225.8; E_value=1e-64; Accession=PF00484.10; Description=Carbonic anhydrase
MGNRSNLVLRAPVLPLFADLTVTDFPSACIVAPGEAFTVRNIAAMVPAYDKTKYTGIGSAIEYAVCALKVEVLVVIGHSCCGGIRALLSLQDGAPDNFHFVENWVKIGFPAKIKVKKDHASVPFDDQCSILEKEAVNLSLENLKTYPFVKEGLANGTLKLVGGHYNFVSGEFLTWDNKQPS

SEQ ID NO: 80054 - protein, 171 aa, Zea mays
  Coding DNA Sequence Number=SeqID_36679
  Subcellular localization annotation: CTP_CleavageSite=19; ConfidenceScore=5.07e-01
MRTLPPPTSHSAARIMQLCAATPKRTSWHMPTPYWGAGAAAFPQTPERSPRFTGDARLGHCVHDVAERYGCAEDAGEVARAVRTLEYAPAPRREQARWGGESEAEAPALYESGAESLRPACLLTVAFALCFSLALRGSAQRANHRLAEKEIVIVLSSASVVPVESSVAVFD

SEQ ID NO: 80055 - protein, 248 aa, Zea mays
  Coding DNA Sequence Number=SeqID_36680
  Gene Ontology: Mol. function=protein binding; Cellular component =endoplasmic reticulum membrane; Biological process=response to stress
  Homolog annotation: Hit_ID=Q06397; Match level="QueryCoverage=73%, HitCoverage=82%, E-value=1e-74, Identity=70%"; Hit description =Derlin-1
  Pfam annotation: Domain name=DER1; Domain location=53-227; Score =130.3; E_value=5.7e-36; Accession=PF04511.6; Description=Der1-like family
MALSPLSAAAPATRQTRMCSNMYQSWGTMRVEEGEQGVASPYAFMLKRYYKSLPPISKAYGTLCFFTTVLVQLQILHPLFLYLDYPLVFKKFEMSESRSVLARYGVMLEKGAFDKRTADFLWMMIFGAISLLVLSIIPLFNSFFLGIPMVSMLLYVWSRENPNAQINIYGLVQLRSFYLPWAMLLLDVIFGSSLMPGLLGIMVGHLYYFFAVLHPLATGKSYLKTPKWVYPFTWSWSKHSLAVFIYND

SEQ ID NO: 80056 - protein, 44 aa, Zea mays
  Coding DNA Sequence Number=SeqID_36681
MAKNFGSETVQIAMNAVVTSHLLVCLYSAAGLIERSGPRLKLLA

SEQ ID NO: 80057 - protein, 327 aa, Zea mays
  Coding DNA Sequence Number=SeqID_36682
  Homolog annotation: Hit_ID=Q6J9V9; Match level="QueryCoverage=33%, HitCoverage=29%, E-value=2e-20, Identity=52%"; Hit description =Putative uncharacterized protein
MEARAHMSCNRHNGYCVQGNRTTTRANAASSRLRDQYRDSRQPCANRRVEAAVQSPTGSHPLLKRQGSPLPRSKDDAPVFRSSNGSRTRTGNGGISKKDPSQRRKRAPSPPTDQGFEGCALRGSATAPEHSGFVPFTDQGFEGWPLGRVRQPPRARRVRDDPGYVRYMAEARVTLPRYPRTFPRPARTICNGIPPEGGIEPSDPIEWVRVRQITCSHFAPLLTDLTGKQRCSPRSGDCANHQGKTESRSPTSSDSGATGSSASPDLRPRPRKKISASPDPRPRPQPRPLRGVTTSPEPTLGLRKSLRLARPGPRTDCATWDTSLPYS

SEQ ID NO: 80058 - protein, 168 aa, Zea mays
  Coding DNA Sequence Number=SeqID_36683
MITSHVVGRSKPGCGLCPALSFKDVHHPGWGGGRTELGPASAWAGVPLLPPAFGGEGHPPALRRRRSPAMRGKVNCCCLARVQLSVLHQDDGRAVRRRLLSPVLKRWPPLVRLPTAAVVACADETVSATNAPGLRLFGFNGWFSSPVRGRERGPSSGSVCPEAIAAAV

SEQ ID NO: 80059 - protein, 421 aa, Zea mays
  Coding DNA Sequence Number=SeqID_36684
MRGPRGKDVFARAPGVFGADAEGSDEGQLVVVPPTVATTVSATVPGAKGSALSAGGEISALTAVKDEAGTVSRRLREASQRLSQEADFADRVASGALTAVVSAEVERLRAQHADAVREKSAADSKCRKLTEKVAALEGERTDLRRQLAEERREANQALAKAQSAQAEANLARVEGSLASQRAEEWETRFNALQARMERAEASTRSEVEQTRKQLMDSYRELGAWTADFEVPDRESGLRCLEWLQEELLALPTIVEGFMSFASLVTCKGAMNALSREGCRHYEVFDRSDEDFEREIYKVEDPLVKESAGALFDRMCGPHGREVVRERSDRARDQAAHDEKVEDFGALNSVRPKAESNPVAAGAEVAPAPPPKTVEGSLAAPAATVSGGGSLPTAVPRAEDPPKTATEPAVEDPTATWSSQVA

SEQ ID NO: 80060 - protein, 129 aa, Zea mays
  Coding DNA Sequence Number=SeqID_36685
  Subcellular localization annotation: CTP_CleavageSite=24; ConfidenceScore=5.24e-01
MAAQGAGRAVSSSLAKSLGLRKPKKETGSGAKNRHQTLSRVYKDQGETGSNVPPRPDAGFENAKRTVVPRTTRARATTAPSTTRPVASTPRRDRRRLWQEKRATLRLRHNDRASKGTGKGGYPEKGPSP

SEQ ID NO: 80061 - protein, 139 aa, Zea mays
  Coding DNA Sequence Number=SeqID_36686
  Homolog annotation: Hit_ID=A5BUC9; Match level="QueryCoverage=89%, HitCoverage=8%, E-value=8e-16, Identity=37%"; Hit description =Putative uncharacterized protein
ELESEKGKLVKDLTEAENKQSMHYSSLQEAQSSLSMKDKELAEATESLKELGSELETSKKRIQEIEAELDSSANKLRKLEELKDERSLHAAQEAKRASKLDKMLELAQSNMKQMEKHISSLQEEQVHQQNLQSLSLVLA

SEQ ID NO: 80062 - protein, 144 aa, Zea mays
  Coding DNA Sequence Number=SeqID_36687
MGKNNKRKREPTPPSEDFGDSEYSEEEFSSESEGSSAPIPLRESSDDSDDSQGLAAEVWTYIRAVERSGLTGSDESEYSSDEEDSSEEGDGGDGDDDDDGDDDDEGGDGGDRGSSGGGKGDDGGGSRGGSGDGGSSKGINKASG

SEQ ID NO: 80063 - protein, 56 aa, Zea mays
  Coding DNA Sequence Number=SeqID_36688
MLAGALREHDKRAAIIAPIHDGDAAAIDHLNGGAYGPDLNFALSNYTLFLVTEDLD

SEQ ID NO: 80064 - protein, 167 aa, Zea mays
  Coding DNA Sequence Number=SeqID_36689
MMNEVKINKKKKKKIGRECLCAAKTQHSLAHLSVRWCTGLSGGAPDSVRCARLVSGELATLGKTSAVYGYNSPDCPRQMTAWWRWELGDHREDLVGDPTQVCKRSLGIHRAGVAKDHLVVSTWFLRGPRGSDTLARVLQRGLVESADSSIPREKLEESSKPCFTFRT

SEQ ID NO: 80065 - protein, 396 aa, Zea mays
  Coding DNA Sequence Number=SeqID_36690
  Gene Ontology: Mol. function=metal ion binding; Cellular component =integral to membrane; Biological process=ubiquitin cycle
  Homolog annotation: Hit_ID=Q9LRB6; Match level="QueryCoverage=83%, HitCoverage=92%, E-value=5e-65, Identity=46%"; Hit description=RING finger 1
  Pfam annotation: Domain name=PHD; Domain location=188-230; Score= -5.9; E_value=0.064; Accession=PF00628.20; Description=PHD-finger
  Pfam annotation: Domain name=zf-C3HC4; Domain location=186-227; Score= 40.1; E_value=7.9e-09; Accession=PF00097.16; Description=Zinc finger, C3HC4 type (RING finger)
  Pfam module annotation: Pfam domain module=PHD::zf-C3HC4; Domain location=188-230::186-227
  Subcellular localization annotation: CTP_CleavageSite=61; ConfidenceScore=5.16e-01
MASGVRSESERDSTRKTKMPAAGLRRAGGRFPLARDVGSSGANERSSSVRRGFGGGVAMPRALLEDSAPAVDAPATTGREPPPPASSAASRVTPAVLFVTVVLAVVLLVSGLLHVLRRLFLKSRHASAGAGERQLLQHEDAGGGLGQAAIDALPEFAYGELSGGGAAASSKGKGKGKEKAARPFDCAVCLCEFDDRDRLRLLPPCGHAFHVACIDVWLRSSATCPLCRTRLSAPSSVGPDVEEQKLQQDHQPPDDESGVVLPLPVRLGRFKNADAESSTGATSRIDGRRRCYSMGSYQYVLADGDHLLVSVHLRHGNARGGSGAVCGPSAAAPSGSDPRQGKKVFARGDSFSVSKIWQWRGSKRLPGGLCADDDGLPWAPAAKDRTTNTRRQHSDT

SEQ ID NO: 80066 - protein, 125 aa, Zea mays
  Coding DNA Sequence Number=SeqID_36691
MARPRRSLPPSTNLHAGPTLNQAREIENAPVDLPPRLRVQPKPPTLHRGSTAATQRRSWTDSPRTRDAPQPDNSPRSAKGKTCPVRRRSLPDLLSLVARKDHAATGEVVARVLACARFMAAREIG

SEQ ID NO: 80067 - protein, 697 aa, Zea mays
  Coding DNA Sequence Number=SeqID_36692
  Homolog annotation: Hit_ID=Q6JAD6; Match level="QueryCoverage=68%, HitCoverage=73%, E-value=1e-165, Identity=61%"; Hit description =Putative uncharacterized protein
MPRTKNVSAPGGGDDEDPRRPFRQVKGKTVYLEQQEGRKKRRTDRAARAAAAAAAAAAQAELGDQPQTPSDQIAYRVRRLASRPRSSSHPTASTPPPTLPAPVTPVAPSTSTAIPATSTTPASTAPPPPAPASAPPVPPPRFREHDETEVRPLATDPRLFDLQRATAARVHRFRYVPVESWLPPQRDPAAGDLFSTRIQKSFFRAQMSAQIALRVHRLLDLLAFLLAAGADSEAHLTYLPGLQTLLTISGSLCYGSSDPPRRPHGGVAPGTAHVAALFRPPFSDGSRRSPADFTTAAKYLYELIRRTLLPRMGYREATTHIQLWLLGALVSHSEFDVVDFQICEIEDTVLDGIRARRQLPYAHYLCHIFAQLIQPPRFQGTLEASRLIFGSYRPAPEIPVPASAPVFDSQAEDAALRQFDTQVTAADDDDDDDDFGVPPPPPPPMPPRSHDHEAGSSSAAPATPQAMDPALASILQTLSLSSRLTWQPSRPGYPRGCSRCFRTCRTGRMHFSSSYFRIGLRVEHSWLLCFSRLVSQYLRFSLLHLLRFTLQLCHRFCQDPLLLLQRGLSPSQYQLQLLPQILDPRLTLTLRRRSLCYLDRVRMRPRRLLLLQRQMKSPIHPPLGHRDPFNSYRDCPVAHRTVRFVCVASHPYSCAFTVIFIVRARDSNLWRFLANGKRDKQRKVVVFKLIIGSLERG

SEQ ID NO: 80068 - protein, 149 aa, Zea mays
  Coding DNA Sequence Number=SeqID_36693
  Subcellular localization annotation: CTP_CleavageSite=46; ConfidenceScore=5.36e-01
MLSRLSLASGKNSGPGRIHASPEGPSGSGRTPDSSEAKLGQTLSVRLTTVSHGLSRVQPRAQQGAPPRPTPGLDLSLGLGKRSPPRPTPGLDLSLGLGKRSPPRPTSASASGGVTTSPDLSLSLGRSHRLARPRPRTDYATGDTSLPYL

SEQ ID NO: 80069 - protein, 427 aa, Zea mays
  Coding DNA Sequence Number=SeqID_36694
MAWADRADLTTTDRPSTRAPARAVASGLGSHRKQTHILGMTMLHRLRRRQHPQRNELPPHRKGCKITNSKQLTGDHCTSSDNDLRLGRLDSSSDCPRANATVKRLSPPSPHGGREQVIKAKEPEVRPQVVLTVSSAEATTSAVGNLTYGGHHLSTDDSGHLRTDAAPANGSRPSAHKEVLAPVLATGVRTRPSKNVHTATAAYDVFRWQFASSARLVNALLPQMLEDEAGGGHSPARSSPPQGWLSPFWVTTGGELQPGCMMKILEAERRLKSANPHRVVLLQQQQEEGNAGAPHLEARKMERRDECEKSKGMATAREIDPFLKKISPLAPQSITGKVSPDVLQGSRPTDPKREDGEPLHTKYATTPRLSALSSSPKPAVGKAGHHARSGQAPFRPCHDDYLKKGIGKRDISKESFVVKETGPEPSY

SEQ ID NO: 80070 - protein, 170 aa, Zea mays
  Coding DNA Sequence Number=SeqID_36695
MASPEFSLRRNRELRLARAQASASASASGEGLRLARPQASPSASDSGEGLRLARPQASASTSASGEGLRLARPRPRPQEKSPPRPTSASDRLRYRGYIITLPLASRLRLRRNKTGVTSKSLRQQGFDYRWEIWLRLIACVEAPVPTRSGRGLKNQDDRWPIFVKSIKSIF

SEQ ID NO: 80071 - protein, 52 aa, Zea mays
  Coding DNA Sequence Number=SeqID_36696
MARVACTLRGKRLDDGVSVLSVKKQQTFVASVPRSYQKKRIKTKAAGGKVLR

SEQ ID NO: 80072 - protein, 187 aa, Zea mays
  Coding DNA Sequence Number=SeqID_36697
MSTVPIDSPFASRPYRLGIQCSTNPGCRRAVTALLCIKLGLAFNSWGCGKILDGSLGSLLLVFLLDSSMLGDEHAGELVGGEEFGLSRAPLTNQMGQRASPGIKEGGRPKSGEDNLGSPVMFCRVRELGKLHKLLAKLTERLARLGSDWGGLATVAEARVAMAGGRELARAKEVRLASEGFADWIKT

SEQ ID NO: 80073 - protein, 336 aa, Zea mays
  Coding DNA Sequence Number=SeqID_36698
  Homolog annotation: Hit_ID=A2YGC2; Match level="QueryCoverage=45%, HitCoverage=69%, E-value=5e-07, Identity=26%"; Hit description =Putative uncharacterized protein
MGLGVCGSLCQGGNEIDGSVYDYGNASPLQPNRTLAEYVDVYSPLLYTPTPQVVCIATTAQEKMKPWKETSRNSKITMSSRRGWLVLDTLHGSLIPFLPSCLAERPLRHPQEIESVRSCSFVLPLEAPLAPPLSTPVAGVAAGGDPDDGGGDISLSHDTDLSTDQEPEGWVARPITRDATRGCHFHDALDTLLRQALDRRTWSIEYRCVVFQHSRGVYPDRWDATCLVCRSENSLRGAEVCLEHYSISERDSAEAAMQDVARRALSHYYSVFGGVADGLNLKYYPCRPSGSTGGVIVSPVGEDNPRLSSTVNLAAVLNTELYHALDEQSGARAEIA

SEQ ID NO: 80074 - protein, 22 aa, Zea mays
  Coding DNA Sequence Number=SeqID_36699
MTPEAFVESSRMALDTLSTDFS

SEQ ID NO: 80075 - protein, 162 aa, Zea mays
  Coding DNA Sequence Number=SeqID_36700
MTISAPTRCRWYPLARSITGGPALWEMDDEKGFIDDLGYSWYDPHLRHAWGDARYAQQHDHSRELDGPLPYLYAQGSVLGEAGSCIQRRDALAPDVMADHAVHSRLLTSRREPRPRDRLYARAPEGDAAHTVVVVTAPGYGPRAAYGKSSRGASPAIFRRAL

SEQ ID NO: 80076 - protein, 75 aa, Zea mays
  Coding DNA Sequence Number=SeqID_36701
MAARRRRLSVLVTMLAVAAPVCLYTSAILVILELGWGDPADSILITGNYRLGSGVEGVANVRRGVLCKMVWVDQI

SEQ ID NO: 80077 - protein, 170 aa, Zea mays
  Coding DNA Sequence Number=SeqID_36702
LALTVGQLVRFGLQNFGDDEQPFPGVRVAHGCLLQGADEVQTPHNKRPGDGYRLQSLSGQELLAFGDGNGSLEDTCGAAVVRGLLVSIRRDPASLLLDAQCLTLGGRGYLGLNRGSREKMSGGTVVRPEAILASFSDSGGHQDRRVCEERLQVPDGFLGLRGPSEALGLP

SEQ ID NO: 80078 - protein, 153 aa, Zea mays
  Coding DNA Sequence Number=SeqID_36703
RICPGVSQLSDSPRCQEEVCAGLLQRFARLRPLATFEHWKKQTATCSTPSAAPEHARARARAAPKPSQCSAIPNPVQPSEKTVHVSVKLPERGIGLCFTGEAGPRSPDFNRPPATVDRGSLEEMVAGITWPTTLPPGWTVEWDPASAEEEHEE

SEQ ID NO: 80079 - protein, 53 aa, Zea mays
  Coding DNA Sequence Number=SeqID_36704
MGLGVCGSLCQGGNEIDGSGYDYGNGCPHCNHCSGEDEAVEGDFQEFQDYDEF

SEQ ID NO: 80080 - protein, 254 aa, Zea mays
  Coding DNA Sequence Number=SeqID_36705
MLSKSSEGYGSGSEDLGPIRECFHVDTGLPKEGDHLSMPLEGDQLPSYNPDRPKPHRGAVRLTSSNSGGCTASSGRNDNTYNNCGKLWRVLETAHRAPQRHRLRRHWVIPRWNLLPGPGQQAASQDPDQDQRAHGHRHKVRFGTGGGRGPFPQGQGEQEAKGGHPQGIHPTQPKEGQEEKEDAQGPPEALAAELVAAAEKRNPLAPKDDHPGDVPNPRKYPLIIDPLSATRASPRCSWMGAAASTSSMQTLWIS

SEQ ID NO: 80081 - protein, 168 aa, Zea mays
  Coding DNA Sequence Number=SeqID_36706
MKELVDLLLDDHVFLLVKPARGLLHRSGVGSDVQGVLSDFPHYVWHVRGTPCKYFGIRAEKVNEHCFLFGLKLEVDPQRFLPEAAWVEGNGLHGFGRLEVAGVLLGIGYLSLEISQIGDEGLGVNERLGVFNALDVTLVGMVVGRADDDDAHGPQAFSASSTCSLGWP

SEQ ID NO: 80082 - protein, 46 aa, Zea mays
  Coding DNA Sequence Number=SeqID_36707
MAAMMAHSAEDEIARGQAAVCQNEILYVKCYKKSWCMHMVNEMLMI

SEQ ID NO: 80083 - protein, 156 aa, Zea mays
  Coding DNA Sequence Number=SeqID_36708
MQRRGLLLGRWLCLGVRWGRLQVLACRRLVFLFADGCVGVASRGGGAARWCWRDQRSVSSRGPLQVARRRRGRPAVERGSAARPAGGEKARAGGMWRGGGTVGGRWGARQRGAACWLKFDGAQMPDELNLRTYDYGAGEDEAVEGDFQEFQDYDEF

SEQ ID NO: 80084 - protein, 307 aa, Zea mays
  Coding DNA Sequence Number=SeqID_36709
MDRLGLAIVLETVAHRGRPLPGSKWVPGAERPNSQPARPPHITEAPQVLSFLPELAVQPPELLEVSLTAPRWGLGLSGLYDGSWSPSSGMLSLEKSRAKLGPSSSSESRHPEGNGSQVGGQVLLTSPARSRGGVVAPMSEQATPGMLAHCPMGHDCGCSVFASCDEKGDDGCLDPREGPVGTDPLAHALILSLPCGPHLSDPIPNLPPTPPPWTHPPLSPSLSPSARTQTVPPRLTDVYRVCCPAGAPPPSPRGVPAPPPLLRDSSVSSRAGPSALALSSPVDLRRGCERRHRWWPMDLAVRSQASV

SEQ ID NO: 80085 - protein, 678 aa, Zea mays
  Coding DNA Sequence Number=SeqID_36710
  Gene Ontology: Mol. function=protein binding; Cellular component =nucleus; Biological process=regulation of transcription
  Homolog annotation: Hit_ID=Q9FUZ7; Match level="QueryCoverage=92%, HitCoverage=95%, E-value=0.0, Identity=63%"; Hit description =SCARECROW
  Pfam annotation: Domain name=GRAS; Domain location=281-578; Score =476.2; E_value=4.2e-140; Accession=PF03514.5; Description=GRAS family transcription factor
  Subcellular localization annotation: CTP_CleavageSite=27; ConfidenceScore=5.36e-01
MGSSSVLLFPSSSSAAPSAPHSFPHSHATAIASSHSLLPPLPCSNPPPPLSSQDHVLIHYIHQLDEQEAATMVRKRPAPDMDLPPPRRHVTGDLSDVTAAAAAGGGPGAPSSASAQLPALPTQLHQLPPAFQHHAAEVDVPPQPHPPAHSQAGGEAPASTTAWVDGIIRDIIGSSGGGAVSITQLIHNVREIIHPCNPGLASLLELRLRSLLAADPAPLPQQQRALLHGAPAAAAGLALPLPPPLPDKRRHEPAPRCQQQQQEEPHPAPQSPKVPTAEETAAASAAAAKERKEVQRRKQRDEEGLHLLTLLLQCAEAVNADNLDDAHQTLLEIAELATPFGTSTQRVAAYFAEAMSARVVSSCLGLYAPLPPGSPAAARLHGRVAAAFQVFNGISPFVKFSHFTANQAIQEAFEREERVHIIDLDIMQGLQWPGLFHILASRPGGPPRVRLTGLGASMEALEATGKRLSDFADTLGLPFEFCAVDEKVGNVDPQKLGVTRREAVAVHWLHHSLYDVTGSDSNTLRLIQRLAPKVVTMVEQDLSQSGSFLARFVDAIHYYSALFDSLDASYGEDSPERHVVEQQLLAREIRNVLAVGGPARAGAGGARFGSWREELARSGFRAASLAGGAAAQASLLLGMFPSDGYTLVEEKGALRLGWKDLCLLTASAWRPVQTPPCR

SEQ ID NO: 80086 - protein, 120 aa, Zea mays
  Coding DNA Sequence Number=SeqID_36711
  Gene Ontology: Mol. function=kinase activity
  Homolog annotation: Hit_ID=Q6QP54; Match level="QueryCoverage=65%, HitCoverage=27%, E-value=6e-27, Identity=75%"; Hit description =Putative kinase
MAVWYLLTLSNCRCFETGGSLGPTRLRAAVVTEYAGRHHCLSGGASQMGHRSCSLRPESARGRVMMVPPVDVAGLRPRLGDVEAPPKPRSSLSSMAEAESEPLGRARRRSSAEARAESEP

SEQ ID NO: 80087 - protein, 461 aa, Zea mays
  Coding DNA Sequence Number=SeqID_36712
  Gene Ontology: Mol. function=zinc ion binding; Cellular component =intracellular; Biological process=positive regulation of I-kappaB kinase/NF-kappaB cascade
  Homolog annotation: Hit_ID=Q2QWV7; Match level="QueryCoverage=72%, HitCoverage=92%, E-value=1e-144, Identity=72%"; Hit description=TRAF- type zinc finger family protein
  Pfam annotation: Domain name=zf-TRAF; Domain location=332-387; Score =54.0; E_value=5.1e-13; Accession=PF02176.9; Description=TRAF-type zinc finger
  Subcellular localization annotation: CTP_CleavageSite=87; ConfidenceScore=5.60e-01
MPVYLGGVCVLLPTTPQSPSRQGKGIQACSALPPLSSSSLPAPNTTPASIQAAAARRCPGRRPSRPPAVDSFSPSSVAEIERQMYISSEKLENAAELLGTAPSRVQVPGLITKQAATARMELPVAEPGTERGEGPLIQCPYCDSEAMHKLAQILLPGLAAVCVDGTTGDPFHSPSVVAVDLRREMVDYITQRSESFIADALIESEANQEGPDAAVPDDPFEAVSVFMDDFGSTKRNIIGHVSGWLLSDSRDDKIDDLVQEMEATRFWPLERREAVAETLLKNVDLRTRFHCPEKYESEARLADHKQQCSFRPVACPNDGCRARVSVRCARDHDAACPYKPLQCEQGCEKRLLRRDMDRHCVTVCPMRPMKCPFGCDSSFPDRDLEKHCAQFLRPHLIKVLKAIHKKARSEDELKDLALKLEKYDGDGKLAKALDARPLTNAVKDLEAKMKAEHSSRRAVLH

SEQ ID NO: 80088 - protein, 423 aa, Zea mays
  Coding DNA Sequence Number=SeqID_36713
  Gene Ontology: Mol. function=DNA binding; Cellular component=nucleus; Biological process=regulation of transcription
  Homolog annotation: Hit_ID=Q2RB33; Match level="QueryCoverage=14%, HitCoverage=17%, E-value=6e-15, Identity=66%"; Hit description=NAC -domain containing protein 21/22, putative, expressed
  Pfam annotation: Domain name=NAM; Domain location=354-423; Score= -10.8; E_value=1.8e-06; Accession=PF02365.6; Description=No apical meristem (NAM) protein
MGKGPIPSISQCSALSTEMRGSTAEEEARHAKPPKPGLAGAAALPAWFGSGGFTHERKATAATWWRDWYGIHGAGERCRGFNNSPEMRSEEEKQKEKSLPDRWGRQHERASAAEVVGSRGICAELGDDNAGPHDSVTGGARVPVNDEVGPRYSDSSKMMRQRMTGCAANCLWCSAAPRTSTPFRHLWCSGLKSRSRLSVVVVLPLNLLAVGFVSVVAVGLMDLDAAAEEEEEGRLEDHNEAEDARFFIGFGESETHGDPIEIDTVTGSRIGTGIGSTSLPELVSDPDAGGSNSNSKKRSKCWNDFDELTKIVNGKKVRLGSRASSGPWCFRRPAMVELEPSVKSEHGGGVGLVLPPGFRFHPTDEEVITSYLLHKFLNPSFAPHAIGEVDLNKCEPWDLPSKLSLHTADFLPFFSFDKKAGSY

SEQ ID NO: 80089 - protein, 279 aa, Zea mays
  Coding DNA Sequence Number=SeqID_36714
MRAYRKKTESATRVGVDRALTLFVDAYRDLGAQTAPFDKSGGGGDPLPWVVVGGARVTPVHSDGPYVLCVARVLHFEAFDQSNEDFDASVFQVEDDVLKRSTGELYDRMWGPHGRGVVRERADRALAHVPASGPAQANFGDNGNDELLMCHTLIVLSSDESEDEADVESWSLEGEGLMTLFAKMDDESSEDDLDYFMALDLAIAQSSSKAAPTEAESSPRIAPAELWGKRRIGVSKRSVGMLGESSQITRVPRRCHRMGMERSRPRDVSHPNLGVQTRA

SEQ ID NO: 80090 - protein, 135 aa, Zea mays
  Coding DNA Sequence Number=SeqID_36715
MNKNTRDTRFILRFGHTTKVPYFLVEAPTKSRVSFNLILPLPTTKYRSSNEEEQEGFRDEAPKSQLFNLTQRFLSKDLKWERQEVCEREWEVFLRLEMEFLRALMWGRVWEVYIKVPPKAGGRWGNLTEIRLNRF

SEQ ID NO: 80091 - protein, 221 aa, Zea mays
  Coding DNA Sequence Number=SeqID_36716
  Subcellular localization annotation: CTP_CleavageSite=76; ConfidenceScore=5.33e-01
MRARARWGPRDAGKGTGRFGWHSGHGRRHDTGVGASKSCSMRRCSPMTAQTTLASVCTNNRAVHEKLRAWRSCPPREETLKRLSNGGDAGLPWVDGSGLRLQRENTGERGPGETEGLRANQRVSHVASEEAELTEATDAVDARRQSQNGDGSRWRSTGTRAERDRESDGVWLRVQLGEGSRAIAKLPKCSVVNKVKKSDQEHNLPVTRISKYFTKLVFGDS

SEQ ID NO: 80092 - protein, 108 aa, Zea mays
  Coding DNA Sequence Number=SeqID_36717
MAQGGVATQSGRRRGIPVELAVNPEQHDHHSFTPALEKVLGTTDDADNDLIEDSPVAALCSVLLLLAARKVCTTTEFGARFMVAREIPKKAAITLQNPIMDKLGELIS

SEQ ID NO: 80093 - protein, 114 aa, Zea mays
  Coding DNA Sequence Number=SeqID_36718
MLVDYTTILNRPSVSVEGQTQQGVESVVEVTLVSGVASDGSSDPSLRLLLLRELRAMARTTTVVIVSVSVRVSFSSGMPYGALALLLLVQATMQSLQIARPTHHHAVEWELRKA

SEQ ID NO: 80094 - protein, 112 aa, Zea mays
  Coding DNA Sequence Number=SeqID_36719
MPSLGDQMVQSPAFTIALRRRDTTAFVQEVEVEAIKIVGKYVPKTEMLRSLDIHGSNVRFNLVFELNSLCYGPYPEGDSADAGDDRGKHVKTPSEEGTSKGKGVVAATRRGK

SEQ ID NO: 80095 - protein, 48 aa, Zea mays
  Coding DNA Sequence Number=SeqID_36720
MVASSLMVLSLLLFVSLTNRNDLKLQVYLRLEREQKYKCDAKANAKSA

SEQ ID NO: 80096 - protein, 618 aa, Zea mays
  Coding DNA Sequence Number=SeqID_36721
  Gene Ontology: Mol. function=heat shock protein binding; Cellular component=intracellular; Biological process=response to stress
  Homolog annotation: Hit_ID=Q2QQ93; Match level="QueryCoverage=94%, HitCoverage=96%, E-value=1e-159, Identity=55%"; Hit description=DnaJ domain containing protein, expressed
  Pfam annotation: Domain name=DnaJ; Domain location=12-77; Score=96.3; E_value=9.5e-26; Accession=PF00226.22; Description=DnaJ domain
MASAAAGTPKRCYYEVLGLSRDCSPTDIKLAFRRLALSLHPDKQPPGSDLAAATAAFQELQHAHSVLSDPQERAYYDSHRSQILFSDPASAGAKSASIVPDLFAFFSSSAFSGFSDTGRGFYKVYGDVFDKVFAQELAYARRMGVPDPAAPPVIGNLDSPYAQVTAFYSYWLGFGSVMDFGWAAEWDAARGESRRVRRLMEEDNKKAMRKARREYNDAVRGLAAFCKKRDKRVVDMVLKKKLEEEKRKAEEKERKKEEDKRKKERAMACQEPEWARAEEVEEGLYDEDEEEEMRAKKEELYCVACNKKFKSDKQWKNHEQSKKHRDKVSELRMAFREEESLKEAEEGEGDWNEVDVGFDFKPTQESDDESAFSDAAEELAEEFEEGLEVHDKENGDKDFDSAEQEVGSYDEASVLEAMLSSCKNRKGGYVAPPEEALSGTAEDDDHHRSSEVNNAKRKGRRRRAAKKEQDESNYAGNEHHGKCEVQPEGSVHGNDVDDIMEGPSSSNVNNGSVSKGDKQNGENTNPKKNKKGTKKKPTVSTDQKSMSKADQKSTSKGKKQKEVSKAPSNDCDTCGGTFESRYCSYHSPLPEQVVFSLGRNRSRNAEDAAEESSLREIS

SEQ ID NO: 80097 - protein, 259 aa, Zea mays
  Coding DNA Sequence Number=SeqID_36722
MSSIPPPAGGLSAAIVVVARRWKEYHVVAAVEGHELKTPETEHRPGPERLLETAHLELDGKLFVNTQQAPTWRANCRRLETGGSLSRRVERSSSSSGAEPESEPWVGQSGVRRLPGLSPSPSPGSGGAEFAVFRGLARVRALGRAERSSPSSGALPESEPWVGRSGVRRLPGPSPSPSPGSGGAEFAVFRGLARVRALGRAERSFLWRLWQGLTSCQSHSVKWHCSRSGAGGAVLLSDLSVERRSDGGHFGSAGGRASG

SEQ ID NO: 80098 - protein, 340 aa, Zea mays
  Coding DNA Sequence Number=SeqID_36723
  Gene Ontology: Mol. function=nucleotide binding; Cellular component =integral to membrane; Biological process=transport
  Homolog annotation: Hit_ID=Q2QQ91; Match level="QueryCoverage=100%, HitCoverage=92%, E-value=1e-100, Identity=72%"; Hit description =Ureide permease 2, putative, expressed
  Pfam annotation: Domain name=FAE_3-kCoA_syn1; Domain location=14-288; Score=401.1; E_value=1.7e-117; Accession=PF07168.2; Description=Fatty acid elongase 3-ketoacyl-CoA sy
MFVVEDKGGAIALMLASLLFLGTWPAVLTLLERRGRLPQHTYLDYSVTNLLAAVLIALTFGQLGGARRGMPNFLTQLGQPNWPSVLFAMAGGVVLSVGNLSTQYAWAYVGLSVTEVVSSSMVVVIGTTLNYFLDNRINRAEILFPGVACFLVAVILGSAVHASNAADNEEKLSASTNAYQLGRTAGAAEPSKHVLDKDVAKDLENGVSGTKQADKAEAGTAEYLIQLEERRSIKGRRAAPGGPPLGAYLGDWDGRHWALLAGLLCGFGNGLQFTGGQAAGYAAADAVQALPLVSTFWGVLLFGEYRKSSRKTYLLLGFMLFMFVAAVAVLMASSGHRTTE

SEQ ID NO: 80099 - protein, 123 aa, Zea mays
  Coding DNA Sequence Number=SeqID_36724
MARPTYNRGKVNHLEVEAIQDAPDVAVGALRTDGSSPGAVVEMVADESPAQDAANSFDIQNDLAMETATSSKIARLFARPLTKVQMEEIMELANQGKGRKTNNKKGCKVAPFVAPVTLPAMEA

SEQ ID NO: 80100 - protein, 303 aa, Zea mays
  Coding DNA Sequence Number=SeqID_36725
  Gene Ontology: Mol. function=phenylalanine-tRNA ligase activity; Cellular component=cytoplasm; Biological process=tRNA aminoacylation for protein translation
  Homolog annotation: Hit_ID=Q2QPD4; Match level="QueryCoverage=95%, HitCoverage=73%, E-value=1e-146, Identity=77%"; Hit description =Phenylalanyl-tRNA synthetase class IIc family protein, putative, expressed
  Pfam annotation: Domain name=tRNA-synt_2d; Domain location=42-254; Score=35.6; E_value=2.1e-17; Accession=PF01409.11; Description=tRNA synthetases class II core domain (F)
MNHGAELGHVDVVSASLASGARTSAPRSVALSSEDDPTNNVPDNIFSKIGLQLHRRDNHPLGILKNTIYDYFDKNFTGQFDKFDDLCPLVSVKQNFDDVLVPSDHVSRSYNDTYYVDGQTVLRCHTSAHQAELLRHGHTHFLVTGDVYRRDSIDSTHYPVFHQMEGFRVFSPDEWSGSRMGGTAYAAAELKKTLEGLARHLFGAVEMRWVDTYFPFTNPSFELEIYFQRLAMVLFDIPDIRLFWSNDKRFTSQFSEGKLGVKFKPFSKFPPCYKDMSFWINDAFTENNLCEVVRGIAGDLVEE

SEQ ID NO: 80101 - protein, 468 aa, Zea mays
  Coding DNA Sequence Number=SeqID_36726
  Gene Ontology: Mol. function=structural molecule activity; Cellular component=protein complex; Biological process=microtubule-based movement
  Homolog annotation: Hit_ID=P29513; Match level="QueryCoverage=22%, HitCoverage=24%, E-value=1e-43, Identity=79%"; Hit description =Tubulin beta-5 chain
  Pfam annotation: Domain name=Tubulin; Domain location=92-243; Score =17.0; E_value=6.8e-08; Accession=PF00091.16; Description=TubulinFtsZ family, GTPase domain
  Subcellular localization annotation: CTP_CleavageSite=44; ConfidenceScore=5.77e-01
VHTTMVHCSTCARAPKSRTARPRPYATSSSPPHCAATSSVPRVRCAATSSVQRVRCAAHHLLLLSPTNPTSQLEHDIDHTEKYAGDSDLQLERINVYYNEANGGRFIPHAVLMDLEPGTMDSVRSGPFDQIFRPNNFVFGQSSAGNNWAKGHYTEGAKLIDFVLDVVRKETENYDYLQAYISKRFVTFRQIALSLQFSVPSLSLTGRRYRFSRTPSPQDHAEKVASLKVGMQVTTTISRGKVGDQVSVTVETAHPRDDILSVREVVEDTEDSDLVFLCRLPLFIFVAVEHRRRGRRHGRRRRSRATTVAGRSSERREATTTVLRARARSSGGVLQAPKLREFTLAEMRAPTHVFKPEMVLGEGGFGRVYKGWVDERTSTRPRAMPASSSPSRSSPRIASRACRSGRLLSVCDGVWSTSSALGAVTSFGDNSKGCDSLFWWQDLARCWSTSSALGATTSSGDNSKGCDS

SEQ ID NO: 80102 - protein, 98 aa, Zea mays
  Coding DNA Sequence Number=SeqID_36727
MEAGRVSVHEGQSHRQKGAKRGARRARREPKPTHISWVRASPTYPAGCGDSTGERGEFGMRSQRPELEESVRLMGPTRVMTPLVRGRHHQQVAEQDPE

SEQ ID NO: 80103 - protein, 31 aa, Zea mays
  Coding DNA Sequence Number=SeqID_36728
MKGKRKLVGRKEINGDGPRRGYNFKGKKLLS

SEQ ID NO: 80104 - protein, 60 aa, Zea mays
  Coding DNA Sequence Number=SeqID_36729
  Homolog annotation: Hit_ID=A7Q1N9; Match level="QueryCoverage=61%, HitCoverage=15%, E-value=3e-09, Identity=72%"; Hit description =Chromosome chr7 scaffold_44, whole genome shotgun sequence
MAAAVARRLLSHRASSSSLSMVQEEAEKKIYTALCERHFEFGCDIDEETSNKLEDPPGIS

SEQ ID NO: 80105 - protein, 601 aa, Zea mays
  Coding DNA Sequence Number=SeqID_36730
MSSSSSSAATTPAAAASSEETLSSLMVEELRAGDSVDFGVSRMTSARVEDMQRLGYFGGGVARAPGTEEVPEPEVAEEDADEGALRCAAGQSSGRDLVEEFVAYGVWPLAHGWALGEVCPRQMPFHGGRVVRSPAFALNLRNRDPAAFVRDAEDGAVQLVGRYVPRTEGQRSFDIRGSNDRLNRVFELNQLPYDGYPGQDEADRRGKKPAVETGDDPAPAAGPSSKKRKLGTAMGGLGVSDSFARELMRTCAAPGERMSSPELRESSARMLRVTGGCWPRNVPIPCAADEDCFTSRMVRQWRVFPYGRNIGAVVWAVIDKERQGAAQKRQAAVRLHEARPKRQRGAAKAAASGGGKPPLAAKAGASAPRKAPEATAGAGGFKSTKVVPPASGVAEASKAARALPLSGKRVADFGTDITVDDYLGGSDEGQLAIVAPGAAIATAAIVPKARGEALGAGGEVSALAVVRDEAGAATRRLKGVTEALSQATEALSQVADFTSRTASGALTAALSAEVERLRTQYADAVREKSASDSKCRKLADKVAALEKEKADLRRQLAGERREANEAIAKEQAAQAEAKLARAEGNIAKELAGHLQERLTAL

SEQ ID NO: 80106 - protein, 98 aa, Zea mays
  Coding DNA Sequence Number=SeqID_36731
MAASGVAMSSVVAPDGTRGVAVAAPEEDVGGGGEEDGGGGVDFSGGADRVRACGQVPCQFHRTTQARRGVDAAAGLGLGLSPGRRRTPLRPTQGSDSG

SEQ ID NO: 80107 - protein, 154 aa, Zea mays
  Coding DNA Sequence Number=SeqID_36732
  Subcellular localization annotation: CTP_CleavageSite=56; ConfidenceScore=5.28e-01
MQAACNRAKWTRFSDSQRASMEAQAHASRNRRARCCMQATAPPLAPPSRLFGCGTDAATRGDPAHDPAAPAWRDGQCGRKDRERGIPRKGSFPVKELGSEPPLLIRGSKADPPRGSTVALDRVGPTPTTGQRFEGRPPEGLHGRLRLLGLRAHY

SEQ ID NO: 80108 - protein, 399 aa, Zea mays
  Coding DNA Sequence Number=SeqID_36733
  Subcellular localization annotation: CTP_CleavageSite=45; ConfidenceScore=5.25e-01
MHLVFPPSKPLDGGYPPSFRLIVGGTQLRGSWYLSAIVRLQGFSSASATAPLHRRSPETATTSPWVGRSKPGCDLGPTLSFKDVHHPRWGGGQAEPELYLPRGFVGYPPLWRSRERALAGPAGGSDFDNAGLVDGGRRQSQRVELVGLAPGGPSCRKAAAAPCAREDRPRCRTLLGRRSCSGVVLPLHRRRRLEKSPSPTGSPPPSALRASGSLYLSSPLERRRGRGQDCSSAHPEACAAAVRPPGAGVVVVAVRAGGGEPPVSLLLLRRPSPIEWGYSPVGCLNRFTKRESPRVKVTSESGDPRTTSPSEARSDLTKDVVDTEGAAAPFQRQDPSLQDQIAVADVYASESCFSRKVMSEKVMSEKRSFFEENFDAEGVAPLLAPEGGSGFAEARPTLP

SEQ ID NO: 80109 - protein, 64 aa, Zea mays
  Coding DNA Sequence Number=SeqID_36734
MALLRSTGTHAQALDLQAVVGTFGLMSKRENLKRYEGWQCRSCEAGKLRHVRRKGNRLKDEKAI

SEQ ID NO: 80110 - protein, 143 aa, Zea mays
  Coding DNA Sequence Number=SeqID_36735
  Subcellular localization annotation: CTP_CleavageSite=25; ConfidenceScore=5.38e-01
SFATARHRLLSFCGHRRVRAPSHVMSEPRRHRPVASLRLRRCPMTPALPLKRLLVPPRQRDAHGRVRQTALIAPELNPKPLDPRRDQPPRLRRALIAGTERRHRAYNEQLVVPECVAEDPSEQPGGDVGNMEDFEEFQDYDEL

SEQ ID NO: 80111 - protein, 313 aa, Zea mays
  Coding DNA Sequence Number=SeqID_36736
MGFEGWPPEGFNSRLRSRGPYTHYWSEAGPRRVHSRLRRRARDDQGYVRYITKARAALPSSPETPCSVPIEGNMALPPLLLAERRRRGVCKKAESVPDRPLAQCGGSGAALAKPGSGRTVDSVNIPARELEPRPCSRATTSSHEGTTRPAEALRKALRPQRSETTPPRPRGLHPAGALARTHRNKMQPRKAGPLAKKCDESLQASANTPFEARGLLSGNIIRGTLKTPNSQLKDSAACATPTAVPLDRVRLTGSQALPKGAIGNSAPPDPGLGLGLSPQKTANSAPPDPGLGLGLSPGRWRTPLRPTQGSDSG

SEQ ID NO: 80112 - protein, 174 aa, Zea mays
  Coding DNA Sequence Number=SeqID_36737
  Subcellular localization annotation: CTP_CleavageSite=59; ConfidenceScore=5.58e-01
MSGAPGKTDFKLFTFGNLQRQLRYNSPDMSGAPKKSCLRNSSASGNRNVCSAIIHRTVRCIHGATATSHQRTPAGAFNARQKRAEVRHAHTGAPDIEQYMSGKRHQFCGDPCGNFVFRVIEKRKLTRSEGPFERGGKIVGKSEHFFRALFDEYSEIYGQSDKTPQHSDSQDKSV

SEQ ID NO: 80113 - protein, 406 aa, Zea mays
  Coding DNA Sequence Number=SeqID_36738
  Subcellular localization annotation: CTP_CleavageSite=31; ConfidenceScore=5.23e-01
MAVRPFTHWFGRKWSPAASPHQWSPKTVTTSSMVGRSKPGCDLCPTLNFKDLHHPCWGGGRGEPGLAFVWAGVPLLPPASGGGNHPPALRRRRPPAMPGKANCCCLARDGSEDLPVRFGAAGARWCGVGGQVDATVGAEVVAAGESFSADETVSATRGPTSSSLALISGSRPPRGDANESLPAVASAPGPSLLLHRSPTSHPELVVPQALRCGGCSYPREWNRSSVCNGTLSAGVCSLWLSGLEHLGVPRLGRALPLKASLAQLRNPRLLCDEPKPEAAVLAWTEAELARKGGFVDPGAGDFPGRGGVAVAAGTWLDPPTVSPSEAGPDSAEGGVDAEGATAPPIDDLFVGSRIAYPSESYLSQKVMSEKVMSEDPTIEVVEKRERCSGRKTFSEENFNAEGVPPF

SEQ ID NO: 80114 - protein, 203 aa, Zea mays
  Coding DNA Sequence Number=SeqID_36739
MDEGTPLGGLESKDDTKPSHGLHTVLSSLWGRGYLAHRLRIRFPEDKGVRRPKQPDQPRRLTGPAGRGSGHDLTTLGTVSAVSATLPRLRGSVPRPPGGGPGASATTRRPRAPQAHTSLGRAVHHRQDFEARNIQSGQQSRRGSDINRGSSSTLGVDSTFGGIRPGLGRRHGRRISTSKEDLSTAPEPSPLGSPPGTRPEQMA

SEQ ID NO: 80115 - protein, 114 aa, Zea mays
  Coding DNA Sequence Number=SeqID_36740
MEHQSSDHDELTHADCPPYKAGLFVTWELVLSGLRPRTVRSTCAQKHTVPAQTYLAPADGPPTPARQSTQLYRDCAEGDPLWSGLRMVRPQGPDGPQYKHTGPVRSEHTLDPSE

SEQ ID NO: 80116 - protein, 20 aa, Zea mays
  Coding DNA Sequence Number=SeqID_36741
PEFRAPGVGAEAEFARLPGF

SEQ ID NO: 80117 - protein, 83 aa, Zea mays
  Coding DNA Sequence Number=SeqID_36742
  Homolog annotation: Hit_ID=A3AGV1; Match level="QueryCoverage=85%, HitCoverage=12%, E-value=9e-09, Identity=49%"; Hit description =Putative uncharacterized protein
  Subcellular localization annotation: CTP_CleavageSite=46; ConfidenceScore=5.43e-01
MESHHGGDGKARDKFSVYQNPSLTRALDSRSARPSVTVLLVLAVISVASASSFLALTSREEQLTKLAGRAGISVLAADWFNRY

SEQ ID NO: 80118 - protein, 128 aa, Zea mays
  Coding DNA Sequence Number=SeqID_36743
  Homolog annotation: Hit_ID=Q94EV5; Match level="QueryCoverage=20%, HitCoverage=5%, E-value=3e-07, Identity=92%"; Hit description=Opie2 gag protein
MDPKGKGMVVNDKEKESFINDPKDDKLSAFRDRGVPKPTSECAACPSPDGSSAWASAEGGEARRPEPSVREVEVPRPSCSSRAQVSRKERTQVYNGDVAECYVSSGGRASALGTCRCGSRRDLGILLA

SEQ ID NO: 80119 - protein, 204 aa, Zea mays
  Coding DNA Sequence Number=SeqID_36744
MAAAAEVAGEPPGVRRPAGPRSLESLGPFDLVVWGSSSLVKETPRPPFDGPRPGPTPKSISRGLGSGWRPWKPVDRGPRGNRPSRLLGPDSRRSPWTAPPSEAGSDLAEDVVDAEGATAPFSVKTRACRIRPSCSSTESLYPSASYFSQKVMSEDPLSEVVKEHERNPAKKRSFFEEKFDAEGVSPLLAPEGGSGFAEARPTLP

SEQ ID NO: 80120 - protein, 91 aa, Zea mays
  Coding DNA Sequence Number=SeqID_36745
MKTRDLRGTRARWKVKVAEVLKAKVKKRLYKSQGCWSSWIALDIKLCQLGASESNSNLKHAKKEKSIKKVRYARCKRVQLMEILARKLIMI

SEQ ID NO: 80121 - protein, 209 aa, Zea mays
  Coding DNA Sequence Number=SeqID_36746
  Subcellular localization annotation: CTP_CleavageSite=40; ConfidenceScore=5.11e-01
MPKWQPERSGHPAGVMSWISELPWPSPSQGVGRGGSRPAEARAESEPWGRARRSFVVFRVLARVRALGSGGAEFAVFRVLARVRALGSGGAEFAVFRVLARVRALGSGGAEFAVFRVLARVRALGSGGAEFAVFRVLARVRALGSGGAEFAVFRVLARVRALGSGGAEFAVAPLARPNCLLDSLCRVALQSEWRRRRCPSVRLASGAVE

SEQ ID NO: 80122 - protein, 156 aa, Zea mays
  Coding DNA Sequence Number=SeqID_36747
MGERRGKADGDEVREELGRVGKEAEVGLGVEHDLRVGKAGRVVDVLLVHLEVVLEVALEDQQEAFGGSGIEHLDDVGGREVELLHARIDLIRMDPHAGNQRQTLRRQLSRNPPDHRRTCATHPKGDDGVEEVHGGVHRDEGSGDDGARVAAMGMSQ

SEQ ID NO: 80123 - protein, 129 aa, Zea mays
  Coding DNA Sequence Number=SeqID_36748
MMENFGSKTVQIAMNAVVTSHLPACLYSTAVDRKDQTVTLQGGTDTRSEVGSFLRNELREGVFWTFGFPKLKRLFSRVKLVTKNDLAPRKGLLLGSCFGAPKVSHEEAASAEVVSKRWPKVPFHGASAF

SEQ ID NO: 80124 - protein, 246 aa, Zea mays
  Coding DNA Sequence Number=SeqID_36749
  Gene Ontology: Mol. function=protein methyltransferase activity; Cellular component=cytoplasm; Biological process=protein amino acid methylation
  Homolog annotation: Hit_ID=A2Y648; Match level="QueryCoverage=24%, HitCoverage=7%, E-value=3e-12, Identity=61%"; Hit description =Putative uncharacterized protein
MPPPTVPAIPPQSPLVLKYGEEGKVVERVNLATRQLRLLPKPVVRICGLLALDVSRDQLKFILPSITPKRHSYMKCEPCIEALLRSSKLVYSNITGKLSVCTQCDQKDLAHTIQFWIKGSIAAIVKWCQSLRGTYDVVAANILLNPLLEMVEDIVGYAKSGGIIVVSGILEEHFILPSITPKRHSYMKCEPCIEALLRSSKLVYSNITGKLSVCTQCDQKDLAHTIQVLSGEAIDTAKALALKELK

SEQ ID NO: 80125 - protein, 78 aa, Zea mays
  Coding DNA Sequence Number=SeqID_36750
MARHGPEPSSNNRHVDTDAASRVVNTGAAYRSINSGAAFHNTDSVAASRGLDHAVAPLGARARGQALLLTLLGHKGGG

SEQ ID NO: 80126 - protein, 76 aa, Zea mays
  Coding DNA Sequence Number=SeqID_36751
MPKLPCAQLRLYANLHILCPSLYCGSDPSLKGPNPRIMTAGEHREDKEGECFVRFGHGDGLVPSGIIAKRRISLIG

SEQ ID NO: 80127 - protein, 76 aa, Zea mays
  Coding DNA Sequence Number=SeqID_36752
  Gene Ontology: Mol. function=metal ion binding
  Homolog annotation: Hit_ID=A9NWT0; Match level="QueryCoverage=67%, HitCoverage=11%, E-value=7e-09, Identity=56%"; Hit description =Putative uncharacterized protein
MAHDCEIHSSTIVSVGTGADGEASLVFLLNRRFIFGSDARSLFVTMFLIVASVSIFCPFVANKLMDKFSYALRCLL

SEQ ID NO: 80128 - protein, 147 aa, Zea mays
  Coding DNA Sequence Number=SeqID_36753
MKHNEFTTRTELKSLTRLIKCAETECGRLRMLKVCLGDSSMRLGVPFIAPRQLGAVGGILGRQILPSVGWRTGQSGAPPDSHCSCLVRDFLPFLAQPTVATPGWLAHRTLSGAHRIVRCPQPTVGAGHALPADCAADCCAGGRWLTG

SEQ ID NO: 80129 - protein, 102 aa, Zea mays
  Coding DNA Sequence Number=SeqID_36754
  Homolog annotation: Hit_ID=Q7XBE0; Match level="QueryCoverage=54%, HitCoverage=5%, E-value=8e-07, Identity=53%"; Hit description =Putative gypsy-type retrotransposon
MEVIEDPSASEVAVAENPAPKGDASGYPAPEGVAGNDPALVGSTNCNPALEGVAGNLALFVPSFLLIWPDGILSLRRNIFNIKPTQPGDTLSLRRSIPKEEK

SEQ ID NO: 80130 - protein, 35 aa, Zea mays
  Coding DNA Sequence Number=SeqID_36755
MAPKRKNQNSAAVVIPPINPNSQLPFAGFAYPPLL

SEQ ID NO: 80131 - protein, 38 aa, Zea mays
  Coding DNA Sequence Number=SeqID_36756
RHYGTGGYEIDGSGYDYGAGEDEAVEGDFQEFQDYDEF

SEQ ID NO: 80132 - protein, 29 aa, Zea mays
  Coding DNA Sequence Number=SeqID_36757
MTHREPRRVGARLPVAKERSEDERGRRLG

SEQ ID NO: 80133 - protein, 351 aa, Zea mays
  Coding DNA Sequence Number=SeqID_36758
  Subcellular localization annotation: CTP_CleavageSite=69; ConfidenceScore=5.28e-01
MERPLALVLPRAASEHPRSCFFPPPRVARSSLAQKALAAAAVALLYSLLASRNAGTASASPTTRSCRISSDTGAARRLVSWPGLAHSAAAVLEPSETDRRDRRSRRQVAQTRPCCRCRPTSLLGDLSSPEPPPASSDRDRQRARELVPQPDLRGPPGVHITLAHGSAAARCAPAYPCPHEAATPHPHTAHRRLLPAHPAAASAPSPTEGDTARCLPPSSPSSALPLALSSASPNDPSVVASCGRGRSRPTRTLDPSAVASPGRGRSRPTRALDPLRRPLSHRMVGGGGLSPCLRPGAPGLHRASTLLPPPLTTRSPPLRPAPLAPTAADVACHQRLRPLPQKKVVGWHPCK

SEQ ID NO: 80134 - protein, 349 aa, Zea mays
  Coding DNA Sequence Number=SeqID_36759
  Gene Ontology: Mol. function=binding; Cellular component =cytoskeleton; Biological process=post-chaperonin tubulin folding pathway
  Homolog annotation: Hit_ID=Q6YVY3; Match level="QueryCoverage=100%, HitCoverage=96%, E-value=1e-112, Identity=62%"; Hit description =Putative tubulin folding cofactor C
  Pfam annotation: Domain name=TBCC; Domain location=196-314; Score =224.3; E_value=2.9e-64; Accession=PF07986.3; Description=Tubulin binding cofactor C
  Subcellular localization annotation: CTP_CleavageSite=69; ConfidenceScore=5.25e-01
MEPDSDQPKAAARGGHRKHLAMLERLSKRSSSSVGAPPSDSSDASPVEAFLSRFADAKLAAESALSACRSSSPEDDAAASLAAAAAAIDDIDRLIAEASHALPPYELRAALATAADLRAAHSVAASELRPKKSFSFRNKSRNPRNPPQDRVTASPPQPPPPEQPKPSLDAILPGFGFRGRNGATFVKDLRVSNDKDGDFTLADLVSCEVYLKGKCRALYIHKLRDCRVFVGAVLGSVLIEDVDGCIFVMAAHQIRIHEARVTDFYLRVRSRPIIEDCSGVRFAPYVLNYEGIGEDLKDSGLEEETGNWANVDDFKWLKAVQSPNWRLVPEEERLQTVNISELHKQEDDS

SEQ ID NO: 80135 - protein, 90 aa, Zea mays
  Coding DNA Sequence Number=SeqID_36760
MDYMMFEVAELDGATMICHTNNKMKVTTTSFIILLLLSLPACLHLRATPFSAEGVGAGASSPYSSDISTDTDSRSDYLSDEESRPEILGN

SEQ ID NO: 80136 - protein, 229 aa, Zea mays
  Coding DNA Sequence Number=SeqID_36761
APPAPPLGAPASGVAAGGDPDDGGGDDSSSHDTDFSANHELEGWFAQPITRDAARGCHFHDALDTLLRRALNRHTWSIEYRCVVYQHSRGVYPDRWEATCLVRRPENSLQGAEACSEHYSISERDSAEAAMQDAARRGVIVSPVGEGNPRLSSTVNLAAVLNTELDHALDELSRARAEIALLRAERAERRHLDDGSPAPVGTQHLYRSPRRGHQSYGNPDCKTKIALEP

SEQ ID NO: 80137 - protein, 193 aa, Zea mays
  Coding DNA Sequence Number=SeqID_36762
MMCKRPITPVRAARATAAAAKRHADTHAASAANAMSTTDTVIAHGIDMMPCLALPLPTPDPGSAARSFYVALEATDLAGNTCRCRAWTNKIMAWTEGWFVLGKKRDRASGHATAVGKGGCEYTFLGGGGIIHQQYDRSEYYYGGFPVYSQDFKATSRWSLLGKDRGRKDDGERYRWPMGRAGLAQPELVMDRV

SEQ ID NO: 80138 - protein, 40 aa, Zea mays
  Coding DNA Sequence Number=SeqID_36763
MGAPAVCVSVSSDDPSLASDRDEYVQSHAQIVQNWIYPIV

SEQ ID NO: 80139 - protein, 271 aa, Zea mays
  Coding DNA Sequence Number=SeqID_36764
  Gene Ontology: Mol. function=calcium ion binding; Cellular component =intracellular; Biological process=small GTPase mediated signal transduction
  Homolog annotation: Hit_ID=Q6ATR5; Match level="QueryCoverage=53%, HitCoverage=22%, E-value=3e-69, Identity=89%"; Hit description =Expressed protein
MELFPASAARILCLLGGLGRGAGVQLQPGTPDKHFWRLSSGQYSVKSGYDAIMQGLNSIVILGARTLWRHRNGCLFDGNPLGLPLPYLWLGVISGFGGTRKTLILREIPEGDVRSLLSDRESLAPCDVAVFVYDSCDEYSWQRARDLLVQVATHGENTGYEVPCLIVAAKDDLDQSSQALQESTRVSQDMGIETPIPISVKLRDLNNIFCRIVHAAQQPHLSIPETETGKARRQYRQLLNRSLMVVSVGAAVAVVGLAAYRVYAARKNSSS

SEQ ID NO: 80140 - protein, 165 aa, Zea mays
  Coding DNA Sequence Number=SeqID_36765
MCRLSIYCAMSTPLADDVPPQHLLCHVHSADGRQPGHSASGMPVHSIGSGEQARCALGEATSGPAIRLVLLLAPPSSPLTTPVGSSSLSHMRTTSSNPAAMNWRSSHAQPWSSRLPKRSVPWGGNRRGSGGGGGGVIVVFVGGETDVVEAMDDAIDGRGRGWDGG

SEQ ID NO: 80141 - protein, 149 aa, Zea mays
  Coding DNA Sequence Number=SeqID_36766
MSHDSLETPLDGRSKLCLAQACPQARVALEEILVLPKVPSSRSGGFRLAQARLEQEDNPEPSLSQRSWEPRRHEHLMQIPTPRDTAVKKGSDGTAIPSTFTNYDDTRPGITGTAPPLRPLYSNNSGWDVLMTEHGLILERKLRLARARL

SEQ ID NO: 80142 - protein, 98 aa, Zea mays
  Coding DNA Sequence Number=SeqID_36767
MEERARTFEDEEDRGRGSFATGLRRRGCANPRNDGNETPLRETDGGWRGFADGGRPYLRDDGGGALGVSVSEKLFIGGDFNGLVGTSAGFEGVRGGFG

SEQ ID NO: 80143 - protein, 134 aa, Zea mays
  Coding DNA Sequence Number=SeqID_36768
  Gene Ontology: Mol. function=hydrolase activity; Cellular component =mitochondrion
  Homolog annotation: Hit_ID=Q6ATR4; Match level="QueryCoverage=88%, HitCoverage=65%, E-value=2e-53, Identity=80%"; Hit description =Putative NUDIX hydrolase
  Pfam annotation: Domain name=NUDIX; Domain location=2-117; Score =12.8; E_value=0.0086; Accession=PF00293.19; Description=NUDIX domain
MWEKMVTCIRKVAPEGGWENDETVEEAAAREAIEEAGVRGDIVHFLGLYDFKSKTHQDACCPEGMCRAAVFALHVKEELASWPEQSTRQRTWLTVPEAASSCRYQWMQEALLTGFSDWHDKWSRGGGGTNCDPA

SEQ ID NO: 80144 - protein, 153 aa, Zea mays
  Coding DNA Sequence Number=SeqID_36769
MAATAAEERGELKGERVQQTSPWHGGLSPRVILLGRQSLSAKKKTKKVKFQNQGNGIEASCAWPDETIKCGVTGQSATGADVTVGVTEGELAVITSANAQKQRANRQSRFGPTCRLVSSPEVGLGATISTPKQGYPLLQCEGTVPMRLSLVAW

SEQ ID NO: 80145 - protein, 209 aa, Zea mays
  Coding DNA Sequence Number=SeqID_36770
  Subcellular localization annotation: CTP_CleavageSite=46; ConfidenceScore=5.36e-01
MGQSAAGTCVAVGMTEGVLAVITSASARKQRANRQSSFGPTYRLVSSTEVGSGATVSTLKQGYPLLLYEGTVPARLPLVAWQTTPDPTTWTAPRSPRGQRRRYTPGYQQWVRTPMGKYRTLVRTDQTSGVRATHDGVPRFWDKEYTGLNQGQAGVRSRHVSRPYRIRLYSPLRRRPDAATWLAARDVSQRAEPDVRPLDRATSAFIADK

SEQ ID NO: 80146 - protein, 355 aa, Zea mays
  Coding DNA Sequence Number=SeqID_36771
MSLITGRVSTIEERLGVTITIIILQLVFLKFDCKILLLIDSPSRIWDINTISYLVTIICFLVTSNCERQHALSAINAEDAQPRGLYVRLRLLAYVKGSWPRGSIGSPPERGVEAYAVWSGHVSAPDPRLALIKVRVLFVLESRDPAVSGPNPTQRGPGLIPGVWFVPVGVLDLTRRSGCLYTVALVLKFHLLCLLRRPRGGAVLARAAVRLLCTQEPAPKEDDSWAQAPASETGPLVSAEVKRHTTAGDGLFLTRWFTFFALGDKRPRSMTHGAGARARDWDVGFGRGEEAHYRGRRLAPHAAVRLFRTRRPTPKEYDSWARPPVPGAGLLLSAEMKRHGNSLLAWRFTFFALRD

SEQ ID NO: 80147 - protein, 98 aa, Zea mays
  Coding DNA Sequence Number=SeqID_36772
MPVIELVLNGNISEMHAYYQMDDGMFSTKSLPFLAMGYPLLLYEDTVPARLPLVVWQTTLDPPRGRLPGRHVAREDDILQGINSGSGAPWESIGPMYE

SEQ ID NO: 80148 - protein, 191 aa, Zea mays
  Coding DNA Sequence Number=SeqID_36773
  Homolog annotation: Hit_ID=Q2QM09; Match level="QueryCoverage=52%, HitCoverage=11%, E-value=5e-07, Identity=38%"; Hit description =Retrotransposon protein, putative, unclassified
  Pfam annotation: Domain name=Transposase_28; Domain location=1-145; Score=-51.1; E_value=0.0075; Accession=PF04195.3; Description =Putative gypsy type transposon
MALLDPPECFQSEVALNLVRNLLGWGAPAFAGRIHVGASPLGDLAAGKFVLFISNLPCGLVLPISSFFVLLLEELGLQPQHFTPRFILQAAIITFLCEMSVGATLLPPAFGRKGVVQRPSGGGKRAELRLHLSRPAGFGLGSQAVCLDPLNHSSRYEDTHHRVVERVGLRYGTRLSGNTAPDHPRGRASIL

SEQ ID NO: 80149 - protein, 64 aa, Zea mays
  Coding DNA Sequence Number=SeqID_36774
MARVLGGLPVQPPLSLCFSGSGREEEGSLQCRDHDFLRVCSTGHWSTATSWSRHQVYVLKALGS

SEQ ID NO: 80150 - protein, 261 aa, Zea mays
  Coding DNA Sequence Number=SeqID_36775
  Subcellular localization annotation: CTP_CleavageSite=37; ConfidenceScore=5.25e-01
MSGAPEDSNSNSPPSGISRGHSAIIHRTVRCTPDSVRCSKGGRPQELASLGFSLQPLRYNSPDCPVCTGLSGASAGQRLLQAPTATCGAFIARQRAQRSGTPMLAHRTLYSTCPVRHRTSRRAQKSELQRSISNGTGDVAGAPDCPSKIPLEEQSLAAAASRALHLVLAEFWLALLVDDVLPLVIQQRLQGTHGLTSLDTEDRANSHHSATAEAGRRAVHSIKLESMGKWPTPCGRKPGTGIEEPPPRAVDIAPTSETAIA

SEQ ID NO: 80151 - protein, 46 aa, Zea mays
  Coding DNA Sequence Number=SeqID_36776
MGHGPWTDGFRGLLVARTFSGQFVASDDQTFMAGLLQVMKNWHHGT

SEQ ID NO: 80152 - protein, 47 aa, Zea mays
  Coding DNA Sequence Number=SeqID_36777
MDTARGPRAVACKGDAIGAGAGSREEGVASLACGGLACDYEKTVVNY

SEQ ID NO: 80153 - protein, 357 aa, Zea mays
  Coding DNA Sequence Number=SeqID_36778
  Gene Ontology: Mol. function=metal ion binding; Cellular component =integral to membrane; Biological process=ubiquitin cycle
  Homolog annotation: Hit_ID=A7P7H0; Match level="QueryCoverage=94%, HitCoverage=88%, E-value=5e-82, Identity=47%"; Hit description =Chromosome chr9 scaffold_7, whole genome shotgun sequence
  Pfam annotation: Domain name=PHD; Domain location=287-331; Score= -6.7; E_value=0.079; Accession=PF00628.20; Description=PHD-finger
  Pfam annotation: Domain name=zf-C3HC4; Domain location=288-328; Score= 27.8; E_value=4e-05; Accession=PF00097.16; Description=Zinc finger, C3HC4 type (RING finger)
  Pfam module annotation: Pfam domain module=PHD::zf-C3HC4; Domain location=287-331::288-328
MEQATGVSGPEHIIDIPREIGPPASVSRSAGRENHEESNPVDRPSTRALVPALQAPSAIGAVPITGHTSGTRRNDNYVRRHRSPLNSGLWISIEVIVNFSQIVAAIVVLCVSRKEHPQAPLLEWVIGYTVGCFATLPHLYWRYIHRNIVNGEHESSHTPQGSAHNNSNEATHAASASERRRNAARNAVLANPRINALFDHFKMALDCFFAVWFVVGNVWIFGGRSSAADAPNLYSFFILQLTFYFPPGCALCSSLLVALGSETEGQEGGILAAGTDKERSLSAEDAVCCICLAKYAHNDELRELPCAHCFHKDCVDKWLKINALCPLCKSEIVSSSGTSDARQSDQNTVPVQEIEMH

SEQ ID NO: 80154 - protein, 451 aa, Zea mays
  Coding DNA Sequence Number=SeqID_36779
  Gene Ontology: Mol. function=extracellular-glutamate-gated ion channel activity; Cellular component=integral to membrane; Biological process=ion transport
  Homolog annotation: Hit_ID=A2XAE0; Match level="QueryCoverage=93%, HitCoverage=44%, E-value=1e-130, Identity=55%"; Hit description =Putative uncharacterized protein
  Pfam annotation: Domain name=Lig_chan; Domain location=101-365; Score= 244.9; E_value=1.8e-70; Accession=PF00060.17; Description=Ligand -gated ion channel
  Pfam annotation: Domain name=SBP_bac_3; Domain location=14-324; Score= -86.9; E_value=0.031; Accession=PF00497.11; Description=Bacterial extracellular solute-binding proteins, family 3
  Pfam module annotation: Pfam domain module=Lig_chan::SBP_bac_3; Domain location=101-365::14-324
MVSGYCIDVFEAAIKALPYPVYYQYAPYYGIGNASSSSYDQMVELIPEEKADAVVGDVSITVVRMGDADFTMPYTESGWSMVVAVQAQTATGMFFFLKPLTPALWLVSLAAFIFTGFVIWVIEHRINPEFRGTPLQQFGIIFHYAFSTLVFAHRENVVSNLSKFLMVIWVFAVLILTSSYTASLTSMLTVQKLRPAVTDVNDLIDNGDYVGYQEGSFVHGELLQMKFDPSRLRSYSTPAEYADALSKGSAGGGVAAVFDEVPYLKVFLSQYCDGYTMSGPVYKGTGLGFAFARGSPMATEVSRAIVGLTEGDDMDLIERKWFGVPGSCVDGVDADNASLTLWNFSGLFLITAVAATLVLLAYLVTFIYRERHEVRAAAEPGSGSVSLKRFRAWLQHYDRKDMSAPHFRQQQGWSDSPSTNGGSSHGRKREGAEQEDAHSPRAISVGPGRRL

SEQ ID NO: 80155 - protein, 180 aa, Zea mays
  Coding DNA Sequence Number=SeqID_36780
  Gene Ontology: Mol. function=endopeptidase inhibitor activity; Cellular component=extracellular region; Biological process=response to biotic stimulus
  Homolog annotation: Hit_ID=A5C0Z4; Match level="QueryCoverage=74%, HitCoverage=81%, E-value=9e-37, Identity=49%"; Hit description =Putative uncharacterized protein
  Pfam annotation: Domain name=SCP; Domain location=44-168; Score=48.5; E_value=2.4e-11; Accession=PF00188.17; Description=SCP-like extracellular protein
MKPLVARLLLCYSLLCLAPAAAPLRLQHDHVRGHGHGHAHPPPYARNATAYGVSAALCPGCGAWADALEFLYYHNLRRGDCALRHSFPDGQFALGENVFWGGPGGAWRPRDAVADWAAEGADYSYADNACAPGRECAHYTQIVWRRTTAVGCARVACDGGGVFITCNYYPPGNVVGERPY

SEQ ID NO: 80156 - protein, 23 aa, Zea mays
  Coding DNA Sequence Number=SeqID_36781
MAMVRGSVVRLSMPPVFGTKHGR

SEQ ID NO: 80157 - protein, 20 aa, Zea mays
  Coding DNA Sequence Number=SeqID_36782
MEWDNDSDVGVDEEEEEVAP

SEQ ID NO: 80158 - protein, 372 aa, Zea mays
  Coding DNA Sequence Number=SeqID_36783
MGTEHGVSGELQADPVPWRRGPRARCLPPMGLRYKIVPAGLGNVLGLAPLGRLESRHRLRNRRGATVARVAVRLLARRLLDAWVWASKLACQKSEKRIHLARLHAACMAARPFRPLVWAKVGVACNRWAVVRTTRGGLASSALSRDATPWELVPLSHRSASRIFIMQPGCSPPPAVTRDDDLRLDGGGKRAGLRPLPLPQPQGFSSPGLGRGVRRVEVGPRVGGGPLLHSVIGGKGGRRPWRWQLQRARLSGASGFGATRGAGIRHGSLKSLRSALPLLGPPEQKSSSSPLLEQVTHQVSPVDYLNRFAKHESPRVKVTSEYEQRRSWLENGNLVGRSLAVLSVSRADAKVDQPRPRVGLAPLEAGWPRPQG

SEQ ID NO: 80159 - protein, 79 aa, Zea mays
  Coding DNA Sequence Number=SeqID_36784
MVAFGGIPQLDVETFAAWAAALVAKAAEEEEKKKVGCVQPRGWFGLGHRTVRWCTGQCPVRQAASAEEAALGNLLTAYG

SEQ ID NO: 80160 - protein, 161 aa, Zea mays
  Coding DNA Sequence Number=SeqID_36785
MGKSNKRKREPTPPSEDFGDSEYSEEEFSSESEGSSAPVSPPASSDDSNDSQGIAAEVWTYIRAVERSGLEGSDESEFSSDEEDSDGGEDEDDDDDDGDDDDDGDDDDGGDGDGDGSGSGGGSGGKDSTRGGSSTGNTRGGSSKGSTRGGGGRGGSSKASG

SEQ ID NO: 80161 - protein, 156 aa, Zea mays
  Coding DNA Sequence Number=SeqID_36786
MTGHFLKRYLAQEYPIRVVLLAAFAFRALVLAFPHPNLLCHSPPTLLTGKNRDGAQEENCKLVCCGDPSHRPQQPVAFLKGKCALGPFLSILVIECQHKCLSVNLYPWMDKVQIKSKGEIESEKSWLCTAKRLFGLEHRTVRWCTGQCPVRQADSA

SEQ ID NO: 80162 - protein, 526 aa, Zea mays
  Coding DNA Sequence Number=SeqID_36787
MGWRAGETASRVYREQECHSGRISSQITQQGHGVRARSTATIISPNPALKHGGAAALQRRRSPASRQHGAKAGQNPYGCVQNAYRVEADRIGRFSPRILPLRAMSTAERIAAAEEKVRRGIPALHANSAAIPGFGRLQCNPETSQDAFPSPSRREVRTRQDGPRKGEEKIGFTSRELRRRLFRSRACARIPSVSVERKELTLRSHPTAAGEVNIPLIPLLSHPGFRGPKPGREHNHQRWYPLPTSHVTHLSRDRDFPYTSTEEARQGFLPDRHRSKINQGPPYTDHSPTALAPFGARSTATIVSPNPALKHGGADALQRRRSPASRQHGAKAGQNPYGCVQNAYRVEADMIGTFSPRISPLRAMSTAERIAAAEEKVRRGIPALHANSAAIPGFGRLQCNPETSPDAFPSPSRREVRTRQAGPRKGEEKIGFTARELRRRLFRSRACARIPSVSVERKELTLRSHPTAAGEGARVPENGNVGPHHREYARATREGSPRSSDWNAGPPRQSRAPRGEMMGHRGGWAE

SEQ ID NO: 80163 - protein, 765 aa, Zea mays
  Coding DNA Sequence Number=SeqID_36788
  Gene Ontology: Mol. function=ubiquitin thiolesterase activity; Cellular component=integral to membrane; Biological process =ubiquitin-dependent protein catabolic process
  Homolog annotation: Hit_ID=A3A502; Match level="QueryCoverage=100%, HitCoverage=96%, E-value=1e-162, Identity=69%"; Hit description =Putative uncharacterized protein
  Pfam annotation: Domain name=UCH; Domain location=67-601; Score=56.8; E_value=7.3e-14; Accession=PF00443.20; Description=Ubiquitin carboxyl- terminal hydrolase
  Pfam annotation: Domain name=zf-HIT; Domain location=28-58; Score =6.4; E_value=0.085; Accession=PF04438.7; Description=HIT zinc finger
  Pfam annotation: Domain name=zf-MYND; Domain location=32-69; Score =44.0; E_value=5.3e-10; Accession=PF01753.9; Description=MYND finger
  Pfam module annotation: Pfam domain module=UCH::zf-HIT::zf-MYND; Domain location=67-601::28-58::32-69
MACPDIIPPGPSLRTMPYFKPAPSLRQEYHECATCHAPAKTRCSRCKSVRYCSGKCQIVHWRQGHKETCQKWLGSGSSSFGGSSTEATEQMPFLANLNSPLPGGDIHLRDMNFDTLSEPSFPTTDGYNLDTDPFPADRSNMNRSNQGIHMSENGAVGVSFEKNNYNAADEIHSSEILSGNKVSNNYFGSDAMSGNGDATYPAKSNAQQPSSCAPDVRKQSKASITVYQPDMSVYLTSDMVSSCEGSYVSAGEPLQRSLSSGRTIGKVTVVNKRPSYPSSKVVSAQKSQDKVSTSYQNDAHEKNPCNKNDQRSTPTCESSQSTSSNLLKSGTSKVEVLKKPSKFLKTSLVALINDNKRNKVLFPYEDIVKFFQYEARGVSPRGLFNCGNRHLVMSMQAACLDGLGGEKHVEPSLQETTLIQQMFGGRLKSKVKCLRCYHESERYENIMDLTLEIHGWVESLQDALTQFTAPEDLDGDNMYKCGRCSAYVKARKQLSVHEVPNILTVVLKRFQSGKYGKINKCVTFPDMLDMVPFVTGSGDNPPLYFLYAVVVHVDTENASFSGHYISYVKDMQGTWLRIDDSEVQVVSVNQVMSEGAYMLFYLRSFPRPPRIYIEKGLPVTSAKRHTSKSSKGSKHDRKQTELLFPANDQAYGVYDFRPDGEGYAQDQHAELRSRAFHHADDAFADSVSADFSEATSSEWSLFTSSDESSFTTESTRDSFSVVDYGDNAGLDPISSIFGPSYAPEHGAPGSFVSRTRFSPSSPQTR

SEQ ID NO: 80164 - protein, 180 aa, Zea mays
  Coding DNA Sequence Number=SeqID_36789
MGSALIAFVLLLLLEERNFAEVGTFQPSLGFKDFHQAARLHPLADGHPRRSVLARPGGLEWGSAGGQAATVVGAEVVAAGEVLVADEIAAAIRAPGLGSLALIACPRSSSGDVGEGLIAAASALRSSLLLFGRPERRSLSLLPEWATASHLGFCRPAGPPMWGVIRTCGSGTGVPFVMAP

SEQ ID NO: 80165 - protein, 57 aa, Zea mays
  Coding DNA Sequence Number=SeqID_36790
RAHGYERPRELQRLVILDQRHCGTGGNEIDGSGYDYGIGEDEAVEGDFQEFQDYDEF

SEQ ID NO: 80166 - protein, 291 aa, Zea mays
  Coding DNA Sequence Number=SeqID_36791
MTSHGSSEGGNTHSHTDGLARGGFPRILWEVLQGAGYTTPPLYTVQLFEKHRVPRCRVRMTLEPHPLQPGWRLLDSESFGYRAEDTIEAIALHELTTFYGFHPLELSTHPIGLFPAEKEDDPMWKDRVEHAKDVWALYPGQTAHLTVRCMNAMYRLQVMRGEAMSQLMALLEATKMTLDNREELMVDLSTEMVEKDLQVEQMANQIQELEELVGARENTIEVLEDQLINTQQQLEEANQHLDMHHQEIQDMETNENVDIKGGVEPEPASSLDTAGSGRPPSPESSVASFVH

SEQ ID NO: 80167 - protein, 31 aa, Zea mays
  Coding DNA Sequence Number=SeqID_36792
MEEEEKRSKHKSSKEHALVLNVLAENLGCLE

SEQ ID NO: 80168 - protein, 37 aa, Zea mays
  Coding DNA Sequence Number=SeqID_36793
MGSHDLRAERESQLMGKCSGGDEGNMEDFEFQDYDEF

SEQ ID NO: 80169 - protein, 295 aa, Zea mays
  Coding DNA Sequence Number=SeqID_36794
  Subcellular localization annotation: CTP_CleavageSite=71; ConfidenceScore=5.11e-01
MGFNKESKGQPKAPLVWYTGLSGVHRTVSGAPPDSVRCTRGLQLKLATFGNFQRHSAIIYRTVWCTPDSVRCSKEGRPQELASFGKLHRLLRYNSPDMFGVHRTVRFNYGATAISAPTATCSAFIARQSTQKSGTRVVAHPDTLQYMSDSIILLTLTRLVVVFIFVNFSFALFTPPSRRLSTTINGGGAPWVCARCEASAEGCECTSGGKESEWGTGHLEMGRGGDERGLDVRHGRGVHDDARVVRGQFGREGSDRRDPWVSEGRCACVEEIGADKWAPLGSERDKGERACADRR

SEQ ID NO: 80170 - protein, 466 aa, Zea mays
  Coding DNA Sequence Number=SeqID_36795
  Gene Ontology: Mol. function=protein dimerization activity; Cellular component=membrane; Biological process=regulation of transcription, DNA-dependent
  Homolog annotation: Hit_ID=A3BVE4; Match level="QueryCoverage=42%, HitCoverage=48%, E-value=9e-78, Identity=81%"; Hit description =Putative uncharacterized protein
  Pfam annotation: Domain name=bZIP_1; Domain location=319-382; Score =32.3; E_value=1.7e-06; Accession=PF00170.12; Description=bZIP transcription factor
  Pfam annotation: Domain name=bZIP_2; Domain location=319-373; Score =40.8; E_value=5e-09; Accession=PF07716.6; Description=Basic region leucine zipper
  Pfam module annotation: Pfam domain module=bZIP_1::bZIP_2; Domain location=319-382::319-373
  Subcellular localization annotation: CTP_CleavageSite=59; ConfidenceScore=5.45e-01
MGDPSASADPAAARHHLSPQLAGQPPVPRSPAPLDLASAAAASGHRRLSPSLRPPAHPQARLPSPYGQISSPGAAAHHALSLSQPLFFSLDSLPPPPPPYADLGAAPAVPAPSPPPSTSDPPPPLGLPPRRSGHRRSQSDIPFGLAQLSPPLPPPAPVKREVATAAEGGDGDDAAFFDLVNAYMDLDGLDPLNSSEDRHDDRDSRASGTTRAGSAAESSENEAESQSTSADRKDGGKSRHCRSLSMDSFMGKLNFAAGDESPKLPLPSPRASGSLTRSGSGSLEGGAVALFDMEFSNGEFTESEKKKIMANERLAEIALTDPKRVKRILANRQSAARSKERKMRYIQELEHKVQVLQTEATTLSAQLTMLQRDSAGLATQNNELKIRLQAMEQQAQLRDALNEALTGEVQRLKLATGEMTDGPMPKGLQQQMNSQMLQLQQLQIQQQAPPQQTQQQGQRQQPQKSA

SEQ ID NO: 80171 - protein, 160 aa, Zea mays
  Coding DNA Sequence Number=SeqID_36796
MTTSLVVGRSKPGCRLCPALSFKDVHHPHCGEGQAEPVFYLPHGPASRFFLRHLGGEGHPPALRRRHPPATRGKANCCCLDRVQLSVLHPGDGRVVRGPATPRSSLRRRPHQGVAQHVVRCEGGTRVLGRSRSRSCSEDGSEDLSVRFGATAVRRRGVGG

SEQ ID NO: 80172 - protein, 149 aa, Zea mays
  Coding DNA Sequence Number=SeqID_36797
  Homolog annotation: Hit_ID=Q6QP51; Match level="QueryCoverage=32%, HitCoverage=22%, E-value=1e-14, Identity=77%"; Hit description =Putative growth-regulating factor 1
MTIGEGLQPGCMMKILEVERWLKSANHREVALLQQQQEEGNTDAPHLGAQKGKRHPWQAKRASFHLHHDDHVKKGTAKGDISKRILLNEGNGPPSPPTDQGFEGWPLERVQQPPQSTRALSPLLIRGPKAGPSEGFDSHPRALGLRAHY

SEQ ID NO: 80173 - protein, 169 aa, Zea mays
  Coding DNA Sequence Number=SeqID_36798
MEVVAALLVQWSPASHLEFVIPQALWCGGCSYPREWNRSPNLWPLCDELEPETVVSAWMEAELARKEASSAREQVASQAEEVQQRRLELGQVEILPPVSPSKAGPDSAKGGNDAESAVAPSADDLFVDSRIAYLSESYFSRKVMSEDSIIDIVEKARKSFSTRALGLVR

SEQ ID NO: 80174 - protein, 87 aa, Zea mays
  Coding DNA Sequence Number=SeqID_36799
MPEQGAAQEVAPDPAPESAPEDLPATALEGKPRNSASAFGNQTPQPNSCMSRGSLEEMVAGITWPSTLPPGWTVEWDPASAEEEHEE

SEQ ID NO: 80175 - protein, 122 aa, Zea mays
  Coding DNA Sequence Number=SeqID_36800
MVTTRRINPGAAGASGIGNQEAFRGNYIPPGLMAMKNNLYVVAKGHKRTLESGISQPRTIVVAQPSFRPMLPGARFRPPLPKTIQQQGFRGQKAFKMALPHAKTRPGSSTGSTTQVKGLKVA

SEQ ID NO: 80176 - protein, 328 aa, Zea mays
  Coding DNA Sequence Number=SeqID_36801
MSAEQPLRFPEAGEFLRRLFLGAPDTVRCTPDSPVNYSGAPLEIPEGGKFELESSGAPDIVRWCIGHCPVYTGQSGAPRPEFYSHSFGYDVFCRWPVLDALHASLATWRGCIVVCTRSRSVDARSRSRSSRTLPPRLSRRWSLGGSLPLHLSQRCPLHHHRASPAAEGDPDEDDDDDGGSSSHSMELSEEQEPEGWIARPITRDAARECHFQDALDTLLHQAFDLHTWSIEYCYVVYQHRRSGIANGLDLKYYPRRSTNSAGGVIVSLVGDEGNPRLNSMVNLVVLLNTELDHTLDELGKAQVEIAELRAERAVRHYQDGGSPAPVGI

SEQ ID NO: 80177 - protein, 46 aa, Zea mays
  Coding DNA Sequence Number=SeqID_36802
MEIAPEGEPNVRCALSSLPETGSGKTDGAMVGQGDFGQGGDGRHEM

SEQ ID NO: 80178 - protein, 47 aa, Zea mays
  Coding DNA Sequence Number=SeqID_36803
  Gene Ontology: Mol. function=nucleoside-triphosphatase activity
  Homolog annotation: Hit_ID=Q8GU82; Match level="QueryCoverage=93%, HitCoverage=3%, E-value=7e-12, Identity=84%"; Hit description=PDR -like ABC transporter
MVESRLGVDAPKVEVRFERLTVEADVRVGRRAVPTLLNAAINAAQES

SEQ ID NO: 80179 - protein, 767 aa, Zea mays
  Coding DNA Sequence Number=SeqID_36804
MPFHGGRVVRSPAFALNLRNRDPAAFVRDAEDLAVRLVGRYVPRTEGQHSFDIRGSNERLNRVFELNQLPYDGYPGQDEADRRGKKPAVETGGDPALAAAPSSKKRKLVMDKDRQGAAQKRQATVRVHEARPKRQRGTAKAAASGGGKPPLAAKAGASAPSKAPEATAGTGGSKLTKVVPPASGVAEASKAARTLPPPGKRVADFGTEINVDDYLGGSDEGQLAIVAPAVAIATAALAPKARGDTLGAGGEVSALAMPYCVGGPYGQPCLPKSRDFGTQHADVVREKSASDSKCRKLADRVAALEKEKADLRRQLAGERREANEAIAKEQAAQTEARLARAEGNIAKELAGELQGRLTALESRAEGAEAAMRVEAERTRTQLMAAYRELGARTGDFEVPEREAGLRCLEWVQEELQELPTVLEGLMSFTSLVTCEAAMNALSREGCRHFEALDQADEDFGRDIFEVEDPVVKESAGALYDRMWGSYGREVVRERAEAARAQAERGERVDDFGALNSALPDPETTPAEAATGVALGPTPETAENAPGAPASAAAGEDLPPKVAEGAPDAPAAAVPSAEDPAAVVAEAAAEASAEASAAAGPSQVQDFGPAHATATTEFLAASTAEDGNEYGGSISEFFDFTDSESSVEWTEESSEEDLDYFAALDVAAAEAAPHAVDAPDVPGPSTGRRRRRAVAKRRFDCALRRLLRGVFTIDFGFFAFVVLVRLHPWVTSARIVFAIDFGFFRTCCAKSGCTLRRLLRGFVAREGG

SEQ ID NO: 80180 - protein, 29 aa, Zea mays
  Coding DNA Sequence Number=SeqID_36805
MACCGVFSAYWAQLALPPRFEMFEGYMYT

SEQ ID NO: 80181 - protein, 135 aa, Zea mays
  Coding DNA Sequence Number=SeqID_36806
MVQQSGVLLNSMKGVMAKVARSILSRSYTTLGPTFGSYQDEKMSHEVPPIYDNQTWAFIPEGFVSRLEYRSKCEVEHAHHSDQNMPLMIRTRLKIMSYSNSRRNMYILMYSPFLFVSLVSPIDAMVKEEFVEDDG

SEQ ID NO: 80182 - protein, 386 aa, Zea mays
  Coding DNA Sequence Number=SeqID_36807
  Gene Ontology: Mol. function=catalytic activity; Biological process =metabolic process
  Homolog annotation: Hit_ID=A2Z482; Match level="QueryCoverage=100%, HitCoverage=99%, E-value=1e-168, Identity=78%"; Hit description =Putative uncharacterized protein
  Pfam annotation: Domain name=Hydrolase; Domain location=136-324; Score=78.4; E_value=2.3e-20; Accession=PF00702.17; Description =haloacid dehalogenase-like hydrolase
  Subcellular localization annotation: CTP_CleavageSite=73; ConfidenceScore=5.42e-01
MVVDTVSASTSIIAPHLFDHRSRGAGASHHHLRRTFHVVACRPLPTAFAGRRLVARVTRQPSSRLADWPVRALAMGVTKEVRASPRREYRGIPGDGGDMGDVGVTSPTPSWPPRNRADDPKLHNPLLRLERMGCGWLGVIFEWEGVIVEDDAELERQAWLTLAQEEGKSPPPAFLLRRVEGMKNEQAISEVLCWSRDPSELRRLALRKDEIHSSLRGGSYHQMRNGSREFMSTLANYKIPIAVVTTRPRKVIEEAIEAVGVRSFFDAVVTAEDVYRGKPDPEMFLYAAQLLSFIPERCIVFGNSNSAVEAAHDARMKCVAVASKHKIYELSAADLVVKQLDELSVVDLKNLADIESPEFGMEPEPEMEEEEVPPPSTSVGIDDLFW

SEQ ID NO: 80183 - protein, 204 aa, Zea mays
  Coding DNA Sequence Number=SeqID_36808
  Homolog annotation: Hit_ID=Q5Z9G5; Match level="QueryCoverage=34%, HitCoverage=28%, E-value=6e-09, Identity=45%"; Hit description =Putative uncharacterized protein P0655A07.24
MEEGQTKNLGWMPDACCPRGACDGYAREQESTGRRGALQPADWRSWRGREEEPQRPQRYSFRRHRSGAANWAAVVLFMVLAAVVLLGAVALLVVVKLLQPRVPRAGGAPRLPVPRPAKGVLPLAYVARAQGAPLGDDGSAAMEAALRDGVVSFRVDGEARTRWKVARIVVVDQWTHMACQLRFFWPNGTVLPFRCISKSKFLFF

SEQ ID NO: 80184 - protein, 452 aa, Zea mays
  Coding DNA Sequence Number=SeqID_36809
  Gene Ontology: Mol. function=helicase activity
  Homolog annotation: Hit_ID=Q7XD08; Match level="QueryCoverage=79%, HitCoverage=37%, E-value=4e-62, Identity=34%"; Hit description =Putative uncharacterized protein
  Pfam annotation: Domain name=Rep_fac-A_C; Domain location=200-329; Score=-61.8; E_value=0.023; Accession=PF08646.1; Description =Replication factor-A C terminal domain
MSRVGLHLKKPVFTYGQLYVAVSRTTSRGGLRILIENEDGSCGMGDVLIPSLQCGNLSVTICVCVSRFWDFSDPQDDARLLRCDMVLLDEELEQVIDIPPAFPTLTYSLTHIEQIHARIDHKDYYTDGLCLTGSSPCKWYINPSIPEVETLMSSARGDHKPVKWNATVTSSQLISPVAEEQKVSYIKYLHPFENKGKEFLFTVTIRKIDNKWWYNSCRKCACTAVTHGDSYKCTNCDCANIAMPVQRYKILVTAGDETADTYFILFGRMAQRIVKRPCDMLIANTPSGFIPDAITKLLERTFIWNVSFSGHTINSGDVCFQVNATVKELGNQNVDISTSTVGTHQSSLMFSQGASSSMEDTPHKTDTLSSPLTPLTPQGSIATTKYLETVDIGDAEPLIESTKTCRSCSSPSKSIAKKLFVADDEEGSISQSSGGGVGGSRSGCLSSDYCNS

SEQ ID NO: 80185 - protein, 67 aa, Zea mays
  Coding DNA Sequence Number=SeqID_36810
MESADGCFDVSLFVVLDDLDVFYSTASVTIIARKHSDVFCQLISSKSIVMALPNEWKMKKLVQSHYS

SEQ ID NO: 80186 - protein, 154 aa, Zea mays
  Coding DNA Sequence Number=SeqID_36811
MPHYRERRAKRVHGPGRDARRRVGEEGQDVGSARRGVGRGFCEGVSEAQLTIVSLGCLPPWFRPPGVNWGALPPCPLCSPMARRSEAPRAGRGGDEPPALLLQVGHVEEADTAGEREGGQGGWIGGAGLGIQATGVAPPPPRVRAEDVALLMEG

SEQ ID NO: 80187 - protein, 242 aa, Zea mays
  Coding DNA Sequence Number=SeqID_36812
  Gene Ontology: Mol. function=cysteine-type peptidase activity; Biological process=proteolysis
  Homolog annotation: Hit_ID=Q5NKQ2; Match level="QueryCoverage=100%, HitCoverage=31%, E-value=1e-27, Identity=42%"; Hit description =Putative uncharacterized protein 9C20.3a
MVVKQYELADTFAEMIDDVLRAESVDPGQTMLRKRLNQLNLQIYLIIYHQVTFTHCKFFQFMYFSSPFSVVSVQLLKPFPYRGMHSFRYPKYSGPDYANFAAATDLTCTQFEEIHEMQQQMRRAFEGCPNDFDVTVPMETNSYSNSKKQGGDIDASHDTQTNTGPLFDQTPSGHCFREDDVNHRPSMNNNRLVLDVNVGALLNFEDNECHNKSPQSYDQAVLDDYLDKTLHQLDNYVEYKSV

SEQ ID NO: 80188 - protein, 204 aa, Zea mays
  Coding DNA Sequence Number=SeqID_36813
MPHAPPQGILAARGDPDGDGDDGNAGGISSHGTELSEEPEPEGWIARPITRDATRGCHFHDALDTLLRWAFDRHTWSIEYRCGAEAFSEHYSITKRDTAEAAMQDATRRALSQYCSLFSGVADGLDLKNYPRRSTGSAGGVIVSPFGEGSPRLNSMVNLAAVLNTELDHTLDELGKVRAEVAEFHAECAARHYLHGGSPAPVGI

SEQ ID NO: 80189 - protein, 192 aa, Zea mays
  Coding DNA Sequence Number=SeqID_36814
MPHAPPQGILAARGDPDGDGDDGNAGGISSHGTELSEEPEPEGWIARPITRDATRGCHFHDALDTLLRWAFDRHTWSIEYRCVVYQHRRGLYPDQLEDTCLYCSLFSGVANGLDLKNYPRRSTSSAGGVIVSPFGEGSPRLNSMVNLAAVLNTELDHTLDELGKVRAEVAELHAECAARHYLHGGSPAPVGI

SEQ ID NO: 80190 - protein, 66 aa, Zea mays
  Coding DNA Sequence Number=SeqID_36815
  Gene Ontology: Mol. function=cysteine-type peptidase activity; Biological process=proteolysis
  Homolog annotation: Hit_ID=Q5NKQ2; Match level="QueryCoverage=71%, HitCoverage=5%, E-value=2e-14, Identity=78%"; Hit description =Putative uncharacterized protein 9C20.3a
MKAGSNDCGFFVMRYIQYYDYMDGSIKQYIQPDDSRDLRSLALYYLTPVASRNSKIQVCPQVVSLD

SEQ ID NO: 80191 - protein, 60 aa, Zea mays
  Coding DNA Sequence Number=SeqID_36816
MEILIPVILADEAFLVKLSVLGPPHLHVPDFLVQIVLLRRWTGGLPLLASGFPKRKGLLV

SEQ ID NO: 80192 - protein, 219 aa, Zea mays
  Coding DNA Sequence Number=SeqID_36817
  Gene Ontology: Mol. function=nucleic acid binding
  Homolog annotation: Hit_ID=Q5NKQ1; Match level="QueryCoverage=91%, HitCoverage=89%, E-value=4e-32, Identity=51%"; Hit description =Putative uncharacterized protein 9C20.4a
MAMDRGSVQYGEATATTLPFGSDGRYAVTPPAALPALGFLEDSNAVHPSLVGATHRIPMRTIGDHEQDTPHILQSHMLESMHVNASIGSIQIDRIPTEYILLRYTYSAIQDVTFSRDDKNLKGKDDIEGDDSTSDGEGIQGEGDDVRDMPGENLPTRRAKDGHGAGQWTTGIPMSDECATELAIKKEMKLDFNVSGVSLRRPDNAKPKGRTISDIEKSY

SEQ ID NO: 80193 - protein, 307 aa, Zea mays
  Coding DNA Sequence Number=SeqID_36818
  Gene Ontology: Cellular component=nuclear chromosome
  Homolog annotation: Hit_ID=A2XUW2; Match level="QueryCoverage=98%, HitCoverage=50%, E-value=2e-43, Identity=38%"; Hit description =Putative uncharacterized protein
  Pfam annotation: Domain name=Rad21_Rec8_N; Domain location=1-100; Score=49.6; E_value=1.1e-11; Accession=PF04825.4; Description=N terminus of Rad21  Rec8 like protein
MVHSNALLWKKGPVHTVWKASFCKESELSRDKVAGTDIVASVGEIMLDVRSPHGLHLAVLAKLLFGIVRIFSKKMEFLLHDFNELSRSFRLSQLAEPTLPSGRLTLGVLKQANKDVRVGRLVVGQQNTCKVQKTVHAVRTTEVSSAISSEGHSVRVETEVTLGISVVIKETRLPDGLPTFTIPRSFELDSFNLGIAEDIDDEGDDHHQLAHQDILLRDERHHAPYFYEPYQRVSCSYAVDSAGFLPEYIALPNNILDFTEGGKSEIENKNADSAWFTPLKDVLPPEMMGMVAEAKDLAKESKTGDNS

SEQ ID NO: 80194 - protein, 179 aa, Zea mays
  Coding DNA Sequence Number=SeqID_36819
MAERTGGASGGSSGRRFAFAVITATKKQGPGKGDTPKRILPHEGTRLRASLLIRGSKAGPLEGFDSRLRSRGPYTHYWSEVRSSPETPCSAPIEGNMALSPPPPCEKATQGRMQKAESVPDRSLALCRGSGAALANPALAEPLTASTYQPESLGPDRTPGLRPVRMREQPNQPKHYARH

SEQ ID NO: 80195 - protein, 197 aa, Zea mays
  Coding DNA Sequence Number=SeqID_36820
  Gene Ontology: Mol. function=triacylglycerol lipase activity; Biological process=lipid metabolic process
  Homolog annotation: Hit_ID=A7Q9S1; Match level="QueryCoverage=100%, HitCoverage=56%, E-value=1e-24, Identity=36%"; Hit description =Chromosome chr5 scaffold_67, whole genome shotgun sequence
LYGKYPSVHVYAYGPLPCVDFVIAEACSHFVTTYHDNGPDDGIIQGYADHTRTADTTVPNERQISHQIPLCNTELDLHNTQNGFFRYNGSSASIDEHLSYEGISSGHDMQIIPLDGADSGFEGHQTSYREIPVEPPEMFLAGLIVHIVRQRRSLFPLWKCWSIQETEPPYKAVLAKRENFRDIVVTPYMFTDHLPWR

SEQ ID NO: 80196 - protein, 94 aa, Zea mays
  Coding DNA Sequence Number=SeqID_36821
MTSEQLSMKGLRLVTKPDQEVDMSKLKCNILNLARLTSDVGAVGQARHNRSHPWNPVTIIGAIKSIEHLRTGTPPDEEVKEGAIAAVNGESKVE

SEQ ID NO: 80197 - protein, 162 aa, Zea mays
  Coding DNA Sequence Number=SeqID_36822
MEAQAHASYNRCAECFVHATAPPLTPPPRLLDCGTDTATRGDPAHDPAAPAWRDGQCGQKWAGTNGGGRRSGPVVSQAHVPSGGGERTLSHGVKTTHPCSVPRTAHARATAAPPTTRPVALTPRRDRRRLWQEKRATLRLRHNDRVRKGTGKGGYPEKDPSS

SEQ ID NO: 80198 - protein, 189 aa, Zea mays
  Coding DNA Sequence Number=SeqID_36823
  Gene Ontology: Mol. function=carboxyl- or carbamoyltransferase activity; Cellular component=ornithine carbamoyltransferase complex; Biological process=amino acid metabolic process
  Homolog annotation: Hit_ID=Q8SA97; Match level="QueryCoverage=100%, HitCoverage=24%, E-value=5e-13, Identity=59%"; Hit description =Ornithine carbamoyltransferase
  Subcellular localization annotation: CTP_CleavageSite=83; ConfidenceScore=5.13e-01
MAPPVDVAGLRPRLGDVEAPPKPRSSPCLWFGRGGDRRLRPGRSLSPGVGRSGVRRLLGLSPSPSPRSGGAEFVVFRDLARVRALGRAERRSSSSGAYPESEPWVGWSEPESEPWVGRSGVRRLLGLSPSPSPGSGEAELPMGLGRAGNMFAAGGGPQARRNSSELYADGGYQLRIRSLEGTPNYGPRQ

SEQ ID NO: 80199 - protein, 90 aa, Zea mays
  Coding DNA Sequence Number=SeqID_36824
MRINLKMMKMKIKTSHLKRRTMIKGEMLMIKTRKMMRVQDRLTPRPHQAIQRDHPVNSILGDIHKGGGRRIKGFRLGVGNARGSQQLHEE

SEQ ID NO: 80200 - protein, 87 aa, Zea mays
  Coding DNA Sequence Number=SeqID_36825
  Gene Ontology: Cellular component=nuclear chromosome; Biological process=chromosome segregation
  Homolog annotation: Hit_ID=A2XUW2; Match level="QueryCoverage=95%, HitCoverage=13%, E-value=1e-15, Identity=50%"; Hit description =Putative uncharacterized protein
  Pfam annotation: Domain name=Rad21_Rec8; Domain location=24-78; Score= 61.5; E_value=2.9e-15; Accession=PF04824.7; Description=Conserved region of Rad21  Rec8 like protein
MRIAVCRKIASILHQLFLDQKRKEGTTTLSLSQVLEGTKRKIAALFFYETLVLKNRGLVEVKQEHHYDDIILSETPKLKAELQRCRN

SEQ ID NO: 80201 - protein, 418 aa, Zea mays
  Coding DNA Sequence Number=SeqID_36826
  Gene Ontology: Mol. function=protein serine/threonine kinase activity; Cellular component=plasma membrane; Biological process =protein amino acid phosphorylation
  Homolog annotation: Hit_ID=Q9LSF1; Match level="QueryCoverage=87%, HitCoverage=86%, E-value=1e-70, Identity=41%"; Hit description =Serine/threonine-protein kinase OXI1
  Pfam annotation: Domain name=Kdo; Domain location=35-226; Score= -87.1; E_value=0.09; Accession=PF06293.5; Description=Lipopolysacchari de kinase (Kdo)
  Pfam annotation: Domain name=Pkinase; Domain location=20-332; Score =118.3; E_value=2.3e-32; Accession=PF00069.16; Description=Protein kinase domain
  Pfam annotation: Domain name=Pkinase_Tyr; Domain location=20-332; Score=-80.7; E_value=1.8e-07; Accession=PF07714.8; Description =Protein tyrosine kinase
  Pfam module annotation: Pfam domain module=Kdo::Pkinase::Pkinase_Tyr; Domain location=35-226::20-332::20-332
MTAVATPTPPPPRQLSLEDLKAISVLGRGAKGVVFHVVHAHGEPDGEGEGGAAAAAMALKAVSREAARHKKAGSGDGDGHRRIWFERDVLLSLRHPLLPSLRGILATEAVVGFAIDRCGGGDLNSLRRRQTEKMFSDSVIRFFAAELVLALEYLHSLGIVYRDLKPENVLIQDSGHIMLVDFDLSTRLPAPPQEPDAPVAAVHLAHGLLLLVVVVLDGEHGLLRGIRRRADSREVELVRGDGGLRGAGDHRRARPTTSRWTGGAWGVVLYEMLYGRTPFRGQSRKETFYRVLTKQPELVGEQTPLRDLIARLLEKDPEKRIGARGVRAHPFFRGVDWDRILQVARPPFIPTPPPQDEGEDGDGDEALDVEKVVREVFASNDAEGGKAWPVADGGRVGGDGDCDGRGDQSKDGDFSVFF

SEQ ID NO: 80202 - protein, 65 aa, Zea mays
  Coding DNA Sequence Number=SeqID_36827
MTWGEPPFFVGWSASKMRHLAEAGRWIKVLEVSLVKNRSCLDLGVSWLGNDGAPHSSFSCADVAK

SEQ ID NO: 80203 - protein, 62 aa, Zea mays
  Coding DNA Sequence Number=SeqID_36828
MPVHVGASHSSRDGWDLQQQGSPSPEQEPEREGGSFGRGGVAVYNFVLDTAAAPLKDLNHST

SEQ ID NO: 80204 - protein, 356 aa, Zea mays
  Coding DNA Sequence Number=SeqID_36829
  Homolog annotation: Hit_ID=A2YSH9; Match level="QueryCoverage=63%, HitCoverage=76%, E-value=6e-12, Identity=25%"; Hit description =Putative uncharacterized protein
  Subcellular localization annotation: CTP_CleavageSite=76; ConfidenceScore=5.42e-01
MWDPQMWQGQGFDPTHPSTFSTPTNHMTNPTWSQGANDPSTYTFSSPWNPFVGMINPGGPPQQPSFGQPQFAPPIPCPQGSTHVPNHTDPITFESEAEHSVQEVNSPTKPSDTPPTFRRTKEQNFKPAEDLLLCKTWLEISSDPVISTGQRKERLWARIEKKTSKAATLYATSQKKPFNFMHCWTRLKDEPKWDAMVHGSPWRGNAGTEPVRSLTPTGSVNEVESDDGGSKGKRPLGRDSTKASRKKSMSSSSQSADYLSRLHDIQIARLKQSEEKSDLKQHNIEFMKEVELKKLEVQSKEIEVQEKKLMMEDRKQKVEELNKLYAMDMDALPEELRAVYMAMRKGLIDFFINNPI

SEQ ID NO: 80205 - protein, 266 aa, Zea mays
  Coding DNA Sequence Number=SeqID_36830
MDGDATAEKCLAAASFPDKSARSEYSEEDARGDPRATIPPPEKVRVIPPSPANRLSSSARRAAVGLVDATPPSTFADRRPGRSVRRRRRRSSLSAGTLGLGSTSKGGHPIADRSTLTRSASFEVQGPRCFPIRYWLSIRIKMSSQDAKLLQHLVLNLASSVETGAFNIRSFLEEAFRHLGDEHYLLNALLAIRKEVDQMEQDALESKARSDPEKERMEEQISLAEPVRPVPRQITFTPPSSPELYEASDNDSYDSDRSTRYSIWNL

SEQ ID NO: 80206 - protein, 345 aa, Zea mays
  Coding DNA Sequence Number=SeqID_36831
  Homolog annotation: Hit_ID=Q6QP51; Match level="QueryCoverage=33%, HitCoverage=42%, E-value=1e-15, Identity=47%"; Hit description =Putative growth-regulating factor 1
GKRHLWQAKRASLHLRHDDRVKKGTEKGGISRKDPSQRRRRAPSPPTDQGFEGWPLGRVRQSPQSTRAPRPLLIRGSKAGPSEGFDSCPEHLGSAPSTDQGFEGWPLGRVRQPPRARRVRDDSRYVRYMAEARATLLRSKPRLPRDSISLRLSPASGGNSSPRRIHDLPEGHLRQWAHPQLARGPARAGFVEKQPWPNRLTNRPYRRRIQCEDRLTPYPDTRVSVGRVEPRAQQEAPPRLTLSLGLGRRSPPRPTPRLGLSLGLGRNRVLARPRPRPQEKSPPRPTLGSDQPRHRGYIITLPIASSGYEGTRPASHLARPGLRHFSDGHVIMYAELKHFSDSHVG

SEQ ID NO: 80207 - protein, 44 aa, Zea mays
  Coding DNA Sequence Number=SeqID_36832
MQEVCNRTTVVHPFGFIASDGDRERGYFEKGSFSAKETGPEPSY

SEQ ID NO: 80208 - protein, 66 aa, Zea mays
  Coding DNA Sequence Number=SeqID_36833
MQLGGPHLSLIVALLAKGRHLRTQDEAVHNMGSRVRTKAEPAPKLRARELQLSTRKRNRLKEEKAI

SEQ ID NO: 80209 - protein, 662 aa, Zea mays
  Coding DNA Sequence Number=SeqID_36834
  Gene Ontology: Mol. function=cysteine-type peptidase activity; Biological process=proteolysis
  Homolog annotation: Hit_ID=Q5NKQ2; Match level="QueryCoverage=99%, HitCoverage=100%, E-value=0.0, Identity=70%"; Hit description =Putative uncharacterized protein 9C20.3a
MKSVDRPPVNPKRITIESSQEFFGVEIQRSASTGDPPNTKHSFHRPAHVERPSVIHEANDKSGSGDDDDDFMTPTKKRNTTGSPIKILRKTCTKRMKVVEISRQTMQKLNVRCNPQDVIITIKILNERQRQAVARKGFSNTLDMTLDALGSRSHLRWLMDKLGHKDMTIRPGQGKELKIMKEIVHLILGLPNAGGGKPLGIDEAVASNNLRAELGLSKDEFVVASLQDRLRKVDDDDLSIRCFFLILFNRLLFSTSSWGISNHELYYLDHLHDAAAPHNKRGKPRIKFFDKNIIQALTKADRRKPRQSGEPFGHCEHRDRTNIFDVPRPDPCGHHTIHIQLPLIKDMLSSKIKQLQPRDRPKFIKKFVEYDSEVGKACSIIQNTLTKMVVKQYELADTFAELIDDVLRAEFGDPDNVAEAPQTAKPPDISHHMSSELTGTQFEEIHEKQQQLHRAFDGCPDDLDVTAPMETNTNSNAEKQVASDEETHSLHTTHVHSLPRLTELDCARSLRDFLCSSKLDPNRKVIEFGECIGNCLDIQQSFADGMCLDNVFMQCFIQCFRDEEINHCSSINKNRLLLDVNVGTLLNFEEHERYSKSPQIFDQTVLDAYLDKTLPQLDNFVDYKTENSRDLRSLALYYLTFHSKNKCLPLPPEIQRFKFARK

SEQ ID NO: 80210 - protein, 394 aa, Zea mays
  Coding DNA Sequence Number=SeqID_36835
MSEWGIRLNEVGSRDPQGLECSRVVGSPPSGGDSGWKGQSWPNEFLKSLQFQRVWHISLWYGHWASRISSSVRTLPRGRRLRIADEVLGPFNGDVVVRLLEQVFRGGGSFLEDGPDEGRVIRPAVEVLNHGSLRDVGDAIPHGLKMPRERVEGLIALALDEIEVLRLRRFIGKGLKICDKLVAEVVPVIDAVAREMLKPLRCILPEDDWQGKGPRPCTSLGPPDNGRDDGPWEVPREKRVLASKLGVLLSLFPLAFLGVATIVVSRIAALTERSFVRGFPYFRGLVPRDGLSRIPFSGFVVTLDVMEPIPTLTPSPPRYTIRGKMTAWTTLRPPHRKTKAYNEVFPSRVLTQPGGPRGIRPISVTLSYGNILGIIQVPEGINVLTSRRWALEHL

SEQ ID NO: 80211 - protein, 286 aa, Zea mays
  Coding DNA Sequence Number=SeqID_36836
  Subcellular localization annotation: CTP_CleavageSite=74; ConfidenceScore=5.04e-01
MPPHSPHALSPYTFRAPGWGAFVLPSSCCCWKERDLAGVRALQHSFGFQGFSSRSPAAVPHQWSSVGMITSLVVGRSKPGCGLCPALSFKDVHHPGWGGGAHRVGANLRVGWQPASSSGIRGRRASSSSARGGVLQPCGGKGELLLPLAGAVLVGRWSLSSPLIFLVAGGGISADETVGATCGRTPDSLALMAGSRAPGHRRATWSLLSRRPSGVEVVHTRGSGTGVPFVMKVTSENLRPLCDELKPEAAVSTWTKAESARKEASSAREHVASQAEEVQQRRLELG

SEQ ID NO: 80212 - protein, 212 aa, Zea mays
  Coding DNA Sequence Number=SeqID_36837
MSCPVRKVTSENLRPLCDELEPKAAASAWTEAELAREEASSTQEQMASRAEELQQRRLRLGQVIRERDQPRSHAAEDVSRAEVLGGHLAVATERPAEVSARVGTLAAMAQARCWRPPSRWRSFRLCHRPRSGQILPKVETTPRVLLLPLSMSEPEGTVCLYRIAYPSESYFSRKVMSEDSAIDIVEKARKSFWQKSFSSIRTCSAAELLIRA

SEQ ID NO: 80213 - protein, 160 aa, Zea mays
  Coding DNA Sequence Number=SeqID_36838
  Homolog annotation: Hit_ID=Q6QP51; Match level="QueryCoverage=36%, HitCoverage=25%, E-value=8e-16, Identity=74%"; Hit description =Putative growth-regulating factor 1
  Subcellular localization annotation: CTP_CleavageSite=46; ConfidenceScore=5.48e-01
MAAADERKQRSNRLQAHVPSWSSRGALSHGVKTTCPCFVPRTTRARATAAQRTACPVALTPRQGKQRLWQAKQASFHLRHDDRVKKETGKGDISKGILLREGSGPRALITDQGFEGWPLGRVQRPPQSTRASGSLLIRGSKADPSEGFDSRPRALGLRAH

SEQ ID NO: 80214 - protein, 47 aa, Zea mays
  Coding DNA Sequence Number=SeqID_36839
MFGLQVAMRLMVLGIGSGNGCQHCNPCSGEDEAVKGDHQEFQDYDEF

SEQ ID NO: 80215 - protein, 921 aa, Zea mays
  Coding DNA Sequence Number=SeqID_36840
  Gene Ontology: Mol. function=oxidoreductase activity; Cellular component=integral to membrane; Biological process=electron transport
  Homolog annotation: Hit_ID=Q5ZAJ0; Match level="QueryCoverage=99%, HitCoverage=98%, E-value=0.0, Identity=77%"; Hit description =Respiratory burst oxidase protein B
  Pfam annotation: Domain name=FAD_binding_8; Domain location=608-729; Score=195.8; E_value=1.1e-55; Accession=PF08022.3; Description=FAD -binding domain
  Pfam annotation: Domain name=Ferric_reduct; Domain location=410-568; Score=180.8; E_value=3.4e-51; Accession=PF01794.10; Description =Ferric reductase like transmembrane component
  Pfam annotation: Domain name=NADPH_Ox; Domain location=123-249; Score= 178.9; E_value=1.3e-50; Accession=PF08414.1; Description=Respiratory burst NADPH oxidase
  Pfam annotation: Domain name=NAD_binding_6; Domain location=735-904; Score=227.8; E_value=2.4e-65; Accession=PF08030.3; Description =Ferric reductase NAD binding domain
  Pfam annotation: Domain name=efhand; Domain location=250-278; Score =27.8; E_value=3.9e-05; Accession=PF00036.23; Description=EF hand
  Pfam annotation: Domain name=efhand; Domain location=294-322; Score =12.1; E_value=0.93; Accession=PF00036.23; Description=EF hand
  Pfam module annotation: Pfam domain module=FAD_binding_8::Ferric _reduct::NADPH_Ox::NAD_binding_6::efhand::efhand; Domain location=608- 729::410-568::123-249::735-904::250-278::294-322
MADTVTGSSRRSQDDTATLIPHSGNLGGSSRKGVKAARFKDDDEVVEITIVQRDSMAIEDVRVVDDGGSGHGGGFDGLSLVSPSSSRSGKLASKFRQVKNGLKMNNSSNKAPQTQLGKNVRKRLDRSKSGAAVALKGLQFVTAKVGHDGWAAVEKRFNQLQVDGVLLRSRFGKCIGNFSGPIEFVSAYSYLNNTNTSIALDCAGMDGSDEFAMQVFDSLARKRGITKQVLTKDELKDFWDQLSDQGFDNRLRTFFDMVDKNADGRITAEEVKEIISLSASANKLSKLKERADEYTALIMEELDRDNLGYIELEDLEALLLQSPSQAAARSTTHSSKLSKALSMKLASNKGTGPFYHYWQEFMYFLEENWKRIWVMTLWLSICICLFIWKFIQYRNRAVFHIMGYCVTTAKGAAETLKFNMALVLFPVCRNTITWIRSKTKIGAVVPFNDNINFHKVIAAGVAVGVALHAGAHLTCDFPRLLHASDAAYEPMKPFFGDKRPPNYWWFVKGTEGWTGVVMVVLMTIAFVLAQPWFRRNRLKDSNPLKKMTGFNAFWFTHHLFVIVYALLVVHGICLYLSRKWYKKTTWMYLAVPVLLYVSERILRLFRSHDAVRIQKVAVYPGNVLALYMSKPPGFRYRSGQYIFINCRAVSPYEWHPFSITSAPGDDYLSVHIRTRGDWTSRLRTIFSEPCRPPTDGESGLLRADLSKGITESSARFPKLLIDGPYGAPAQDYREYDVLLLIGLGIGATPLISIVKDVLNHTQHGGSVSGTEPEGSGKAKKRPFMTKRAYFYWVTREEGSFEWFRGVMNEVAEKDKDGVIELHNHCSSVYEEGDARSALIVMLQELQHAKKGVDILSGTSVKTHFARPNWRSVFKHVAVNHENQRVGVFYCGEPVLVPQLRQWSADFTHKTNTKFEFHKENF

SEQ ID NO: 80216 - protein, 80 aa, Zea mays
  Coding DNA Sequence Number=SeqID_36841
TETLHQGSLLVQVTRPVLELALRCKVSECPASCVKDACALSHLGYPRNIPIKRARAAKASSEGWRLRLRPNICPPRDQFD

SEQ ID NO: 80217 - protein, 213 aa, Zea mays
  Coding DNA Sequence Number=SeqID_36842
MEARINRAIAISCENPVYVTTHPRWITLHRRASSNIWRPPFVLRKNHPRWHPRKLARKADEAAKAALLATKKGKALALTNTTHQEATEDDALYTCGPEGQPQPPLGFAPPEGADLTEDGDVLGVSTEEQLQPRALRIKNRNLQRQKEILEAKRQRVSALAKVRQMIRDEEQKAQDLEQEIALMQREGHLGLQHGPPLQQRAQLEDICEGHLGL

SEQ ID NO: 80218 - protein, 76 aa, Zea mays
  Coding DNA Sequence Number=SeqID_36843
MVKKLEKGTTEACTKSLEENDKDLRIAKRRKQKKRINTSSKSLNHASIKGNIQDEQATMDSEVQQVEIAEQELIEG

SEQ ID NO: 80219 - protein, 99 aa, Zea mays
  Coding DNA Sequence Number=SeqID_36844
MALGVCGSLCQVWVRPLGRSGYEIDGFGYDYGAGKWYSFRLERVVSIATTAQAKMKLWKETSRSSKTTTSSRRGLAATPSRLPVKAAVIYVSFSHFDLL

SEQ ID NO: 80220 - protein, 153 aa, Zea mays
  Coding DNA Sequence Number=SeqID_36845
MYGALELAVLGRASIERGGTWGVGMEQGSRGLPRGCSPWEEQRARGHGGEKKGHRGKLLQGNPTMDSEGRAAEGVHGRGLGFPALEESLHVSKEGGHARRGEGEAGARVQGAEEQGARARRRIGRVLGCSAAMGGGEQSCCSAMGERGRWGRG

SEQ ID NO: 80221 - protein, 81 aa, Zea mays
  Coding DNA Sequence Number=SeqID_36846
MPKLGAIALGPYKLSVPSTPLENEEEVTVEEEETAPSTENPPAGNCFYFDICGTEPDSPTTQGKPRCICHLLTVLNSLSLE

SEQ ID NO: 80222 - protein, 147 aa, Zea mays
  Coding DNA Sequence Number=SeqID_36847
MAVGVSEALYAKAVMSSSLMTWEVPSQQGPCAGGRAHRGRDGRAQGAEGSRSEDLGTAARRGQGGRAQGRRGSRARGGQDGRAAEVRTAAPKGAASLEGQDGRAPGAVSPDHAQERGGRGRTQGIGERGGRGRERERERGGELTSGI

SEQ ID NO: 80223 - protein, 38 aa, Zea mays
  Coding DNA Sequence Number=SeqID_36848
MARAVWGRVMLLLGAGKSPSLRDGEAELGEGSRWKNGG

SEQ ID NO: 80224 - protein, 333 aa, Zea mays
  Coding DNA Sequence Number=SeqID_36849
  Subcellular localization annotation: CTP_CleavageSite=30; ConfidenceScore=5.12e-01
MAEFPGSTPTPYSPPWPALELHSSPWRHPPCSFPSTSPWRWRLLPARHALLARAGDPRPSLSHPWGSGSSLGAFPLCNSRGNSALWPRLGPAAVGPDRHLGTRSPLCMSSSSRDARPRSHVDLAASRPRRARRNAAVSSSSDALRCVALARSGYPPSTCAAPSSSLFTPKRNPVFCVEKKASRLTLVDGAGYATPPQYAVQLFEEHRVPRCRVRMTLKPHPLQPGWRSLDLKSFGFRADDSIESMALHVLTTFCGFHPLELSTHPIGLFPAEKEDDPMWKDRVEHAKDVTGLVESTKITLDNREDLVVDLSTELVEKDLQVEQMANQIQELEN

SEQ ID NO: 80225 - protein, 87 aa, Zea mays
  Coding DNA Sequence Number=SeqID_36850
MAGLGCQGRGESRGRHGKLQVGGTRERGAMGGSSARAGARPILRGGGRKGGSSLRCREGRRRVRCCREEERDREKRKWWLGESEGWE

SEQ ID NO: 80226 - protein, 144 aa, Zea mays
  Coding DNA Sequence Number=SeqID_36851
MPPIGVMKRIKKNDYRVIQDGKDTSHDGCSIRNVSQCGEVQPALPHLYPLSLTLVLICILPLPLLVLGIIFGIMSGAATTETPVVIALTILDIAEVPDLSASGDNSDLAEDDLCDPTTTSKPEAPMQPLNQLPVVTDLADARSA

SEQ ID NO: 80227 - protein, 98 aa, Zea mays
  Coding DNA Sequence Number=SeqID_36852
MGGAESSRPWGEKKGRRRKLLQGSPTMDNEGRAAEGVHGRRLGFPALEESLHSLARRSREGVAPWLAEGRSSCALEEEEEGACAHRLKEKRGRDGCGG

SEQ ID NO: 80228 - protein, 842 aa, Zea mays
  Coding DNA Sequence Number=SeqID_36853
  Gene Ontology: Mol. function=oxidoreductase activity; Cellular component=integral to membrane; Biological process=electron transport
  Homolog annotation: Hit_ID=A3BUB0; Match level="QueryCoverage=97%, HitCoverage=93%, E-value=0.0, Identity=74%"; Hit description =Putative uncharacterized protein
  Pfam annotation: Domain name=FAD_binding_8; Domain location=530-654; Score=167.2; E_value=4.4e-47; Accession=PF08022.3; Description=FAD -binding domain
  Pfam annotation: Domain name=Ferric_reduct; Domain location=332-489; Score=145.1; E_value=2e-40; Accession=PF01794.10; Description=Ferric reductase like transmembrane component
  Pfam annotation: Domain name=NADPH_Ox; Domain location=52-152; Score =200.2; E_value=4.9e-57; Accession=PF08414.1; Description=Respiratory burst NADPH oxidase
  Pfam annotation: Domain name=NAD_binding_6; Domain location=660-825; Score=240.9; E_value=2.8e-69; Accession=PF08030.3; Description =Ferric reductase NAD binding domain
  Pfam annotation: Domain name=efhand; Domain location=153-181; Score =26.5; E_value=9.6e-05; Accession=PF00036.23; Description=EF hand
  Pfam annotation: Domain name=efhand; Domain location=197-223; Score =0.6; E_value=16; Accession=PF00036.23; Description=EF hand
  Pfam module annotation: Pfam domain module=FAD_binding_8::Ferric _reduct::NADPH_Ox::NAD_binding_6::efhand::efhand; Domain location=530- 654::332-489::52-152::660-825::153-181::197-223
  Subcellular localization annotation: CTP_CleavageSite=43; ConfidenceScore=5.32e-01
MTSSAGYADGGTGGLGDGDPPVPPLRKQPSRIASGMRRLASKVSAAVPEMRGLKRTHSGTQSGLRGLRFLDKTSAGKDGWKSVEKRFDEMNTEGRLQRENFAKCIGMADSNEFASEVFVALARRTHINPDDGVTKEQLKQFWEEMTDQNFDSRLRIFFDMCDKNGDGKLTEDEVKEVIVLSASANKLAKLKKHAATYASLIMEELDPDHRGYIEVHLALFACLSRSSILTEDRKQIWQLETLLRGMVTASAPPEKMNMASASLARTMVPSSHRSPLQRRINKAVDFVHENWKRIWVLSLWGVLCIALFVFKFIQYRRRAVFEVMGYCVCIAKGAAETLKLNMALILLPVCRNTLTRLRSTALSKVVPFDDNINFHKVIALAIAIGSATHTLAHVLCDFPRLVACPKDKFMEKLGPFFNYVQPTWPTLLASIPGWTGILLILIMSFSFTLATHSFRRSVVKLPSPLHHLAGFNAFWYAHHLLVIAYVLLVMHSYFIFLTKQWYKRTTWMYLAVPVVFYASERSIRKIREQSYRVSIIKAAIYPGNVLSLYMTKPPGFKYKSGMYMFVKCPDVSPFEWHPFSITSAPGDDYLSVHIRTLGDWTSELRNLFGKACEAEVTSKKATLARLETTVVAHGLAEDTRFPKVFIDGPYGAPAQNYRKYDILLLIGLGIGATPFISILKDLLNNIKSNEEMHDAELGCSLKTNGPGRAYFYWVTREQGSFEWFKGVMNDVAESDRDDVIEMHNYLTSVYEEGDARSALIAMVQSLQHAKNGVDIVSGSKIRTHFARPNWRKVFSDLANAHKNSRIGVFYCGSPTLTKTLRDLSIEFSSTTTTRFHFHKENF

SEQ ID NO: 80229 - protein, 315 aa, Zea mays
  Coding DNA Sequence Number=SeqID_36854
  Subcellular localization annotation: CTP_CleavageSite=82; ConfidenceScore=5.11e-01
MSPLHLALCGAFGSYASVALSPARLTVKIVARNTMIDKITVSWWSPKELQAKTLSSSRLVKVVTRMMVMIMLMVMVVHVATTAQEKMKLWRRTSRSSKSTMSSRRGLAAPPAPPLGVPAAGVATGGDPDDGGDDSSSSHTTDLSEEQERQGWVARRITHDAACMCHFHDALDTLLRQALDQHTWSIEYRCVVFQHSRGVYPDRWEATCLLAVRRTVSGVWSIGGVVVSPVGEDNPRLSSTVNLAAMLNTELDHALHELSRARAEIVQLRAERAEHRHLEDGSPAPIGTQHPYHSPRHGHHAYGNPDRLTRINLEP

SEQ ID NO: 80230 - protein, 61 aa, Zea mays
  Coding DNA Sequence Number=SeqID_36855
MAGGIKLAGAKGKWLAGEGNLARLSYLDLLALSLEKQRTQMILEKRSEIQKFRNLNFSKGS

SEQ ID NO: 80231 - protein, 304 aa, Zea mays
  Coding DNA Sequence Number=SeqID_36856
MALSREGCSHYQGFDRSDEDFGRKIFKVEDPVVKDAARALFDRMWGPHGREAVRERADRARDQMARAEDVEDFGHLNSALPEADVNLVVAEAEVDPAPLPKTGEGSHAAPASTVSGGGSLPATVPMAEDPPKAPMEPAAEDPVAATRSSQDFGPAHATATANFVAASTVVAGNESNESTSKFSEFDDSGSSVVWTEESSDEGLDYFAALDVAEAEASPRVTDAEVLPGPSVGRRRRRAVAKRRVSELDGGRLRVGRTGRQELLSSLVGASIGEGELHSLFEGEELRIMLFNYREMGIIPKVEPM

SEQ ID NO: 80232 - protein, 160 aa, Zea mays
  Coding DNA Sequence Number=SeqID_36857
MAPGEAVELGGWHSNSLAADNAPGAALDGVWDVCAVVCYCTMCTVAVPDTGRLGARGVEEAASSSTRKSSKISAVCIALACSGSFPGNVRVMMIVALAAVRTCRLPREWTGMPPAVWSGHRLPAQGILNVEVAHPCQWSEQGTLNAEAAHRLSGGASSSQ

SEQ ID NO: 80233 - protein, 538 aa, Zea mays
  Coding DNA Sequence Number=SeqID_36858
MVALAKYVWATTSYDGQPSVEVFAKHYCLHWQKRRIGHKIAQFESCTFTPKSGKTSMEVVELVPYARNKWGNWWDYWFYVSEAEVEDHPGLPAAIMVWGVALGAWMDAGRSMPSLGGRKVRSPLFALDVRRRDPVAVVREAEDGAMRIVGRYMPRTEAQRSWDIRGSNDRLNRVFELNGLSYGGYPGVDVVDRRGKTSSIDGDMRGPRGKDVFARAPGVFGVDAGGYRGSMAQERSYPRAAGKDFFTSRMARDLRVFPYGRNIAVVVSAVMNKDRQDAAQKRRAVVRLPEARPKRARGSAKAAVPGCSQPSLAAKPVAPGSGKLQESMKAASAGGTKSAPEGAAKVREQPSPGKRVADFGTNISVDNYLVGWRFQRWRRGFGGHCRQGGGGHCVPPAAGGIAAADIAAESSKLRYASLCAAFMAADFADRVASGALTADVAAEVERLRAQHADAVREKSAAESKSRRLAEKVAALEGKRMDLWCQLVEERREANQAITKAQTAQAEAKLARAEESLASPARRGMGGAFQRSAGPHGEG

SEQ ID NO: 80234 - protein, 111 aa, Zea mays
  Coding DNA Sequence Number=SeqID_36859
MVDLDSSEDLFLLISFIVEVNFLLGSDLGTIGRGVRCHYLSWDNNCGYMGYVRIPVRLNRGGYATIGWLRPHSGSQPFTSVVSKVLANPGNMGYTTCGYRVQPLQSVKLVY

SEQ ID NO: 80235 - protein, 139 aa, Zea mays
  Coding DNA Sequence Number=SeqID_36860
MAHESREEEDDDEAYKYNSGVHSASHSVEAQPPPNEEPSRRLRFLLLLYAMCLDEACAADNSHLCAPLPLRTLLHLTGCLLSLWAPGSNTGMLAPSGGFEDAACDTLGAFTSVSLQGRGLAGTLLSPSQFSVPTFQCSC

SEQ ID NO: 80236 - protein, 506 aa, Zea mays
  Coding DNA Sequence Number=SeqID_36861
  Gene Ontology: Mol. function=diacylglycerol kinase activity; Cellular component=nucleus; Biological process=activation of protein kinase C
  Homolog annotation: Hit_ID=A2XLR7; Match level="QueryCoverage=73%, HitCoverage=45%, E-value=1e-148, Identity=71%"; Hit description =Putative uncharacterized protein
  Pfam annotation: Domain name=BTAD; Domain location=102-219; Score= -31.1; E_value=0.094; Accession=PF03704.8; Description=Bacterial transcriptional activator domain
  Pfam annotation: Domain name=PPR; Domain location=172-206; Score =13.7; E_value=0.19; Accession=PF01535.11; Description=PPR repeat
  Pfam annotation: Domain name=PPR; Domain location=276-310; Score =17.0; E_value=0.071; Accession=PF01535.11; Description=PPR repeat
  Pfam annotation: Domain name=PPR; Domain location=312-346; Score=7.3; E_value=1.1; Accession=PF01535.11; Description=PPR repeat
  Pfam annotation: Domain name=PPR; Domain location=380-414; Score =13.0; E_value=0.23; Accession=PF01535.11; Description=PPR repeat
  Pfam module annotation: Pfam domain module=BTAD::PPR::PPR::PPR::PPR; Domain location=102-219::172-206::276-310::312-346::380-414
  Subcellular localization annotation: CTP_CleavageSite=66; ConfidenceScore=5.07e-01
MRPYIPKPTFAFCHSLLASRLLPSAASPTAPLLPIQALLVTAGLLPRHPDLALLALNSLLHALSRRAARPAHPRLALRLLRLMLSPATPPALPAPDHLSFPFALSAAAALDANPSSSAAAGTAPGPQLHALLVRNALFPADHYVTTALLQLYSPRPDLARRVFDELPRREAIHYDLLIGSYARAGAPAEGLSVFRTMLDDDGVTPDAVVLTTAVAACAQAGALDLGAWVHRYVERAAPGLLADAFLGSALIGMYAKCGCLEEAVRVFDGMPERNAYVWATMVGALAVHGMAAEAVACLERMAREDGVRPDGVAVLGALSACAHAGDVEEGLRLLGEMRPRYGVVPGHEHYSCAVDMLCRVGRLEDAVGLVKIMPMAPLASVWGSVLAGCRSHGNVELAEVAARELERLGGSADEGVYVQLSNIYLDANRKDDARRVRKLIGGRGIKKLPAYSALEVDGEVSSFVADDQAHPRRFEIWEVLRLLADQMAQKPNEEESVELICVLAGM

SEQ ID NO: 80237 - protein, 215 aa, Zea mays
  Coding DNA Sequence Number=SeqID_36862
  Gene Ontology: Mol. function=protein binding; Cellular component =mitochondrion; Biological process=tRNA splicing
  Homolog annotation: Hit_ID=A5BVM7; Match level="QueryCoverage=37%, HitCoverage=5%, E-value=1e-23, Identity=68%"; Hit description =Putative uncharacterized protein
  Pfam annotation: Domain name=DUF292; Domain location=142-215; Score =53.3; E_value=8.4e-13; Accession=PF03398.5; Description=Eukaryotic protein of unknown function, DUF292
  Pfam annotation: Domain name=PTS_2-RNA; Domain location=29-184; Score= -61.6; E_value=0.039; Accession=PF01885.7; Description=RNA 2' -phosphotransferase, Tpt1  KptA family
  Pfam module annotation: Pfam domain module=DUF292::PTS_2-RNA; Domain location=142-215::29-184
MPARSVSRSTHTEWPVFKVILVLSSWLNETINVWMFMHLLGFMLFFDLTLVHLGQYFTKAVRRDNKQRFSLLEEDGELLIRANQGHTVICYLSNSGQLPYKWSVEIDFCCSRTDAEGWGNLPNICFIFFFLRWFPNKTSLRMAVARIKLLRNRKEVQVHQMRHEVAQLLEANQDMTARIRVEHVIREEKFMQAYDLIEVYYELIVARLSIIDSQK

SEQ ID NO: 80238 - protein, 181 aa, Zea mays
  Coding DNA Sequence Number=SeqID_36863
MELGGWHSNSLAADNAPGAALDGVRDGCAVVRYRAACIAAVLGTGRLGTRGVGEAASSSTRKSSKVLVRLRPLAYVSGSRPRGSIGSPPERGAEANETPHSGVRDPYRGPGSCTWESWTLPGGPVRIYRGPALPMGVRTYWRYLGGYRLLWPCGGPGAARVAGSGAACHATRDSHVDSSPS

SEQ ID NO: 80239 - protein, 199 aa, Zea mays
  Coding DNA Sequence Number=SeqID_36864
  Pfam annotation: Domain name=Transposase_28; Domain location=1-160; Score=-56.0; E_value=0.018; Accession=PF04195.3; Description =Putative gypsy type transposon
MALLDPPECFQSEVELDLVHNLLRWGAPAFAGRIRVGASPQGDLAAGEFVLFVSNLSYGLALPISSFFVLLLEELGLQPQLFTPCFILQAAIIAYLCKMSMGATLLPLAFGGMGVAQRPFRGGRRAELWLHLSRELHQHPMVGSELSCDSISLALIALVPAPTVTAGPATYTEDATQEVVQDVAEMAAARFQRDPTDVE

SEQ ID NO: 80240 - protein, 145 aa, Zea mays
  Coding DNA Sequence Number=SeqID_36865
  Subcellular localization annotation: CTP_CleavageSite=37; ConfidenceScore=5.40e-01
MRGANHRASSSPSKAADQPLTRGPRPTSHPPLASVSVCEEGESPREEQAAARGSTSLHLRQNQQPSLWHGGLGPRVILPGHRFLGAEKSNRRSRQYRVSSGPQQKTEKVNFQNQCSGIEAPRAWPSKTIKCGGHGSVSRGDRRDS

SEQ ID NO: 80241 - protein, 215 aa, Zea mays
  Coding DNA Sequence Number=SeqID_36866
MTNPRWLTAAHSVSSDNDLRSGWPNSSSDDLRADAAATRLLFASPRGGREPDIKAKEPEVGPRVALTVSSAENLSPAATTSAPTVASTCPPTPHQRAPAAQSAPAGPHSRPHHENENGTVPEHEYCPRGVRRVVRPPGAAGHNRPDRGWNAAPWLGSSSSPSPAWLEDGFHPQMPEKEAGHQPTRRRRGLSLHRRAQRSSPYDTGAGSHAACELA

SEQ ID NO: 80242 - protein, 559 aa, Zea mays
  Coding DNA Sequence Number=SeqID_36867
  Homolog annotation: Hit_ID=Q6J9V9; Match level="QueryCoverage=19%, HitCoverage=39%, E-value=3e-07, Identity=39%"; Hit description =Putative uncharacterized protein
  Subcellular localization annotation: CTP_CleavageSite=48; ConfidenceScore=5.00e-01
MQAACNCTKGMHPFDFDASSVAAQAHTSCNWRDSYFVQKLHRHLRQCRAFSTAEPVPRFEATLRMDQQCRPSTSVTGSRPLLEQQESPLPWREDDAPVFRSSNGSRMHNGCPANHSSHRINSTAGQATPLAGTGKGDTPKGILLCEGSEPRALLLIRGSKAGPSEGLAPRKGSTAASGHSGSTPTTDQGFEVWPPEGFDSRLRTRRARDDSGGSRAALTNPAPAKPLTASTYQPENSEPDYAPGLRPLVNTINTKLQRPDGRNTGQSSVHSRDTISPRPSPASDRNSRPRWIHASPEGLLKQRAHLRLARGPARVGFTVKQPWLDRLTNRPYRRSIQCKDRLTPYPDVRSSVDKAEPPSPASGAIGSSASPDPRARPPPRPQTTVSASPDPRAQTQPRPRKTVSASPNPRARTQPRPRRSHRLARPWARTDHVTGAHLSVIPNLSPTISPPWTLPHPHVLRPRPRPHAPFEPRALLAHPSSLICALCPTLSLCPRVQGAPPLPTDVRCPFCGHRRAHASSFALSALTEAIFACREPRHRRLSSPCASVVASRLQRFCSR

SEQ ID NO: 80243 - protein, 63 aa, Zea mays
  Coding DNA Sequence Number=SeqID_36868
MRAPTLVSLACRLCSTAVWDHTVRPGELLPERPEFLTVPGVPPQIRTAPWTASAAPPFLELEL

SEQ ID NO: 80244 - protein, 213 aa, Zea mays
  Coding DNA Sequence Number=SeqID_36869
MPGKANCCYPARVQHSILCPGDCGQPHQGVSQHVVRHEGSTRVLGRSHSRFHGEDGSEDLPVDATVGAEVVAAGERFSADETVSATRGPTSGSLALMSGSRPPRGDANKSLVAAASALRSSLLLFGHPERRSLSLLTEWAAVTSEVSVSRRRRSPLARSALPLKASLAQLRNPRLLCDEPEPEAAVLAWTEAGSAREQASSAQEQGASQAEEA

SEQ ID NO: 80245 - protein, 327 aa, Zea mays
  Coding DNA Sequence Number=SeqID_36870
  Gene Ontology: Mol. function=RNA-directed DNA polymerase activity; Biological process=RNA-dependent DNA replication
  Homolog annotation: Hit_ID=A3BQI5; Match level="QueryCoverage=67%, HitCoverage=21%, E-value=3e-19, Identity=30%"; Hit description =Putative uncharacterized protein
MAYCCDDGCNCPPDCGCPCDCCNLYPEVETAAASGILAAPTTKASAGGCNTCKVEPKKFEVLNQLSSGSVSAEVPAHLSALEQRVPATNEGLLDACLPARSMRPSCVLAFTTEMTREEAALRKALFVSVVGTRPEVQGVEVLEEVALSFGIDVAAMAIHQAMPEDFLLFLPDEDTVSRVYGGGRLFRGPRFNLHFKRWTRCAHASTATLPALVDVKIRGIPPHAWARSTAEHLLHGSCLISELHPATVEKSDLSSFMLRAWCFNPVLLHRDMDLLIVEPGPAATEIRCLSYKISIEAFPVDFSATGGTLSLPHRWTATLPAATMASL

SEQ ID NO: 80246 - protein, 302 aa, Zea mays
  Coding DNA Sequence Number=SeqID_36871
MARRETRQRRGRFSVWAQGIYGPTSQDQKEEANEPRPSQKEANEPSFFEICAAKHVALIKTSLYRRYFAGRCSQFFSVLKGSRRREMHHVRVRGLFRFHPYLCVGPLEQRDATSPHEGPHQAAGSLELVHGQAPPLKYYSRRRIRSQHQVQDEFDPRSDYSNNSQALVQQGITPVQSFVASVTKPISCILPHPPPQKRRSAQLPPDFVPRHSSRLASKGSKSSKDAPIRHIQQDLIRRLGIASGNEVVSTEAHDKYGRFFSNPLSESHIKALVALFGWTVPENVENLETIQLLAGDAPTDFI

SEQ ID NO: 80247 - protein, 132 aa, Zea mays
  Coding DNA Sequence Number=SeqID_36872
MDYPGKKLNVMLQPLIEELKDLWKESKHMMAAGTGGTKSASAGSVKARELPLSGKRVADFGTDISVDDYLTGSGEGQLVVVPPAVVPTVPPAVPGRGVALSVLVVRFRRSLPSRTRRTNVPPAEGGVAAAKS

SEQ ID NO: 80248 - protein, 131 aa, Zea mays
  Coding DNA Sequence Number=SeqID_36873
  Gene Ontology: Mol. function=triacylglycerol lipase activity; Biological process=lipid metabolic process
  Homolog annotation: Hit_ID=Q2R077; Match level="QueryCoverage=40%, HitCoverage=14%, E-value=4e-19, Identity=79%"; Hit description =Lipase family protein, expressed
MARRCTVTTSWRGFEFREKCFSFWVIGKAVMLDEIINYVQILQRQIEVHHGFYSAYHNTTLLYEILKSIKWARKMYGNLPINVVGHSMGGDLASFCALDLFLHGLAFTHQEGLEEAMADDGPHRHNLFFAH

SEQ ID NO: 80249 - protein, 344 aa, Zea mays
  Coding DNA Sequence Number=SeqID_36874
  Gene Ontology: Mol. function=helicase activity; Biological process =protein amino acid phosphorylation
  Homolog annotation: Hit_ID=Q1EPC6; Match level="QueryCoverage=74%, HitCoverage=29%, E-value=2e-55, Identity=49%"; Hit description=DNA helicase homolog, putative
  Pfam annotation: Domain name=DUF889; Domain location=139-338; Score= -6.3; E_value=4.7e-11; Accession=PF05970.5; Description=Eukaryotic protein of unknown function (DUF889)
MGKDIKTFHLPTIIDRYDDSHGTDREIYEEESIEPMAEYVATKETLNEEQRSAYDKILSVVDTNNGGVLFVDGPGGTGKTYLYKALLAALCSQYKVVVATATSGVVTSILPGGGLPIRASRYHLLLMTVMLPFGGKSVVFGGDFRQVLPVVRKGSRAQIVAASLRSSYLWESMCHLKRVQNMRAQSDSWFAEYLLRVGGGTEEANNDGDVRLPNEFKRKQFTIRLSFAMTVNKAQGQTIPNVENKSSAPEACKGQCHSDSSASKLLESHMIHDFEVDGCDNFEIGTQFSELINLCMKDSIEGQSNFGAAPMEQNTIDSKRLSLDHEAKCPLCGSDISDLSEELR

SEQ ID NO: 80250 - protein, 151 aa, Zea mays
  Coding DNA Sequence Number=SeqID_36875
MGKSNKRKREPTPPSEDFGDSEYSEEEFSSESEGSPAPVSPPTSSDDSDDSQGIAAEVWTYIRVVERSGLEGSDESEFSSDEEDSDGGEDEDDDDDDGDDDDGGDGDGDGDGSGSGGGSGGGDGSKGSTRGGSSKGSTRGGGGGSSSKASG

SEQ ID NO: 80251 - protein, 272 aa, Zea mays
  Coding DNA Sequence Number=SeqID_36876
MICVLTLFPLHPRDILAPAPRSVNGRRARNPPSPRLLIPSIHALRDSCDRDRHGATECGDLGIVGLALSSGNALSNLFSNQRTKADSIVPEYIGDDKCVWAHGSPRCLLDHVVGTLKKEIGSQMEVRCQTSFCQNEDGFPKLLRACTVRLGIRSQPEYDGCEFVEHGTEKCVMTVYIGSSPHHVEWSVTAAGHIFKDTCQVVARKALRALCQIYEEEVADTCRCFGSDRTPGVAPQGSGRLEMRNTLRPGEYVSVVTRGLYGLKTQRVAVGG

SEQ ID NO: 80252 - protein, 154 aa, Zea mays
  Coding DNA Sequence Number=SeqID_36877
  Homolog annotation: Hit_ID=Q5N7Y3; Match level="QueryCoverage=79%, HitCoverage=31%, E-value=3e-61, Identity=88%"; Hit description =Putative lysine ketoglutarate reductase trans-splicing related 1
  Pfam annotation: Domain name=DUF707; Domain location=1-154; Score =94.3; E_value=3.9e-25; Accession=PF05212.3; Description=Protein of unknown function (DUF707)
MVANLFLIYPRWYAKQFLHPDIVARYDYIFIWDEDLGVEHFNAEAYIKLVRKHGLEISQPGLEPDKGLTWQMTKRRGDQEVHKFVEIMATVFSRDAWRCVWHMIQNDLVHGWGLDFALRKCVEIANVREWLLDFFMNEVIDIGGSCRVEVVSHN

SEQ ID NO: 80253 - protein, 57 aa, Zea mays
  Coding DNA Sequence Number=SeqID_36878
MGSSSLRAERESRLVGGNEIDGFGYDYGTGCQHCNHCSGEDEAVEGDFQEFQDYDEF

SEQ ID NO: 80254 - protein, 1143 aa, Zea mays
  Coding DNA Sequence Number=SeqID_36879
  Gene Ontology: Mol. function=helicase activity; Biological process =viral genome replication
  Homolog annotation: Hit_ID=Q1EPC6; Match level="QueryCoverage=77%, HitCoverage=80%, E-value=0.0, Identity=65%"; Hit description=DNA helicase homolog, putative
  Pfam annotation: Domain name=DUF889; Domain location=588-791; Score =46.5; E_value=1.2e-14; Accession=PF05970.5; Description=Eukaryotic protein of unknown function (DUF889)
MDCGIYTFRAHGMMYHNVRSFGREAGTEHKHLELYFYDDDSSLEHRYNKCRQDHLEKDKAAITQLVEILKGNPYSEHLRYMGHIDNVEDYHIALNLDQTLNQKLYNAPITLENDLAIYVCLYTTITVIDSKFDQDRLDLVVRIFRPKLEELKKRLTKHHILGKIRAYVFVVEFQKRGLPHAHFLLIMQRKYKLTCPDQYDLLIFVEIPNKKKYPQLYKMVIKHMMHGPCGLLNPKYPCTKGRASCKNHYPRDFSDATLQGKDSYPIYRCRDHGSNEKVRGYELDNRWVIPYNPYLLRLFNCHINVEASGSIKAIKYLFKYIYKGHDRASVAVRDANNANGDVDEIKQYRDARWVTPPEAIWRIFSFDLSQNSPRVMQLQLHLENMHMVSFHECAKVNPVVQHPGADRSTLRHILRQIGHTRRLRASFIMTFLSAEGERFYLRLLLNHVTGATSYADLRTIDGDTLPSFREAAQRRGLLEADDTIDECLNEAALYQMPSTLRRLFATILVYCEPNDVAELWQRYLDAMSEDYHRSTQSKPHVQHMVLIDIRNILQSMGKDIKTFHLPAIIDRYDDSHGTDREVYEEETIEPTTKDVAMKETLNEEQSCNNYIWCCGFHIAWGRTTHSHFKIPLTIDDGDDEASMTKRQAIEALDNSMCDVMGRPGLPFGGKTVVFGGGTEKANTDGDVCLPNEMMYHSFDTAVHDPNNNYPLEFLNTLTPNGLPPHVLKLKVGCPIMLLRNIEPANGLCNDTRLVVRGFQKNSIDAEIVLGQLAKMQIFLPRIPLFPSKDEMFPFQFKRKQFLIRLSFAMMVNKAQGQTIPKVGVYLPEPVFSHGQLYVALSRATARSKVKILVIPVTDEMKKKKGVERNSTINGTTYTKNIVYTSFLLFSGHVADTIKKADEHWIDKNNVQYANLVYKEVLTPARSEGVEGHHDSRLIESRLVESDANLEFVTGILGSLTDKQDTEKANGVVSGCGVGFQNGNYHLDALYSELLMSNSKYDPRVCVINEIQEPGLGACNLISQERKVAAGHSACATPENVTVENKSSAPEACKGQCHFDSSASKLLESYMIHDFEVYGCDNFEIGTQLSELINLCMKDSIEGQSNFGAAPMEQNTIDSKRLSSDHEAKCPLCGSDISNLSEEL

SEQ ID NO: 80255 - protein, 147 aa, Zea mays
  Coding DNA Sequence Number=SeqID_36880
  Homolog annotation: Hit_ID=A2ZL18; Match level="QueryCoverage=45%, HitCoverage=6%, E-value=7e-30, Identity=91%"; Hit description =Putative uncharacterized protein
MFDYSPNMIAIFQDVGLWLEEINLGGYKQVFQENSVNGEYLESLSMFTTEQILRFIRRCHMKWGDFITLCKELRRIKELPQTLLDVVRKKNSVVVRLTQYEHLNENKSDQVGYCSKPRSIVTSEVLWRALKGSKKSAGHGGRRHASP

SEQ ID NO: 80256 - protein, 50 aa, Zea mays
  Coding DNA Sequence Number=SeqID_36881
MGLICISSLSTKRDKLDIWLEFPEEEDEIQEVVSEEESALVPAQQVMGAI

SEQ ID NO: 80257 - protein, 161 aa, Zea mays
  Coding DNA Sequence Number=SeqID_36882
  Homolog annotation: Hit_ID=A3BNZ7; Match level="QueryCoverage=70%, HitCoverage=12%, E-value=2e-07, Identity=26%"; Hit description =Putative uncharacterized protein
MTEGAVVGMQQQIIPDVTTNDADEGVHFVENHDEDVLFEEDDDEEDGYLFAGQDGESIEDIEIDETQDAFTVTPDVPNTYDKVYSNIPEETHSLDIVADCVYYKAKKFHMTTNMDCGIYTFRAHGMMYHNGSPYSEHLRCMGHVDNIEDYHIALNLDQTLN

SEQ ID NO: 80258 - protein, 244 aa, Zea mays
  Coding DNA Sequence Number=SeqID_36883
MDLHGRDPAAFVREAEDGAARIVGRYVPKTEGQRSWDICGSNDRLNRVFELNRLPYGGYPGQDDVDRLGKKPAAETEDDPAPAAAPSTKKRKLGTAMGGLGVSDSFAMELMGVTEPPKNVSPVLQTLQNIGDKELRKRLHKLTFIKKAILSIVKSFCKNRVSRKQASEKDFKNIKGGGKCTGACLRSQNREGHERLIAFPMIGGLSVQIGDSRRGNLIGDDGTTVENHGGAVERLGHAAGTEMA

SEQ ID NO: 80259 - protein, 518 aa, Zea mays
  Coding DNA Sequence Number=SeqID_36884
MERAEASTRSEVERTCKQLLDSYHELGARTADFEVPDRESGLRCLEWLQEELLALPTIVEGFMSFASLVTCEGAMNALSREGCCHYEIYKVEDPVVKESAGALFDRMWGPHGREVVRERSDRARGQAARAETVEDFGSLNTARPEAETNPVAVEAEIVPALPPETGEGSLVAPAATASGGGSSPTAVPKAEDPPKTATEPAAEDPTAGWAFAGGLVGVQDFGPAHATATANFVAASTVDAGNELDESASKFSDFGDSGSSVEWTEESSDEDLDYFAALDVATAEASPRAAGAEVVPGPSAGRRRRRVVAKRRECSKSSPDGVASLYALEDAFVLTMKGPSHLGSSLPLDSVRAVRTSTRSPSLNSLGMTAWSRHAFVWAWYLFRACRAKTRSPSMRSFEVGPSTSGTADETVRGDPCFISCGVMASDPYRRRKGVNPCTQSCLAHRPLQFGRYSEAANNVLLEEFLCSLRCYCGYSPRLDPFGKILDNDEGELEVPLSRGQGPDNVQAPALERPCVGD

SEQ ID NO: 80260 - protein, 188 aa, Zea mays
  Coding DNA Sequence Number=SeqID_36885
MAPKKASSKADEAAKAALLAAKKGKALALTHTTHQEATEDDALRKCEDDALRKCEDDALRTCGSEGQPQPPLGFTPPEGADVAEDGEVLGVSAEEQLQLRALRIKNCNLQRQKEILEAKRQCVSAQAKVRQMIRDEEQKAQELEQEIALMQHEGHLGLQHGPPLQQRAQVEDLHFPQRDHAIPHAAAF

SEQ ID NO: 80261 - protein, 71 aa, Zea mays
  Coding DNA Sequence Number=SeqID_36886
MASSWAKLLELLAMDTSSPRIRLLPWPACYVSDQCRCLITPEIHNLVTVTPNLVILVPMISLRSVEYYYVV

SEQ ID NO: 80262 - protein, 42 aa, Zea mays
  Coding DNA Sequence Number=SeqID_36887
MAEARAAMAGGNELAGAKEGWLAGAGFELGIKVNMLDLWLKV

SEQ ID NO: 80263 - protein, 36 aa, Zea mays
  Coding DNA Sequence Number=SeqID_36888
MTKVNALPKIVECLGGDAGNMEDFEEFQDYNEFYLS

SEQ ID NO: 80264 - protein, 244 aa, Zea mays
  Coding DNA Sequence Number=SeqID_36889
  Homolog annotation: Hit_ID=Q6J9V9; Match level="QueryCoverage=38%, HitCoverage=23%, E-value=5e-13, Identity=50%"; Hit description =Putative uncharacterized protein
MQVACNRTTETHPFDFDASSMEAQAHTSSAGGGVTVDMAKSGPAVMAAAGERKQQSNRLEAHVPSRSSRGALSHGAKTTHPCSVSRTARTTAAPRTTRPVSLTSRQGKRHLWQAKRATFHLRHDDRVKKGTEKGDISKGILLREGSGPRALLLIRGSKAGPSEGFRQPPQSTRASGFITDQRFEGWSLGRIRHPPQSTRAPRPLLIRGSKAGPSKGSTAAPEHAERGMTLGTSDTWPRLGIRCR

SEQ ID NO: 80265 - protein, 149 aa, Zea mays
  Coding DNA Sequence Number=SeqID_36890
MPPRTRRTARKHTGPIGVPCHQLAPRHDNSSSGSNDPIGDLEAEVSRLQAELRRRTAIWVVDGDRINELRRDVRHLQDQLADRDLALDWVIQSRSLAWDKEQKAQARVAELNLVVDDLQTYCNTLHEEVHVLYSQLHPNAFQDSRTGQS

SEQ ID NO: 80266 - protein, 95 aa, Zea mays
  Coding DNA Sequence Number=SeqID_36891
MPEGIVEDVDVECSGKELEDMVEGMVEVVVVIEEVMVEVEEVNNCRQLQPKTEEEQKMSGVIHGQSQEDGGAYAQQHHSEPKHQYKNTEEGCLDQ

SEQ ID NO: 80267 - protein, 337 aa, Zea mays
  Coding DNA Sequence Number=SeqID_36892
RVRVCQTKKGGEETVYRRVRQTASAEANVLNAVISSDDIGLSPLGSVLKIRNKDINYSLQHGHNGVIRLHEFLWCLCLEFKQLRAQLLARSPLPSMVEVVTLARTEEIRLRGVLSSSSMVLATPTVSPAPAPTTPAPAAVPLASGCAVVVFCRYYKATTHTIEKCRRRPPRHRGSASTFTASASPQSPPDWALDLTRRMERMEGLYAISSASYMVSSVVARVPQPGPPQALAYLTPSHQDPNPVTASASGSSYGGLWGMDIPQVHTSAKIRLGPHSSRPSEASRYGPGKRNQQKRAGPDVKEAHVRVSSGISANMPGRVCYHARHPEPPVIARAREH

SEQ ID NO: 80268 - protein, 311 aa, Zea mays
  Coding DNA Sequence Number=SeqID_36893
  Gene Ontology: Mol. function=protein binding; Cellular component =protein complex; Biological process=protein catabolic process
  Homolog annotation: Hit_ID=Q9LT08; Match level="QueryCoverage=100%, HitCoverage=100%, E-value=1e-128, Identity=79%"; Hit description=26S proteasome non-ATPase regulatory subunit 14
  Pfam annotation: Domain name=Mov34; Domain location=24-120; Score =73.6; E_value=6.3e-19; Accession=PF01398.12; Description=Mov34MPNPAD- 1 family
MERLQRIFGASGMGQPPTDSPLLDSSEQVYISSLALLKMLKHGRAGVPMEVMGLMLGEFVDDYTVRVVDVFAMPQSGTGVSVEAVDHVFQTNMLDMLKQTGRFHVSLKVIGELILLVVQLTCMFCSYKRKMEESFEALNPRAVAVVIDPIQSVKGKVVIDAFRLINPQTMMLGQEPRQTTSNVGHLNKPSIQALIHGLNRHYYSIAINYRKNELEEKMLLNLHKKKWTDGLILKRFDTHSKTNEQTVQEMLNLAIKYNKAVQEEDELPPEKLAIANVGRQDAKKHLEEHVSNLMSSNIVQTLGTMLDTVVF

SEQ ID NO: 80269 - protein, 114 aa, Zea mays
  Coding DNA Sequence Number=SeqID_36894
  Homolog annotation: Hit_ID=A2WN89; Match level="QueryCoverage=92%, HitCoverage=69%, E-value=8e-47, Identity=75%"; Hit description =Putative uncharacterized protein
  Pfam annotation: Domain name=PLAC8; Domain location=2-92; Score=16.6; E_value=0.00056; Accession=PF04749.8; Description=PLAC8 family
  Subcellular localization annotation: CTP_CleavageSite=62; ConfidenceScore=5.20e-01
MVTGPTKQGCIGAICPCFLFGKNAQFLGSGTLAGSCTTHCMLWGLLTSLCCVFTGGLVLAVPGSAVACYACGYRSALRTKYNLPEYREIRERTGSGSSPAPNVTPPPVQTMDEL

SEQ ID NO: 80270 - protein, 94 aa, Zea mays
  Coding DNA Sequence Number=SeqID_36895
MAITSGIRNRNTIDGTKTKVKIHGSVHRTVIGKTSMIKEVLNVFALREEQGNQAEDACRLPHATHHERKAFFTSSYEIAHRRTEATTRVWTVVL

SEQ ID NO: 80271 - protein, 338 aa, Zea mays
  Coding DNA Sequence Number=SeqID_36896
  Homolog annotation: Hit_ID=Q6QP51; Match level="QueryCoverage=45%, HitCoverage=95%, E-value=5e-13, Identity=32%"; Hit description =Putative growth-regulating factor 1
MTASKKSRLRALGLRAHYWSQVRRLVPRKGLTAASGHSGSAPTTDQGFVGWPPDGFDSRPIACRVRDDSGYVRYITKARAILPRGSRATLANPALAKPLMASTYQPENSEPDYAPGQRPLVTPISTKLQRPDGRNSGQSSVHSRGTISPHLSPASSRNGRPRQICASPEGLGLNPDSEDGLCLARSQGSDSTSTSDDSLRLARPQGSDSTLTLDDGLRLARPQGSGSTSTRKTVSASPGPRARTQPRPRRSHHLARANHATRGAIITLPLASPGYGEQDRRPIWLAPVKQVMMAPRVLHDNDGSQPLTEARRRQQGFDSPDSCASTGLKRSSDGHDAT

SEQ ID NO: 80272 - protein, 440 aa, Zea mays
  Coding DNA Sequence Number=SeqID_36897
  Gene Ontology: Mol. function=catalytic activity; Cellular component =cellular_component; Biological process=biosynthetic process
  Homolog annotation: Hit_ID=Q9SDD7; Match level="QueryCoverage=65%, HitCoverage=96%, E-value=1e-124, Identity=77%"; Hit description =Putative MAWD binding protein
  Pfam annotation: Domain name=PhzC-PhzF; Domain location=149-436; Score=375.1; E_value=1.1e-109; Accession=PF02567.7; Description =Phenazine biosynthesis-like protein
MRWPGDSDAAASREAQSRTRGELKGAGTVAGDLGHRELHDRGILSWERGNHGWSRRGAGRWRPERRAEGRVKLKEPGRSAPSSPQREFGCARVMARRRDGVQTSAPDGVCVGERNGQGRHPVRSGQILLCTPLEERERFFLLSGYLTSSPWSSQVDAFTAEPFKGNPAAVCLLEDAAKAADERWMQSVAAEFNISETAFLLREKSSAAGAVPLFQLRWFTPVAEVELCGHATLASAHFLFTSVLAEHEKLVEFSTKSGILTAKKVPAPQSTGVSGEGKLFIELDFPTIDLVDCHPSELPAIPDTLNGASIVSVHKSTTAGDLIVELSSGKEVADIIPNIHEIEKCSGRGIIVTGPAPAGSGYDFFTRFFCPKFGIDEDPVCGSAHCVLAPYWGGKLGKHKLIAFQASPRSGILYLELEATGRRVRIQGEAVSVMTGTLLA

SEQ ID NO: 80273 - protein, 154 aa, Zea mays
  Coding DNA Sequence Number=SeqID_36898
  Subcellular localization annotation: CTP_CleavageSite=81; ConfidenceScore=5.25e-01
MAQGSVGEAGKMSRGPVGPAAGQLCRGSGLALRALGRGAWGGAHGSARRATRLGERSCSRARAQAERRSGPPRAGSRRECRAQGRAAAQGPLDATPGGTAERVRRGERGWVREERGEDSPGTAVCRDDSFCAIWIWGDLDLGRETRGYVTAVGI

SEQ ID NO: 80274 - protein, 142 aa, Zea mays
  Coding DNA Sequence Number=SeqID_36899
  Gene Ontology: Mol. function=hydrolase activity, hydrolyzing O -glycosyl compounds; Cellular component=chloroplast; Biological process=carbohydrate metabolic process
  Homolog annotation: Hit_ID=B0FLE9; Match level="QueryCoverage=73%, HitCoverage=11%, E-value=6e-45, Identity=81%"; Hit description =Starch branching enzyme III
MEDCYNQYVDKDALIYLILANEMLHRLHPDIVTIAEDATFYPGLCEPTTQGGLGFNYWVNLSIPEMWLWHLENVLEQEWSMNKIIKLLIPSDGSSSPLTASHQQDQEILRGNWQQASAYYLQFTQGSKDEINLLWLKIICWK

SEQ ID NO: 80275 - protein, 145 aa, Zea mays
  Coding DNA Sequence Number=SeqID_36900
  Gene Ontology: Mol. function=unfolded protein binding; Cellular component=mitochondrion; Biological process=protein folding
  Homolog annotation: Hit_ID=A2ZL18; Match level="QueryCoverage=32%, HitCoverage=4%, E-value=3e-14, Identity=85%"; Hit description =Putative uncharacterized protein
MGAPDFCARCARIYCAAGEQWSARGSSAAEEAALSACSAQGCRNQQCCVPQADGWCPYWETHESSAAAVDSTDPPAEKHEYQVEVNRLMVLIVHNLYSNKEVFLRELVRYDSGETGGLLLICILFRNDHSFDGNVFVSLQLAHAT

SEQ ID NO: 80276 - protein, 120 aa, Zea mays
  Coding DNA Sequence Number=SeqID_36901
  Subcellular localization annotation: CTP_CleavageSite=36; ConfidenceScore=5.02e-01
MAAGGPRRLPAPPLTPPMTPNNTADSSWTVDCSCCVTSHDGDIPPLMSRPPSLATPAPATHREQKGWVFDTPSDPLGTAYLCRHHSRPYPFAYSRSEAGRRTMTTLAAVFVRLVIDVKVA

SEQ ID NO: 80277 - protein, 125 aa, Zea mays
  Coding DNA Sequence Number=SeqID_36902
  Gene Ontology: Mol. function=nucleic acid binding; Biological process= mRNA metabolic process
  Homolog annotation: Hit_ID=A3AVD4; Match level="QueryCoverage=52%, HitCoverage=10%, E-value=3e-12, Identity=55%"; Hit description =Putative uncharacterized protein
MGERRGSLLPFIERGRGAGVLHWPSMEALPERNQGEGKGNWCPLMLPLRQGRDTSRENDEDAAPRAVQEHNGKKIKDKEWYVERARKKSETEMELKRRFERILKDVANKATNIKDFTELIYHELG

SEQ ID NO: 80278 - protein, 282 aa, Zea mays
  Coding DNA Sequence Number=SeqID_36903
  Homolog annotation: Hit_ID=A2XFR6; Match level="QueryCoverage=51%, HitCoverage=41%, E-value=2e-27, Identity=46%"; Hit description =Putative uncharacterized protein
MDPGTHMMVRTLQTTRVNTSYAPQPRQIPVYPVVVEEAPADLPPVQVENVINLEDSSEEQLPTPTPLAESLAFAAGSSTSASSAPAFQAPTPGGDDPDDSGDGDDEDDDEDDGEDGHINEEADYAQQDHFMGIGDRGLRTLSAHESLIPLSTYAASVSDAARRTLWSLSHTYRQQLQNTRFRHLPQRLRGESQTNIVLGEPGEDRLNTLAGVVAGLNTDLDSATLDLYSVHLELEIAHARIAALEAQLQGLNPPEAQVPAVALSPPRKRLRYGELGSVTRLL

SEQ ID NO: 80279 - protein, 114 aa, Zea mays
  Coding DNA Sequence Number=SeqID_36904
MAPKRASSKAAPSVDEAAKAALLAEKKGKALADTTHQEACEDDALSKRQHNDQPTPEGTLRTCSSGGQPQAPPGFAPLEGEDTTEDGEVIGVSAEEQLQLRALRIKNRNLQKQK

SEQ ID NO: 80280 - protein, 135 aa, Zea mays
  Coding DNA Sequence Number=SeqID_36905
MATVQKPKDEGNKGNRKIFIDHPVSDGCFALMKNFLPPVELSSVAFALFVKASADDVNNCLHHVALYTREFTTLESTLAVSCLLAFGAATHVDHCEALLSNFGEFLISLPVSDSLQYVHHISGQFFTVYLDMRLI

SEQ ID NO: 80281 - protein, 104 aa, Zea mays
  Coding DNA Sequence Number=SeqID_36906
  Homolog annotation: Hit_ID=Q41865; Match level="QueryCoverage=49%, HitCoverage=5%, E-value=2e-11, Identity=60%"; Hit description =Putative uncharacterized protein
MKYRYNFSNNCYNDTVKLVIDLLSPKHKMLENLYQSKKIVLGLCMNYEKIDGEILQTQLEEERREHIEMEARMRTEWEAEQAAYLVDQQRMVEMFQYMLSLGSA

SEQ ID NO: 80282 - protein, 27 aa, Zea mays
  Coding DNA Sequence Number=SeqID_36907
MGLELTTTRMELGAKIYGAELATTSAP

SEQ ID NO: 80283 - protein, 282 aa, Zea mays
  Coding DNA Sequence Number=SeqID_36908
  Gene Ontology: Mol. function=hydrolase activity, hydrolyzing O -glycosyl compounds; Biological process=carbohydrate metabolic process
  Homolog annotation: Hit_ID=Q9AT30; Match level="QueryCoverage=99%, HitCoverage=91%, E-value=1e-128, Identity=76%"; Hit description =Class III chitinase RCB4
  Pfam annotation: Domain name=Glyco_hydro_18; Domain location=11-263; Score=20.7; E_value=1.9e-08; Accession=PF00704.19; Description =Glycosyl hydrolases family 18
MAANSNLFRDYIGAIFNGVQFSDVPINPDVEFDYILAFVIDYSTETDPPSPTNGQFSIFWQDSVLTPSAVAAIKQSNPNVRVAVSLGGATVNNSPVFFNVTSIDSWVQNAVSSLTTIIQQYNLDGIDIDYEQFQEDPATFAECIGRLVTTLKSNGVIKFASVAPFADADVQSHYQALWSSYGISVVDYINFQFYAYDASTTAEQYVNYFDEQMANYPGGNILASFTTAPTTTSVPVDTALSACQTLQSQGKLYGIFVWAADYSKDQGFKYETQAQALLANST

SEQ ID NO: 80284 - protein, 245 aa, Zea mays
  Coding DNA Sequence Number=SeqID_36909
MRLGVPFIAPRQLRAIGGILGRPKLPSVGWHTGQSGVPPDNHCSCPVRDFLPFLAQPTVATSCWLAHRTVRCPQPTVGAGHASYADLAANRYAGGRWHTGQSGAPPDSPESSTARPSPTAVPPARVRLTAAESKPQAPQEAPPRPTLGLGLRRSLRLARPPGARPPPRPRKVDSASPDPRAQPRPRPRKVVSASPDPRARPQPRPRAESRPRPTPASALGGVSASPDLGLGPTTPQEAHHYPTPS

SEQ ID NO: 80285 - protein, 317 aa, Zea mays
  Coding DNA Sequence Number=SeqID_36910
MELKTRKRHKRGYNQGRIPVPGTGRLGTCGVEEAASSSTRKSTEVSARRLQDGLDAACQRSGQDTLNVERHIVCQWDRHATCLLRSKCRGSVAQMPYVRLRPLAYVTGDSPCGSIGSPSELGVEAHWIKPGHMVFPVPDLAVGGQDLTQRGPDLIQGVRLAHLGVPGRTRRFGLCVQGSDAFLRRSGSTDGTLEYITSSVHMASFGTAHVLGSGVVHRAARATTALPERTRVSAAAATEPHSRSEAPQTTALPPDPDPPSYCGEPMGTGTEEDSSARRCSTTTKSSSGTSCPPCSPSSCTARPRSSATSSFTPSSFR

SEQ ID NO: 80286 - protein, 51 aa, Zea mays
  Coding DNA Sequence Number=SeqID_36911
MAFHLAHNPFKGGIGSINKYEQQTYHPLHGTMIGTDEPIFKYFHGSTQPHI

SEQ ID NO: 80287 - protein, 137 aa, Zea mays
  Coding DNA Sequence Number=SeqID_36912
  Subcellular localization annotation: CTP_CleavageSite=44; ConfidenceScore=5.72e-01
MGGGLLAAASTLRSVLPLFGPPEQKSSLSPLPEQVTARRSSAFRCSAGLPPRSGVVRTCGGGNRSSVGNDISNASVFCSLRLSRPEHDPLSEVVKKHERNPAKKRSFFEEKFDAEGVSPLLAPEGGSGFAEARPTLP

SEQ ID NO: 80288 - protein, 139 aa, Zea mays
  Coding DNA Sequence Number=SeqID_36913
MARIRSTARLTNEGEDTEATETAPISEVMRRSELVVQEGEKIIPEKDDAITEAASDDDEDDEGSLEETENFRGSEAFGSQEAKVLNSRPYRGEVKGEGVEKDAKEEKKFASATGGNEGGQKKRRMMVVMRAIHKTPPRS

SEQ ID NO: 80289 - protein, 137 aa, Zea mays
  Coding DNA Sequence Number=SeqID_36914
MSLQPARPPRAELHLSGLGCGDPHAVDAEARESASASSVLEMESTSTVAVVTDTRTAHPVVGDDAVVVSTEEAAPVVSDHVQTLVQTLVGRGDLSISLRPQRQGRHSGHYYLQVVDRRRMLSTPDRATVLPGQQGGH

SEQ ID NO: 80290 - protein, 255 aa, Zea mays
  Coding DNA Sequence Number=SeqID_36915
  Gene Ontology: Mol. function=oxidoreductase activity; Cellular component=membrane; Biological process=electron transport
  Homolog annotation: Hit_ID=Q336V3; Match level="QueryCoverage=41%, HitCoverage=19%, E-value=7e-34, Identity=71%"; Hit description =Cytochrome P450 family protein, expressed
MMPASCPASLPPASSATRLLPAGVHRRDSTNEERIFIISEDGKVDDVVDRPMDEQIVTAVFVPACIEALLNDGMNAGKTREAVADHQYSEYDNGLKDKDQKILFEDDIDLSLFNCKFDSHITDSPIIDAVYTALKEAELRSTDLWPYWKVDCLCKIIPRQLLAEKAVMLIRNTVDKLIMKRKEIQVEIEQIAGEDYVNEGDSSILRFLLANMSPKIEEPKIQYTLKAIAGSVTAVYGLFVQLMTNSQFACFAQYQ

SEQ ID NO: 80291 - protein, 95 aa, Zea mays
  Coding DNA Sequence Number=SeqID_36916
MESHDLRAERESRLVGKVAMRMMVLVLTLMMMARLRHTARKSVIPFLPSRLAERLLRRPVTGQSSHLERLHHRLHEEQKHRRQEQEQQGSSFSLQ

SEQ ID NO: 80292 - protein, 21 aa, Zea mays
  Coding DNA Sequence Number=SeqID_36917
MAHAGHHHYPSLGLSRLGIGK

SEQ ID NO: 80293 - protein, 253 aa, Zea mays
  Coding DNA Sequence Number=SeqID_36918
  Subcellular localization annotation: CTP_CleavageSite=67; ConfidenceScore=5.23e-01
SGWNSGPRRIHASPEGLLRRQAPPRLSRGLARAGSVVKQPWPYRLTNRPLRRRIKCRGCLTPYPDTRASVGQAELTAVTSPLFFIVRYDRKTASLAPLRLPRQPPRQRLTTSHDQPPSSSLGRNRKLRLARPHAPASGGGLRLARPQAPASGGGLRLARPLDSASTPVSGGIASSPDPGLGLKRSYKEQDRRPIWLTPATGNDGLRRSSDGHAITCAGPKLSPNGYVGMATLREKSFGIIAEKGNRLKDEKAN

SEQ ID NO: 80294 - protein, 322 aa, Zea mays
  Coding DNA Sequence Number=SeqID_36919
  Homolog annotation: Hit_ID=Q6QP51; Match level="QueryCoverage=49%, HitCoverage=90%, E-value=1e-19, Identity=35%"; Hit description =Putative growth-regulating factor 1
MRDRERGYFERDPSQRRKRAPSPPTDQGFEGWPLGRVRQPPQSTQAPSPGRPRALGLRAHYCSGVRRLAPRKGSTAAPEHAESDFVTESHQREASSPRTLSNGSRSGKSPAASGATGSSASPDLRPQPRKEFSASPDPRARPQPRPREESRPRPTSASASGEVSASPDLGLGPTAPQGMHHYPTLASSGYEGTRPASHLARPGLRHFSDGHVIVYTGLKHFSDSHVGMAFLREGGHTGDELTKRLTVSLATLMGQEESTSSSKDITVTYEERKKIMGKKQIESSSSSNICSKRIAKENKELKKEVAHPLSKRQVEVNSTSSR

SEQ ID NO: 80295 - protein, 67 aa, Zea mays
  Coding DNA Sequence Number=SeqID_36920
  Homolog annotation: Hit_ID=Q5XLE2; Match level="QueryCoverage=100%, HitCoverage=100%, E-value=5e-23, Identity=57%"; Hit description =Brain protein 44-like
  Pfam annotation: Domain name=UPF0041; Domain location=1-66; Score =8.8; E_value=3.4e-06; Accession=PF03650.4; Description =Uncharacterised protein family (UPF0041)
MATALKSFLNSPVGPKTTHFWGPVANWGFVIAGLVDMNKPPEMISGNMTAEFDFRRYLEKKEPEAKQ

SEQ ID NO: 80296 - protein, 77 aa, Zea mays
  Coding DNA Sequence Number=SeqID_36921
MSGAPRPYRAELATLGFLQALSAIIHRTVRCANGVTTIQRSGRLQRYSAQQCAGRVRGTSDNEQWMSGVGVRTVRCH

SEQ ID NO: 80297 - protein, 222 aa, Zea mays
  Coding DNA Sequence Number=SeqID_36922
  Gene Ontology: Mol. function=methyltransferase activity; Cellular component=Golgi apparatus
  Homolog annotation: Hit_ID=Q8S7P9; Match level="QueryCoverage=99%, HitCoverage=32%, E-value=1e-105, Identity=80%"; Hit description =Putative uncharacterized protein OSJNBa0095C07.16
  Pfam annotation: Domain name=DUF248; Domain location=1-211; Score =53.3; E_value=5.7e-29; Accession=PF03141.7; Description=Putative methyltransferase
IRKLESCITPPIEAAQLKKFPERLSAIPPRILEGQVPDITEEVYEEDNKLWKKHVNTYKRVNKLIGSSRYRNIMDMNAGLGSFAATLHSSSSWVMNVVPSISERNTLGIIYERGLIGIYHDWCEAFSTYPRTYDLIHGNDIFSLYQNKCDAEDILLEMDRILRPEGAVILRDNADVLNKVRSMVAGMRWKSKLLDHEDGPHVPEKILISVKEYWVGSEEQNS

SEQ ID NO: 80298 - protein, 254 aa, Zea mays
  Coding DNA Sequence Number=SeqID_36923
MKRLAGTPNPRSWKETKLSTYPDGGDGAAPLGGAIHSGCGSLERGQSKPSATRVSRSSIVTVEKGHGSRDGTTRPIALTPRQGRRHLWQAKRATLHLCHNDRVKKVRHAVQFRILFLFPFLSLATGTGKGDTPKGIRAHYWLEVRKAGPSEGFNSRLRPLGLRAHYWSEVRRLAPRKGSTAASGHSGSAPTTDQGFEGCPPKGSTAASEHAERGMTLGQGSVHSRDAIAPHPSPASGRNNRPRQIHASPEGILK

SEQ ID NO: 80299 - protein, 237 aa, Zea mays
  Coding DNA Sequence Number=SeqID_36924
MAQLAFNELLLSSLYQLNLGILCSLLVYSHQHNTYMFTVPWAARNISENSKGLCARIPKTHSTVPMDRGFYCSEPRGFLCKKHCEAVSVDLHRPIEYGAPRLNPLPCEPVLTRGSRIQDLRSRSDEKQAPGSNLSKRYSSSNLRRSIRIRWLRALFPNQDPRMAVPSFTHGGAHAGAHQFRAPTLPAPIALAQNKVEVCANTEGKYSPTNRARSFQVTTSCWFWTELRFGEKSEHHR

SEQ ID NO: 80300 - protein, 226 aa, Zea mays
  Coding DNA Sequence Number=SeqID_36925
MATTQEVDPFLKVTHPTRILRRHGLSLHQRAQRSSPYDTGAGSHASCELARTEEAKPSRAERVTAQRLQALLHLRLTQRVKGRTTMQAACNCTTGMHPFDFNAPSMEAQAHTSCSRPLLGQQESPLPRRKDDAPVFRSSNGSRNGCPANHSSCRINFAAGQAKRATLHLRHNDRVKKGQGSVQGTRSRLARAQPRARIADPGGFTSRPRVSSSNGRTFDSPEAQLG

SEQ ID NO: 80301 - protein, 331 aa, Zea mays
  Coding DNA Sequence Number=SeqID_36926
MGSARVAFVSLWEERNFVEVGTFQPSLGFKDFHQAARLHPLTNGRAEPELYLPYRPAVHLLLQHSGKRALTGLAEGADFNNAGPIGRKRRQLQHAWFAGSAGSGTASGATSHCWVECGYLPAVRAAVAPHAPGDRPRRRALLGRRSCSWVVLPSLWHDASARRSVLARPGGFERGSAGGRVDTAVGVEVVAAGEGLVADEIVGAICAPGLRLFGFDSLSSPLEWGRGRGPCRSSVCLEVIVAAVWPPGAEVVVAAAGVGGGEPPRILSSQRPSNVGGCSYLREWNWSSICNGTLSACVCSLWLSGPEHLGILGAIPCFFLISSTRSRLSAS

SEQ ID NO: 80302 - protein, 54 aa, Zea mays
  Coding DNA Sequence Number=SeqID_36927
MRLLRKCVISLKMTRTKDLNAESFVRTIPTMMMSGTITSWQKLKDMLITSFQGF

SEQ ID NO: 80303 - protein, 205 aa, Zea mays
  Coding DNA Sequence Number=SeqID_36928
MQAACNRTKGAHPFDFDASSMEAQTHTSCNRRAGCYVQETAPPLAPLPCLLDCGTSIATRGNPAHDPTVPTRHIGHGSVSRGRRRDGRYGQKWAGSNGSGRQAEQRSSRQPSSRPLLGQRENPLPRVKTDRWHLWRAKQAALHLRHNDRVKKGTGKGDTPKGILLREGNGPRAPLLIRGSKAGPSEGFNSRLRALGLRAHYWSEV

SEQ ID NO: 80304 - protein, 687 aa, Zea mays
  Coding DNA Sequence Number=SeqID_36929
  Homolog annotation: Hit_ID=Q6QP51; Match level="QueryCoverage=23%, HitCoverage=75%, E-value=5e-12, Identity=35%"; Hit description =Putative growth-regulating factor 1
MACLGLGGRRKHTLQDNPILQARILTVEGSSSTLGINHTFGKGSGSSRRLGRSLRGLGQLSPEDISPARGLGNSIPASVPPVDDPARLWPTKSSFRASSASVRADTATPGFGSSKSGRGVPLTKQEKPWTARPTEPRDSYASGIRIPHSSPLHGATHAWYEQPHTIGGPAEQQKTDGWLARARAGSSDNDPRSGWPNRSSDGLRADAAATLPSPTLALEGRGQGSSALRQIPTQILPDEWSTDLRAEAPYRCKGRTAPEHERRPSSARRLGRSSRARGATTALEAGGGTGSQAGEPNALKLTTPAVDQPRVVEVRPSRRATSAPARMMNILEAEGGTKIAARLASPHPEGWWSPSRGPGKGDTPKRILLREGNRPRASLLIRGSKAGPSEGFNSRLRALGFHAHYWTEVRRPAPRKGSTAASGHSGSTPTTDQGHFAAPLTGLTRGQRRLCRSDCCASRQSEADKARTRAQPRKTTSSAPPDPVLGLGLSPERRQTPLRPTQGSDSGSAPEDDELRSARPQGSDSGSAPEDDELRFARPQGSDSGSAPEDDELCSARPQGSDSGSAPEDDELRFARPQGSDSALTSADGLRLARPRGSDSTSASEDRLDLDLGGASTSPDLGHRPTTSTGGAIITLPQADSGYGEQDQRPIWLAPPDKLQRSSDGHDTTRTGCQNLSGCHDGMYLGR

SEQ ID NO: 80305 - protein, 205 aa, Zea mays
  Coding DNA Sequence Number=SeqID_36930
MANGTNTHGVTVTRHDEGRRTARASWAAASAQQHSCDAQGRGSTANGCYGAKRQCGWACCAQQLGHGAQGLGSPARGRCCYVDVAARRSKARARGVCTPGHRLAACCDSRRQGNSRAQGLLVAKLAGGAAIVAALGADEGLQRHDELTRRGKRENGGELASAAYREALRARIRRRHSAGGKKGERRGGRAHLGGAHDDGRSGARW

SEQ ID NO: 80306 - protein, 301 aa, Zea mays
  Coding DNA Sequence Number=SeqID_36931
MVVIGRLCASTHDAVMNECVAPVSNNTSAIWESTGNIPTIMSGSPKLLQPPSGSVSHDYSAAESGCLLQAETHSASLGHWGLTAAGLPSSDIASPSGLALHSGNMLYFQPELVLPDCSAGLLGQEDEVPVDSASGTDLLLADYSSDSDADAEDTAFETAAAAEVDAGWGPLILHLRSSISLRFLSVMIALSIRCWNVGKHACPWASEASEAEVVAIVAAAAPEWRPESDQWLELPESASGTSARWTSGAGATTVVAGVPHPTELAAPAEHAFLLCACFLTSAECNHTSELILQILQHKKRV

SEQ ID NO: 80307 - protein, 237 aa, Zea mays
  Coding DNA Sequence Number=SeqID_36932
  Subcellular localization annotation: CTP_CleavageSite=81; ConfidenceScore=5.35e-01
MSSRSLMHRVFPPSKPPDGGYPPSFRLIVGGTQLRGSWYLSAIVRLQGFSSASPAVPPPPPRRWSPKTVTTSSWVGRSKPGCDLGPTLSFKDVHHPRWGGGRAEPALYLPHGFVGHPLPRRSRERALTGPAGGPDFDNAGLVDGRRRHLQRVGLVGLAPGGPFCRRAAAAPYSPVDYLNRFTKHESPRVKVTSESGDPWTASPSEVRSDLAEGIVDAEGATAPFQRQDPSMQDQSVL

SEQ ID NO: 80308 - protein, 312 aa, Zea mays
  Coding DNA Sequence Number=SeqID_36933
MCSHYYSAYPPFEVAEEDADEGALRCAAGQRSGRDLVEEFVAYGVWPLAHGWALGEVCPRQMPFHGGRVVRSPAFALNLRNRDPAAFVRDAEDGAVRLVGRYVPRTEGQRSFDIRGSNDRLNRVFELNQLPYDGYPGQDEADRRGKKPAVETGGDPALAAAPSSKKRKLGPRKNDLTIYWALGPLVRSFISLVDPGDIYPPQAPDLWVDLETTPRGLPAEVWTYIRAVKRSGLEGSDESEYSSDEEDSDGGEDKDDDDDDNDDDDGGDGDGDGSGSGGGSSGGDKSKGSTRGGSSKGSTRDGGGGSSSKASG

SEQ ID NO: 80309 - protein, 50 aa, Zea mays
  Coding DNA Sequence Number=SeqID_36934
MLDEAARWDDLVTGLRSMSYGAKATTAKASSEGWRLRLRPNICPLWDQFD

SEQ ID NO: 80310 - protein, 52 aa, Zea mays
  Coding DNA Sequence Number=SeqID_36935
MKRHPDWLWAWPTIGWARKIVELEFKRCLSISCRRDCLSTWAESNKQAARVE

SEQ ID NO: 80311 - protein, 104 aa, Zea mays
  Coding DNA Sequence Number=SeqID_36936
MTVGGGCLSYGAPDSPVYTGHVRGAAVGNSRGCQVPEPRLLGAPDTVRCTPDSPVNYSVLALRNPEAEEFSARPPGAPDTVRCATGQSDAPDQGVFRDAFSSLF

SEQ ID NO: 80312 - protein, 114 aa, Zea mays
  Coding DNA Sequence Number=SeqID_36937
MSPKPLRFDRWSFDFWARLDVRWRTEHALWSVRGAAVGNSRGCQVPEPRLLGAPDTVWCTPDSPVNYSALALRNPEAEEFSARPPGAPDTVRCATGQSGAPDQGVFRDAFSSLF

SEQ ID NO: 80313 - protein, 101 aa, Zea mays
  Coding DNA Sequence Number=SeqID_36938
  Subcellular localization annotation: CTP_CleavageSite=81; ConfidenceScore=5.24e-01
MACALAARLVPTSARPAHVTRALGKDTAHSLSLPLPHIHSPPPSHSPSRFPSLSLHRSTVATGLLPALWPQSEFAAAVILRLPANWSLLVPCQATPSVVSG

SEQ ID NO: 80314 - protein, 22 aa, Zea mays
  Coding DNA Sequence Number=SeqID_36939
MDKKAKGIAINSTEKESFVKEA

SEQ ID NO: 80315 - protein, 152 aa, Zea mays
  Coding DNA Sequence Number=SeqID_36940
MHDVPTNAVKVVEGHTRRVEATTKPDPRDSAAAAAVKYYGEKLLGPVGSPITATPRKHHTERRSPGPEFRWRCGNGDGNHRRRHPLLVLAMVAATWGHDWSGIARGPTIWTPGGQPEELRNGTAQLGGRSAERFRCREDRVGEDDESAKRVP

SEQ ID NO: 80316 - protein, 330 aa, Zea mays
  Coding DNA Sequence Number=SeqID_36941
  Gene Ontology: Mol. function=acid phosphatase activity; Cellular component=extracellular region; Biological process=biological_process
  Homolog annotation: Hit_ID=Q67WU6; Match level="QueryCoverage=77%, HitCoverage=53%, E-value=1e-144, Identity=91%"; Hit description=Acid phosphatase
  Pfam annotation: Domain name=Metallophos; Domain location=42-232; Score=13.9; E_value=0.023; Accession=PF00149.19; Description =Calcineurin-like phosphoesterase
  Subcellular localization annotation: CTP_CleavageSite=44; ConfidenceScore=5.08e-01
MGQLKWSRSSTGGTRERAKASPYALSPKDKKGVGRLTALITMPTTTTTQAKCLPTQRLPCFDLIDPNSFYLCYSRYEHNDGIRWDSWGRFVEHSTAYQPWIWNTGNHEIEYRPDLGETSVFKPYLHRYMTPYLASKSSSPMWYAVRRASAHIIVLSSYSPFVKYTPQWLWLKNEFKRVDREKTPWLIVLMHSPMYNSNEAHYMEGESMRAAFEKWFVKYKVDLVFAGHVHAYERSYRISNVNYNITSGNRYPVPDKSAPVYITVGDGGNQEGLASRFYNPQPDYSAFREASYGHSVLQLKNRTHAIYQWNRNDDGNPVPADTVMFHNQYW

SEQ ID NO: 80317 - protein, 233 aa, Zea mays
  Coding DNA Sequence Number=SeqID_36942
  Gene Ontology: Mol. function=carbohydrate binding; Cellular component= endoplasmic reticulum membrane
  Homolog annotation: Hit_ID=Q67WN6; Match level="QueryCoverage=73%, HitCoverage=80%, E-value=6e-61, Identity=72%"; Hit description =Putative uncharacterized protein P0017B12.6
  Pfam annotation: Domain name=DUF2012; Domain location=6-196; Score =199.7; E_value=7.3e-57; Accession=PF09430.1; Description=Protein of unknown function (DUF2012)
MAASSLCHGHLLLFLLVSVTSACLGTAAAHQAGSGEGYTIAGRVKIDGMSEKGYGLPAKTSNTKVILNGGQRVTFARPDGYFALYPTNDSLPHNVPAGTHLIEVSSIGYFFSPVRVDISARNPGYIQAALTETRRVLNELVLEPLKEEQYYEVREPFSIMSLLKSPMGLMVGFMVLMVFVMPKMMENIGIFHLFYIEWIQAFSYYVSLKLATSKQQLLRAVLHDTMVEFSSIY

SEQ ID NO: 80318 - protein, 115 aa, Zea mays
  Coding DNA Sequence Number=SeqID_36943
MAENLWPLYDELEPEAAVLAWTEAESAQKEASSAQEQVASQAEEVQQRRLELGQVIRERDQPWSHAAEAVSQAEVPGGQLAEATERPTEVSARAGALAETRAVRAQARCWRPPSR

SEQ ID NO: 80319 - protein, 91 aa, Zea mays
  Coding DNA Sequence Number=SeqID_36944
MEVLNLTWRSGLYIQGSDTFLWGSGPTVDTLEYIVFSGHVAAPEPSTWWDWVLFTMRLEIAASSYCMDLDAHYCKSVSNDLHEESIDALNK

SEQ ID NO: 80320 - protein, 128 aa, Zea mays
  Coding DNA Sequence Number=SeqID_36945
MSYPHADDPLVHQDGAVAVRDVICPVGLRPNHWSGLGGGSGGSRVHGGFVSGVTMGDPSVCTDEFFTVTVGPPCVAVGARHHSDHGSESNGRRQQIPLRCGAFAKEPSNFYEISSPSIMVQRVLQSGP

SEQ ID NO: 80321 - protein, 290 aa, Zea mays
  Coding DNA Sequence Number=SeqID_36946
  Gene Ontology: Mol. function=transferase activity, transferring glycosyl groups; Biological process=sucrose metabolic process
  Homolog annotation: Hit_ID=Q6EY62; Match level="QueryCoverage=37%, HitCoverage=9%, E-value=1e-39, Identity=76%"; Hit description =Sucrose-phosphate synthase 9
MIATAGQACGTKTKRRFGLGGTVGSDQDPKSPPNQLSASAAAHSDSGKQIAVAASHDSDSNSLASGGYIMNSDPKYDMRKLRRQIQIERLIPHESKHPLTQAQAAEGNNHSPFPVPCRISFPFLLLSSLYPSPPSPSPPPAPAARPPFASISPAAMYGNDNWINSYLDAILDAGKGVAAAAAGAVRGRGGGWGGDRPSLLLRERGHFSPARYFVEEVITGYDETDLYKTWLRANAMRSPQEKNTRLENMTWRIWNLARKKKEVRLFALGSFLLSLRAASYVPQSSCSSRF

SEQ ID NO: 80322 - protein, 438 aa, Zea mays
  Coding DNA Sequence Number=SeqID_36947
  Homolog annotation: Hit_ID=A7PRZ8; Match level="QueryCoverage=11%, HitCoverage=13%, E-value=3e-07, Identity=60%"; Hit description =Chromosome chr14 scaffold_27, whole genome shotgun sequence
  Pfam annotation: Domain name=IQ; Domain location=169-189; Score=23.3; E_value=0.00091; Accession=PF00612.18; Description=IQ calmodulin -binding motif
  Pfam annotation: Domain name=IQ; Domain location=211-231; Score=27.0; E_value=7.2e-05; Accession=PF00612.18; Description=IQ calmodulin -binding motif
  Pfam module annotation: Pfam domain module=IQ::IQ; Domain location =169-189::211-231
MANRWWAWSGMVVWLVDRWAGLGEARISGLGIPSCQERRTLDSPGLGYVTRSLRPSSPVGVFLLTAGLRERATRAATLEPSLRQRGITSPEKTAILMDRRSMTPGIISRLSSPPPAAHPSPPPAAAPSAAATPSHPPSPTPDAFTRLEEKWDQFVVMFHRYKEKTEKELQATVRLQAAARGFLARRQVQSLRGEKHLAVASRATPWPSSHEQAVVRLQAAVRGFLVRRAVRKLHLLISSSLHQLAACAPNHQVSSILFEPPAEVEIWVCSPPARPQEGRLLHSGNYLGAGQTQHKNELVPPSPFIQREVRSSALPLGSRRTGGHRCSSNLYFSSTIILYFRLKINKAPRAATLEPSLRQRGITSPEKTAIPMDRRSMTVADVPSQESLGLAMSSAFDDYYIKDCDVISAPEVTLRRTDSNDQFVILTTVGVAFVPACL

SEQ ID NO: 80323 - protein, 885 aa, Zea mays
  Coding DNA Sequence Number=SeqID_36948
  Gene Ontology: Mol. function=transferase activity, transferring glycosyl groups; Biological process=sucrose metabolic process
  Homolog annotation: Hit_ID=A2X1Q3; Match level="QueryCoverage=86%, HitCoverage=85%, E-value=0.0, Identity=77%"; Hit description =Putative uncharacterized protein
  Pfam annotation: Domain name=Glycos_transf_1; Domain location=432 -616; Score=60.8; E_value=4.6e-15; Accession=PF00534.11; Description =Glycosyl transferases group 1
MRSPCFTMDSDSGAAALDRVQAAAAPELVVHSGACGHVGLLPEVELALAKLLLIIDERRQRERLLLVVFVLGFHFEKEEAIRLSKHRLETKKPRNDATAEMSEDLFEGVKGEDAGDPSVAYGDSTTGNTPRTSLFDKLYIVLISLHGLIRGENMELGRDSDTGGQVKYVVELAKALSSCPGVYRVDLLTRQILAPNFDRGYGELDELLASTSFKNFRCERGENSGAHIIRIPFGPKDKHLAKENIWPFIQEFVDGALGHIVRMSKTIGEETGSVCPVWPTVIHGHYASAGVAAALLSGALNVPMLFTGHFLGKDKLEELLKQGRQTREQINVTYKIMRRIEAEELSLDASEIIIASTRQEIEEQWNLYDGFEVMLARKLRALVKRGANCYGRYMPRMVIIPPGVEFGQLIHDFDMYGDEDNQSPALDPSIWFEVIMRFFTNPRKPMILAIARPYSEKNIATLVKAFGECHPLRELANLTLIMGNREAISKMNKISAAVLTSVLTLIDEYDLYGQVAYPKLHKHSEVPDIYRLAARTKGAFVNVAYFEQFGVTLIEAAMHGLPVIATKNGAPVEIYQVLENGLLVDPHDQHAIADALYKMLSEKQFWSRCRENGLKNIHQFSWPEHCKNYLSRISSLGPRHPAFACKEDHKVPVKCRKHISIIAVDSVNKEDLIQIIRNSVEATRTGTMSGSTGFVLSTSLTIAELQSVILPPLKELQKLMRIQSLRCHALYNHGATRLSVIPMHASRSQALRYLSIRWGIELPNAVVIVGETGDSDYEELFGGLHKTVILKGGFNTPANRIHTVRRYPLQDVVALDSSNIIGIEGFSTGDIRSAMQQQLVTPGYDINVPNAYAVDHFQHLRNEDSREKPRSETLAIHLESEYGSS

SEQ ID NO: 80324 - protein, 92 aa, Zea mays
  Coding DNA Sequence Number=SeqID_36949
MEPSTPTHRDRATRPPARSSHAEPSAPCPRPKTDRDRAAHRATPCFPDAPCLGPTPYTATPTPTVEDRKLADEDMMLNSMDASLVIPPVIFL

SEQ ID NO: 80325 - protein, 131 aa, Zea mays
  Coding DNA Sequence Number=SeqID_36950
MDPLKPVLRRALRSRFLAVCLIESSSTPLPISRTAQPLLQVRRRADAEGPIAIHRRARIQGCHAIWTYTLDVSWGSSKATRFEAVETKHGCLACRPGRCDKLPADILMGKTSSASIESQLPGILYRLPKLN

SEQ ID NO: 80326 - protein, 139 aa, Zea mays
  Coding DNA Sequence Number=SeqID_36951
  Subcellular localization annotation: CTP_CleavageSite=48; ConfidenceScore=5.16e-01
KTLGNEFLAQWPSIWHSAKKPLCRVLILGPRQRLTAVSFRTAADGPLSSATFVECLTLGKHVFAECVPVPSVLHSVNQLVTESRTLPSAALGKAFFAECPTKGTRQRVWHSAKARIPVVYSSSVRVLLGAFGFRRSSKT

SEQ ID NO: 80327 - protein, 132 aa, Zea mays
  Coding DNA Sequence Number=SeqID_36952
MVNRYFAGEEANTTAAWFLVDEEDRADLKRKEAEAIHVTPKGGVIDVLGVQYQEGEGSGYLAGRPAAGWGQTRSGRRRNAPWGRTTRTDDDDNKTTDDDDEEARTMARERKKPEGSGGSEQNGGVVVVKGSQ

SEQ ID NO: 80328 - protein, 110 aa, Zea mays
  Coding DNA Sequence Number=SeqID_36953
MTNRVFCSSRLQLIYLFYFEKYQLKLLNQVAGKCLNSYSESCFQVRVIGEDPDNGFKPTSGRVESDGNSHVIYAENVGKMIITPTKLRSWLSHTLAFNMSSHVPSWAEKA

SEQ ID NO: 80329 - protein, 623 aa, Zea mays
  Coding DNA Sequence Number=SeqID_36954
MNKRPAFKVPSQTEPRFHLRMYEQPHMIGGPAEQQKTDERLAVARSSSSDDDDFCSGGPNSSSDDLRADAAAIRPSPMPSLERQGRAEGRRVGGQSVGGTGYLVGGETSSGCRGGRRRRKRIRSHSGRRAGHAAAASASNGERPSPRSLREGAGCCPRRDRPQLGALPSPALMMKILEAEGGAEAAARLASPHPGGWWSPSWVTTGEGMQPGCLMKILEAERWLKGTNFHEVAFLQRQGGRIAGVPRPGARKPSQAKSSPTRSKVLPLRRGGWVPRVMQAGPEQKKPNCRARCMQLPSGHEHSSTIAQTSGPTRHATGASVATCEQLHRHSHHYRASSTAELAGGSSGHVVSQAYVPSRDSKETLYHGVKTACPGTGKGGYPEKGSFSTIKGSKAGPSEGFNSRLRALGLRAHYWSEVRRPAPRKGSTAASGHSGSAPTTDQGGNDLVMESHQREASSPRTLSKGDRVRQITRSLGQGLPTPEGFTSRPRTPSSNGHTFGLPKAQSSPRSNLGQIATPTDQIAGAFNAKGSDSGSAPKDDELRFARPQGSDSGSAPEDDELHFARPQGSDSGSAPEDDELCFARPQGSDSGSAQEDDELRFARPQGSDSGSAPEDDELRFARP

SEQ ID NO: 80330 - protein, 279 aa, Zea mays
  Coding DNA Sequence Number=SeqID_36955
  Gene Ontology: Mol. function=triacylglycerol lipase activity; Biological process=lipid metabolic process
  Homolog annotation: Hit_ID=A7QG21; Match level="QueryCoverage=86%, HitCoverage=51%, E-value=8e-98, Identity=69%"; Hit description =Chromosome undetermined scaffold_91, whole genome shotgun sequence
  Pfam annotation: Domain name=Lipase3_N; Domain location=9-79; Score =59.7; E_value=1e-14; Accession=PF03893.7; Description=Lipase 3 N -terminal region
  Pfam annotation: Domain name=Lipase_3; Domain location=112-249; Score= 96.4; E_value=8.8e-26; Accession=PF01764.16; Description=Lipase (class 3)
  Pfam module annotation: Pfam domain module=Lipase3_N::Lipase_3; Domain location=9-79::112-249
MSLACGLPLLECVYCLACARWAWKRCLHSGEVDSATWGLASADDFEPVPRMCRLVMANYEPDLSPSAPLLFAPPGGYGIDPACVLRRRTYADTRGRVTPYLLYLDHAHADIVLALRGLNLVKESDYALLLDNRLGKRRFDGGYVHNGLLRAAGWVLDAECDLLRELLETYPDYTLTFTGHSLGAGIAAMLTMVVVLNLDKIGNIDRTRTRCYAMAPARCMSLNLAVRYADVINSVVLQVTVTHSGFLIMSTDYSLLVSTILHLYFPMAGRLLAPDGYSS

SEQ ID NO: 80331 - protein, 113 aa, Zea mays
  Coding DNA Sequence Number=SeqID_36956
MALARAYKAPRDLDRTPPHALDLTGAQNHRRLPVHGLPRGRPNPRHRRPANRTLPNPVQPSEKTVHTSVKLPERGIGVCLAGEASPQSPDSTRPSTSVDRPLRHPVKLTVPLD

SEQ ID NO: 80332 - protein, 112 aa, Zea mays
  Coding DNA Sequence Number=SeqID_36957
  Subcellular localization annotation: CTP_CleavageSite=40; ConfidenceScore=5.28e-01
MGKWSCAGTPAGRKMNRALGKIWASRLGAGGSASMGKKAPALAVWGGSMGRRRPWMLLPLRKGSQGEGGAPMGGLLPRWRAAAFQGAEWRTPGGASARWGRRAPCRDAERRE

SEQ ID NO: 80333 - protein, 288 aa, Zea mays
  Coding DNA Sequence Number=SeqID_36958
  Gene Ontology: Mol. function=binding; Cellular component=cellular _component; Biological process=signal transduction
  Homolog annotation: Hit_ID=A7P3U9; Match level="QueryCoverage=34%, HitCoverage=19%, E-value=2e-32, Identity=63%"; Hit description =Chromosome chr1 scaffold_5, whole genome shotgun sequence
  Pfam annotation: Domain name=HEAT; Domain location=119-155; Score =28.2; E_value=3e-05; Accession=PF02985.13; Description=HEAT repeat
  Pfam annotation: Domain name=HEAT; Domain location=170-205; Score =3.0; E_value=9.6; Accession=PF02985.13; Description=HEAT repeat
  Pfam module annotation: Pfam domain module=HEAT::HEAT; Domain location=119-155::170-205
MSRLILSARRVSSSPDFADDQDSPQPPPTLQFVPFIVADHKIIGSVYNPFASMYFGASYLAWLSQYEGREQSYEFIVQVYLGGPENFLLRIIYECSSTFLPNFKSPPKGFGNWQTILLAGQHEQIVPHVLNSFLDQDSRVRYYACEALYNIAKIPMLMFKVQLTFLTGLSSIEEFIPLLRERMNVLNPYVRQFLVGWITVLDSVPDIDMLGFLPDFLDAYNQHPIAHLLILLNIPCVQLPYILPHMLPSEKAFSAAVSALGFYNKDVIVVYDGKGLFSAARVWKSDIT

SEQ ID NO: 80334 - protein, 102 aa, Zea mays
  Coding DNA Sequence Number=SeqID_36959
MPPRIRKTVRKSTGPIGVPRHQLAPRHEDSSSGSNDPIRDLEAQVEQLRTELRHRNDVWVEDQLAERDLALDWAVNSRSLALAKEAKARARVEELSRAVDNL

SEQ ID NO: 80335 - protein, 243 aa, Zea mays
  Coding DNA Sequence Number=SeqID_36960
VLQGAGYTTPPQYTVQLFEKHRVPRCRVRMTLEPHPLQPRWHSLDSESFGYRAEDTIEAIALHGLTTFCGFHPLELSTHPIGLFPAEKEDDPMWKDRVEHAKDVWALYPGQTAHLMVRCMNALYRLQVMRGEAMSQLMALLEATTKITLDIREKLVVDLSTEMVEKDLESTIEVLEDQVINTQQQLDEANQHLDMHHQEIQDMEANEDVDIEGGEEPEPASSLDTTGSGRPPSPESSVASFAH

SEQ ID NO: 80336 - protein, 100 aa, Zea mays
  Coding DNA Sequence Number=SeqID_36961
MTRIRSADARAGATDRLGRLSATRGKGWLTSRAQRQWAKALTGGQTGRSGEPIHGRKTGIGAAEGAEHGEAAYGGAGQLRSTAADSDCTGKTPVNADRTN

SEQ ID NO: 80337 - protein, 95 aa, Zea mays
  Coding DNA Sequence Number=SeqID_36962
MGQRASPMIKEGRRPKSGEDDLGFPVKFCQVRELGKLHKLLAKLSERLARLGSDRSGLATVAEAQVAMAGGRELAGANEATQREVEFKHGLAPNL

SEQ ID NO: 80338 - protein, 118 aa, Zea mays
  Coding DNA Sequence Number=SeqID_36963
  Subcellular localization annotation: CTP_CleavageSite=50; ConfidenceScore=5.23e-01
MAAKWVGLTTMGKWSCAGTAAGRKMNRALGKIWASRLGAGGSASMGKKAPALAVWGGSMGRRRPWMLLPLRKGSQGEGGAPMGGPAPALACCCIPGSRVEDARRCFGTLGKKGALQGC

SEQ ID NO: 80339 - protein, 142 aa, Zea mays
  Coding DNA Sequence Number=SeqID_36964
MGLRFHSRGYEQPPHQGARGITNSKRLAGDLCSRDNDLRLGWLDSSSDGLRANATAEGPSFTSLMEDENQPLKPKSRRPGAQVVPMVSLAGTTAGARGSLTYGGHHLSTDDSGHLPSNTASANSGRPKAHRQVLCNTLNLGV

SEQ ID NO: 80340 - protein, 270 aa, Zea mays
  Coding DNA Sequence Number=SeqID_36965
  Homolog annotation: Hit_ID=Q6J9V9; Match level="QueryCoverage=18%, HitCoverage=17%, E-value=4e-08, Identity=64%"; Hit description =Putative uncharacterized protein
MANTLNTEGGTGITARFASPYPGAGGHRLGGMEGGKMRRMREEEDMTGSEQKKPNRRAWGTQPPSGYKRSSTFAQTNGRERRAAMQAACNRAKWTRFSDSQRAQPGGPGPRVTQPARRMLHASNCTATCATTAPLRLRNQYRDSRRPGTRPSSASLTRRSNGRRFALAETTAPKKGPGKGDPPKGILPREGTRLRASLLIRGSKAGPRRVQQPPQIAWALHPLLVRGSKAGPSKGSTAASGYSGSVPITDQGFEGWPPKGSQSPQTPSEG

SEQ ID NO: 80341 - protein, 148 aa, Zea mays
  Coding DNA Sequence Number=SeqID_36966
MRCTSVALLLLSLEERDLMEIGALQPSLGFKDFRRAARLHSLTNGQFGGEKQVGLRPLPRPQLQGSSLSGLRWGSALGRGGDVLQPCGGKANCCSVAGVQLSFLLPGGGRAARGPATPISSSLRWLHREVAQHVVRREGSTRVLGWPW

SEQ ID NO: 80342 - protein, 263 aa, Zea mays
  Coding DNA Sequence Number=SeqID_36967
MTLSTSDTWLRLGLHSRGTLGHFRDWRERFVMESHRREASSPRTLSKGSGSDESPAGHMRERSDPVEAPRKALRPQRSQTTPPRPRGLHPAGALARTHQNKAKSRKAKTDNKSRSTTEFGIGRNRKLRLARPQAPASGGGLRLARPPDSASTSVSGGIASSPDPGLGLKRSLRLARPWALTNRANRGYIITLSLASLGYKEQDQRPIWLTPATGNDGAPRATMTLVALIPLRQQGDVSRILAALPAMLLQGSGASLTATLSRV

SEQ ID NO: 80343 - protein, 132 aa, Zea mays
  Coding DNA Sequence Number=SeqID_36968
MAGSKDSSEVSTSNIITPTWEALPAEEQLLFEERQEQLIQEAKAKFLADFKVDRNNKDGHNGEEILGVTEVALVLLWSHQSCHEAGHMEERGNNGEQAWVGDERVEVPDERPWVWDQSVVGEGKAAAEREEE

SEQ ID NO: 80344 - protein, 502 aa, Zea mays
  Coding DNA Sequence Number=SeqID_36969
  Gene Ontology: Mol. function=transferase activity; Cellular component= chloroplast; Biological process=metabolic process
  Homolog annotation: Hit_ID=Q5JK52; Match level="QueryCoverage=91%, HitCoverage=99%, E-value=0.0, Identity=72%"; Hit description =Probable NAD kinase 1
  Pfam annotation: Domain name=NAD_kinase; Domain location=242-472; Score=76.3; E_value=9.8e-20; Accession=PF01513.12; Description=ATP -NAD kinase
MSHDELADKEPSSSEEFQLAPTGSKFRSLSPAPIPIPASPGIRSLVDSVSDETVNVDVMASHQSENGSISTASSTVSLLESEKAAYEFLAQTPVRSTDAHLIEFSEALRTVAKALRQVAEGKAAAQAEAAEWKRYSSCISNNLDKLASQLTLETPAPDQLGCCGKHGICAHQVLQDEVPGPIPRSNHKVGGRKAPFKLSWGCNGDKNGQHKHDFVSFEKGDITTAERSNKQILLKWESPPQTVLFITKPNSSSVRVLCAEMVRWLREYKNVNIFVDPRVSKELLTEDSYYNFVQTWDNASEHYRELLDNVLNGPFSITLRNRIQCHVIRDAAKDEIVTEEPFLVLNEVTIDRGISSYLTNLEVYCDSSFVTCVQGDGLIISTTSGSTAYSLAAGGSMVHPQVPGILFTPICPHSLSFRPLILPEYVTLRVQVPYNSRGHAWASFDGKDRKQLSPGDALICSISPWPVPTACLVDSTTDFFRSIHEGLHWNLRKSQSFDGPRD

SEQ ID NO: 80345 - protein, 164 aa, Zea mays
  Coding DNA Sequence Number=SeqID_36970
MSRPVHGLLLPLLFAVCLMIPLKVSECSRPPPSPSSGDDHVHVGRPHHQRQRLLLDAEARTARPPTCRTDVVAGAAGAGAAPPSSASPTTPARGVGAVAASSRPRQTSDADDRALLARSTLARRFLAGADVDVDGTASATDGSRGVSCRSYNPHINCPPAASKP

SEQ ID NO: 80346 - protein, 80 aa, Zea mays
  Coding DNA Sequence Number=SeqID_36971
MLSVTVARAPQLILHAIELGEKLRIDSIWCQSLGSVGHRLNRPNTRKKWKPLKSKYHHLWKHRLRTVSTLIFVDLSLTHP

SEQ ID NO: 80347 - protein, 451 aa, Zea mays
  Coding DNA Sequence Number=SeqID_36972
MESQAVIGTGVRACVGQDRVSGDQWSDVDARGWRLLAAPDRAAASEDTLELLVFWLKRPWPGPTQARHRPDLGGARALGEGGHCPSGKGKGAASSSSAPGGFGRSEGESRHRLRRADGSFVEDPPLDSGLPQKHQKTASRVGEAGSPTQGSQRRVSPPPTSPSVPPSPPQPSSGLPPLPGQQHQQQQQGQQTSCFQGRWKVRGPKASSPSVSKVAPTSESGLQQQASAGVDAGDLPPTATVEAAPSDPQVPTGTAEAVPLGPQAPHWESSNDVVEPPSSGWHCRGSAIGPPGTSRESSSCSTAGVYGRLNGGVPDPIPPPVLEEPEALQETEAAILREWEALETEHQRLGDWCTQLEERTKAVSCQFASERSKLACGHEDLKEDLEKVIEQEREATQEEKRLAQRKERLDQREVVIAEFHEKLKAYNAMLENQRDKQTTIFHEVVYHILIL

SEQ ID NO: 80348 - protein, 178 aa, Zea mays
  Coding DNA Sequence Number=SeqID_36973
  Homolog annotation: Hit_ID=Q5Z9G5; Match level="QueryCoverage=58%, HitCoverage=42%, E-value=1e-14, Identity=43%"; Hit description =Putative uncharacterized protein P0655A07.24
  Pfam annotation: Domain name=Hin1; Domain location=47-178; Score =46.8; E_value=7.8e-11; Accession=PF07320.4; Description=Harpin -induced protein 1 (Hin1)
MLHYYAIIISFHMLLSTLEPWALFNYRKPRPAGGLADVEGVRGGGASASTAPRAPYVAVRAASLYVLVYGQTGALDDVQITVRVEARNGNTHSAAYFSRLECRLAFAGATLAVLRAYPFRVPAKGVLPLAYVARAEGAPLGDAGSVAMEAALRDGVVPFRVEGEARMRWKVAGIVGVD

SEQ ID NO: 80349 - protein, 218 aa, Zea mays
  Coding DNA Sequence Number=SeqID_36974
MARPVRAMLPCILVVVVLLFQTAASSRPLLSTEERRRRPRVDPTASPAPAHRAESRSHHHRAAAETGTGRVAAVETTTTEDDDGSRTTSSSTRAEEGGGAAAAALSSATTTTSARGKQQDDDVVGVGLRNGRPAAALLRSVLARRFLAGVVGGADSAARASCRSSDVHISCTPPAVGALIYARAQDPAAGAAEDSTRSRFARRLRAQQQQVRQKTPRA

SEQ ID NO: 80350 - protein, 428 aa, Zea mays
  Coding DNA Sequence Number=SeqID_36975
  Pfam annotation: Domain name=zf-CCHC; Domain location=29-46; Score =15.5; E_value=0.0069; Accession=PF00098.14; Description=Zinc knuckle
MKNQGCASSKMTLIKENDKQQASCQVERRFCYKCGEQGHISKTTDQAKDGGKKSFEVPSAREKVKEAEEPKAKGEEGGLQSQGGPVSLCGGPDPMMHPGKRVPLIQDTDSGPRDRLRGACEPTVFCDGPEKTWYWRERQCDFSAPSNRPAATSRRWSFTRMITSIMVERSEPGYGLPPPSASRMFIILAGVESEPSWGLAFRMGWRPASSSSIRGRRAFTSHAEEANFGYAGSAGCRRRQLPRVWLLGLDGFGAASGAASCYLVGAWLSVHSTGDGRAVLRRTGARTSSRVLRQPPPTGTVVAAVIGAEVVAAAEVPTAIGAEVVASAGEPLGASYHAALLVWRLDVSRLDTSVSEKIVNNSREATRRDLDLYTASARERPRYGTRLSGYTGSGPPQETNVHSLALDPRLSDQQAEFMGTDPTGLAYT

SEQ ID NO: 80351 - protein, 258 aa, Zea mays
  Coding DNA Sequence Number=SeqID_36976
  Gene Ontology: Mol. function=transposase activity; Biological process= transposition, DNA-mediated
  Homolog annotation: Hit_ID=Q2QRE9; Match level="QueryCoverage=96%, HitCoverage=46%, E-value=3e-15, Identity=27%"; Hit description =Transposon protein, putative, CACTA, En/Spm sub-class
MAELKAKRGSRTYLTWTDAMDLALLEVLVEHHNNGDRGQNGWKPHVYNAAIRNVKDKCNVDITKDNISARCKTFDKHYEIISKILSQSGFGWDWENNRLSMDNEDANKGAACYKTKVVKNWDAICTIYSKDHANGEGAKTGTESGQDVVNDSPTNANENSPVLAPKKQRTGDAIMGVLTDMKASFQEAMQSNAPLELPKKTAPSKILAALQEIPDLPREDMLRSYGMLLSRDDRIFEALMELPMEMRKDWLLFENERK

SEQ ID NO: 80352 - protein, 89 aa, Zea mays
  Coding DNA Sequence Number=SeqID_36977
MCQHQTLTYVGVLPIPGPCCGPDLTWRDLGPTLKALFETRVRSSETTDQAKDGGKKSFEVPSAREKVKEAEEPKAKGEEGGLQSQGWSS

SEQ ID NO: 80353 - protein, 109 aa, Zea mays
  Coding DNA Sequence Number=SeqID_36978
  Gene Ontology: Mol. function=hydrolase activity
  Homolog annotation: Hit_ID=A7P772; Match level="QueryCoverage=48%, HitCoverage=6%, E-value=4e-12, Identity=62%"; Hit description =Chromosome chr9 scaffold_7, whole genome shotgun sequence
MKPGDTAIVYACELLKIKGNFDPSKAVALGLRPGPKYRELRLGDFVQSDQFDEMIKKFRDALAKHRADKCSLGPTWELESELLALAANKDLQGATTGFKHGRLRGGQDR

SEQ ID NO: 80354 - protein, 136 aa, Zea mays
  Coding DNA Sequence Number=SeqID_36979
MGKNNKRKREPTPPSEEFGDSEYSEEEFSSEPEGSPAPVSPPASSDDSDDSQGIAAEVWTYIRAVERAGLEGSDESEYSSDEEDSDGGDEGEDDDDDDGDGSGRGGGDGSRDSTKGSSRGSTKGGGGGRGRGRASG

SEQ ID NO: 80355 - protein, 445 aa, Zea mays
  Coding DNA Sequence Number=SeqID_36980
  Subcellular localization annotation: CTP_CleavageSite=72; ConfidenceScore=5.38e-01
MAAAIAGSPWPPARPRPGAPAWPLAPGRALAAPPATPTPPLAALGRPPGRPGRALAWPLGRLGRLDSPTPLRARLVAGSTAPRAGGNEIDGFGYDYGAGKWYSFRLERMARLRHTARKSVIPFLPSRLAERPLRRPVAGQSSHLERLHHRLREEQERRRQEQQSSSFSLHQEIESVRSCSPVLPLEPPPAPPLGAPASGVAAGGDPDDGDGDDSSSHDTDFSANLEPEGWVARPITRDAARGCHFHDALDTLLRRAFDRHTWSVEYRCVVYQHSRGVYPDRWEATCLVRCPEDSLQGAEACSEHYSISERDSAEAAMQDAARRALSHYCSVFGGAADGLDLKYYPRRPSGSTGGVIVSPVGEGNPRLSSTVNLAAVLNTELDHALDELSRARAEIALLRAERAERRYLDGGSPAPVGTQHPYRSPQRGHQSYGNPDCKTKITLEP

SEQ ID NO: 80356 - protein, 585 aa, Zea mays
  Coding DNA Sequence Number=SeqID_36981
  Gene Ontology: Mol. function=extracellular-glutamate-gated ion channel activity; Cellular component=integral to membrane; Biological process=G-protein coupled receptor protein signaling pathway
  Homolog annotation: Hit_ID=A2X049; Match level="QueryCoverage=96%, HitCoverage=63%, E-value=0.0, Identity=76%"; Hit description =Putative uncharacterized protein
  Pfam annotation: Domain name=ANF_receptor; Domain location=46-407; Score=301.7; E_value=1.4e-87; Accession=PF01094.19; Description =Receptor family ligand binding region
  Subcellular localization annotation: CTP_CleavageSite=52; ConfidenceScore=5.04e-01
MRIAFLVLLVLSLFLLPNGIGKSLAARPSVVNIRSILQLNSTTGGVSDVAIRAAVEDINLDPTVLNGTTLQVQTRDTNCNDGFLGMVQALQFMETDVIAIIRPQCSPIAHIISYVANELQVPLMSFASDATLSSIQFPFFVRTMPSDLYQMAAVAAVIDYYQWKIVTAIYVDDDYGRNGIAALDDELTARRCKISFKIGFRSNAKKSDLLNLLVTVSNMESRVIILHTGSEPGLKLLSLANGLKMMGNSYVWIATDWLFAYLDANSSVSAETINAMQGVLTIRPHTPKSKVKSNLVSKWSSLSKKYYHSDLRTSAYGFYVYDSVWTVARALDAFFEDGGRISFTNDSRLRDETRGTLHLEAMSVFDMGNKLLNKIRNVNFTGVSGQVQFNAQFELIHPAYDIISIIGNGMRIIGFWSNYTRLLSTVLPEDLYSKPPNTSLANQQLYDVIWPGETAQRPRGWAFPSNAKELKISVPNRFSFKDFVSKDNATGSMKGYCIDVFTQALALLPYPVTYRFIPFGNGTENPHYSQLVQMVVDNDFDAVIGDIVITMSRTKAIDFTQPFIESGLGCLFLLSVWLFGFLSIE

SEQ ID NO: 80357 - protein, 400 aa, Zea mays
  Coding DNA Sequence Number=SeqID_36982
  Gene Ontology: Mol. function=structural constituent of ribosome; Cellular component=ribonucleoprotein complex; Biological process =translation
  Homolog annotation: Hit_ID=O48557; Match level="QueryCoverage=24%, HitCoverage=56%, E-value=4e-45, Identity=94%"; Hit description=60S ribosomal protein L17
  Pfam annotation: Domain name=Ribosomal_L22; Domain location=294-400; Score=98.6; E_value=1.9e-26; Accession=PF00237.10; Description =Ribosomal protein L22pL17e
MAIARFVLQEGTDKVFINFRDAKIQMDTPSGVKGSIPACIKFSVKVPGEIPYNGIYYDPPEETYLDLVAPFCYLFKFTLCYAFGENWGIAIELEDEQIDWALLKNVLDIFIKIRLGQMECFENDFEDFLLKDTTEYCSVKAQRHIRHVRGLSILSDLDPRPSPVQIPAPSLPTSTPSPVLDRVRARHRLHIPVAKSYSLSIPRLTVRDGRAPFPLFCDSFRSALPPIRGTASRPPMRRAHLPASAQRRPTVALLLGLVLALCLTVLSIQSSFSAAPGAPGRRLDLDADDVRELAGFQSRVQQCVNTRETAFALRKLSLTKAKSYLEDVIAHKQAIPFRRYCGGVGRTAQAKSRHSNGQGRWPVKSARFILDLLKNAESNAEVKGLDVDTIYVSHIQVNQA

SEQ ID NO: 80358 - protein, 256 aa, Zea mays
  Coding DNA Sequence Number=SeqID_36983
MGGPLGREVVRERSDRARDQAARDEKVEDFGALNSVRPEAESNPVAAGAEVGPAPPPETVEGSLAAPAATVSGGGSSPTAVPRAEDPPKTAMEPAAEDPTAAESSQVQDFGPAHATATANFLAASTVDAGNESDESASKFSDFGDSGSSVEWTEESSDEDLDYFAALDVAAAEASPRATDAEVVPGPSAGRRRRRAVAKRRVSEVDGGRLRVGRAGEQELLSLPAVASVGEGELRSLFEGEELRIMLYICNYNLYE

SEQ ID NO: 80359 - protein, 530 aa, Zea mays
  Coding DNA Sequence Number=SeqID_36984
  Gene Ontology: Mol. function=zinc ion binding; Cellular component =COPII vesicle coat; Biological process=ER to Golgi vesicle-mediated transport
  Homolog annotation: Hit_ID=A7QQS7; Match level="QueryCoverage=67%, HitCoverage=44%, E-value=1e-121, Identity=62%"; Hit description =Chromosome undetermined scaffold_144, whole genome shotgun sequence
  Pfam annotation: Domain name=Sec23_trunk; Domain location=291-530; Score=266.5; E_value=5.7e-77; Accession=PF04811.6; Description =Sec23Sec24 trunk domain
  Pfam annotation: Domain name=zf-Sec23_Sec24; Domain location=216-256; Score=72.4; E_value=1.5e-18; Accession=PF04810.6; Description =Sec23Sec24 zinc finger
  Pfam module annotation: Pfam domain module=Sec23_trunk::zf-Sec23 _Sec24; Domain location=291-530::216-256
MGAAERDGVAIKKLSRLFKSVLGFEVDNSTFTEAQIRAMFYPKFKNDKSDQKTRTKMIDMVSHGLANLKVTLKHSSSLFMYDGHHGGAYVKNSFGNSVIFFIPAVARCGGAWDQHQLAEEEDVDPLPEGHHHILLLPRSASRAARRTPMWAADPSAAPAAAVVADPDGPDAVRLTWNTWPRSKVEASRCVVPLAATISPGRVPDPSAASPPPLPYPPLRCKAPCSALLNPFARVDFAAKIWICPFCFSRNHFPLHYSAISESNVPAELFPQCSTVEYIVGGAGVPGVGSSPPPPVFLFVIDTCVIEEELGYVKMAMRKATALLPEHALVGLVTFGTQVHLHELGFSDLSKIYVFRGTKEISKDQILDQLELSGAGRPGFPMMPQQPSGPQVNGMHPSVTAGVNRFLLPVSECECTLSTLLDELQPDQWPVEAGNRAIRCTGVALSVAAGLLGACMPGTGAMIIALLGGPCTEGPGMIVSKDLSEPVRSHKDLDKDAAPHFQKAVKFYDGLAKQLVSQGHVLDVFASALDQ

SEQ ID NO: 80360 - protein, 79 aa, Zea mays
  Coding DNA Sequence Number=SeqID_36985
  Subcellular localization annotation: CTP_CleavageSite=20; ConfidenceScore=5.09e-01
MSQGIIRIKPKGKAGLQKCSSGTPRSYPGTEVVVPGYNFVKLFDFSFNMIEGLGLVNAFFNSELVWTSALSFEFSSSFS

SEQ ID NO: 80361 - protein, 39 aa, Zea mays
  Coding DNA Sequence Number=SeqID_36986
MGTGFLMGIDIFHGYGFGTDPTVGGLDPIQGVWIPFQGS

SEQ ID NO: 80362 - protein, 260 aa, Zea mays
  Coding DNA Sequence Number=SeqID_36987
RFVDRSDEDFEREIYKVEDPGVKESAGALFDRMWGPHGREVVRERSDRARDQAARDEKVEDFGALNSVRPEAESNPVAAGAEVGPAPPPETVEGSLAAPAATVSGGGSSPTAVPRAEDPPKTAMEPAAEDPTAAESSQVQDFGPAHATATANFLAASTVDAGNESDESASKFSDFGDSGSSVEWTEESSDEDLDYFAALDVAAAEASPRATDAEVVPGPSAGRRRRRAVAKRRVSVVDGGRLRVGRAGGPNCCPCRPLRV

SEQ ID NO: 80363 - protein, 234 aa, Zea mays
  Coding DNA Sequence Number=SeqID_36988
  Subcellular localization annotation: CTP_CleavageSite=19; ConfidenceScore=5.26e-01
MSCNRRAGYRVRKNRTAACANATSSQGRRGSLKRQVFQNQCSDSRHLAHGPTVTLSMKVTGQSAMGIGAADDMAIGGLAVITSTGAQVQQANHQSDSGPTCRLTSSSEAGPGATIDTLNQWYPLLQYEGVAPVRHLQVTRRAAPNPTTWAGLRAPRGEEGGLERFLECLSIRTYSLDDRPEKQCNHEGGMGRPKPNNQRNWGVVRFAVVPSMGLGVCGSLCQWWIAPWGGVRYI

SEQ ID NO: 80364 - protein, 45 aa, Zea mays
  Coding DNA Sequence Number=SeqID_36989
  Subcellular localization annotation: CTP_CleavageSite=21; ConfidenceScore=5.14e-01
MAWPWPPPARASPQVVFGAIYAQVKEKASRRISRSSRTSTSSRIS

SEQ ID NO: 80365 - protein, 129 aa, Zea mays
  Coding DNA Sequence Number=SeqID_36990
  Gene Ontology: Mol. function=transferase activity, transferring glycosyl groups; Cellular component=integral to membrane; Biological process=cell wall organization and biogenesis
  Homolog annotation: Hit_ID=A2Y0X2; Match level="QueryCoverage=44%, HitCoverage=5%, E-value=4e-23, Identity=82%"; Hit description =Probable cellulose synthase A catalytic subunit 1 [UDP-forming]
MPGFAPCTPISDRDFDFPTDAGAAKPTKSANGQVCQICGDSIGVSATGYVFVACNECAFPVCHPCYEYEREGNQCCPSARLDTRDKNVGFLATSLRDYRDKDGVKGLCVVGAIDNCTSQLPTYGRSSPP

SEQ ID NO: 80366 - protein, 156 aa, Zea mays
  Coding DNA Sequence Number=SeqID_36991
MDTAELQRRPGTELGTAGFTAAALWRARSEGEVEEGAGWCANEGGGDGEQGSGLKWPRARWGEPHAQRGRGDRGTHGGGYVKTEKLTSRARGAEREKKAGTRTFTVTSKRHTDKLSLIGSNHLIGFYQHSQYSNASTHPREHVEGVSLITMPFILI

SEQ ID NO: 80367 - protein, 307 aa, Zea mays
  Coding DNA Sequence Number=SeqID_36992
  Homolog annotation: Hit_ID=A2WRY7; Match level="QueryCoverage=95%, HitCoverage=93%, E-value=2e-36, Identity=36%"; Hit description =Putative uncharacterized protein
  Pfam annotation: Domain name=HSP20; Domain location=53-140; Score =6.3; E_value=0.00065; Accession=PF00011.12; Description=Hsp20alpha crystallin family
MASTQAPAAADNVDPVYEWLDDGASYLLRLDLPAEQTTLKTHGCSFHLPSSPCWLNQIMEGFKKEDFRVHVDGEGRLTVIGNRKPTPGGGGKALRLHKTFQLPNTANLDTITGRFDGNVLTLTVPKLLAGADAPTTPPPQSKEEARVAGDKPDQADKLPARVGRGREETTEERRTTETERTSLAATSKEEDEEKAKPMVALPPQSSEKASGDHQRDDQQDGKAQADHRHREMVAREAARRIEAARARVAEAKAKAERERKCEHWKERAVEEGLRLAEAVNNKKEVIATAVAAFTLGVFVSSRLFSRT

SEQ ID NO: 80368 - protein, 158 aa, Zea mays
  Coding DNA Sequence Number=SeqID_36993
MAPKAGLSCYRPHSGEWHSSRSRAGGAVFLSGQSVERRSDCGHFGLVDRGARVRIRCQAILALNAPAIRSVGVAIWSRLLLREACPSWASGESKAQLEEERKECMEMEARMRVEHGVEWMARLADWQRMAEMFQYMQSLGAAQGLPQPPLLFPPADPA

SEQ ID NO: 80369 - protein, 1319 aa, Zea mays
  Coding DNA Sequence Number=SeqID_36994
  Homolog annotation: Hit_ID=Q6JAD6; Match level="QueryCoverage=47%, HitCoverage=88%, E-value=0.0, Identity=80%"; Hit description =Putative uncharacterized protein
MPRTKNASASGGGDDEDPRRPFRQVKGKTVFLEQQEGRKKRRSDREARAAAAAAAAAAQAALGDQPDVPSDQIAFRARRLASRSRSSAHTSASTPPPTLPAPVTPIAPSTSTAIPTTSTTPASTATPAPAPASAPPVPPPRFRERDETEVRPLASDPRLFDLQRATAARVRRFRYVPVESWLPAQRDPAAGVLFSTRIQESFFRAQMSAQIALRVHRLLDLPAFLLAAGAESEAHLTYLPGLLTLLTISGRYVEEWVRVFYASVWIDPDHHWMRFRFEREDVTITASQIRQLFGFPESSTRLHSLCYGTSDPPRRPHGGVAPGTAHVAALFRPPFTDGSRRSPADFTTAAKYLYELVRRTLLPRMGYREATTHIQLWLLGALVSHSEFDVVDFLICEIEDTVLDGIRARRQLPYAHYLCHIFAQLIQPPRFQSTLEASRLVFGSYRPAPEIPVPAYAPVFDTQAEDAALRQFDTQGAAADDDDDDDFGIPPPPPPPMPPRSHDHEAGSSSAAPATPQAMYPALASILQTLTQQQAQLAAEQARMSERMLSMFQTMQDRQDSLQQQLIQDRAENRAFMALMLQHSGISVPPVQSAPPSSLHAPVVPSILSAPPAVTSPLRPVTLAFTSPVLSSVCPQPPVPPASAVTTTAVAVSVTASVPVAPAALPASESVPAPASTADPGSETDSDPPSADSPSRRNPRAQPSEMNFSGTPDTAPDCPARILTVEGSSSTLGVNYTFGEVRPSLGRRRSPRISTLKDDVITMPRPSPPGSSPRIRPEQAARLVTPRPRPAVPRRHQPGPRPRQINSGVGPANGRPGSGSGRPGLLFEPTLPLFALTPLPLGFGSSKSGRGVPLLSKRSLGQQGRPSRGTPMPPGYGYLTLHLYTGRLTLGEVASTATMNKNTGIQSAIQTELRFHLRRYEQPHSMGRPAEQQKTNGWLAVARSGSNDNDPRFGWPNCSSEGLGADAAATLPSPTPTLEGEDKYKELEARSADGGGDPVGNGDFSSRLRLSTDDRGRQPSGRSPLKSSRTSGAPTSAWRRRTGGGTGSQADEPDVLRLTTPAVDQPRVVEVRPARRASEHPLPQTPKERPTHEPAREVELRLSPASTPARMMNILEAEGGTKIAARLASPHPGAGDQRAKGRVAMQAACNHAKWARFSDFQHAQHGGPGPRVMQPTRRMLRASNCTATRATATPPRLRNQYRDSRQPYARPSSASLAGRSSGHVVSRAYVPSGGSERTLSHGVKTTGSERRFAFAIMTSSKKAPSLPTDKRFEGWPLGRVQQPPQSAWAPRPLLVRGSKAGPSEGFNDRLRLLGLHAHY

SEQ ID NO: 80370 - protein, 71 aa, Zea mays
  Coding DNA Sequence Number=SeqID_36995
MAHRTVRCATGAPTVRHRCVNGHFQRLVLTASRWTHGAPDIEQFTVRCTPDSPVRCPPSLRVLISGIAFTL

SEQ ID NO: 80371 - protein, 144 aa, Zea mays
  Coding DNA Sequence Number=SeqID_36996
MGGSEPGSFAEKDPFRATGAPVARRVGLGSKLAYQKSEKRVHLVRLHAACMAARPFCPLVWAKMGGRLGGPWSVLEKTRPAAPGGARRGVAFKRWRVRGNRLSRLLGPDSRRSPWTATPPEAGSGFAEDVVDAEGAMAPFGVKT

SEQ ID NO: 80372 - protein, 183 aa, Zea mays
  Coding DNA Sequence Number=SeqID_36997
MSGAPEDSDSELVTFGKFQRQLRYNSADCPVLPGRAASGTRQPREFISAAPLKFTGLSGVHRTVRCNSGATAISAPTATCDALNARQRAQRSGTRMLVHRTLNSTCPLSFSAEPNFSCVELSQLQLNFNFNWGPGRFNRCQDQFLQSDLQSASLTGRLSVSLPHAVEPVLGAVQPVLVNLTNL

SEQ ID NO: 80373 - protein, 105 aa, Zea mays
  Coding DNA Sequence Number=SeqID_36998
  Subcellular localization annotation: CTP_CleavageSite=70; ConfidenceScore=5.09e-01
MSKNTRDTRFIPRFGHTTKVPYFLVEAPTKSRVSFNPNPPFADHKGQAHTLIFAQTSGQSASQTGRLQVRLQKLVLTPVEPAWTPVEVEVQLELRKFNTAEVRLS

SEQ ID NO: 80374 - protein, 114 aa, Zea mays
  Coding DNA Sequence Number=SeqID_36999
  Subcellular localization annotation: CTP_CleavageSite=37; ConfidenceScore=5.06e-01
MVRERRTQTNTMSKNTRDTRFIPRFGHTTKVPYFLVEAPTKSRVSFNPNPPFADHKDRFNRMGQADRQSASQTGRLQVRLQKQVLTPVEPAWTPVEVEVQLELRKFNTAEVRLS

SEQ ID NO: 80375 - protein, 196 aa, Zea mays
  Coding DNA Sequence Number=SeqID_37000
MARRRSEKNKKTTPKENKENHRSRQFWHAILVPLGLGDLIPAVDEISFADWWRKALKKEKEENEQWRPNDESTSPKGLSSNFDSHICCVANENDGGSTNEDEEDERSFMQLYAHLSLEDKAVMLKLLKRAREQSEARQMLEDILSIKMLRFDKLTKEHKELQCSHVDLVRSTGLRLRTQLKTWEEKSSLEQIGNSN

SEQ ID NO: 80376 - protein, 394 aa, Zea mays
  Coding DNA Sequence Number=SeqID_37001
  Subcellular localization annotation: CTP_CleavageSite=65; ConfidenceScore=5.20e-01
MGLLHPRRSTVPHRHYLWLCCPQIHRRTSSPPACSDPSRTSSSSSHDNLRPARGSLIADPCAGVSARAGVAPLASADTCAAVGPLVGLLDDRTREKARSRCRVARGPTLFVSYDHDHLNFGYLDIQGLSSTRSAHRSLILPQHSHPHDVATAGGFQLVSSYLRLLVQSYRLRCSRCDCRDVRVFWAASGRQKLKLIPNAELLPRLLAEAIGYEAARSLTSRSAAQLASVRSRALLGFPRTVLRRLREPNAAPPPVRTTRIAAGVRSDADALAPSSRFRVVPNIASASSFSYHFELKVLGSKIIWDSRTSVATSTEAKEIACMLEQDSLVLQEHLDIVNNFNIPVDSSYEPSTLSSPPPSDDVLTPHWDFAEHFQNFWGVEYDSDHMPSFSDNDV

SEQ ID NO: 80377 - protein, 55 aa, Zea mays
  Coding DNA Sequence Number=SeqID_37002
MDKCGGGTGGGGVVHGAFRRRLRAQHRKCGFQRHSRDDTLTYPYYKAAHKQREIN

SEQ ID NO: 80378 - protein, 320 aa, Zea mays
  Coding DNA Sequence Number=SeqID_37003
  Homolog annotation: Hit_ID=A2WQX2; Match level="QueryCoverage=10%, HitCoverage=16%, E-value=7e-09, Identity=84%"; Hit description =Putative uncharacterized protein
MAASPSSPLTAPPEPVTPPSPWTITDGAISGTLPAAEAFAVHYPGYPSSPARAARTLGGLPGLAKALLPEILIHLQFQPCSAPDQSVLMFVRAAPPLPLRSGVPIPAPASSSASAPRTPTAIQPLASPAPPLAFCCASPSAKELRHLVPMWSLVSGLLTTSKTTLTWDGHNTLWAADVPMPAPSSRHGVDDELVAEDSRFLYITVFRVQTTHEVYAGMADFQHVVPVHAAQTRKRKHSDSQNDNENFGSGTLLSEILYFKDYRLLVMMPFLVNILVFCMTDKTGHDEADGDVMMLVPPLFSVKDRPTKIASPHCLENGTN

SEQ ID NO: 80379 - protein, 479 aa, Zea mays
  Coding DNA Sequence Number=SeqID_37004
  Homolog annotation: Hit_ID=A2X5N0; Match level="QueryCoverage=35%, HitCoverage=63%, E-value=7e-14, Identity=33%"; Hit description =Putative uncharacterized protein
MIVGGVGAEKSEVRSGVGNRLGGQTVEEPCLSEEMCRGTNMEVDAAREEKVTGRIVTEFMAPTWAGSKAPGEKGAPAEVGEVPRVPPEVERQRRPAERWWGEGPRHPRTARATCGWCQSTGCRRMATENRPESYPGRPTCHHVHSCDRDPPGASSPPKSSRGRGPRCGEEDPPPRVRGGSPRCAVERRGGSGGRSSGEAKLLEKKIVLGLRKSGKRLHAGKDGRHTIEARAQAVEEVEHEALIGDAGPEGAESVRHRLHLTAVLVHREIALSKLAKSGLKVQDPSLAVAKELCLKGTPDPVSGIVRHSNDVPKFGREGAMDPGKHHFIHQEPVLRRVSDRREDVVGEGVAAEDLQDLVAPPRVLSGVGHENVGDGCPDAGEGRRLSVKRGTKDREGDKVAGEGTKDGEGLKLTPGMEGAAPRATSMPRLTRATLTTSRPVAVRPWESRGGGHRQASGAVGSVGCIGPASSGGGGGQVPT

SEQ ID NO: 80380 - protein, 101 aa, Zea mays
  Coding DNA Sequence Number=SeqID_37005
MAPSSPPWWMRDATRRSCNESACSFKDERENSGFIPARLQVRVHVLSRSDPYNWLPCFTCALLIHAYVGPVIVPELQNIDQMPHLAQPQGAARGVKLMMTG

SEQ ID NO: 80381 - protein, 56 aa, Zea mays
  Coding DNA Sequence Number=SeqID_37006
MADSDSCARCARIKCRYRPLELLHMDLFGPIAYISIGGRQVSYPRDLEGILETDSK

SEQ ID NO: 80382 - protein, 314 aa, Zea mays
  Coding DNA Sequence Number=SeqID_37007
  Subcellular localization annotation: CTP_CleavageSite=36; ConfidenceScore=5.51e-01
ETGSSVDRSNRLAAFSKTARRCLPPDPGRSLRPPRRANRVTSARRHGWIERACRRGRIDPSSSSRPASRGAQRGQVVVDLVTDRQSEVVGHASAGESEDGGAGGGKDRERDWGERRRSVAAANVEGEHEIGGRGSRLSIRRWNGGAISTYAMALHPRLAPAGEFGAGGERGGPEGREASMASVRRVEEQGRRASRTRDRKGIATTAATKARPPGIEAEAEPCTGHPATVAPTQANAQVAPPPSRLEQTCKPPCRHMRRRAGDGYRRGQAMPRAATADECVGEGRRDLSSEQARYRDTAIAATEERIGTHHCKQE

SEQ ID NO: 80383 - protein, 205 aa, Zea mays
  Coding DNA Sequence Number=SeqID_37008
  Homolog annotation: Hit_ID=A2XGD7; Match level="QueryCoverage=81%, HitCoverage=49%, E-value=1e-57, Identity=62%"; Hit description =Putative uncharacterized protein
MTSELRSLEGARVSKIHVVLQELTSDSTDLMICLYLSILEKWAVALVEVKPSLLSGEAEKFLFEDIYQVGYNVVTSRRRNVGKVRGFTFDISSGAMESLELDSFGLSIVPSSLVSTYCLFVEDVLDIVSDTVVVHEDAVSRVQRLTQGILGTQNIHGPGGEIDEYGRFGGRGRRRRANGQGKSGGRELRSEPKHPDDEWELPMDY

SEQ ID NO: 80384 - protein, 616 aa, Zea mays
  Coding DNA Sequence Number=SeqID_37009
  Homolog annotation: Hit_ID=Q10LU7; Match level="QueryCoverage=99%, HitCoverage=99%, E-value=1e-137, Identity=47%"; Hit description =Expressed protein
  Pfam annotation: Domain name=zf-LSD1; Domain location=12-36; Score =2.7; E_value=1.4; Accession=PF06943.3; Description=LSD1 zinc finger
  Pfam annotation: Domain name=zf-LSD1; Domain location=401-432; Score =9.6; E_value=0.12; Accession=PF06943.3; Description=LSD1 zinc finger
  Pfam module annotation: Pfam domain module=zf-LSD1::zf-LSD1; Domain location=12-36::401-432
MANAEGFRLVRCPNCLNVLPEPHNVTVYRCGGCGTTLRAKICASGGRHASAKQARQDSDSYSVATAVSNGNGAPPQIKDQGSESSFGADAPSTEHGSNGAGSGENGGGILAVQNAVVVAHDAENKENHTVEQPTENSETCRAVSGHDDDTERRLNASEIKTVPSEMSKAAVSAQDPEQKEEGGGEHAANKKGYLVRVLSRSCDLRSSRDSTDFQSARTSLQSKSFSASEPLQSKIMNTVDELKGDLSELFSNKPADDCKPKAHQPPRPSNSKQDGRTTRAAIASSAPLAAYHPAAKHSGYVSRPSKSGQVAAASRGLPSLRYRRHWVYPFHFHHNVQTETRPCRHGCCHHSCQQPPCYRYRPCKQEPAATRRPPVMVSNKRPPPPRNYCLPVLRGAPFVICSSCVSLVQLPAEFAVPSRGTRRLRCGSCSEVLSYSYRDPGARKRLQSPFGGDEYSTDEYEQASGGHNAAAAGGFFGEADPVSYSEEYGLSFGIGHSTSTEDGQQPLYVSRNSSFNTVDERTGTRDGKLHRLMGYSSASEVLQHSPDLFESFGRRAADAGRAHVGGKGKGVCVAENDACERDGGAVERSKVRSGGWPVHGILKKGIHGLESLKLRS

SEQ ID NO: 80385 - protein, 36 aa, Zea mays
  Coding DNA Sequence Number=SeqID_37010
MGSRHSAYSAEAECRGKEEGVEADLQEFRDFDEFED

SEQ ID NO: 80386 - protein, 67 aa, Zea mays
  Coding DNA Sequence Number=SeqID_37011
MAIGSVLSHGAPNSLVRHRTLSGEEFGLESPGAPDTIRRYCSARLRRLYRSLKFLHGGVLYKPCLMF

SEQ ID NO: 80387 - protein, 579 aa, Zea mays
  Coding DNA Sequence Number=SeqID_37012
MGEGLRSNRRLTSGSPPPALTTTTTTPAPDGRAAAAQASGWVLLQSCPCPHRRSRGEDKYEEPEARSADGGGDPVGDGDFSSRLRLGTDGRGHQPPGRSPLKSSRASGARTSARPPAGGAAGSQADELDMLEVTTPAVDQPCVVEVRAARRASERPLPRTPRERVTHEPAREIERRLSPAPTPARMMNILEAEGGTKIAARLASPHPGTGGHRLGPTGGRGGQPCRRHATTPSGRASPTPNTPAWRPRPTRHTTGAPDAACKQPHRHLRHHHTSSIAEPMPRLEATQRTTQQRQPDAAVNAAKSGPAVMTVAGGREQRSRHQPSSCPIRGQQENPLSRREDSAPVIHSSNGSRTRNDRPANHSPRRINSAAGQAALLAGEAGDASPSPLRASLLIRGSKASPLKGSNSRLRSRGPYTHYWSKVRRPPPRRVPRPPQATRAPRPLLIRGSKAGPRRVHSRLRRRARDDQGYVRYITKARAALPSSPETPCSVPIEGNMALSPLLLAERRRRGVCKKAESVPDRPLALCGGSGAALANPAPAEPLTASTYQPENLGPDRTPGLQPVRMRERPDQPKHYARH

SEQ ID NO: 80388 - protein, 109 aa, Zea mays
  Coding DNA Sequence Number=SeqID_37013
MPAGQTHAHETATGGAANLSNRRLPTHLPPPLPEEGGADVPATCSFHLLAFSENAANLLDLAPLLPVSLAQLRAVSTTMEVEKKSSAGATKLTIMQVIPCYIVDRVRAT

SEQ ID NO: 80389 - protein, 36 aa, Zea mays; identical to SEQ ID NO: 80385
  Coding DNA Sequence Number=SeqID_37014

SEQ ID NO: 80390 - protein, 78 aa, Zea mays
  Coding DNA Sequence Number=SeqID_37015
MAWGAERVQGGGIHVGAPATRDNEAAGAWSSLGLAANSLNRSVDMHLVKMLPTLILTDLKELEVAKWTGARGKNSEKR

SEQ ID NO: 80391 - protein, 197 aa, Zea mays
  Coding DNA Sequence Number=SeqID_37016
MGRRETEREGGKPVGDRCKGETRGLRVVPRPALGRARRRLLRGRVCLPWSRSSPSPGSGEAETVVFRGRGRALGSGEAEFVVFRGRARVRALGSGEAEFVVFRVRARVRALGSGEAEFVVFRGSGEAEFVVFRGRARVRAPGSGEAELPMAPEAGLGRCQPHSVEWRSSRSDAGGVVFLSGWSVERRSDCGHFGSVD

SEQ ID NO: 80392 - protein, 412 aa, Zea mays
  Coding DNA Sequence Number=SeqID_37017
MNKTPALKVPLQTELRFHLRRYKQTPMIGGPAEQQKADGWLVAACSSSSDNDFCSERPNSSSNDLRADAAAIRPSPTSPLEGRGRAKGRRVGGQSAGGTGYLVGGETSSSCRGGRGHQKQRRSRSDWRAGHAAAASATNGERPPPRSLREGAGRCPRGDRPQLGALPSPALMMNILEAEGGAEAAARLASPHPGTGGHRLGTGGTFGGRSRRRFTSAIMTASKKAGPSEGFNSRLRALGLRAHYWSEVRRSAPRKGSTAASGHSGSAPITDQGVRLTAAKPGLGRHRKFRLDRPRGSDSGSTPEDDELRLARPQGSDSGSTPEDDELRLARPQGSDSGSAPEDDELRLARPQGSDSGSAPEDDELRLARPQGSDSGSAPEDDGLCLARPGARTRPRPRKTDSTSTSDVTPGL

SEQ ID NO: 80393 - protein, 369 aa, Zea mays
  Coding DNA Sequence Number=SeqID_37018
  Homolog annotation: Hit_ID=Q6J9V9; Match level="QueryCoverage=23%, HitCoverage=31%, E-value=1e-08, Identity=46%"; Hit description =Putative uncharacterized protein
MTTSKKVRHVVRFRIIFLFLFLSLATGTGKGDTPKGILLREGSGPRALLLIRGSKAGPSEGFDSRLRALGLRALLLIRGSKAGPSEGFDSRLRALGLRAHHWSEVRRLAPRMGSTAASGHSGSAPTTDQGFVGWPPKGSTAASEHAKRGMTLGTSDTWPMLGLRSRGSGAALANPAPAKPLTASTYQPENLEPDYAPRLRPVKAPSTQGTRSRLARAQPRAKAADPGGFTSRPRVPSSNGRTFGSPEAQSSRRSNLGQIAMPTDRLGLNLDAGRRTPPHPTLGLGLSLDLGQRTPSRTTPGLGLSLDLGRRTPPRPTPGLGLSLNLGRWSPPRPTPGPRLDLDLGGVSASPDLGLGPTTSQGEPSLPYP

SEQ ID NO: 80394 - protein, 307 aa, Zea mays
  Coding DNA Sequence Number=SeqID_37019
  Gene Ontology: Mol. function=nucleic acid binding; Cellular component= intracellular; Biological process=regulation of transcription
  Homolog annotation: Hit_ID=Q6H6A6; Match level="QueryCoverage=99%, HitCoverage=99%, E-value=4e-65, Identity=46%"; Hit description=Zinc finger protein-like
  Pfam annotation: Domain name=zf-C2H2; Domain location=166-188; Score =4.0; E_value=4.1; Accession=PF00096.17; Description=Zinc finger, C2H2 type
  Pfam annotation: Domain name=zf-C2H2; Domain location=227-249; Score =19.3; E_value=0.015; Accession=PF00096.17; Description=Zinc finger, C2H2 type
  Pfam annotation: Domain name=zf-C2H2; Domain location=4-26; Score =20.2; E_value=0.0079; Accession=PF00096.17; Description=Zinc finger, C2H2 type
  Pfam module annotation: Pfam domain module=zf-C2H2::zf-C2H2::zf-C2H2; Domain location=166-188::227-249::4-26
  Subcellular localization annotation: CTP_CleavageSite=28; ConfidenceScore=5.28e-01
MAKSTCKLCSRRFASPRALAGHMRAHSMASAKSQISSASSASTSITASGIDADKKRGPVRGHALRENPKRRGRLDDSDRESETTDYYSPSPDAKRSHAGSGDAEPVSSVSDAATPEEDVALSLMMLSRDSWPAPPPYSYRLDSDDDDESDARPAVVAATAQKRTRYECPACKKVFRSYQALGGHRASNVRGGRGGCCAPPLSTPPPAPLQPLPECEGSEEDSKAQPHECPYCFRVFPSGQALGGHKRSHLCSAAAAAAAAAPVTSGADPSITMRSLGFIDLNLPAPFDDVEVSAMSDPFLSSKPAGS

SEQ ID NO: 80395 - protein, 135 aa, Zea mays
  Coding DNA Sequence Number=SeqID_37020
LSPRRATLLRWRHRNEQVTGPRETIHGERRIYGGALTTASNCPHPASTVVCYANDDTPSRCERGETLTDDHSNNAFAISPTAERSRRRIPTAAVTVPSSTLGTRLLRRLPDRPEQRTEKLPMSSVRKERLTQVAH

SEQ ID NO: 80396 - protein, 403 aa, Zea mays
  Coding DNA Sequence Number=SeqID_37021
  Gene Ontology: Mol. function=structural constituent of ribosome; Cellular component=ribonucleoprotein complex; Biological process =translation
  Homolog annotation: Hit_ID=Q9XET4; Match level="QueryCoverage=24%, HitCoverage=54%, E-value=1e-34, Identity=78%"; Hit description=40S ribosomal protein S7
  Pfam annotation: Domain name=Ribosomal_S7e; Domain location=40-198; Score=17.9; E_value=2.2e-07; Accession=PF01251.9; Description =Ribosomal protein S7e
  Subcellular localization annotation: CTP_CleavageSite=9; ConfidenceScore=5.03e-01
MAALSAPLRAIAAGSRVAASDPVKVSVRRRREGKMYTARKKIQKEKGLEPSEFEDSVAQNGNQELKSDLKDLYINNAIQMDVTGSRKAVVIHVPYRLRKAFRKIHVRLVRELEKKFSGKIAAMRCPLPRPPDHSDGAGSGRRWGILLASQVGITSDLFFVFFPAGFLLCEKKQVTQIAAMEPDLVAAGASSSPPPSPVSATSPPWQMRGGPDPPPRASRPSGSATVAASSSNRPSRPPQPVRICRQAALLHRHCPDLLLIRRQDPPPIETSPAALCPDRISPPGQFLLGSAVQEVLARPPGPSAAVQSIARLLDCSAAVQAVFFNFIPDGFGCTFISFGSADQTALCGHGLLFHLTKDPPALREDRSHAADIKTWQINDGKVMADMVNSTKPSMIMSLSKFTT

SEQ ID NO: 80397 - protein, 78 aa, Zea mays
  Coding DNA Sequence Number=SeqID_37022
MARRGAESAAIGGGGEWERAGGPARTVRQRRVREGRGMRQGRWMRVGRSGCGRTVHHGVDIVYIPVPLLYCHEDTDIV

SEQ ID NO: 80398 - protein, 588 aa, Zea mays
  Coding DNA Sequence Number=SeqID_37023
  Gene Ontology: Mol. function=nucleic acid binding; Cellular component= intracellular
  Homolog annotation: Hit_ID=A2X802; Match level="QueryCoverage=70%, HitCoverage=69%, E-value=1e-70, Identity=40%"; Hit description =Putative uncharacterized protein
  Pfam annotation: Domain name=zf-C2H2; Domain location=14-36; Score =11.9; E_value=0.58; Accession=PF00096.17; Description=Zinc finger, C2H2 type
  Pfam annotation: Domain name=zf-C2H2; Domain location=257-279; Score =19.9; E_value=0.0094; Accession=PF00096.17; Description=Zinc finger, C2H2 type
  Pfam annotation: Domain name=zf-C2H2; Domain location=397-419; Score =7.5; E_value=1.7; Accession=PF00096.17; Description=Zinc finger, C2H2 type
  Pfam annotation: Domain name=zf-C2H2; Domain location=95-116; Score =3.4; E_value=4.8; Accession=PF00096.17; Description=Zinc finger, C2H2 type
  Pfam module annotation: Pfam domain module=zf-C2H2::zf-C2H2::zf -C2H2::zf-C2H2; Domain location=14-36::257-279::397-419::95-116
MPPSPPPSPPEYKHFCRVCNKGFTCGSALGGHMRAHGPASDVDGFGVVDDDDGSLDEEGVTRCPGADEWDDAVGTSATHAYALRANPNRLIRSCQLCKNCGKEFTSLELFLQHARCSRSEDEGGGGEEEQVGSPVPSSSSPPTNADGGGDEDPILATPWSKGKRSRRVGTTEEDPSTSTVGEEEDLAKCLVMLSSSKSNINDQEANVIATITKDDHHHQKQPIPFFTQSQESVVAALPSSPLVVPQYISPAPRGGVFECKACKKVFTSHQALGGHRASHKKVKGCFAAKFETSNATESTRHHQVVAVNIAKDGRNNDNGKAPAVDEIINAGASASASAHVPGGFATTIVDTNIGTSSDTPRSLYSSMALAPIVEHNPLVETTLAVAAAQFKKSTKMHECSVCHRLFTSGQALGGHKRCHWLTSNTSDPCNTVTASMIPSLTEDFVGGVVKQQFNLQPQPMVVDVPPPVLDLTIAPNATVAHLQPLAVAAPSNVNHQKKDATRKKYAIDAVMEEEEADSTPAKRAKISDLKDMVSMDGLQDKNTFSKIIQSLAEAIINIGSASQDNDLVYKQCCRMPKLNSIGSDQAKT

SEQ ID NO: 80399 - protein, 619 aa, Zea mays
  Coding DNA Sequence Number=SeqID_37024
  Gene Ontology: Mol. function=oxidoreductase activity, acting on single donors with incorporation of molecular oxygen, incorporation of two atoms of oxygen; Cellular component=chloroplast
  Homolog annotation: Hit_ID=A7PKF5; Match level="QueryCoverage=92%, HitCoverage=90%, E-value=0.0, Identity=55%"; Hit description =Chromosome chr15 scaffold_19, whole genome shotgun sequence
  Pfam annotation: Domain name=RPE65; Domain location=43-619; Score =58.6; E_value=1.3e-19; Accession=PF03055.6; Description=Retinal pigment epithelial membrane protein
  Subcellular localization annotation: CTP_CleavageSite=29; ConfidenceScore=5.43e-01
MAAMHAIVHHRAPPPGRCCRGHGRSVVVRASAATVTTSIPGSAATVPDSPSAAFWDYNLLFRSQRAESPDPVVLRVTEGAIPPDFPAGTYYLAGPGMFTDDHGSTVHPLDGHGYLRSFRFDASGAAHYSARYVETAAKREEHDAGGASWRFTHRGPFSVLQGGSRVGNVKVMKNVANTSVLRWGGRVLCLWEGGEPYELDPRTLETIGPFDILGSLCGGTDEVARDASGEAAHHGRRQPWLQEAGIDVAARLLRPVLSGVYSMPAKRLLAHYKIDPKKNRLLMVACNAEDMLLPRSNFTFYEFDANFALVQKREFVLPDHLMIHDWAFTDSQYVLLGNRIRLDIPGSLLALTGTHPMIAALAVDPSRQSTPVYLLPRTPEAEAEASGRDWSVPIEAPSQMWSMHVGNAFEERNARGGINIQLHMSGCSYQWFNFHRMFGYNWLNKKLDPSFMNIAKGREWLPRLVQVSIDLDKRGTRRGCAVRRLSDQWTRPADFPAINPGFANRRSRFVYAGAASGSRRFLPYFPFDSVVKVDVSDGSARLWSVAGRKFVGEPVFVPTGSGEDDGYVLLVEYAVYDHRCHLVLLDARKIGERNAVVAKLEVPKHLTFPMGFHGFWADE

SEQ ID NO: 80400 - protein, 46 aa, Zea mays
  Coding DNA Sequence Number=SeqID_37025
MAMMGSTSEKMYLGQVRKQKIFAAFVQRWCPKKKIKTEAAGGRVLR

SEQ ID NO: 80401 - protein, 169 aa, Zea mays
  Coding DNA Sequence Number=SeqID_37026
  Homolog annotation: Hit_ID=Q5GAU8; Match level="QueryCoverage=71%, HitCoverage=78%, E-value=6e-37, Identity=65%"; Hit description =Putative uncharacterized protein
  Pfam annotation: Domain name=zf-GRF; Domain location=34-78; Score =9.5; E_value=0.0022; Accession=PF06839.3; Description=GRF zinc finger
MYREALWQKRGRPRELYPDVSSKDAPVPPELPVPNCDCGRLSWVHQSQHPDTAARCYYLCGTLDGHQRCFFFQWIDGPDKFDPRYLLFVNWLSGKTSHERFKRWVPPPPNPPPMTDAEKEDCFGRPTASAPDAWLDVVEPLYSNDCNKTLRWMDSGIQHFALTGMNELV

SEQ ID NO: 80402 - protein, 63 aa, Zea mays
  Coding DNA Sequence Number=SeqID_37027
MAMAGLCDGKVVMMGLDCYKVHLDDPDIGVDIVKMRSFTSLVDTNYILDAIHGSELLEVQDIG

SEQ ID NO: 80403 - protein, 52 aa, Zea mays
  Coding DNA Sequence Number=SeqID_37028
MTCIAVVSILHVWLVLAQQGECASAALMYHQHSYKFLGQPLKLRLCMELEHG

SEQ ID NO: 80404 - protein, 54 aa, Zea mays
  Coding DNA Sequence Number=SeqID_37029
MENGGRRAPGAVGDSVDGDAGAFALLLADHKASRRAGGGWEDSTLGERLGGVGG

SEQ ID NO: 80405 - protein, 100 aa, Zea mays
  Coding DNA Sequence Number=SeqID_37030
MQNFFMLLRCLNLLKGKKQSLEPMISSSVSLYEIEKLFRWIITIWERQICVLPRRWSNPFPSIMSNCSKEAEWQNLRKGMGKYIEDAGDYARHLINQNDS

SEQ ID NO: 80406 - protein, 481 aa, Zea mays
  Coding DNA Sequence Number=SeqID_37031
  Gene Ontology: Mol. function=carbon-carbon lyase activity; Cellular component=mitochondrion; Biological process=aromatic compound metabolic process
  Homolog annotation: Hit_ID=A2Z3C9; Match level="QueryCoverage=19%, HitCoverage=15%, E-value=7e-23, Identity=59%"; Hit description =Putative uncharacterized protein
  Pfam annotation: Domain name=HpcH_HpaI; Domain location=1-183; Score =10.1; E_value=1.8e-08; Accession=PF03328.5; Description=HpcHHpaI aldolase family
MYVLFLLSFSRTLTELAALTGYDYVVVDMEHGSGGIPKALACLRALDAARTPVVLRLPEASAVWAKKALDLGPAGLMLPATESPEAAAEAVSHCRSAATRRAGSAALHTPSSAPWRRGSVHDGGRHVGVPRAHVAPQRQRVRGEEEEQLRGQGGAGAVARPRAVRDEAGRVQLTRDGGHLHGDGGGGRGGEVGGGGGEDGVRAGGEEGQQREEIGGEEGEQSSSRARAVHPARRLVERRPAARGRPAAWRRDRDGLVSPWYMAGTTSSAARTRCHSAARQRRTAADDVEHEQAPRRSCSHAHGDGFCFRCSDATRTTAGFSGIGVGDEAARDYYDRAHQELIPVFGALVMHLYTGFGPEALPVGIRWTMDERDPGCLYGDLAELSCWGFFSLIVHPLLGEARCRRAGVLLQKVLDICNNLIFHTTLTMWRGLFVTSDKIRGGCLGAGSVAAAAAMDRSMLGDLDGLPEEDKMRMAAMIDQL

SEQ ID NO: 80407 - protein, 57 aa, Zea mays
  Coding DNA Sequence Number=SeqID_37032
MCPEKVIYSKASTVVRTPMGERRTPGYTVRTPKVGPGPPGLVPNPRVYSPDPQGAKV

SEQ ID NO: 80408 - protein, 107 aa, Zea mays
  Coding DNA Sequence Number=SeqID_37033
MTTSLMVARSEPGCGLPPALSFKDVHHPCWHSQDPRAQCVTSSGTQDSGSVGFVAAGGGCSWSRRRILLVRPACSGPLAPQQRQPSVAPQQRQPSVAPQQRQLAAVV

SEQ ID NO: 80409 - protein, 392 aa, Zea mays
  Coding DNA Sequence Number=SeqID_37034
MAEERQPPWGCAPLIAARRRQDRKHHHECELSGDFPTRAPKRHGQSLPRHAPGFPPYDTGARPHMSYRLTRSTKKANHRTRSVQLPRGYVPLHFRSNQRPGRRTAAQGACNRPAVMRPFIFAETSGRKGEPPRRKRTTAPRLCAPSASLQPAVQHGGPGPHDMQPARQLLGAEKSRQCHIFSGSSRKTEKISFQNQCSDSRHLAHGPTVTLSTKVTGQSTVGIGVAVGMTIGGQQLASSPEAGPGATVGTLNQGYPLLHYEDAVHVRTSTEGHRTPVRTSLELPRRHAGSIGWAPGPSERRPAAAAWLAARDIGQQAEPGVKPLKPRNLCIYYAEDAPPATMLDARLTWTKELRKATPQKKTLKRSKKSPRPDCLVWKACGANGHLLGHGNG

SEQ ID NO: 80410 - protein, 313 aa, Zea mays
  Coding DNA Sequence Number=SeqID_37035
  Gene Ontology: Cellular component=chloroplast thylakoid membrane
  Homolog annotation: Hit_ID=A7NWZ1; Match level="QueryCoverage=51%, HitCoverage=72%, E-value=8e-66, Identity=73%"; Hit description =Chromosome chr5 scaffold_2, whole genome shotgun sequence
MPQHDSSATPPVEYHDSSATFETKKGTGKDSGKILDGRCPTPAHHYPLAFLSLGRNVKCSSSQQRGLEHSPVTTQQRSQHRGEIMSSLSSGISASPSAAPSTARRRHDAAPQQLRVKAAARPQLLHAGRRRSSVGRRPGGGAVVVRAGPGPLSEIEPDLEEDAIDVYRTNGISPEDFEYGKYDGHHTYFEGQDKKGFWEDVSEWYQEAEPPQGFQALISWAFPPAIILGMAFNVPGEYLYIGAAVFIVVFCVIEMGKPDKPHNFEPEIYMMERSARDKLIADYNSMDIWDFNEKYGELWDFTVNTRDDIVKST

SEQ ID NO: 80411 - protein, 247 aa, Zea mays
  Coding DNA Sequence Number=SeqID_37036
MCLSMHGISAWLQALLLLAATALQASLAAAALYYTCMCDRCAWSTRSSSCLTYHEELCMTKTLISPQSKHLVTRSKIFLFLSLRAMHIGDRRHEREGIVSSTEAAVARPTVAAVPRPTVATLDPEGERRRQRPYVVAAVSRPAVAAPDPEGERRQRPCAVAAIPRPVAATPLPRRAVAEVSRSAARPLCRQAAASPKPRGGGTSKAGEQATPVDVRVATATHEARCSSERRHGRGEMRAAMIARDIL

SEQ ID NO: 80412 - protein, 68 aa, Zea mays
  Coding DNA Sequence Number=SeqID_37037
MDLGLEDRRKEESAGQGGALTERRAAARDREARRRRGAGSLGSVREAATGTGSLGSVHPQNKMHPGAF

SEQ ID NO: 80413 - protein, 266 aa, Zea mays
  Coding DNA Sequence Number=SeqID_37038
MNAKARVAQRHHARFRPLAYAACSMPCGSIGSPLEWGARVYADRSESHQTRSGHMSAPDPRLGPDDGPGVRHFSMGSELTVDALEYITFSGHVAALDLPMWWGQALLLAQSSRPRLGVPTKHFLRLKAIRMTKRSHGVCSGAGMEQRRTKAKGRNRLGENAKRLAFSPEVGPRATVGTLKLGPWLAPASGDYSAPATALDPTTWVGPVPPRVWSLDPHGKTSLYGVQAAHSGVPRFQDRTYPGLNQGLGGGPLPTRVQTWSDGIWT

SEQ ID NO: 80414 - protein, 229 aa, Zea mays
  Coding DNA Sequence Number=SeqID_37039
MGQIGSTSFRPYYGGTEPHPAELPGRPCSSWSTGLKPVFPQKSLWAHHGSSLLMNLCRNSYDVRTWTSSTNVDGKRRSEMHGCTYVYVNLVRSALCRACLAGPLGNALDPGVVLCLEIFKGLPGGLHCLGAWRRLRHIKLADLLLQFPLFFLCFELVLGQQLASPGEHFFPEGEIRLSSGEVRLSPVQGLLLCLKVFLGEGGIAGLALELLLPFLQPFHSLDLLGPLGF

SEQ ID NO: 80415 - protein, 167 aa, Zea mays
  Coding DNA Sequence Number=SeqID_37040
  Subcellular localization annotation: CTP_CleavageSite=73; ConfidenceScore=5.21e-01
MAPNPLDKGKGAANSASAPGTRPTDRSGSQQQESAEGGAGGPPPATAKTAPAASHAPVRDPATAVPASGGVAVAEEVPAGGSTPTPDIGGDTGGVSSSNPPPAPEEMEVLSDTEAAILREWKALEAEHQRLSDWCTQLEERTKTTSRQFTSERSQLKRDRKEYKRDL

SEQ ID NO: 80416 - protein, 650 aa, Zea mays
  Coding DNA Sequence Number=SeqID_37041
  Homolog annotation: Hit_ID=Q6JAD6; Match level="QueryCoverage=93%, HitCoverage=96%, E-value=2e-91, Identity=59%"; Hit description =Putative uncharacterized protein
MEKCKPIKTPMPTNGHLDLDEGVTLIDRVPSPVLPGSSPLVMPRTKNVSAPGGGDDEDPRRPFRQVKGTTVYLEQQEGRKKRRTDRAARAAAAAAAAAVQAELGDQPQTPSDQIAFRVRRLTSRPRSSTHTSASTSPPTLPAPVTPIAPSTSTAIPATSTTPASSAPPPPLPLQLLLSLHHDSGSVMRLRFVLWFRILDCLTFSVLQRHGAQMSAQIALRVHRLLDLLAFLLAAGADSEAHLTYLPGLQTLLTISGRPASYLDSPSRRLAFTVSDTALLTLLVALMAVWLRVQLTSRLCFARPSQMGRDVHRQTLLQQAKYLYELIRRTLLPRMGYREATTHIQLWLLGALVSHSEFDVVDFLICEIEDTVLDGIRARRQLPYAHYLCHIFAQLIQPPRFQSTLEASRLVFGSYRPALEIPVPASAPVFDSQAEDAALRQFDTQGTTADDDDDDFGVPPPPPPPMPPRSHDHEAGSSSAAPPPQAMDPALASILANLAAEQARLSERMLSMFQNMQDRQDALQQQLLQDRAETRAFMALMLQHSGISVPPVQSAPPPPLHAPVVPSILSGPPVGTSPLRPVTLAFTSPVPSSVCPQPPVPPASAVTTTAVAVSVTASVLVAPAARPQSESVPAPASTADPGSETDSDPPP

SEQ ID NO: 80417 - protein, 147 aa, Zea mays
  Coding DNA Sequence Number=SeqID_37042
MGKGNKRKREPTPPSEDFGDSEYSEEEFSSESEGSLAPVSPPASSDDSDDSQGIAAEVWTYIRAVERSGLEGSDESEFSLDEEDSDGGEDEDDDDDDDGDDDDGGDGAGDGSNGGGGSGGKGGTRGGSSTGSTRGGGGKGSSSKASG

SEQ ID NO: 80418 - protein, 119 aa, Zea mays
  Coding DNA Sequence Number=SeqID_37043
MASGSSRGKGAHSLVKENCGFTRWVDPRPIFPHAEYISYLQNRIFDLEREVSNINDEEERDNNNGGASQVQVCPDPYCCCPCHNKNVGPPSSPPHPQQTPTMGGYYGEGSTQFGMWEHY

SEQ ID NO: 80419 - protein, 241 aa, Zea mays
  Coding DNA Sequence Number=SeqID_37044
MNALSREGCRHFKVFDRSNEDFERGIFQVEDPVLKRSAGALYDRMWGPHGRDIVQKRSDRAMEQMAHDEEVEYLGNLESTVPLAVGAMAGVEEQPASPTDVGEGPMEAPVPTGEDTSVAVAPAAEDPAASAGPSQVPTCGPTQTTPADVTNFVAAATVVPADYCVSGSESESLSFDDEFGSPFSWSEESSGEDLDNFVALDAATAESSPRLEVGEVSDLPSPRIERQRRKVVSKHSVGEMS

SEQ ID NO: 80420 - protein, 195 aa, Zea mays
  Coding DNA Sequence Number=SeqID_37045
MDVCVDDYLVGGVMIFDARIGRGLVGSDAGQLAVVPAPVAAASVIATTEAKGSSQDPWSKFCASGEITSVATTKDMAGSVAQQLKLATRQLKHAVAFVEHVASGALTSEFAAERRRLEGRIERIRTQHTEAVRDKSAAENKTRKLKEKLTAVEAEKEDLGRHLAAEKQDANRACVEAQAARAEDKLARAEANLTI

SEQ ID NO: 80421 - protein, 185 aa, Zea mays
  Coding DNA Sequence Number=SeqID_37046
MQKKKIGNKIAQFRSCTFTPRTGKTSAKVVEIVPCARNKWGNWWDYWFYVSGGEVEDLPGLPAAVMCSHCYVAFPPFEVAEDDEDEGALRYAVRMSSGHNLVEEFIRYGVWPLAHGWVLGEVCPCRMPSLDDQLVRSPAFALDLRGRNPTAFVREVEAEASRIVGRYVPRTETCGVGIFTVLMFV

SEQ ID NO: 80422 - protein, 129 aa, Zea mays
  Coding DNA Sequence Number=SeqID_37047
  Subcellular localization annotation: CTP_CleavageSite=41; ConfidenceScore=5.11e-01
RVRALGSGGAEFAVFRVLARVRALGSGGAEFAVFRVLARVRAVGSGGAEFAVFRVLARVRALGSGGADFAVFRAALSFCQTGQWSGGVTAVTSALPGARVRIELYADGGYQLRIRRLEGTPNYGPRQAR

SEQ ID NO: 80423 - protein, 72 aa, Zea mays
  Coding DNA Sequence Number=SeqID_37048
MARSSVTVRVRESETEREEEDTSTEALERRQRGRERRPEMEEMDERRDGGRSRSGEERSGRAAEWVRGAIGN

SEQ ID NO: 80424 - protein, 100 aa, Zea mays
  Coding DNA Sequence Number=SeqID_37049
  Subcellular localization annotation: CTP_CleavageSite=28; ConfidenceScore=5.29e-01
MQATCNRTKGAHPFDSDASSMGAQAHTSCNRRASYYVRENCTATCAYTAPSRLRNRCRDSRQPCAWPNSANQAHRSWGPGKGILRKGSFSAKEASPEPSY

SEQ ID NO: 80425 - protein, 88 aa, Zea mays
  Coding DNA Sequence Number=SeqID_37050
MSRADVLGGQLAEATERPVEPSARAGFPEETLAAMAQAWCRQDLFVGNRIVCPSKSYFSRKVMSEESLGSVDLAAYVYSVVFRIPLSK

SEQ ID NO: 80426 - protein, 149 aa, Zea mays
  Coding DNA Sequence Number=SeqID_37051
MGKSKKGGSSSHHSGDKRKREPTPPSEDFGDSEYSEEEFSSESEGSPVYTSPPASSDDSDDSQGIAAEVWTYIRAVERSGLEGSDESEVSSDEENSSNSSEEESGGDDDDEGDGDGDGDSGKGNGKGGSKGDGKGGSGSSKASGKAPLA

SEQ ID NO: 80427 - protein, 90 aa, Zea mays
  Coding DNA Sequence Number=SeqID_37052
  Gene Ontology: Mol. function=kinase activity; Cellular component =ornithine carbamoyltransferase complex; Biological process=amino acid metabolic process
  Homolog annotation: Hit_ID=Q6QP54; Match level="QueryCoverage=71%, HitCoverage=22%, E-value=8e-13, Identity=59%"; Hit description =Putative kinase
MAPPVDVAGLRPRLGDVEAPPKPRSSLSSVAEAESEPLGRARRRLLAKARAESEPWGRAKRSGAVLLSGRSVERRSDGGHFGSAGGRASG

SEQ ID NO: 80428 - protein, 487 aa, Zea mays
  Coding DNA Sequence Number=SeqID_37053
MGCTCVAFFLLLFEERDAVGVGVLQSPLGFKDFHHAARLQSLTNASRMFIIRAGEGVHRVGACLRVGRGPASSSGIWGRRASSSSAEEASSSHAEEGALLLPGQGAAVHLLPSDDRRLHRGVAQHVVCREGGTHVPGRSRSHSCGESGSEDLPVHFGAAAARWCGVGGQVATVVGAEVVVAIGETASTEAVASTDETVNATCAPDLRLFGFNGCFSSPVRGRERGPFSSSVCPEAIAAAVLPPETEVVAALLVQWTPASHLEFVVPQALWSRKPPRALPTFKSRYHCYPKYDLRPLCDELKPEAAVSAQTEAVSAPIEASSAQEQVASQAEEVQWRRLELSQVIREWDQPRSHAAEALSRAEVLGGQLAEATKRPAEASARVGTLAESLAVRVQARCWRPPSWWRSFRSCRCLRPGQILPRVEMTPRALLLPLSMSEPIGTDLFVGNKIAYPSESYFSRKVMSEDSVIDIVEKARKSFFTRALGLVQ

SEQ ID NO: 80429 - protein, 53 aa, Zea mays
  Coding DNA Sequence Number=SeqID_37054
MAPLRRTVYRVLYSVSTKISWRIEFRESSRDVTQEWLDMVKIARKGLRGTKRR

SEQ ID NO: 80430 - protein, 83 aa, Zea mays
  Coding DNA Sequence Number=SeqID_37055
  Subcellular localization annotation: CTP_CleavageSite=34; ConfidenceScore=5.09e-01
MVRERRTQTNTMSKNTRFISRFGHTTKVPYFLVEAPTKSRASFNPNPPFADHKDKNRLSVRLSVRLNQYFQKGEQCKNRLNLF

SEQ ID NO: 80431 - protein, 108 aa, Zea mays
  Coding DNA Sequence Number=SeqID_37056
  Gene Ontology: Mol. function=transcription factor activity; Cellular component=nucleus; Biological process=regulation of transcription, DNA-dependent
  Homolog annotation: Hit_ID=Q6J832; Match level="QueryCoverage=97%, HitCoverage=45%, E-value=6e-27, Identity=62%"; Hit description =Ethylene-responsive element binding factor
MPLPPSLELDLFHRAAAVVTGAIVVCFPFGSIPVTHPYYFFGQAAAAATAEAGCRVLKLAPTVTVAQSGSDCSSVVDLSPSPPTAMSARKTAVFDLDLNCSPPMEAVA

SEQ ID NO: 80432 - protein, 58 aa, Zea mays
  Coding DNA Sequence Number=SeqID_37057
MLVDYTMILNGPSVSVEGPTQQGVESVMEMKTGLLQQMGCPMVVQGASLAEVQGKATT

SEQ ID NO: 80433 - protein, 643 aa, Zea mays
  Coding DNA Sequence Number=SeqID_37058
MPSSSSSTANTPLAYSSSEDTLSDLAAAELQPGHTVEFGVSRISSVRVQDMKQLRYFGNGVGRVLGRKRFPSPRASWSCLRRSSPPAFRLPAHRFVAEVLQRFEVFAKNYCLHWQKRKIGNKIAQFGSCTFTPRTGKTSVEVVELVPCARNKWGNWWDYWFYVSGSKVEDLPGLPAAVMCSHCYVAFPQFEVAEDDEDEGALQCAAHMSSGHDLVEEFIGYGVWPLVHGWVLGEVCPRHMPTLGQQLVRSIAFSLDLCGRDSATFVREVEDGAVRIVGRYAPRTEGLWSWDIRGSNVCLNRVFELNRLPYGGYPGDDAAAAADRREKKPMAVAEEGPSREAAPATKKRKIGTAVGGLGVSDRFAMELMGTCVALGGRMSSSELRESSGANAEVMEKDRQDAVRKCRAVTRVGDPFREAKKAWGGAKSAAPGSSKPPPATKPAAPEPSNSSAGAGAAAAAADKLPSAEPAKERRPLSPDPWSNFCASGKISLAAATKDVAGFVSQQLRHASQQLKHAAAFADHVASGALTSEFAAEIECLQAQHTDAIREKSAAENKSRRLTERLAAVEAEKGDLQRQLAEERRDENKAIADAQAAQAEAKLARAEASLARQRAEELEKRLSALRNRVDKTEASTRAEVERTHV

SEQ ID NO: 80434 - protein, 99 aa, Zea mays
  Coding DNA Sequence Number=SeqID_37059
MAGEQSVVELALLLASETPDTRGDSSIVVDEATTPQAKDVAVDPAEGSDDDNEDTDIEEDSTIIHPTKPSHVDSGKSTIKGGHIEVLTKFNNIDWALKI

SEQ ID NO: 80435 - protein, 115 aa, Zea mays
  Coding DNA Sequence Number=SeqID_37060
MDSSASIVRNSERGGATRFKQYLGSRGGNVEGCRNVPPNICDYFRRELDNDQDKRKARIAGSQMEMGHLNGDPMLNEQDTKSDTPLPSSIVAHGTSREKLVDWTQKNVGDTHVGK

SEQ ID NO: 80436 - protein, 80 aa, Zea mays
  Coding DNA Sequence Number=SeqID_37061
MAMNKSKKGDKNKSFDELLLEQCPYHPHHNDYITDMLGLNNGVLSLKDDLKCSYKCDIEVVYLVAKSQLISQVQEVANLS

SEQ ID NO: 80437 - protein, 61 aa, Zea mays
  Coding DNA Sequence Number=SeqID_37062
  Homolog annotation: Hit_ID=A7P7D9; Match level="QueryCoverage=98%, HitCoverage=12%, E-value=4e-09, Identity=51%"; Hit description =Chromosome chr9 scaffold_7, whole genome shotgun sequence
MENRAKQNNPSYDGGLTEDQLVYCINSFKEAALSNDQKFGHIDISEKQKLRQNCKLPLKWH

SEQ ID NO: 80438 - protein, 88 aa, Zea mays
  Coding DNA Sequence Number=SeqID_37063
MAGSAASLPAGSAASLPAGSAASLPAGGYEIDGSGYGYGAVAINRYEKELQVHDTSPKNNSVNKKDVVEPSLRLMVKAMYWSVVIDTS

SEQ ID NO: 80439 - protein, 485 aa, Zea mays
  Coding DNA Sequence Number=SeqID_37064
MAGQAIPGAGVPARTGQDQELGGGWPDVDARGRRLPEAPDHAAAAEGASVLLRGPRTDLSWDELEVLVKGITGESFIPESLILPQGIPALCDDPWLRTAILATLPTLDESGVAVRQTGGRDPHREIWISDALAGGPQTAGVAPTASAAAPRPWTREKGLSVRGLLVGPRRPAPRPRARRGASVLRHHHHWVRRHHSHHHHRSRRRHHHLGVISPKGTSSNNNNNSSSKSNGRPASRVARRSRAPSECSPLFSISLSITPTGLDPSSACQGFLPLCSQGHASSAPGCRHRESATGLPCSSWGSGSSGANVKRRRSGGRGPHCSDSCRSLNDGDAIEYTVGSGRGGPNCARPAIKVDAGGASSSIPPPTPEETDVVFGRRLRSGAEPEAAPVPLPRVLSRAHQALHETEAAILREWEALEVEHQRLSNWRTQLEERTKTTSRQFASERSELERDRKDYKKDVQKVYALELEVGRKKKRLAKKEEALN

SEQ ID NO: 80440 - protein, 99 aa, Zea mays
  Coding DNA Sequence Number=SeqID_37065
MEEQRVQQTAAVESLQKLQRELKGKARDAALAEEKLKAKGESLDRREMDPTRREADLARREKDLAFKEEMLERWEKLLAEHELEAEEKERTLEERVHRF

SEQ ID NO: 80441 - protein, 46 aa, Zea mays
  Coding DNA Sequence Number=SeqID_37066
  Homolog annotation: Hit_ID=A2WQX7; Match level="QueryCoverage=80%, HitCoverage=11%, E-value=5e-09, Identity=81%"; Hit description =Putative uncharacterized protein
MGMWKVVCVTDASAYIASWIVRLLLDRGYTVRATVRDTYELGLSVY

SEQ ID NO: 80442 - protein, 91 aa, Zea mays
  Coding DNA Sequence Number=SeqID_37067
MASGIEQQQQLLELEMFSIIYAKNVRRLTLDRATEARAENELLQPAAGARDRWWRPRRRAAATRPSGKDAVQPFAAAASWTCAAKQSRRKQ

SEQ ID NO: 80443 - protein, 115 aa, Zea mays
  Coding DNA Sequence Number=SeqID_37068
MFVASHKQPSVKGDIKEEGTSFTVAEELWLEVKLGGVGGGATLNDGLGELVRDDVDDPCPYNAIHTDLIECGGLMKGITDVWRVGGKGIVLRVILIKVDVTRRQLDRNTHTSDVV

SEQ ID NO: 80444 - protein, 595 aa, Zea mays
  Coding DNA Sequence Number=SeqID_37069
  Homolog annotation: Hit_ID=A2YMS1; Match level="QueryCoverage=89%, HitCoverage=65%, E-value=0.0, Identity=74%"; Hit description =Putative uncharacterized protein
MESSSGEELEEEFPGHEWITPQSSINAAYQSQTEKGIRKICSDLLELKDAIENLSANRQSKFLAFLRISEEVVEAEQELIELQKHVSSQGILVQDLMSGVCRELDIWHKSSKEEDATKKDSETELDEILSDDTQDPRTIFLDKLDVLLAEHKMEEAVLALEAEEKKYLVADESGKESNADNTAFKTALVKRKTILEDQLVRYCGQPSLSMNELRKCLSGLIKIGKSSLAHQVLLKAYGSRLQKSVEAFLPNCSIYTETYSATLSQLVFSAIAKAAKETNTLLGDSPMNTNRIIQWAEYEIETFARLVKENSPLPESVSALRSACICIETSLFHCSCLESQGLKFSKLLMVLLRPYIEEVLDLNFRRVRRKIVDGARNDDILLLTPQEGSPLSGAVSPNVMLTSSGKKFMSIVNDVLDQILPMTIVHFGGAILNKFIQLFDRYVETLIKVLPGPSEDDNLLESKEPIELKAESDAQQLTLIGTAYTVADELLPAAVSKFFDIQAEKKGAGGSSEGLGPGSIYAMEYKEWKRNLQHSLDKLRDHFCRQYVLSFIYLEGKSRLDAKMYLGRKDDDLLFDPDPLPSLPFQVIAFFRNHA

SEQ ID NO: 80445 - protein, 417 aa, Zea mays
  Coding DNA Sequence Number=SeqID_37070
MVTTSSMVGRSEPGCGLCPALSFKDIHHLCWGGGQAELELYLPRGFVGHLLPQHSGERALTGLAGGSDFDNAGPVGRERRQLQRVGLAGSAGSGSAPGAPSRRESGCRAARTRGPPKTSRAARAAFAFLGCPAFAPMAAVVGAEVVALKKSSSPTGSPPPCALRASGSLALISCPHPLEWGRGRGAHCSSVRPEAITAVVWPPGAEVVVAAAGAGVSEPPVGVLSPRRPSSVGGCSYLRGWNRSSVCNGTLSAGVCSLRLSGPEHESLGSVDLAARGFSCLVKGTFGRSAMSWSRRQRCQHGHRQSWLEKRLRRPELGRAVHWRDRRRSWVAEATSQADVLAGQLAEATERPVEPSARAGFPEETPATMAQAWCQQKVMSEKVMSEVSVSRRRRSPSARSALAAYVYSVVFRIPLSK

SEQ ID NO: 80446 - protein, 150 aa, Zea mays
  Coding DNA Sequence Number=SeqID_37071
  Subcellular localization annotation: CTP_CleavageSite=20; ConfidenceScore=5.49e-01
MRRRSFLSFFFSLLFFSLSRAVGRPRPAQPPLAPPLGPNWPMPPPTSPFPPNSFSLPLIFSHFLSLSLSRRPYPCPKPPPPPAQPPPSAAPAAGRPAPSPSPVSPLPLPLYSLPHHPLPFPSPPGPLAAMAGSDSHRTCPQAGASPCRPL

SEQ ID NO: 80447 - protein, 234 aa, Zea mays
  Coding DNA Sequence Number=SeqID_37072
MVSHSGYGGYKCGHCTTVVGVSEALAEDTIEAIALHGLTTFCGFHPLELSTHPIGLFPAEKEDDPMWKDRVEHAKDIWALYPGQTAHLTVRCMDALYRLQVRRGEAMSHLMALLEATKITLDNREEHVVELSTEMVEKDLQVEQMSNEIQELEELVGTRENTIEVLEDQLINIQQQLAEANQHLDMHHQEIQDMEANEDVDIEGGEEPEPASSLDTAGSGRPPSPESSVASFAH

SEQ ID NO: 80448 - protein, 88 aa, Zea mays
  Coding DNA Sequence Number=SeqID_37073
MATVTLEVKGETQLNNLAEKLATAGVRHKDGFLTVTTATTSDYRADYRDYRADYRVAAEGKRSGDHVGARYSRTEERKRRWGITSMAR

SEQ ID NO: 80449 - protein, 91 aa, Zea mays
  Coding DNA Sequence Number=SeqID_37074
MALLDPPKRLQPEVALNLVRNLLGWGGHHCLPPQDVREGDAPSHFFLQHSGGRMFTSLVKVDSGLSRGSIPRAPNSLGWEASRAAAPSLWL

SEQ ID NO: 80450 - protein, 51 aa, Zea mays
  Coding DNA Sequence Number=SeqID_37075
MSIEERKISMIGKSTALNPNTEEFVLRPLDLLVIIPISERQKGLGQWIVID

SEQ ID NO: 80451 - protein, 138 aa, Zea mays
  Coding DNA Sequence Number=SeqID_37076
MAVTFKNKITLSPGAMFRFGTISCTADIEGTLHRVADPPEKKPSSGILREAKARLWTSPQLTSRGKMWRNLPIMMPGDKETDAEMCGDIMKPGNGIWRSPCLGTKPQKWEKLLTNEYTEKDVTPAALITDRLRIGSES

SEQ ID NO: 80452 - protein, 204 aa, Zea mays
  Coding DNA Sequence Number=SeqID_37077
MPDEVFEVSAVPKGVAHVLVIRTLGVEDFIQCPHSSVRCPTGSSGRWPDSVHLLTRPFFPVLFWMLVCILPCVEAGVGATTAHHVPRQLVLLRLILVDVGGLEVRRPLDGPETGSKCRNSACILLPMFVPSVPGRGVGSKPSRPSPEWTTSRSYRRLNSGGTTSRRYTVISVILLSAPHLIFMPSVAQSADGASCVSLAVNGVT

SEQ ID NO: 80453 - protein, 423 aa, Zea mays
  Coding DNA Sequence Number=SeqID_37078
  Homolog annotation: Hit_ID=A2YGC2; Match level="QueryCoverage=41%, HitCoverage=75%, E-value=3e-12, Identity=30%"; Hit description =Putative uncharacterized protein
  Subcellular localization annotation: CTP_CleavageSite=47; ConfidenceScore=5.76e-01
MAIPPPSSAAMAGSAAPAPCPVPARLGRPRARPARPPPCPPGSAAPMAARPRSPLAGSTAPVAENDPVEEPEELAGEAPEQQSVVMRLMVLVMTMMLVVSIATTAQAKLKLWKETSRSSKITTSSRCGLAATPSRLPVKAAVIYVSFSHFDLLKELYGRLRRMMRPLHHHWAPPASGIAAGGDPDDGDGDDSSSHDTDFSANPEPEGWVARPITRDAARGCHFHDALDTLLRRAFNRHTWSVEYRCVVYQHSRGVYPDRWEATCLVRCPENSLQGAEACSEHYSISERDSAEVAMQDAARRALSHYCSVFGGAADGLDLKYYPRRPSGSTRGVIVSPVGEGNPRLSSTVNLAAVLNTELDHALDELSRARAEIALLRTERVERRHLDGGSPAPVGTQHPYRSPQRGHQSYGNPDCKTKITLEP

SEQ ID NO: 80454 - protein, 124 aa, Zea mays
  Coding DNA Sequence Number=SeqID_37079
MAVMGSTSDKMYLCQNRIGPLIGPSTRVRSIGTAKQKLELVRQSLALDNLQVYCNTLHEEVHVLYARLHPDVPSDVAAMGARPSGTTNEGPDGELDLFRPPPSMNLADERSPAAGNEATKDDED

SEQ ID NO: 80455 - protein, 146 aa, Zea mays
  Coding DNA Sequence Number=SeqID_37080
MGSLAVPAAEERAEGLTGGDIAPVRWPRAGELVGGEESDLSRAKLTNQTGGRPKSGEGDLGLPVKFYRVRGLGELHGPMAELTEALARLGGDWSGLATVPEALAAMAGGKELAGAEGWLAGDEIWSPEIRFVSLLKSEANPGFCRV

SEQ ID NO: 80456 - protein, 74 aa, Zea mays
  Coding DNA Sequence Number=SeqID_37081
MEGKPSRERKSELKRVSPPLAGVGEFICGRESKYKRSSSLISCDKQMIRIEFLSLQGLTALAYNAPLTPTTAVQ

SEQ ID NO: 80457 - protein, 122 aa, Zea mays
  Coding DNA Sequence Number=SeqID_37082
MIILKRINEEADEVEAYIVKALLAQQDKECIFVVCLEGAFGAYVNKKGRHNKNFGRTVIWKHFQGRAGFATCPLLLDEIANVRERLLDFFMNEVSIRIVAPDEVGAWRVAGNPHRCTEAYIK

SEQ ID NO: 80458 - protein, 263 aa, Zea mays
  Coding DNA Sequence Number=SeqID_37083
  Homolog annotation: Hit_ID=Q2R4R1; Match level="QueryCoverage=46%, HitCoverage=15%, E-value=6e-09, Identity=30%"; Hit description =Transposon protein, putative, CACTA, En/Spm sub-class
MAEAEPELLGRARRSPSPSPGSGGAEFAVFRGLSPSPSPGSGGAEFAIFRGLSPSPSPGSGGAEFAVFRGLSPSPRPGSGGAEFAVFRGLSPSPSPGSGGASYGAFGQAWLPLYADGGYQLRIRRLEELKKEWWPDFVEWVTSDEYIALGEKGKQSQSMNKFRQKLGRRSYTVQKRKWAKEDAQALTEGKSIPFQDMPDGRHKDWARARNPSGDVDLNEKSVAGMGLAQGDGPRKKKRRTTKEYVKRIVDEYEAKFEKLTALC

SEQ ID NO: 80459 - protein, 257 aa, Zea mays
  Coding DNA Sequence Number=SeqID_37084
MYAARSAKVGLPIGEECGGDENDGFGYDYGTCKWYSFRLERQEIESMRSCSPVLLLEAPPAPPLSASAAGVAAGGDPDDGGGDSSLSFSTNLSEEQELEGWVARPITRDAARGCHSHDALDTLLCQALNRRTWSIEYRCVVFQHSRGVYPDRWEATCLVRRPENSLRGAEVCSEHYSISERDSAEAAMQDAAWRALSHYCSVLGVVADGLNLKFYPRRPSGSTGGVVVSPVGEDNPRLSSTVNLAVVLNTELDHALD

SEQ ID NO: 80460 - protein, 179 aa, Zea mays
  Coding DNA Sequence Number=SeqID_37085
MNVNGNLQNGIGIQMGQIKAIEIKETVEKGRNRKSETAEKKRNINHGFVGILCWNSDPVANPPRTELLRRKDPDGHEMEKVRLRNNRHMVTYERQLAVGVDRGNHSSGRTRGFPLGRHLNSTGEQSGSRIAKGQRGSECRKARTRARKAEAAEGAVHMGLSRSRYRFQKSAQSSPGDYL

SEQ ID NO: 80461 - protein, 113 aa, Zea mays
  Coding DNA Sequence Number=SeqID_37086
MGKSNKRKHEPTPPSEDFGDSEYSEEEFSSESEGSPAPVSPPASSDDSYDSQGIAAEVWTYIWAVERSGLEGSDESEYSSDEEDSSDSSEEGGGDGRDNDNDEGDDDDARRWR

SEQ ID NO: 80462 - protein, 160 aa, Zea mays
  Coding DNA Sequence Number=SeqID_37087
  Gene Ontology: Mol. function=protein dimerization activity
MEDEHHEQEVHNQVRPSPHVRNEEEEEILIDMNDELYEEGDHCGRSQEEGDDDDDAEEEEEGEELEGDHVSKAQKTNRGRKRLKGGGQLSPSKDKAKRGKRVGCWKYFKEIHVQSKKEFGVMVTKAKCKFYYKSYAYHPGGNFTAKPSFTEVHTVSEQIG

SEQ ID NO: 80463 - protein, 40 aa, Zea mays
  Coding DNA Sequence Number=SeqID_37088
MALLSTMETCSASTLNWCCLTALLGTGFGTAAAEVDAGSA

SEQ ID NO: 80464 - protein, 276 aa, Zea mays
  Coding DNA Sequence Number=SeqID_37089
MHCALPPFEPPDGVLQRCLALAFVGGARPRGDRHLSAIARLQGFSSCSPAAFPHQWAVWWGDASRAAASAPPSASRIFVILAEAEGDLSRGSNSRMGRQAISSFSIQGRRHLPTLRRGELRQRRAGRPQASRLLRRAHRWTVQDAVRRMGGIRVLGLSCPHSGTTPPCGGRGLPFRKDLSGELPVQAGASAIRRCGAGAQVAAVVGAEVVAAGEGFSADETIDASCGRTPGCLALMACPRPSSGDAGEGLVTAALALRSSLLLFSRPKRGSLSLLV

SEQ ID NO: 80465 - protein, 199 aa, Zea mays
  Coding DNA Sequence Number=SeqID_37090
  Homolog annotation: Hit_ID=Q6QP51; Match level="QueryCoverage=70%, HitCoverage=84%, E-value=9e-18, Identity=38%"; Hit description =Putative growth-regulating factor 1
MRPFGSVHIRWTGTKEAGPHVMDRERGRCGKDPSRRRKRAPSPPTDQGFKGWPLERVSTAAPERSGSVPTTDQGFVGWPLERVRQPPRAHRVRDDSGAARSAPTAVLATPGTTDNKSRSTTEFSLGRNRKLRLARPHAPASGGGLRLARPQAPTSGGGLRLARPSDSASTPVSGGIASSPDPQPRPQEKSPPRPTLGSD

SEQ ID NO: 80466 - protein, 61 aa, Zea mays
  Coding DNA Sequence Number=SeqID_37091
MMEGSLVIRTSYYSEVEGFPHLLRSCALRMGIRKKPEYVWKELKVPFGPGTGSGCRLEGGE

SEQ ID NO: 80467 - protein, 210 aa, Zea mays
  Coding DNA Sequence Number=SeqID_37092
MGPGWHSPVEQVVPGPQARHVGRHGTTYSHMASPVEPGVPHRLIPSPPGPSAQPLTRTRTRHPCSLSLPDSAIRRFPFGDWRLGSSVAAPPRSNDLGALGSRPRCRSVVDASSSSSGVDRARRLRAPLRDGAGDRSSAVKVAMADDDNVNPVTGNDDLRATGLVPDDEDDIQADAAALLGIDLTSAPVDLSSNPTEREIGLHLFLNDFGG

SEQ ID NO: 80468 - protein, 137 aa, Zea mays
  Coding DNA Sequence Number=SeqID_37093
MAGSSCHLWGGPLGVELLPQPPRGVLCGLLLQRSHAAASSLEREQSLGGRVEPHLLPPPHTVSSERRLQRRNRGEQRRPGEEKRAPAGAVREVAGSPVDVTRREEDPISAGISGARQPMRREEPRPPWASGSRSWVG

SEQ ID NO: 80469 - protein, 162 aa, Zea mays
  Coding DNA Sequence Number=SeqID_37094
MASALRWSPPLASRWCRGRWGRGPLCFGTHVEVATVVVLVLICVPPVPVVCDVCRLFPDTWPPGMQAQCVEYLVREAKLRVRTPWIAALDTRALAVEWWSVQAYGLGPDPGLPTMHEPLAAVYGRRATKCILGCRLTSELADGVLVLALQLLLHRFIKRLDP

SEQ ID NO: 80470 - protein, 229 aa, Zea mays
  Coding DNA Sequence Number=SeqID_37095
MSFKSLEFVVKLGKEGRKIEYKEPVLLSLECSCTRSSKSQNQRLRLHEDNSLMRKTKGISWFLDMCPTRVPKCKKVDKVQIKDKVLETEKIELEKRWLEQPKTAQSGCTGLSGGAPDSVWCARLARAKWLLSGLRRRCTAIIHRTVWWCTGLSGGPFTGELIALGNSSSTYGYNSPDCPCKGERLQVVEIPRKRDIERQSKTPWYSSWSLDHLRGVDCNPRPLGRHNVE

SEQ ID NO: 80471 - protein, 131 aa, Zea mays
  Coding DNA Sequence Number=SeqID_37096
  Gene Ontology: Mol. function=transporter activity; Cellular component= membrane; Biological process=transport
  Homolog annotation: Hit_ID=Q69VR7; Match level="QueryCoverage=42%, HitCoverage=13%, E-value=1e-17, Identity=76%"; Hit description =Phosphoenolpyruvate/phosphate translocator
MWPHLFQLLRFATLGASRGCRGVSSHDELDVVCVAVTNLSFVSVTTVQYAKLLPLALIHMLGNVFTNMSLGKVAVSFTHTIKAMEPFFSVLLSILFLGEESFQYLSGVSPFTFTMVSRYTNHKAQFYFDHE

SEQ ID NO: 80472 - protein, 75 aa, Zea mays
  Coding DNA Sequence Number=SeqID_37097
MGHDLVLYMLQNGSAGDVLVDVMQLCKTFIRLLVYLISIKGETENKDIVNQDESFMDIDSAECRLEEPAWSNRIC

SEQ ID NO: 80473 - protein, 293 aa, Zea mays
  Coding DNA Sequence Number=SeqID_37098
  Gene Ontology: Mol. function=carbonate dehydratase activity; Cellular component=chloroplast; Biological process=carbon utilization
  Homolog annotation: Hit_ID=A2Z248; Match level="QueryCoverage=85%, HitCoverage=79%, E-value=9e-95, Identity=63%"; Hit description =Carbonic anhydrase
  Pfam annotation: Domain name=Pro_CA; Domain location=69-225; Score =196.8; E_value=5.4e-56; Accession=PF00484.10; Description=Carbonic anhydrase
MASRDHTGLTRQLLDFQHDTIDEVGAEHGPFMDLKARFMDFKQRNYVFFDIAVSGTMDRENFSNYQNLAEQQTPKFMVIACADSRVCPTAVLGFQPGEAFTVRNVANLVPPYEHEGSETSAALEFAINTLEVENVLVVGHSRCGGIQALMSMKDDSTSGARLSTRAAAGNLSFDMQCKHCEKESINSSLLNLLTYPWIEKRVNEGTLNLHGGYYNFVDCTFEKWTLLYREGLEGGSKSESLYQITVSIAMHGTMALACQLAVVLHTHGQELSTVEAQSHNGVRCDAMNNMVAK

SEQ ID NO: 80474 - protein, 347 aa, Zea mays
  Coding DNA Sequence Number=SeqID_37099
  Homolog annotation: Hit_ID=Q6QP51; Match level="QueryCoverage=40%, HitCoverage=90%, E-value=8e-08, Identity=32%"; Hit description =Putative growth-regulating factor 1
MEATPHSVRSSASARMTKILEAEGGAEAAARLASPHQTTHCKSKATLEHPIRGLKSTGAGTHTSYELIRSTKKANHRTRGMDRERGCCGKDPSRRRKRAPSPPTDQGFEGWPLGRVSTAAPEHSYLKPITDQGFEGWPPRKGSIAAPERSGSVPTTDQGFIGWPLGRENSAARSAPTTVSATPATTHNKSRSTTEFSLGHNRKLRLARPHAPASGGCFRLARPQAPASGGGLRLARPPDSASTPISGGIASSPDPGLGLKRSLRLDRPWARTDRANRGYIISLFLACSSYKEQDQRPIWLTPAMGNDGLKRSSDGHAITCTGPKLSPNGHIGMYTGLRHSTARHISA

SEQ ID NO: 80475 - protein, 52 aa, Zea mays
  Coding DNA Sequence Number=SeqID_37100
MWPLLLQLGALGAISSGGELTTMANRDQAPDVLDPVVSLSKRYDPPWPPAEE

SEQ ID NO: 80476 - protein, 242 aa, Zea mays
  Coding DNA Sequence Number=SeqID_37101
  Gene Ontology: Mol. function=transcription regulator activity; Cellular component=nucleus; Biological process=regulation of transcription
  Homolog annotation: Hit_ID=Q69MD0; Match level="QueryCoverage=95%, HitCoverage=93%, E-value=2e-30, Identity=43%"; Hit description=BHLH -like protein
  Pfam annotation: Domain name=HLH; Domain location=16-93; Score=44.0; E_value=5.1e-10; Accession=PF00010.17; Description=Helix-loop-helix DNA-binding domain
MDRECSPLAATTRSGTGRSHSEAERKRRQRINAHLATLRTLLPAASRELTVRGSSSSNSIANTVTYVCVYELIMQMDKAALLGEVVRHVRELRGEADAAAAGAAVAVPGEGDEVGVEEGHQHRFCHGGERAARRVRAWVCCADRPGLMSELGRAVRSVSARAVRAEIATVGGRTRSVLELDVGGRHHDGEGTSTSSRPALQAALRAVLLSREEMLGAECYKRQRFSAHLARVYDSGAVEVTD

SEQ ID NO: 80477 - protein, 108 aa, Zea mays
  Coding DNA Sequence Number=SeqID_37102
MPRGEEYHVVAAVEGHELETPEAEHRPGLKRLLKTPHLDLNGKPEQARNREMMYPLLARSVRAQGRSRRRLLLRPRPGSDEDAIPPETEVEAESGGRTRRRPPPEAGA

SEQ ID NO: 80478 - protein, 296 aa, Zea mays
  Coding DNA Sequence Number=SeqID_37103
  Homolog annotation: Hit_ID=A2Z244; Match level="QueryCoverage=60%, HitCoverage=69%, E-value=8e-57, Identity=69%"; Hit description =Putative uncharacterized protein
  Pfam annotation: Domain name=DUF617; Domain location=2-184; Score =182.2; E_value=1.3e-51; Accession=PF04759.4; Description=Protein of unknown function, DUF617
MTVSLFGHHRGRVILAIHEDTRVSPLFLIELPMPTSVLHREISSRVVKLALESDTRRSAHRRLVEEYIWAVYCNGRKASYAIRRKEASNDERQRKEASYDECHVLRLLRTVSMGVSVLPPPAPEKDDGPDSEITYVRARVERVVGSKDSEVFYMINPEEGGNSGDNNGGGGGGAPELSIFFSKDEMGNPTLNSLPSGKWRPLRYNSPDRPVCQRSNDYFARNAFNARLRAQRPEHAQQAHRTVYRTCPVHHRTAQRPHKSELQRSNPNGWLTWLAHRTVRCAMRQQTSNGHILVGL

SEQ ID NO: 80479 - protein, 312 aa, Zea mays
  Coding DNA Sequence Number=SeqID_37104
  Homolog annotation: Hit_ID=A2YYN2; Match level="QueryCoverage=99%, HitCoverage=99%, E-value=7e-53, Identity=41%"; Hit description =Putative uncharacterized protein
  Subcellular localization annotation: CTP_CleavageSite=32; ConfidenceScore=5.21e-01
MATKAKSSSSSCLSFLKDALLLPTKNAKLFVPVFLLVTAPLILLQITNVFYIQPRTADMLHHINEVKNMDPSSADYAKLMVEIMKEAKELAMISIALLVITFAGSFAKQIIAFFATSTTYAGDRYSFPELFTKVIMKGRHLRGPLITVAMVGVLNVACALLLAALLQLAMRQLGVLYTAILFVLPFLAFLYLDVVFFVAVAASVADEDSRGVSALRLAWRLMTRVCRKEGFVLVVAVHLVAMVPSLLYAVALACLKKNMPMGLALFSVYALLSGLVQLFYFAGIMVYYYLAMESKEVMAHDYVNIPTVEATV

SEQ ID NO: 80480 - protein, 483 aa, Zea mays
  Coding DNA Sequence Number=SeqID_37105
  Gene Ontology: Mol. function=recombinase activity; Biological process= DNA recombination
  Homolog annotation: Hit_ID=A2YYN4; Match level="QueryCoverage=64%, HitCoverage=99%, E-value=8e-82, Identity=52%"; Hit description =Putative uncharacterized protein
  Pfam annotation: Domain name=7tm_1; Domain location=147-467; Score= -98.4; E_value=0.027; Accession=PF00001.12; Description=7 transmembrane receptor (rhodopsin family)
  Subcellular localization annotation: CTP_CleavageSite=53; ConfidenceScore=5.34e-01
MATGQISSTPPSFFNFLKEGLLLPSHNRRLFAAVFTVIAASTCLLLVGNDLVVQPLAVELNLDTKALNSTDFRSPDLLPLIRKTQADTRALLLTSTAYFLFGAVIRSAIQIVVFFAAVSTYSGELHTFGSLLGRVKAQVKGPVLTFAFVCALEITYVALLVAMSTLVMVLMIKKYYGLFFVGSLLLLPLFVFLVYFSFLCSMSVVVAVAEPGCYGAGALGRAWRLLKGKRRRVMLFISVTGVLAAALTPMYTLAKRRELTNMAAGLLLEFLYVILMSALQLFATCTMAAFYYECKGSTEASAAEYVKTCRSQKAVRREVNGSTLLWTPTPRRSGKRPLQSWRPGLGREQGPQQGALGGDQHLGVGGPAVRHGDGSRTVYPGAVAGRGSTLVGGGTEGEGSSESASRRACRAVWMSVCTAPTLAPHVLVVPFPAQGYALPLLDFAGLLAAWGLRLTVVTSPANLPLLSPLLAAHPGAGAELASS

SEQ ID NO: 80481 - protein, 89 aa, Zea mays
  Coding DNA Sequence Number=SeqID_37106
MVKALDQHGGSRLSPSDLTSLRGKEHTAMAAPRTFLTKWVLQTLHTPLDSVLKESCSMTRGGYNASDVSGATPFKTLDALTQTVDNVYF

SEQ ID NO: 80482 - protein, 65 aa, Zea mays
  Coding DNA Sequence Number=SeqID_37107
MASAGGWGHWLRRNRSPESVVARWAATAVAGDLHASTSDEQATVDSEVQLVGIAEQELIEGKLCP

SEQ ID NO: 80483 - protein, 201 aa, Zea mays
  Coding DNA Sequence Number=SeqID_37108
  Homolog annotation: Hit_ID=Q6QP51; Match level="QueryCoverage=31%, HitCoverage=29%, E-value=2e-15, Identity=64%"; Hit description =Putative growth-regulating factor 1
MEAQAHTSCNRRVGYYVRETAPPLALVPRLIDCETGAATRGDPAHDPTVPTEHIGHGSVSRGRRRDGRYGQKWAGSNGGGRRAEAAFKSSAGSRPLLGQRECPLPRREDDAPVFRTPNGSRTHNGCPGPRKGILRKGSFSAKEAGPKPPTDKRFEGWPLGRVQQPPQSTRAPRPLLVRGSKAGPSEGFNGRLRSLGLRAHY

SEQ ID NO: 80484 - protein, 170 aa, Zea mays
  Coding DNA Sequence Number=SeqID_37109
MDMILYENWSNSCSNLDCLVAETELYSVHCKLKFSTRVSSLEPYGDILAVEKYQPGNTLHCMLNMCRDTLPIFRSEHASPLRGNHCPHHSGQGYYTKVVELYLRNNFGNVSLVCCCVKTGEKFWVLVVINPRRIRRELLPEGVKIQPEVVTEEESTPVAADQVEEPSNWV

SEQ ID NO: 80485 - protein, 84 aa, Zea mays
  Coding DNA Sequence Number=SeqID_37110
MPEMPGEEEKLGKGWVPCAREEWISWRARDYACSDWWGPRDGALQRDSKLGCAEKGISWAAREQVWARWLEAGPNGRGVVRGWS

SEQ ID NO: 80486 - protein, 836 aa, Zea mays
  Coding DNA Sequence Number=SeqID_37111
  Homolog annotation: Hit_ID=Q10B64; Match level="QueryCoverage=31%, HitCoverage=82%, E-value=1e-18, Identity=34%"; Hit description=No apical meristem protein
MASNDNDRRPTDDKASIALLRRIRAGEHVDFVHGVDVCDAAPEILVANLEPVPGYSSVWYLYCAKKYTNKRGQLSGYRQRAITGGGGASWHPEIGRKNVQGSGGGTFCTFTYGRKHKTEERSTRSVVVVNRMGWKMVEYDDLAEADAASNYVLCKVYRTALAKGKSSLPSSSSSGQNENASSSKPPTAKKRKVCGGDHPEAAPASKLIQQQQVEELNVDDIDILERLSDVLSGEPVPEPGMQQPTDARTEHDGRFSIVEELKMLPDEPVAEPGIQHPTDAGTEHDGRFSIVQELKMLRDEPVAEPRIQQPTDARMKHDGRFSIVEGLKLLPDEPVAEPGIQQPTDAETEHGHGSGSSFSISIEEELNVDDYDIDIMEMMLDEPDHPEATPASLIQQQEADVQQHVHGHGVGFHFEGMQQPTNVIEPEHDDGRSIHPTSGDPLLAAQASFDFEGMQQPTTVAETEHDVRFKVCCSSEHGHGSGSSFSISIEEELNVDDYDIYIMEMMPDEPDHPEVTPASLIQQQEADVQQHGHGHGVGFHFEGMQQATNVIEPEHDDGQSIHPTSGDPLLAAQASFDFEGMQQPTTVTETEQDVRFKVCCSSEHGHGSGSSFSIEEELNVDDYDIDIMEMMPDEPDHPEATPASLIQQQEADVQQHGHGHGVGFHFEGMQQPTNVTEPEHDDGRSIHPMFGDPLLAAQASFDFEGMQQPTTVAESEHDDGRSVHPLSGGPVLAAQISYDFEGMQQPTTVTESEHDDGQSVHPLSGGPALAAQVSFDFEGMQQPTTVAEPEHDDGRSMSIQLRRMCSYTPSGVHTSATKIQRSGLLQGPDDAHSLLF

SEQ ID NO: 80487 - protein, 215 aa, Zea mays
  Coding DNA Sequence Number=SeqID_37112
  Homolog annotation: Hit_ID=Q6J9V9; Match level="QueryCoverage=64%, HitCoverage=30%, E-value=1e-10, Identity=38%"; Hit description =Putative uncharacterized protein
MTASKKPPQSTRAPRPLLIRGSKAGPSEGFDNRLRALGLRAHHWSEVRRLAPRKGSTAASGHSGSAPTTDQGFIGWPPKGSTAASEHAERGMTLGTSDTWPRLRIHSRGTLGHFRDQQERFCNGIPSEGGIEPSDPIKRDRVKAPSTQGTQSRLARAQPRAKAANPGGFTSCPRVPSSNGRTFGSPEAQASRRSNLGQIATPTDRIAGAFNARID

SEQ ID NO: 80488 - protein, 57 aa, Zea mays
  Coding DNA Sequence Number=SeqID_37113
MAMMGSTSEKMYLCQNPGGELTYARVKCYICRVIGDPQVRKQQIFVAFVSRWCLKVA

SEQ ID NO: 80489 - protein, 135 aa, Zea mays
  Coding DNA Sequence Number=SeqID_37114
  Homolog annotation: Hit_ID=Q5SMM9; Match level="QueryCoverage=63%, HitCoverage=22%, E-value=8e-26, Identity=68%"; Hit description =Pentatricopeptide (PPR) repeat-containing protein-like
MVLLAAAARRHHRLVLRTRLLATTSSTYPPLPPDPVPDPDPITPVPSPVRTPSDEQFTAWVTRLRPGFTASDLAAAITVEEDPDLALALFRWAALRPGFRHAPESYLAVLTVASSGRRPAAAEALVHDVFAGACG

SEQ ID NO: 80490 - protein, 65 aa, Zea mays
  Coding DNA Sequence Number=SeqID_37115
MVAVVGAEARKLVNDLPKQQKLQIDYPHIMCGPCLHHRISNRVSWVDPHIFLRSHCRLYPLELVA

SEQ ID NO: 80491 - protein, 254 aa, Zea mays
  Coding DNA Sequence Number=SeqID_37116
  Homolog annotation: Hit_ID=Q6QP51; Match level="QueryCoverage=19%, HitCoverage=22%, E-value=2e-12, Identity=71%"; Hit description =Putative growth-regulating factor 1
MEIGRGGAHHGRMEKNDMGDTASGGRRAKRGKAPMARGGRGREARGGPGGWANGVGERLCSRAHTQGGGCGWDTHAARVWGRWATASEWAKGRWASRRLPGRARLRMGHGEGRKGASWACAGEWARGVTGRIGGTFGRRSRRRFTSAIMTASKKGPRKGILLKGSFSAKEAGPEPPTDQRFEGWPLRRVRQPPQSTRAPSPPTNQRFEGWPLGRVRQPPQSTRAPRPPLVRGLKAGPSDGSDSRLRPLGLRAHY

SEQ ID NO: 80492 - protein, 198 aa, Zea mays
  Coding DNA Sequence Number=SeqID_37117
MEGLIPKFETCGLYQFMGQRTYFNEMAVKQFLATSEIDIEAESITWMTGFKRYSASFADFAAANSLNYGTISAGLDLYTEDNFEDFVQFYEPARLGIPRRPFKNEIGFLTRPLTPFPDDEEDPGYEGGAAPNVEGQQMPPPPPPPQPQHYWEPAPGYFDPYFHNLQQGLETHIDTRFEGLMTHVDHRLDDMQSRYESS

SEQ ID NO: 80493 - protein, 201 aa, Zea mays
  Coding DNA Sequence Number=SeqID_37118
MSIYEPQFGFKIHNQQVDRNWKNEYQAADRPPMDRGPSAASGTGQSDQPRRQSEIIRARTVRRPSADRPRQGSKNGQWSQTCQLRSFACSLVLSTRPILSCVECARTVNGFGGLRKKLAGRFKSKRPRGGDDDDYTPTTDSEAQSSAGGTDSMDTEDLPHVHPDYPIDISGWTFPKRRFSMAEYCSRRTVNQYTLPSDTNI

SEQ ID NO: 80494 - protein, 447 aa, Zea mays
  Coding DNA Sequence Number=SeqID_37119
  Gene Ontology: Mol. function=signal recognition particle binding; Cellular component=signal recognition particle, endoplasmic reticulum targeting; Biological process=embryonic development ending in birth or egg hatching
  Homolog annotation: Hit_ID=A3BRW5; Match level="QueryCoverage=83%, HitCoverage=70%, E-value=1e-161, Identity=73%"; Hit description =Putative uncharacterized protein
MEKKTAGTNAKQRIYMLGRFRKAVKWASLFSQLCSVKGDSRTSLEAEAYASYMKGALFFEQDKNIDAAMINFKNTRAIYEELGKYGSIENQLLCRQRIDEVEPMIDFCSHKLGGSYLQAHELLDTANDLLKAKMEAVLSETRSQQAASMTEFKWLGRTFPITNAKTRVSILKAQQLERDLSAAATESVAADKKLAIFDKIFSAYHDARSCIRNDLASAGNAEDIKDDLNGLDKAVSAVLGLRTIERNQLLVSIGKSKFTKHRDEKNERTTKPEELVRLYDLLIQNVTDLTDLVSSGRNKNEEENSFIHEYELKGLAFRAERCFFLAKSYSSAGKRAEAYALFCHAHTLTGSALQQHSNSHDKALIQDLEFLSNNCRSNSCIEHATGIMEEEIVPLKLSKGVSTMSLADNKTKIGCAMVSNLEVDATVFFDLYILFRVPLGVSVGATI

SEQ ID NO: 80495 - protein, 450 aa, Zea mays
  Coding DNA Sequence Number=SeqID_37120
MASNDNGAIWIPKTSICFGSLDFVVNKEGEMTRVPETLTHLTNDLPDVVGRLGDLWLDPLRKSMDLKTRQKPPMPRSWGVLDPVRDSFLDILLSGPEDGFTSLPNEASCNPGHECLTSHTTGDHFPRTRSLGGALTGIMLNLLPQESPPGPQANSQESLLGPSLSLSSQCPTAREQGSPRSRMGLSLHVEGQRHAMTINDRRRLVYGGGATLHFPREMTAWWRFELDDHPRGFVGDLTRKLYAVASKPKKNKFKGKKDDEKKEKKFFKKKEGKHDRFHKKKNGKVYIVGDWLTDIESSSVSSSSEEYDEKVTAIAGDFSSPPPSSSSSTTHLWLMAKGEQKVQNGIVIIEDCDGDDEYASPTYDELAVLLKNILKSLESPKLNVTRPEGLGEKIPAQLPGGKFSWCMVKEVHSSSPAQLQLKKLNSAEVKFSWKAQLQLKKFSCFSARTL

SEQ ID NO: 80496 - protein, 125 aa, Zea mays
  Coding DNA Sequence Number=SeqID_37121
  Homolog annotation: Hit_ID=Q6Z0D0; Match level="QueryCoverage=44%, HitCoverage=13%, E-value=1e-22, Identity=82%"; Hit description =Putative signal recognition particle 68K protein
ENKYLLDMLESYESAIGEPNTKAPCRIAQFPPPFQAVPCNPIVLDMAYNSVEFPNLENQTLNKHHWQEALALASLIDDEKKLGDCQFDLWKQYYVAACVTVFGKLRRSRRLDAVQSGCTALSIFK

SEQ ID NO: 80497 - protein, 139 aa, Zea mays
  Coding DNA Sequence Number=SeqID_37122
MVKFGLFFLKETRQHRYASVHNWSAAIPAEVWILMVSSVHLREYQYESLVVHRFEELAHRFAGDVFSSERLCAATWSGHAAVPHAAAHERHAHATPLHKATAPPGPILLPHPEDTMMSQNLTGADMIRLRKRVMVMFGY

SEQ ID NO: 80498 - protein, 614 aa, Zea mays
  Coding DNA Sequence Number=SeqID_37123
  Gene Ontology: Mol. function=catalytic activity; Cellular component =intracellular; Biological process=guanosine tetraphosphate metabolic process
  Homolog annotation: Hit_ID=A8DD65; Match level="QueryCoverage=79%, HitCoverage=68%, E-value=1e-151, Identity=56%"; Hit description =RelA/SpoT-like protein
  Pfam annotation: Domain name=HD; Domain location=158-262; Score=42.5; E_value=1.5e-09; Accession=PF01966.13; Description=HD domain
  Pfam annotation: Domain name=RelA_SpoT; Domain location=352-462; Score=171.9; E_value=1.6e-48; Accession=PF04607.8; Description =Region found in RelA  SpoT proteins
  Pfam module annotation: Pfam domain module=HD::RelA_SpoT; Domain location=158-262::352-462
  Subcellular localization annotation: CTP_CleavageSite=31; ConfidenceScore=5.74e-01
MPLPSPLSTSPSPASQPASIRVAAKGANRRRAMTPSVSCPVKCRPHPCLAPQPPAPSPELLAARGAPIAGELRACRSPPYLPLSRSADSLELRAACRGAPPASRARAAVALGGDGPSAALIAGAQSRHAIFRDELVRRAFTAAEAAHRGQVRASGDPYLQHCVETAALLAELGAGPAVVAAGLLHDTVDDAGLGYGFISEHFGAGVADLVKGVSNLSHLSKLARRNDTASRIDEADRLRIVFLAMEDARAVLIKLADRLHNMRTLDSLSKTKQQSVAKETLEIFAPLANQLGILNWKEQLENLCFKYLYPENFDELSTKLIEIYNIDMIAAATRRLEQALQVRGLSYYAIYGRHKSMYSIYRKMARKKLVMDKIYDIHGVRVILENKADCFATLEIIHHLWPRIPGKFKDYINSPKPNRYQSLHTVVLTEQTLPLEIQIRTRDMHLQAEFGIAAHWRYKEGERSCCTSVSEIVEWVRWVTWHCQTLNTGYPSSLACDASSKETHTIPSHSDACLLSYSKQCDHKGPVLVILLENEKMSVQEIPQNWTILDLLKRSSNYGMPLRLRLNCHAVHNWNQELKMGDVLELIPSTPCKSRGHTRELHQKFDHRLAVSQS

SEQ ID NO: 80499 - protein, 142 aa, Zea mays
  Coding DNA Sequence Number=SeqID_37124
  Homolog annotation: Hit_ID=A2Y3P0; Match level="QueryCoverage=90%, HitCoverage=39%, E-value=2e-09, Identity=38%"; Hit description =Putative uncharacterized protein
MYDKLWRSCHLDAVQSCCSALSIVKRGGPHGRRQRRRLSGCSGHRIRRRHHHVVQLIVHLKPNLPRKLLLTGYEFLCAETMTVADVPSQELSVLGMSRAFDDYYIEDCGVILAPEVTQRRTDNNEQFVILATVEVAFVPACL

SEQ ID NO: 80500 - protein, 995 aa, Zea mays
  Coding DNA Sequence Number=SeqID_37125
  Gene Ontology: Mol. function=protein-tyrosine kinase activity; Cellular component=microtubule organizing center; Biological process= microtubule cytoskeleton organization and biogenesis
  Homolog annotation: Hit_ID=Q6H548; Match level="QueryCoverage=100%, HitCoverage=100%, E-value=0.0, Identity=72%"; Hit description=Gamma -tubulin complex component 5-like
  Pfam annotation: Domain name=Spc97_Spc98; Domain location=47-860; Score=-6.9; E_value=3.7e-09; Accession=PF04130.4; Description=Spc97 Spc98 family
MVLPRRTPELLEADEAQSFVHKLQLSVSGGLPHAVPVPGLRTEEHELVKAVFQVLQGFETSWFYWDSDVPWYREKAGIYVAHLSLTGLRSLLSPFLFTATCLKQVELFVGKVRMQHHKIPTLDAFASSVDSWLKRLRKAALKEEEQQFVSVNKTITLLGLTDSLSSLRSGAEHLSQVLHGAVPDGFWDSGAHMASSEVAVHILDHLFKKLNEGEPFHMLLVIFTGSLLPYLQCLDSWLYDGILDDPYEEMFFYANNAVTIDQPSFWEMSYMLRVRGSRVDSSTTLTESESIKKKGSSNKESTTAGACLKVNNQGCVYILCPTFLKDVARAIVSAGKSFQLVEHVQDVHQIQTHKSTHRSNLYQDTNCSGQQKFWPDMSNLRIHDGPPRNKDALEVSTSQFGNDSREMGLLTLSEIFLICISGLLENGDHVYEYLRTLHADNVPNNNAFMENESNLKETEGTCTGNIIEKTWVKLLKDATSGRKCNGMEETIHAVIDKAGFASGCPKDASSNVVEGVFTLSCYENPAITACREVLMRNPASWSELNISESFHLPPLNDGNMRRAIFADGHSAGTSTDYKFGFQFDDLEHVRQEDDRRTLEDLYAFPTLLPCAKKDSTLASRVLKFIQNMSMKDPLQPVGIIQECLSKCIKRQVDLIGNQILCKLMGEWRLMDELFVLRAIYLLGSGDMLQQFLITIFDKLDRGNSWDDDFELNNLLQESIRNSADKMLLTAPDSLVVSLAKYDTHNGEEGISTSKKGRALGFGIDALDMLNFTYKVSWPLDLIINTEALKKYNQVMGFLLKVKRAKFVLDETRKWMWKARGRTAHNFKQHLIVAQKLLHFVDAFHQYVMDRVYHSAWTELCDGMTAATTLDEVMEVHEAYLSSIQRQCFVASDKLWALIASRVKTILGLALDFHNVEQTLSTGGTASAVRTRCEMEIDRIEKQFDECVIFLLRILSFKLNVGHFPHLADLVTRINYNHYFMSDSGSFSAIPGSRPR

SEQ ID NO: 80501 - protein, 106 aa, Zea mays
  Coding DNA Sequence Number=SeqID_37126
MSSQHGPDYDWRTSPIDPQVVYASGGKAHGRYIMFANVINSSQVRVQCGGSSRLGARGGRPHRGGWGDRRAVWGRGRDAEVGASTTNWEMYSFVRGRRSTSGIEST

SEQ ID NO: 80502 - protein, 472 aa, Zea mays
  Coding DNA Sequence Number=SeqID_37127
  Homolog annotation: Hit_ID=Q6QP51; Match level="QueryCoverage=34%, HitCoverage=80%, E-value=5e-10, Identity=34%"; Hit description =Putative growth-regulating factor 1
MQVACNRTAGTHPFDFDASSMEAQAHRSCNRRAGYYVRKTAPPLAPMPRLLDCGTGVVTQGNHAHGPTVPTEHVGHGSVSRGRRRDDRYGRKWAGSNGGNGRAEAAVKSFAGSCPLLEQQGSPLPRREDDAPVFRSSNGSRNGRPASHPSRRINFAPPQNTRAPRPLLIRGSKAGPSEGFDSRPRARRARDDSGYVRYMAEARGQSFVHSRDAISPRPSPASGRNNTPRRIHASPEDLLKQWAHPRLARGPARAGFAVKQPWPDRLTNRPYRRSIQCEDRLTPYPDARSSVDRAEETLPRPTSGLGPRLGLGRWSPPSLTPGLDLNLGLGRWSPPRPTPGLGHNLGLGRWSPPRPTPGLGLNLDLGRNRVLARPRPRPQEESPPRPTLGSDRPRHRGYIIALSLASSGYGEQDWRPIWLAPLTVGTSDWLVHRTLSGAHRTVWCPLPTVGAGHVSPVDLAADRCAGGRWLTG

SEQ ID NO: 80503 - protein, 309 aa, Zea mays
  Coding DNA Sequence Number=SeqID_37128
MVTTSSMVGRSKPGCGLCPVLSFKDLHHPCWGGGRGEPEPAFAWAGVPLLPSASGGGNHPPALWRRRPPAMRGKANCCCLARLQHSVLCPGDCGRPHRRVSQHVVCREGGTRVLRRSRSRFCGEDGSEDLSVRFGAAAACWCGVGGQVATGEGFSADGTVSATCAPGLRLFGFNGWFSSPARGCERGPSRGSVCPGAIAAAVLPSETEVVAALLAQQSPTSQPEIVVPQALRCGGYSYPREWNRSSVCNGTFSASNPRLLCDEPEPEAAVSAWTEAESAREEASLAWEHVASQAEEVQQQRLELGQVVR

SEQ ID NO: 80504 - protein, 166 aa, Zea mays
  Coding DNA Sequence Number=SeqID_37129
MGKNPRQQQINIWSVKKSTARTSYRDEADLLLLEEAEAEQHCSSQQVAVGAWPAGCIVRVTAWKQAAAGSTGTEAGSAAAHCSLRGERPSAPWQETEMGSTSTAGSGNGEQPSRAARRGGRYGAERPSALRLRACGCGRRRKRKTGRRVARKQEARFIDLAVFGPG

SEQ ID NO: 80505 - protein, 545 aa, Zea mays
  Coding DNA Sequence Number=SeqID_37130
  Gene Ontology: Mol. function=protein binding; Cellular component =nucleus; Biological process=regulation of transcription, DNA -dependent
  Homolog annotation: Hit_ID=A2XHV2; Match level="QueryCoverage=95%, HitCoverage=97%, E-value=1e-127, Identity=51%"; Hit description =Putative uncharacterized protein
  Pfam annotation: Domain name=GRAS; Domain location=122-442; Score =141.4; E_value=2.5e-39; Accession=PF03514.5; Description=GRAS family transcription factor
MNNERESQEPAAATTSDWLDESIAFLAANLDLGFNDYGWPSASEAQERHDDVRSMIVETLAPTATTLHQPSLNLDISVASSSSPMTSQQEFGQPKKRKSSGNSSSQRPHVGGGGQQEKGGASCARPKPGKKGSGKGAAATVDREARWAEQLLNPCAAAIEAGNLPRTQHLLYVLGELASFSGDPNHRLAAHGLRALTRRLPHATGQAALATVKVPPCECPTSVFSGVDPRLFRASLIRFNEVSPWFAVPNALANSAIAQAASRKKGAVAEPRQVHVVDIGVSHGVQWPTLLEALTRVPRGSTPPSVRLTLVGPTATPPVPFSASPPGYDCSPQLLRYAKSIDLDLAIVHAPCLDTLRGTLTPGETLVVCLQFRLGLTTADDQAAIFRKVRDLNPELMVLTELDGGRRNDDSATSEFAARLELLWRFLDSTAAAFKGMDAYERRVMEAEAGTALALTPRCGATVDGGREAWRARLAAAGFEEAAFGGEAVETAKALLRKYDGGWELVPPSPSAAAAVGLRWEGQPVSFSSMWRPAQASPVLIGPCT

SEQ ID NO: 80506 - protein, 168 aa, Zea mays
  Coding DNA Sequence Number=SeqID_37131
  Gene Ontology: Mol. function=tRNA dihydrouridine synthase activity; Biological process=metabolic process
  Homolog annotation: Hit_ID=P32696; Match level="QueryCoverage=47%, HitCoverage=100%, E-value=2e-37, Identity=100%"; Hit description =Uncharacterized protein yjbO
  Pfam annotation: Domain name=Phageshock_PspG; Domain location=89-153; Score=116.5; E_value=8e-32; Accession=PF09583.1; Description=Phage shock protein G (Phageshock_Psp
MSINGGIKSLEEAKAHLQHMDGVMVGREAYQNPGILAAADREIFGSSDTDADPVAVVRAMYPYIERELSQGTYLGHITRKRFHIWESIMLELLFVIGFFVMLMVTGVSLLGIIAALVVATAIMFLGGMLALMIKLLPWLLLAIAVVWVIKAIKAPKVPKYQRYDRWRY

SEQ ID NO: 80507 - protein, 55 aa, Zea mays
  Coding DNA Sequence Number=SeqID_37132
MESHDLRAEWESRLVGKRHRGTGGYEIDGFGYDYDAGEDEAVEGDFQEFQDYDEF

SEQ ID NO: 80508 - protein, 115 aa, Zea mays
  Coding DNA Sequence Number=SeqID_37133
  Subcellular localization annotation: CTP_CleavageSite=9; ConfidenceScore=5.03e-01
MKLWKETSRSSKTTTSSRRGLAATPSRLPVKAAFIYVSFPHFDLFGQTDISADIRYPCCFLFVAGNGCHFSPKITKVMSKQPNELIHMNTVASAQAKDESCSHAQGHKFQTSTSS

SEQ ID NO: 80509 - protein, 357 aa, Zea mays
  Coding DNA Sequence Number=SeqID_37134
MPTLGQQLVRSPAFSLDLRGRDPTMFIREVEDGAVRIMGRYAPRTEGLRSWDIRGSNVRLNRVFELNRLPYSGYPRDDAAAAADRCGKKLVAVAEEGPSQEAAPTTKKRKIGLKRDRGGAGSDVGQLAVLMAPVVATSPTAAVDAKGASQDPWAAFCVSDAISSATAAKDVAGSVSHQLRHASQQLKHAADFADHVASGALTLEFAAEIERLRAQHTDAVREKSAAENKSRKLAERLAAAEAERVDLRRQLVEERRDTDKAMPMRRLLRRRPNLRGLRPVSPANASRSWRQGSTACAIAWTKLRRRRARRSSRRMRSSWICSGSWVRGPPLSKCPAKRWASASSSGYRRSWGCSRPS

SEQ ID NO: 80510 - protein, 83 aa, Zea mays
  Coding DNA Sequence Number=SeqID_37135
MLSPIDRDDDYAADAEAAAPCDALDNVIVLKGGNKSSNDGGPTQKASGPMTMLELALLSKLIQRGSGKSANNVYRGIAIALFI

SEQ ID NO: 80511 - protein, 116 aa, Zea mays
  Coding DNA Sequence Number=SeqID_37136
MKHRPNTVKLFAIIDCELGRDSEPANNVLLEKLLGSLRHYCGYCPSLDPLGKIFDDDEGEPELALNKYEVLASVLEALGLVDVTWVTLWIMDGWCANDMLEHVGGQGFASSRCFGQ

SEQ ID NO: 80512 - protein, 41 aa, Zea mays
  Coding DNA Sequence Number=SeqID_37137
MSNPWFLSVLSKIFLSNNVVKAKGDAGNMEDFEEFQDYDEF

SEQ ID NO: 80513 - protein, 573 aa, Zea mays
  Coding DNA Sequence Number=SeqID_37138
  Homolog annotation: Hit_ID=A2YEY3; Match level="QueryCoverage=76%, HitCoverage=100%, E-value=3e-71, Identity=42%"; Hit description =Putative uncharacterized protein
  Pfam annotation: Domain name=IQ; Domain location=282-302; Score=27.3; E_value=5.5e-05; Accession=PF00612.18; Description=IQ calmodulin -binding motif
MASYREGKPRRSDEMTYLAPSWLRGNAGSGLWRCLFQFMAHAVATDNRSSRQACPLGVADDKQTNSCSTSTARAVCRTGCTGAALIQQGGTGLYTVLWSECISGLEPHCEPLIIYQATDCYADTHASRIPAPREMGLAGGIVRRVFSKSPCSSAGSRGHSVRAFSYIACSSLVGVFTVSAGHVVRSSTTDACMSTADSQEKGSAEHRRRWGSLRLYLCGEEMNAAAEEEEDGDGDTVSVKSFETCCVMPEEAHVVVPVHHRLMSAAHDGNDQSRVPGGADEEGAATLIQSAFRGFMSRRQLQEARARTRTRTRGREPEPDGAKDQEPSSPTWGPSVATSVLVQVGDESSSLGNLRLRLSEESASVQQQRSSSQRSSSRPPPAFRVKEEWDDSTVSSNVSRMRIQNRIEATTRRERALAYAFSQQGEFNVGWSWLERWMATRQAEPADDCASRNADTGSATGRRVVVVRRRSDLAVEEKESCASNDVSVVSFDASSGLACHRPTGNKSRLKGGRSLPRRKQVAASASASDHRFQERSHKVSKKGHQRVEQEPHKDRFDAVAALDDDACQPPTDY

SEQ ID NO: 80514 - protein, 300 aa, Zea mays
  Coding DNA Sequence Number=SeqID_37139
  Subcellular localization annotation: CTP_CleavageSite=43; ConfidenceScore=5.40e-01
MSITFVNGLWKSVEAPEVFSSLSRFPLLPSRRSFPAHSFGYTRPSSGSGFVLAVLHIHNSGSENTCSHNPLGKHCQIMFLRTFGGRRPPTAGDPSAATMDAPSSSAAMPAGGSAASAPIAQDDAGAEVASSGPQDSPVTVEATLPGSQVSVGGPKAAVPPAAVADLPTAIPPDAPPEVGVGARPALSPSQLRRVRRLFLGVHSSLEREDFKEDIRKVSDREEEVTRKERVLEKQRDKQAAAEVKLKKLQEEMWARQNKLLDELELKDEEKVKRLEGKVRALEGQVRQFQAAQATQSAPGP

SEQ ID NO: 80515 - protein, 309 aa, Zea mays
  Coding DNA Sequence Number=SeqID_37140
MNALSREGCRHYEVFDQADEDFERDIYKVEDPIVKESAGAIYDRMWGPHGREVVRERAETARAQAARGERVDDFGALNSALPDPESNPAEAVPEAALEPPPETAEGAPDVPAAAAAGGGPPPETAEGASDAPAAAAPRAEGPATVAAEAPAEATAEAPATAGSSQVQEFRPAHATATTNFLAASTVDDGNKFDGSASEFFDFTDSGSSVEWTEESSEEDLDYFAALDVAAAEASPHAADTEDVPGPSTGRRRRRAVAKRRLCAPAHLATLAKALRTWSGVFVMLHPAVPSGTAARMVFAVDFGFSHLLC

SEQ ID NO: 80516 - protein, 183 aa, Zea mays
  Coding DNA Sequence Number=SeqID_37141
  Homolog annotation: Hit_ID=A2XM86; Match level="QueryCoverage=45%, HitCoverage=26%, E-value=6e-09, Identity=40%"; Hit description =Putative uncharacterized protein
MVIKVKLERNLHMLVDLFEPKMGLYDNSGTFLGANEDSTRTLAEIEKKIARATVLPRNHGGDIALFKLDIDELIADYAKIVDIFSSSCRGHHKNPPSESYVLSEGWLGSRSIIAACSAFSDIVLQANITKQVHEITARLLDIHDKMMLINNKEDLPKVAQQSTSPYPHDIAPTFHRPDARHNA

SEQ ID NO: 80517 - protein, 112 aa, Zea mays
  Coding DNA Sequence Number=SeqID_37142
MTALQPRVGLGMPTRPPPDLLNPEFMMPHAAPALGGSRCHDIGRHQASGEEAGGRSKATPMWPGRSQVAPTAAVGRGSMGKEATLAFTPTWVVAIMWRFCGSSSENPANVLI

SEQ ID NO: 80518 - protein, 172 aa, Zea mays
  Coding DNA Sequence Number=SeqID_37143
MALVGGAHRSIAHNRAWVIYRWDRFVRGSFPLLDDGSCAGIAQQISALRHRTCRSTRPVVVVPEYKSDLAPRPTPSSFIMKEHRVVRIPKSRGEGATGRRRLCNTVGPHHTVVWASSSSLLVTSWTTDSPGYAVGAWVLVECIRRRGTPELLVGVNCSAVKPFGSWSGCMVA

SEQ ID NO: 80519 - protein, 140 aa, Zea mays
  Coding DNA Sequence Number=SeqID_37144
  Gene Ontology: Mol. function=signal peptidase activity; Cellular component=signal peptidase complex; Biological process=signal peptide processing
  Homolog annotation: Hit_ID=A3C1D6; Match level="QueryCoverage=30%, HitCoverage=9%, E-value=8e-10, Identity=76%"; Hit description =Putative uncharacterized protein
MVAAFARAAWLKEYHEKVSMTLNILADLSPLFTWNTKQVFVFVAAECETPHDAFIQYVICTITVVFTFKAIYASIVNVHCTFTLLAQLCLTTFVFKYGSGLIIVAIFVLKLTSVKEKSLGLLTQNFVKLFFTMKVETISL

SEQ ID NO: 80520 - protein, 46 aa, Zea mays
  Coding DNA Sequence Number=SeqID_37145
MDCPVPSARGPKTQRLHGSEGPEEKTTLGRRSIVYHPEGPTGLLDS

SEQ ID NO: 80521 - protein, 302 aa, Zea mays
  Coding DNA Sequence Number=SeqID_37146
  Gene Ontology: Mol. function=aspartic-type endopeptidase activity; Biological process=DNA integration
  Homolog annotation: Hit_ID=Q8S474; Match level="QueryCoverage=36%, HitCoverage=9%, E-value=2e-09, Identity=36%"; Hit description =Putative pol protein
MTAHAESDFEVGLYPDTVWMPAPTLGISSFHVATKPNFHRRPLESQEGELQRVDVVVRLKKGAKGSQLANKKIKCWVQQKGKEPTVGPLVWAHRTVRCATGQCPVHHRTVSGAPGDSSSNSPPSGISRGSRAIIHRTVRCTPDSVRCAMEKRPQELFSFGKSQRLVRYNSPDMSGVHRTVRCDSSATAIPRQRLPAEALNAPQRAQTSGLPILAHRTMNRSCPVRHRTSRVAHKSELQRSDSNGTDDVAGAPDMSGVHRTVRCAIEQTGSPTATFGGWGYKYPNHPTFIAIQVFHFSTTYKS

SEQ ID NO: 80522 - protein, 141 aa, Zea mays
  Coding DNA Sequence Number=SeqID_37147
MEGSTKARSDGSTIARPTEEGTIEAAEEGTTEAAEEGTTEEGTTEPTEEGTTKEGTTEPTEEGTTKEGTTEPTEEGTTDAVVVVTDPVALVALVALVGLVSDHLQKFYLVPIVALVADPLQKLDLPHSCNFSQYVLILHTF

SEQ ID NO: 80523 - protein, 197 aa, Zea mays
  Coding DNA Sequence Number=SeqID_37148
MARDRRGRRRPQQPGADAVGARLGLACAAAAARDRRGRDAENGEKIRTCELACKWFDWFSSMHRTHAKTVADQGHMETAGARLLGLACDRFRPGCRARRATPWLLPRPELASAAHRLGSSGQSDAEHMPAAARPDATWDGRDTAGRCRHSCSIRRERDQGSAKTGVGERKKERGLPAHGDRRRRDEHGTGGTLGTGS

SEQ ID NO: 80524 - protein, 49 aa, Zea mays
  Coding DNA Sequence Number=SeqID_37149
MVGLQVVTRMMVMTMVMVAFGAIYAQVKKKENSVEAVLQEFQDFDEFND

SEQ ID NO: 80525 - protein, 530 aa, Zea mays
  Coding DNA Sequence Number=SeqID_37150
  Gene Ontology: Mol. function=DNA-directed RNA polymerase activity; Cellular component=intracellular; Biological process=transcription, DNA-dependent
  Homolog annotation: Hit_ID=Q5PK93; Match level="QueryCoverage=22%, HitCoverage=8%, E-value=2e-56, Identity=97%"; Hit description=DNA -directed RNA polymerase subunit beta
  Pfam annotation: Domain name=RNA_pol_Rpb2_6; Domain location=1-435; Score=-155.2; E_value=5.6e-05; Accession=PF00562.19; Description=RNA polymerase Rpb2, domain 6
NGYNFEDSILVSERVVQEDRFTTIHIQELACVSRDTKLGPEEITADIPNVGEAALSKLDESGIVYIGAEVTGGDILVCKVTPKGETQLTPEEKLLRAIFGEKASAVKDFSLRVPNGVSAEQFPEAGEFQSRPSLGHRTLSGTEKGDTPKGILLREGSGPRALLLIRGSKAGPSEGFDSCLRALGLRAHYWSEVRRLAPRKGSTVASGHSGSTPTTDQGFEGFPPKGSTAASEHAERGMTLGTSDTWPRLGLRSRGTLGHFRDQQERFYNGIPSEGGIEPSDPIKRDRVRQITCSGIKLTIDNWRDGEACPITPHAPPQSRRDPTRQSNPVYNGSSSLISCEKQTIRIEFLSLQVTALVSTITGMGDHVSGRVRGKVCGQALVLDLGLPPEQLLAPARGRTLRQQGYSLSNAMNIRQGRSDRSHFAPPLTDLTGKQCCMPRSDCCATRQGETDSSQVQPRAPWEAPPRPTPGLGLNLNTGRRSPPRSTPGLGLNLDLGRRTPPRPTPGLGLNLDLGGITASPDLGLGPTML

SEQ ID NO: 80526 - protein, 88 aa, Zea mays
  Coding DNA Sequence Number=SeqID_37151
MAPEAGPGCCQSHPGGWHNSRSGACSTVFLSDCNLADGEYVLVPEQGAAQEVAPDPAPEPAPEDLPATALEGKPRFMHNLLFMLFYFT

SEQ ID NO: 80527 - protein, 84 aa, Zea mays
  Coding DNA Sequence Number=SeqID_37152
MPIKTPMGTNGHLNLDIGGKSVDQKYNGSSSLISCKKQTIQIEFLSLQVTALVPTITGMGDHVSGRVRGKVCGQVHSEKDLLDI

SEQ ID NO: 80528 - protein, 164 aa, Zea mays
  Coding DNA Sequence Number=SeqID_37153
MGRGNPGYDPDPAFSIEGVRHPRWDGERGEPGLYLLRGSAGHLIFQLLVVAIALQPCGGDVLQPCRGRRTVATQLGCNIPPSPSHSRRGRQRGPAGALGSGPLFGFNSWFASLERDREREPSGGRVHPGPWLLLQRSLAGPPTFVAPQARGRSYPRGTEPEFRL

SEQ ID NO: 80529 - protein, 77 aa, Zea mays
  Coding DNA Sequence Number=SeqID_37154
MAVGALQKGAWVAVGVHMEAGTRAGGTAYSRLQGGLGITNFRPDSFSSSEAGTQLQSETSPGWVNRELMLMTSSGGN

SEQ ID NO: 80530 - protein, 143 aa, Zea mays
  Coding DNA Sequence Number=SeqID_37155
MLGDSWIEDCCTWFIVFGFLLCMMVILIDRILQWEEQRERKACSSSNNRRRSRNTLVMRYFKEFKSPRFKSSTLILFKWGSVPVRFLLWRQRRRPVASLWRTRSSKHISFWMRSDHPSFVDEAPEDQSRKESMWEFARERFAC

SEQ ID NO: 80531 - protein, 56 aa, Zea mays
  Coding DNA Sequence Number=SeqID_37156
MPSMGLGVCGSLCQGGNETDGFGFHYGAGCQHCNHCSGEDEAVEGDFQEFQDYDEF

SEQ ID NO: 80532 - protein, 70 aa, Zea mays
  Coding DNA Sequence Number=SeqID_37157
MSKIGGSCLSKTVAILAKGRYLRNQESGCGYTEAWSRRSLTGTAIKTKDKIIAKLYAEELRHHGGKGKPT

SEQ ID NO: 80533 - protein, 137 aa, Zea mays
  Coding DNA Sequence Number=SeqID_37158
  Homolog annotation: Hit_ID=Q10T66; Match level="QueryCoverage=72%, HitCoverage=50%, E-value=1e-09, Identity=39%"; Hit description =Expressed protein
MDRTKTLCAVSNLPLQPNAEPLSLDDARRLLFKVVGWRLVLSGGDGDGDEQRPARLQCVWNAALYGAGHAPAALAFEAPNQVMAKLSTSSAAGDSLTINDYIVPWLQLPRSGAGDFFWSARAKVSPRSSVGGEQCSS

SEQ ID NO: 80534 - protein, 71 aa, Zea mays
  Coding DNA Sequence Number=SeqID_37159
  Homolog annotation: Hit_ID=A2YZX5; Match level="QueryCoverage=60%, HitCoverage=3%, E-value=7e-09, Identity=65%"; Hit description =Putative uncharacterized protein
MAGAHAGARQLEVTINGIGERAGNASLEELTVLEGSFCNLKLRFKGELPPEAVYNIIIDPKNKRVFMISKI

SEQ ID NO: 80535 - protein, 151 aa, Zea mays
  Coding DNA Sequence Number=SeqID_37160
  Subcellular localization annotation: CTP_CleavageSite=24; ConfidenceScore=5.16e-01
MVAEIAAIGGRPSSQPSQARKSVVLSVAASPASFTHREPRGFGFIQYFDPKAAKDATRGLRHELDAERASAETFCFTSGDTEIGGQKGAAQDYSEGGRPDQAGDNKSSSNPALTTTPHDDLEGRIPRWPTRAALLLQLCPHYAPMSSSALM

SEQ ID NO: 80536 - protein, 41 aa, Zea mays
  Coding DNA Sequence Number=SeqID_37161
  Subcellular localization annotation: CTP_CleavageSite=15; ConfidenceScore=5.09e-01
MATVVSSALHAVGAVASAKPRSVAPAVARRRSVRMDPQHVA

SEQ ID NO: 80537 - protein, 220 aa, Zea mays
  Coding DNA Sequence Number=SeqID_37162
MDSAMMAGRRWRDPGIARPRAVQGEDVGGRAGRTVRQANVDAYGTFLRVVEIIGLLIPGPRALIQRSSGFNLQNFPDTDCSHGGLQIYFIISGGLFSKTSTAKGYAPISAVRLHAKRKDWIFHLNDRHGKPPRPAPFVSARVYIRSDVRAGPLRSPLFFSISYTVESQWRLGCLHWMQQDEQEEGGGKVLAAEEEERIRDRNRGNAQEDALRNCIPWTRV

SEQ ID NO: 80538 - protein, 99 aa, Zea mays
  Coding DNA Sequence Number=SeqID_37163
  Subcellular localization annotation: CTP_CleavageSite=70; ConfidenceScore=5.25e-01
MAVMGSTSDKVYLCQVRKQQSFVVSVQRWYPRKSPSIEVGRGRMLASHFENNKLVCRRVFCLPGLSKVLRARTTVGGPNTLGGSVTTGIEAKPISSDIT

SEQ ID NO: 80539 - protein, 187 aa, Zea mays
  Coding DNA Sequence Number=SeqID_37164
MGFCRKDAWEAATMQALSIFCEHHQKMVAIHHVGLIPLKATAHQTAFALTFRHILSNREERVIDLFVEVVEKDLQIEQMGTQVHQIQEEVHEQEVTIGILEDQPHDLQLELDDANEHIEMEMDDGNVADKTNRLRRRHHRLVRYKSFAQQNKILRQLVQHQSQSQPFSGDAKKRDHFLHGINTKLKE

SEQ ID NO: 80540 - protein, 604 aa, Zea mays
  Coding DNA Sequence Number=SeqID_37165
  Homolog annotation: Hit_ID=A2YGC2; Match level="QueryCoverage=30%, HitCoverage=79%, E-value=2e-12, Identity=30%"; Hit description =Putative uncharacterized protein
  Subcellular localization annotation: CTP_CleavageSite=42; ConfidenceScore=5.72e-01
MQPSRPNSAQPGRVPAPPDRRTPPLSGSPLFCVPSLSRSLPSGADLSATLRPLSLSAHATSIRWRPTPAFPTIQLAGDRAKPPRAPPRALVPKVPLPLLKLDKALVLLKPLPHDRNASPSSSGPPKTFSPPFSPLCPWILGLFPAIEFAVAFSPSLPNSGDPRATLARASLNSGDPTAAERNSAARSRSSPLSVPLCPIFIARLRSRITLRARAPDALARLSAPKSPGAGPARSVRPPPLPLTPLARLSALARPPARPPSVADLISAVGFRSNYNEQYEVPECVVGDPPEQQPGEGNHLERLHRRLHEEQERRRQEQEEEQQDSSPSPQWEVESERPPSPAPQPEMPPAPPQGIPAAGGDPDGDGNDDDAGGSSSHGTELSEEPEPEGWIARPITRDAARGCHFHDALDTLLSWAFDRHTWSIEYRCVVYQHRRGLYPNQWEATCLVRHPDDDLRGAEAFSQHYSITERDTAKAAMQDVARRALSKYCSLFSGVADGLDLKYYPRRSTGSAGGVIASPVGEGNPRLNSMVYLTAVLNTKLDHALNELGKVWAEVAELRAKCVACHYLDGGSPAPVGIQHPYRSPPCGRFDYGTPDCRTRIDLDP

SEQ ID NO: 80541 - protein, 295 aa, Zea mays
  Coding DNA Sequence Number=SeqID_37166
MKQCGELASADSAALQLQQSPSTSECCGLIGHAWGEVFCNTPGVTLARATLALKAVFTRGVSSLGTHTCEIALGARRRSAPDSWRDSHVCDLWKRLNIGRNSLPRVRRLLPRQSTLARALARPAPRPSQTRAVARPRAYKSLPGFGYTLPHTLHTSPELASRRLPVRSEPAAAQPLCHRRPASRAIPNPVLPSEKLVHTSVRLPEQGIGVSFAGEASPRSPELSPPPEHVDRFYPSFYNMPKSKENRKDCNLADGEYILVPEQGAAQEVAPDPAPEPAPEDLPATALEGKPRFYA

SEQ ID NO: 80542 - protein, 109 aa, Zea mays
  Coding DNA Sequence Number=SeqID_37167
MWKDQVEHAKDVWALYPGQTAHLTVRCMNDLYRLQAVRGEAMSQLMALVEATKITLDNIEELVVDLSTEMVEKDLQVEQMANQIQELEELVGARENTIEVLKDELINTQ

SEQ ID NO: 80543 - protein, 57 aa, Zea mays
  Coding DNA Sequence Number=SeqID_37168
MSTVALTRDNLAPALALAHNNFENSYLDNLDEPAIEDPGVHQVATAEQELVEGKLCP

SEQ ID NO: 80544 - protein, 102 aa, Zea mays
  Coding DNA Sequence Number=SeqID_37169
  Gene Ontology: Mol. function=oxidoreductase activity; Biological process=electron transport
  Homolog annotation: Hit_ID=A2XWE1; Match level="QueryCoverage=88%, HitCoverage=16%, E-value=2e-34, Identity=76%"; Hit description =Putative uncharacterized protein
MGLSSLQSIVKNSPFLRSDREFRNLLHLSTVDVISVKLWFDKKIIIPKVANVCSGFDDSSGWAFFDLTSVYDDYCEESITIVEAEFLHHILSNAYKILRAQL

SEQ ID NO: 80545 - protein, 207 aa, Zea mays
  Coding DNA Sequence Number=SeqID_37170
  Gene Ontology: Mol. function=ubiquitin-protein ligase activity; Cellular component=ubiquitin ligase complex; Biological process =protein ubiquitination
  Homolog annotation: Hit_ID=A3B534; Match level="QueryCoverage=25%, HitCoverage=8%, E-value=5e-10, Identity=71%"; Hit description =Putative uncharacterized protein
MRRALQRAALAGRPGGRSWRCDLGAVAGESALQRPQWLKALVADCATRSCTRLLLQSDEVAARGGLQHDLAMLHDLLPAAELGLADDSARVAAVPPRGGPGAGAKGRRARADPGGGAGGSRGQGRRGWKGTGGRRLVGGIHATWNKRNWSSKIGINKFIGSSIETSQCLYMGLISFNCNYFGKVPNVKIVYYPITSFKSSHICFFLA

SEQ ID NO: 80546 - protein, 729 aa, Zea mays
  Coding DNA Sequence Number=SeqID_37171
  Homolog annotation: Hit_ID=Q7XBD4; Match level="QueryCoverage=23%, HitCoverage=17%, E-value=1e-07, Identity=27%"; Hit description =Cinful1 polyprotein
MPSSSSSAAATPPADASSGETLSDVAAEELRAGDTVEFGVSRMSSVRVQDMQQLGYFGGGVARVPGTEEVPEPEGELVVHQLTPNVVVALAKYVWATTSYGGQPSVEVFAKYYCLHWPKRKIGNKIAQFGSCTFTPKTGKTSMEVVELVPCACNKWGNWWEFWFYVAEGTVEDHPGLPVAEMCLHYYSAYPRFEVAEEDADEGALRCAAGLSSGRDLVEEFVAMLVWSPTFALDLHGRDPAAFVREAKDGAARIVGRYVPRTEGQRSWDIRGSNDRLNRVFELNRLPYGGYPRQDDVDRRGKKPAAEIEDDPAPAAAPSSKKRKLGTVMEGLGVSDSFAVELMGTCAAPGGRMSSPELQESLPRMLKVTGGWWPENVPIPRAAGEDFFTSRMVRDLRVFPYGRNIAAVVSAVMEKDRQEAAQKHRAVIRLPEARPKRAQGTAKAAAYGGSQPSLAAKSAAPGSSKVPDVVKAAGAGVVKSASAGAAKARDLPSPAKRVADFATDISVDDYLTGSGEGQLVVVPPAAATTVSATVPGAKGSALSAGGEISALTAVKDEASTVSRRLREASQRLSQAADFADCMASGALTAVVSTEVERLQAQHADAVREKSAADSKCRKLTEKVAALEGERTDLRRQLAEEKREANQALAKVQSAQAEANLARVEGSLASQRAEEWEMRFNALQARMERAEVSMRSEVERTRKQLMDSYRELGARTADFEVPDRESGLRC

SEQ ID NO: 80547 - protein, 140 aa, Zea mays
  Coding DNA Sequence Number=SeqID_37172
  Gene Ontology: Mol. function=oxidoreductase activity; Biological process=electron transport
  Homolog annotation: Hit_ID=A2XWE1; Match level="QueryCoverage=52%, HitCoverage=20%, E-value=5e-25, Identity=54%"; Hit description =Putative uncharacterized protein
  Subcellular localization annotation: CTP_CleavageSite=47; ConfidenceScore=5.15e-01
MCGCAALVAGARPPRPVLPRRLRRRRGSSVRAEVSPGGESQPKKVTVAGAGWAGFAAAHHLIKQGYDVTLLAAESGPTEEVEFPIFHNQPRLPAPFGVFAYPEFPNLPLSDRLTSIPVIAAVIDFDNTDTAWRKYDARKF

SEQ ID NO: 80548 - protein, 138 aa, Zea mays
  Coding DNA Sequence Number=SeqID_37173
MKHKTAALKLTQRFLSKDLKWERQEMLKGKCALGPFLSILVIECQHKCLNVNLYPWMDKVQIKSKVPPLTLYFFVNLKCKGERLQVVEIPRKRDIERQSKTSWYSSWSLDRLRGADCNPRPLGRHCRKRVTPKRGGVN

SEQ ID NO: 80549 - protein, 59 aa, Zea mays
  Coding DNA Sequence Number=SeqID_37174
  Subcellular localization annotation: CTP_CleavageSite=28; ConfidenceScore=5.34e-01
MACGNVLGFGGQGSAQGTRSRLARAQPRAKTADPGRFTPRPRVLSSNGCTIDSPEAQLG

SEQ ID NO: 80550 - protein, 143 aa, Zea mays
  Coding DNA Sequence Number=SeqID_37175
MEDIIPISIDCRSKDPISNGSEGVGRLNNLDDDVGSARQLERPRVEHDLDGVEDVEIVQSHCRDTGGAEQLGNLRLDEIVLRPGVSFDDHVVDADAHRSNDSRRCTDYIRSRSAADRNVFTAAAINRYSWGNVGDTYKYLETS

SEQ ID NO: 80551 - protein, 369 aa, Zea mays
  Coding DNA Sequence Number=SeqID_37176
  Gene Ontology: Mol. function=hydrolase activity, acting on glycosyl bonds; Cellular component=extracellular region; Biological process =carbohydrate metabolic process
  Homolog annotation: Hit_ID=Q7XUR3; Match level="QueryCoverage=100%, HitCoverage=61%, E-value=1e-141, Identity=69%"; Hit description =Putative alpha-L-fucosidase 1 precursor
  Pfam annotation: Domain name=F5_F8_type_C; Domain location=206-327; Score=6.4; E_value=0.036; Accession=PF00754.16; Description=F58 type C domain
MDYMFDAWFSLIHQLQERVVIFSDAGPDTRWVGDEAGVAGYTCWSPFNKSSVTIGHTTAELQQRNRRAGLQEKGQVAVATGVAADNQISGLQGWCQERRGKEMCWLETVFAARYSSSGDPFGQDWVPAECDVSIRPGWFWHASEKPKNVTTLLDIYYKSVGRNCLLILNVPPNSSGLIADEDIQVLQEFTEIRRAIFSQNFAANATVTANSVRGEQDNLQFAPSKVLEDGIYSYWAPQEGQTCWEMLFDLGQSTSFNLLQLQEPIQLGQRVIEFHVAILVDELWQTIVEGTTIGYKRLLLFPVTESRYLKLTIDSARADPLISFFGVFMDPFSSIHSLQNHVKPPRTNSNEVTMLRMAHASVNKSIDAM

SEQ ID NO: 80552 - protein, 781 aa, Zea mays
  Coding DNA Sequence Number=SeqID_37177
  Gene Ontology: Mol. function=oxidoreductase activity; Cellular component=nucleus; Biological process=electron transport
  Homolog annotation: Hit_ID=A7PHZ8; Match level="QueryCoverage=87%, HitCoverage=77%, E-value=0.0, Identity=69%"; Hit description =Chromosome chr13 scaffold_17, whole genome shotgun sequence
  Pfam annotation: Domain name=Amino_oxidase; Domain location=202-629; Score=321.9; E_value=1.2e-93; Accession=PF01593.15; Description =Flavin containing amine oxidoreductase
  Pfam annotation: Domain name=DAO; Domain location=194-609; Score= -24.9; E_value=0.00047; Accession=PF01266.15; Description=FAD dependent oxidoreductase
  Pfam annotation: Domain name=DUF1702; Domain location=473-658; Score=- 239.1; E_value=0.065; Accession=PF08012.2; Description=Protein of unknown function (DUF1702)
  Pfam annotation: Domain name=Pyr_redox_2; Domain location=194-610; Score=-38.0; E_value=0.015; Accession=PF07992.5; Description =Pyridine nucleotide-disulphide oxidore
  Pfam annotation: Domain name=SWIRM; Domain location=83-175; Score =64.4; E_value=3.8e-16; Accession=PF04433.8; Description=SWIRM domain
  Pfam module annotation: Pfam domain module=Amino_oxidase::DAO::DUF1702 ::Pyr_redox_2::SWIRM; Domain location=202-629::194-609::473-658::194 -610::83-175
  Subcellular localization annotation: CTP_CleavageSite=72; ConfidenceScore=5.72e-01
MSEQAPPYAPFSLVSSLAPEPSSTPSPNPTLVLPSPAFPNKRKRTGFRRKVPSGAPAAPAPSLVAPSQPPLPASAADDIIVINREPTAEAVTALTAGFPADSLTDEEIEAGVVSDVGGIEQVNYILIRNHLLCRWRETYNSWLAKEPFAMLIPPHCEHLLTAAYSFLVSNSYVNFGVAPAIKERIPKEPTRPSTVVVVGAGLAGLAAARQLVAFGFKVIVLEGRKRCGGRVYTKKMEGGGRLAAADLGGSVLTGTFGNPLGIVAKQLGLPMHKIRDKCPLYRPDGSPVDPEVDKKVEITFNRLLDKSSNLRASMGKVAADVSLGAALETLRQVDGGISTEEDMNLFNWHLANLEYANAGLLSRLSLAFWDQDDPYDMGGDHCFLPGGNGKLVQALAENVPIVYERTVHTIRYGGDGVQVVVNGGQVYEGDMALCTVPLGVLKNGGIKFVPELPQRKLDCIKRLGFGLLNKVSMLFPHVFWSTDLDTFGHLVEDPRRRGEFFLFYSYATVAGGPLLMALVAGEAAHNFETMPPTDAVSSVLQILRGIYEPQGIEVPDPLQSVCTRWGTDSFSLGSYSHVAVGASGDDYDALAESVGDGRLFFAGEATTRRYPATMHGAFISGLREAANITLHANARATKSKVDRSPSTNTQACAATLTDLFRQPDLEFGSFSVIFGGKASDPKSPAILKVELGASRKKNTAEGVKTEQNHSNKLLFQQLQSHFNQQQQLYVYTLLSRQQAMELREVRGGDDMRLHYLCEKLGVKLVGRKGLGPGGRCCDCIH

SEQ ID NO: 80553 - protein, 201 aa, Zea mays
  Coding DNA Sequence Number=SeqID_37178
MEDSLAIKSSYCSEVEGFPRLLRSCALRMGIRKKPEYVWTEHFEGGMIRCSMAVYLGERGDPIENDPTIVYMAGYLHTLDNQYDDLALHCTSLTSQVESLEQKVRELSEEKASLQESLSLAEGEETNTREAYRTLKMDYDKVLKKLAPARKTRKKTKSQGCQTEQQEENPPRNQSDTEDMSLASLDDLLLEFGDTLEKEFG

SEQ ID NO: 80554 - protein, 192 aa, Zea mays
  Coding DNA Sequence Number=SeqID_37179
  Homolog annotation: Hit_ID=Q8H6I2; Match level="QueryCoverage=73%, HitCoverage=71%, E-value=4e-60, Identity=70%"; Hit description =Putative MURBZC
MAHSAAEGTLRRGSTGEDAGQGEEDGAVPNFPVRRGDGDEETAVKDGGEGTAGRRVTCAKETIAKYCEVNQKLVQALRYSLSLMSDTAKKLQDTASLCYTDEDVVDGFKLTQVARSLDELAETLEVTAIDCQVSMMDPTTILEAGYGSEDSAVWEDVFRDREIMNQPLEAETLAEHCAKWGLNYNEIRDRSV

SEQ ID NO: 80555 - protein, 476 aa, Zea mays
  Coding DNA Sequence Number=SeqID_37180
  Gene Ontology: Mol. function=transcription regulator activity; Cellular component=nucleus; Biological process=regulation of transcription, DNA-dependent
  Homolog annotation: Hit_ID=Q10KD2; Match level="QueryCoverage=67%, HitCoverage=66%, E-value=9e-91, Identity=52%"; Hit description=IQ calmodulin-binding motif family protein, expressed
  Pfam annotation: Domain name=Ank; Domain location=153-185; Score =28.4; E_value=2.7e-05; Accession=PF00023.21; Description=Ankyrin repeat
  Pfam annotation: Domain name=Ank; Domain location=192-226; Score=4.2; E_value=8.2; Accession=PF00023.21; Description=Ankyrin repeat
  Pfam module annotation: Pfam domain module=Ank::Ank; Domain location =153-185::192-226
  Subcellular localization annotation: CTP_CleavageSite=80; ConfidenceScore=5.00e-01
MKRDLRPSLGDDFSRSCFFVEECPTIYRRLPWSPRTAFLAAQAPTSTTRLALSSRLSPLLALPMDPAAPEPIPAPATDTDAETNADTDAEVGGEGAGVETETGSGTMPAGGVAEMKELPEELAKGVVCLKCETSVEAAAAGVGYDWAINWAIRGWTALHWAACYGRERTVGALIASGAASGALTDPTQQYPSGRTPADLASENGHKGIAGFLAESALTSHLSALTLKESPSGNVEEICGLTAAEGFAVSSSSQLACVNSQEESLKDSLGAVRKSTQVAARIFQAFRVESFHRKKVIEYGDDDCGLSDERTLSLVSLRDPKSGHGDSHFAAVRKNYRKVVWSVGIVEKVILRWRRKGRGLRGFQPEKQLEGPSWQIQPAKAEAEDENDFLKDGRKPATGRLDRALARVRSMNQYPEARDQYRRLQACVNSLRESQAMQDRMLADSAGTDGGDFMTELEEPYASKSMPKREQFPIADC

SEQ ID NO: 80556 - protein, 550 aa, Zea mays
  Coding DNA Sequence Number=SeqID_37181
  Gene Ontology: Cellular component=membrane
  Homolog annotation: Hit_ID=Q6ET90; Match level="QueryCoverage=75%, HitCoverage=43%, E-value=1e-112, Identity=54%"; Hit description =Mechanosensitive ion channel domain-containing protein-like
MDQQRRSSIRLYGSNASSRSGSFDFEHDQDKERADQPSDGDRREVVVKIDAEPHSPVSLHAAGGMSGHSSAVSTPRAGGAVSMLAASASGSSASTSSAGGDAPRSGESFSFKNRTPQSSAGGGESSEDPPSRLIGSFLRKQAAAGGELSIDPDFEVDEMRRPPRAPTSVNASRELRVSFQDPRKRFSPSTSSASSSSYDASHNRNQSTIDLDTAEVLRCTSTSTGSSLLARSKTRSRLMDPPPPSTSSAPASEVDPRKSFVSKGLPPKSGQLRSGLIGKSGLIGKSGPIGKSGAFEDEDDDPFMDEGMTSDFKRDTMDCLLIMEWVSLVVIVGALICSVTIPSLSIKKLSGLHLWKWELLVFVLICGRLVSGWVIRIAVFFVERNFLLRKKVLYFVYGVRRAVRNVLWLGVALVSWHLLFDKAAKRETHTLVLPYVTKVLCCLLVATVIRLIKTLLLKVLASSFHVSTYFDRIQEALFNQYVIETLSGPPLVDESRMMAEVQRLQSAGASIPSELEATAMPGKSGPTAQEWAPHDGHVQAGRRRGQQAAA

SEQ ID NO: 80557 - protein, 342 aa, Zea mays
  Coding DNA Sequence Number=SeqID_37182
  Gene Ontology: Mol. function=calcium ion binding; Cellular component =membrane
  Homolog annotation: Hit_ID=Q2L3D9; Match level="QueryCoverage=99%, HitCoverage=59%, E-value=1e-165, Identity=85%"; Hit description =Mechanosensitive ion channel
  Pfam annotation: Domain name=MS_channel; Domain location=107-315; Score=28.0; E_value=1.4e-07; Accession=PF00924.9; Description =Mechanosensitive ion channel
MDEQLKHATGEDELATEIHSEYEAKVAAKRIFQNVAKPGSKHIYLSDLMRFMRQEEALKAMDLFEGAQEHNRVSKRSLKNWVVNAFRERKALALTLNDTKTAVNKLHQMANVVVALIVLALWLLILGIATSKFFVLLSSQLLVAVFMFGNTLRTIFEAIVFLFVMHPFDVGDRCEVDGMQVVVEEMNIMTTIFLRYDNLKVYYPNSKLAQLPIMNYYRSPDMGDSVDFTVHVATPVEKLSLMKERLMHYLDNKKEHWYPGSMVVLRDVDDTNKLKASIWCRQTINFHDMGMRFERRELLLQEMIKVLRDLEIEYRMLPLDINVRNAPAIQSSRMPSTWTFSY

SEQ ID NO: 80558 - protein, 852 aa, Zea mays
  Coding DNA Sequence Number=SeqID_37183
  Gene Ontology: Mol. function=serine-type endopeptidase activity; Cellular component=cytoplasm; Biological process=proteolysis
  Homolog annotation: Hit_ID=A3AWD9; Match level="QueryCoverage=64%, HitCoverage=66%, E-value=0.0, Identity=77%"; Hit description =Putative uncharacterized protein
  Pfam annotation: Domain name=Peptidase_S9; Domain location=505-707; Score=138.3; E_value=2.2e-38; Accession=PF00326.12; Description =Prolyl oligopeptidase family
  Pfam annotation: Domain name=Peptidase_S9_N; Domain location=16-446; Score=491.0; E_value=1.5e-144; Accession=PF02897.6; Description =Prolyl oligopeptidase, N-terminal beta-propeller domain
  Pfam module annotation: Pfam domain module=Peptidase_S9::Peptidase_S9_ N; Domain location=505-707::16-446
MGSLATADGPLPPLKYPQARRDEDIVDDYHGVLVPDPYRWMEQVDSKEVKEFVDAQAAVTSAVLSSCDHRGRLRGQLTALFDHPRFRAPFKRRGSYFYFHNPGLRPHSALYVQHGLGGEPDVLLDPSTFSEDGTVSLGVVGVSDDGEHLAYGTSGSGSDWVTIRVMRVRDKEHLPDTLSWVKFSRIAWTRDGQGFFYSRFPAPRDALDSGMKTGVNLNHEVYYHFLGTEQSQDVLCWRDPDHPKYIYIPQVTEDGKYVILSVSETSEPVNKLYYCDLSALAHGLGGVKSAHGNGMLPFVKLVDRFEAYYGLIANDGTQFTFLTNKDAPRYKLARVDVDDDEPGSPWWTDVVPEDEDGKAVLESACAVHGHKLLVSYLSDVRCVLQMRSLVTGELLHDIPVDIGTVSGISGRRCDAEVFVEFASFLTPGIIYRCDVGSAVPEMDVYREISVPGFDRNEFEAKQVFYPSKDGTKIPMFIVSKKEISLDGSHPALLFGYGGFGVSVTPQFSVARVVLMRNLGFVACVANLRGGGEYGEGWHRAGSLANKQNCFDDFVAAGEFLVSAGYTSPARLCVEGGSNGGLLVAACVNQRPDLFGCALAHVGVMDMLRFHKFTIGRAWTCDFGCSENEEEFQWLIKYGSGCLLPLLSVFTKRVGNDALIMQIDEAADRLLDQRQQRPANGSGCPISGKKFVAARLQTRLFAAPHKKEDRSHPQVGPIHLFVRGCKQPGLQPGCNKIFFPISALASTVDVSSSSRIAPPSSAPPLANAHSGARCSRPASRTRQPRRAACPPRGAHRRRSTGEMRRRCPDACRCWRWWPRICGPRPPQRAERGSGAGTLLEMVLGYNVSVLYLN

SEQ ID NO: 80559 - protein, 217 aa, Zea mays
  Coding DNA Sequence Number=SeqID_37184
  Homolog annotation: Hit_ID=Q5X143; Match level="QueryCoverage=93%, HitCoverage=53%, E-value=5e-11, Identity=31%"; Hit description =Putative uncharacterized protein
  Subcellular localization annotation: CTP_CleavageSite=52; ConfidenceScore=5.70e-01
SGAGPLAASPTRYFDSSGAGLSPASPTCYFNSLGARLLSTSPTRYFDSSGARSMSASPYCYFNSLGARLLSASPTRYFNRSGAGLSPASPTCYFDSSGAGPLSASPTRYFDSSGAKLSPASPTHYFDSLGAAPFSGAGPLSASPTRYFDSSGAGLSPASPTRYFDSLGAASLFALPTRYFDSSGARPLPASLTRYFVSSGASAHLTKTTRRSKLLDP

SEQ ID NO: 80560 - protein, 126 aa, Zea mays
  Coding DNA Sequence Number=SeqID_37185
  Homolog annotation: Hit_ID=A2YPL8; Match level="QueryCoverage=94%, HitCoverage=95%, E-value=6e-29, Identity=59%"; Hit description =Putative uncharacterized protein
MAADGGPATSALEEALKPFQERASEAEVRSSRFFSRAPDHLLFPAVPLLEQIRIAKLEALLYNKDGPSGGSEATSSAVKDLQSKLDVVTAECLTEKEKNKKLTMENEKLQYRMTHLIRAIKEAESR

SEQ ID NO: 80561 - protein, 364 aa, Zea mays
  Coding DNA Sequence Number=SeqID_37186
  Gene Ontology: Mol. function=protein transporter activity; Cellular component=membrane coat; Biological process=intracellular protein transport
  Homolog annotation: Hit_ID=Q5VQ77; Match level="QueryCoverage=48%, HitCoverage=55%, E-value=2e-72, Identity=75%"; Hit description =Coatomer protein complex, beta prime subunit-like
MAEECLLQAKDLSGLLLLYSSLRDAEGIEKLASLAKEHGKNNVAFLCLFMLGKVEDCIQLLVDSNRIPEAALLARSYLPSKVPEILAIWRDDLSKINPKAAESLADPSEYPNLFEDWQVALTVEKKGNYLPADQYLNHAEKSDMTIVEAFKRMQVVQHEEPEDVAEENGELDQQALRDPYFKGLARVEREPSCQPIRKVEFDFEHKRMSKEEIRELIFREILEYHPQLLSSYINGTERTTFLYPSAVDQFKKQFSHLEESGGNGPSVPTDRKHASLPRTTVVHSNPIPAKEQPLAVSSRVRPVSDDSCKNPWEKASGPGNVTRTSLTLQGLQAQAGILRNRARLRGAARMYLTASEKSLYRGVF

SEQ ID NO: 80562 - protein, 167 aa, Zea mays
  Coding DNA Sequence Number=SeqID_37187
MERFKKRRAEGKILNPLILEEFQWDNEWVQMATNNEEVHPGDHGLFWFHIDEAIGATKPLQGRNFPRMSRTYTRRNGVVAAASTSTTTTISDQDQQELGEEEEAEIDFVAPDDLHVEDDYGQALATDDEAAATANNEDVGTCNGLRYRLGLMGLGQYAIFISLSFIC

SEQ ID NO: 80563 - protein, 1607 aa, Zea mays
  Coding DNA Sequence Number=SeqID_37188
  Gene Ontology: Mol. function=metal ion binding; Biological process =proteolysis
  Homolog annotation: Hit_ID=A3BN35; Match level="QueryCoverage=97%, HitCoverage=96%, E-value=1e-178, Identity=48%"; Hit description =Putative uncharacterized protein
  Pfam annotation: Domain name=AT_hook; Domain location=1117-1129; Score=16.8; E_value=0.03; Accession=PF02178.10; Description=AT hook motif
  Pfam annotation: Domain name=AT_hook; Domain location=424-436; Score =0.0; E_value=23; Accession=PF02178.10; Description=AT hook motif
  Pfam annotation: Domain name=DDT; Domain location=256-313; Score =39.4; E_value=1.3e-08; Accession=PF02791.8; Description=DDT domain
  Pfam annotation: Domain name=FYVE; Domain location=1024-1069; Score= -16.8; E_value=0.068; Accession=PF01363.12; Description=FYVE zinc finger
  Pfam annotation: Domain name=PHD; Domain location=1228-1278; Score =20.5; E_value=5.2e-05; Accession=PF00628.20; Description=PHD-finger
  Pfam annotation: Domain name=PHD; Domain location=456-498; Score =25.3; E_value=1.4e-05; Accession=PF00628.20; Description=PHD-finger
  Pfam module annotation: Pfam domain module=AT_hook::AT_hook::DDT::FYVE ::PHD::PHD; Domain location=1117-1129::424-436::256-313::1024 -1069::1228-1278::456-498
  Subcellular localization annotation: CTP_CleavageSite=18; ConfidenceScore=5.03e-01
PSARSVAALASPRSANPRGSARAGGMEALVGRAVRKAFPGFGTYAGVVESYDPGAGYFRVLYEDGDSEEVDADEMAQILVGPAMPRAQQQRTSPQDAAGRRPKKRRRGNEDDPSPTSTPDGVVLAVAAAAGEETEPATPVMEAVAEKKPRVSPGPESSRPLRRSARQAKAAEHAAEMEAAVAVAAAAEAEEEAAAAAAASTPQQSGRKRPRAIGSGRYRSVSRDLEEAAPKKPLPPPPKPELPPSSQGLDLGGLPVLDVFQVYSCLRSFSKQLFLSPFSLETFVAALRSTYVNPLIDWVHFTLLRALKSHLEDSANEGDPSAVHCIRYHVLCCIVNLNWELLDLATWPIYLAEYLLTRGSELRYGMKLTDLSLLSTEYYRQPAGVKLELLRSLSDDVLEIGAIRSRLSESDGNDEGFRSTGVRRKKRGRGSSAKVAVGSSQFPEGSAEVDDGNSDECYLCGMDGNLLCCDGCPAAFHSKCVGVVEDLLPEVLNSCHPSYSSMVNTISSFCDTAIKSPNLNSRYQSSRECSTSDAEIDSKHLSLLKQPSDHDQFKVEQRSSFEHLNSGKISTSNSDDLDQDLSQHSIKLRYSLMSRSGIVAEGDLNQIPENRSSSAKNDNCNSPKDIVYSRANGSLAKNQKDSPPKEKPRDWQLHSDPARYINYYSFGQIAASAAEELKHKLSENKDVKKPVQDVLSFHLRTICKKLTDIKYMEGPKPHTLDLGAENNMESHIILAMYNILSVEERLNGLLSGPWQNPQYSICWRNAVLKASDVSSLKQPLLMKAADSVEVVGSAAHILVRSSNKSLSHGWKIISPSVSLEEVASVIGQQSCSARRIPTISYTDGSQFARRFKYIAWRAAVEMAENAAQLILQIKELEWNIKWTEILSTLPSSLMTKETQKIARLFKKVIIRRKRIEGTNVEYLLDFGKRENIPPVISKHGTKLEESSSERNRYWLSEVHVPLNLLKAYEAKTFARLLKKKETDELSKKTKKLCGSKPEMPRKTGFDYLFEKAEKRSTMPCGHCHKEVIASEAVNCQYCAALFHRKHFKVPRGATNAVYVCNKCLDEKVLKVESPQKKTAPKKLSPKKKQKKQKKQSRKIETRRNQIVLKCKTKIGKKGKRGRPRKNPTDLSKNEPSKIHESEPSNVSKNEPVKRISKRLHDKYMKSNSNVSENAASSSKRKRTVSQYSYWLNGLRWSQNPHDERARSFRKERVVFPSEDAEISEVNPVCCLCEKCYNEEDIYIACEKCEDWFHGDIYSVNIENVNNLIGFKCHRCRRRSLPVCPYAETVTVVKGQSDEDHCIKLVDQCVGKFVEDEDPNCPKDLGAPGSLQELHDHEIEQGLNVHITEIEFSYDNCLEELNDHGCSKEFDAHSTEKDLEDDKSLRKVDIHNELRALDDLGSEKEPGDHCNPKDLNSHINLKDPGNCRSDKEMKDNNCLNELDGDNNWKALDSYNSWKLLDSHNSQEELDCTTNSKFSPKEIPCPMELDGFSSLKLVSHNILEELDNHNCLKENGNENSSKELDNNGSPKDSGDCLADHFNSSRISGNEALVLTPETDSVNESLGLQSKDDPGKSVPTEHEIDLQVVTVEENIASYEKTHYSPGWSHC

SEQ ID NO: 80564 - protein, 601 aa, Zea mays
  Coding DNA Sequence Number=SeqID_37189
  Homolog annotation: Hit_ID=A2YHK3; Match level="QueryCoverage=39%, HitCoverage=19%, E-value=8e-08, Identity=27%"; Hit description =Putative uncharacterized protein
  Pfam annotation: Domain name=PAM2; Domain location=248-265; Score =17.5; E_value=0.017; Accession=PF07145.6; Description=Ataxin-2 C -terminal region
  Pfam annotation: Domain name=zf-CCHC; Domain location=362-379; Score =13.5; E_value=0.014; Accession=PF00098.14; Description=Zinc knuckle
  Pfam annotation: Domain name=zf-CCHC; Domain location=381-398; Score =20.4; E_value=0.0013; Accession=PF00098.14; Description=Zinc knuckle
  Pfam module annotation: Pfam domain module=PAM2::zf-CCHC::zf-CCHC; Domain location=248-265::362-379::381-398
MTPEHHAEAGEARGVATPMTGAGEALRTGRTRGWAAATFAVGASGAGMVNLTGGMWGARGAAASVSSWRGRMVAVVATMEGGTDDARGSMWGADDERTRQMWILIGCADGRGSMQSVDGGTARGWKGGRRRRGGEDHGARHRRGYGGGWPRLAVVASAGSAAGARSGAGAMGGRCLCGRGGEGHGRGWRAASFRARGRNQSQLIPRLSASPSLLLRTGAHPLPSLPTSPSPAPTPGPATTSPSPVAPGSPSSLSPLARPFVPAGRSRTQRWAEVSPASVGTTPVSWHRSFRDVALLPPPGAAQPEPRREPPRPVFKLVARPASSSRAPRPSPDAEGWVEVRSRRRPRGPPPPRRSIPQDLRGRCFNCMAPSHKAFECRRPVRCFTCRSLGHRAAWCPTRPQVPLRKSVSVWDRLGPLPVVARPRSVLGAGATAQVHVGAKGRRHRTRGRRSNPPLVLELSAPHAPMPAEEGTSPQSLVADNASAPRGCVLERSDAISRMEFRLQRCALFVVITGSRPRVATEVFVAEVAAGFGLLEDSFSVHRSSPEDFVLILNSEQAAIEVYNNGSVFNSPSGSFKFIRWSGLAHAEVVSFPSDSRLEGG

SEQ ID NO: 80565 - protein, 394 aa, Zea mays
  Coding DNA Sequence Number=SeqID_37190
MHGRHVASGRWPLHGGVQGGDGSFPVTACAGPEERGRDPIDGGALFGGVILAPEVDAVVGRAEGPGSNGGSSQGPSVGFPSSSGGPGRSLESVGPVRPLEIVGPEIELHLGGSGVDSGDLRSTFVGGGVAPSPAAGATPVAAKAGMVPAADADMIPPSPTAGAPPVTKDAGMVPAADAGLVPPLPAADAADMAPAAVGPPSSFPAAASGGLPVAGSGEPSSSSTAPPVLTGGMKSLTMMLGPGTRIWPRSPITYSRKGRRVVASPVLSPVPAQPRFVERMSKAVDSILDDPPMRQRRPRNHAGGTLPRRSRRLAGAGVEPPSIPQRIPLGKLRIVKELGLLQTDHAELLSPGVLDDYAKVFEKRPSVLQLKSLALLLNMSIPEDLLGEPASREI

SEQ ID NO: 80566 - protein, 322 aa, Zea mays
  Coding DNA Sequence Number=SeqID_37191
  Homolog annotation: Hit_ID=Q7XBD4; Match level="QueryCoverage=26%, HitCoverage=9%, E-value=3e-07, Identity=34%"; Hit description =Cinful1 polyprotein
MWLGLLTLLARRQMKILGLLLGILSVGLMLGKALRLQQDQEDIENESAIVELEALAEAKKEAEKHMNKIWQRLKNKDNCFGIDSRHCDHLKRVFSSIGATSREDSYSRGDVGGALTWVEKEKGELEGFINARGDYCAMIVSCGMASVLEKHLNLHSLRNDFGVFYTFTSVDEKSDSAFPYFGVFLTFHTKVLESAIVSSLHLKEPPFCRVVAYPTLKHSRLKIVVTWGPGVGHIAGCKARGTASMKLKMCPQSFREITNAWGTTYMVTTNISFTIFIFVSASCIKAFDVEATCFGTVLRNAYVQVKLHILSFFDSQAASDEG

SEQ ID NO: 80567 - protein, 331 aa, Zea mays
  Coding DNA Sequence Number=SeqID_37192
MNSTEAVGKRLYRLASESPNIDAEPDNRIGTLETVDFPKSKWLGLARYGDMVIIIGSSFLNISFLRFGNSLFCLGSKKVNRQDFYTRQTATYTPLRGGPQRPNRHIFIDTCQVVTRKALKAMMRALEGQQLLEDDPTFVYLTTYLLTRDAQYDFLARHHRQMIARAEDAEKRNRQLHVDLTTTQSRVAALESREVIVVKALKQAKDEHVQKLIEVYLVTHNQRRALRIQELASSNLVQPMRAEDPQILEGHPVSIRGEKKAWELPEGAIVLEGMSVSPKAMGKQEHPKSSQDPPPELFEPLTMKKIPSPSLEVKEEATSTPLAPPPYEELQ

SEQ ID NO: 80568 - protein, 190 aa, Zea mays
  Coding DNA Sequence Number=SeqID_37193
MHRSPTESPPRRSCPRTATADRSPAPTELPPEPPPPHVHLPTCTVDLGHGTRTMHGRTPSISAIPAPHCTRISPMPLTSGLGHAEIPSISSRVRWRPTAHQATGSWGLRASAMPQPLGPTSVLAVMSGLGAPLVRDIMVTDDDDGSDYEFWYFLYEEPYLNNKHQVIHIASAAQEKMEAMQRTLRSSRLD

SEQ ID NO: 80569 - protein, 95 aa, Zea mays
  Coding DNA Sequence Number=SeqID_37194
  Subcellular localization annotation: CTP_CleavageSite=73; ConfidenceScore=5.91e-01
MASSPVLAVSPIPLPPPSAYKRARSSPVFATQLPQSPLPSSPSCSSKRRRAPCLAPLRHTLVITGHHFASPVMAGNLTGGFAAAGTRHCAVDRPP

SEQ ID NO: 80570 - protein, 185 aa, Zea mays
  Coding DNA Sequence Number=SeqID_37195
MVRDTELIGHKISPCEVITYALRRRPRRIVWGRDGADTEEQVLPEERLHIFTHKSCYPSTKGSRLPIHLYRGGEAGTVIAAKSSRGPPYTDHSPTALAPFGYQLALQMTRVLTASRSNTNETWVSCVKRLRRRGMVNYEPRDQITTVQIRSELCYEAVGPRRRRRHNAAEFSPEKSNVPSPSHGS

SEQ ID NO: 80571 - protein, 291 aa, Zea mays
  Coding DNA Sequence Number=SeqID_37196
  Gene Ontology: Mol. function=kinase activity; Cellular component =ornithine carbamoyltransferase complex; Biological process=amino acid metabolic process
  Homolog annotation: Hit_ID=Q6QP54; Match level="QueryCoverage=25%, HitCoverage=26%, E-value=2e-16, Identity=61%"; Hit description =Putative kinase
MAPPVDVVGPCPRLGEVEAPSRSRSSLSSKVEVESEPPGRTRRRPSADARAESEPWGRAKRSSSSFGAEPESEPWGRARQSSSSSGAEPKSEPRGRAERSSPSSRAEPESEPSGRAERSSSSSGAEPKSEPWGRAERSFPWRLGPDLAAVSLTLSSGSAVGVAQAALSFLSDRSVERRSDCGHFGSVDWRACVRIKVSGHLCIKCPCDLVGWRGDLAKGERTVKDRLDFFTYALESPFRKEEGGKRHVPLEGAEHGVSGELLGGARCLPLMEFRYKIVPAGLGNVLGYLGK

SEQ ID NO: 80572 - protein, 23 aa, Zea mays
  Coding DNA Sequence Number=SeqID_37197
MAPSHRSAHHPPEAQPPTITNGL

SEQ ID NO: 80573 - protein, 372 aa, Zea mays
  Coding DNA Sequence Number=SeqID_37198
MQAACNRTKGAHPFESDASSMGAQAHTSCNRRAGYYVREATPPLAPVPRLLDCGTSAATRGDPAHGPTVPTEHIDHGSVSRGRRRDGTGKGDTPKGILLCEGSGPRALLLIRGSKAGPSEGFDSRLRALGPRALLLIRGSKAGPSEGFDSRLRALGLRAHHWSEVRRLAPWMGSTATSGHSGSVPTTDQGFVGWPPKGSTAASEHAERGMTLGTSDTWPRLGLRSRGTLGHFRDQQERFCNGIPSEGGIEPSDPIKRDRVRQITCRGTPKTPKSQLVTPISTKLQRPDGRDPGQGSVHSRDTISPRPSPASGRGRQAADSGGFTTRPRVPSSNGRTFDSPEAQLGQASRRSNLGRITTPTDRIAGAFNARID

SEQ ID NO: 80574 - protein, 340 aa, Zea mays
  Coding DNA Sequence Number=SeqID_37199
  Subcellular localization annotation: CTP_CleavageSite=41; ConfidenceScore=5.66e-01
MSSHSLHASRPSTFRAPRWGAPAVLSSCRRWRNTTSRKLVPFSHRSASRIFIRQPGCIPSPVVTQDDDHQFDGGEKRAELRPLPLPQLQGSSSSLLGRRARRARALPPTRVDGPPLLPASGGGNHPPALRRRCPPAMSGKANCCCPARVQHSVLCPRSRGEDGSEDLPVRFGAAGARWCGVGGQVDATVGADVVAAGESFSADKPVSATRGPTSDSLASMSGSRPLSGDANKSLPAAASVLGPSLLPQRSLANHQEFVVPQALRCGGCSYPREWNQSSVRSGTLSAGVCSLRLSGPEHLGGDPPTVSPSEAGSDSAEGGVDAEGAAAPPLMSDPAGTIYL

SEQ ID NO: 80575 - protein, 1566 aa, Zea mays
  Coding DNA Sequence Number=SeqID_37200
  Gene Ontology: Mol. function=peptidase activity; Cellular component =cell surface; Biological process=pathogenesis
  Homolog annotation: Hit_ID=A3BZX6; Match level="QueryCoverage=82%, HitCoverage=87%, E-value=0.0, Identity=39%"; Hit description =Putative uncharacterized protein
MEHLFMQAFESRDRVAAQVQQQADFYSQTLASSLLAAGHQPPEWLIPSTTLPQELNGKPIVLTGRQITTPAINRTVFLPLAIPSTLSTKSGDPNGYDGYPNTNCTAMGTNQHEEEHQEQSSLAQELTESCTADKMFSRIQRSRTRQMHIEDRVHGQDQAAKSGSCDGMHRSNLKTVGSNRAAASSLMPCDDVPNLAATTSDPGQGSGFCAIQGKSIDFLKCNNNPEDQGVKLDGFPPLIVENKIICSDSDIGVSNNCSIRDSLGAPLPDFSKPNTADSVCLCHRIPETHLLVEPKILQFDVAESVCMNPSSEQTGQQQESSLKSNHLDLAFTNPSSEDPSSTSSQGPHSMGRLLLNHVKSRNLNPDSEPVEQHHKYTSECGHPDLTSMHSPNKKPSLTCPVEAPNSMGEPLLHKDTEHIPETNSLGRAYSKFSQPLKIDTSNSNETNCSVVNSLLDNDTLQATEDTDKLKSHVSPPYSGPLQLPTQLADARFGAHTSPGILPNSLLGVDGCNHLSNLQKNDTNSRCSRYRSAVSLELLPPQNFISTDACQSRLLSYRTQSNDKHSSSVASAMNASKSADSKLPQEQYLLVRPSLEFNGSISDAETPLGRSPLGMQNEMLQADPVYDSANCSPGILGDDAHVSKAYGGSADNRKNISVVPKVGPISSSRIRDMQITEKNVVASSEKNNGKLQEGKAQETPHPKDDVQVNADSCTAENIEKMKSPCTSESCEENNKHQEDRGHAQKKSAADVVQINGEKISMEIQPSDPYILRSTGFDDFMLLKSETKNDAVNHSISVASDVQQNESSSPKLRNRFSLAEVALCNSSRAKALSPNFSCDISSRNVAEEMDLQNYQAQLQNTFDVATSSIMPSRSDISLDSVELCSQEENTYLKGEGLSVSNSNVEHSRMAPQMDEILSQSVILNPANYLSTDSTNIFLNYALDQHGKHAPSPVKKLSYGSGVEADRKFRSEDLTGCLLYDGTTSRKKDSDSVKFNDAMPQFESFDFSLPLDSSTTEEKAFGSVHDSIQFGTFNSDPANKHEMSAVSGMYQLLATMSGKATNCLFNDDERQPGESIDGSVTDIFGSSGLGHKGSFITPDFAASCSSNAANKKDNGENPLTPSVEKYCLGKLSEKNGSVSEHMGSIPELLCFRIDEDNDIAEGNDYREILPRSIGNQEQSGRKALQDITGLCQSIGNSASYSIGMSMDTGDTDMTVETCSSELNHHPDLRNDGDNKKPKESCGSLLKKGGKMSRSLHNRLSKTETRHMNEANPGKRSKPSNIVANVASFIPLVKPKVQPTACEAIHLPYNLSSSMGVASSTTMALRATNSSRLMKLSPSTSASTIMHATSSSDIVWPRLSNNVVSSDREMLRPLQSAWGTYPLKKDVRVKALETAEAAKRLEEKKRSEREMRKAAAKLEREKLKQEKELKQKEEEEQKKKRGADVATRKRQRDEEERREKERKRKCIEEARKQQKRPIERKHANINNAHPEGHDNKELQQNSAEAVKGPVKFDEMTGLGGNATNSNNEMVVITDERPAISGPNCQENIPNSIEEFVLPTYRNVVSDEFLS

SEQ ID NO: 80576 - protein, 135 aa, Zea mays
  Coding DNA Sequence Number=SeqID_37201
  Homolog annotation: Hit_ID=Q2WBL9; Match level="QueryCoverage=45%, HitCoverage=13%, E-value=9e-07, Identity=54%"; Hit description=4 -alpha-L-fucosyltransferase
MAAADTERSAAFRCVPYSAVVLLPLLSGYFDLPSISSLSTPSSILAFTACFPNVLDSVGSCDWHPFISVLEAFASWDATGLGLSYRHQAALPTPRRTMQRHPSPAFLFGDGLRGGRTWRRTTPTCLSRGGRGRAK

SEQ ID NO: 80577 - protein, 111 aa, Zea mays
  Coding DNA Sequence Number=SeqID_37202
MGIRVRDARAAKKMREGEENREYRCPNKPARNDYAQLNRHAQGTRMSRALALAILLLAAAAAVAPLASAGTEEFTSVGSSGGKMFDRAVGADPDPSPAGGLPADPAPDARP

SEQ ID NO: 80578 - protein, 29 aa, Zea mays
  Coding DNA Sequence Number=SeqID_37203
MAWDDIYGDDDFDDVMIVPASTISSESTG

SEQ ID NO: 80579 - protein, 248 aa, Zea mays
  Coding DNA Sequence Number=SeqID_37204
  Homolog annotation: Hit_ID=Q6QP51; Match level="QueryCoverage=46%, HitCoverage=57%, E-value=1e-21, Identity=45%"; Hit description =Putative growth-regulating factor 1
MQAACNRTKGAHPFNFDASSMEAQAHTSCNRHAGYYVRKTASPPAPIPRLLNCGTGAATRGDPAHNPTVPTEHIGHGDRERGYSERDPSPRRKRAPSPPTDQRFEGWPLGRVQQPPQSTRAPRPLLVRGSKAGPSEGFNGRLRPLGLRAHYRSGVRRLAPEGFDSRLRRRARDDPGYVRYVTKARATLPRVRLTTAKSGLGRHRKLRLARPQGSAPVLASDDGIRLARPQGSDSALAPEDDELRLARP

SEQ ID NO: 80580 - protein, 66 aa, Zea mays
  Coding DNA Sequence Number=SeqID_37205
  Subcellular localization annotation: CTP_CleavageSite=29; ConfidenceScore=5.18e-01
MALPPPPPCGKENSAACPAPTAVPLARVRPTAAKSSLERYRKLHLARPQGSDSTSSSDDGLCLARP

SEQ ID NO: 80581 - protein, 284 aa, Zea mays
  Coding DNA Sequence Number=SeqID_37206
MFDVTYNPEDGPRAYREPSIYNRLSEYTVMAQLPYDLGRTTHNVASRNSRADALAVGGYKRSRGRERLSASPFSRAATFSYESPGPFFYRCKERAQVYNGGGRARRSPSSEVEVESEPRGRARRSPSSEVEVESEPWGRARRSPSSEVEVESEPWGRARWSPSSEVEVESEPRGRARWSPSSEVEVESEPRGWARRSFLWRLRPVLAAVSFTLTGGTAVGAAQAALFSCQVGQWSDEVTAVTSALSTEDDPAKVASLRSLPELGLGRVEGLRGDEIVSLEWTEP

SEQ ID NO: 80582 - protein, 369 aa, Zea mays
  Coding DNA Sequence Number=SeqID_37207
  Homolog annotation: Hit_ID=Q6J9V9; Match level="QueryCoverage=42%, HitCoverage=45%, E-value=8e-12, Identity=37%"; Hit description =Putative uncharacterized protein
  Subcellular localization annotation: CTP_CleavageSite=68; ConfidenceScore=5.05e-01
MHEESAKTWLPSKGVAPLLKATLPTCVLSRRGLSLHQRAPRSSPYDTGAGSHASYKLAQDRRSQTAARGTGKGDTPKGILLREGSGPRALLLIRGSKAGPSEGFDSRLRALGLRAHYWSEVRRLAPRKGSTAASGHSGSVPTTDKGFVGWPPKGSTAASEHAERGMTLGTSDTWPRLGLRSRGTLGHFRDQQERFCNGIPTEGGIKPSDPIKRDRVQQITFRVKLTAAKTGLRRHRKLRLAQPLGSDSTSTSDDGLHLARPLGSDSTSTSDDGLHLARPQGSDSTSTSDDGLRLARPQGSDSTSTSDDGLRLARPLGSDSTSTSDDGLRLARPLGSDSTSTSDDGLRLARPQGSDSTSTSDDGLRLARP

SEQ ID NO: 80583 - protein, 139 aa, Zea mays
  Coding DNA Sequence Number=SeqID_37208
  Gene Ontology: Mol. function=oxidoreductase activity; Biological process=electron transport
  Homolog annotation: Hit_ID=A3BZ94; Match level="QueryCoverage=63%, HitCoverage=18%, E-value=2e-19, Identity=55%"; Hit description =Putative uncharacterized protein
MACGKHTVYNYSDMLWSHYRPYWRQLRKLWVTELLSARQLRLTERVRAEEVCAMLRDLHPATSTSTTGAQGAPTHGDAQRDLTHVAGQEVRGRGRRRAGRRGHARGVQVDDRGDLPQRRAACGRHGVVARLARRARIPL

SEQ ID NO: 80584 - protein, 546 aa, Zea mays
  Coding DNA Sequence Number=SeqID_37209
  Gene Ontology: Mol. function=carbon-sulfur lyase activity; Cellular component=vacuole
  Homolog annotation: Hit_ID=Q8LL95; Match level="QueryCoverage=64%, HitCoverage=83%, E-value=1e-116, Identity=60%"; Hit description =Putative alliin lyase
  Pfam annotation: Domain name=Alliinase_C; Domain location=187-546; Score=702.8; E_value=2.5e-208; Accession=PF04864.4; Description =Allinase, C-terminal domain
  Pfam annotation: Domain name=Aminotran_1_2; Domain location=184-542; Score=-84.1; E_value=0.0046; Accession=PF00155.12; Description =Aminotransferase class I and II
  Pfam module annotation: Pfam domain module=Alliinase_C::Aminotran_1 _2; Domain location=187-546::184-542
  Subcellular localization annotation: CTP_CleavageSite=83; ConfidenceScore=5.02e-01
MPSAALNLGTAVEGSFQGAGGGMVPSARLLTANGGGAPSRREETANGGGPGSDLAALRPTKRPRGKAQLAGKPRRRAPIWNLQAAVFVSVVLNVGLLLQHHVNSTAPSHHDHDHGHRQEHQACPTHLDGGGVSRSSRGRQEVEAAASAASVPKAAGGAVHRQAAGDAGLGDQPRPYCILASVDIRVVGCCSGDPTMFEEFWRGTGAAAEIVIPGWQTMSYFSDVGNVCWFLEPGLDHEVRRLHRLVGNAAVDDGYHVLVGTGSTQLFMAALYALSPPAAAPMSVVSAAPYYSSYPAVTDFLQSGLFRWAGDASSFTGDAYIELVCSPNNPDGAIREAVLPSGGSGVAVHDLAYYWPQYTAITRRADHDIMLFTVSKSTGHAGTRIGWALVKDRDVAKRMAKFIELNTIGVSKDSQLRAAKVLGAVSDAYELPEAAQHRLFDYGRRKMVERWRVLREAAAASGAFSLPHETSAFCNFTKETAATNPAFAWLRCDREDVEDCASFLRGHGILTRSGSQFGADPRYVRVSMLDRDDAYDIFVKRLSSLH

SEQ ID NO: 80585 - protein, 340 aa, Zea mays
  Coding DNA Sequence Number=SeqID_37210
EGNLSNVKQPLLDQPPDEQQVSNPHSDLSSDSSYGHIHGALLQNGQPLNGQIPEDPVDMGPVPNFNAPAAHPMLGPQEVDGPPIQEVPPVPGDIVIPDAQPVEPLVNGHNNVELNFMFSPGWHSDPVLLSHLERKRNAQFYRIWERFFAPADYSATSVQVSKKWAPFFLSNLMHEDSFSWSKKFLSSDIPSALLEPESMSLPFVLPRKCPEDKLPDLVVSEESADDTSVPADTTSSKPNIAIVESDLRRSKRLRDARAGFRQGSCQKKNCLMCQHKCEGPPSLSARAIRRLGERFCNLSEEDLADKVLKKKKNPPGCVGSSKSGKKDEGDRNQESSDDDK

SEQ ID NO: 80586 - protein, 151 aa, Zea mays
  Coding DNA Sequence Number=SeqID_37211
  Subcellular localization annotation: CTP_CleavageSite=43; ConfidenceScore=5.02e-01
MTSHAKTHAVKVKGRRGTEMLNRSSFGSFCLLELWFGLLVACRAAVSQRRSAALTQGSFAAMSNFGLLVYKTLNVLRFDDVETRAETKKQPWSTYQSKEQSRPWSRDQESIVAEREVNLIWRRGGRRPCYVGEEGGDPATSARRATTMLLR

SEQ ID NO: 80587 - protein, 118 aa, Zea mays
  Coding DNA Sequence Number=SeqID_37212
  Gene Ontology: Mol. function=nucleic acid binding
  Homolog annotation: Hit_ID=A2YET8; Match level="QueryCoverage=39%, HitCoverage=7%, E-value=7e-12, Identity=70%"; Hit description =Putative uncharacterized protein
MAHRLLWDVQANGWERLNFPIICESCLGDNPYVRLCVLGLLRLGMSSFQRYKGDAVSGFERYLCFSCRDWKLRHMTIASCPGLTDLALASVAKFSPSLRLVNLKKCSKVSDGCLKKFT

SEQ ID NO: 80588 - protein, 329 aa, Zea mays
  Coding DNA Sequence Number=SeqID_37213
  Gene Ontology: Cellular component=nuclear pore; Biological process =transport
  Homolog annotation: Hit_ID=Q10R44; Match level="QueryCoverage=60%, HitCoverage=20%, E-value=5e-82, Identity=70%"; Hit description =Nucleoporin family protein, putative, expressed
  Subcellular localization annotation: CTP_CleavageSite=65; ConfidenceScore=5.32e-01
REHLHNSPHLFDHRSRGTAASHHHHLRRTFHVVACRPLPTAFAGRRLVARATRQPSSRLVDWPVRALAMGSRRRPGPALAGSIGGSPGMVATWGTLGKEEGKSLPPAFVLRRVEGMKNEQAISEYCESWSRDDAQRQYIVELGIPEEWMHEALALYHEYYGDKQGALENLIQCGNWKKAHTIFVTSVAHSMFLSSNHQEVWRITSALENHKYEIADWDLGAGIYIDFYVLKNSMQERNAMDDSGSLEEMSESCRSFFGRLNESLLVWGSKLPVESRACYSKMAEELCALLVDTPSETLNLPMGCLLMMLNAPVPDESREGQRHSDPCFG

SEQ ID NO: 80589 - protein, 490 aa, Zea mays
  Coding DNA Sequence Number=SeqID_37214
MMKILEAEQWQKSANPHEVALLQQQQEEDKVGSTTAQETKSVDSPVVRPLEGAALTRIPPANTGAPHPEARKAEGHDECKGSETWLLLKGEPLFKGRFPHLRPKRHGQGLPRCAPGFPSYDMGARSHVSYKLARSAKKVNRRTGSVQPPYGYSPSHLHRNQRSRRRTAVRGACNRPAVIRPSTFTATSGQGGEPMHKERATARGCASPRLRPVVQPLAWGPSPHVIHPACRFLCAEKSHRHSRQYRAFSRPLQKAEEIKFSKPMQRLEAPRTWPNEGIECEGHGPVSRGDRRGSRRDHGLADSNCINGRTGAASQSPVKLWPHLQAHILPLRRGPGAHCRYPESGIKGHHRARKDDTSRMYQASRTSMKERRTPVCITRTPRLWPETLDEGGARAILQTALLSRSLSKSTPVLCGALCSSSLIREASPARRYYAHLRRQGVRRLLQQPTIATPSLISIVLLGPHVGAHRSCTRPPCAIKGGVCNVTNGPK

SEQ ID NO: 80590 - protein, 337 aa, Zea mays
  Coding DNA Sequence Number=SeqID_37215
MEAQAHASCNRRTGYYVRATAPPLAPLPRLLDCGTSTATRGNPAYDPAVPARRDGQYGQKWADSNGGGRRAGAAVTSSAKAYVPSRGSEITLSHGVKTTRPCSVPRTARTRATAASRTTRPVTLTPRRDRRRLRQEKQATLRLRHNDRVKKGPGKGDTPKRILLREGNMPRASLLIRGSKAGPSEGFNSRLRALGFRAHYWSEVRRPAPRKGSTAASGHSGSVPTTDQGFVGWPSKGSQPPQTQSEGWPWVRSIHNQGSGYAPEGDLSDAADVDSGLRSGWGIGNPGVALPCIVGHQHVGDSSPESIVVGLGRRGMNSGMGVRRGGVPDAVALDSWR

SEQ ID NO: 80591 - protein, 179 aa, Zea mays
  Coding DNA Sequence Number=SeqID_37216
GDRGRDEEPYARDRELERSRGGSGRSRVIDRYREERDSRLPPKNGRMRRECYLLRRDAGGRRERLQARPRGGDHACAAVGATGVAQAKAGRPDPEGQRGGLGKRSLRRMRDSVSILTMAPPAPGLARTKGEADGSAAAPATNVAGGQALPFATAHHDVAAPTLQRRPLPLSPPAAPLLL

SEQ ID NO: 80592 - protein, 156 aa, Zea mays
  Coding DNA Sequence Number=SeqID_37217
MASGHCCRSTSAHLRCRDDATILDIIVVERARYGEYRSLLAGLPNEVHPGLISEVVHLVVAPPDVLLLYIHLVRGHSHNNNGHHSSAQEFMVGCDAQNNPRVVDIGNDHEVPMFDDGQRGAAALDHVQAAAALELCRTQRAHGPCRTASRVRTGSR

SEQ ID NO: 80593 - protein, 416 aa, Zea mays
  Coding DNA Sequence Number=SeqID_37218
  Gene Ontology: Mol. function=nucleotide binding; Cellular component =Golgi apparatus; Biological process=regulation of transcription, DNA- dependent
  Homolog annotation: Hit_ID=A2ZPP7; Match level="QueryCoverage=83%, HitCoverage=39%, E-value=1e-157, Identity=79%"; Hit description =Putative uncharacterized protein
  Pfam annotation: Domain name=DUF246; Domain location=74-415; Score =559.9; E_value=2.6e-165; Accession=PF03138.5; Description=Plant protein family
MRAVASAVVWTAVVQVASIAGLFRPRVVADCGGKGGGGAAAGLAALAGEDSAAARLSPPALVPKRIYKSNGYLRVTCNGGLNQMRAGICDMVTIARHLNLTLVVPELDKRSFWADPSDFGDIFDVDHFINSLRDELMIVKELPLKLQLIRTKKRLYSMSPVSWSNETYYLKRILPLARKHKVIHFDKSDARLANNGLPVQLQMLRCRVNFDALRFTPQIEALGRQLISTLQRSGQFVVLHLRYEMDMLSFSGCTHGCSTEEAEELTRMRSVSFTVTHYSTLCATSTLRWKKRLVLKRRGFRDFAPLTPEEITLVLKALGFTKDTLIYIASGEIYGGERRLAVLKAAYPKLVRKEKILSPDELRPFQNHSTQMAALDYMVSLASDIFIPSYDGNMARVVEGHRRSASLDSVRNINNH

SEQ ID NO: 80594 - protein, 233 aa, Zea mays
  Coding DNA Sequence Number=SeqID_37219
  Gene Ontology: Mol. function=oxidoreductase activity
  Homolog annotation: Hit_ID=Q10I64; Match level="QueryCoverage=60%, HitCoverage=23%, E-value=7e-62, Identity=79%"; Hit description=FAD -binding domain-containing protein, putative, expressed
MARQQPERVPTQRHPVGCGGGWKRDGWLEARRGLREPAPERWAVRGVPRGGPEDVLLTVCPWDPRVRGGTLFHQTTFSLPVRRAVLFVAEVHRLRDLEPRALCGVELYDDILMRYVKASTAYLGKPAPRGEPSGDMVDFDITYYHSCDPGQACLFEDVLEEVEQMGIFKYGGLPHWGKNRNLAFVGAARKYPGLPRASTPACRASCASRTPTTPSGVLSVAEVVGSAAGVGNG

SEQ ID NO: 80595 - protein, 650 aa, Zea mays
  Coding DNA Sequence Number=SeqID_37220
  Gene Ontology: Mol. function=diacylglycerol kinase activity; Cellular component=nucleus; Biological process=activation of protein kinase C
  Homolog annotation: Hit_ID=A2XNG7; Match level="QueryCoverage=83%, HitCoverage=89%, E-value=0.0, Identity=76%"; Hit description =Putative uncharacterized protein
  Pfam annotation: Domain name=PPR; Domain location=213-247; Score =51.2; E_value=3.5e-12; Accession=PF01535.11; Description=PPR repeat
  Pfam annotation: Domain name=PPR; Domain location=314-348; Score =49.3; E_value=1.3e-11; Accession=PF01535.11; Description=PPR repeat
  Pfam annotation: Domain name=PPR; Domain location=349-382; Score=6.8; E_value=1.2; Accession=PF01535.11; Description=PPR repeat
  Pfam annotation: Domain name=PPR; Domain location=385-419; Score =17.3; E_value=0.058; Accession=PF01535.11; Description=PPR repeat
  Pfam module annotation: Pfam domain module=PPR::PPR::PPR::PPR; Domain location=213-247::314-348::349-382::385-419
MSSATCRRGFNGKFRRIASAPSPLLHRTGLSPPADCGARAAEQHCLHLLERSSAPAAVLQSLAFLLKSGLHANPLVLTRLFASSAAAAPALLEPLVAALLVPSVPIDAFLANTLIRAHAASPLPSARLRAASFFPLMLRSATLPNKFTFPFLLKACAAFPGVGVQAHAAALKFGFTTDQYVSNTLIHMYSCFGGEFLGDARNVFDRMAKSSAVTWSAMIGGYVRSGLSSDAVGLFREMQASGVRPDEVTMIGVLAAAADLGALELARWVGRFVEKEGIGKSVTLCNALIDALAKCGDLDGAMAVFQGMKERTIVSWTSVIDALAMEGRGKEAVAVFEEMKTAGVRPDDVAFIGVLTACSHAGMVDEGYGYFESMRMAYGIDPKIEHYGCMVDMFGRAGMVERAMEFVHKMPMKPNPIIWRTLVAACRAHGRLELGETITRNLLNEYPAHEANYVMLSNVYALTRRWKEKSEIRREMSKRGIKKVPGCSLVELDGEVHEFIAGDESHPQWKEIYMMVEEMARELRRAGHISATSEVLLDLDEEDKEVALQWHSEKLAIAFVLLRTPPAGSIASRMAPARAMISDRNKRISSKAKPTRTQTRTQKVASGFRTEERMGPASTTTLRTGPRAVGPAAVCRLPGSESQTPTRVNA

SEQ ID NO: 80596 - protein, 84 aa, Zea mays
  Coding DNA Sequence Number=SeqID_37221
MALMTVAEEPGAWETCAREALNQSADGPSGADGWRQQTAVQPARRRRHSCKNSASKPMPLPSHIHQPITKWDPTGALFTEKNFG

SEQ ID NO: 80597 - protein, 166 aa, Zea mays
  Coding DNA Sequence Number=SeqID_37222
  Gene Ontology: Mol. function=zinc ion binding; Cellular component =nucleus; Biological process=regulation of transcription
  Homolog annotation: Hit_ID=A3AP52; Match level="QueryCoverage=45%, HitCoverage=23%, E-value=2e-28, Identity=77%"; Hit description =Putative uncharacterized protein
  Pfam annotation: Domain name=zf-Dof; Domain location=102-155; Score =31.2; E_value=3.9e-06; Accession=PF02701.6; Description=Dof domain, zinc finger
MVFSSVPVYLDPSNWSQHHQAQEQQQHAQHGQLPSDGGMDAHAHHHHDQPPPVRPPHGGALMAPRPDMAVVVSASGNGPTGGGSAIRAGSMSERARLAKIPQSEPGLKCPRCESTNTKFCYFNNYSLSQPPSRLSPTRHRSPLLSARAGRRHPSRPPLPAIATRAP

SEQ ID NO: 80598 - protein, 39 aa, Zea mays
  Coding DNA Sequence Number=SeqID_37223
MGDPYPRGYGYGVLDPLLGAIGRGAELTQLGATAYGAEL

SEQ ID NO: 80599 - protein, 53 aa, Zea mays
  Coding DNA Sequence Number=SeqID_37224
MNPMLRAQVTHNQKDLVSTMLIKVVLVFVTLPFDPNVQLHNSRTYQCFNAWRC

SEQ ID NO: 80600 - protein, 202 aa, Zea mays
  Coding DNA Sequence Number=SeqID_37225
  Homolog annotation: Hit_ID=Q10BD4; Match level="QueryCoverage=33%, HitCoverage=75%, E-value=3e-18, Identity=70%"; Hit description =Expressed protein
MQRSGTSRGPNAQRQYGTATPLELDWTPLHLSSFARWCAPVPPAPPPPTAYITLPLLFLRPAHQTRSRLRSCVAIALLACSVPVARGGGRAPLVVVIPAERGGRVGEMEVEHGGEMMMLVEAAAADEEGWQTPRREDCRIPVVPPCPAAPSRKKAVAMAPEAAGGSRRRDPPKGGYFQPPDLESLFVLAPPRAQAAASSRAW

SEQ ID NO: 80601 - protein, 77 aa, Zea mays
  Coding DNA Sequence Number=SeqID_37226
MPLIEIILAVIIDHSPKPLSVRHAERVLTALAAPYVLQSGQRGPIFDLHTILEHGISFTKILIMGEPLSCTGKLETD

SEQ ID NO: 80602 - protein, 268 aa, Zea mays
  Coding DNA Sequence Number=SeqID_37227
  Gene Ontology: Mol. function=binding; Cellular component=cytoplasm; Biological process=protein folding
  Homolog annotation: Hit_ID=A2XNH4; Match level="QueryCoverage=94%, HitCoverage=72%, E-value=1e-115, Identity=79%"; Hit description =Putative uncharacterized protein
  Pfam annotation: Domain name=Arm; Domain location=114-155; Score =22.6; E_value=0.0015; Accession=PF00514.14; Description =Armadillobeta-catenin-like repeat
  Pfam annotation: Domain name=Arm; Domain location=198-238; Score =10.6; E_value=0.5; Accession=PF00514.14; Description=Armadillobeta -catenin-like repeat
  Pfam annotation: Domain name=Arm; Domain location=72-112; Score=9.2; E_value=0.75; Accession=PF00514.14; Description=Armadillobeta -catenin-like repeat
  Pfam annotation: Domain name=HEAT; Domain location=125-157; Score =8.4; E_value=1.5; Accession=PF02985.13; Description=HEAT repeat
  Pfam annotation: Domain name=HEAT; Domain location=203-240; Score =8.8; E_value=1.3; Accession=PF02985.13; Description=HEAT repeat
  Pfam annotation: Domain name=HEAT; Domain location=77-114; Score=1.6; E_value=16; Accession=PF02985.13; Description=HEAT repeat
  Pfam module annotation: Pfam domain module=Arm::Arm::Arm::HEAT::HEAT:: HEAT; Domain location=114-155::198-238::72-112::125-157::203-240::77 -114
MAKDGGPDWNGLFKWSIAHGDGTNPPRALSEEDRKWFMEAMQANTIDVVKRMKEITRVMRTPQDVLQSQGVTPENIEDLHSIGGLDPLLGYLKNSNAGIRAKAAEVVSTVVQNNPKSQQLVIESNGLEPLLINFKSDPSTNARTKALGAISSIIRHNQPGVSAFRLGNGYAGLKDALGSYDAKLQWKALNLIQYLLHNKADRSFATELGLPKLMMHLAASDDHLVREAALSGLLELSQDQTSGNALPDQDKLKRDPEEPNRRDQCDGL

SEQ ID NO: 80603 - protein, 60 aa, Zea mays
  Coding DNA Sequence Number=SeqID_37228
MDVRAFSGIIYNVIDQQAFVESRLSRRRELAFVEKERGNEVGAATELVEGSTVSESIKIL

SEQ ID NO: 80604 - protein, 2431 aa, Zea mays
  Coding DNA Sequence Number=SeqID_37229
  Gene Ontology: Mol. function=nucleic acid binding
  Homolog annotation: Hit_ID=A2WMU4; Match level="QueryCoverage=96%, HitCoverage=92%, E-value=1e-66, Identity=24%"; Hit description =Putative uncharacterized protein
  Pfam annotation: Domain name=SAP; Domain location=3-37; Score=30.9; E_ value=4.7e-06; Accession=PF02037.18; Description=SAP domain
MDLAGMKRRELQALCKRHGLPAGGTNADLVGRLDAVLSGPAVVEEEVAGVPARKGCLKQTGGGATEAKKVTFWGGDVGADVPVRRSRRNSFNPAEAEEAGEAVAVDRKPKRKNQENDEGVAVIAQARVTRRSNLEWSATVLPPAVEKKRGRQNAAESDVQKSALVEVTARTTRSRSIVPVVVPPTVVENKRRKTGDPQTTVELTMLSDVPRSDFPATRSLRNKIVHVNNSVVDETHTTRQLENKMRPSTRRHQQVASSPEDKGQKIPATSKSPLLRWSRRNYSEANSANSVNIKLAKDSSTAQPLAHHNSHSEDLEKQPAVKEPIKRSTRKSIALAALEKEKDVIEGKNPEAHVRRSTRKSVVQVKDTKSIVEETQYANSEDVAKQPATKGPARGLRRKSVITELHEKEKSLIAEKNMETDEAILTRKPVIPVKNIKAVGEGIQIGKGKDVDKQFVVKQPTRRSSRKSVLPDMLENNSGLLAPKMNAEMNVRRSTRKSVLPDMHNEKQDHHKMARNENLQSGKYQDGEKQQKVKDSIRQSRRSIATVLLEGQNNDEGKKFKNPTRRTTHKSHALNAVEEVSMDHIEVGEEGLKLRKRSRFLLEISSSANVSWKHQNAQISNEKDNTEGSQQASNCTTSKRRSSKKRRTTAPEEVMPFKVANDDIVIMEETKDTLEYNNESSSKVQEICQVNAAREEFSSGPLLVTVAPSDEICTVQSVAVVIPGSESGDDANQSSDKSKQPQEHSVTQTVDDHLSETRSGKLDQSTCITGLVSDNCVVSEDKTLMSEGEGDFVGPKSPNGLSISFIVADREEQSPVSGEQRVSLEANANEPEEKNLANVTSTDLHTKSLQHDIDRIAKETDKDVLSLVFPIEEHEEKYGVSPIAVEKCVCREASACESARKPLTVIFSNNLHTKHLQHDCDVLIKETGEEVLAQENCNDQPVPAQTDQEIKLNDELADPDVLAQENCNDQPVPAQTDLEIKLHDELADPDHEEQSPVSGERRVSLEANANEPEEKNLANVISIDLHTKSLQHDNGRIAEETDKDVLSFVFPIEEHEEKYAVSPIAVEKSFRQEASAIESAGKPLTVIFSNDLHTKHLQHDCDVLIKETGEEVLAQENCNDQPVPAQTDLEIKLNDELADPDVLAQENCNDQPVPANEPEEKNLANVISTDLHTKTLQHDNDRIAEETDKDHEEQSNVFGERRVSLEANANEPEEKNLANVISTDLHTKTLQHDNDRIAEETDKDHEEQSNVSGERRVSLEANANEPEEKNLANVISTDLHTKTLQHDNDRIAEETDKDVSSLVFPIEEHEEKYAVSPIAVEKSVSREASACESAGKPLTVIFSNDLHTKHLQHDCDVLIKETGEDVLAQENCNDQPVPAQTDLEMKLNDELADPEVLAQENCNDQPVLAQTDLETKLNDELADLAMESGCSITERNEGLVAHNLDQEGFLEATPECKQECGLPEETVISSKETGSLLCADQSPIGLESLFSQESIVESVGHCALASATTHTENGFDDSKDCHNKSALENVHVPEPCSHNDTKGGIFKNVDCMHTSQRDDRMEGVPEANTDEEHVLSAFLLDANHLNVVINSEEVVCEGEDSKELLHSEDCKASSEKTDVNDGNVYGISDAVVRCALHAPADDNYEIFLGPNTDVPRQVYNDGCSDVKEDRFASKPWTIDIIEDASVKERSNLKDWQLDSKLEGTEIVESGLYFNKDIGNILHSGSIGEITPSGSGLSKDSSVDYRGEVLDGFSMEASLERSSTRGEQNGCRLDAIENPSITLATSGYKHEGALSEEAVYTKKNYAGTCLSNPRELIMELQSHFSKENINESDPHDSLVFPTAENSADEQLVKVHHGSNLSQLGLTDLLDGPIGCSNTDVLCQCDNHKNQSNEDKVEEVEAVSAAKYIESEVVLLPSQERSNLNNEQLNTKLESPNIMGSCLNCDNDVCNTSDNGSVFVIGKRTPSASGLPEDYPKDSDLQQPVLDSFSVVSSFQDNISGKKTVSGVAGSEILSLSLATPDYKHEDGFSEEAVCRTKNYTGTSSVDPRHLDMEGHSIYSEGGTEKSNLQDNLAFLSAESGKDEPIICHVEKLVDAHASSDTYQGPCQDLGRHEEQESCMSIPMQAKESGGVLRSSHTKGSVTAAQIDLAGDAHLIVSPFDHVIRQSLYHSDNAAAKQVFSEEKEETKSISSSDIDILHEKSYSSGHDDHAACAAETQFYHPQKASISDGLHLGPSSLQVESLDALDSDILYVNTGVLEQHHKEGYYEPSVYQITSGICTMSEAEPFEVLETGKDVKTPSKLDEQLNPGLDGDEAEKHSLDCGTDTSPVMSKRTLSSPGSGICQSSRRRGIDELCGKLQSFKVSSAVKGSYVAMGAPRPKPGDSTSRSAAALLRNIENTTAVKAGRPPVKPNADGKDSSRRALQPISGRPDSR

SEQ ID NO: 80605 - protein, 257 aa, Zea mays
  Coding DNA Sequence Number=SeqID_37230
  Gene Ontology: Mol. function=phosphotransferase activity, alcohol group as acceptor; Cellular component=cytoplasm; Biological process =nucleoside metabolic process
  Homolog annotation: Hit_ID=Q7EZ54; Match level="QueryCoverage=56%, HitCoverage=24%, E-value=6e-44, Identity=59%"; Hit description =Putative uncharacterized protein OSJNBa0036M16.113
MGFATVGALLLGSAPASGPSDSGGAPKSAESTTYKPSYGETPSREKKYADVIIPRGGDNRVAVDMIVQHIRTKLRQHDLCKIYPNVHVVQSTFQIRGMHTLIRDRDITTPEIALEEQDRNPPFDIGSYGEQILDTLSSRTNNTGTASFYRSVDLDKGKATNELVCYTAENPFHVRLIGPNRRPEMEARFARKRVKSPLQNAGKVRESSLAQHECPNKPLCKNGKITVTTATKLTQDGKRRRRSSAHLMQPINLESSG

SEQ ID NO: 80606 - protein, 73 aa, Zea mays
  Coding DNA Sequence Number=SeqID_37231
MDGDVDGENNSSQFINNDLRIVPGEENGPSQSIYNGSSVAPIDLEEGAATDNGSAPTSYADEKLLLSGIIYVF

SEQ ID NO: 80607 - protein, 227 aa, Zea mays
  Coding DNA Sequence Number=SeqID_37232
  Subcellular localization annotation: CTP_CleavageSite=49; ConfidenceScore=5.51e-01
MEGDSVHGLGIPLPRKAIPQSPWKAIPSVSARATRSCRQPPRRRAGQTRRTARRQHCPFRTSGPRRAMRHRWPPQFLGKPFTYFIGCHALFLESNYFDPIGKTSDLALLSILIFILLVASTLTDLNGAFGWLAIHIDNLKVNFRCTFDGLRYGVAFNPLQCAIMLLRRMAEKLPVLLRYQCLHVHTYFKNSRPSEKLKEGEDIYIYQGDKSFCYEDDHRVLVCEFIL

SEQ ID NO: 80608 - protein, 343 aa, Zea mays
  Coding DNA Sequence Number=SeqID_37233
MRGVPRYRCIGFEKFSVFCGGPEEAQYWRERWFSFSASRNRHPRMVTRGPGPPCQGPGYWFRRRQRAGGGVLLTQPTGLLLFGGGEETHHRRWWHAPHAAVCLLRTWRPMPKEYDSWARAPVPETRSPWRASGEVFYGALGRKWGNPSLKRDSSKRGSHSHQRPFALELFALLCRRSRHGPARPSRAPPARGSTQLGVQPAWMGWVGVCRKDPCRCISSRRPRRRRVCVLRLQTPQRVGATDLVFLRAAARGALPRGGGALPPVLSFKDVHQPCSGGEQAGLRLRLPHELVTRLFLQHSEERMVTSLVKVGGELRLCGTGQTANAVCRRASSSLAWMVLSSPP

SEQ ID NO: 80609 - protein, 270 aa, Zea mays
  Coding DNA Sequence Number=SeqID_37234
MKTMEWCADREGGDSMGAAISGETRPLGETASSPARGAGAPTLGAGAVGLFPLASVGGGVWEAPFPAPQPEMPPAPPQGILVAGGDPDGDDDTSGSLSHNMELSEEQEPKGWIARPITRDAARGCHFHDALDTLLCQAFNRHTWSIEYCCVVYQHRRGEVADGLDLKYYPRRSTDSAGGVIVSPVGEGNPKLNNMVNLVAMLNTELDHALDELGKVRAEVAELRIERVARHYQYGGPPAPVGIQHPNRSPPRGRFDYGTPDCRTQKDLEP

SEQ ID NO: 80610 - protein, 136 aa, Zea mays
  Coding DNA Sequence Number=SeqID_37235
  Gene Ontology: Mol. function=heat shock protein binding; Cellular component=nucleus; Biological process=protein folding
  Homolog annotation: Hit_ID=A2X204; Match level="QueryCoverage=71%, HitCoverage=34%, E-value=2e-42, Identity=86%"; Hit description =Putative uncharacterized protein
MELPRLVCVQIHLHYGRAGAGESLVGHLAVQMSREKSNAEKRALYDDTGITDDALVGEAANNLQEYFRTMYKKVTEADIEEFEAKYRGSDSEKTDLKELYTKYKGNMNMLFCTMICSEPKLDSHRFKDIIDEAIGE

SEQ ID NO: 80611 - protein, 154 aa, Zea mays
  Coding DNA Sequence Number=SeqID_37236
  Gene Ontology: Mol. function=DNA binding; Cellular component=nucleus; Biological process=regulation of transcription
  Homolog annotation: Hit_ID=A2XAV4; Match level="QueryCoverage=87%, HitCoverage=35%, E-value=2e-53, Identity=75%"; Hit description =Putative uncharacterized protein
  Pfam annotation: Domain name=NAM; Domain location=2-94; Score=107.1; E_value=5.5e-29; Accession=PF02365.6; Description=No apical meristem (NAM) protein
MVADVAKLSTNEWYFFSFRDRKYATGLRTNRATKSGYWKATGKDRVIHTPCSWPAAAAGHHCTVVGMRKTLVFYRGRTPNGVKTSWVMHEFRMENPHTPPKEDWVLCRVFYKKKADAMDYADCSDQDAIAVHMPRGSADPRGAAVAASGRGGRQ

SEQ ID NO: 80612 - protein, 337 aa, Zea mays
  Coding DNA Sequence Number=SeqID_37237
  Gene Ontology: Biological process=heat acclimation
  Homolog annotation: Hit_ID=Q10M69; Match level="QueryCoverage=60%, HitCoverage=59%, E-value=5e-66, Identity=65%"; Hit description=F-box domain containing protein, expressed
MFGILAQLEGLVEASRIFLRGQAQLKRCALVPLVDDACLRIDRVIPADAADAGAPRPRAALSHLLKSVLLAVLKPFAHCDAKSASPQKHAQQQHHSPAQVLRNFSSIRSLRMELPVSDVGTDDGVVLRWKAVFGSTLQSCVILGGTRVDRAAAAGPPHAPSSAPPAGDDDGGSIPESLYTNGGLKLRVVWTISSLIAAATRHYLLREIVKEHPTLERVALTDAGGQGTLSMTDAVGEDGVDEEDGGSSGITQSTRTRTESTRGTSSWKRREMREQQPSALTLPMRLKMTRRSASGRRSNWSSPAAPESQRSSPPRSHRQRRDPAGSSDIGGGRADWI

SEQ ID NO: 80613 - protein, 144 aa, Zea mays
  Coding DNA Sequence Number=SeqID_37238
MGKNNKRKREPTPPSEDFGDSEYSEEEFSSESEGSPALIPLRESSDDSDDSQGLAAEVWTYIRAVERSGLEGSDESEYSSDEEDSDGGGEDEDGDNDDDDEDGGGGDSDGDGSGRGGSSGSGGGGSSRGSNRGGSGGGSNRASG

SEQ ID NO: 80614 - protein, 841 aa, Zea mays
  Coding DNA Sequence Number=SeqID_37239
MQVVELVPCARNKWGNWNEFWFYVAEGTVEGHEGLLVSEMCSHYYSAYPSFEVAEEDVDEGALRCAAGQSSGRDLVEEFVAYVVWPLAHGWALGEVCPRQMPFHGGRVVRSPAFALNLRNRDPAAFVRDAEDGAVRLVGRYVPRTEGQRSFDIRGSNDRLNRVFELNQLPDDGYPGQDDVDRRGKKPVVETGDDPAPAAAPSSKKRKLGTAMGGLGVSDSFARELMRTCAAPGGRMSSPELRESLARMLRSFSLRAKSTKVVPPLSGVAEVAKAARALPSAGKRVADFATDISVEDYLGGSDEGQLAMVAPAAVTTMAAVPPKAKGGALSAGGEVAVLAAVRDEAGAASRRLKEVVESLSQVADFANRTASGALTAVVSAEVERLRTQHADAVREKSAADSKCRKLADRVAALEGEKADLRHQLAGERRETNEALVQAQAAQAEAKLARAEGNLARERAEQLQERLIALESRVERAEAAMRAEAERTRTQLMDTYRGAAGTPHCRGGFMSYASLVTCEGAMNALSHEGCRHFEVFDQADEDFDRDIYKVEDPVVKESAGAIYDRMWGPHGRVVVRERAETARAQAARGERVDDFGALNSALPDPEPTPAEAVSGVAPEPTLETVPDAPTSAAAGEDLPPKVAEGAPDAPAAAAPSAEDPAAVAAETTAEATAGPMAEAPATSGPSQVQDFGPAHATATTEFLAASTAEGGNECGGSASEFFDFTDSGSSVEWTEESSEEDLDYFAALDVAAAEASPHAAGAQDVPGPSTGRRRRRAVAKRRVSGEEGARLRVSRAGRQELLSLPAAASTGEWELRSLFAGLYDEVVCSRLSVPAKALCTLS

SEQ ID NO: 80615 - protein, 97 aa, Zea mays
  Coding DNA Sequence Number=SeqID_37240
  Subcellular localization annotation: CTP_CleavageSite=33; ConfidenceScore=5.04e-01
MGSKTLSTKCTFASLTRLKKKTLKDKLAFWESRAVTKSSYPRNRVHANREHRYTIVQPLATEDQQRMRHDYNSEVNNNTVREDDHGVAEASYESSAR

SEQ ID NO: 80616 - protein, 179 aa, Zea mays
  Coding DNA Sequence Number=SeqID_37241
  Subcellular localization annotation: CTP_CleavageSite=14; ConfidenceScore=5.04e-01
MACTAAQKERTAARAGSVPPRGRGRRQRRLTSSPEVGLEATVGTLKLGYSLLLYEDPVPTRAIFSRVVKELYAGPDHDSPQPQATTLGQQQHLTPPRGWLRGCHVARESDILEGVNSESGPPWESVGPLDIQFGPPRWSRTPRVRTGPLEWDPDPSVWGPDRPHWGPKTLLKVQAGVRS

SEQ ID NO: 80617 - protein, 322 aa, Zea mays
  Coding DNA Sequence Number=SeqID_37242
  Subcellular localization annotation: CTP_CleavageSite=77; ConfidenceScore=5.16e-01
MPAGGSGCQHQASDGSGAGDPPPAAAAETAPPDSHAPTRGPAAAAPTSSGVATVEEVPTAPTATTASMTAMSSSTPSAAAEEVPTAPTPAIKGDAGGASSSIPPPTPEETEVVFGRRLRSGAEPEAAPVPLPREALATELQAKLSALEKILEEQWIQQTTAVERLQKLQQELEGKVRDAALAEEKLKEKGESLDRRETDLARREKYLAFKEEMLTRRGELLAKNELEAEKKEKEVEKQDSATDHLRRLDQILGARLEAEGGRLYRAVIEYILTCFRSHDLAISLELIIAGSVATTEDAAWEGVQDTVELVAERFQRDPADDE

SEQ ID NO: 80618 - protein, 671 aa, Zea mays
  Coding DNA Sequence Number=SeqID_37243
  Homolog annotation: Hit_ID=A2YCT1; Match level="QueryCoverage=65%, HitCoverage=37%, E-value=4e-47, Identity=30%"; Hit description =Putative uncharacterized protein
MKLIYSLLNEGMAGRVQDFITLRIGSLWLDAPLGPLHASDSASFLHTTAASPAMIGLEQEVNSKPHDGFIPVVSKATKRRARRMAARSRVSASQEYPNKVHKVASSSLGPPGFSRLKANKSVSHKTEARFRKTTLREWPVCIKQAPPTKFVQLRVSSTSTPKETTPTLTPPKMLEVRSSKLAPSILGAPPTKTVTITTPLGPNEEVVLVDQHQHPHFCNKGKAAMVEKEAPEFIPSPVYNLGLVEHGRVLRWQGIGLTNDDIRKGHVDPTATLSDPISSEIMVSKSSVQGSMSPKRHRRHRRNNRRTRANLIVVDSAALTNAHRSLIVDMILTQHQESCCRIQDAARRAMHASLERTICQDLNKLLPGVSMSGDDINGEIMRRAEAFAQWPEYQEWVKRNPQRKKYVKQAVNVRASRATNKRRELALPANSMASRVGCTSNSTSNHARPSHERLVGRSRRSTSSRAPFSTQKRTSSNPFKVLYAMPVGITEKYSDASQSSSASTHFKRKKPRKQIPSGHRPITQSLLGCRSDDSNAISNDDLCSPLNNDDGPSRVEQVLAANDGHSVEQQMAQLMATLQQKEDELVALREQMAREQVANHNHNNERDASTSHNQQRSEPALTLEAIQRMIFEEKHEHNLMEEYATFAIGVFEDDDEPLYFPKEEVPEVDEI

SEQ ID NO: 80619 - protein, 61 aa, Zea mays
  Coding DNA Sequence Number=SeqID_37244
MAFLYEDILKAKKEILTGLGNVDKAATQNLYKSIIEIIDSKMKGAKPEFEFEGVNQIEGDY

SEQ ID NO: 80620 - protein, 88 aa, Zea mays
  Coding DNA Sequence Number=SeqID_37245
MSGSIHCAAAVWHVVQGGRLTTRSWFQVYERFVDCWQMKYYLRLVLYLKVLLTQRSVIEPMVVVRGNEMVLVAHPGKWEVAAHPPSLS

SEQ ID NO: 80621 - protein, 144 aa, Zea mays
  Coding DNA Sequence Number=SeqID_37246
MHVVSDFLKRRVMPLQRRPRLCCWFTGPNDIGRIQHGPGLRTAVMATLSTLDESSMVVLQTCGRDPLRGIRIPSVPARGPQPTSGAPSAGLAVAPSSMDRGKGPASSSSAPGGTGEARQSSATTTIGPAAITTTSTIGPSATTT

SEQ ID NO: 80622 - protein, 74 aa, Zea mays
  Coding DNA Sequence Number=SeqID_37247
MADNRTSSRREDVLRTRREATARLPLRRADYAGVTQDARALSVQLVVTWAGRPAGQGPRVVLLAGESSGRRGSY

SEQ ID NO: 80623 - protein, 337 aa, Zea mays
  Coding DNA Sequence Number=SeqID_37248
MRLMILVMTMVLMARLRHTARKSVIPFLPSRLAERPLRRPVAGQSSHLERLHHRLREEQERRRQEQQSSSLSLHQEIESVRSCSPVLPLEPPPAPPLGAPASGVAAGGDPDDGGGDDSSSHDTDFSANPEPEGWVARPITRDAARGCHFHDALDTLLRRAFDRHTCRGVYPDRWEATCLVRCPEDSLQGAEACSEHYSISERDSAEAAMQDAARRALSHYCSVFGGAADGLDLKYYPRRSSGSTGGVIVSPVGEGNPRLSSTVNLAAVLNTELDHALDELSRARAEIALLRAERAERRYLDGGSPAPVGTQHPYRSPPRGHQSYGNPACKTKINLEP

SEQ ID NO: 80624 - protein, 250 aa, Zea mays
  Coding DNA Sequence Number=SeqID_37249
MTKQYYYRVDDAHPATTTDDRTSSRREDVLRTQREATARLPLRRADYAGVTQDARKAAPRARASDSRASRGHAVHAWTEMVLHRQRATLATRRGCTQPRRGHSWPRRGQHDHSRGAAHRALRWQLWVTGTWVAQSGEQGIAASVTGARSASGARCRTWSGVVAGTRCVGLERCRGVGGRLVAAAAGRPAGQGPRAVLLAGESRGRRGRDGEIEEGGREIAAAAAVARERSGGWGGCSRSTEIILEEPLDL

SEQ ID NO: 80625 - protein, 18 aa, Zea mays
  Coding DNA Sequence Number=SeqID_37250
MKGLLLGAFFSAKAFVNK

SEQ ID NO: 80626 - protein, 265 aa, Zea mays
  Coding DNA Sequence Number=SeqID_37251
MDDGVWVASFCLLLRLAEAAAPVPAAENSPETRGAGALRVPGATWVAGEVGEGAGNLPVGTGSGQGHRRGGGPRRSGSAVALKNSGEQLNETGGNKKVGRGGRGTLPQGEFRGPLDGDGDAAAARVDGGGPRGCAENGGEREQRDSGRERGNWGASRVADVEAKLTMAEGTAELRRRRRNELGRRCVGEVGEGSAGAQMREGERASEALGSSGRGEVVASSMRDVGVESAARADRGGGYAETEELTAWAHEQRERGKRARGRRSR

SEQ ID NO: 80627 - protein, 121 aa, Zea mays
  Coding DNA Sequence Number=SeqID_37252
MAGVGRSTRAGGDARRRRGVRPGHGKIEQLDGSERFTGCQRRYGCKELVEDSLDSSVHARRRKTEVRILRETLGDTGVSQKTLDHGLNDDFIGHCGRLCSQSQEPSDIRLKVFLTVLCALE

SEQ ID NO: 80628 - protein, 415 aa, Zea mays
  Coding DNA Sequence Number=SeqID_37253
  Homolog annotation: Hit_ID=A2XLP3; Match level="QueryCoverage=56%, HitCoverage=28%, E-value=8e-14, Identity=33%"; Hit description =Putative uncharacterized protein
  Subcellular localization annotation: CTP_CleavageSite=47; ConfidenceScore=5.01e-01
MLIVITVAVDGIWKSCPQSGGPVQFPGFNVLTVTALMEPVTAFLVFMAMTAAEKYYARNDREKLYNVREDLAQTSAVTMVHAKLMGSVNVKVDGQGLTALQVLKHEDKRFAMNNVVYMEGFVIMISIQRCDEDGDNRLRLVERVWIVQTRPFLAKGKKKRRVFRAQDMARRSLSGYNISEASSVMALDTGSKRPFHLGTRRWAALVYKLCWSGLFVRSRLAVATVAEGNRLGRKNRAKAGKTNGTSHDGRKRWCAHDVKRSRGRAIATARVGVGLVSDEYGEEAYAPMPSAENGMVQRCQRFTTNQYKDKRKGSKQRSKVKSKAALVWRTGLSGVPPDSVWCTREIDSELASFGNSGSYSAIIHQTVRCSTGLSGVPAEQRLLRANGRLQRNSESEQCAPTCAEVRAGVRRRTVQ

SEQ ID NO: 80629 - protein, 568 aa, Zea mays
  Coding DNA Sequence Number=SeqID_37254
  Gene Ontology: Mol. function=metalloendopeptidase activity; Cellular component=membrane; Biological process=cell adhesion
  Homolog annotation: Hit_ID=A2XLP3; Match level="QueryCoverage=55%, HitCoverage=38%, E-value=1e-158, Identity=85%"; Hit description =Putative uncharacterized protein
  Pfam annotation: Domain name=PsaN; Domain location=11-118; Score= -35.1; E_value=0.089; Accession=PF05479.2; Description=Photosystem I reaction centre subunit N (PSAN or PSI-N)
  Subcellular localization annotation: CTP_CleavageSite=47; ConfidenceScore=5.47e-01
MDPITRPAAPSFHRPAVATAKHLHQAAATLARRNGVSRRCLLTLLMSTAAIPGGSESRKALLQEYLKKSKENKEKNDKERLDDYNKRNYRDYFGLIEGQVREKTEEERTESEKRILEWLDKNRPKSGRPDGLFEHHLLHSCLMIQPNVSNQGVTHQTTLVLRIVHPFLFEGDGGNWPIADRGRGEKNPKLSSFSYTAGPVHGGEARASRRAQAEGRNCSGDDTEARGRGVASEAVNGSGGALRAAAAYMEAGAPPRGWRCGVLWLVSVEIVLVLVCTRGAGADSGESKGSFLQDSEAGEKDVYLSHSCIHDEILHQRRRAGRKEYSVMPQVYHESREDAERVRGRHLLGMSSWRAPHENARKPIRIYLNYDAVGHSPDRDCKNVGDIVKLGEPPVSSAPGTPICDPHGDPPLVGDCWYNCTLEDIAGKDKRQRLRKALGQTVEWFRKALAVEPVKGNLRLSGYSACGQDGGVQLPHAYVEDGVANADLVLLVTTRPTTGNTLAWAVACERDQWGRAIAGHVNVAPRHLTAEAETLLSATLIHEVMHVLGFDPHAFTHFRDERKRRRGQ

SEQ ID NO: 80630 - protein, 92 aa, Zea mays
  Coding DNA Sequence Number=SeqID_37255
  Gene Ontology: Mol. function=bile acid:sodium symporter activity; Cellular component=membrane; Biological process=sodium ion transport
  Homolog annotation: Hit_ID=Q650U0; Match level="QueryCoverage=85%, HitCoverage=16%, E-value=6e-16, Identity=59%"; Hit description =Putative uncharacterized protein P0669G04.12
MDVLPPLQHALSLPTPPSHAFGVYNVETWFIHRTARYYAQALEFLMFPVCVNSNAEDFIEAIKGPDAIIVGYIRQFVIKPLFGFLFGTLMEY

SEQ ID NO: 80631 - protein, 403 aa, Zea mays
  Coding DNA Sequence Number=SeqID_37256
  Gene Ontology: Mol. function=protein binding
  Homolog annotation: Hit_ID=Q6AVG1; Match level="QueryCoverage=99%, HitCoverage=93%, E-value=1e-172, Identity=73%"; Hit description =Expressed protein
  Pfam annotation: Domain name=DUF266; Domain location=74-393; Score =644.5; E_value=8.8e-191; Accession=PF03267.5; Description =Arabidopsis protein of unknown function, DUF266
MAAGQGRVLPSGMLKVFLGFLLLAVGLSAVGMYMARHAVAAAAPALFRPCLSGSSAEEEPEGLERWTRPPARVEHAMTDQELLWRASFAPRVRGYPFRRVPKVAFMFLTRGPLPLAPLWERFFRGHEGRYSIYVHALPSYHANFTSESVFYRRQIPSKMRCYPKDITDTNLAFVESVSDFARDWFLCYVYVAEWGQMTMCDAERRLLANALLDISNEWFVLVSESCIPIFDFNTTYRYFRNSNQSFLMAFDDPGPYGRGRYNWNMTPEVELDQWRKGSQWFEVHRELAIEIVKDTVYYPKFKEFCRPHCYVDEHYFPTMLTIEAPNRLANRSVTWVDWSRGGAHPATFGRGDITLEFLRRVREGRTCLHNNQNSTMCFLFARKFAPSTLEPLLELAPTVLGFG

SEQ ID NO: 80632 - protein, 179 aa, Zea mays
  Coding DNA Sequence Number=SeqID_37257
MDATRACISAPAIRDYNLASVEPPRFELGTGISPAPRGRIERAKSRGGTYQIWFGFGGAAVVRWCESARRVADGGAGVGGVGVGVRDSGPRGTCSVLSSRVEMQSDGPMSLVYKKAAKEASTICMDRVLRSYVRDGSGVCTVDLMFGEDLTEMPSLILARVGAVAPLRWTLVLAAGSLV

SEQ ID NO: 80633 - protein, 189 aa, Zea mays
  Coding DNA Sequence Number=SeqID_37258
MGDPVSAQVRDKVHARLHSSTRLTEPGLDFKSWGCGEILGGRLLSWLLDFLLGNFLLGDEHSLARWNSDRGKDHVGETYRRRFSSGEVVDDVGEVTAVTTVCGSASEESTRGSGRPKSDEVALAVPAGQGLGSSLEKLHALSGKLSKGSGEVGGLWKRLATAVCSGSGGGRWHLLFAANSGDHWLGRDL

SEQ ID NO: 80634 - protein, 190 aa, Zea mays
  Coding DNA Sequence Number=SeqID_37259
MVGAVQPLHGGNQGQWGITCQGGTVQDMVNGVTWPSILPPGWTITSPTPVNGGDTRFSFDYLSHEGFPSILWEVLCSTSYPTPALYTVQLYEEHRVPRCRVWRTLESHPLQPEWRSLDSETVGFRADDTTKAAVLKTLTTFYGYHPLEMMMHPLGLFPAEKRDGPMWCNRVSHVKDMWAMHPDQVGRITV

SEQ ID NO: 80635 - protein, 87 aa, Zea mays
  Coding DNA Sequence Number=SeqID_37260
MEQRITRSTLTGGRVKSGDRGLASLAKQTPIPCSGSFTENASNTWRCSSAHVQKLAEIANVRILAKIRRRPLPGTYGYLLYDSSKGR

SEQ ID NO: 80636 - protein, 107 aa, Zea mays
  Coding DNA Sequence Number=SeqID_37261
MAEALAAMAGGKELAGAKGKWLTGEGECGAKWGAPRKAFIGVARALPTLSDLAEDPRPPPWSSSSLEAMPSDPELRPEITGYRFAHARRSSEPVCQRPCPLALSPIG

SEQ ID NO: 80637 - protein, 28 aa, Zea mays
  Coding DNA Sequence Number=SeqID_37262
MAGGKELAGAKGKWLTGEGCVQGNLARL

SEQ ID NO: 80638 - protein, 301 aa, Zea mays
  Coding DNA Sequence Number=SeqID_37263
MAERYQLPRSCIPPTTRQKDCGCSPSGGSESGKTRCIREREDTVAFQGGHPPFKGDSPYLRPQPSRAESSPTRSKILPLRREGWVPRVMQAGPEKKKPNRHARCMQLPSGYEHSSTFAQTSGPTRHATGALVATCEQLHRHSHHYHASSTAEPAGRSSGHVVSQAYVPSRGSERTLSHGVKTARPCSVPRTARARATAASRTTRPVALTPRRDRRRLRQEKQATLRPRHNDRVKKGNRPRASLLIRGSKAGPSEGFNSRLRALGFRAHYWSEVRRPAPQKGSTAASGHSGSAPTTDQGFVG

SEQ ID NO: 80639 - protein, 134 aa, Zea mays
  Coding DNA Sequence Number=SeqID_37264
MTRQLAERKGKAALVVPQDAPENNDRAVNSKRPRTENPLTLEGIVLTSRFHPPEVDDIIEDSEVLGISAEDQLKLQALHIKNNHLQKQEILAAKRHRTNMQAKVREMVLEEEQKARELEQQIAEMQAEDPCHRQ

SEQ ID NO: 80640 - protein, 116 aa, Zea mays
  Coding DNA Sequence Number=SeqID_37265
MTLWLSVGATLAIRSFVALVSGQSLVECSESHHGTDNRIFSVAKALGLCLCPWQCCHRGLVVGDSLDDEECFLLVAAGLRCCAPRAGHGLAGLGPAVKPRGGLKLWCKRASFIKVI

SEQ ID NO: 80641 - protein, 50 aa, Zea mays
  Coding DNA Sequence Number=SeqID_37266
MQIIERKCEAQKGVGISSILLHGPESLAQVEGVAPGLGKMVPGLEKVLLV

SEQ ID NO: 80642 - protein, 376 aa, Zea mays
  Coding DNA Sequence Number=SeqID_37267
MSSRSPMHRVFPPSEPPDGEHPQSFCLVVGGTQLCGSWYLSVIVRLQGFSSGSPAASPRRWSPKTVTTSPWVGRSKPGCGLCPSLSFKDLPRARLSDPSGFGAASGVAFRHGSRKSIRPEVIAAAVRPLGAEVVVVVVGAGGGEPPVGLLLLRRPPDRVGLNPRPLFDEPKPDVAVSARTEAELARKEDLIGRNLAGSSTGGTDAGVELPRPRAGLMSSGDSWLRLQGGRPSRLLEPNSWRRPRRRWSGRGVVLRGGDPPTASPSQVMPDFAEGVVDAEGAAAPFNCQDPSLQDRKVMSEVSVSQRCRSPSARSALAAYVGGSDVAEVPDLSASRDNSDLAEDDPCDPTTTSKPEAPMQSLNQLPVVTDLADARSA

SEQ ID NO: 80643 - protein, 1982 aa, Zea mays
  Coding DNA Sequence Number=SeqID_37268
  Gene Ontology: Mol. function=peptidase activity; Cellular component =cell surface; Biological process=cell adhesion
  Homolog annotation: Hit_ID=A2YD38; Match level="QueryCoverage=68%, HitCoverage=87%, E-value=0.0, Identity=46%"; Hit description =Putative uncharacterized protein
  Subcellular localization annotation: CTP_CleavageSite=90; ConfidenceScore=5.02e-01
MQSACNRAKWAHPFDSNAPSMEAQAHTSCNRRAGCYVRATALPLAPLPCLLDCGTSGRKQRSHRQPSSRPLMGQRENPLPRREDGAPVIRSSNGSRTRNGCPANHSPRRINSAAGQAAPLAGEAGDASPFAHNDHVKKGTGKGDTPKGILLREGNRPRAPLLIRGSKAGPLEGFNSRLRALGLRAHYWLALEGFTAASDTERGMTLGTFDTYPRLGLRSRGLGLGLSPGRRRTPLRRPQGSDSGSAPEDDELRFARPQGSDSGSAPEDDELRIARPQGSDSALASADGLHLARPRGSDSTSASEDRLDLDLGGASTSPNPGLGPTTSQEAPSLPYPKLTQATGNKTDVPSGSSRLQRSSDGHDTTRIGCQNLSGCHDGMTLLRRVGCAGKDGTALTFPTRTHTSSCIPPETRSRSHRHKAAPPAAANSLPAVMYSSYSAAAFALRAAKPSLHAHSSYSYFYHPPPHLCHCDDADEHRHHNKVVPRSPYLAPRFLFDGCLLRHSAYLLLSAQLRLLPPPPRPYASRCCRRRAPIGCCRDGGGGRQLAGQLCCHVEAHKCRCCGSGAGRPDLGAIRRRLKAPECRCGSSGDGTLLGAGCVRRDVPRLVGRAMRQEVWEYEGGQWLYGRSSTECLDSEEEEEDCGYGQLEVGGMHFSRRWEDGNVDDGDGHCMDCCRRKGIENYYSGEDVYSSRRRERRDLNEGRHSFRDSDRRQRSEYYDDEDDLDLGQRKQGWEGRDTRNFVPNDAVDTRSVETRRYCDDGREYNCIRDRRNFNSDDVANVRRAGRYAEDIGGFDRRRESRDFEIDDKVIVRREGRRHRNDHRYVSRHPRRSEDTDGEDVSLLRSRHWNDKEIGYNEQDLADRRYYSMVRSQKSAGASSLHEDDSKRASNFRSTFDARHTGQKENSASSVRWHDNVGGRTEQISEERDRRRSAGWSNDERERYDYDDAQFVRVRNSRIGRQDDKFITEDETRVTSSSKNTSILKHGSNADQQAAVHKDGSTKSSQKITEISEVHDNSTEQDSRAQRYHQEDRENYTKNTPSSVQNSVKMASDSRRQVDQHNEVNQNLVSVTDSRKNSGNLNNITHVIRDKKSIVNQQVIHETDIDAQNITHVDISKIHASDTSTSRSSQSHLETRSDMNSSSSMGFINRTRSQEKEGYGNMISANDSGMVRGSQSHLETGLYDPFHSKPSANITDNKRESHEQAELNIANASNAAAANTSGSHLQTKTDYQFQSPSAVAIDSMNEQIDFAKIHAIDATVSSSQGPVIRNDNQVHKASTVHWSSERQGMNGRQITQVSNTERDDEARSIFPESSQDTHHNMDLIWQQADTSGISDDKNITGLLVESTKKGFMTNVDMGKQEATMGSYDQEVRSEITAGSSLPSDSSARQSVKESMLESAARLEKSSTFLVGRFVDELQQGVSDPDATLTKKNGKSIMEGITSSSSRSRTKGPADEMWDVQSTTSEETFKTADKEEGSSADGATNSASQTPKNESVVARKVHKSLWAYVADIIRLGFIQHGDSHDSSHKSVKKSSSNNSQSTEGWLSSQERDNDGTKKKNGSTNTLGGGEQESGVASMSNEEYLHTDTHGLQISETVVEPQVGRSEGDLLPTSSTDDLHISGGRTKQSDAGELRKGNSIDDSTPTYLDITIGHLPERKTASRITTEGSGEFITGKGMLAGTSSVTISAMEAGRSEDGADSIYDPSGAITPYHDSQTQTVMPHENTSTGILGPPALPVGVSTRFEEKNIMQEAPEIIKTGGKDTELKRRNFQRNKQVLKDTFDEWEEAYQRDAEQRKADELFMREALLEAQRAADIWEEGSDVGDATVACPRWTRLLFVEDSVRECDALNRNQTPSRGAPSSPLNRSSYPPPRLHEAATTLAQCSHRPPRRPHTDAASPHACMLMMQLVNRSPSSRSCPNVDRQPASQATTADAWPSSTSSQGNDLGPDPTATVLLQHHRPKTWLTPIVRCKATAPAGSRLWQRSP

SEQ ID NO: 80644 - protein, 130 aa, Zea mays
  Coding DNA Sequence Number=SeqID_37269
MAPPSGALSSVGRCSSVIAPHLFTGAWAPGVRLVSHPGTEHAKKAWRKTKSGGGFDDRPLGLKIYGWDWVLAEPALRLALPRLPRFHLPPKPPKGLRHTAIAAQLGLAKTLAIPALGRRWELRATVRDHA

SEQ ID NO: 80645 - protein, 210 aa, Zea mays
  Coding DNA Sequence Number=SeqID_37270
MGWSGARVAAQSGPVLWACMLCHSVTGMNYLHTSKARGIASFERPASGGDHISTDGGDHLCADDSPSSGDHLSMYATAKGSSPPSSYGGDNEAIKAKEPEVRWQVALTVSPAEATTSAVGSLTSGGDHLSTDDSGHLRTSAVPANGSRPSAREEVLAPFLTAGVRTRPSKNAAAAPMAYDVLYDPPVRPATREKPWVWPTRARRDRRPCG

SEQ ID NO: 80646 - protein, 39 aa, Zea mays
  Coding DNA Sequence Number=SeqID_37271
MARWPRLSGTSGNAYVYDNPVGFVPVNPAYWSAHMHDEL

SEQ ID NO: 80647 - protein, 105 aa, Zea mays
  Coding DNA Sequence Number=SeqID_37272
MNVCELTLAVSHPPQVKNRLRYSCIFPEMLNREGNGMGMANTRTWRGRHTKPLPEIDIIGWEKTLSVPSDAVGHERRWLWLAEKGLRMIDSELGGYWAAVSCGPM

SEQ ID NO: 80648 - protein, 294 aa, Zea mays
  Coding DNA Sequence Number=SeqID_37273
  Gene Ontology: Mol. function=triacylglycerol lipase activity; Biological process=lipid metabolic process
  Homolog annotation: Hit_ID=Q2R077; Match level="QueryCoverage=18%, HitCoverage=15%, E-value=8e-16, Identity=70%"; Hit description =Lipase family protein, expressed
MACNITCPSIEIGGYGDALLNLIYASPSSQFEELSLECELDATGNHSRVKDAQVHGSPIPESNGRLSTTAQTKMMSTVSEDAILVGSSFRWKRKLTYFITMKPEDVYQSSLGNNNKRVGLFDMGDGSSEPAAEDNNQMHQENIFFALKAKVIWDVLVPRGPPCSREDYNRAIDTLLEASLLQSLSLPSVVLLNQDKYSLRPKILVVVAIDFYVYIQKDDDESRHIYETHTLIIVLIHLKVYHGFYSAYDNTTLLYEILKSIKWARKTYVNRPVNVVGHSIGGDLASFCALDLFV

SEQ ID NO: 80649 - protein, 422 aa, Zea mays
  Coding DNA Sequence Number=SeqID_37274
MQEAYNRPAVERPLSFAATGGPTWGPGPHVMQPARRGTLFYSMKALHPYDTSRGTPDPCEYEPGAPEETCRVPLSEVRALAGSRDREDPDTSKSPVPTHGVRVTQQTARLTSLLVNRKGLLCESATTKGYGLIEPLDHQSSAQIRSLIPPSPEPLNPIGANDAQLKANNWGIFLREIESAVKLITAHDGSVAVLLKWMDEKARSGLISQRGGGQEADARDQTVGAVHWLTGGAHVSAPIAVLGRAGDVYGPDPFVRSHLLSSLATASIISITVPTFSSLRLSLCAHPHAHAERLRLTTPVAAAAVAASTTSPDFPAVGAVLGKPTVLVGSGREDRSRGVHAEGGGAMSSSQVVVLTLLEFWSVRCSSSCSASSSSRRANSESSVGLIIRITPTGNDNKLQMYLRLEGKQKYKRDTKANAKSA

SEQ ID NO: 80650 - protein, 36 aa, Zea mays
  Coding DNA Sequence Number=SeqID_37275
MKLVPAASRLQLFHFSLAPPQLRKGARIFVSQAPTQ

SEQ ID NO: 80651 - protein, 178 aa, Zea mays
  Coding DNA Sequence Number=SeqID_37276
  Homolog annotation: Hit_ID=Q9LIV7; Match level="QueryCoverage=53%, HitCoverage=39%, E-value=3e-27, Identity=57%"; Hit description =Putative uncharacterized protein
MVVLHVKLAPPAAAAATAAASSPMQDVDEETEFLYECAASAVVADVAAALGALAGLPGRHPLPLPPPSRCAGAMGELERALDEAEAYASKEQVQRNRFLSPRALREHIKNIEKKCANTLQEPLEALSLQESSSDNKHERIQIWWAGKELAMDQKLSDYIGVNDKTKIVVRLIEARDEC

SEQ ID NO: 80652 - protein, 56 aa, Zea mays
  Coding DNA Sequence Number=SeqID_37277
  Subcellular localization annotation: CTP_CleavageSite=48; ConfidenceScore=5.13e-01
MANVFLWDRARPGTTGPSCLRPGTARVRITVPGLGRVSQPAGRPGTTRYQTVPGLD

SEQ ID NO: 80653 - protein, 429 aa, Zea mays
  Coding DNA Sequence Number=SeqID_37278
  Homolog annotation: Hit_ID=A2XZT1; Match level="QueryCoverage=76%, HitCoverage=100%, E-value=3e-36, Identity=38%"; Hit description =Putative uncharacterized protein
  Subcellular localization annotation: CTP_CleavageSite=35; ConfidenceScore=5.26e-01
MALNESSPTPAKPFRVNNQLSLPALRQRLHYTTVACNRDPTKPNCKRTAQNPINHLPSLWLARLADAQQQASPVFVLPKSQSSLRVPHPKTRSSEAGTGIAAMPRPPTMVIQDDYIDMDLTPAATPEPSPASPRFEFQSAGAGAAGDRHREAAFASPADELFYKGNLLPLHLPPRLQLVQRLLQDQEQPPPLRGAKRDAESDATAAAAAERGDADAAAAASKVCAAKKPSWAKKLKVVKRWASKEYIRSLFLARPPLPSDIVAAAGGASASGHGIGSVSARGSVLEQEEVCQCQHRKSFSGIIRRVRLVATKAPGTSPLCSSSSSSSSSSTPSCRNANGFFFRTPASAAGATPALKRSSSAGSSEEGAIQGAIAHCKRSQLLQPGMVASAAARRSVSDVMFYSVTNTPRASSVTAGEVAQERRQEMCRG

SEQ ID NO: 80654 - protein, 81 aa, Zea mays
  Coding DNA Sequence Number=SeqID_37279
MAHHRGLRRWDERGHGIGFITQHRSYPPKHAQRSQRRPRDSLEFVTEFVCYRGARRDTIASIRKVGAELARWGPQGSDQLD

SEQ ID NO: 80655 - protein, 286 aa, Zea mays
  Coding DNA Sequence Number=SeqID_37280
  Homolog annotation: Hit_ID=O48967; Match level="QueryCoverage=81%, HitCoverage=79%, E-value=1e-22, Identity=49%"; Hit description =Putative uncharacterized protein
  Subcellular localization annotation: CTP_CleavageSite=30; ConfidenceScore=5.27e-01
MAHSGSTRPIPQPSRHQHEASASVRSPSVRAAPTEDLRAELNRRRAGEEARVSLGRSNDLRAELNRRRAGEDARVSLERARERRQNVEGRNLNYDFAVVAPQTPTGARIQAGVPLAGVGCSAWQLGHPSSDRTCRKSATERQTRLGLGVAQTGGSGAVTQDGKKKKKNRGHEKPSSAALVVAAATGGRNKRNKRPRPQRGNIGSCSVHPNSRHGAAECREIIELAKHVTERREETSRDGSSPRRRPGKERVNNGEVAAGERDLGYQSPEGVLKDVFTGGSNFGDDS

SEQ ID NO: 80656 - protein, 119 aa, Zea mays
  Coding DNA Sequence Number=SeqID_37281
  Subcellular localization annotation: CTP_CleavageSite=32; ConfidenceScore=5.21e-01
MMVLASVATTSFAILLLFFLPSCLHLRATPFSAEGVGASASSPYWFDTSPDTDSRSGYCTSMRTFHIMRASSFSPLSDVPFVFPAFALFFLPNLLPSPTVAVASRPTLVDAYEANRSCS

SEQ ID NO: 80657 - protein, 99 aa, Zea mays
  Coding DNA Sequence Number=SeqID_37282
MDGGNHPRGGEPSFSQLLQGLQKGLEILLFLARGPIAPVTAGGDHHSLRKRREPPIVISEAKQATLHLRHDDRIKKGPGKGILRKGSFSVKEAGPEPSY

SEQ ID NO: 80658 - protein, 209 aa, Zea mays
  Coding DNA Sequence Number=SeqID_37283
MDVLMIRNIGENQQGLGKGQGVEEEEQGHPQQEGDQVRLGCDSISGSRTRISLHGEVTRVSWVITNGAVKIDRVFYQLVSDFQVSREPFVSRHVAVPKLPGRYLRHVPSRYVCFYADLPKVFVLKRPSASKQTPNSSPFAQITRPGVENRFLRDPVDRRGRGFRRQMGGAAARAKGAAVCCLAAALLAGEDEWDGDETGAVEWRMCGCD

SEQ ID NO: 80659 - protein, 63 aa, Zea mays
  Coding DNA Sequence Number=SeqID_37284
MARVACTLCGKRLDGGVSVLSVILLNLTNKTGFLRIHFSKHFCKIESLIIEKPYLDSLKPAYP

SEQ ID NO: 80660 - protein, 150 aa, Zea mays
  Coding DNA Sequence Number=SeqID_37285
MAMASEQNHSSGAIPARGMSKGCYQPGNLGWARTAMRHHWGPTLVHASCGDEDVPGNDGPHAIGCEILWSKRYPRDRTRGPRDSVLFTREAQRVKYWPVGRRSRRRDPKEIRARDHNAGPTRRCNSQAGRHIGLIGLAWRGQTGLRGFEK

SEQ ID NO: 80661 - protein, 780 aa, Zea mays
  Coding DNA Sequence Number=SeqID_37286
  Homolog annotation: Hit_ID=Q6ZBZ9; Match level="QueryCoverage=81%, HitCoverage=73%, E-value=1e-156, Identity=49%"; Hit description =Putative uncharacterized protein P0493A04.31
  Subcellular localization annotation: CTP_CleavageSite=51; ConfidenceScore=5.22e-01
MGAALGLGLGPVSHHDDCGAGCPNLSPPAAVPPRRSLRLAGPALGTPNTLSARDGSSSGFGSGGSEKRSGRARARVPASSLATSISPRTGNSNSDGGGSGADRVSASGDSSGGSDPFTTLRSGFRIAKRRMEAGGEAETGSSRRGQVHNEMLHQHVDTPTKRCKTILVGGVETEHVSDTKGDSDEDCMMLGPSGTELNYVATKTEKGDVDDPANASNGESLQTHNLLPAANGGVVEQLVYASGSPASFEAQVSADMCLKEGSSQCSSRKEGKVKEKLVLGNNKSCAYANVGSAVDTCSHKFNPDSKGKEKMVAEDSLSSLTSSEDEPDFDPVDSKETQLNSGSVSASMESYRRQTVKERAIKLAPKFAFFKADKDEHSEDDDEELEPGPDTEDWPGPFATAARIYEEREAKLRARELNSLKLDESANRVIRWSPSKDRKNLVQAQVAPSLTSVCLNTLAEHSEWIQSLEGVPEELKHKLLKILCDSRKMNTHLLNKLLCDSPTELHLSECSWLSEDDFEKTFGKCSTESLQDLQLDISGRCIPDYILPTTLAKVPNCMPLLRKISLKGNYRLSDNGLVTIISAAPSLCSLNLCECSLLTSSGIDILANKLCSVLRELYIDDCTNVDAMTILPSLQKIKHLEVLSMSRIQSVCDKFVKGLIPVHGLNLKELAFAGCLKLTSSSIKTIGEYCQKITSLDLCNLNRLRDSAMMHLRGCRLIRKLKLQRNAFSDEAVSQYLEASGGCLTELMLNNVEVLVPTDVFRCHRCAALGEIISTGAAPS

SEQ ID NO: 80662 - protein, 153 aa, Zea mays
  Coding DNA Sequence Number=SeqID_37287
  Subcellular localization annotation: CTP_CleavageSite=93; ConfidenceScore=5.69e-01
MQRLMGAIQEAPPHPTPGLSLNLGFRRRSPPRPTLGLGLNLSFRRRSPPRPTSGLGPRLGLRRSPPRPTPGLGLNLGLGRWSPPRPTPGFGLNLDLRRNRVLTRPWPRPREEPPPHPTLGSDRPRRGGYIITLRLASSGYGGTRPASHPGSPR

SEQ ID NO: 80663 - protein, 161 aa, Zea mays
  Coding DNA Sequence Number=SeqID_37288
MAVSRSQVDHIWYPGRREVNVRRVPHWGTGVVDSLDSQLGAASCLATVAPPPPPAVGKVTGQTRMLLFRHGGKTSSSPPPPGGLTTAVVAVARQRKEYHIVAAVEGHELETLEMEQHPGLKRLLGTTHLELDRKLFVNTQQAPTWHANCRRFDPGGPWTDE

SEQ ID NO: 80664 - protein, 186 aa, Zea mays
  Coding DNA Sequence Number=SeqID_37289
  Pfam annotation: Domain name=zf-CCHC; Domain location=70-87; Score =26.1; E_value=0.00013; Accession=PF00098.14; Description=Zinc knuckle
MSLRYDRIYTLRALKIERPRLSVNVAILAKGRYLRTQVGITVDQNNTKVGTAPKVDDLLFNIYRKKQRKRRCFACGEKGHFKDNCPTIIEPKKGRSKGKTLTSVKTWDDSSSEDEPPRMRNHRSSSHSSQSSHKCLMTRGKMSIPSSSDDSSSDDEGEGKLSVDELAEAVKFYRMFALNKRLNLKL

SEQ ID NO: 80665 - protein, 96 aa, Zea mays
  Coding DNA Sequence Number=SeqID_37290
  Subcellular localization annotation: CTP_CleavageSite=82; ConfidenceScore=5.54e-01
MAMFARPLLATLLLLPAFLLSAASAADSKSMAPVTFSRALSFPVATVACYIPRVRSCTRSIDPICLGPASSVRWTSAWIWVLWMRASGWDLAGAVG

SEQ ID NO: 80666 - protein, 62 aa, Zea mays
  Coding DNA Sequence Number=SeqID_37291
MQIPYVILKENLSPKDCNLADGEYILVPEQGAAQEIAPGPAPEPAPEDLPATALEGKPRFYA

SEQ ID NO: 80667 - protein, 161 aa, Zea mays
  Coding DNA Sequence Number=SeqID_37292
  Subcellular localization annotation: CTP_CleavageSite=41; ConfidenceScore=5.68e-01
MGAIQENSVACPAPTAVPPARVRLTTAKFSLRRNRKLRLARAQGSASTSASGGGLRLARPQGSASTSALGGDLFLARHQGSAPASTSGGGLCLARPEGSVSTSASEDGLCLAQPQGSASTSTLEGIASSPDPGLGLGRSLCLARPWARTDRAAGDTSLPYP

SEQ ID NO: 80668 - protein, 144 aa, Zea mays
  Coding DNA Sequence Number=SeqID_37293
MACGNILGFGGRKSDRCDTPVSPRVSLKKPNQEPSFYVNQSKHEHQNNLSEKEFTKGRGNGNTCSTAADTPGSRPFAHRAFPVHARAHSPVHDRPPVSSPPTSIPACARGPTDSGHLRRRSAHRCDPRDLPFALDHFTGTVSPP

SEQ ID NO: 80669 - protein, 213 aa, Zea mays
  Coding DNA Sequence Number=SeqID_37294
  Subcellular localization annotation: CTP_CleavageSite=53; ConfidenceScore=5.27e-01
SLMGAIEVKAPSTQGTRYRLARARPRAGTVDQGGFTPRPRVSSSNGRTLDSPEAQLGQASQRSNLGQIASPPTENCAACPAPTAVPPARVRLTTAKSRLRRNRQSPPRPTPGLGPRLGLGRWTPPRPTPGLGLDLGLGRWTPPRTTPGLGLDLYLGRWSPHRPTPGPGLNLDLGRNRVLARPRPRPQEESPPRPTLGSDRPRHRGDHHYPTPS

SEQ ID NO: 80670 - protein, 137 aa, Zea mays
  Coding DNA Sequence Number=SeqID_37295
MWTQHVSGQLRKNCGSDAINFVNAGHLCELPTSVGAVASALIGWHHNSSAFVANSGEEFLTGALSTTEQPLPVDFTSAPSESRSVWEITNRRGDLVCRGGIGWVSGRLVPLNSHLQILIHTSMLHTGSVREESNLNP

SEQ ID NO: 80671 - protein, 193 aa, Zea mays
  Coding DNA Sequence Number=SeqID_37296
MQLFGCGVWLPKALAEFINQVLALSSIRGKEKGGVAYRRGYVRKESKNGAETYPVYVHRWSGEVRRPWTGFSGEAKSDSLLGELHRGMHGLFRGSGMAGKGSADRSTVVGDRVAAGTPFARQTAVISGSGEVERARRGTVDVYGGFIGTGAGNSIGSALARRGARGGARGRALASSERVEHVALCFCSCSTLC

SEQ ID NO: 80672 - protein, 289 aa, Zea mays
  Coding DNA Sequence Number=SeqID_37297
MTSHGSSDEGNAQSHTDGLAREGFPRILWEVLQGAGYTTPPQYAVQQFEKHRVPRCRVRMTLEPHPLQPGWRSLDSESFGYRAEDTMEAIALHGLTTFCGFHPLELSTHPIGLFPTEKEDDPMWKDRVEHAKDIWAIYPGQTAHLTVRCMNALYRLQVMRVEAMSHLMALLEATKITLDDREELVVDLSTEMVEKDLQVEQLSNEIQELEELVGTRENTIEVLEDQLINTQQQLAEANQHLDMHHQEIQDMEANEDVDIEGGEEPASSLDTPGSGRPPSPESSVASFAH

SEQ ID NO: 80673 - protein, 24 aa, Zea mays
  Coding DNA Sequence Number=SeqID_37298
LLAPVSEGPEWCMRWGHGQHTARE

SEQ ID NO: 80674 - protein, 75 aa, Zea mays
  Coding DNA Sequence Number=SeqID_37299
MAADNPPSGGGIDDVLPARWKNDIRARPVLSPANGGGGGATKAGQEAALRRLLSELISYIIWTSSHSAQNSIKKG

SEQ ID NO: 80675 - protein, 179 aa, Zea mays
  Coding DNA Sequence Number=SeqID_37300
  Gene Ontology: Mol. function=sodium:hydrogen antiporter activity; Cellular component=integral to membrane; Biological process=sodium ion transport
  Homolog annotation: Hit_ID=Q2L3E0; Match level="QueryCoverage=59%, HitCoverage=24%, E-value=5e-27, Identity=62%"; Hit description =Sodium/hydrogen exchanger
MWDDFFPVPELFMFYLTASYPVRIQLSTNGSNLIYTCASYLGGLLYIVYRLPLVECMMFGALVSATDPVTVLSIFQNFFPYPIPYPLFIFFPTDAYKILGPFFGLSLKVAISLYRSMASMRTHHSGKNFFLVILRFLENFVGSMSSVSLVQPWGFFSADKLKFTRKGLTAMYTAKSALD

SEQ ID NO: 80676 - protein, 451 aa, Zea mays
  Coding DNA Sequence Number=SeqID_37301
MATGAPSFIGYEPVSSDEWQRGGEEIYLPSPLGDGVWCVGGTTSSRPSGTNNACSYDNDFKEDDHLEVVLPAWQWQEVVRLFRSLTLLRWTERQPKKCLGHPCQSLPILGVLAVVSALLPPPVYRCVSLEAVPLLATISSSSVGVIVPSPPGGHPSSPEMPRANMEDWRQVESASSWGDLSLSTIEETLGSFQDMVSITRASMTHDFIRFGHVNAAYRAEKLVSVEREVEQLRVTTTHSVVKQRELAKLHSKVECLESEEIELLFEAPEDAFSADDVKRAVKEMKVVAETQGSTELHGFCLVVGQVCSHLSPPPPIEMPQIGTRSQKWEKLSTSEYTKKDGTLATVIVDKLKTENESKPSKKAIGDCLLEQLITFYPSLILRATYAMPSTAGKTHRAPSMLRATDGTKTMRNRIPEVAEAVVIEDFYRGSNDLAFVQDILQKAPATFEQLF

SEQ ID NO: 80677 - protein, 103 aa, Zea mays
  Coding DNA Sequence Number=SeqID_37302
MEMTLMDRVGGDNAMGANKEAQRRDGGKSSPRRQTNKRENTKIHPLDKKPLHNPKELSKGSGDAVGNLGTWCLNEAHEVPVEQPCEMKRTTKSPSGNLARRSG

SEQ ID NO: 80678 - protein, 97 aa, Zea mays
  Coding DNA Sequence Number=SeqID_37303
  Gene Ontology: Mol. function=kinase activity; Cellular component =ornithine carbamoyltransferase complex; Biological process=amino acid metabolic process
  Homolog annotation: Hit_ID=Q6QP54; Match level="QueryCoverage=97%, HitCoverage=28%, E-value=6e-13, Identity=50%"; Hit description =Putative kinase
MALPVDVAGLCPRLGDVEAPPKPGSSLSSMAEAEPEPLGRARRRSSAEAESEPLGRARRRSSAEAESEPLGRARRSSSSSGVYPESEPLVGWSGVAV

SEQ ID NO: 80679 - protein, 314 aa, Zea mays
  Coding DNA Sequence Number=SeqID_37304
  Homolog annotation: Hit_ID=Q2QQ41; Match level="QueryCoverage=55%, HitCoverage=60%, E-value=1e-11, Identity=27%"; Hit description =Putative uncharacterized protein
MYLFTKCFIRRSTFEYMKLFFFKSLHRDPAVEIGLVLDIVGESTLIDTFFCYLGGNARLFDDYRDEDYYVLPRKFSIVARVEVKFPIEPRYRDRQHFILSDINGAKIEAMTSSYETVKHFNNLLHEKHVFKMHNVDFSISMGAHQFRHLSGPMELYLTRQTVVEPYTVPFQMPPFPKHIFLSLADIAELPNRTLVDIMAIVVHLDVIHRTMWGPFRKIVVMDARWSLHAIKVWGDLLNKNALRWVLAKENCSIIIGTMFRRFRRQECLESSDYTTIHFNPFHHNNHHFEPIQKALMAWNDRQFAVRFLEEQRRR

SEQ ID NO: 80680 - protein, 112 aa, Zea mays
  Coding DNA Sequence Number=SeqID_37305
MATLCKLQGIYVLEQNICLKFCMELCQMAFGILLSISIEVPGEEPYHFQPRLFSKYTGNGDTNQDVALCYFLKKYLAGLLHSKTPMNLSIDERCKINNLSTSMIALSQIPSF

SEQ ID NO: 80681 - protein, 461 aa, Zea mays
  Coding DNA Sequence Number=SeqID_37306
  Subcellular localization annotation: CTP_CleavageSite=5; ConfidenceScore=5.12e-01
MGGARGSPAWSSLGERNFAEVGTFQPSFGFKDFRQAARPPSPTNGQFGGEKRARLRPPPRPQLQGFSSSGLRRRSAPSGGFPPRGSVTLFFPRHLGGERHPPAPRGLPSAMSGKANCCCPARVQHSVLCPGDGRVAYGPAVSRSSSRRQPRQRVAQHVVCHEGALMFWGGLGEGGSEDLPVRFGAPGARWCGVEAVAAGEGFSANEIAYSACSPGPPSLDSNGWFSSFAAVSPPGAEVVVAATGVGAGEPPGVLSPRRPSTVGVESLGLVGLAARGFSCLVKGNPRPLFDEPEPEAAVLAWTEAELARKEDFVGRSLTGPSAGGTGAGVELSRPWAGLMSSGDSRLRFQGDRPSRLLEPDSWKRPWRWWPGRGADVALRSGDPPTVLPFEARSDFVEGGVDVEGAAAPPPSSGIAYPSVSYLSQKVMSEDPTFEVVKKHERRSGRKTFSEENFDAEGVPPF

SEQ ID NO: 80682 - protein, 83 aa, Zea mays
  Coding DNA Sequence Number=SeqID_37307
MYMPNVAVGEVLEPCVRGVVAVGGAFEPCRSTVVGAAGTLFTSSCFRRGLRTAVVMDARGEPSLLVTGASLDGTLVLFPRSLS

SEQ ID NO: 80683 - protein, 77 aa, Zea mays
  Coding DNA Sequence Number=SeqID_37308
MKDAKPIKTPMGTNGHLDLDTGETTDQAKDGGKKSFEVPSAREKVKETRNPKPGVKKKTCKVKVDRVKSYGASRITT

SEQ ID NO: 80684 - protein, 236 aa, Zea mays
  Coding DNA Sequence Number=SeqID_37309
  Homolog annotation: Hit_ID=A2Z2X5; Match level="QueryCoverage=22%, HitCoverage=52%, E-value=1e-07, Identity=60%"; Hit description =Putative uncharacterized protein
SRSTRSGEAELPMRPRLDLAAVGLTLASGTAVGAGQTTLFSCQAILALNASAIRSVGVVIWPRLLLREACPSWAKGESKQYFNSNSAHVPFNASNPWSPAPPRVFLSAAGKDGVMRPAAPAAAADAHQSRLLYELCALLLTVLGASPDDGAGARPLLPRQVTPAGVASMLLGASMALMLCGSVTFMLGFFLMPWVVGLGFLFLFVGFVTNLSGIWRAILLWPSAACSPKEASSPCT

SEQ ID NO: 80685 - protein, 50 aa, Zea mays
  Coding DNA Sequence Number=SeqID_37310
MEPGGGTAVGAVESLLTSSCFRKGAESRRRHRVGRRGSSSEAEVESVFRG

SEQ ID NO: 80686 - protein, 291 aa, Zea mays
  Coding DNA Sequence Number=SeqID_37311
MAAGEVLVADEIAATIRAPGLRLFGFDSLSSPLEWGRGRGPCRSSVCPEVIAAAVWPPGAEVVVAAAGAGGGEPPRVLSPRRPSNVGGCSYLRGQNRSSVCNGTLSAGVCSLWLSRPEHVVKETLGRSAMSRSRRQRCQHGQRRSWLEKKLCWPEPGRAVHWPDQRRSRVAEAMSRADVLGGQLAEATERPVEPSARAGFPEETLAAMAKAWCRQDSVIDIVEKARKIVSAEKLSNVKTCSASGIAYPSVSYLSQKVMIEVSVSRRRRSPSARLALPAYVYSVVFRIPPSK

SEQ ID NO: 80687 - protein, 384 aa, Zea mays
  Coding DNA Sequence Number=SeqID_37312
  Subcellular localization annotation: CTP_CleavageSite=62; ConfidenceScore=5.14e-01
MHEESAKTWLPSKGVALLLKATLPTCVLSRRGQSLRQHAPRSSPYDTGARSHASCKLAQDKRSQTAARGAHNCPAVTSTPPLSDQRVKGRTAMQAACNRTKGAHPFDFDASSMEAQAHTSCNRRAGYYVRETAPPLAPVPRLLDCGTGAATRGNPAHGPTVPTEHIGHGSVSRKRRRDGRYGQKWTDSNGGSRRAEAADRRHLWQAKQATLHLRHDDHVKKGTGKGDTPKGILLIEGSGPRALLLIRGSKAGPSEGFDSRLRALGLRAHYWSEVRRLAPRKGSTAASGHSGSVPTTDQGFVGWPPKGSTAASEHAERGMTLGTFDTWSRLGLRSRGTLGHFRDQQERFYNGIPSEGDIEPSDPIKWDRVRQITCRYFWSAPLGH

SEQ ID NO: 80688 - protein, 202 aa, Zea mays
  Coding DNA Sequence Number=SeqID_37313
MDSMVFEVDELDGATMICHTNSKLKVYVGIVPEVGRGGGSSEVEAESGPRGRARRRPSSEVEAESEPWGRARRRPPSGVEAESEPWGSARRSPSSEVEVESEPWGQARRSPSSEVEVESEPWGQARRSPSSDVEVEPELGGRARRSFLWRPRLDLAVVSLTLSSGTAVGVGQAALFSCQVGQWSGKVTVVTSALSTEERASG

SEQ ID NO: 80689 - protein, 22 aa, Zea mays
  Coding DNA Sequence Number=SeqID_37314
MGQTPTGHNSGLCTRWGLNPCP

SEQ ID NO: 80690 - protein, 167 aa, Zea mays
  Coding DNA Sequence Number=SeqID_37315
  Homolog annotation: Hit_ID=A2XNG1; Match level="QueryCoverage=100%, HitCoverage=34%, E-value=1e-37, Identity=52%"; Hit description =Putative uncharacterized protein
  Subcellular localization annotation: CTP_CleavageSite=65; ConfidenceScore=5.11e-01
MANASKHLQPSSQAGNDKKYQGTLVASPAKAISPKCVNRIVPSKQLILGGGSIGHVASFLIKVVALEAYVSIVSFTHNLNNMFGYDKLSMPLLFLSVTTTVSELSSKHDDEPDNNTEHSETPSETNELASTSGTSDAADGTKEIVQENWLVLLFRELEKQGITLPER

SEQ ID NO: 80691 - protein, 33 aa, Zea mays
  Coding DNA Sequence Number=SeqID_37316
MQSAQSLVSRARTAIHSAAARVLTDIKADLQGS

SEQ ID NO: 80692 - protein, 55 aa, Zea mays
  Coding DNA Sequence Number=SeqID_37317
MEDDSWARAPVPETGLLVSAEDTRRRVVEHAGLRYKTRLSGYTAPDHPRGQVSIL

SEQ ID NO: 80693 - protein, 224 aa, Zea mays
  Coding DNA Sequence Number=SeqID_37318
  Gene Ontology: Mol. function=zinc ion binding; Cellular component =nucleus; Biological process=regulation of transcription
  Homolog annotation: Hit_ID=A5HWF0; Match level="QueryCoverage=90%, HitCoverage=50%, E-value=1e-48, Identity=50%"; Hit description=Dof zinc finger protein 1
  Pfam annotation: Domain name=zf-Dof; Domain location=83-145; Score =138.4; E_value=2e-38; Accession=PF02701.6; Description=Dof domain, zinc finger
  Subcellular localization annotation: CTP_CleavageSite=92; ConfidenceScore=5.39e-01
MATLSGTGGGGGGNVDAHAHHHQLPSMPPPARVGALMAPRPNMAAVVAASGGSTSDGSGPTGGGSVIRSGSMTERARLAKIPQPEPGLKCPRCESTNTKFCYFNNYSLSQPRHFCKTCRRYWTRGGALRNIPVGGGCRRNKRTKSSNSSSATSASRASGTSSSTSSTATGGNSAASIKLPHQGHGGQLPFLASLHHPFTDGDHHYNTGASRLGFPGLSSLDPMD

SEQ ID NO: 80694 - protein, 208 aa, Zea mays
  Coding DNA Sequence Number=SeqID_37319
  Gene Ontology: Mol. function=zinc ion binding; Biological process =regulation of transcription
  Homolog annotation: Hit_ID=A3AP52; Match level="QueryCoverage=56%, HitCoverage=34%, E-value=2e-18, Identity=44%"; Hit description =Putative uncharacterized protein
MSGIYPFNVEGHGGEGSGFADHMFGDSKVPSSARLITQLTLVKMEDNPTSAVMASSSPREFLGLPGNPQFWDGGGSNGGASGNNGAGTGNAGSAGGDAIPPGGSWMDLSGFNSSLSENGTAATTPDRGTSTTARRGNGVVATGLGTIATAQGQCRRSPSGSGAAAAGLGTDATACRGRGAAATVAIGRGSTAARAIGQPPTLMNRDGA

SEQ ID NO: 80695 - protein, 203 aa, Zea mays
  Coding DNA Sequence Number=SeqID_37320
MQVTRNRIVVTHPFGFVASGMVAQAHTSCTRRAGTEKGDISKRILLGEGNGPPSPPTDQGFEGWPLERERFYNGIPSEGGIKPSDPIEWVRENSAAHPAPTAVLATRARLTTASSASGATASSALPDLRPQPREEVSASPDPKTRPQPRPREESRPRPTPTSASGEAPTKARRRQQDPSSIDNCASTGLGHFSDDHVIAYTGL

SEQ ID NO: 80696 - protein, 496 aa, Zea mays
  Coding DNA Sequence Number=SeqID_37321
MHRGLPPCEPPDGEHPRCLRLAAVGGARPRGGWRPSAIAWLQGFSSGSPAVVPRRRSPRMMTVGLVVGRSKPGYGLCPALSFKDIHHPCYGGGQAKLGFYLPHGPASCLFLQHSGDRALTGLAEGANFDNAGPVSRKRRQLQRAWLAGSAGSSAASDAASCRLVRAWPSIHRTGDCCTMRTGGSSKTSYAARVAFVSLDCLVLTPAHRLHAEVAAVVGAEVVAVREGFSADETVGATCGRTSSSSALMACPRPSRGDVGEGFSTAAFALRSSLLLFSRPRRRSLSLLMEGSSTSHLEFVVPQALWCGGCSYPREWNRNSFCNGTQSMGNLRPLYDELEPDAAVSAWTEAESVRKEASSAQEQVASQAEEVQQRWLELGQVIRERDQPRSHAAEAMSRAEVLGGQLAEAMERPVLVSARARILAEALAAMAQARCWRPPSRWRSFRPCRRPRLGQDLFVGSRIAYPSESYFSRKVMSEDPAIEVVEKRESRSGKRLF

SEQ ID NO: 80697 - protein, 623 aa, Zea mays
  Coding DNA Sequence Number=SeqID_37322
  Gene Ontology: Mol. function=phosphoprotein phosphatase activity; Cellular component=nucleus; Biological process=multicellular organismal development
  Homolog annotation: Hit_ID=A7PNM2; Match level="QueryCoverage=61%, HitCoverage=61%, E-value=1e-127, Identity=58%"; Hit description =Chromosome chr8 scaffold_23, whole genome shotgun sequence
  Pfam annotation: Domain name=PP2C; Domain location=216-582; Score =39.8; E_value=9.8e-09; Accession=PF00481.12; Description=Protein phosphatase 2C
MGNSLACFCCAGGAAGHVAPAALPSDPAYDEGLGHSFCYVRPDKVPVPFSADDDLVADAKAAEDATTFRAISGAALSANVSTPLSTSLLLLLPDESAASSSGFESSESFAAVPLQPVPRFPSGPICAPAGAGAGFLSGPIERGFLSGPLDAALMSSGPLPGAATSGRMGGAVPSLRRSLSHGGRRLRDLTRAILARTEKLQGSMDLGLGLGLGSPDGAGLQLQWAQGKAGEDRVHVVVSEERGWVFVGIYDGFNGPDATDFLVSHLYAAVHRELRGLLWDQRDAHPDQPTTTSTTASDHQDRRRRRARRSRPPRGADDDQRRWKCEWERDCSSALKPPTQRPPRGSSQNDHLAVLKALARALRKTEEAYLDVADKMVGEFPELALMGSCVLAMLMKGEDMYLMNVGDSRAVLGTMDSVDVEQVTSDGLVGDGTPLLSAVQLTSEHSTSVRQEVCRIRNEHPDDPSAISKDRVKGSLKVTRAFGAGFLKQPKWNEALLEMFRIDYVGSSPYVTCSPSLCHRRLSTRDRFLILSSDGLYQYFTSEEAVAQVEMFIATTPDGDPAQHLVEEVLFKAANKAGMDFHELIEIPHGDRRRYHDDLLLYKISTKHHWVGLGSRRIQVESR

SEQ ID NO: 80698 - protein, 105 aa, Zea mays
  Coding DNA Sequence Number=SeqID_37323
  Subcellular localization annotation: CTP_CleavageSite=90; ConfidenceScore=5.59e-01
LDLLDFLFKSALASVSCAAGGWPAVPEQKQRSRQQRGMVRLTSASQAATRTRTQKVASGFRTEARAGPATTTTQEADRGEGKGSRGRGPAAAAASRARTPTRVNA

SEQ ID NO: 80699 - protein, 626 aa, Zea mays
  Coding DNA Sequence Number=SeqID_37324
  Homolog annotation: Hit_ID=Q6J9V9; Match level="QueryCoverage=7%, HitCoverage=17%, E-value=5e-07, Identity=62%"; Hit description =Putative uncharacterized protein
MRRKDGGFPPFGGLEGGKARRIRERGDMTGSEQKKPNRRAWGTQPPSGYKRSSTFAQTNGAPSLEARATRHATGAPDAACKQLHRHLRHHRASLVAEPIPRLEAHQAQDQQRQPDATVNAAESGPAVMTVADAREQRARRQPSSRPIRGQRESSLSRGEDNAPVIRSSNGSHTRDGCPANHSPRRINSAAGQVALLRDDQVVIQNFEKIDPQLRLSGALNEDCHGTVDRADQVASAAGSSLVTVGDKLEPLNNSGHCTIVTAADVDYLAEREEEIEVTEEETPPPPPSESQAGNLFYFDICGSEPDSPVNEGKPRTTVGGPNYLGGSVTSGRSNGRCFALAETTAPKKGPGKGDPPKGILPREGTRLRASLLIRGSKAGPRRVQQPPQIAWALHPLLVRGSKAGPPKGSTAASGYSGSVPITDQGFEGWPPKAHRRHHVRRPSRRLGGCSRKPGSGRTVDSVNIPARELGPRPYTRATASSHEGTTRPAEALRKALRPRRSEITPPRPRGLHPAGALARTHRNQKQPRKAGPLAKKCDESLQASANTPFEARGLLSGTIIRGTLKTPNSQLVTPISIKLQRPDGARTRAKPRKTANSAPPDPGLGLGLSPGRRRTPLRPTQDSDSG

SEQ ID NO: 80700 - protein, 82 aa, Zea mays
  Coding DNA Sequence Number=SeqID_37325
MTVAMSHLSVHDTAYAPHVYVPNLISGSLKTPKCTPEKFEKSPDDEGGESSYIMRYSDIGGTNSINLGPFGSIGTVPSQELF

SEQ ID NO: 80701 - protein, 250 aa, Zea mays
  Coding DNA Sequence Number=SeqID_37326
MQAACNRTKGAHPFDFDASSMEAQAHTSCNRRAGYYVQETAPPLTPVPRLLDCGTSAATRGDPTHDPIVPTEHIGHGSVSRGRRRDGRYGQKWADSNGGGRQAEAAVKSSASSRPLLGQRESPLPRREDDAPVFRSSNGSRTHNGRPANHSPRRINSAAGQATPLAGEAGTGKGDTPKGILLREGSEPRAPLLIRGSKAGPSEGFNSRLRALGLRAHYWSEVRRPAPRKGSTAASGHSGSAPTTDQGFVG

SEQ ID NO: 80702 - protein, 162 aa, Zea mays
  Coding DNA Sequence Number=SeqID_37327
MASVVGAEVVAAEEVLVADGITATIRAPGLRLFGFDSFSSPLEWGRGRGLCCSSVRPEAIAAAVWPPGAEVVVAAAGAGVGEPPGDSANDVVEKARKIVSAERFPSIKTCSVSGIAYPSVSYLSQKVMSEDPTFEVVKKHKRRSGRKTFSEENFDAEGVPPF

SEQ ID NO: 80703 - protein, 368 aa, Zea mays
  Coding DNA Sequence Number=SeqID_37328
  Gene Ontology: Mol. function=hydrolase activity; Cellular component =nucleus; Biological process=metabolic process
  Homolog annotation: Hit_ID=A2YP97; Match level="QueryCoverage=92%, HitCoverage=94%, E-value=1e-115, Identity=64%"; Hit description =Putative uncharacterized protein
  Pfam annotation: Domain name=Abhydrolase_3; Domain location=103-338; Score=253.0; E_value=6.5e-73; Accession=PF07859.4; Description =alphabeta hydrolase fold
  Subcellular localization annotation: CTP_CleavageSite=65; ConfidenceScore=5.38e-01
KQEPINQMGSSSSKNASHMSSLPWTVRIQAAAFQVAQRQDGSIRRPILFLSDLKTGASRATPSPDVSEVRSTDITIDVSRGLWARVFCPTAIADDAPAPLPVFVYFHGGGFMLFSASFGPYDTFCRRLCRKLRAVVVSVNYRLAPEHRFPAAYDDGVATLRYLDETPTPLPADLVPAPVDFGSCFLIGDSSGGNMVHHVAQRWASMSSATSSQSQSQPPLRMRRLRLAGAVLIQPFFGGEERTEAEVRHDKACRILSVARADLYWREFLPEGASRDHPAARVCGEGVELADTFPPAMVVTGRIDLLKDWHARYVETLRGKGKRVRVVEYPDAFHGFYAFPELADSSKLVEDIKLFVDDHRSGSRLDAC

SEQ ID NO: 80704 - protein, 99 aa, Zea mays
  Coding DNA Sequence Number=SeqID_37329
MGHGWGLGLLTAVPIRACASLLDRVFGIGVSGPSCLPLLTWKTFIADLEDEGFRRPALLIADAPLQSGRRELKGGSDMKRGESELGSGMIWRLAAGLLL

SEQ ID NO: 80705 - protein, 199 aa, Zea mays
  Coding DNA Sequence Number=SeqID_37330
  Subcellular localization annotation: CTP_CleavageSite=42; ConfidenceScore=5.25e-01
MAAAPDRARPARLATSRGTLRAAVALGKGGRARRLGRATVPSASHAGEEGERERGRREDGTELTTVTNDDSGEASLDAGKDGGAGQRCRVGWEGRFGKSSWACAAGRTWRRGSWKFGGRRADMWAPLPGGDGGASAARGARRRPWRLGVAHARVVGCATRQPGGPWHDARPSHGGRPGAGWAEARAGMGCGRGEGEKEV

SEQ ID NO: 80706 - protein, 124 aa, Zea mays
  Coding DNA Sequence Number=SeqID_37331
MVRRFIPQGKNESRISVHAEIAQVWPPASVIRSPNSPAEILAACPYLNTSRDLAWLHPQPAKVAVKLGIARRTPFIASVSLLVAGSAVKHTESRCMESDQLCGKWVTRLVGKDAQPLQSVKLVY

SEQ ID NO: 80707 - protein, 227 aa, Zea mays
  Coding DNA Sequence Number=SeqID_37332
LEAPPAPPRDVPAVGGATGGGPGGDPDDDDSDHSTESFEPQEAEGWVARPITRDATRGCHFHDALDTLLRQAFDRHTWSIEYRCVVYQHSRGRYPDRWEATCLVRRPEDDLRGAEAVSEHYSISERDTAEAAITESVVVSPVGEANPRLSSTVNLVAVLNTELDHSLDELSRARTEIAELRAELAERHHQEGGSPAPVGTQHPYRSPPRGHHTYGSPVCKTRIDLDP

SEQ ID NO: 80708 - protein, 119 aa, Zea mays
  Coding DNA Sequence Number=SeqID_37333
MKVVRHASMSKVGYEKALDTLDELEVGVFAGVMRLGDQTEQFDQNDIGDEIVGDKTGCEPGASNALVRVEHKLDFNIGGVSMDKPINVKPKGRTIRNDEVVPPIAEPYGLESKISMQRL

SEQ ID NO: 80709 - protein, 157 aa, Zea mays
  Coding DNA Sequence Number=SeqID_37334
MVEAPWVRYLSQEYVPMLTWATNTIAPPLAHISVIDGGTTGDIDTSRKGWRVDYREGEVGRRRGKALGPWVLTPVDEGLRQQRAAQQQLQREARHREQYGVARERSGRVLLKGPELAIYREGKRDGGALGERRARRRLQVPSMATLPERIMGEEKKR

SEQ ID NO: 80710 - protein, 327 aa, Zea mays
  Coding DNA Sequence Number=SeqID_37335
  Homolog annotation: Hit_ID=A2XFR6; Match level="QueryCoverage=56%, HitCoverage=53%, E-value=3e-28, Identity=39%"; Hit description =Putative uncharacterized protein
MDLGTHMVCAWFYPLEPVLVEEVPVDIPHIRVENVVILEDSSEEHLPTPTPLAKSLAFAARSSTSAPPAPAVQAPAPGGDDLDDSGDDDDEDDNDDEGEGEHVNEESNYAQQDYFMGFGPVVEHYTSMFETGHFPNLLQDVLHALGTYVRPLYETRRVREPPRACYYITRIHVRVMDAGDRGFSTLSAHESLTPLSTYAASVSDTARRTLWLLSHTYRQQLQDTRFRHLPLHLSGGSHTSIVPGEASEDCLNTLAGVVAGLNTDLDSATLDLSRVHLELEDAHARIAPLEAQLQGQDSPEAQVPAMALSPPHKRLRYGEPGSITRLL

SEQ ID NO: 80711 - protein, 438 aa, Zea mays
  Coding DNA Sequence Number=SeqID_37336
MREVESEAIKIVGKYVSKMEMMTRKQVKTQPEEGTSKEKVVVAATQKRKIDSQGTWDEKMGPKASRLFVEELTGTCVGPGEVMSSPELQETSSRMLKVTRGRWHRKDPIPRATDDDYFTSRLFCELKIFPYERNIGVVVSAVIEKDRQDIQRKKQKAPLQLVDPRRDAKVARPSAKGSSAYNDAPPRRGPWLQNRLRRRALLKRQCRGPRGHVRSCLRTTTWWAESPCSMPRLGCRLLVSGMTYASKQGSKAGQLAVVPSVVPVGLGVTALENEKEDLDRWLNDEKEDTENTREDAQASHKRVADLEVEVKNMPGYCEKTESATRAGVDRAHSLFVDVYHNLGTQTAPFDKSGEEVGNRSLWWLQDELELLPSIVTCLMSYASLIKDDVLKGSAGVLYDRMWGPHGRGVVRERADQAPVQAMRDEKVEHLTGLESSVA

SEQ ID NO: 80712 - protein, 303 aa, Zea mays
  Coding DNA Sequence Number=SeqID_37337
MLQGPPPTTQGLGPTRHASWPRAEEAKPPRAGRQHLWQAKQATLHLRHNDHVKKGTGKGDTPKGILLREGNGPLAPLLIRGSKAGPSEGFDSRLRALGLRAHYWSEVRRPAPRNGSTAASGHSSSAPTTDQGFVGWPSKGSTAASDAERGMTLGTFDTKPRLGLRSRGTLGHFRDHRERFCNEIPSEGGIEPSDPVKRGPGPANHPQLTGDTMFGALQGQHGAFPPPPCGKATQGRMKKAESVLDHPLALCGGSRAALTNPAPTKPLTASTYQPKNLGLDCAPGLRPVRMREQPDRPKHRETH

SEQ ID NO: 80713 - protein, 88 aa, Zea mays
  Coding DNA Sequence Number=SeqID_37338
MVRRFIPHGKNESRISVRAEIAQDRINREFVCRVTTDFSPKIISAMDPHSAVANDLCYVTTSEQATVESEDQQVEIAEQELIEGKLCP

SEQ ID NO: 80714 - protein, 82 aa, Zea mays
  Coding DNA Sequence Number=SeqID_37339
MKLGPIRSPGTLGVILELHGHQNEEEIEVEEARTTPPPPEEPQAGNCFYFDICGAEPDSPITQGKPRCICHILAILKSFSLA

SEQ ID NO: 80715 - protein, 81 aa, Zea mays
  Coding DNA Sequence Number=SeqID_37340
MGKPVPSLLMLFLGRGGYNGSSSLISCEKQTIRIEFLSLQVTALVPTITGMGDHVSGRVRGKVHCQVQSGFNNIMLKEERN

SEQ ID NO: 80716 - protein, 295 aa, Zea mays
  Coding DNA Sequence Number=SeqID_37341
  Homolog annotation: Hit_ID=Q6J9V9; Match level="QueryCoverage=21%, HitCoverage=32%, E-value=3e-08, Identity=45%"; Hit description =Putative uncharacterized protein
  Subcellular localization annotation: CTP_CleavageSite=56; ConfidenceScore=5.15e-01
MKRLAGTPNPHSWKETKLTTYPGGGDGAAPLAGGIHSGCLSSERGRSKPSATRSSRSSAVTVEKGHGSRGEMMVTRSAITEQKGWRREGLGGRFPFLRLKLSGCENLRRRQEAEQRTVARPSPEYIKTKARPVQRFARTRRGIQKPKAKRPFPERLPHAQRPPREPPAPSHSLRGATGGASGRGSKRRFAFAITTASKKGQGKGDTPKRILLREGNMPRASLLISGSKAGPSEGFNSRLRARGLHTHYWSEVRRPAPRKGSTAASGYSGSAPTTDQGFVGWPSKGSQPPQTQSEG

SEQ ID NO: 80717 - protein, 50 aa, Zea mays
  Coding DNA Sequence Number=SeqID_37342
MAVMGSTSEKMYLCQKHRRGTKDGAEPKLRVEELRHDNGKGNRLKDEKAI

SEQ ID NO: 80718 - protein, 122 aa, Zea mays
  Coding DNA Sequence Number=SeqID_37343
MKGSTFSKHFCKTESLIIEKPYLDSLTTSIPLRVFSLVGKMPPRTRRTACKHTGLIGVPCHQLAPRHDDSSSGSNDPIGDLEAEVNRLQAELCRRTDIWVADGDRINELRRDVHHLRDQLAD

SEQ ID NO: 80719 - protein, 57 aa, Zea mays
  Coding DNA Sequence Number=SeqID_37344
MKGSTFSKHFCKTESLIIEKPYLDSLTTSIPLRVFSLVGWYQRKNARNEVREERILH

SEQ ID NO: 80720 - protein, 226 aa, Zea mays
  Coding DNA Sequence Number=SeqID_37345
MPSCIRKTTRKSTGPIGVPRHQLATRHEDRSSGSNDPIGDLEAQVEQLRSELRHRNDLWVADGERINELRTDIRHLQDQLAERDLALDWAVNSHSLAWDKEAKARARVEELSSTVDNLQMPSKTRAQDGAGTSRGREATPNPPPVPPTLAEAIAALVNVMADNTRFLREIAGQQMQQQGGRAYPQGPRETSYLDFSETRPPLFVKEEDPLEADEWIRVIEQKFELL

SEQ ID NO: 80721 - protein, 56 aa, Zea mays
  Coding DNA Sequence Number=SeqID_37346
MAMMGSTSEKMYLCQHILESLLLCRVKKQQTFVASVQRWYQKKSTKTKAAGGKVLR

SEQ ID NO: 80722 - protein, 108 aa, Zea mays
  Coding DNA Sequence Number=SeqID_37347
MGKNKKGGSSSHHSGDKRKHVPSPPSEDFGDAEYLEEEFSSESEGSPVYASPPVSSDDSDNSQGIAAKVWTYIRAVERSGLEGSDESEVSSDEGNSSDSSEEESGGDY

SEQ ID NO: 80723 - protein, 41 aa, Zea mays
  Coding DNA Sequence Number=SeqID_37348
MGMKIDPNPYPNRVKPIGFRVSGGDAGNMDDFEELQEYDEF

SEQ ID NO: 80724 - protein, 91 aa, Zea mays
  Coding DNA Sequence Number=SeqID_37349
MNKREGGVITLRATVASSWACESSPVRAPTRGTEELLTGVSSPSWIGVTVAWDLCAILNDGLGHVGAWMFLIRRYQIWRPEQITGYVSSGF

SEQ ID NO: 80725 - protein, 42 aa, Zea mays
  Coding DNA Sequence Number=SeqID_37350
MAQPLSQDEEWVPQDNGMDQWGDMNMKTRRKKKYHRVEVKVA

SEQ ID NO: 80726 - protein, 714 aa, Zea mays
  Coding DNA Sequence Number=SeqID_37351
  Subcellular localization annotation: CTP_CleavageSite=36; ConfidenceScore=5.04e-01
MTTSIGGAAAPSAPTPPSAESDPASDSDTDEGSPPRRKMSAPRLGHCRRGLLQEPGPSRRLDRSLRSLSQLSPEDISPAHGLGNPTPASAPPVDGPARLWPTKLLFEPTPPLSMMTPMPLALAHRRAGRGQQASPSARNEEETRLYAKIHRCSGPDSHNEQTLALKVPLQTELRFHSRGYEQPPHRRACGTTNSGRLASDLCSSSDGPGTDAAAGRLSFASPLKGREPDIKAKEPEVGPRVALTVSSAEKLSPAATTSAPTAASTCPPTPHRRAPAAPKRTGSNSSPSPAWLEGASSEELEDGFHPQKLEEEVARRPVREVELRLASLSAPARMMKILEAEGGAEVVARLASPHHQTDGDSPRLRPQPSRTESSPTRSKVLPLTTRGLGPTRHASWPRTEKAKPPRAERVTAQRLQRLLHFRPDQQMKGRTAMHAACNRTKGAHPFDFDASSMEAQAHTSCNRRADYYVRETTPPLAPVPRLLDCKTGAATRGNPAHGPTVPTKHIGHGLVCRGEGATVDMAKSGPTVMAAAGGWEQQSNRLQAHVPSYDSERALSHGVKTTRPCSVPRTAHARTTAAPRTTRPIALTLRQGRRHLWQAKQATLHLRHDDRVKKGIGKGDTPKGILLHEGSGPRALLLIRGSKAGPSKGLDSHLEALGLRAHYWSEVRRLAPQKGSAAASGRSGSAPTTDQRLAPEGFDNRLRACRARDDSGYV

SEQ ID NO: 80727 - protein, 296 aa, Zea mays
  Coding DNA Sequence Number=SeqID_37352
MRPGRTPPPAVTQDGDLGLDGGGKRAGLRPLPLPQPQGFSSPGLGRGVRRVEVGPRVGGGPLLHSAIRGKGGCRPWRWQLHRAWLSDASGFGAARGAGVRHGSLKRFFCRTRPEVGAAAVRPPGAEVVVVAAAGVGDGAPFVGLPLLRRPSPSEWGCSGNRPSRLLGPDSRRSPWTAPPSEAGSDLAEGVVDAEGATAPFSVKSRACRIRLSCSVCLLRPSRPENTPSLRCKAVSPFLLFRASGLSVGNRDVCVGESCFSRKVMSEPKHQVAHLEVSGPDPSGVVASQGLLVPRRV

SEQ ID NO: 80728 - protein, 221 aa, Zea mays
  Coding DNA Sequence Number=SeqID_37353
  Subcellular localization annotation: CTP_CleavageSite=52; ConfidenceScore=5.34e-01
MAPPCDVVGPSPGSGEAEAPPRSKLSPGLGVGRGGDRRPRSRLSPSPGGRARRSPASSIEVESEPWGRARRSPSSGVEVESELWGRARRSFLWRPRLDLAAVSLTLASGTTVGAAQAVLFSCQAILALNAPTIRSVGVVIRPRLLLREACPSWASGESKLCADEGYQLRLGVLGGAEHGVFIELLTGDLPDPVPFDRVRGLDASLWWDFVTESLLLVSEMS

SEQ ID NO: 80729 - protein, 382 aa, Zea mays
  Coding DNA Sequence Number=SeqID_37354
MGPQVPMGGNPQISFTNCREDACLRDGVGTEIVQLHPVDVQNRPHKTACWHSEPPLVKGDEAQHVPRWRGRGGFARRGHPLRLRVTGERAKQTISNKGLQIIRRDDGERPRVARRNNGHPVGHHQAEEVAAERTRDRERGYSKRDPSPRRKRAPSPLLIRGSKAGPSEGFNSRLRALGLRAHYWSEVRRLAPRKGSTTASGHSGSAPTTDQGLGLRSRGTLGHFRDRRERFCNGIPPEGGIEPSDPVKRGPGPANHPQPSPASGAIGSSASPDPRARTQPRRWTTDSALPDPRAQTQPQPRKTVSASPDPGLGLNLDAGRWTPPHPTPGLGHNLGLGRRSPPRPTQGSDSTSTSKDGLDLDLGGASASPDLGLGPTTSQGGP

SEQ ID NO: 80730 - protein, 148 aa, Zea mays
  Coding DNA Sequence Number=SeqID_37355
  Gene Ontology: Mol. function=protein binding
  Homolog annotation: Hit_ID=Q7XXS3; Match level="QueryCoverage=77%, HitCoverage=82%, E-value=1e-37, Identity=70%"; Hit description =Putative uncharacterized protein
  Pfam annotation: Domain name=CHCH; Domain location=103-144; Score =44.3; E_value=4.3e-10; Accession=PF06747.4; Description=CHCH domain
MAHRLALAALRCTVHSQCDCWLCIGYSALACSKSARQAPPPAPVRDGGGSMFGGIGSTIAQGGMAFGTGSAMAHRAVDAVLGPRTIQHETVASEAAAAAPAPPVMNADACSIHSKAFQDCLNNYGSEISKCQFYLDMLNECRRGGVSA

SEQ ID NO: 80731 - protein, 201 aa, Zea mays
  Coding DNA Sequence Number=SeqID_37356
MAMMGSTSEKMYIRQVRKQRTFVAFALRWCQRKNLKSEASGGCCPPFKNIILLSERYAAAYEENRTVWVEDGQRINELRADVRHLQDELAERDLAIDWAVNSLSIAWDREAKARARVAELSAAIDNLQVYCNTLHEEVHVLYLRLHPDVPVDPVAMGAGPSGTAGEGLGGELDLFKSPPFMNLADEWSPTTDSEATKDDRN

SEQ ID NO: 80732 - protein, 79 aa, Zea mays
  Coding DNA Sequence Number=SeqID_37357
MTKESGSRPGNGWPRSAENSCSTVFEKGNMASRRALVKLGGHVGAIRSQWASDSPCTTNLGRGGGGVRILASIELTGEM

SEQ ID NO: 80733 - protein, 121 aa, Zea mays
  Coding DNA Sequence Number=SeqID_37358
MAPPCLRCSVTGPSGEGEPWAVDLSRELAAAELLSLGNDSPNGLVPHSGNTHDFLLALALLGCSGWLLGQEDGLPGCSNAGIDFLPASYSDGTAAAAEETASGTAAASSDTDVGAGAGDPA

SEQ ID NO: 80734 - protein, 55 aa, Zea mays
  Coding DNA Sequence Number=SeqID_37359
MASIGQVLEQGRKNSRFRCLRTGAEVRGVLSQNSRHLKREAAPQQHLPPPTPDDH

SEQ ID NO: 80735 - protein, 78 aa, Zea mays
  Coding DNA Sequence Number=SeqID_37360
MEIGLREQCRGTVHLFIGTGCNLRKITFMSFIIDYNNDTKHHGSLSQSIFKSVRPFVLRSIIVPKLSRIFGYEAYPQQ

SEQ ID NO: 80736 - protein, 69 aa, Zea mays
  Coding DNA Sequence Number=SeqID_37361
MAMMGSTSGKMYLSQFCLDRTNTRKANTQWEWRDGESSVYPLWQEAGRWCICALGWREPGLALRNPVAS

SEQ ID NO: 80737 - protein, 173 aa, Zea mays
  Coding DNA Sequence Number=SeqID_37362
MGRSGSLVSGGGHAQARHRGRALTDGALQPVTKNGERKGETDGRVLLAGDSAWVKKERGGHGWASGLGSMAWDRYRRPPATNRRNRENGGERREGTAGKFTSGGARTRARLGLTIEEHDCGRRSSSTGNEFGRRGLGDGEALASLKNRRAQLRVFNPNSIQINSTMCNNSKNI

SEQ ID NO: 80738 - protein, 120 aa, Zea mays
  Coding DNA Sequence Number=SeqID_37363
MSTNGKIRAWGDCSPREETLEYWSNGGDTGMPRVDDGGASAAWGNAGESGPGETKSLGANRKVSRVAGEGAELTKATDRADARRWPRKNGGSSAELHGRARRARESEGVQLRAQLGEGSE

SEQ ID NO: 80739 - protein, 180 aa, Zea mays
  Coding DNA Sequence Number=SeqID_37364
  Gene Ontology: Mol. function=acetyl-CoA C-acyltransferase activity; Cellular component=peroxisome; Biological process=fatty acid biosynthetic process
  Homolog annotation: Hit_ID=Q84P96; Match level="QueryCoverage=55%, HitCoverage=23%, E-value=3e-34, Identity=70%"; Hit description=3 -ketoacyl-CoA thiolase-like protein
  Pfam annotation: Domain name=Thiolase_C; Domain location=14-131; Score=89.6; E_value=1e-23; Accession=PF02803.9; Description=Thiolase, C-terminal domain
MYIEFSTLNIQINKGFTAKLSGYGCVDFNTEVIFNAPVICFLRSAANLSVETLEKGLLNQFVYCCNKSGLDRSKVNVNGGVIALGHPLGATGARCVATLLNEMKRRGRECRFGVVTMCIGSGMGVAAVFELCSARLEVSTITRHCNPMVIGDRELPCYCVLILKTFIMTMYEILSLISTG

SEQ ID NO: 80740 - protein, 285 aa, Zea mays
  Coding DNA Sequence Number=SeqID_37365
MASLRCTARKSVIPFLLSCLVERPLRRTVSGQSSHMERLHHPLREDQECRRQEREQQDSSPSPQHGVESKRHPSSMPQLEVPPTPPKGTIGDRGDLDGDDDGGSSSHNKEPSEEQEPEGWVTQPITCDTTRGCHFLDVLNTLLRRAFDQQTWSIEYHCVVYQHSHGLYPDQWEANCLVHHLDDDLRGAEAYSEHYTITERDTAEVAIGVADGLDLKYYPRCLTDNTMSVIVSSVGEGNPRLSSMINPFAMLNTELDHTLDELDELGKDRSEIMELRAKRAECRHQ

SEQ ID NO: 80741 - protein, 142 aa, Zea mays
  Coding DNA Sequence Number=SeqID_37366
  Gene Ontology: Mol. function=nucleotide binding; Cellular component =endoplasmic reticulum; Biological process=small GTPase mediated signal transduction
  Homolog annotation: Hit_ID=Q01474; Match level="QueryCoverage=61%, HitCoverage=45%, E-value=8e-45, Identity=97%"; Hit description=GTP -binding protein SAR1B
  Pfam annotation: Domain name=Arf; Domain location=61-142; Score=30.4; E_value=9e-12; Accession=PF00025.12; Description=ADP-ribosylation factor family
MGYDLRPLGGTAARGFCVAAAHGASLSAAWSIGTRPHSPVPCVEEEGGAAGRVGEMFLWDWFYGVLASLGLWQKEAKILFLGLDNAGKTTLLHMLKDERLVQHQPTQHPTSEELSIGKIKFKAFDLGGHQIARRVWKDYYAK

SEQ ID NO: 80742 - protein, 205 aa, Zea mays
  Coding DNA Sequence Number=SeqID_37367
MEGMLQGVCCSMPWGVGGAFGALSIGHGEKGRSCCCSFWAPWRKSRGVADVAEQERASSCWSAMGEKQQGREGRTPWLGALAQGVEGGACWLEEEEEEEGAMDQSSPTPWTVEGNAGGARLLADHGEDDSLLQPLARRRSREGARLLLCEEEGAGGAAPWLAEGEELLRAGCCYRGAGRKKLLEAERKGGVGVQIAKCKGEGSYL

SEQ ID NO: 80743 - protein, 325 aa, Zea mays
  Coding DNA Sequence Number=SeqID_37368
MEDFEEFQDYNEFYVHCVARCQVKSSHLERLHRRLHEEQEHQRQEQEQQDSSPLPQQEVESKRSPSPAPQPEMPPAPPQGIPASGGDLDRDGDDDDVGGSSTTARSSRRTQNRRDGSLDPSLVTPLTVYQHHRRLYPDQWEATCLVCRPNDDLRGAEDFSEHYSITERDTAETAIQDAARRVLSQYYSLFRGVADGLDLKYYPQRSTDSAGGVIVSPVGEGNPRLNNMVNLAAMLNIELDHALDELGKVQAEVVELRSECATRHYLDGGSPAPIGIQHPYRSPPHGRFDYGSLEDMVAGVTWPSILPPGWTVEWDPTSAEEEREE

SEQ ID NO: 80744 - protein, 78 aa, Zea mays
  Coding DNA Sequence Number=SeqID_37369
  Gene Ontology: Mol. function=lipid binding; Biological process=lipid transport
  Homolog annotation: Hit_ID=Q5N781; Match level="QueryCoverage=76%, HitCoverage=50%, E-value=1e-08, Identity=48%"; Hit description=Non -specific lipid-transfer protein
MELQARCVCVVAMLLVASFAGLDTTHGTGECGRVPMDQAALKLAPCAAATQNPRAAVPPSGLRSYPIIILFVRTTAFS

SEQ ID NO: 80745 - protein, 150 aa, Zea mays
  Coding DNA Sequence Number=SeqID_37370
MLVDYTTVLDGPSVSVEGPTQQGVESVVEPTPASGVTSDGSSDPSLRLRLLRELRAVARTATDVVIVSVSVRGASLAEVQGKAASQTPPPIEARGKSPAAPAIGVDAPAPRAGDDAVSPGDWTDLAPCDTVDAPPGEKAKRGSQTYMQCT

SEQ ID NO: 80746 - protein, 154 aa, Zea mays
  Coding DNA Sequence Number=SeqID_37371
  Subcellular localization annotation: CTP_CleavageSite=35; ConfidenceScore=5.50e-01
MAGMPLLSSSGPPENFSPSFFPLCPRTRGLFPAIEFAVAFSPSLPNPGDPGTPLARACPNFGDLTAAERSSAARSRSSLLTTSSPRFLSVLLETFLSNNQEGHQWGSGRSARSAKVGVQRFIRFGFVSHPPWGGVLRLYDWRNLTSSYALGESL

SEQ ID NO: 80747 - protein, 609 aa, Zea mays
  Coding DNA Sequence Number=SeqID_37372
MCGPWGRMSSHELRESSSRMLEVTGGRWPKNLPIPWAEGEDMSTSRIARGLRIFPYGRNIVAVVSAVMNKDRQDAAQKRRAVIRLPDPRREAKRARGSAKAAAPGGSQPTLAAKPAAPGSSKVPESTKAVVAGRTKSTPDEATKSGAFCAGGEISLATAVKDEAGTMSCRLREASQQLSQQLSQAADFADRMASGALTADVSAEVERLRAQHADVVWEKSVVESKSRRLAEKVAALEAERTDLRRQLEEAKLARAEGSLASQRAEEWEVRFNALRGHVEKAEASKRSEVERTHAQLVDSYRELGARTADFEVPDREACLRFLEWLQEELLVLPTIVEGFMSFASLVTCEGAMNALSREGCRHYEVFDQTDESFGHKLFKAEDPVVKQSAGALFDRMWGAHGREAVRERSDRMERAEDVEDFGGLVGAPPEAAEGKPVLPLDAGEGPSDVLVPAAAGEDPVSAPVPTVKGAQEVVAELAVEGPTAADAPSQSDDSGSSVVWTEESSDEDLDYFAALDVAAAEASPCVMGADIPGPSVGCRRRRAVAKRRVSEVEGGRLRVDRAGKRELLSSPVAASVGEGELRSLFEGEELRIMLFNYREMGIIPKVEPM

SEQ ID NO: 80748 - protein, 139 aa, Zea mays
  Coding DNA Sequence Number=SeqID_37373
MTVADVREQRARRQPSSRPIRGQRESPLSRCEDNAPVIRSSNGSRTPNGRPANYSPRRVNSAAGQGPGKGDTPKGILPREGTRLRASLLIRGSKAGPPKGSTAASDRVGPIPTTGQRFEGRPPEGFHGRLRLLGLRAHY

SEQ ID NO: 80749 - protein, 235 aa, Zea mays
  Coding DNA Sequence Number=SeqID_37374
  Homolog annotation: Hit_ID=Q69LJ5; Match level="QueryCoverage=90%, HitCoverage=89%, E-value=4e-11, Identity=34%"; Hit description =Putative uncharacterized protein OJ1328_D07.26
MVPAEAIAIAVRLYSLSAAAAAAGSLLAWLVAAAAGLWRRIRAASASSHNKRGSSVRAVIGNDDREPQPPLPSRAAITEEPRRPVALAPAELLSPSSVSELTNTPSSKVRFTAHYYSGALGDDDDDGGGVVDGVRKCADTDDCEVEIMVLRRSVSEPARRRRARTLLAAAAAPWEERETMAVRRRSDLGCWYRHVDMAALDGSVVRLWDGGVAGREREDEERAQDWNCNDCRYRS

SEQ ID NO: 80750 - protein, 158 aa, Zea mays
  Coding DNA Sequence Number=SeqID_37375
  Subcellular localization annotation: CTP_CleavageSite=5; ConfidenceScore=5.46e-01
MPPPRLTLRADPQPPDPPGPRLSFPFALKQPSRGPRSHTNCHDLARSVMPPPRTIHRAFPSVQPPDPPGTRLSFPSALKPRKCTHKFGSRGNGARFGYGVHDLHRLIWKPHNLRRRFGKHDLADLGTTKQEPTPHLPLFRGSQSLNFRITNCLQATQK

SEQ ID NO: 80751 - protein, 103 aa, Zea mays
  Coding DNA Sequence Number=SeqID_37376
MDHMGLSHKSIKGRWDQLDGNRIAASRGMAGRLQLLGSLVAAGRAGEADARLGKAGQQHQSGVHGWGGCGNAAAMGMVGPQGLRAGLAGGSPEKERAGSADAL

SEQ ID NO: 80752 - protein, 73 aa, Zea mays
  Coding DNA Sequence Number=SeqID_37377
MGSRHSACSAEAGCRDSFVLLLLVTLLRGERYLIRDGWFTGGDKDDDYDYGNGKEEGVEGNPQEFQDFDEFED

SEQ ID NO: 80753 - protein, 348 aa, Zea mays
  Coding DNA Sequence Number=SeqID_37378
  Gene Ontology: Mol. function=protein serine/threonine kinase activity; Biological process=protein amino acid phosphorylation
  Homolog annotation: Hit_ID=A2YIL1; Match level="QueryCoverage=26%, HitCoverage=8%, E-value=1e-43, Identity=86%"; Hit description =Putative uncharacterized protein
MARERVKCVCGIFGLKSGITVDQNNTNVNEPPKVGWAKWFHKKGYKYSCDATFWVTKGKITPKYLSNRTGRVAGQKEEAQNSQGHDDKQMNTKDAKLVGYPHSDEEEHLDFTSLSSFERVEGHLNFVPLASYCNLLEPGKHTLYSGRFAPVGCLREVPVRGIEGHEGYIRLIEAKKKGKGDLLVHKIICTRRFISPQNNMYQDCKIVEGQIYTKRLNEKQITSLLKVQVGNSPEYITDRKLGKGGFGHVYVGRRVSGGAARTGPDAYEVALKLEHRNSKGCNYGPPYEWQVYNTLNGCYGIPSVHYKGRHSDYYILLNSFYALIFLGNGYAWSQPLGRVEFNGAGLLD

SEQ ID NO: 80754 - protein, 429 aa, Zea mays
  Coding DNA Sequence Number=SeqID_37379
  Gene Ontology: Mol. function=helicase activity; Cellular component =intracellular; Biological process=protein amino acid phosphorylation
  Homolog annotation: Hit_ID=Q1EPC6; Match level="QueryCoverage=84%, HitCoverage=22%, E-value=1e-167, Identity=76%"; Hit description=DNA helicase homolog, putative
  Pfam annotation: Domain name=DUF889; Domain location=190-426; Score =445.8; E_value=6e-131; Accession=PF05970.5; Description=Eukaryotic protein of unknown function (DUF889)
MSLRYDLIYTPNALKIERPRLSVNVAILAKGRYLRTRVGITVGEVQNNTKVDTAPKIFIRKPLKAGPEGGLFFVDGPGGTGKTYLYRVLLATLRSQGKIAVATATSGVAASIMPGGRTAHSRFKIPLTIDDGTVCSFTKQSGTAELLRKASLIIWDEASMTKRQAVEALDNSMRDIMGRPELPFGGKTIVFGGDFRQVLPVVRKGSRAQVVASSLWMSYVWESMSHLKLVSNMRAKNDPWFAEYLLRVGGGTEDTNSDGDISIPDEVCVPYSGSDSDLDNLIDFVFPNLNENMSNSTYITSRAILSTRNDWVDMINAKMIDRFQGEHMVYHSFDSAMDDPHNYYPPEFLNTLTPNGLPPHVLKLKIGCPIILLRNIDPANGLCNGTRLVVRGFQRNSIDAEIVLGQHAGKRIFLPRIPLCPSDEEMFPF

SEQ ID NO: 80755 - protein, 87 aa, Zea mays
  Coding DNA Sequence Number=SeqID_37380
MELLSKSYPTKEKTLKGMLVMWESRISRGVIKIKEGNAGIVLTINSYNLMQQASEKDFFKNIKGGGKCTGALPSFTGDQAPDPQMSK

SEQ ID NO: 80756 - protein, 379 aa, Zea mays
  Coding DNA Sequence Number=SeqID_37381
  Gene Ontology: Mol. function=kinase activity; Cellular component =cytoplasm; Biological process=phosphatidylethanolamine biosynthetic process
  Homolog annotation: Hit_ID=Q69QD7; Match level="QueryCoverage=79%, HitCoverage=79%, E-value=1e-142, Identity=81%"; Hit description =Putative ethanolamine kinase 1
  Pfam annotation: Domain name=APH; Domain location=77-298; Score=61.8; E_value=2.3e-15; Accession=PF01636.14; Description=Phosphotransferase enzyme family
  Pfam annotation: Domain name=Choline_kinase; Domain location=89-290; Score=266.1; E_value=7.1e-77; Accession=PF01633.11; Description =Cholineethanolamine kinase
  Pfam module annotation: Pfam domain module=APH::Choline_kinase; Domain location=77-298::89-290
  Subcellular localization annotation: CTP_CleavageSite=82; ConfidenceScore=5.04e-01
MAAGSGYGGGVEAKATTTAVSAAAPAEVPTSAASVDISLPLLKMSPRIMQVPRPHIYLRSSCFGSRSRSRLRPAWSRLLKVSVKEDNGNESSVTVRLYGPNTDLVIDRKRELQAIPYLSAAGFGARLLGIFENGVVQSFIYARTLSPADMKEPKIAAEIAKELRKFHQVDIPGSKEPQLWNDIFKFLKKAAALKFEDNMKQKRYEKISFREIQDEVQELKDLLDILRAPVVYAHNDLLSGNLMLNDLEGKLYFIDFEYGSYSYRGYDIANHFNEYAGFDCDYNLYPDKDAQYHFFRNYLHTDRPSEVDAQDMEVLYVETNTFRLASHIYWALWALIQAKVSPIDFDYLGYFFLRYGEYKKQRESCFSLAQSFLSELKNG

SEQ ID NO: 80757 - protein, 101 aa, Zea mays
  Coding DNA Sequence Number=SeqID_37382
MAPSYLPRCRPRADAASTWHQARRQDLWRRARIYNHKDCLAQLAERKALNLKVVGSSPILGAIDLGAELGATSTPRQLVDDSTAGSSAPRSMAPRCVNSAP

SEQ ID NO: 80758 - protein, 337 aa, Zea mays
  Coding DNA Sequence Number=SeqID_37383
MPTGRGMGNRCPSSLARSNGTPTWEQPDHPLLTGFPLPRGLGAGKGWSPPPPPLLPPFLTKLSSFLSPLDSSLCESAVAETESVAVGLSGLPHRFLGRACGDGEASAAASNGSSDTDRTWRGAWAWAWESPSSWGSGGLGVVMVTSMAGSRSCTPRRPQPGRRRRARAARARAALQERPRRGALAELGGHDAEAVPPLVVRVRRPRRAPLRAAAHRPAPRQRRAVASRGARGRHGRVLLRVRVPTRAPERARAHRRGAHASRLVNLTIRRLVLPLLGRHGHAPGVAPAHVGVVPPAAVQAQLLQTGMLELPGSLTPTTAAYMAGQRRADGRPGQVLA

SEQ ID NO: 80759 - protein, 181 aa, Zea mays
  Coding DNA Sequence Number=SeqID_37384
MTRTEELGLELRIRSGVNLSSSAHCGSVASCYGVLTVAVRGRKPPDSSRTSGVVVVTLMAGLFTITRKTLDKFVYKWAHNDMQVHSLGLTVTNHGSHGFGNTRYRRYPFQYRILADDLSTSTSTAPTGVCVRIYAPCISGFPRQNSGWHHQECFRHHCISPWKLARPASIPFIKWFSKRKL

SEQ ID NO: 80760 - protein, 410 aa, Zea mays
  Coding DNA Sequence Number=SeqID_37385
  Homolog annotation: Hit_ID=A2YVU4; Match level="QueryCoverage=33%, HitCoverage=87%, E-value=4e-11, Identity=36%"; Hit description =Putative uncharacterized protein
  Pfam annotation: Domain name=Auxin_repressed; Domain location=93-230; Score=54.7; E_value=3.1e-13; Accession=PF05564.3; Description =Dormancyauxin associated protein
MTDEPESRLKMTVVPEERKIWVATRRIEAINSGSEDAVADLDQLGIALPPADSPPRRPISPDFDRSVERKRSGPGTFLGRARTGAYMGLLNQLWDDTVAGPRPDSGLGKLRKYASFSPSSSSSAAVAAAAAAGSAPPPGAVTRSLTMLRRPAALSVVTSPRSESSSAPSSPSPASGAPDSPFGAATTPRGEGWTKKLRGKARMGGGGGDDAPGTPRSPTVYDCSEKPSPRCISATSGLAQSITVEPLAHDAMEAATTPPPTTRSHHRYSPTPSIHPPIAFLSALEREPHAVVAAAGPPGSRPLCSFHRSAVDFQASSMVSRVEEMSTTECADLGEEFWLQKNFLGQPPPHALPPLTIVVRLAPIPLPPLREVASPNIFVPPCGLAGLRRPLWMEGRGGGGADCGSGAVGE

SEQ ID NO: 80761 - protein, 158 aa, Zea mays
  Coding DNA Sequence Number=SeqID_37386
MASSTEENMKALLKVLVDCAEDATKSLGGLVDHALDHMHDEEIVARTLFAIKERLELLQQDALEAKVQAFPEIAKYQGDDISLEPTTPSTPQTVTDRSFDEDELYYPEVSDEWNPLGPVQANPFADSFPGSNTSTPLQGSNIVPSLPVNLESDAEHSV

SEQ ID NO: 80762 - protein, 140 aa, Zea mays
  Coding DNA Sequence Number=SeqID_37387
MEALNVSWNELLALVLNVEGWNAWSLVRQWGLGAKIDPVLVLDAKGGENKGQSNRWISYHLSNFENGKIELEMRWLCSAKVYSVWVHRTVSGGAPDSVWWCTGQCPVRQAGYGEQAALGTSTAVYDYNSPVCPVVHRTVR

SEQ ID NO: 80763 - protein, 48 aa, Zea mays
  Coding DNA Sequence Number=SeqID_37388
MGSRHSACSAEAGCRGGDKDDGYDYGNGKEEGVEADLQEFQDFDEFED

SEQ ID NO: 80764 - protein, 87 aa, Zea mays
  Coding DNA Sequence Number=SeqID_37389
MGPRRPSAGARAREERSNMGEGKRDNLCSRRIPGDGGDWHGETRRATAVFRARWIVTRRCSARCLVDASELGERLRRNCESARAGKG

SEQ ID NO: 80765 - protein, 157 aa, Zea mays
  Coding DNA Sequence Number=SeqID_37390
  Subcellular localization annotation: CTP_CleavageSite=53; ConfidenceScore=5.29e-01
MGTVSEASVSLPSRSTLVASNWSFVRFRETSFDDGKKAKRQDFYTRRTPARTRCVVDRRDQTVTPQRGAATRWEIESFLDNELREGVFWTFGSPKLKRLFSRVKLVTKNDLAPRKGLLLGLCFVAEGLQGRSGFRLKLLVRGGRSFLFMKLRYYKPT

SEQ ID NO: 80766 - protein, 196 aa, Zea mays
  Coding DNA Sequence Number=SeqID_37391
MAPPVDAVGPWCPRLGDVEAPPRSRSSLSSEVEVESEPLGRGLSPSPSPRVGRSGVRRLPGLSLSPSPGVGRSGVRRLLGLSPSPSPGVGRSGVCRLQGLSPSPSPGSGGAEFPMAPRARLGCCQPHSVEWHSSRSGAGGAVLLSDRSVERRSDCGHFGSVDRRARVRIKVSGHLCIKCSCDLVGWRGDLAWVASW

SEQ ID NO: 80767 - protein, 146 aa, Zea mays
  Coding DNA Sequence Number=SeqID_37392
MNKTPAFKMPLQTEPRFHLRGYEQPHTIGGPPEQQKTDERLVVARSSSGGDDDFCSGGPNSSSDDLGADAAAMRPSPMPSLERQGRAEGQRVGGQSVGGTGYLVGGRTSSSCRGGRRRRERLRSHSGQRTRHAAAASAADGERLSP

SEQ ID NO: 80768 - protein, 88 aa, Zea mays
  Coding DNA Sequence Number=SeqID_37393
  Gene Ontology: Mol. function=tRNA-pseudouridine synthase activity; Biological process=pseudouridine synthesis
  Homolog annotation: Hit_ID=Q75M65; Match level="QueryCoverage=70%, HitCoverage=15%, E-value=1e-20, Identity=77%"; Hit description =Pseudouridylate synthase
MGHTSGDVENLSRDPDRFYGFSSEGNIEPTVESEIFKALERAKRMVGNRKESCYSRCGRTDKGVSATGQELALCILPNPDKNDRQIRL

SEQ ID NO: 80769 - protein, 104 aa, Zea mays
  Coding DNA Sequence Number=SeqID_37394
MTSSSILAGVVVCGSPCALAYSSPCTLAYRSPLVAAEEDDKSFMFTCTQLKMVLENDQHSDVDGKSLYIEFLQEYEEKKNQSPKPRAADMETETDSTNCVGVHT

SEQ ID NO: 80770 - protein, 482 aa, Zea mays
  Coding DNA Sequence Number=SeqID_37395
  Homolog annotation: Hit_ID=P76481; Match level="QueryCoverage=89%, HitCoverage=77%, E-value=0.0, Identity=92%"; Hit description =Uncharacterized protein yfbK
  Pfam annotation: Domain name=VWA; Domain location=192-353; Score =61.9; E_value=2.2e-15; Accession=PF00092.19; Description=von Willebrand factor type A domain
NKESQQQQPSTPTEQQVLAAQQAAIKEAEQSAAAAKALAQQEVQQYSDKQALQGRLQEAPTFARAAKAKATHIANPGTARYQQFDDNPVKQVAQNPLATFSLDVDTGSYANVRRFLNQGLLPPPDAVRVEEIVNYFPSDWDIKDKQSIPASKPIPFAMRYELAPAPWNEQRTLLKVDILAKDRKSEELPASNLVFLIDTSVFVELLVKELREQDNIAIVTYAGDSRIALPSISGSHNAEINAAIDSLDAEGSTNGGAGLELAYQQATKGFIKGGINRILLATDGDFNVGIDDPKSIESMVKKQRESGVTLSTFGVGNSNYNEAMMVRIADVGNGNYSYIDTLSEAQKVLNSEMRQMLITVAKDVKAQIEFNPAWVTEYRQIGYEKRQLRVEHFNNDNVDAGDIGAGKHITLLFELTLNGQKASIDKLRYAPDNKLAKSDKTKELAWLKIRWKYPQGKESQLVEFPLGPTINAPSEICVFAQQ

SEQ ID NO: 80771 - protein, 78 aa, Zea mays
  Coding DNA Sequence Number=SeqID_37396
MVRPWHPGAAPSRDAASWPPARPSYLLASGIAARAQLGPDVFGLQVAMRLMVLGIDSGNGEDEAVEGDFQEFQDYDEF

SEQ ID NO: 80772 - protein, 48 aa, Zea mays
  Coding DNA Sequence Number=SeqID_37397
MYEMHPALFLKSGCDMKFVVAECVAGDFPEQQPGEGKCPLTHYVLLTL

SEQ ID NO: 80773 - protein, 292 aa, Zea mays
  Coding DNA Sequence Number=SeqID_37398
MAKPTTYQVPLINQLRPRDQKKKMVNRSRAWGLTDGAHESVAQGGPHARRERGRTLTGGARGSAVQREGREDKREEAARRGPSVGIVVNLSRAHGVGALARTGGFVWGRKGHGAVAVGWRAPARRCSAIAGVHRWLLNGEGRTGIVKENSSGGIHLGRGMVGGGALSGGGGQQSGTAEGPCRGGSGVQMARRRKSSDELECERAQLGWGRWDEESEVGREVGTCSDLKKGRSSGFTQRRDVGTTTSTCMCTACAGERLKEGRGLPGEAMGSVGQRQHAQRAGEGASTCVAQG

SEQ ID NO: 80774 - protein, 147 aa, Zea mays
  Coding DNA Sequence Number=SeqID_37399
  Subcellular localization annotation: CTP_CleavageSite=75; ConfidenceScore=5.28e-01
MNERKHREMEERKHKIGGPQTRRTPLSSSSLCSASGSRVSLPSPPGRAPSSCSLSSRAPGPSVPAPETCSSTIARLGAAPGGCLLSLRAPNLPESCAPWCLPSLCQTVSGLLPKAILPARRRPYPLFLPQRGFELLSHCACRTRART

SEQ ID NO: 80775 - protein, 104 aa, Zea mays
  Coding DNA Sequence Number=SeqID_37400
MAVIPARRRPYPLFLPQRGFELLSHCACRTRARTQLDALPARPSSSLLGPGHRAECLLTSCLLASWSPSSSALVQVVSTRSAVISSRLSAALVQIAAVEFHRRV

SEQ ID NO: 80776 - protein, 148 aa, Zea mays
  Coding DNA Sequence Number=SeqID_37401
MGKSKKGSGSSPRSGDKRKREPTPPSEDFGDSEYSEEEFSFESEGSPAPVSPPTSSDDSDDSQGIAAEVWTYIRVVERSRLEGSDESEYSSDEEDSSDSSEEDSGGDGGDGGDDGGDGDGGGDSGTGGDGGNKGDHGSGSKGSNKTSG

SEQ ID NO: 80777 - protein, 96 aa, Zea mays
  Coding DNA Sequence Number=SeqID_37402
MAESGCLLLAEAHSALLGHWGLTAAGLPSSDIASPNGLALHSGSTLCFHTELEDEAPADSASKTDVLLIDCSGDSDTGAEDTAFETAAAGVDAGSA

SEQ ID NO: 80778 - protein, 129 aa, Zea mays
  Coding DNA Sequence Number=SeqID_37403
MERMLNERLSTIGGRRLHHCDPEELNHEESGDENSGFSHEFDPFGDGRRGYGDGRHTNFDNLCGRRHAHGHRVRFEDEEFEDRDREASDENPFANDGMFGWHHHHQHANFEDSESYHGHRHRNDPNNIA

SEQ ID NO: 80779 - protein, 147 aa, Zea mays
  Coding DNA Sequence Number=SeqID_37404
MTRTELANPSETKNWQSAPHASQHAHPTGARKRLPVGPNVVYLTAYLLTLDAQYDVLAQHHRQMIARVEDAKKRNRQLHVDLTSTQARATALESREAIAVEALKQAKDEHVQKLMEAYLVTHNQRRALRIQEPASSNPVQSVRDEDP

SEQ ID NO: 80780 - protein, 82 aa, Zea mays
  Coding DNA Sequence Number=SeqID_37405
  Subcellular localization annotation: CTP_CleavageSite=35; ConfidenceScore=5.15e-01
MPLIKVYNNDSNTYGLKGHSTFKSDLRRQSMVPTVAMGAGPSGTANEGPDEELDLFRPPPSMNLADEQSPVAGNEATKDDED

SEQ ID NO: 80781 - protein, 607 aa, Zea mays
  Coding DNA Sequence Number=SeqID_37406
  Subcellular localization annotation: CTP_CleavageSite=43; ConfidenceScore=5.60e-01
MCPQPSQAESSPTRSKALPCGAGAGSHMSCRPAPSRRRQTAVRGARNRPAVTSDPPLLPRPTGERGGQPCRRHATVPSRRASPTPDTPAWRPRPTRRATGAPDAACKQLHRHLRHHRASSIAEPIPRLEATQRVTQQRQPDAAVNAAKGGPAVMTMAGAREQRSRRQPSSRPIRGQRESLLSRREDNAPVIRSSNGSRTRNGCPANYSPRRINSAAGQVALLAGAAGDASPSPKQPRQKRLRASLLIRGSKAGPPKGSTAASDRVGPTPTTGQRGSKAGPRRVHSRLRRRARDDQGYVRYITKARAALPSSPETPCSVPIEGNMALSPPSSLRKGDVGAARTRDRSRKTANSAPPDPGLGLGLGPRRRRTPLRPTQGSDSGSAPEDDELRFARPRARTRAQPQKMTNSASPDPRARTPPWPLPNDLRLARLRSSGSASAMEDRLNPGFGGASTSPDLGHRPATSTGSAIITLPRADSGHREQDRLRCSSDSHDITPAGCQDLFGCHIGMAFLEKVGRAGTRTGQALSRGRSLPSPAWTLVTPYCKRTRPGRGTNTKAVGFPPLSRPTPAASLPPFALAHALDPSGLGHAAHSLVGLGTPRSRNADTF

SEQ ID NO: 80782 - protein, 41 aa, Zea mays
  Coding DNA Sequence Number=SeqID_37407
MDQEVHPNRLALESNSNSAQFRPNKQALKEFRDGQRTSQCF

SEQ ID NO: 80783 - protein, 87 aa, Zea mays
  Coding DNA Sequence Number=SeqID_37408
  Gene Ontology: Mol. function=heme oxygenase (decyclizing) activity; Biological process=heme oxidation
  Homolog annotation: Hit_ID=Q94FW9; Match level="QueryCoverage=64%, HitCoverage=30%, E-value=9e-25, Identity=94%"; Hit description=Heme oxygenase 1
MMLVDIFSVQKSKTTCSSIISYHLTHYHVLLLEFYKWEGNLSQLLQNVRNKLNQVASSWSREEKDHCLEEMEKSFSYSGGLLRHIFT

SEQ ID NO: 80784 - protein, 185 aa, Zea mays
  Coding DNA Sequence Number=SeqID_37409
MASKQNSDRGRARRFRGVRPPVCEAHKVEDDRGKASVQVHRVGGVLMRENTSGDGGGLGGGRARSRSCSWEPAEGWSSGRQSRIEASVRQSSALRWGEGRERDWKALVEVSDLLVPHTDHLERVEDDGHAAELHDGVGRPSASSDGGMENSVGEDLVPLGGVREANPNVTIVALSVYNQIDKNIK

SEQ ID NO: 80785 - protein, 98 aa, Zea mays
  Coding DNA Sequence Number=SeqID_37410
  Gene Ontology: Mol. function=protein binding; Cellular component =membrane coat; Biological process=intracellular protein transport
  Homolog annotation: Hit_ID=O81742; Match level="QueryCoverage=83%, HitCoverage=11%, E-value=4e-34, Identity=91%"; Hit description=Beta adaptin-like protein
MPQRLMLIFVPKAVCAIGRCAIKLERAAERCISVLLELIKIKVNYVVQEAIIVIKDIFRRYPNTYESIIATLCESLDTLDEPEAKGIFWVAIKHVKNE

SEQ ID NO: 80786 - protein, 598 aa, Zea mays
  Coding DNA Sequence Number=SeqID_37411
  Homolog annotation: Hit_ID=A2ZPB5; Match level="QueryCoverage=87%, HitCoverage=55%, E-value=0.0, Identity=81%"; Hit description =Putative uncharacterized protein
MGEPLLASLSMENSNSHPCTLLSMDPAGSHLASAESSGGGSAATNGVGNGVDRELFVIPRRESAHPVPPDINLPLSADHSPLPPSWSLDTFDILDVTLGTHNYESEVALTLPKPTGNGNGSAAIGVGARKYAKRGDSIWGAWFFFNNYFKPALVEKSKGKMVRDASRNISGFDKSDLRLDVFLVQHDMENMYMWVFKERPDNALGKMQLRSFMNGHSKHGEPSFPFSADKGFARSHRMQRKHYRGLSNPQCLHGIEIVASPNLSAVPESDLKRWAELTGREHNFSVPSEASDFESWRNLPSTDFELDRPHPPAAKSATHGQKKGLNGSGLNLSTPPSSDDGMDLSPKCAKRRKDFFGHGVEEDCVMANNSCSDREQEAEAHTGEPSWMHEFTGVAKHASGPVTAAKTIYEDEEGYLIVVSMLFSDPHSVKVSWRNTLTHGIVKITCVSTARMPYIKKHDRTFKLTDPFPEHCPPGEFVREIPLATRIPEDAKIEAYYDETGTGLEIMVPKHRVGPEEHEVQICLCFVVRSKAVLPMARLKQASESRLWIQEQPKQILKRIEIGRDTSMYVVSDACWKSANPAGTGGLRVCHHEDQLRG

SEQ ID NO: 80787 - protein, 140 aa, Zea mays
  Coding DNA Sequence Number=SeqID_37412
  Homolog annotation: Hit_ID=Q6QP51; Match level="QueryCoverage=100%, HitCoverage=86%, E-value=2e-07, Identity=28%"; Hit description =Putative growth-regulating factor 1
  Subcellular localization annotation: CTP_CleavageSite=83; ConfidenceScore=5.72e-01
MGAIKVKAQSTQGTQSRLARAQPRAKATDPGGFTSRPRAPSSNGHTFGSPEAQSSQRSNLGQIATPTDRIAGAFNPRPRKTVSASPDPGLGLDLDLERWTPPRPTPGLGLDLDLGGASASPDLGLGPTTSQGGHHYPTPS

SEQ ID NO: 80788 - protein, 116 aa, Zea mays
  Coding DNA Sequence Number=SeqID_37413
MRYKSCLSQNAHLLVPKCALPLEASEEEDQEDEPPQEEGNDQGGDAKDQDKEDEVEEALSRFGLVDGDARGAQQLHEEMRKLSGVFRNKTILTWGWWTREQFFDLVAKDIPKVERF

SEQ ID NO: 80789 - protein, 183 aa, Zea mays
  Coding DNA Sequence Number=SeqID_37414
GRAEPELYLPYGPAGHLLLQRSWERALTGLAEGADFDNAWPSGRKRRQLQHAWFAGSAGSGTASGATSHRWAECGYLPTIWAAVAPRAPGDRPRRRALLGRRSCSWAVLPVLRHDASARRSVLARPGGLEWGSAGRQVAAVVGAEVVVAAVGVGGGEPLGVRRPRGPPAVFLPHFEHQDSPVG

SEQ ID NO: 80790 - protein, 106 aa, Zea mays
  Coding DNA Sequence Number=SeqID_37415
MAGGIELAGAKGKGLAGEGTGSCSVTKVPVSECLVPRLSCAKNRVKRIWFEFKLSQNVFKRTQMIFEKRKTLRDTGVSQPSPLKGISSRDSGQSPPGVKRRVRLNG

SEQ ID NO: 80791 - protein, 72 aa, Zea mays
  Coding DNA Sequence Number=SeqID_37416
MEHRPGLERLLETTHLELDGKLFVNTQQAPTWRANCRRFDPRGSLDRRSERFWHPVHVMSWPSEESWSPAEG

SEQ ID NO: 80792 - protein, 207 aa, Zea mays
  Coding DNA Sequence Number=SeqID_37417
  Subcellular localization annotation: CTP_CleavageSite=53; ConfidenceScore=5.53e-01
MGAIKVKAQSTQGTRSRLARAQPWAKAADPRGFTSRPRAPSSNGHTFGSPEAQSSQRSNLGQIATPTDRITGAFNGSDTASASEDGLRIARPRARTRPQPRKTDSASPDPRARTQPRPQKTVSASPDPGLGLDLDLGLRLARPQGSDSTSTSEDGLDLDLDLGGASASPDLGLEPTTSQGGIITLPLASSGYGEQDRRPIWLAPVNK

SEQ ID NO: 80793 - protein, 195 aa, Zea mays
  Coding DNA Sequence Number=SeqID_37418
MQPGCSLPPVVIYKDDHQPHGGEKRAVLRPPPTLSFKDVHHPLGVEGEPSRGPALRMGWRTGARTFLHALRRPPSPTDRPGLQGRTSPGWCTRVCYLVTKGREIRPLRLAPMDRTYRDAPAPGGGTSSVIAGRSPLGRRIPVTLKRPSQPRESCGALLGLVLAVGLGPDPGFPSAFDEGALVFGCGHFYMNLSGV

SEQ ID NO: 80794 - protein, 124 aa, Zea mays
  Coding DNA Sequence Number=SeqID_37419
MAEERELPGGETAGGGDPDMDPPGEHRRASSRGSGGGRAWQISPLVPQSVAGKSPPMRTKAPNLWHGGPTLRNSRKEHATALLLYALPSPPQLAVKKANRHTRSMQPPCGYMPFHLHCNQRSRR

SEQ ID NO: 80795 - protein, 247 aa, Zea mays
  Coding DNA Sequence Number=SeqID_37420
  Gene Ontology: Mol. function=protein binding; Cellular component =integral to membrane; Biological process=positive regulation of growth rate
  Homolog annotation: Hit_ID=A2XR87; Match level="QueryCoverage=80%, HitCoverage=77%, E-value=9e-74, Identity=70%"; Hit description =Putative uncharacterized protein
  Pfam annotation: Domain name=PTPLA; Domain location=55-220; Score =142.4; E_value=1.3e-39; Accession=PF04387.5; Description=Protein tyrosine phosphatase-like protein, PTPLA
MAGVGSALRRLYLSVYNWVVFFGWAQVLYYAVLTLRLSGHKAVYAAVERPLQFAQTAAIMEINSEISSAIVRVCVLPTWRLVGEVSGLCNSSTDWIQTQSHLLVTTLVISWSITEIIRYSFFGTKEAFGFAPSWLLWLRYSTFMLLYPTGISSEVGLIYIALPYMKASEKYCIRMPNKWNFSYDYFYSSVLALLIYVPGLSLMMMWFFLKNNSKLLARAVGEILLDQVPLTLVAIMHAVKFVAVMLV

SEQ ID NO: 80796 - protein, 78 aa, Zea mays
  Coding DNA Sequence Number=SeqID_37421
  Homolog annotation: Hit_ID=A2ZPA5; Match level="QueryCoverage=60%, HitCoverage=24%, E-value=1e-12, Identity=76%"; Hit description =Putative uncharacterized protein
MGKRDFERLHHVAFFEAMATELPDEYASQEVNHLTLSYFAVGGLSLLRELDREQTSDDRPLSMGVPGIRRKKRSIQSS

SEQ ID NO: 80797 - protein, 158 aa, Zea mays
  Coding DNA Sequence Number=SeqID_37422
MAPLWHGRFEPKVGRGGDSFEVEAESELGGRARRRPLSEVEAESEPGGRARRRPSSEVEVESEPWGRVRRRPSSEVEVESEPWGRARRRPSSEVEVESEPWGRARRRPSSEVEVESEPWGRPHPGRWHSSRSSAGGAVFLSGQSVEGRSDCGHFGLVV

SEQ ID NO: 80798 - protein, 133 aa, Zea mays
  Coding DNA Sequence Number=SeqID_37423
  Homolog annotation: Hit_ID=Q6QP51; Match level="QueryCoverage=45%, HitCoverage=39%, E-value=8e-15, Identity=53%"; Hit description =Putative growth-regulating factor 1
LAPRKGSTAASEHSGSTPTTDQGFAGWPLEGFDSRPRTRRARDDSGYVRYMAEARATLPRKATKGHMKKAKSALDRPLALCRGSGAALANPAPAKPLTASTYQPENSKPDYAPGQRPVRMREQPDRPRHHERH

SEQ ID NO: 80799 - protein, 55 aa, Zea mays
  Coding DNA Sequence Number=SeqID_37424
MSRYYAKKEMVTDDKPATSHGKAPSGESRNKGKEKESSSLKSHRSGDKKKKMRKV

SEQ ID NO: 80800 - protein, 162 aa, Zea mays
  Coding DNA Sequence Number=SeqID_37425
MAVVSPTAGGGIDDVFLKGKCVLGPFLRKIQLKMPWLEQPKYAQSRSTGLSGGAPDSVRWCTGQCPVRQAGSGKKAALGTSTAVYGYNSPDCPVVHRTVRWCTGLSGGRFTGELVALGNSSATYGYNSPDYPMCTGLSGEPTVGRANGRPRNLRGTRGRANG

SEQ ID NO: 80801 - protein, 164 aa, Zea mays
  Coding DNA Sequence Number=SeqID_37426
MDSEGRAAKGVHGRGLGFPALEESLHVSREGGHERRGEGEAGARVQGAEEQGARARRRIRRALGCSAAMGGGEQSWCSAMEMRVRAWTVEGKEGAVPAAKPEGGALERIVWALGGGGAMAAGLLPARWREGREEAPCAKEEEDREVGWRREKRVQQNFLVNYAT

SEQ ID NO: 80802 - protein, 50 aa, Zea mays
  Coding DNA Sequence Number=SeqID_37427
GDIEQSEIPECVVGYLPEQQPDDDEEDGYDYAYGNGNGKEEGVKADLQEF

SEQ ID NO: 80803 - protein, 46 aa, Zea mays
  Coding DNA Sequence Number=SeqID_37428
MTQLFEFYEAEDPEHLFDDDEEDGYDYAYGNGNGKEEGVKADLQVF

SEQ ID NO: 80804 - protein, 72 aa, Zea mays
  Coding DNA Sequence Number=SeqID_37429
MRGNPGCAIGLQTPIAGAPDEEGILHRIADPSVIKLSLEISEKAGTRRQIAEPPAPQAKTTFRKSRVENSLA

SEQ ID NO: 80805 - protein, 113 aa, Zea mays
  Coding DNA Sequence Number=SeqID_37430
MNLEEMEPELRPYYERKKKELGDGGASGSGTVTAALGLGDSALGLGDGGARARGRGRRRLGSGTAAHSALGLGDGGARARARGRGHDGSLAAQLCQLGREELGFLPTNKPFIL

SEQ ID NO: 80806 - protein, 46 aa, Zea mays
  Coding DNA Sequence Number=SeqID_37431
MEIEIRIKVWYRSLEDMVAGVTWPSSLPPGWTVEWDPTSAEEEHEE

SEQ ID NO: 80807 - protein, 370 aa, Zea mays
  Coding DNA Sequence Number=SeqID_37432
MGSTHVAFVLLLLEERNFVEVGTFQPSFSFKDFHQAAWPHPSPMVTQEGDHRFDGGEKLAGLRPLPRPQLQGSSSSLLGRRARRARACLRVGWRPVFPSGIWGWKPSSSSARRRPPAMRGKANCCCLARVQHSVLCLSDYGRSHRGVSQHVVRREGSTRVLGRSRSCFRGKDGSEDLSVRFGAAGARRYGVGGQVDAAVGADVVAAGEGFSTDEIVGVTCAPGLRLFGFNGWFSSPVRGHERKPSSGSVRPGAIAAVAEVAGKPPGRRRSRSARSALPLKASLAQLRKPRLLCDELEPEAAASAWTEAESARKGGFVGPEAGGFLGRGGALPTSSFEVEILPPVSPSEARPNPAEGGNNAKGAVVPSVDV

SEQ ID NO: 80808 - protein, 147 aa, Zea mays
  Coding DNA Sequence Number=SeqID_37433
  Gene Ontology: Mol. function=sodium:dicarboxylate symporter activity; Cellular component=membrane; Biological process=dicarboxylic acid transport
  Homolog annotation: Hit_ID=P0AFJ0; Match level="QueryCoverage=89%, HitCoverage=37%, E-value=7e-48, Identity=78%"; Hit description =Putative permease perM
MGDSVVKISLASLVGLLTIAVYLVLVPLMVFFLLKDKEQMLNAVRRVLPRNRGLAGQVWKEMNQQITNYIRGKVLEMIVVGIATWLGFLLFGLNYSLLLAVLVGFSVLIPYIGAFVVTIPVVGVALFQFGAGAGRQPVSAGVVLRSG

SEQ ID NO: 80809 - protein, 176 aa, Zea mays
  Coding DNA Sequence Number=SeqID_37434
  Homolog annotation: Hit_ID=A2Z9I4; Match level="QueryCoverage=46%, HitCoverage=10%, E-value=3e-12, Identity=49%"; Hit description =Putative uncharacterized protein
MSESSPVRHRASVYGGTSAPPATSSVGRKRGMVSEEEEVVVAIAMDGVGDWELAWGFGRRPKGDWGITYSTPPLGALSVTNVKLNNDKEFQGKSLFKPRNNSATNPQLLVYLEANSFDASRGCIMLRCAEVTSKVVLYKSRDIMGPGMNALAVGAPSDSHTELYEDGENRDTKRIR

SEQ ID NO: 80810 - protein, 101 aa, Zea mays
  Coding DNA Sequence Number=SeqID_37435
MQVACNRTARAHPFGFVAFSMEAQAHTSCNRRAGYYVQETAPPLVPMSRLLDCGTGAATRGNPAHGPTVPIEHNDHGSGPGKGIFRKGSFSAKEAGSEPSY

SEQ ID NO: 80811 - protein, 93 aa, Zea mays
  Coding DNA Sequence Number=SeqID_37436
  Gene Ontology: Mol. function=small conjugating protein ligase activity; Cellular component=endoplasmic reticulum membrane; Biological process=regulation of protein metabolic process
  Homolog annotation: Hit_ID=Q10MI2; Match level="QueryCoverage=89%, HitCoverage=26%, E-value=6e-40, Identity=92%"; Hit description =Ubiquitinating enzyme, putative, expressed
  Pfam annotation: Domain name=UQ_con; Domain location=13-91; Score= -4.1; E_value=6.9e-05; Accession=PF00179.17; Description=Ubiquitin -conjugating enzyme
MAKYNRSNPAVKRILQEVKEMQSNPSPDFMALPLEEDIFEWQFAILGPRDSEFEGGIYHGRIQLPSDYPFKPPSFMLLTVTAKFGKSESFTVK

SEQ ID NO: 80812 - protein, 241 aa, Zea mays
  Coding DNA Sequence Number=SeqID_37437
  Homolog annotation: Hit_ID=Q6JAD6; Match level="QueryCoverage=100%, HitCoverage=60%, E-value=2e-18, Identity=42%"; Hit description =Putative uncharacterized protein
MDSWLLAQRDPAAVPLFNTRTQESFFRVHQLLDLPVFLSVVSAESEGHLSYLPGFLSLLTSGGRYIEEWFGLYRPAPKDTVPAPAPVPDLRVEDEAIRQFEAQGAVADTSSDDDEDLGIPPPPLVPPRSHNHEVVSSSVALAAPLAIDPALAAILQSLTQQQAHMVAEQARQATEQARQAAIQQQLSKRMLSMFQTIQDRQDTLQQQLLADRVKHRAFMTHILQHTNVQLPPMQSAPPLAL

SEQ ID NO: 80813 - protein, 235 aa, Zea mays
  Coding DNA Sequence Number=SeqID_37438
MFQLQMSKEYAEQRQQYEDRLNMLRQEAKAEIDSLEKSIDGQAGPSSSFDDIQFPAESDDDINNLTQPIRLSQDEVSIGQADFSEFQRMIFKRLGDRVLKKPREYISPFKIPRNRPEILLAKAVALRRKIASDPELKGQADFSEFQRMIFKRLGDRVLKKPREYISPFKIPRNRPEILLAKAVALRRKIASDPELKRLRYERRLYAEGPKKHLPFARIATFNDKWGLSTFNASSV

SEQ ID NO: 80814 - protein, 134 aa, Zea mays
  Coding DNA Sequence Number=SeqID_37439
  Homolog annotation: Hit_ID=Q1RFC5; Match level="QueryCoverage=58%, HitCoverage=44%, E-value=2e-36, Identity=89%"; Hit description =Putative uncharacterized protein
MVTRHQRISADRQGLFLGDIEKCAIVADAQFDIKTRTSYTVKITGNQGELATCHTLCLSRANHRCCFIEYAVDELMAVFCAERFRQFDRFVNGHFVWHIATFRQFVQRNAQYCFFYLSQFFQQAGQVWLHQFVE

SEQ ID NO: 80815 - protein, 133 aa, Zea mays
  Coding DNA Sequence Number=SeqID_37440
  Gene Ontology: Mol. function=phosphatidylglycerophosphatase activity; Cellular component=integral to membrane; Biological process =phospholipid catabolic process
  Homolog annotation: Hit_ID=P18200; Match level="QueryCoverage=100%, HitCoverage=77%, E-value=1e-78, Identity=100%"; Hit description =Phosphatidylglycerophosphatase A
  Pfam annotation: Domain name=PgpA; Domain location=1-124; Score =196.6; E_value=6.2e-56; Accession=PF04608.4; Description =Phosphatidylglycerophosphatase A
MGSLAAIPFWYLMTFLPWQLYSLVVMLGICIGVYLCHQTAKDMGVHDHGSIVWDEFIGMWITLMALPTNDWQWVAAGFVIFRILDMWKPWPIRWFDRNVHGGMGIMIDDIVAGVISAGILYFIGHHWPLGILS

SEQ ID NO: 80816 - protein, 108 aa, Zea mays
  Coding DNA Sequence Number=SeqID_37441
MARTRAYKAPRDFDRTPLHALDLTEAQTHQRLPVHGVSVAARSPYHHRPANRTLPNPVQPSEKAEHTSVKLPEQGIGVCFAGEASPWSPDSTRPPPLRHPGELTVPLD

SEQ ID NO: 80817 - protein, 139 aa, Zea mays
  Coding DNA Sequence Number=SeqID_37442
MGDPVHSHRSHALPLPSHWIAGPTEQPLNRVGATRLPMHGDYLLPLYSSRTCLPSLFTSPKPNQALAPGRRELCSPRMPTASTIDKRGSVLALGSRKGVAGEVFAGDWEESTTEASRIRRRRLSSAAHHGELWRFSESR

SEQ ID NO: 80818 - protein, 92 aa, Zea mays
  Coding DNA Sequence Number=SeqID_37443
MATQIQELEDQIGARENTIEVLEDQLLTTQQQIEEANQHLDMHHHKIQDMEAEGVDEDIDIEEGQEPEPASSLDTAGSGRPPSCSNLLSWAG

SEQ ID NO: 80819 - protein, 58 aa, Zea mays
  Coding DNA Sequence Number=SeqID_37444
MQLVDDLKNDGHDQWMLAKRGRSDRIHFVAPLTDLTGIQRRLPCSDCRATRQSEVNSG

SEQ ID NO: 80820 - protein, 585 aa, Zea mays
  Coding DNA Sequence Number=SeqID_37445
MRDAGPVDFVGGPVRLSHLVSKTSLDGGDAALVRNGPVGVFEDMQQLGYFGNGIGRVLGAEEVPEPDGELVVFEAFFTVGLRLPAHCFVAEVLQRFEVQLVRSPAFSLDLHGRDPAAFVCEVEDGAMRIVGRPRGKDVFAQAPGVFGANVEVMEKDRHDAAWKHRAVTRVGDPFREAKKAPSKSSAGARATAIGVGKSPRPSPRRSKGRRRRVRCGAAGCCPDSGGSHFANGGGWDQGLCVPAAEACVAVAEACGRLCRPCCVGCLDFGVAQAEAKLAWVEASLARQRAEELEARLSGLHNRVDKTEASTRVEEELGVLPSIVMGLMSFASLVTCEGAVNALSREGCGHFEVFNQSDEGFEHKIFQVEDPVLKRSAGSLFDRMWGPHGRETMAHHEEVEDLDDLDSTLPEASGVELASPSDAGEGPSAIPAPTGADEDPAPAPVLTGEDASKAVPTFGPSQATAAGNIDFVAASTVVPADDSLFGSVSECFESDGEYGSSFPWTEESSDEGLDYFVVLDVAAAETSPSMEGAGDLANRVGKRELLSSPIGASKGEGDLRNLFEGEELRIMLFNYREMGIIPKVEL

SEQ ID NO: 80821 - protein, 177 aa, Zea mays
  Coding DNA Sequence Number=SeqID_37446
MAIISKIWGQSALELDLSLRCLMLDAESLGTKLIRSSAYHPQTDGQTERSAKPASLHTQTTKEPERKRSLNGIMAIISKIWGQSALELDLSLRCLVLDVESLGTKLTEVQLTTHRLMVRWKGWVECEGKREGGRARRPETGVREVGIPRPSCSSHAQVGRKERIQVYNGRRSRVLRV

SEQ ID NO: 80822 - protein, 197 aa, Zea mays
  Coding DNA Sequence Number=SeqID_37447
MEPGGGTDVGAVESLLTSSCFRKGAESRRRHRAGRCGSSSEAEVESVFRGRGRVRALGRAERSSSSSGAEPEFEPWVGRSGVHRLLGLSPSPSPGSAGAEFAVFRDLARVRALGRAERSSSSSGAEPESEPWVGRSGVRRLPGLSLSPSPGSGGADLPMAPLAGPDCLSVSLCQVAPQSEWRWRRCPSVRPVSGAVK

SEQ ID NO: 80823 - protein, 99 aa, Zea mays
  Coding DNA Sequence Number=SeqID_37448
  Subcellular localization annotation: CTP_CleavageSite=28; ConfidenceScore=5.64e-01
MPPSPSGGSAAAPSAAAIATGATTSSVRVSRAGGPGQVNYELGHSKMSWRRVKEMESLGFFPIGCCQVVGAETFLRPNGEVLVLRAYSLLVFAFSATIF

SEQ ID NO: 80824 - protein, 69 aa, Zea mays
  Coding DNA Sequence Number=SeqID_37449
MDKIKRIEVPKAKVAKRFLQEVKVDQAEKRHEEVSFWSLFEVKHENYGEDEKVIGRCSRKFKLNGKKKD

SEQ ID NO: 80825 - protein, 388 aa, Zea mays
  Coding DNA Sequence Number=SeqID_37450
  Homolog annotation: Hit_ID=Q6JAD6; Match level="QueryCoverage=73%, HitCoverage=59%, E-value=2e-41, Identity=59%"; Hit description =Putative uncharacterized protein
  Subcellular localization annotation: CTP_CleavageSite=6; ConfidenceScore=5.13e-01
MDRAARAAAAAAAVAAQAELGDQPQTPSDQIVYRVRRLASRPRSSTHTTASTPPPTLPAPVTPVAPSTTTAIPSTSTTPASTAPPPAPASAPPIPPPRFRERDETEVRPLAADPRLFDLQRATAARVRRFRYVPVESWLPAQRDPAAVDLFSTRIQESFFRAQMSAQIALRVHRLLDLPAFLLAVDADSEVHLTYLPSLLTLLTTSGRFASSLDFTSRRLDFTAYDTAPLTLLVALTALIRPPQFQGTLEASRLVFGSYRPVPEAPVPASAPVFDSQVEDATPNQFEAQDASVDDDDDDDFGIPPPPPPPMPPRSHDHEAGSSSATPAAPRAIDPALASILQTLTQQQAHLAAEQPRQAAAHQQLSERMLSMFQTIQDRQDSLQQQLL

SEQ ID NO: 80826 - protein, 106 aa, Zea mays
  Coding DNA Sequence Number=SeqID_37451
MPDQNEPHSPESSGMPPSAMDKIREEMTGLFRDTLESSLEHPRKGNTPPWSSQEPSAHYEMILCHSGAVDPSRPLTNLSRVTNKIFTVITELPTPPSRLGDADHQE

SEQ ID NO: 80827 - protein, 416 aa, Zea mays
  Coding DNA Sequence Number=SeqID_37452
  Subcellular localization annotation: CTP_CleavageSite=2; ConfidenceScore=5.36e-01
MSSSSLMRRVFPSLKPPDGGYPPPFRLLVGGTQLHGSWYLSAIVRLQGFSSRSLVAPSRRWSPKTVTSSSWMGRGKPGCGPALSIGCVRHPRWGGGRGEPGLYLMCGSANHLLFQLLVVAIALPCYDGVILQSCRGRRTVAVQLGCNIPSSPSHSRRGRQRGSTGALGSGPLFGFDGLFASLERDPEQEPSGGRVHPGPRLLLQRSLASLPAFVTPQARGHSYPRGRNRSSFCDGTLNASVFCSLWLPGPEHPTPKSISRGLGSGWRPWKPVGRGPRGNRPSRLLGPDSRRSPWTTSPSEAGSDFAEDVVDAEGAMAPFSVKTRACRIRSSCSVCLLRPPRPEKHTLAALAKLRLFSSCFEHLDSVGNRDVCVSESCFSRKGRVRYPYPRGVGIPRLGRPCRLRVLSPVHEALSPT

SEQ ID NO: 80828 - protein, 117 aa, Zea mays
  Coding DNA Sequence Number=SeqID_37453
MPSSRSTSSRHCFMAPGEAVELGGCRINSLAADNAPGAALYACTAAVPGTGRLGTCGVEETSSSSTRKFFDVSARCSTICTIMLSEDASKNLMPSPLPGAPNVGEGILRPGGGVHPP

SEQ ID NO: 80829 - protein, 214 aa, Zea mays
  Coding DNA Sequence Number=SeqID_37454
MAQPPTWGPRPTCHASGVPVPEYEEGEPSCEECTPAYGSAPLRLRQNQQPSPWHKGPGPPVILLGRRFLGAEKSHRRSRQYHASSGPPQKTEKVNFQNQYNGIEAPRTWPNENHQVRKSRVMCRLSIYCDLSTQLAGGVPVQAIAKQYAHAARCTVSIITYALPGKLTMHANTTQIADVRVQEDCSSKLQVLNPLYSWAHMSGLSTLIRAPLGL

SEQ ID NO: 80830 - protein, 536 aa, Zea mays
  Coding DNA Sequence Number=SeqID_37455
MDYSAPAGSRWKLAPGSLTSGGDHLYSERPPLHQRLTSNGGHLRPGGLPATAAITMHTKRSSLPSSYGGEEKTIQERGRHLHGVRRLVRPPGRRRNSAAGGAEDTMDVADLRTARPSPVRWTDSHAPISGRRQRRRRHQSHQSQRDGAAARLASHPKKLGRAWDGAVAQPAAHLHEAGPSNSCTKKDGIDGTNSLESLETKNTSSSAERLGTLEMKSQGHGKLWRHKAGTLKAKGRRELEGERAPRVGEKQDMVATQRVNPFLKADFPARAPKHHGQEKSQRHSCQYRASSRPSQKTEKINSQNQCSNSRHPAHGPTKTLSAEVTGQSAAGAGVVVGVTMGEPAVTASTSAQEQRANRQSNFGPTCRLASSPEAGPGPLSDVSVEPDLREGAPDPCTPNKDPRLRPETPKRRPDAATWLVARDISQRVEPDVRPLDRADSAYIAERTRRLSTLLTGDVPPQHLLRPVHSAGRRRQGHPVDGAPVQSTVETVRPCCAVHCTHHPLYEKLPPARQGYADLGAGALRHPAGEFPLRQIA

SEQ ID NO: 80831 - protein, 263 aa, Zea mays
  Coding DNA Sequence Number=SeqID_37456
  Homolog annotation: Hit_ID=O48967; Match level="QueryCoverage=22%, HitCoverage=12%, E-value=4e-16, Identity=79%"; Hit description =Putative uncharacterized protein
MAVVGTLNQGYPLLQYEGTVPVRQSLVTRMQSVGPDLHEEALDPCTHSPDPEYGPRLPSKRAGSLGWGPDPSELNPMRLRSPLKRRPDAATWLVACDVMCHLSIYCDLSTQLAGGVPVQFIAKQYARAARCIVFVITYALPGKLPLHANTTQIADVRVQEYCSSKLQGDFVVEEEAVSSVPRVSNLPVSGAAARVAVPPSKLHGLVRGHEAVTDDLRAELNHGRAGEDARISLERARKRRQNIEGRNLDQDFAAVAPQAPMGT

SEQ ID NO: 80832 - protein, 311 aa, Zea mays
  Coding DNA Sequence Number=SeqID_37457
MVCRLLGWDTSAFGGRICAGTILPGEFAAREFVLFLSSTSPAGWCYRSCLSSGGGARPRGGGALPPVLGFKDVHQPCSGGERAEPRLRLSHELVTRLFLQHSEEKDDHQPCEGWRGGRLRWRAARSRGGRRRWRAIGAEVVAAADEPLGAEVVAAAGEPLGASYPRDPTGVEVVHTCRVEMELGLRLKADIILLLFVRLDLSRLQTSIPKKELAMAPRRLTVRDQAKRLHGSGPPQETSFRVRDQAKRPHRLWTTPWNGLSFFRTGPQAIGPSCFCREVLNYQQAGLMRADLTGAGVHRCSSGQEEVLLQS

SEQ ID NO: 80833 - protein, 349 aa, Zea mays
  Coding DNA Sequence Number=SeqID_37458
MDKIELKFYKNLDKCVFKGSLAGSTGPTSATPAPVPNANNEEEQFSYQLSGLEDLPSDDSVGLFNDNIIPQEVHFPQEEAPNNEDVVLALPVFPPADLILEGNNDQGEENMNVEENINVGCMQHFEQPIHDPAYEDYLARKHFSSWAEMFPTNSEFIRVPKMWAAFFMGLLLRSYSFEWTKKFLLSGALSAFVEPNMETVPIKIPSKCLLPPSQELHKESQFASPTDVVNRKKHSILVDTEVRMSARLREKARGFKSYSGIRKNCLCCARPSPPSISHKIIKKLGAEFCKVDPSKLCPDALNSSRSSSSTIQRPHSSSSSRVELRATPEDQRDESEDDDDAGPRPPAGM

SEQ ID NO: 80834 - protein, 46 aa, Zea mays
  Coding DNA Sequence Number=SeqID_37459
SQYHKPFLLTDIRPVNKYNGHRIARTDKASMPTVTAKFGKSESFTV

SEQ ID NO: 80835 - protein, 231 aa, Zea mays
  Coding DNA Sequence Number=SeqID_37460
PRWVERVGERKGGRGEVAGVERERGGSPAAFVFVPRPGQGDVGVPPKPRLSLPSVAVAEPEPWGRARRKSFGRDQGGVRALGSGEAEVVRPRPGRSPSPWGRARRSFVVFRPESEPWGREERSFVVFRVLAQVRALGSGGAEFAVFRVLARVRALGSGGAEFAVFRVLARVRALGSGGAEFAVVPLAALSFCQTGQWSGGVTAVTSALPGARVRMKLYADGGYQLRIRRLK

SEQ ID NO: 80836 - protein, 44 aa, Zea mays
  Coding DNA Sequence Number=SeqID_37461
MSHVFEDYYIKDCGVISAPEMPHRRTSSNDQFIILATIRITNGL

SEQ ID NO: 80837 - protein, 352 aa, Zea mays
  Coding DNA Sequence Number=SeqID_37462
MDGGRRRHTLQDNLILQARVFTLEGGCSTLGIDDTFSEGPRPTIFQGRQPGPRPRLVRTTPLRGGGPAEQQKTDERRAVTCSSSGDDDDFCSGGPNSGDTDLRADAAARRPPPMPKLVRQGRAEGRRVEEEPLQAAVADAGAVSGSEATRVREPGTVQLPSATDDDRPSLRSLSEGAGRRPRGGRPQLGTLPSPALVMKILEAEGGAGAAARLAFPHHQAGGHHLGQLHRHLRHHRASSVAEPMPWLEATQRTTQRRQPSATVNAAESGPAVMTVAGEREQQSRRQPGSRPIQGQQESLLSWREDGAPVIRPSNGSRTRNDRPANHSPRRINSAAGQAALLAGEAGDASPSP

SEQ ID NO: 80838 - protein, 470 aa, Zea mays
  Coding DNA Sequence Number=SeqID_37463
  Homolog annotation: Hit_ID=A2WLN4; Match level="QueryCoverage=14%, HitCoverage=55%, E-value=9e-20, Identity=65%"; Hit description =Putative uncharacterized protein
MEDAEAGAARKRKRGGAGEEAGGGAYDGKEKELLGEDGDDGRYEGIAEEAVAEVMRWLEAEIADDSAPQPAAGFVTINGNEESCGPSFSAAASTVMASVDTRAGAPPPPPVPWPWPEPDPEPERVVPAPGVGVDVAAMEVEAGTGTGGEAADEEWLARLLTCGALLEGVYANSPAGTGSGSFWRGSLRRFQVFCSARFVVRSCMLRDCPLEPVFTLLSGRVQQLHDAQIPFRTHQEAQPASTTVHAPGPFSVDCCRAARPGRSRCRLTGLPTPAARSIAPNKPKTGPEGSSTPVHGATCQVVRPTISIDPSAGLLLLPLSRRTRCRVPGHLRPNPYAPCAPQVLVLLLHPHSPWMRKDAAAPQQTRTLCWISRSRQPGLLASAAFGQTPQACSCSLQPTPTLARHTGLSGGAPDSVRCARLAGGEPAALGKTQRHTAIIHRTIRRKERIQVYNGDVAECYVSSGERELAP

SEQ ID NO: 80839 - protein, 56 aa, Zea mays
  Coding DNA Sequence Number=SeqID_37464
MAEYRQRATAIQRAMVDSAKVNSVAIVPRRSQSRKSEGHRTVRCRKKTKLQWSTKL

SEQ ID NO: 80840 - protein, 200 aa, Zea mays
  Coding DNA Sequence Number=SeqID_37465
MRRAAWPTVHSPYVRLRPLAYVTGRGPRGSIGSPPGWGAEPYRMGPRHVSVLDPYLVFDQGLSIFCPGASGPRYELATLGKIESCSAIIHRIVRCATRLSGESAGNGYPVRNGRLCKSEQCSYSATQKSEQEVRGAPDCPVWHETVRCRKKTKLQWSTELQTLTVGDVVAHRTLNNECSVAHRTVRCAHHNSLPNGYLGG

SEQ ID NO: 80841 - protein, 786 aa, Zea mays
  Coding DNA Sequence Number=SeqID_37466
  Gene Ontology: Mol. function=nucleic acid binding; Cellular component= intracellular; Biological process=regulation of transcription
  Homolog annotation: Hit_ID=A2WLN2; Match level="QueryCoverage=57%, HitCoverage=91%, E-value=1e-125, Identity=56%"; Hit description =Putative uncharacterized protein
  Pfam annotation: Domain name=RS4NT; Domain location=141-178; Score =13.6; E_value=0.039; Accession=PF08071.3; Description=RS4NT (NUC023) domain
  Pfam annotation: Domain name=zf-C2H2; Domain location=156-178; Score =16.5; E_value=0.1; Accession=PF00096.17; Description=Zinc finger, C2H2 type
  Pfam annotation: Domain name=zf-C2H2; Domain location=183-204; Score =15.8; E_value=0.17; Accession=PF00096.17; Description=Zinc finger, C2H2 type
  Pfam annotation: Domain name=zf-C2H2; Domain location=79-101; Score =27.9; E_value=3.8e-05; Accession=PF00096.17; Description=Zinc finger, C2H2 type
  Pfam annotation: Domain name=zf-C2HC_plant; Domain location=507-562; Score=57.6; E_value=4.3e-14; Accession=PF07567.3; Description =Protein of unknown function, DUF1544
  Pfam module annotation: Pfam domain module=RS4NT::zf-C2H2::zf -C2H2::zf-C2H2::zf-C2HC_plant; Domain location=141-178::156-178::183 -204::79-101::507-562
MMLKDLAAIQQHHHQQQLAAAAADENMSNLTSASGDQASVSSHPVPPPAKKKRSLPGNPDPDAEVIALSPRTLMATNRYVCEVCGKGFQRDQNLQLHRRGHNLPWKLKQRNPKEVVRKKVYVCPEPGCVHHDPARALGDLTGIKKHFSRKHGEKKWKCDRCAKRYAVQSDWKAHSKVCGTREYRCDCGTLFSRRDSFITHRAFCDALAEESARAVTAAAAVAGQHHPGPAGMLFSQAAGGGDGGAGLHLPPGVLDPSQTLGGGHGMSLQELCLKREQQQQQQFAPSSWLTAQHHQQELELPGSAVFGLARPLDQQEYMGNSTTESTAGLSGFVGFSPSAAGGAAASAHMSATALLQKAAQMGATLSRPSNQGQMAGTHSSSTTNAGTGTANAAAAAASNVPGTGAAGALGFGSPHHFGAEERTTRPADRDAGNGSGNAAAVAAGGGNEGLTRDFLGLRAFSHGDILSMAGFDPCMSSASPAAMSSAASNPSAQPAVDKQPLKQNSDDIGWEYGTIVNPNDWNVIKCKLCPMVVKAGIYRLKLHIAGRKGQVRACPNATQEDRDKCSKALDDSRKAKIARLTEKQEVIDAVADEMDVNDDTGLDDIGSSQPRTMGPMDKFTMSLDSNSLGSTQKNLHQQKISEHVMKERLHILKRYVARWMNTFQCHKTVMSLTKCWKLLAAFGPATDATFAQGWMVDGAEKDEEGSDVEPVTGLTWKLIAETCGAEEVTKLRRSARLTVQREVEDTPLSETESEEAPQEEDVDFESDQDDVITAGYELDAEEDNDG

SEQ ID NO: 80842 - protein, 243 aa, Zea mays
  Coding DNA Sequence Number=SeqID_37467
  Gene Ontology: Mol. function=zinc ion binding
  Homolog annotation: Hit_ID=A2YE05; Match level="QueryCoverage=43%, HitCoverage=44%, E-value=3e-30, Identity=58%"; Hit description =Putative uncharacterized protein
  Pfam annotation: Domain name=SWIM; Domain location=118-147; Score =10.6; E_value=0.046; Accession=PF04434.8; Description=SWIM zinc finger
MGARAGGGRTGRRAHGAGGRNTGRRRLANGAASAGERGAPVCATGRLAAAVDGGRGGDGAVGGGGAMAAGQWATGRLNFRRRRRRAGREKRRVGENETARRVGSALKRLMSDGYGLGRRTVATNPVCTCPDPAMPCKHVLFVLFRVLDLSDEACVWRQTLRPCQVAWLVGTPTYPDVLASARARERFHWMWSVRTVVEPTDARWQEASSRRPLDGAACPVCLEEMAPHHRHRAAAPPPPRRQS

SEQ ID NO: 80843 - protein, 336 aa, Zea mays
  Coding DNA Sequence Number=SeqID_37468
  Pfam annotation: Domain name=Spt4; Domain location=120-193; Score= -22.0; E_value=0.00039; Accession=PF06093.4; Description =Transcription initiation protein Spt4
  Subcellular localization annotation: CTP_CleavageSite=25; ConfidenceScore=5.62e-01
MPATNAAISARTPQSARRRTSGVATSALVASPTSLRGHLPGQAHLRRGGLGLGRQTCRPPRTCARLASAGICRDRYTSGAAASASVARPAGLHGRVPGQEEVIESIIAGMWNVVEVMADACVRCLVLSVLDSGQNGCENYPFLEMDREHDDIVNCTTPSFTRCSIFSPAMNFHHPQISKLGQAETYYQYQTCQYLVPHLAGYIHQVLYQLIFGSSQSIPPSLIYTASSCQNAEQGLAHLHPFSSNRMLSKPHRLTTNLDTMSISTNVSARVQRLGAIPTKIVKRRSVSQALNNRKWVDDIKGALTVQAEESINHILLAFVLSREYDYHKVIEIAKF

SEQ ID NO: 80844 - protein, 80 aa, Zea mays
  Coding DNA Sequence Number=SeqID_37469
MVAARHEQVASSFPCCEDLRLDIILTFFPQSHGVDDRHSLLSDFQLIQTLQSTWHNFYHYLEMGLQNFVEYQECQKGTFL

SEQ ID NO: 80845 - protein, 106 aa, Zea mays
  Coding DNA Sequence Number=SeqID_37470
MRRYVQQAPTQPPLGHDPEQLHRVVHRQAGGLMIVANVGDSRVILGTASDDDDITLSSSSSTGSPTCHIKDCGVISASEVTQRRTDSNDQFVVLATVDVAFVSVRL

SEQ ID NO: 80846 - protein, 155 aa, Zea mays
  Coding DNA Sequence Number=SeqID_37471
MALSPPPPCRKATQGRMKKVESVLDRPLALCGGSGAALANSAPAKPLTASTYQPKNSEPGYAPGLRPVRMREQPDWPRHRERHQDLEGVKPLLRGLGGYTRWENNVVCAAPTVVPPVRVRLTATKTGLRRHRKLRLAQPQGSDSTSTSEDGLRLA

SEQ ID NO: 80847 - protein, 793 aa, Zea mays
  Coding DNA Sequence Number=SeqID_37472
  Gene Ontology: Mol. function=microtubule motor activity; Cellular component=microtubule associated complex; Biological process =microtubule-based movement
  Homolog annotation: Hit_ID=A2YE10; Match level="QueryCoverage=85%, HitCoverage=69%, E-value=1e-151, Identity=57%"; Hit description =Putative uncharacterized protein
  Pfam annotation: Domain name=Kinesin; Domain location=338-504; Score=- 6.8; E_value=8.6e-15; Accession=PF00225.14; Description=Kinesin motor domain
MEFPIRVNGCCTQNCQSREKGEGSIPKIAEDHVLQMMINKSKIGERRLVDKDMSSLMAQKEDVARLTKDKEDMVRLLKDKEDIIRLMKEKEEMVLLIKEKDDMVTSRKEKIDGRDQSANAYANKSTTYNDETIRMIKEKEDSNITIMKLKSKLEAVKSLFEESHNQLESAKEEVLKLQKDKENSANIISKLRQELSLAHESYKTHIQELESSALQASKFFEHRIKEVDLMLEDSIKKRTDLEEVLKSRMDTWKKKEIMVNQVLRLQIQSIQDLRLSSVSIRHEIQNCQRRWSEELNGLGQSLNILINDSENYHAALEENRKLYNEIQELKGNIRVYCRIRPFIPGEDQKSTTIKYVGDNGDLIIANPTRHGKEGSKSFKFNKVFGPTTSQDDVFKDIEPLIRSVLDGYNVCIFAYGQTGSGKTYTMTGPENATENEWGVNYRALNDLFHISHNRGDTIIRMLMYPTGTANLHKSYRVLWINPDVSSYSETLSTLKFAERVSGVELGASKANKEGKDIREFMEQLSLLKHKMAKKDDEINRLQQLKTQTPRVRTAKRADSPLKHSSSSPGISNLGSKIQHRRTVSSGKAMSIASRAGSDTFSDTSDRHSESGSMQSVDDILPRRGIMGLPKLSIGEMGQNSADPELVCFDYADSEERLSDISDSGLSMGTETDVSVSSIVELTRFQEQENIPSTLKEQESARKIPNDQLSKVATRVQKTTVPKLAQTSLWPKLRDPPALRSPGPCLLDRWASDSVHSEIFSMAFAAYMERENHNTNNICTKDVHDFEEMDISQV

SEQ ID NO: 80848 - protein, 235 aa, Zea mays
  Coding DNA Sequence Number=SeqID_37473
MEEGCEGWGGWEWSNELVVGVVWKEAPESTTQSVVGGGDGGGEGVAASATSKPQRRARLQWDGGSSATRACTRAAVEVTPALGPKRSWQQHPCICGSTPGTHVLERPGSRGAGAAAGARGRAGGGWREERAGLAAPERWHCRLLHGGGSCAPGTAGARGRRPARRSAAQAADGGVAGSARKKGGGHGRGRRPTAGGLGKPTAVGGRREMKVALVPSWRMKTLTLIRVGCGNDRLR

SEQ ID NO: 80849 - protein, 281 aa, Zea mays
  Coding DNA Sequence Number=SeqID_37474
  Homolog annotation: Hit_ID=Q6BTJ4; Match level="QueryCoverage=56%, HitCoverage=32%, E-value=2e-09, Identity=27%"; Hit description =Similar to CA1621|CaIFF6 Candida albicans CaIFF6 unknown function
MISSRPSPASGRNSRPRQIHASPEGLLKQRTHLRLAQGPARAGFAEKQPWPDRYANRPYRRSIQCKDRLTPYPDARSSADKAEENSAACAAPTAVPLVRVRLTAAKTGLRRHRKLCLARPQGSDSTSTSEDGLRLAQPLSSDSSSTPEGGLHLARPLSSDSSSTPEGGLRLARPQGSDSTSTSEDGLRLARPLSSDSSSTPEGGLRLARPQGSDSTSTSDDGLRLARPSGLGLNLDPGRQSPPRPTPLPGLSLDLGAASASPDLGLRPTTSQGGHHYPTPS

SEQ ID NO: 80850 - protein, 228 aa, Zea mays
  Coding DNA Sequence Number=SeqID_37475
  Homolog annotation: Hit_ID=A2YE06; Match level="QueryCoverage=86%, HitCoverage=89%, E-value=3e-58, Identity=63%"; Hit description =Putative uncharacterized protein
  Pfam annotation: Domain name=DUF1677; Domain location=84-209; Score =178.1; E_value=2.3e-50; Accession=PF07911.4; Description=Protein of unknown function (DUF1677)
  Subcellular localization annotation: CTP_CleavageSite=18; ConfidenceScore=5.41e-01
MAVMAGPFLAMASNAAVSASANSTGNGEVKRRRRTSSTNALQRTASDVSAYELHHHHHGVVTNKDEKAEAEQQQPAVPEASPVLQHAKCECCGMSQECTPEYIRGVRARFAGRWVCGLCAEAVTEEADKKKGGPLEEALKAHMGVCKRFNGFGRTHPVLFQAEAMREILRRRATATLGPRSRSSINPREVNREVAKAAGTGISRSSSCMTFIADHDFNHRASSSINKN

SEQ ID NO: 80851 - protein, 23 aa, Zea mays
  Coding DNA Sequence Number=SeqID_37476
MALSFVAPGIPEFMAPELYEEYN

SEQ ID NO: 80852 - protein, 160 aa, Zea mays
  Coding DNA Sequence Number=SeqID_37477
  Subcellular localization annotation: CTP_CleavageSite=38; ConfidenceScore=5.63e-01
MGGGLLAAASALKSVLLLFGPPEQKSSSSPLLERVTARCSSVFCCSAGPPLSSGVVRTCGGGTGVPFVMALRMPGFFVHRGCRGLNMGNRPSRLLGPDSRRSPWQRLSGRDDDVVLQSGDPWTASPSEARSDLAEGVVDAEGVTAPIQRQDPSLQDQSVL

SEQ ID NO: 80853 - protein, 99 aa, Zea mays
  Coding DNA Sequence Number=SeqID_37478
  Subcellular localization annotation: CTP_CleavageSite=58; ConfidenceScore=5.41e-01
ANTSAFVPIYAKWWTKCKSCQKPKSAQSGFTGLSGGAPYNVRWCTGQCPMRQAGSGKQAALGTSTTVYDYNSLVCPVVHRTVRVRCANGSQTPTVGFAK

SEQ ID NO: 80854 - protein, 213 aa, Zea mays
  Coding DNA Sequence Number=SeqID_37479
MQGSCLTAIAAKSTKDLPTLTTPLLPLPLSGKYWASFSRECRGYGVKFLRPSAHYPWTAGSISEKRRGLFVKCGPKGVWSDLVYTIDHRRSRFNPRVMNTYNPLRPLDPISTHKGRPRTNLDLSRSRPHQRSRSQLRKPVCHDIILTVRQDRTAHVLLPNLRTRHSGGQSSPHGGALTGDRALAFKCPRFSKLVDAIRCWGHGKHDNAGFTGD

SEQ ID NO: 80855 - protein, 141 aa, Zea mays
  Coding DNA Sequence Number=SeqID_37480
MDASDAISSTCYGQQEVGSLATSINVPIVRLKKIWILSHDIVVDSAHVCQSEFLIQIIIYSCCVLMSLTCPMKKSQGQTDGRVKHGGDSARWDTISALSGVRFVPLVDLEDCLEPSKTNVTTLPNGVRIAYETSSVLRTAI

SEQ ID NO: 80856 - protein, 280 aa, Zea mays
  Coding DNA Sequence Number=SeqID_37481
MASQRLCNIDSTTSCLSPCEGTSRQPQPAGALADEQSRLAALQQYHSGAAQSAAGQPQPAGPVTSRPAASVLYCCFTIPVPGFQVSGQRANREDGRTRNSGERLVGAESAFPHASATDSFPKGPRKAPVKPRVPATVRRWIPRRRGVDSRRGRGYLPPYWFGFRFVRKAEAGTRRGVYSRGGVKIVTRIPRLVDHQCHGARRYRDSVSNGGGRHADVWDLLLSEVEGSSRGHGRFVGPARQAGAAFQWARVSAQHNDIARIARNFIKMNLFVRQITIMVN

SEQ ID NO: 80857 - protein, 114 aa, Zea mays
  Coding DNA Sequence Number=SeqID_37482
MSGGAPDCLVHHPTEGKYCLPRMPPTAPSCLGAIKGTPRRMEETPKHTLSILNHSHFVFAHSIDILSDLSSVLVCFHFDPYCKGERLQVVEIPRKRERVKKEEHRGIQVDHWIT

SEQ ID NO: 80858 - protein, 357 aa, Zea mays
  Coding DNA Sequence Number=SeqID_37483
MVKVVHRNSASALSRAARADGCGRRMGGEAGDPKTIGSQHRRAPRLRDYARDDNVSAKWRTAMLQLMQPFWRLELAACVLASMLHHGSEEADGEMKRKGPTCCAVIQMFRTRKRSDDAWELGVWASTGFRHVSSARDSRVNIYSRAFILSASIYSVAAAPAEDRPCPAKPPPRSRTPVRWASASASSALSPIVLSSPLTDAAAPKSRPDKGGGKGPSSCLDLDVEWIAEHARQVLLYYTTLRLRHTSRLGMATGKLSADSVSGHPYPRLISDIRTRTRYPLWITNSIHIRYPRVTDIRGYIRLPTTHTTYLNPANSNMISYLSSKFKYDKNIQPYRICPAMKSDTCIKAYSEQYKIV

SEQ ID NO: 80859 - protein, 630 aa, Zea mays
  Coding DNA Sequence Number=SeqID_37484
  Gene Ontology: Mol. function=endonuclease activity; Cellular component=nucleus; Biological process=response to DNA damage stimulus
  Homolog annotation: Hit_ID=Q8W5R1; Match level="QueryCoverage=100%, HitCoverage=100%, E-value=1e-176, Identity=52%"; Hit description =Flap endonuclease GEN-like 2
  Pfam annotation: Domain name=Chromo; Domain location=320-371; Score =8.4; E_value=0.054; Accession=PF00385.15; Description='chromo' (CHRromatin Organisation MOd
  Pfam annotation: Domain name=XPG_I; Domain location=72-143; Score =26.6; E_value=3.2e-06; Accession=PF00867.9; Description=XPG I-region
  Pfam annotation: Domain name=XPG_N; Domain location=1-80; Score=-6.9; E_value=0.0094; Accession=PF00752.8; Description=XPG N-terminal domain
  Pfam module annotation: Pfam domain module=Chromo::XPG_I::XPG_N; Domain location=320-371::72-143::1-80
MGVKNLWDILDSCKKKLPLQHLHANRSPAFLRDKVYLKNLFHRIRALIALNCSLIFVSDGAIPSVKLATYRRRLGLNAAEDGCFTSDSDSFLFGAKTVYRDVFIGEGGYVICYEMEDIQNKLGFGRNSLISLAVLLGSDYSNGVHGFGPEAACRLVKSLGDDTVLGQILSDGVKPARKCKGKGSGANAGTVGGTCPKASTCEVGINQDSGSQFRDIINAYLEPKCHSPDSEAVQRACSQRPFLRSQLHQICEQYFAWSPVKTDLCVHERIPLSYFLENMSTDEYILPKIAERELRRFSNLRSTSSDLGMKPSLNEIPVPCPVLAIVKQRKVQGSEYYEVSWRNIDGLQVSVVPGELVRSACPEKITEFLESKDAQKKQKRRARPKKSGQAAVKDVDAQLQELLLGIESESGSFPCTANGPQTAAIQMVAPLQEFVDLSSPSPPIRSCKIARSRKLSDSDTVTMDGIHLQHQSLQIGSMESNSALGLEPIDLSSPSPCAAHKPQAAPEAPPLCMEAERRALWDISNLVEKEPSCCKHEPGTNVQVEESPLFRHGTGMAGEADSSRRGDAQSREVVEAAMIDLSSPSPVKVDNSRRNGKKDCEAGSSSQSPEHERKARELRLFLDSIRDELY

SEQ ID NO: 80860 - protein, 576 aa, Zea mays
  Coding DNA Sequence Number=SeqID_37485
  Gene Ontology: Mol. function=hydrolase activity, hydrolyzing O -glycosyl compounds; Cellular component=endoplasmic reticulum; Biological process=protein processing
  Homolog annotation: Hit_ID=A3BNT3; Match level="QueryCoverage=98%, HitCoverage=92%, E-value=0.0, Identity=68%"; Hit description =Putative uncharacterized protein
  Pfam annotation: Domain name=Nicastrin; Domain location=249-454; Score=-58.8; E_value=3.7e-05; Accession=PF05450.6; Description =Nicastrin
MSPSGELLASISSVFTVAFVLLACVELGDAAAAAVGVYRLIQYDLAGAPLGSRAAVLNHHAAALPLPAGADLSRSALVAPLLDLPLSFLRGQLTLALLLHLLNYYALLPKLIDLVPPFTFVAQNSYDAFSEYLVEKKHLGGLLILLPTNNDSVDDKGQFKGVLTELEKLLLHEQVPYPVYFALHDDNLDNLLADIHRIASTGQPASATTGGYKLVVSSAEPRKVSSPTISNIQGWLPGFKGEGDSEQLPTIAIVANYDTFGAVPALSVGSDSNGSGVVALLEIARLFSRLYSNPKTRGKYNILFGLTSGGPYNYNGTSKWLRSFDQRVRESIDYAICLNNVGSWGNDLWMHVSKPPENPYIKQIFKEFSDVSKEMGVSVGIKHKKINVSNPRVAWEHEQFSRFRVTALTLSEMSTPPDFLESTGGLHDTRESTDAESVIRAARLVSESLARRIYGLKGRNIDVFAENSSLAINPHYIRSWLDLLSRTPRVAPFLQKNDPFIAALEKSHLVPGFLARHDIGILVQELSAHTTDVRVQSDALDGMFTFYDATKATLNVYQNSMVCNALIYCPDKLPGE

SEQ ID NO: 80861 - protein, 166 aa, Zea mays
  Coding DNA Sequence Number=SeqID_37486
  Homolog annotation: Hit_ID=Q6L5E0; Match level="QueryCoverage=36%, HitCoverage=7%, E-value=2e-16, Identity=70%"; Hit description =Putative uncharacterized protein OJ1651_G11.5
  Pfam annotation: Domain name=DUF1296; Domain location=26-82; Score =47.6; E_value=4.3e-11; Accession=PF06972.2; Description=Protein of unknown function (DUF1296)
MRGDGRGGGGRQPSYAAPDGANAVAIPVASRKMVQSLKRILADRSEGEIYATLCDCGMDPDIAVERLISQDPCTTKVEPDKARVVACNRPHRMLSLGLRYQNLHLLDDVDGPRDLEIRRVPRQKSLALTPSPTGSSRETAPTFVASPPGTWGHWAGPDSSSLCDSP

SEQ ID NO: 80862 - protein, 138 aa, Zea mays
  Coding DNA Sequence Number=SeqID_37487
MSLPSAVAKALGKGTGKGAHWRVLCRVPVHQTLGKETSFAECLLGLSAQRLAVGSTRPVFAECRRWHSVKDPSPSLGAVTVTFLCRVPNGTRQSLCRVPDKKYSAKKLLPMTVSPTVAKWFVPGARGSMDNVYRFGPL

SEQ ID NO: 80863 - protein, 66 aa, Zea mays
  Coding DNA Sequence Number=SeqID_37488
MHNVDDIMPTSKAEKITLNKKTRNEDLRVDYLQKSTQSSGATPIGCTSGAPNESPFQEKTTPTSKA

SEQ ID NO: 80864 - protein, 102 aa, Zea mays
  Coding DNA Sequence Number=SeqID_37489
MGKNNKRKREPTPPSEDFGDSEYSEEEFSSESEGSPAPVSPPVSSDDSDDSQGIAAEVWTYIRAVERSGLEGSDESVARGGRRRGDGRAIIVNIYAFEIESE

SEQ ID NO: 80865 - protein, 103 aa, Zea mays
  Coding DNA Sequence Number=SeqID_37490
MNVDEQGAEPGVTDRGNGREFRSGNMDSEHELWRAARHADEQGAAPASVHNGVNKPPKLSGPHAPVLVSKTSDSYACAPNNLTGSVRVPRGPRINDLPPRSQD

SEQ ID NO: 80866 - protein, 261 aa, Zea mays
  Coding DNA Sequence Number=SeqID_37491
MGRRETEREGGKPEGDRRKGETCGLRVCPAPRSGALAVGGYKRPRGREREACTRRPVLPVRPTLPYECPGPSFYRCKERAQVESEPWGRARRSSSSSGAEAESKPWGRARRSSSSSRAEAESEPWGRARRSSSSSGAEAESEPWGRARRSFLWRPRPDLAAVSLTLSSGTAVGVAQAALSSCQAVAPELQRECKYSLGGFCRTFLQGDQPFSVAFRSSGCTRAHPPGVAPEASEEWFDSFEVLMRFVMLQPVWLFPHANWP

SEQ ID NO: 80867 - protein, 372 aa, Zea mays
  Coding DNA Sequence Number=SeqID_37492
MLDASKLKGCAPLVRLHAACMAVLPFTRWSGRKWRNARWCGVGGQADAAVGADVVAARESFSAVEAVSAAYGPTSGSLALMSGSHPLSGDANESLPVAASVLGPWLLLQRSLASRPELVAPQALQCGGCSYPRGRNQSSVCNGTLNAGVCSLWLSGPEHPKPKAVVSAWTGAELARKEDFVGWSLAGPSTGGTDTGVELSKPRAGLVSSRDSWLRLRGGRPSRLLGPGSWRRPWRRWPGRGADVVLRSRDPPTVFPSEAWSDFAEGVIDAEGAAAPPPSRIVCPSESYFSRKVMSEDSAIDIVKKARKIVSAEEFSSVKTCSVRRITYPSVSYLSQKVMSEVSVSRRHRSPSARSALAAYVYSVVFRIPLSK

SEQ ID NO: 80868 - protein, 147 aa, Zea mays
  Coding DNA Sequence Number=SeqID_37493
MALEAGLGCCQPHSVEWHCSRCGAGGAVLSSGRSVERRSDCGHFGSVDWRARVRIRCQAILALNASAVRSVGVAIWPRLLLGEDWASGEPKLCADGGYQLRLGVLGVPLIMVPDKTGLCLFSHTTQAQPFDVLIHPQKKVALLKDLI

SEQ ID NO: 80869 - protein, 180 aa, Zea mays
  Coding DNA Sequence Number=SeqID_37494
MNVDEQGAEPGVRRTGGTDASSDRGTWIVSTNSGEQRGTPTSRALLRLPSTTASTVSSGGEGKNEEEVRDTWARCGAAGGGVELGGSVGLSALLQAGASGRHAARSGLLGAHGVGSRGVLGLAQGRSASGRRDPAAAAGACVGLAGRRGRARERRAGGGGERREKREGGVAAAVQGVGRG

SEQ ID NO: 80870 - protein, 447 aa, Zea mays
  Coding DNA Sequence Number=SeqID_37495
  Gene Ontology: Mol. function=transcription repressor activity; Cellular component=chloroplast; Biological process=regulation of nitrogen utilization
  Homolog annotation: Hit_ID=A2XGS6; Match level="QueryCoverage=48%, HitCoverage=36%, E-value=1e-103, Identity=86%"; Hit description =Diphthine synthase
  Pfam annotation: Domain name=Epimerase; Domain location=88-312; Score= -43.0; E_value=0.00058; Accession=PF01370.12; Description=NAD dependent epimerasedehydratase family
  Pfam annotation: Domain name=NAD_binding_4; Domain location=90-299; Score=-59.4; E_value=6.1e-05; Accession=PF07993.3; Description=Male sterility protein
  Pfam annotation: Domain name=NmrA; Domain location=88-337; Score= -97.8; E_value=0.013; Accession=PF05368.4; Description=NmrA-like family
  Pfam module annotation: Pfam domain module=Epimerase::NAD_binding _4::NmrA; Domain location=88-312::90-299::88-337
  Subcellular localization annotation: CTP_CleavageSite=23; ConfidenceScore=5.29e-01
MAVGCFNPVLSPLVPSPPGRRVRAALRCRWHRHPLTAVSLRRLPCGAAAGRGTRRLAAAAESQAVQEQPARAEEAGGAGAAEASSKLVLVVGGTGGVGQLVVASLLSRNIKSRLLLRDPEKASSLFGKQDESVLQVYKADTRNPNDLDPQMFEGVTHVICCTGTTAFPSKRWDGDNTPERVDWDGIRNLVSALPQTVKRLVLVSSIGVTKYNEIPWSIMNLFGVLKYKKMGEDFVCNSGIPFTIIRAGRLTDGPYTSYDLNTLLKATAGERRAVVIGKGDKLVGEVSRLVVAEACIQALDIESTEGQIYEINSVKARKLRILSWYYGWVKGPELTQRNGRSYSDLLDQLEFVPNNSISVILVPGMERREETVGYPSVNEKEGENGGNKTCGVTNRVPAHEAGGVHGALCSHFVGDALTLTKVNWSAAPTGFLDHCPLILYRVFNFGI

SEQ ID NO: 80871 - protein, 229 aa, Zea mays
  Coding DNA Sequence Number=SeqID_37496
  Gene Ontology: Mol. function=binding; Cellular component=integral to mitochondrial outer membrane; Biological process=mitochondrion organization and biogenesis
  Homolog annotation: Hit_ID=Q10L89; Match level="QueryCoverage=63%, HitCoverage=84%, E-value=5e-69, Identity=88%"; Hit description =Tetratricopeptide repeat protein 11, putative, expressed
  Pfam annotation: Domain name=TPR_2; Domain location=87-120; Score =19.2; E_value=0.015; Accession=PF07719.8; Description=Tetratricopepti de repeat
MDTHVGKLIDSVGSIFRGSDVLPWCDPDIIAGFESEVAEAANEEQKTESLMRLSWALVHSRQPEDVNRGIGMLEASLDRSSSPEETREKLYLLAVGRYRTGDYTRSRQLLERCLEIQHDWRQAITLQRLVEEKTKRDGMIGMAIITGAFGVVGLVAGGRDEDIFSVEVNKKKAGKSLVVGDSAHHFLLRVKGCSLVFFRGIFPMKIPKKSSKQGLSESSWLTTSFQVSF

SEQ ID NO: 80872 - protein, 106 aa, Zea mays
  Coding DNA Sequence Number=SeqID_37497
MAENTTTELEAADDLMATDRRRLAARRRSGGLQSVVACRSPRIGAQDWRSQVSKRRYPVRRAGEVRDIRNYTVQISKWLFPEKKSRVKEHNLPYKAENKCKHLISN

SEQ ID NO: 80873 - protein, 830 aa, Zea mays
  Coding DNA Sequence Number=SeqID_37498
  Gene Ontology: Mol. function=protein transporter activity; Cellular component=clathrin adaptor complex; Biological process=intracellular protein transport
  Homolog annotation: Hit_ID=Q10LA0; Match level="QueryCoverage=100%, HitCoverage=100%, E-value=0.0, Identity=77%"; Hit description =Adapter-related protein complex 1 beta 1 subunit, putative, expressed
  Pfam annotation: Domain name=Adaptin_N; Domain location=13-535; Score= 735.2; E_value=4.5e-218; Accession=PF01602.11; Description=Adaptin N terminal region
  Pfam annotation: Domain name=Alpha_adaptinC2; Domain location=671 -784; Score=4.0; E_value=0.0016; Accession=PF02883.11; Description =Adaptin C-terminal domain
  Pfam annotation: Domain name=B2-adapt-app_C; Domain location=709-830; Score=42.6; E_value=1.4e-09; Accession=PF09066.1; Description=Beta2 -adaptin appendage, C-terminal s
  Pfam annotation: Domain name=HEAT; Domain location=118-154; Score =29.3; E_value=1.4e-05; Accession=PF02985.13; Description=HEAT repeat
  Pfam annotation: Domain name=HEAT; Domain location=156-193; Score =17.1; E_value=0.065; Accession=PF02985.13; Description=HEAT repeat
  Pfam module annotation: Pfam domain module=Adaptin_N::Alpha _adaptinC2::B2-adapt-app_C::HEAT::HEAT; Domain location=13-535::671 -784::709-830::118-154::156-193
MSGHDSKYFSTTKKGEIPELKEELNSQYKDKRKDAVKKVIAAMTVGKDVSSLFTDVVNCMQTENLELKKLVYLYLINYAKSQPDLAILAVNTFVKDSQDPNPLIRALAVRTMGCIRVDKITEYLCDPLQRCLKDDDPYVRKTAAICVAKLYDINAELVEDRGFLEALKDLISDNNPMVVANAVAALAEIQDSSVRPIFEITSHTLSKLLTALNECTEWGQVFILDSLSRYKAADAREAENIVERVTPRLQHANCAVVLSAVKIILLQMELITSTDVVRNLCKKMAPPLVTLLSAEPEIQYVALRNINLIVQKRPTILAHEIKVFFCKYNDPIYVKMEKLEIMIKLASDRNIDQVLLEFKEYATEVDVDFVRKAVRAIGRCAIKLERAAERCISVLLELIKIKVNYVVQEAIIVIKDIFRRYPNTYESIIATLCESLDTLDEPEAKASMIWIIGEYAERIDNADELLESFLETFPEEPALVQLQLLTATVKLFLKKPTEGPQQMIQAVLNNATVETDNPDLRDRAYIYWRLLSTDPEAAKDVVLAEKPVISDDSNQLDSSLLDELLANISTLSSVYHKPPESFVSRVKAAPRADDDEFADTAETGYSESPSQGVDGASPSSSAGTSSNVPVKQPAAASPPGPVVMPDLLGDLMGMDNAIVPVDEPAAPSGPPLPVLLPSNTGQGLQISAQLTRRDGQIYYDISFENGTQGVLDGFMIQFNKNTFGLAAGEALQAWKSLPDDNEFTKEFPGSVISSIDATVERLAASNVFFIAKRKNANMDVLYLSAKMPRGIPFLIEVTAAVGVPGVKCAVKTPNREMVPLFFEAMEALTK

SEQ ID NO: 80874 - protein, 91 aa, Zea mays
  Coding DNA Sequence Number=SeqID_37499
  Subcellular localization annotation: CTP_CleavageSite=14; ConfidenceScore=5.57e-01
MAKSASQTGKQVARAVRGGSTAPPGRFNRSGQPWSACRQLSATVGTVGKAVVACGHEVPHGTGVTKSGEIPTEVGLVIFLGPRGPVGRDVR

SEQ ID NO: 80875 - protein, 293 aa, Zea mays
  Coding DNA Sequence Number=SeqID_37500
  Homolog annotation: Hit_ID=A2WJL3; Match level="QueryCoverage=89%, HitCoverage=68%, E-value=6e-46, Identity=40%"; Hit description =Putative uncharacterized protein
MATTQFAMVEELASLIKDNLHSKHLILSTEESLVAALQELHCREEDDGAADTIELQPAGAYHRLLLHRLAEIYGPSVLVSDMIWKFDNSDDFMSVVLTRNDTDFQKPQKADIVQKDISVKSSRLKDNTDSKPLRQPAVHPAASLKEREAAYRAARERIFSVDDAKGNDRSYVKCRQVPVVAQRMIAHALGQKVQNTTEAVASTESRGKHKQLPNGKSIPTHSRNNFCPVTPDNKEAEMKAVIGWMLIVGLGPREDMWPGAGSKIQAQMGKDVAGYALHAKPSGRETPLLSLVW

SEQ ID NO: 80876 - protein, 419 aa, Zea mays
  Coding DNA Sequence Number=SeqID_37501
  Homolog annotation: Hit_ID=Q4JQF9; Match level="QueryCoverage=81%, HitCoverage=12%, E-value=1e-171, Identity=92%"; Hit description =Aberrant pollen transmission 1
MASLLSLSIVELRLKAPKAALGIKDLKTDISKTGGLDPVLNVQVNIIPLFVQALDSDSIGNNTLVFSKLDWWVSGQYCSAMDTSDHSSFLFEDISLSCDLHQRDKAIRVKNLDLMLGPIVVNLEEKLLAKKKPSASTVAEQKDEPSVDNKSAARSEGGKLASLNKKIMVRVVSLSHQVSFNMSKLVLKFLPKDHGLSINNEIGSISLRCTRLQPQDFGEVTTHIRLETDVTEIHLLMDGATSVLEVVKVSTVVSANIPSQPALPVQAEVDIKISGFQCNLIVSRIKPLIRINSDKKKPLVLHENPQQKKAPKEKLALSLACTMSVPELTLVLHSLDDVPLYHWHELCLEVTMSSKFYTIKLTWGTGMDPLKILRLAPFHRSHMGVEVCIHCGSTLQSVPKREFGSILLAQKGMPSKCGN

SEQ ID NO: 80877 - protein, 2101 aa, Zea mays
  Coding DNA Sequence Number=SeqID_37502
  Homolog annotation: Hit_ID=Q4JQF9; Match level="QueryCoverage=96%, HitCoverage=80%, E-value=0.0, Identity=89%"; Hit description =Aberrant pollen transmission 1
MGMWLNQCILLCACYMTSAFKSHYTKFGIYDAILVDDEFVKSEIAGDNNEYISNSFRLPGLPSSLLDEICCIFQSANVSASKMIDRGTQLHGKLGDLKFLVPSKHQQSMKEGQDNDEDHAKSAISVNISGIRMHFCFSYLESLCATAMSYKVFMKSILPPKKRSVQENASQKSTKKAKRALLLKINVAQCSIVYDGEMRLEDMSIADPKRVNFGSQGGRVVIINEANGSPRMAYVNSTSLPDHKNVHFSTSLEIYQFGVSLNKAKHTMQVELENFRLTHKEDQLDNKPVEETKLFDVRKAKFVQRSGGLNDIAACSLINVTDIAVRWEPDPYLELLEVATRLKSVLHRMKLQNSVTEVKDETLNMDILSKKESPSDHGQQEKAQKKRESVIAIDLESLKISGELADGVEAMITVGYIFSENAKIGVLVEGISVSFCGAWILKSSRMQLSRIPISVSDSNSDKKLQSAAACDWVIQCRDVNICLPFRLQLRAIDDAVEDTLRAFKLISAAKTSVLFPEKKSSTTSSKKSKPKSTAFRYVRIIVRDLIAEIEEEPMQGWLDEHMILMKNVFCESTVRLNLLDELSSGKNKDSPKAKLDSSEKNSGCPDVDAYVPGTHSIEKLREEIYRQAFQSYYQACQKLPVSEGSGACSSGFQSGFKMSTRRASVMSVCAKDVDVSLSKIDGGDEGMISFIKSLDPVCDKDDIPFSRLYGSNFSLKTRSLSAYLRDYTFPLFSGTNGKCDGRLVLGQQATCFQPQARQDVYVGKWWRVNLLRSATGYTPPMKTYADIPLYFKKAEVSFGVGYEPVFADVSYAFTCALRRANLAKRWYFERPEPPRRERSLPWWDDMRNYIHGKFKLCFNETKWHLPASTSPYEKLDELLIITDFMEIHYVDGYVSLSSKYLRVYLTSLESLAKKSSLEIPHHPAIPFLETPSFFMDISIEWGCDSGNPMDHFIFALPAEGKPRDKVFDAFRSTSLSLKWSFSLKPYTTEPIEHQKKSNLNTTAPTVNVGVHDLAWLMKWWNLVFLPPHKLRLFSRFPRFGVPRFVRSGNLPLDRVMTEQCIRFDAMQLQINNMPLQADDPAKGLTLHFTKFRYEIAFSRGKQIFTFDCKREPLDLVYQGIDLHLLKVFINRIPESSTSMDSKIENKVLQTKDKDSLGCEKGKKKTSPTEKSRDDGFFLYSDYFTIRKQTPKADAARLSAWQEDGRKKTEMPLIKSEFDGGDESDHDQSGSDDEGFNVVVADSCQRVFVYGLKILWNLENRAAVLSWVGGLTQAFQPPKPSPSRQYTQTKILEKKQLIKEAEMSKDGALSSVSSTSQPSEPQQIKSSESPPSNGSGKPDLTSSSENALKRSNNSDSEEEGTRHFMVNVVQPQFNLHSEEANGRFLLAAGSGRVMVRSFHSIVQVGQEMFEKAIGSSNDATGGTGPEMTWSRVELSVMLEHVQAHVAPTDVDPGAGIQWLPKIHRRSSEVKRTGALLERVFMPCQMYFRYTRHKGGTPELKVKPLKELTFNSPDITAGMTSRQFQVMMDVLTNLLFARTPKKPKSNLSYPLDNDDDNIEEASDAVVPDGVEEVVLAKIGVEVKERARKLLLDDIRALSICGETSHGQSQSPKANDIAWIVTGSRLMLVKQLKKRLVNVRNGRKEAYSMLRTAMQKAAQLRLMEKEKNKSPSFAMRISVRIKKIVWSMLADGKSFSEAEINDMLTTKLFVLKNGLANAKSYTVVSPWNPPAEWGKCNSRCFKIIRNAMLRVNAWQGAPTGGNPVIESFLVDIYPLKIYLTEAMYRMMWGYFFPGDEQQPQKRQELFKVSTTAGTRRKKNTSVAETNSPNNQSSKETTFAQKPELRRTSSFDRTWEETVAESVANELVSQMEGQTNTQYEPQDAAKDSKLLRPVRSTREDKKIVEPNELKQSRPQKMMDFRNIKISQVELQLTYEGLPFAVSDGKKFKAKSSSQKEPSTALISAADFNLSDSDGDEAGSSDQLPAFLKKPSDGAGDGFATSVKGLFSTQKKKAMAFVLKTMKGDADHDFHGERSENEIEFSPFARQLTITKTKKLIRRHTKKLNKSKVHKVTATELEVAELPPRAPGYNTDSSSDSSSAETSPKD

SEQ ID NO: 80878 - protein, 108 aa, Zea mays
  Coding DNA Sequence Number=SeqID_37503
  Gene Ontology: Mol. function=nucleic acid binding; Cellular component= ribonucleoprotein complex; Biological process=RNA splicing
  Homolog annotation: Hit_ID=Q10LA2; Match level="QueryCoverage=74%, HitCoverage=15%, E-value=1e-25, Identity=76%"; Hit description=U4/U6 small nuclear ribonucleoprotein PRP4, putative, expressed
MKIGWGELGQYTVYLCPVRLCRIGTESEEEEDIQYPFFTEGTHELLKARVDIAHYSLPRAKARIERAKRHHEDPDEDQEAEAELVVKQAGEFVLECSEIGDDRPLKGN

SEQ ID NO: 80879 - protein, 107 aa, Zea mays
  Coding DNA Sequence Number=SeqID_37504
MTRVVVFNPNSSYDTRFAMLCLLVISPIWVMWAEDLNTCQMFDDKPKPGFINILTSIESRLMLRLSFAILPNSGVIMRKDGSYLQDIFSLRAWWDLTAKFPIMLFSF

SEQ ID NO: 80880 - protein, 202 aa, Zea mays
  Coding DNA Sequence Number=SeqID_37505
MTRANRRPASAAGNKKPGRTRAGSHGREVRARGAVERAEARPSLLLVNGHQDELEQGGHLGTGKKGAQQGHPTGAERERQTAERKEDPSWGPNRAREERKEKAGAEEEGSRGRELAAHAAVTSRARRARASRESRGDPADGVVGRAGAREEEERREQGDARLERGGGRREIQAPSWRRRRSLGEPREKLGAVALWRRRIARN

SEQ ID NO: 80881 - protein, 191 aa, Zea mays
  Coding DNA Sequence Number=SeqID_37506
MAPPVDVVGSCPRLGDVEAPPRSRSSLSSEAEVESEPLGRARRRPSAEARAESEPWGRAERSSSSSGAEPESEPWVGRSGVRHLPGLSPSPSPGSGEAEFPTVPEAGPGCLSASLCRVAQQSERCRRCCLSVRSATFALNAPAIWSVGVAIWPGLLLGEGWASGEPELCADGGYQLRIRSLEGTPNYGPRQ

SEQ ID NO: 80882 - protein, 698 aa, Zea mays
  Coding DNA Sequence Number=SeqID_37507
  Homolog annotation: Hit_ID=Q10MS1; Match level="QueryCoverage=55%, HitCoverage=40%, E-value=2e-28, Identity=63%"; Hit description =Pentatricopeptide, putative, expressed
  Subcellular localization annotation: CTP_CleavageSite=70; ConfidenceScore=5.47e-01
MGNSAPPDPGLGLGLSTGRQRTPLRPTPGLGLGLSPGRRRTPLRPTQGSDSGSAPEDDELRFARPRARTRAQSRKTTNSASPDPQGSDSGSAPEDDELRFARPQGSDSGSAPEDDELRFARPQGSDSGSASEDDELRFARPQGSDSALASADGLRLARPGGSDSTSASEDRLDLDLGGASTSPNPGHGPTASTGGAIITLPQADSGYGEQDRRPIWLAPPDKLQRSSDGHDTTRTGCQDLSGCHDGMYLGRYLSSARHIAAAEANNSAKLDSNPRHLCFAPPSASSAVQPRHAGWPHPRRPPPQQRCLAVAVFLIPRAAAAPDVDLHQRLCSSSAASSTSLSIWWRKKEMGKEGLMAVALLKRLAALPPVGCHPRLEQFMRSHVSQLLRTDLLAELLRQDHASLSMKGHSGAAGGWRLLHTGLGFGFGALGAAAVWRLRAARLVDCSSARADQEPARLLLYCVVAAGFSRGPGAEAPSRGSRPSLLPAQGPHAGGRASRRRGPGKQAVQQAGAAQAAGQASSATSRRMGPGATRDQQPASSAVAARQSMIAAAEANRSANLGSNPRHLCFAPPSSFVLPADLIPAGRRPSHDAWPYLYFSSRGPPPAAPDVDLHQRLCSSSAASSPSLSIWRRKKEMGKEGLMVVAQLKRLAALPPAGGHPRLEQFMRSHVSRLLRTDLLAVLAELLRQDHVSLSMKV

SEQ ID NO: 80883 - protein, 357 aa, Zea mays
  Coding DNA Sequence Number=SeqID_37508
MASGRTLLQPCPRPRRRSRGEDTYKEPEARSADGGGDPVGDGDFSSRPHLGTNDRSRQPTGRSPLRSSRTSGAPTSARRRRTGAKAGLPQNTNAALAARNVLGGSSRACSATTALAAGGGTGSQAGEPNALKLTTPAVGQPRVIEVRPAHRATRMMNILEAEGGTKIAARLASPHPGAGGHRLGPAGERAGSHAGGMQPRQVGAPLRLPTHPAWGPTPTRHATGAPVATCKQLHRHSHHYHASSTAEPVPRLEATLRTTQQCQPGATVNTAKNGPAVMAVAGGQEQRSRRQPSLRPIQGQREKPISRREEGAPVFRSSNGSRTRNGHPVNHSPCRINSAAGQAAPLAGEASDASPSP

SEQ ID NO: 80884 - protein, 332 aa, Zea mays
  Coding DNA Sequence Number=SeqID_37509
  Subcellular localization annotation: CTP_CleavageSite=51; ConfidenceScore=5.44e-01
MLFRLPGLLLSPRSSCFHHAPCAPVFAGGIRVRAIPQRSHRRGACALRFLPAALSRQWSSTRMTTSLVVERSEPGCGLPPALNFKDVHHPCWGGRRAKLGSCLPHGLRVWLPGLDGFGAASSVACRRQAGRGCSSTARLMVAPCAGLPHPWRTAPTSPRGSYKTSYAAEVAVAFLDGLVLTPVGGQGARTFPHAVRRLSSPEDGGEDLFRMVHALRRPSPLSHRLGGFRKGSGRELSSATLLASDQQAGFMGTDLTGLAYTTYRDAPALGGGTPSVAARRSPSGLGPDPGFPSAFDEGALVFGCGHFCMNLSEVWTRRESRRVFGGRQASAP

SEQ ID NO: 80885 - protein, 561 aa, Zea mays
  Coding DNA Sequence Number=SeqID_37510
  Homolog annotation: Hit_ID=Q8LJ29; Match level="QueryCoverage=87%, HitCoverage=95%, E-value=0.0, Identity=70%"; Hit description =Putative uncharacterized protein P0674H09.17
MVQLFLQVPAECGSVNTVVVEGRRSLFHNVESIIKSLTKSAGRYEARLWLCATVSLVHSLSDCGQRDLFLDLLERKNSRRDVAARLLRMIFDKKPRMVGSILARKGHILEDFFRGNPNRIMQWFGHFAVTGESTHRKGAKALSQFAFVNRDRCWEELEWKGKHGQSPAVVATKPHYFRDLDVLETVENFLEYVPDFWSSDELANSIKDGEILQIDEEYFVDQFLYLMYEENSKDAWHVVEDFLMDEQFSSLCQHLLIHLDEERLLGFLNSLGKLINPTMQCKELTFPCCWLEVLLSGHYDHISLDDLVFLNCVIAKGRQLWRLMNDEEQHEEWGQMEELLKGGNHLTDADHFALMKELVETELPGVLKWVGIQSWIIFCELSKECKSGDSCESFFSHNKIEFHKADDYSLVRNYGFSISHMPDIDVEDLTRSSHKRRKRNRRKRHRYESDEDKFDELLELGSSDGKNGVESQRGSWRLSTDGFSASWDIMHSGIAERCMRSRTTLFSWDAEGIEYGPGISLKPIWTLELVVENSGDARKYESLLTLPVILRKRWLLKQLKK

SEQ ID NO: 80886 - protein, 182 aa, Zea mays
  Coding DNA Sequence Number=SeqID_37511
MARGLGPTRHASWPRVEEAKPPRAVHATAQRLQASLHFHPDQQVKGRTAVQAACNRAKWARPFDFQRTQHGGPSPRVMQPARRSLRASNCTTTRTTTTPPRLRNQYRDSRQPCGPGKGDTPKRILLREGNRLRASLLIRGSKAGPSVVPRRGLTAASKRVGSTPTTGQRFEGQPLGRVQQPP

SEQ ID NO: 80887 - protein, 143 aa, Zea mays
  Coding DNA Sequence Number=SeqID_37512
MGEATSGRDRSVVEAVRRRERRWGVAGCPAGEKMGRWRLTSGGGAGHWRPRPLVEASKRAGAQGWMSWPRIRVSWRWASDKLADGPHTAYVPVFIFLQDCNLADGEYILMPEQGVAHEVAQDPAPEPAIKDLSAPALEGKPRF

SEQ ID NO: 80888 - protein, 323 aa, Zea mays
  Coding DNA Sequence Number=SeqID_37513
  Gene Ontology: Mol. function=voltage-gated anion channel activity; Cellular component=mitochondrial outer membrane; Biological process =anion transport
  Homolog annotation: Hit_ID=Q9SPD7; Match level="QueryCoverage=100%, HitCoverage=100%, E-value=1e-147, Identity=85%"; Hit description =Voltage-dependent anion channel protein 2
  Pfam annotation: Domain name=Porin_3; Domain location=5-316; Score =342.2; E_value=9.2e-100; Accession=PF01459.13; Description =Eukaryotic porin
MAAAGPGLYSEIGKKARDLLYKDYHTDQKFTLTTYAANGAGVCHCYSWRILPCRFSPCESKCLPVVYLKATTAYQCLLYSDFILLLQAITAASTRKDEAIFNEIQSQLKHNNVTVDVKATSESNVITTITVHELGTPGLKAILCVPFPYQKSAKAELQYLHHHAGVAASVGLNANPVVNLSGVFGTKAIAVGADAAFDTSSGDLTKYNAGLSYTTPDFVAAATLNNKGDNIAASYYHSVSPTTAVGGELSHSFSTNGNTITFGTQHALDPLTTVKARFNNYGMASALIQHEWRPKSLVTISTEVDTKAIEKSSKVGLSLVLKP

SEQ ID NO: 80889 - protein, 130 aa, Zea mays
  Coding DNA Sequence Number=SeqID_37514
  Homolog annotation: Hit_ID=Q6QP51; Match level="QueryCoverage=53%, HitCoverage=33%, E-value=2e-13, Identity=62%"; Hit description =Putative growth-regulating factor 1
  Subcellular localization annotation: CTP_CleavageSite=72; ConfidenceScore=5.51e-01
FALFTPPLGDFQQRHSPRSDCCASHPGKANNSKFGLRRNRKLRLARPHGSASTSASEGDLRLARPQGSASTSASEGGLRLARPQDSASTSASGGIASSLDPDLGLRRSLRLAQPWARTDRAAGDTSLPYP

SEQ ID NO: 80890 - protein, 43 aa, Zea mays
  Coding DNA Sequence Number=SeqID_37515
MAGGNSLAGAKERWLADEGKFGTTLIFGSSGFEFGKAENTDDL

SEQ ID NO: 80891 - protein, 177 aa, Zea mays
  Coding DNA Sequence Number=SeqID_37516
  Gene Ontology: Mol. function=transcription factor binding; Cellular component=intracellular; Biological process=regulation of transcription, DNA-dependent
  Homolog annotation: Hit_ID=Q3S835; Match level="QueryCoverage=97%, HitCoverage=98%, E-value=1e-85, Identity=84%"; Hit description=RAB7
  Pfam annotation: Domain name=Arf; Domain location=1-168; Score=-97.3; E_value=0.038; Accession=PF00025.12; Description=ADP-ribosylation factor family
  Pfam annotation: Domain name=Miro; Domain location=11-120; Score =31.7; E_value=2.7e-06; Accession=PF08477.4; Description=Miro-like protein
  Pfam annotation: Domain name=Ras; Domain location=11-170; Score =237.3; E_value=3.5e-68; Accession=PF00071.13; Description=Ras family
  Pfam module annotation: Pfam domain module=Arf::Miro::Ras; Domain location=1-168::11-120::11-170
MESWRRRTLLKVIVLGDSGYVSKKFSQQYKATIGADFLTKEVLIGDRLVTLQIWDTAGQERFQSLGVAFYRGADCCVLVYDVNVKRSFNTLDTWHDEFLNQAGPSDPQRFPFILVGNKIDLDGGSKRMVPEKKAREWCASKGDIPYFETSAKEDHNVDTAFLCIARLALEHEHDQDM

SEQ ID NO: 80892 - protein, 695 aa, Zea mays
  Coding DNA Sequence Number=SeqID_37517
  Gene Ontology: Mol. function=oxidoreductase activity; Cellular component=mitochondrial matrix; Biological process=metabolic process
  Homolog annotation: Hit_ID=A3B692; Match level="QueryCoverage=59%, HitCoverage=36%, E-value=0.0, Identity=86%"; Hit description =Putative uncharacterized protein
  Pfam annotation: Domain name=Aldedh; Domain location=50-433; Score= -187.3; E_value=2.2e-06; Accession=PF00171.13; Description=Aldehyde dehydrogenase family
  Pfam annotation: Domain name=Cupin_1; Domain location=558-693; Score =78.0; E_value=3e-20; Accession=PF00190.13; Description=Cupin
  Pfam annotation: Domain name=Cupin_2; Domain location=593-669; Score =34.5; E_value=3.9e-07; Accession=PF07883.2; Description=Cupin domain
  Pfam module annotation: Pfam domain module=Aldedh::Cupin_1::Cupin_2; Domain location=50-433::558-693::593-669
  Subcellular localization annotation: CTP_CleavageSite=51; ConfidenceScore=5.09e-01
MGQSGRDSQACTWKDKVAAHAVIRDGFSARGFRFQPSGSAEFCCSVQGSWTASANWNWIVDPLNGDKFIKVAEVQGTEIKPFVESLSKCPKHGLHNPLKAPERYLMYGDISAKAAHMLGQPAVLDFFAKLIQRVSPKSYQQALAEVQVSQKFLENFCGDQVRFLARSFAVPGNHLGQRSNGYRWPYGPVAIITPFNFPLEIPLLQLMGALYMGNKPVLKVDSKVSIVMEQMIRLLHDCGLPAEDMDFINSDGAVMNKLLLEANPKMTLFTGSSRVAEKLAADLKGRVKLEDAGFDWKILGPDVQEVDYVAWVCDQDAYACSGQKCSAQSVLFMHKNWSSSGLLEKMKKLSERRKLEDLTIGPVLTFYSEDLVENTDDPDKIFASFATAVTTEAMIEHMNNLLKIRGSKVLFGGEPLANHSIPKIYGAMKPTAVFVPLEEILKSGNFELVTKEIFGPFQVEFLDTWMYLGDPLTGQPTPEFERGPRALHRTTGEPGPKNSAWHARLQVGIHETIYGNVTFPSHCKIQDFCIADLSAAATPGGYPCKPPKDVTADDFHYGGLATPGTALKPFKISLGSAVVTTFPGLNGLGISAARMVMVPGGVAPLHSHPGGTELIFVIEGSVVCGFISATLNRVYTKTLYAGDLMVLPQGQLHFQYSHGNTTAVTLSSFSSDNPGLQILDFALFANDLPTEVVNK

SEQ ID NO: 80893 - protein, 305 aa, Zea mays
  Coding DNA Sequence Number=SeqID_37518
  Homolog annotation: Hit_ID=Q6J9V9; Match level="QueryCoverage=44%, HitCoverage=47%, E-value=3e-63, Identity=89%"; Hit description =Putative uncharacterized protein
  Subcellular localization annotation: CTP_CleavageSite=52; ConfidenceScore=5.18e-01
MAGASDTSGRRSGRRFTSIMMTASKKGSGKGIFRKRILLSEGNGSRALLLIRGSKVAPGGVRQSPQSTRAPSPLLISGSKAGPSEGFDSRPRARRVRDDPGYVRYMVEARATLPRYLRTFPRPAGTICNGIPPEGGTEPSGPIKWVRVQQITCSLKTQSLTMHPGCGQAAWENNKADQGITKRIKTFRGLGGYTRRENSTVRPAPATVSTTRVRLTTVSHSLSRVQPRAQQGAPPRPTPGLDLSLGLGRRSPPRPTPGLDLSLGLRRRSPPRPTSASALGGVTASLYLGLGPTTLQGIHHYPTSS

SEQ ID NO: 80894 - protein, 513 aa, Zea mays
  Coding DNA Sequence Number=SeqID_37519
  Gene Ontology: Mol. function=RNA binding; Cellular component =ribosome; Biological process=translation
  Homolog annotation: Hit_ID=Q6L5I7; Match level="QueryCoverage=99%, HitCoverage=84%, E-value=1e-146, Identity=56%"; Hit description =Putative 30S ribosomal protein S1
  Pfam annotation: Domain name=S1; Domain location=280-352; Score=3.7; E_value=0.11; Accession=PF00575.14; Description=S1 RNA binding domain
  Pfam annotation: Domain name=S1; Domain location=359-431; Score=39.1; E_value=1.6e-08; Accession=PF00575.14; Description=S1 RNA binding domain
  Pfam module annotation: Pfam domain module=S1::S1; Domain location =280-352::359-431
  Subcellular localization annotation: CTP_CleavageSite=52; ConfidenceScore=5.66e-01
MPPPSLVSILPAASISPRRRQAKHPKTPTASHPFFSRRLVSQPPRHASISPSAAGGSGSDELHLLEKPLPAVAEDNEAEEELESAPVSSTEEALAPFLKFFQVKSTDPDVGADTADGEVPEEASRRDVLSAAGERGVSYYDPKPGDFVAGVVVRSDGRTLDVDIGSSGEPALMLAKESAPVPAEEFGYLACDVASKCAAEFAAEGRVGVVVRQFRGGGEGDGEAIIGRNGKEKVAPVLRADNITLIYLFPALKGLKLKLLKRGSENGFNKMYGVLKFVEIKQLNVPIKIKIYEWNASGLLSRIEGLRAFLPKPEMMTRPRNFTDLKNKVDQEMHVCITRIDEETNELIISEKEAWAVTCLREGTLLQGTVRKLFPYGAQIRIGETNRGGLLHISNMTHGKLRSVADVLKVGETVKALVIKSTPDRIALSTKDLESEPGLLITNKEKVFSEAEEMARRYREQIAEPQPPGSIAAEDSCDDAVPFNDESRSYANWKWLKFSKSDDVANPKSGVES

SEQ ID NO: 80895 - protein, 387 aa, Zea mays
  Coding DNA Sequence Number=SeqID_37520
  Subcellular localization annotation: CTP_CleavageSite=67; ConfidenceScore=5.01e-01
MAGGNSLAGAKERWLADEGTGSCSVTKVPVSECLVPRLSCAKTVSKGFGLSSNFPRMCSRETLGDTRVSHGSQPSSSRLWPSSEQLERQWSHADMKSHMAPGSRSPEKFQLTSGSSSSSEPAGPEVETAVSRSQVDHIWYPGRSGYALTKALTEAGSLGGSKLNLKGTGWKTEGTCWLVDGGEVASEMECVVISGARLMPDKSLAKVPASSVRLGLAFCWDATPVVVSGARITPDMSPAGVPASSTRSGPTAVEVLPLPGHGCPVSVSSDEEGGRVDSGVPLPPRGDVVVEFVSAGRADDRRCCRAAGEGVPCHSRRQGTLTRGSQSRAPSRAEESAEDCSSRTQRESIVNTQRAPTWRANCRRFGPGDPQPDRLVNFVSRAPVQMG

SEQ ID NO: 80896 - protein, 270 aa, Zea mays
  Coding DNA Sequence Number=SeqID_37521
  Homolog annotation: Hit_ID=Q6L5I8; Match level="QueryCoverage=23%, HitCoverage=77%, E-value=8e-07, Identity=51%"; Hit description =Putative uncharacterized protein OJ1741_B01.6
  Subcellular localization annotation: CTP_CleavageSite=2; ConfidenceScore=5.26e-01
MTASNAASITGTATHGATGSDGSMVVRSRGSQQIGLQYGDGCRQSQTQSMGASWDGGSRSQLLNEHSADIRDPAAGAFSGVLVETTPPPPAQAHEAFAFLSGGTAEGREPNEQASHQRRLLGPEWMGFMLRVRLASFFVGAAAAAAGGGYFLYKDYKLANDSLALKVRTPPLFLLASHQILDCCARIATGALGGGDSEAVMLEAHRHVACGMGGSRVNPRQEGVPLSFSPGRHATHILFDDPMTVVWFGFTKNTSFGRLMQGWVAFLSIM

SEQ ID NO: 80897 - protein, 181 aa, Zea mays
  Coding DNA Sequence Number=SeqID_37522
MELEKRWPCSAKVCAVWVHRTVRWCTRQCPVRQAGSGELAALGTSTAVYGINHRTVRWCTGLSGEPFTGEVVGLGKPSKAYDYNSPNCPVRHWTVRRKQIRIGQCPVVHRTVRCASRQKARIAFLQCSQRLLAALGAIKGTPWCMEKTSKHSLSIVDHSHFVLAHLFDILSDLSSVLVRNS

SEQ ID NO: 80898 - protein, 351 aa, Zea mays
  Coding DNA Sequence Number=SeqID_37523
  Gene Ontology: Mol. function=hydrolase activity; Cellular component =extracellular space; Biological process=iron ion transport
  Homolog annotation: Hit_ID=Q10PD0; Match level="QueryCoverage=82%, HitCoverage=84%, E-value=1e-119, Identity=72%"; Hit description =Purple acid phosphatase 1, putative, expressed
  Pfam annotation: Domain name=E2F_TDP; Domain location=2-61; Score =37.6; E_value=4.4e-08; Accession=PF02319.11; Description =Transcription factor E2Fdimerisation partner (TDP)
  Pfam annotation: Domain name=Metallophos; Domain location=74-270; Score=30.8; E_value=5e-06; Accession=PF00149.19; Description =Calcineurin-like phosphoesterase
  Pfam module annotation: Pfam domain module=E2F_TDP::Metallophos; Domain location=2-61::74-270
MGNSLVTATYCDLNPMAMQAAQGKWPPSVNYAKRRIYDITNVLEGIGLIEKKLKNNIRWKGVDDSRPGEVSDDMSILQMGRVGEKLDIDFVISTGDNFYKNGLKGVHDQAFKESFMDIYTAQSLQKPWYSGNHDYRGNALAQLSPVLRKIDDRFICMRSFIVNASITEKQLVDFFFVDTTPFQLEYWTHPGKHRYDWRGVAPRGKYIANYLKDMDVAMKRSTARWKIVVGHHTMRSVSEHGDTEELLELLLSVLKDNDVDFYINGHDHYLEHISSRDSPLQYFTSGGGSKAWRGVFHPNKDKLRFFYNGQGFMSLQLNQDQAHFIFYDVFGNILYRWSSRHPQSSTYLDEE

SEQ ID NO: 80899 - protein, 574 aa, Zea mays
  Coding DNA Sequence Number=SeqID_37524
  Gene Ontology: Mol. function=calmodulin binding; Cellular component =nucleus; Biological process=glucosinolate biosynthetic process
  Homolog annotation: Hit_ID=Q6L5I6; Match level="QueryCoverage=99%, HitCoverage=98%, E-value=0.0, Identity=71%"; Hit description =Putative uncharacterized protein OJ1741_B01.8
  Pfam annotation: Domain name=IQ; Domain location=116-136; Score=29.8; E_value=1e-05; Accession=PF00612.18; Description=IQ calmodulin -binding motif
  Pfam annotation: Domain name=IQ; Domain location=138-158; Score=21.4; E_value=0.0033; Accession=PF00612.18; Description=IQ calmodulin -binding motif
  Pfam annotation: Domain name=IQ; Domain location=164-184; Score=6.1; E_value=9.6; Accession=PF00612.18; Description=IQ calmodulin-binding motif
  Pfam module annotation: Pfam domain module=IQ::IQ::IQ; Domain location=116-136::138-158::164-184
  Subcellular localization annotation: CTP_CleavageSite=43; ConfidenceScore=5.62e-01
MGKSPAKWIKSVLFGKRSSSRSGSTKAKDLSKGTTNKAAAAAAAAAGKEPAFSESSPVISEPVLVSAHNNETAREAAKGENSSVQEVPVTDVSQDLEKQGTVGSDTSNDAERLREEQAAVKAQAAFRGYLARRAFRALKGIIRLQALIRGHLVRRQAVSTLRATWLIVKFQALVRGRNVRLSNVSIQATTELSQQNFGGSKPGSWKEKLSSNAFARKLLSSPIVVEALHVQYDEMDPNSAFNWLERWTVSHVWKPISQPKRVGTDAKPHTRKASYAMETESAKLKRNARKSPAVPFEPSQTNTTIENEKTRRNPRKLSSTPAESVPDGQLTELEKVKRSLRKVTSSTVETSKVPSPTTEIPDRQEVQCERPLRSAKQAPIHVENQEPQNVNLSENAKMDILVPDIQPDVEVASDLVTITNEEKVDETPSVVAPAAEIMPLQDINSEENALVNDVEERSKEEHSSTDNLKGSKRRSSFSAKPEYPENGSKNSPALPSYMAATQSAKAKLRGNSSPRLSSDSAEKNGFTRRHSLPSPNNGKIISHSPRTQRPTHAGGKDGAKGDKAMLSSRDASGM

SEQ ID NO: 80900 - protein, 71 aa, Zea mays
  Coding DNA Sequence Number=SeqID_37525
MALCGIWRGFDLFDVKLERELIAAEVVVLAVAGGDRVAGAGTQAAPRQDMPRVLDGRVGADGCSVEPSTVE

SEQ ID NO: 80901 - protein, 176 aa, Zea mays
  Coding DNA Sequence Number=SeqID_37526
MADPRRSHAIRPIWAPTTSFEGPYAQFGRWRNILGLTVGRDGDKGVIHGVMRRRGRALSSDPRNSTAEPVSENPGEGIRYALNQVKTLSEIHGGVHGVRSLGLAREQGGHGHDWVRTTSINPVGQQPHRPRRSMRGEHGAEETSAVDVIVDITPQPITLNQRSKSDKYHKNKHSSI

SEQ ID NO: 80902 - protein, 153 aa, Zea mays
  Coding DNA Sequence Number=SeqID_37527
MEQDADPTTSLLGGGPASTNLEDVIGGCDDVRVGGRLLDEDEEEEEDVPLIRKSSRSSRSSDIPIDPVGQEITRTFSHASSTLEGGLVHEDTLALDVVGQSHSAPLGTTEGASASEGAAKDDPAPEGGAKDDPTPKGGAEDNPAPKDAGPGSS

SEQ ID NO: 80903 - protein, 182 aa, Zea mays
  Coding DNA Sequence Number=SeqID_37528
MEKGGGGLTTAVACADDETGSERSDDRVVVRARVWGGEARAGVRGRKNGKGEKEGGGRGAPERWRASGGRGIGARVRAPSVSRGSGATYRSLRALERGDWAGRGARALGQVGPQGGGHVGRAAGRSRLRRRTASVVGPIEGARSCARLSRPRGGGRGCWAEGGLGLIPFLFLFIFYSNLFGG

SEQ ID NO: 80904 - protein, 197 aa, Zea mays
  Coding DNA Sequence Number=SeqID_37529
  Gene Ontology: Mol. function=transferase activity; Biological process= response to stress
  Homolog annotation: Hit_ID=A2Z9J5; Match level="QueryCoverage=37%, HitCoverage=34%, E-value=4e-15, Identity=51%"; Hit description =Putative uncharacterized protein
MGGERFLRDGAAAPRSRPEAEPNRGQVVQVFDEMDQVDVRFKGDEIGTMLVTQGIILMPTGTKSITKKLPTALLTLKGMIDGDKAEATEQVAAALAQLEDAFTACNKVQHFLVGDDIGFLDIIIESYVGWCRAVERIAAQSVLDEMRTPRLATWAARFCEHEAISQDMMPDTRRLVEFGEALRAALVANANANAQRM

SEQ ID NO: 80905 - protein, 188 aa, Zea mays
  Coding DNA Sequence Number=SeqID_37530
MGRHPTSPSHRIVGPSSFFGLADESEIAFSRRAMPGCIMFKSTPLENEDDLRITFGPIVCTNETTLVPGAEDANSLFDGHEEDILGVGENCTPDPSTALKGKRKVFHDSLKPRKKKELRDDYMIRIVDVFESRTFSSNKSISSYDLMLRPDDDQNDDEITEEFIVPLVALDMCGSSSSGVSRRAMAET

SEQ ID NO: 80906 - protein, 463 aa, Zea mays
  Coding DNA Sequence Number=SeqID_37531
  Gene Ontology: Mol. function=transporter activity; Cellular component= integral to membrane; Biological process=transport
  Homolog annotation: Hit_ID=Q652N5; Match level="QueryCoverage=100%, HitCoverage=89%, E-value=0.0, Identity=75%"; Hit description =Putative sialin
  Pfam annotation: Domain name=MFS_1; Domain location=130-422; Score =97.3; E_value=4.9e-26; Accession=PF07690.7; Description=Major Facilitator Superfamily
  Subcellular localization annotation: CTP_CleavageSite=40; ConfidenceScore=5.48e-01
MTRLQKSGKFLQPVLDSSRNYLTSTFYNASLKRRVLSRVECFVSSDPINNGWLKPRRSENFTSLESACVQPEYKLPVRTRADCKAEQYEITGSPLSPSDVPADAVMIGDTNEISPWWQEFPKRWTVVLLCFFAFLLCNMDRVNMSIAILPMSSEFSWNPATVGLIQSSFFWGYLLTQCILILGGIWADRFGGKGVAMPAMNNILSKWIPVSERSRSLALVYSGMYLGSVTGLSLSPLLISRFGWPSVFYAFGSLGTVWFALWQSKAHSSPDDDPELSKAEKRHILGGSALKEPVTSIPWRLILSKAPVWALIISHFCHNWGTFILLTWMPTYYNQVLKFNLTESGLLCVLPWLTMAVFANIGGWIADTLVQRGVSVTNVRKGSDAFSQSGLYSNHQDIGPRYAGVLLGLSNTAGVLAGVFGTAATGYILQKGSWDSVFKVSVVLYIVGTVVWNVFSTGEKILE

SEQ ID NO: 80907 - protein, 105 aa, Zea mays
  Coding DNA Sequence Number=SeqID_37532
MKLGNMIWHSPCPRMMPQKWEKLPTNEYIEKDITPTVGKTHCSGFDTYLGTASTIGVTSVTAVIEDFYRGSNDSAFVRAILQKALATSEQLFRETDIYITADERA

SEQ ID NO: 80908 - protein, 252 aa, Zea mays
  Coding DNA Sequence Number=SeqID_37533
MGAPKVHPSAEAEIVPYNKPIGRTKNLWADYFKINSKIRGLWGTDIPRSTRRREGLTWGLRLVTPQGHPFVGRAKATSGMGRPEKATDSSPNPPQEVGYYASQSGSNLQKIVCPSHVRPTRAIELQSTTPSYPKAPQGVTLGVRSDSKRRQSLPQTDLEIGSVDRSWVARMSCYMGLELSLGVELEKLCYRLGQLLDYVGAHGTSLVEHLDNAPCRIWDIADFDVHRGAAVALLMGKICFDCSLQDIVVPFG

SEQ ID NO: 80909 - protein, 210 aa, Zea mays
  Coding DNA Sequence Number=SeqID_37534
MGKSNKRKREPTPPSEDFGNSEYSEEEFSSESEGSPAPVSPPASSDDSDDSQGLAAEVWTYIRAVERSGLEGSDESEYSSDEEDSSEEGGGGDGGDDDDDDEATATMTVTAAAGAATAAARVATAAAVGVLGPTAHPGLPLKVRAALRCVTPYVLAMDPGDICPPQAPDLWVDFEIISPKILGPACGPRTSLSAPKVHPMGVAPELRVDF

SEQ ID NO: 80910 - protein, 178 aa, Zea mays
  Coding DNA Sequence Number=SeqID_37535
  Subcellular localization annotation: CTP_CleavageSite=34; ConfidenceScore=5.40e-01
MGGGLLVAASALRSALPLFGPPEQKSSSSPLLERATARRSSVFCCSACPPIEWGCSYLRRWNQSSVCNGTLNASVFVHCGCRGLNMDVCASESCFSRKVMSEVSVSRRRRSPSARSALPLTRTLTRPWGSVTDAVEKARRIASAEELPNVKTCSVHGITYPNVSYLSQKVMSEDPLSK

SEQ ID NO: 80911 - protein, 144 aa, Zea mays
  Coding DNA Sequence Number=SeqID_37536
MGKSNKRKREPTPPSEDFDNSEYSEEEFSSESKGSPAPVSPPASSDDSDDSQGLAAEVWTYIRAVERFGLEGSDESEYSSDEEDSSEEGGGGDGGDDDDDDDGGDDDGDGGGRGGNGGSKGGNGGSSRGSNSGGSSKGSNKASG

SEQ ID NO: 80912 - protein, 115 aa, Zea mays
  Coding DNA Sequence Number=SeqID_37537
  Subcellular localization annotation: CTP_CleavageSite=71; ConfidenceScore=5.11e-01
MALFFPSSFEGEGIEKMARHVFVPWLGTFASFFQVIRVHSFVGKVDNGVFRESFFSSGSTMRCRVPSSSTMDEMVPKQNIVLGQRTILHLEVMAIEIAWIKDTPYLARPGLTVYV

SEQ ID NO: 80913 - protein, 548 aa, Zea mays
  Coding DNA Sequence Number=SeqID_37538
  Gene Ontology: Mol. function=cysteine-type peptidase activity; Cellular component=protein complex; Biological process=ubiquitin -dependent protein catabolic process
  Homolog annotation: Hit_ID=Q5JK78; Match level="QueryCoverage=91%, HitCoverage=99%, E-value=0.0, Identity=71%"; Hit description =Ubiquitin carboxyl-terminal hydrolase
  Pfam annotation: Domain name=UCH; Domain location=192-539; Score =176.9; E_value=5.1e-50; Accession=PF00443.20; Description=Ubiquitin carboxyl-terminal hydrolase
  Pfam annotation: Domain name=ubiquitin; Domain location=46-116; Score= 20.6; E_value=0.0023; Accession=PF00240.14; Description=Ubiquitin family
  Pfam module annotation: Pfam domain module=UCH::ubiquitin; Domain location=192-539::46-116
MPTYLMGFHLNPLINPWVEKLAQTHVLIEQKSTGFRVPIAISRGVSVKWQKELFPGIEIDTSQPPIVFKTQLYTLTGVPPERQKIMVKGGILKDDADWSTLGVKDGQKLMMIGTADEIVKAPEKGPVFVEDLPEEEQVIALYASCAHLSLQLWAIGGIPIPEFSKLSFFGDIHEMGTYVLYVPMALGVGLMGHSAGLYNLGNTCYMNSTLQCLHSVPELKSALLSYSDTVRGNGIDQASHNLTVATRNTFGDLDQSVRPVAPLQFLQTLRKKYPQFAQQHNNVYMQQDAEECWTQLVYTLSQTLTSDSSESAALPMKQLFGIDLAGEVHRIAYNYRRKIWYRSSSNQQKIMVHCAESGEESMETESVYSLKCHISQDVNHLHEGIKHGLKTELEKASPTLGRTAVYTRESRINELPRQKVDYPLELDVYEFCSDELKQKLQAPRQMLRDAENAKFGLKAQGKASGFKENEKQLTGVYDLVAVLTHKGRSADSGHYVGWVKQDDGKWIEFDDDNPNIRKEEDILKLSGGGDWHMAYICLYKARMAELKS

SEQ ID NO: 80914 - protein, 313 aa, Zea mays
  Coding DNA Sequence Number=SeqID_37539
  Subcellular localization annotation: CTP_CleavageSite=87; ConfidenceScore=5.59e-01
MQAACNRAKWAHFSDSQHAQHGGPGPRVMQPARRMLRACNSTATCATTAPPRLRNQYRDSGRPSARPSSASLARRRSGRRFAFAIMTASEKGPGKGDTPKRILPREGTRLRASLLIRGSKAGPSEGFDSRLRSRGLYTHYWSEVQRPAPRKGSTAASGYSSSAPITDQGARTRARPRKTANSAPPDPRLGLGLSPERRRTPLRPTQGSDLGSAPEDDELRSARPQGSDYALTSADGLRLARPGGSDSTSPTEDRLNLGFGGASTSPNLGRRPATSTGGTIITLPRADLGHGDKIGVPSGSLRQIGDDGAPHTL

SEQ ID NO: 80915 - protein, 458 aa, Zea mays
  Coding DNA Sequence Number=SeqID_37540
MESHDLRAEWESRLVGGYEIDGSGYGYGAASPLQPNRILAEYVDVYSPLLYTPNPPQVVSIATTAQEKMKLWKETSRSSKITTSSRCGLAATPSRLPVKAALSTFLFRTLIYCKTYMDVSDMARLRHTARKSVIPFLPSRLAERPLRRPVAGQSSHLERLHHRLREEQERRRQEQRSSSLSLHQEIESVRSCSPMLPLEPPPAPPLGAPASGVAAGGDPDNGGGDDSSSHDTDFSANPEPEGWVARPITRDAARGCHFHDALDTLLRRAFDRHTWSVEYRCVVYQHSRGVYPDRWEATCLVRCPEDSLQGAEACSEHYSISERDSAEAAMQDAARRALSHYCSVFGGAADGLDLKYYPRRSSGSTGGVIVSPVGEGNPRLSSTVNLAAVLNTELDHALDELSRARAEIALLRAERAERRFLDGGSPAPVGTQHPYRSPQRGHQSYGNPACKTKINLEP

SEQ ID NO: 80916 - protein, 57 aa, Zea mays
  Coding DNA Sequence Number=SeqID_37541
MESHDLWPERESRLVGGNEIDGSGYDYDTGCQHCNHCSGEDEAVEGDFQEFQDYDEF

SEQ ID NO: 80917 - protein, 72 aa, Zea mays
  Coding DNA Sequence Number=SeqID_37542
MGKPIPSLLMLLLGRVTALVPTITGMGDHVSGRVRRAICGQVHSDHASPWIRVHRPSWFLLSKWIQPIPDLA

SEQ ID NO: 80918 - protein, 135 aa, Zea mays
  Coding DNA Sequence Number=SeqID_37543
  Subcellular localization annotation: CTP_CleavageSite=50; ConfidenceScore=5.24e-01
MNAGCRRWEGESSKSPAPNKQSPALAERWATGSKKSSSHQFLKSVGIKTSASSKASSSNKSELREQLAAEATAAVQGELDLLRKKCEEAEEQQARTQRELEEYKKIIEKNSKEMEETNVLIKKLLSLHGNSSSST

SEQ ID NO: 80919 - protein, 173 aa, Zea mays
  Coding DNA Sequence Number=SeqID_37544
MELLSKSYPTKEKTLKGMLVIWESRVSRRVIKIKEVKRKRKQMNSTGLISTQPAHENREDHDRLVVFPSSGGLLVQIGGSLTTLRSSGRGQFIVLAGGGREFRARRAAVGGGEEHWRMRISVLRRGNLTGVDLTAVASYSDAVEGLSHAAHGREAAVDGELIGYSSKAEGQSR

SEQ ID NO: 80920 - protein, 161 aa, Zea mays
  Coding DNA Sequence Number=SeqID_37545
MPPRTRLTARKSTGPISVPWHQLAPRHESSSSGSNDPIGDLEARDQLADQDLALDWAVQSRLLACAKEARAQARIKELSSTVDDLQVYCNTLHEEVHVLYSQLHPSAPAHPAEAEARPSHVAGRALGVELDLFEPPPSMRLVDVWTPTPDDEAAKSNGKQD

SEQ ID NO: 80921 - protein, 122 aa, Zea mays
  Coding DNA Sequence Number=SeqID_37546
MESHDLRAEWESRLVGGYEIDGSGYDYGAASPLQPNRILAEYVDVYSPLLYTPNPPQVVSIATTAQEKMKLWKETSRSSKITTSSRCGLAATPSRLPVKAALSTFLFRTLIYCKTYMDVSDV

SEQ ID NO: 80922 - protein, 117 aa, Zea mays
  Coding DNA Sequence Number=SeqID_37547
  Homolog annotation: Hit_ID=Q6JAD6; Match level="QueryCoverage=99%, HitCoverage=19%, E-value=1e-17, Identity=42%"; Hit description =Putative uncharacterized protein
MMKFKTQGAVADTSSDDDEDLGIPPPSPVPPRSHDHVVGSSSAAPAAPPAIDPALVAILQSLTQQQAHLAAEQARQTIQDRPDTLQQQLLADRAKHRAFMTHILQHTGAQLPPVEST

SEQ ID NO: 80923 - protein, 29 aa, Zea mays
  Coding DNA Sequence Number=SeqID_37548
MDAPTFTLGFGSGLALCGVKVKQLLLVGQ

SEQ ID NO: 80924 - protein, 43 aa, Zea mays
  Coding DNA Sequence Number=SeqID_37549
MAGNHHQHKPQRLMGAVQVKASSTKGLDLASPEPGLGCELNSQ

SEQ ID NO: 80925 - protein, 48 aa, Zea mays
  Coding DNA Sequence Number=SeqID_37550
MESHDLRAEWESRLVGKVCDLCRGLETGKEEGVEADLQEFQDFDEFED

SEQ ID NO: 80926 - protein, 99 aa, Zea mays
  Coding DNA Sequence Number=SeqID_37551
MAHRIVRCPLPTVALATVGSPDSPDYHKDIAQRIRARKGRGQEGRERDREQKFFYKKKGGKAHAGKERDSDENSSNDDDEDIVTLATNKDIVASQKFKS

SEQ ID NO: 80927 - protein, 261 aa, Zea mays
  Coding DNA Sequence Number=SeqID_37552
  Gene Ontology: Mol. function=carboxyl- or carbamoyltransferase activity; Cellular component=ornithine carbamoyltransferase complex; Biological process=amino acid metabolic process
  Homolog annotation: Hit_ID=Q8SA97; Match level="QueryCoverage=41%, HitCoverage=20%, E-value=1e-20, Identity=52%"; Hit description =Ornithine carbamoyltransferase
MAPPVDVAGLRPRLGDVEAPPKPRSSLSSVAEVESEPPGRARRRSPADAGAESEPWGRAKRSSSSSGAEPKSEPWVGRSGVRRLPGLSPSPSPRSGGAEFAVFRDLAQFIVFRDLARVRALGRAERSSPSSGTLARVRALGRAKRSFLWCLRPGLTACQPHSVEWHRSRSGAGGAVFLSGWSVERRSDGGHFGSGGRASGQRCQATFALNAPATWSVGAAIWSGLLLSEDRASGEPGTHLPLEGGLGRDGDPPGSAALVRG

SEQ ID NO: 80928 - protein, 198 aa, Zea mays
  Coding DNA Sequence Number=SeqID_37553
  Homolog annotation: Hit_ID=Q6J9V9; Match level="QueryCoverage=39%, HitCoverage=31%, E-value=3e-15, Identity=52%"; Hit description =Putative uncharacterized protein
MQVACNCTTETHPFDFDASSMEAQAHTSSVKSSEGSRPLLEQQGSPLPRREDDAPVFHPWNGSRNGCPANHPSRRINFAAGQATPLAGTGKGDISKGILLREGSGPRALLLIRAASKHSGSTPTTDKGFEGWPPEGFDSHPRTRRARDDFGYVQYMAEARATLPRGSGAALANPALAKPLTPSTYQTENSEPDHAPGL

SEQ ID NO: 80929 - protein, 612 aa, Zea mays
  Coding DNA Sequence Number=SeqID_37554
  Gene Ontology: Mol. function=nucleic acid binding; Cellular component= intracellular; Biological process=transport
  Homolog annotation: Hit_ID=A3AVH6; Match level="QueryCoverage=70%, HitCoverage=96%, E-value=7e-94, Identity=47%"; Hit description =Putative uncharacterized protein
  Pfam annotation: Domain name=NTF2; Domain location=20-136; Score =38.8; E_value=1.9e-08; Accession=PF02136.11; Description=Nuclear transport factor 2 (NTF2) domain
  Pfam annotation: Domain name=RRM_1; Domain location=306-376; Score =33.9; E_value=5.9e-07; Accession=PF00076.13; Description=RNA recognition motif. (a.k.a. RRM, RBD,
  Pfam module annotation: Pfam domain module=NTF2::RRM_1; Domain location=20-136::306-376
MDSMEQPEPKTAGHYYALQVGSVFLTGYYNVLTNQPHLANQFYTDNSSVVRLDCETGRWSFGETVEVINDMMMSMKLSKVEVKTANFLESWAGAITLLVTGLVKLKHYPVRKRFAQNIVLAPKEDGYFIFSDIFKLICDEYDDQYPFADYNCADNMPQVEASYTMAEIGSDYLDGEPEAQETVDPAENHVQHQDYLEYKAGNVIDDETHLEEHIPPFPSSTDVKRDSPLALPHPPSPTLEEPVEEAPKTYASVLRTKSKATLAITESQQAQQLAQQPQSASVHEKSNLDNHRDVSVPEDEEEFLSVYVGNLSPSTSVFDLEKVFQAFGRIKPDGVAIRSRKEAGVFFGFVEFEDMSGIQNALSASPVELNGRFVHVEERRPNCGFPRGRLVIVIVITYSAGRGRGRADFSRDQAAPEDDELRFARPQGSDSGSAPEDDELHIARPQDSDSGSAPEDDELRFARPQGSDSALTSADGLRLARPRGSDSTSALEDRLDLDLGGAYTSPNPGLRPTTSQEAPSLPYPKLTQATGNKTGVPSSSPRLQRSSDGHDTTQTGCQNLSGCHDGMALLQKVGRAGKGRDGARGPPGFETPTVGAPGRGLLRVDKQLPVKL

SEQ ID NO: 80930 - protein, 274 aa, Zea mays
  Coding DNA Sequence Number=SeqID_37555
  Homolog annotation: Hit_ID=Q6QP51; Match level="QueryCoverage=79%, HitCoverage=94%, E-value=8e-21, Identity=37%"; Hit description =Putative growth-regulating factor 1
MAVAGGWKQQSSHQQAHTPSWDSERTFSHGGRRHDKRHLWQAKQAMIHLRHNDLVKKEHSGSAPTTGQRFEGRPLERVQRSPQATRAPRPLQIRGSKADPEGIDSRLRRRARDDPGYVRYITEARAALPRLGGCSRKPGSGQTVDSVNIPARELGTRLFTRATASSAPEDEELCFARPQGSDSGSAPEDDELRLARPQGSDSGSAPEDDELRLARPQGSDSALTSDDSLRLARPGARTRPRPRKTDSTPTSKEPPPRPGLGPTTSQEGPSLPYP

SEQ ID NO: 80931 - protein, 85 aa, Zea mays
  Coding DNA Sequence Number=SeqID_37556
MAQQCQPGASVTGQLAAGEGATVDMPKSGPAVMAAAGTGKGDTPKGILLCEGSGPRALLLIRGSKAGPSEGFDSRLRALGLRARY

SEQ ID NO: 80932 - protein, 49 aa, Zea mays
  Coding DNA Sequence Number=SeqID_37557
  Homolog annotation: Hit_ID=UPI00005A975E; Match level="QueryCoverage =59%, HitCoverage=1%, E-value=7e-07, Identity=89%"; Hit description =PREDICTED: similar to Retrovirus-related Pol polyprotein from transposon 297
MTNGQVERANNMILKGLKLRIYNDLNKFGSDIKRGSNSTLGIVSTFGGI

SEQ ID NO: 80933 - protein, 237 aa, Zea mays
  Coding DNA Sequence Number=SeqID_37558
MGSARVASRPFVEVGTFQPSLGFKDFHQAARFFKDLHHPCWGGGRAELELYLPYGPAGHLFLQHSEERALTGLAEGADFDNAGPIGRKRRQLQHAWFAGSGTASGATSHRWAERGYLPAVWAAVAPHVPGDRPRRRALLGRRSCSWAVLPLLRHDASARRSVLARPGGLEWGSAGGQAAAVVGAEVVATGEGLVVDEIVSAICALGLRLFGFDSLSSPLEWGPVSSPCFEYWNSPVD

SEQ ID NO: 80934 - protein, 86 aa, Zea mays
  Coding DNA Sequence Number=SeqID_37559
MAKRSSPLSHYGGEDKTIQAMELGSTAEGGRGRHQPMWEANPRLSSLLTTAGLMNILEAKHQWKSIAPARSCTSSRGKTRPVAPAR

SEQ ID NO: 80935 - protein, 256 aa, Zea mays
  Coding DNA Sequence Number=SeqID_37560
  Homolog annotation: Hit_ID=O48967; Match level="QueryCoverage=58%, HitCoverage=32%, E-value=3e-40, Identity=60%"; Hit description =Putative uncharacterized protein
SRGKQRLTPPRGRLQGHYVAGGDDILQGLNSGSGPPRESTGPLDAQPGPTGQGPEPPRIPAGDFLSDIWRASMMMQIVEHRVETLEDFLVEEEAASCTPRVPNRPVPGTAAVHAAQQHTTAQTSRTASRAAPGALYAARELLRHPPSSTASPGAMKQWRDDVDRLLGMAHSGSTRSRPRSSRRQHEATASVRSPSVRGAQTDDLRVELNRRRAREDARVSLERVYVTAITAAWHSTPQTGVAQTGGSGAVTHDGKK

SEQ ID NO: 80936 - protein, 120 aa, Zea mays
  Coding DNA Sequence Number=SeqID_37561
MARLTGDGRGPAKGRPRSGGVSGDHVEVRVTGGGDRSRPLGAVDRCSVGSLDSLVIYSEVTPRKTRERPVCEVPRPRQWTVYGAPLAAPILDFAPTFVEFPNSFSLLVYVELYAPEINDN

SEQ ID NO: 80937 - protein, 290 aa, Zea mays
  Coding DNA Sequence Number=SeqID_37562
MVTTSSVVGRSEPGCDLGPALSFKDLHHPGWGGGRAEPELYLPRGFVGHLLPQHSRERALTSLAGGSDFDNAGLVGGERRQLQRVGLAGSAGSGSAPGAPSRRKSGCRAARIGGPPKTSRATRAAFVFWGCPAFAPVRRLYAEVGAPLVREDPSGDMPMGRWLPSSALRWWRLKKSLSPKGSPPPSALWASGSLALIACPRPSSGDVGEGIVAAAFALRPSSLQFGHWERRSLSLLPEQAAASHPSAFCCSAGPPIVGGGGCLYLRRWNRSSICNGTLSAGVLFIVAVGA

SEQ ID NO: 80938 - protein, 188 aa, Zea mays
  Coding DNA Sequence Number=SeqID_37563
  Subcellular localization annotation: CTP_CleavageSite=50; ConfidenceScore=5.59e-01
MVDTARNGSAVMAVAGGRKQRSSRQPSSRPLLGQRENPLPRREDDTPVFRSSNGSRTRNGCPANHSSRRINSAAGQAAPLAGEPGIGKGDTPKGILLREGNGPRAPLLIRGSKAGPSEGFNSRLRELGLRAHYWSEVRRSSSRKGSTAAAGHSGSAPITDQGFIGCPPKGSTAASDAERGMTLGSFDT

SEQ ID NO: 80939 - protein, 191 aa, Zea mays
  Coding DNA Sequence Number=SeqID_37564
  Homolog annotation: Hit_ID=Q6J9V9; Match level="QueryCoverage=57%, HitCoverage=29%, E-value=6e-11, Identity=45%"; Hit description =Putative uncharacterized protein
  Subcellular localization annotation: CTP_CleavageSite=46; ConfidenceScore=5.27e-01
MAATQGVAPFLKVTLPTCVLSRRGLSLHQHAPRSSPYDTRAGSHASCELVQDRRSQTATRGARNCPEVTSTPPLSPKPAGIGKGDTPKGILLREGSGPRALLLIRGSKAGPSEGFDSRLRALGLRAHYWSEVRRLTPRKGSTAALGHSGSAPTTDQEFEGWPPEGFDNRLRTRRARDDSGYVRYMAECRGP

SEQ ID NO: 80940 - protein, 346 aa, Zea mays
  Coding DNA Sequence Number=SeqID_37565
MHCALPPSEPPDGERPRCFRLAAVGGAQLRRSWYLSAIARLQGFSSGSPAASPHRWSPKTVTTSLMVGRSKPGCGLCPALNFKDLHHPCWGGGRAEPELYLPYGPAGHPFLQHSGERVLTGLAEGADFDNAGPIVRKRRQLQHARFAGSAGSGAAFGATSHRWAECGYLPARDASTRRSVLARPGGPEWGSAGGQMAAVVGAEVVAAEEVLVTDEIAAAICAPGLRLFGFDSLSSPLEWGRGRGPCRSRVCPEVIAAAVWPPGAEVVVAAAGVGGGEPPGILSSRMPSNVGGCLYLREWNRSSVCNGTLSAGVCSLWLSGLEHLGILGVIPCFSLILSTRTRLLAS

SEQ ID NO: 80941 - protein, 41 aa, Zea mays
  Coding DNA Sequence Number=SeqID_37566
MSTDEETGRAQTAHRRHCSGLGARCGIRAYPSAESILLKEP

SEQ ID NO: 80942 - protein, 198 aa, Zea mays
  Coding DNA Sequence Number=SeqID_37567
  Gene Ontology: Mol. function=kinase activity; Cellular component =ornithine carbamoyltransferase complex; Biological process=amino acid metabolic process
  Homolog annotation: Hit_ID=Q6QP54; Match level="QueryCoverage=37%, HitCoverage=40%, E-value=1e-11, Identity=43%"; Hit description =Putative kinase
MAVGEVLAPCSCDVVVVGGALEPCGSTAIGAVGSLLMPPCFHKGLRTAVVMKHAGCHHYLFTGPEVGRGGDSSEVEAESEPWGRARRRPSSEVEAESEPWGRARRSLSSEVEAKSEPWGRARRSPSSEVEVESEPWGRARRSFLWRPRLDLAAVSLTLAGGTAVGAVQAALFSCQVSQWRGEVTAVTSALSTEERVSG

SEQ ID NO: 80943 - protein, 180 aa, Zea mays
  Coding DNA Sequence Number=SeqID_37568
MEKASLEHGLLPAPLVAAHWLAAADVSRVHPQQQLPLTCPRLPVSEINAATITFPARMTLTFPPFLVRTARLATRVGAPLAALARAVAEALPLPVRGPSPVSLISRPPESTPASSVLASSPTCRRTPPCARGPIHIKPTIYIGPSVIRARAPFKQLYRIWSTDYRQSYRTATSQAHLPPP

SEQ ID NO: 80944 - protein, 283 aa, Zea mays
  Coding DNA Sequence Number=SeqID_37569
  Homolog annotation: Hit_ID=Q6QP51; Match level="QueryCoverage=73%, HitCoverage=80%, E-value=4e-12, Identity=33%"; Hit description =Putative growth-regulating factor 1
MHKGSAKTWLPFKGVTLLLKATLPTCVLSHRGLSRLQHAPRFSPYDTEAQAHTSWTGKGDTPKGILLREGNGPRAPLLIRGSKAGPSEGFNNRLRALGLRAHYWSEVRRSAPQKGSTAASGHSGSAPITDQGFVGWPPKGSTAASDAERGMTLAAKSGLGRHRKLRLARPQGSDSGSAPEDDELRLARPQGSDSGSAPEDDELRLARPQDSDLASAPEDDELRLARPQGSDSASALEDDELRLAQPQGSDSASAPEDDGLRLARPQGLDQPCHRGSHHYPTPS

SEQ ID NO: 80945 - protein, 320 aa, Zea mays
  Coding DNA Sequence Number=SeqID_37570
  Gene Ontology: Mol. function=transferase activity; Biological process= paclitaxel biosynthetic process
  Homolog annotation: Hit_ID=A4F1S1; Match level="QueryCoverage=91%, HitCoverage=58%, E-value=1e-68, Identity=49%"; Hit description =Putative acyltransferase
  Pfam annotation: Domain name=Transferase; Domain location=2-295; Score=-105.2; E_value=7.7e-06; Accession=PF02458.6; Description =Transferase family
MADALGLTQFLGAVAELARGVAQAPTVRPVWERHLLEGQRNPPRIISDGLDLWYEAEMADDDGDNIIPSSLNLKDDDMALRSFFFGPGEIAAIRDQLSPDLRKRASRFDVIAGWLWKHRTMALAPDYSADEPMLMLVVVNARGRDREATGCAGIPTGYYGNAFAIPVAVSTSGKLCANPVSYAVGLVKEAKDKVDMEYMRSAANLIVHRGRRSPRFTVGMYSLTDETKARFHDLDFGWGRPVYGGPAEAVGTPALPWLSSFILPFKNASGEDGAVVPVCLPRLAMDRLVDEMGKMRRRRSPAEVQQPRHGFPVIVKRSAL

SEQ ID NO: 80946 - protein, 709 aa, Zea mays
  Coding DNA Sequence Number=SeqID_37571
  Gene Ontology: Mol. function=methyltransferase activity; Cellular component=cytoplasm; Biological process=peptidyl-arginine methylation
  Homolog annotation: Hit_ID=A2Y8B9; Match level="QueryCoverage=95%, HitCoverage=95%, E-value=0.0, Identity=69%"; Hit description =Probable protein arginine N-methyltransferase 7
  Subcellular localization annotation: CTP_CleavageSite=53; ConfidenceScore=5.34e-01
MPSCLLPGIAPRPPPAALRSLLLRRSRMASSGPARAFQLRLNPLTGDSEWLVVDEAETEAEVAAPAPTHHKQLLAATSYLDMLNDASRNRAYRLAIDATVTDPTSRVLDIGYDESRAGTGLLSMMAARALAAAGGEGRGSVSACESYLPMGKLTRRVLRANGMENKVSEILDSELLGEGLIPTLQHAHDMLLVKNPKTVPYRATTYGVLVESTSLWKMHDLHSNEANAEDGVRLIPSGTQIVLSVKSQQHAMQCDALADEIRLLSEPFKVFEFDFSERPDSHRETKIEIKATADGHAHAIVSWWVLQLDSSGSVFYSTAPRWVRQSSGVDLPQYANGTKDWCDHWKQCVWFIQGTGAPAKKDQTLSLSASHNQTSISYQLNINDEGSRSPKSNHLTLLPERVALYGDKVWRSALISVIRNYTSERSSPICIVADDSVFLALIVSFLLPSSKVLAMFPCLRDSGLNYLQAVADANNLSMDRIKVIGKKASSLTTNDLNHEKVNMLVGEPFYHGSEGMLPWQNLRFWNERTLLDPLLSEDAFIMPCKGILRFCAMSLPDLWRSRRSLKDVEGFDHSVVNDTLGACGDLPGEQQGPCLPYYVWQCGYTKKLSEVYSLMDLNFSEPIHSCFGETKVEFAHDGTCHGFAVWIDWVLDKENSIVISTGPESRYWKQGVQLLSTPVQVNPANSVMHVEANFDADIGELTFKSTTLS

SEQ ID NO: 80947 - protein, 199 aa, Zea mays
  Coding DNA Sequence Number=SeqID_37572
  Subcellular localization annotation: CTP_CleavageSite=49; ConfidenceScore=5.04e-01
MGKPVPSLLMLLLSRGRVPLDSPTRWQGGRPSHSSNHFLQRTCKNYATSKAEYTNTQLDLPGALRPHTHQPSPSIPCQQIRAHRLGVQCPTDPDWPSCSDRTCTHHNRNGRPRLRSREGICPLPGSLRLCIKPGLAFQSSGRQVLWCRLGCWIWGYLLSSSLLRHEDVLSVSKITVYRNAMNMYVMIMQDLRTLLKKLS

SEQ ID NO: 80948 - protein, 358 aa, Zea mays
  Coding DNA Sequence Number=SeqID_37573
MAAPRTTRPVALTPRRDRRHLWQEKRAALHLRNNDRVQKVRHVIRFRILFLFLSLTTGTGKGDTPKGILLREGNGPRAPLLIRGSKAGPSEGFNGRLRALGLRAHYWSEVRRLAPRKGSTAALGHSGSAPTTDQGGNDLVMESHQRKASSPRTPSKGDQVRQITRSSLETPCSAPSKGNMALSPPLPCGKATQGPKSGLGRHRKLRLARPRAQTRARPWKTTNSASPDPGLGLGLNPGRRRTPPRPTQGSDSGSALEDDELRLARPRAQTRPRPRKTTNSASPDPGLGLDLGLSRRSPSRPTQGLGLDPDLGRQTRPRPRRSLRLAQPRARTDHVTGGAIITLPLASSGYGEQDRRPI

SEQ ID NO: 80949 - protein, 498 aa, Zea mays
  Coding DNA Sequence Number=SeqID_37574
MAEDASGESPAASPRQRSPKTVTTSPWVGRGKPGCDLGPALSFKDLNHPCWGGERGEPGLYLPRGFVGHLLPQHSRERALTGLAGGPDFDNAGLVGGERRQLQRVALAGSAGSGLALGAPSCRKSSCRAARTGGLPKTSRAARVAFVFWGCPAFAPVRRLCVEVGAPLVREDPSGDLPVGRRLPPSVLRWQRLKKSSSPTGSAPPSAPRASSSLYLSSPLERRRGRGHCCSGVRPEAIAAAVRPPGAEVVVAAAGAGGGGNPRSLFDEPKPGAAVSARTEAELAQKEDFIGRSLAGPSAGGTDAGVELSRPRARLMSSGDSWLRLRGGRPSCLLEPDFWRRPRRRWSGRSADVILWSGDPPTALPSEARSDFVEGVVDVEGAAAPPPSRPEPAASYLDLFVGNKIVCPSESYFSRKVMSEDSAIDIVEKARKIILAEEFLSVKTCSVRGVTYTSVSYLSQKVMSEDPTFEVVEKHERYSGRKDLFLRKNFDAEGVPPF

SEQ ID NO: 80950 - protein, 156 aa, Zea mays
  Coding DNA Sequence Number=SeqID_37575
  Gene Ontology: Mol. function=protein serine/threonine kinase activity; Biological process=protein amino acid phosphorylation
  Homolog annotation: Hit_ID=A7Q2H1; Match level="QueryCoverage=46%, HitCoverage=29%, E-value=1e-08, Identity=38%"; Hit description =Chromosome chr1 scaffold_46, whole genome shotgun sequence
MEEATDMFSDRNLVDKGSFGRVYIACSRMDDPNLVMLISYCSNDKHRFVVYKLIMPRDNLQDILKGIGEVMLNTGRQKNRRSASQPEDRRGTIVSGRSEDSKLSALKAYQRAKGLLSAFRPRGVPGPTSKLSPHAPAQMGRRETEREGGKTGGRQA

SEQ ID NO: 80951 - protein, 94 aa, Zea mays
  Coding DNA Sequence Number=SeqID_37576
  Subcellular localization annotation: CTP_CleavageSite=56; ConfidenceScore=5.21e-01
MALAWLGRGAGRAGGRASVLWRGQKASNTWRDRKRANLAMNPTQTSSWHLGLSHMSSSAKVALAKVTPGVLQFAPRKAIKSQVMVDFVAEWVDT

SEQ ID NO: 80952 - protein, 354 aa, Zea mays
  Coding DNA Sequence Number=SeqID_37577
MGRRETEREGGKKPEGDRRKRGNPRPSCLSRAQVGSGSSLSPWVGRDGDRRLRPRSSPSPRSGEAEFVVFRGRGRVRALGRARRSSSSLGPSPSPSPGSGEAEFVVFRGRARVRALGRARRSSSSSGAEPESEPWVGRGGVSYGARGRTWLLPLTVGPAVRSTSAQWLALDAFRYPVGHPLFICSIESDGAVVPSPGGIFSRALCPKPIVRIGQGREPWCCGQPLSQEQEGGYRHGEEPTSRGGPPRHQESRAGRRPCAIAYRLAERFGALVLLDTSSIASSHPSFRAQLSSSHSLCGAEIVSRCSRPRGTWASSFGRMDVARRLEGAADRELRLAIDPLSAGPPLPWDFIAPL

SEQ ID NO: 80953 - protein, 20 aa, Zea mays
  Coding DNA Sequence Number=SeqID_37578
MGALAHLKEMAARQVPEKNK

SEQ ID NO: 80954 - protein, 105 aa, Zea mays
  Coding DNA Sequence Number=SeqID_37579
MGTLPGGLFVEFYKHHFTSGGRSTRDTFENVAQDDDEDDDNDDDDAGAGAGAGAAGQVEIGPSQLQDAPTTQPSQLTPRRRRPRDPYTPGTDALGAKGKGKTRRK

SEQ ID NO: 80955 - protein, 152 aa, Zea mays
  Coding DNA Sequence Number=SeqID_37580
  Gene Ontology: Mol. function=transferase activity; Biological process= paclitaxel biosynthetic process
  Homolog annotation: Hit_ID=A9YCD1; Match level="QueryCoverage=99%, HitCoverage=32%, E-value=8e-48, Identity=66%"; Hit description =Acyltransferase
MATINFTVHRRPAVLVAPASPTPRELKRLSDFDDQESLRFRIPVIHFYQRKESMAMGCSGDPAVVIRDAVARALVPYYPFAGRLREHDGGKLAVDCTGEGVLFVEADADVCLEQFGDVLLPPFPCLEELIFDDAPPAAAGAAILHTPLLLIQ

SEQ ID NO: 80956 - protein, 55 aa, Zea mays
  Coding DNA Sequence Number=SeqID_37581
MAYTLTQGHQRAQTMAERANGGAGLLRVFNSNSIQVSNSNQIKYVQQFKEYLGSI

SEQ ID NO: 80957 - protein, 55 aa, Zea mays
  Coding DNA Sequence Number=SeqID_37582
MGRLEPWAKWESRLVGKVCDLYRVLETGISAMLTCLGGEVGNMEDFEEFQDYDEF

SEQ ID NO: 80958 - protein, 138 aa, Zea mays
  Coding DNA Sequence Number=SeqID_37583
MTKEASFRSQNTVHSLQDSSKAPSGHQLQGAEAAGASKEDMGISPGKSIAYSMVKTWATLQERVKSPFRSKKRLPKQKPSRISRSRSYILLRATLPTYQSMWAINLQLLLLQQAIHKLPGLNSHRHHHYNLLTLEASS

SEQ ID NO: 80959 - protein, 328 aa, Zea mays
  Coding DNA Sequence Number=SeqID_37584
MALLHSARYQQSLRRYHARGDQTSAGGAAAPSASIPPSAESDPASDDDTVGGSPPRRDLSAPRLGHRRWGLLQEPGPSRRLDRPLHSLSQLSPKDISPAHGLGNPTPTLVPPVDGPARLWPTKLLFEPTPPLSMLTPLPLAPAHRRAAEGPDSRNEQDTDTQGAITNGTLVPLPQVRTTPHIGGPAGRQNPRWLATAHSDSSDNDLRSGRPNSSSDDLRADAAAIRPSPTFPLEGRGQAEGRRAGGQSAGGTDYLVGRETSSGCLGGRWHRKQRRSRSGRRARHAAAASATNGERPSPQSLREGADRCPRGDRPQLGALRPIKDDEDP

SEQ ID NO: 80960 - protein, 175 aa, Zea mays
  Coding DNA Sequence Number=SeqID_37585
  Gene Ontology: Mol. function=sequence-specific DNA binding; Cellular component=nucleus; Biological process=regulation of transcription, DNA-dependent
  Homolog annotation: Hit_ID=A1YKF1; Match level="QueryCoverage=54%, HitCoverage=31%, E-value=1e-36, Identity=76%"; Hit description =Homeobox
  Pfam annotation: Domain name=HALZ; Domain location=65-109; Score =56.6; E_value=8.3e-14; Accession=PF02183.9; Description=Homeobox associated leucine zipper
  Pfam annotation: Domain name=Homeobox; Domain location=10-64; Score =63.6; E_value=6.7e-16; Accession=PF00046.20; Description=Homeobox domain
  Pfam module annotation: Pfam domain module=HALZ::Homeobox; Domain location=65-109::10-64
MSGVGGGARKKLRLSKEQSAFLEDSFKAHSTLTPKQKSDLAKRLKLRPRQVEVWFQNRRARSKLKQTEVDCEYLKRWCEKLAQENRRLQREVAELRRLCSAAYPFYGAAAGFGVATARVCPSSCDNDVSEAAISGAPSAAAPPPSTLFASWPPHFGPFTVVVPPLLRRQPSATTS

SEQ ID NO: 80961 - protein, 172 aa, Zea mays
  Coding DNA Sequence Number=SeqID_37586
MRGKANCCCLARVQHSVLRPGDRGRLHQGVAQHVVRRKGGTRVLGRSRSRSCGEDGSEDLPVRFGAVAARGRGVAGEGFSADDTVSVTYASGLRLFGFNGWFSSPARGHEREPSSGSVRPGAIATAILPSEMEVVVAAAAEVAGKPPGVCRPAGPPMWRLFIPAGVEPEFRL

SEQ ID NO: 80962 - protein, 220 aa, Zea mays
  Coding DNA Sequence Number=SeqID_37587
MQAVCNRTTRTYPFDFDASSMDAQAHTSCNRRAGYYVRETAPPLTPMPRLLDCGTGTATRGNPTRGPTVPVEHIDHGDQERGYFERDPSPRRKQALSPPTDKGLTPRKGSTAASKHSGSAPTTNQEFEGWPLEGFDSRPRPRRARDDSGYVRYMAEARATLPRYFWSAPLGHLADPYQTGHGRPLGSPVSNSLETPCSAPYEGNMALSPLLIVERRRRGV

SEQ ID NO: 80963 - protein, 180 aa, Zea mays
  Coding DNA Sequence Number=SeqID_37588
MGKKGSRRKGEEGRGARPQGGRRGDHRAPWKKKGRCKGDGAESVGHGTAHCACTREGAEGRKALSLLPSLKGAPWGEVELSSLLAACRGHHREEEDRLLLREGEGAGGAAPWMAEGRKGAAAGRPWKGGSSLVAAAAVKKGGRRGLAGEERRGVAAEKLEGWECKIAKCKGEGFVFIEGH

SEQ ID NO: 80964 - protein, 35 aa, Zea mays
  Coding DNA Sequence Number=SeqID_37589
MTARHCSTPSSTSRRLPLLCASSGHLVIGMAIVCI

SEQ ID NO: 80965 - protein, 60 aa, Zea mays
  Coding DNA Sequence Number=SeqID_37590
MASKFSAQRCRSKTAALDTLRTERNPVFCVEEKASRSTLVDVQSDAQIRITIVRANTDWV

SEQ ID NO: 80966 - protein, 508 aa, Zea mays
  Coding DNA Sequence Number=SeqID_37591
MDKDRQGAARKRQATVRVHEARPKRQRGTAKAEASGGGKPPLPAKVGASAPGKAPEVTVGAGGPKLTKVVPSVSGVAEAAKAARTLPPPGKRVADFGTEINVEDYLGGSDEGPLALVMPGAAIATAAPAPKAGGEALGAGGEVADFTSRTASGALTAALSAEVERLRTQHADAVREKSASDSKCRKLAEKVAALEKEKADFRRQLAGERREANEAIAKEQAAQAEARLARAEGNIAKELAGELQRRLTALESRAEGAEAAMRAEAERTRTQLMTAYRELGVRTGDFEVPEREAGLRCLEWVQEELQELPTVLAGLMSFTSLVTCEAAMNALSREGCRHFEALDQADEDFGRDIFEVEDPVVKESGGALYDRMWGSYGCEVVRARAEAARAQAERGELVDDFGALNSALPDPETTPAEAATGVALGTDPGNCGRCTRRPCTCCGRRKTFPQRWPKARPMPPQLLCRALKIQRRWGRRQRRRPRRRLPQRQGLRRWHRWCLGLRNFWMLY

SEQ ID NO: 80967 - protein, 128 aa, Zea mays
  Coding DNA Sequence Number=SeqID_37592
MTHFFSGLINLPMKIGETKHLFFLLLDLLMNGFEVPNFLVQLLLLRARYNGPDHTWASELDEAARWDDAVAGLRLVPNKAKGVPARFVCVGSATAAKASSEGWRLCLRPNICPPRDQFDKVTWCRRCR

SEQ ID NO: 80968 - protein, 60 aa, Zea mays
  Coding DNA Sequence Number=SeqID_37593
MAQLGYVVVALLVNSHQAQVFPVLAIESELGVGRDMEDVDIADSNMPMDKVETSVHMLLC

SEQ ID NO: 80969 - protein, 298 aa, Zea mays
  Coding DNA Sequence Number=SeqID_37594
  Homolog annotation: Hit_ID=A3B5S9; Match level="QueryCoverage=35%, HitCoverage=27%, E-value=3e-23, Identity=52%"; Hit description =Putative uncharacterized protein
  Pfam annotation: Domain name=DUF947; Domain location=108-241; Score= -43.6; E_value=0.0035; Accession=PF06102.3; Description=Domain of unknown function (DUF947)
  Subcellular localization annotation: CTP_CleavageSite=70; ConfidenceScore=5.14e-01
MALPHAPPQYSNVPSHIPIVHSQPQQPLQSPTIYNQQLQPPLPQLSRPPSMPPFPHQMHSQVPNSFGLTHANAPQHMLQQPMFHMMFGILHSVSNPQTNFLPGQPPLPRQPATTAAVPAAAVTNNKDVLDLVISLAAAKKPARTNTYETPKMIKKSKDLDAIGKMKSHITWIDKQLKSHSPKNVESEILLEHIKKEREAAKAGKRPYYLKKSELHERKLMNKYNEIKLADEETLEDGSQWKLASAPPNTAKLMFFRVTGYLQIDVGSMDEHSTKSDEEYESLAMRDVMATSPTMSRKL

SEQ ID NO: 80970 - protein, 332 aa, Zea mays
  Coding DNA Sequence Number=SeqID_37595
  Homolog annotation: Hit_ID=Q5YLM2; Match level="QueryCoverage=18%, HitCoverage=9%, E-value=2e-22, Identity=84%"; Hit description =Roothairless 3
  Subcellular localization annotation: CTP_CleavageSite=35; ConfidenceScore=5.22e-01
VHNSQLRTVLPSRCAHAISLRPPALPSPPSALHPRCINARGFCLSLSLRRLPPPHPSTAPLPPPWISPEGAADPPYPRPGASVPRHGRPGSTTSSSSPHHCAACPRRTPPPRPFPRRGSRPYASGSRTPSFDGVVARRPATAASSRGWARGRGGCGSGRGLRTHARRRSPSSNPPPLPLRLPFPAVHALFDCFIYLAIALPPSPSHQSTAPALPIHRYGWLRSSPRCGPRSPPARGARSDAEGDDTGGGGPCARPRLQRHPANLQRNFVDRTKIRPFVSDKNKQPYPFRANVTVLNSSTRPLKSWAALVTFSYGEILVGINGETRTRRLTEP

SEQ ID NO: 80971 - protein, 381 aa, Zea mays
  Coding DNA Sequence Number=SeqID_37596
MVRVACTLHGKRLDGGVSVLSVGVNLIWNPSGELTYARVKCYICRVIGDPQLSIIDLDRRNFTDMKTCQHILESLLLYRVKKRQTFVASVQRWYPKKRTKTKAARGKALHLKLFTAYSGGVFASNVSYCNCFRTFVSPMNCNVCVTGKTLLGRYATTHEKDARKSTGPFGVPRHQLAPRHEDSSSGSNNPIGDLEAQVDQLRSELRHRNDIWVADGERINELRTDIRHLQDQLAERDLALDWAVNSRSLAWAKEARAHARVEELSSAVDNLQVYCNTLHEEVHVLYSQLHPNVPADPVGMGAGPSGAAGEALGGELDLFRPPPSMNLVDQWSPTPDSEATKRDKKQEVCGETLHILNQGKGLLFIRLGDKYLLKKWPTKGP

SEQ ID NO: 80972 - protein, 49 aa, Zea mays
  Coding DNA Sequence Number=SeqID_37597
MGKPVPSLLMLLLSRVTALVPTITGMGDHVSGRVRGYVHYQVHSVHSNA

SEQ ID NO: 80973 - protein, 71 aa, Zea mays
  Coding DNA Sequence Number=SeqID_37598
MDHLNLQDVDSLSANLRLSGPLGRRPSGGLRKFLKMMAGRIKIGAVGGLPLPKNVTGGFGLDMKATSCAYK

SEQ ID NO: 80974 - protein, 221 aa, Zea mays
  Coding DNA Sequence Number=SeqID_37599
  Subcellular localization annotation: CTP_CleavageSite=46; ConfidenceScore=5.00e-01
MNELTGIRSAITNGTPVPPPQVRTTPLRGGSPAEQRKADEWCAVTRSSSGNDDAFCSEGPSSGNADLRLDAAARRPPPVPKLVRQGRAEGHRVGGNSPYVRPQAPRAESSPTRSKALPCDSGAGSRTGKGGYPERDPSPRRNLAPSPPLLIRGSKAGPPRVQQSPQIAWARHPLLVRGSKASPPKGSMAASGYSGSAPITDQGFEGWPPKGSQSPQTPSKG

SEQ ID NO: 80975 - protein, 434 aa, Zea mays
  Coding DNA Sequence Number=SeqID_37600
  Homolog annotation: Hit_ID=A3AWA1; Match level="QueryCoverage=24%, HitCoverage=3%, E-value=3e-25, Identity=61%"; Hit description =Putative uncharacterized protein
  Subcellular localization annotation: CTP_CleavageSite=38; ConfidenceScore=5.45e-01
SAGHQWKVAPRIPCRQRPQSPSRPQSSAHRRLLPAHPAAASAPSPTEGIPTDSAPCRLPGSPECDPLSLNPRRLNSDRRPRSRSSSRHPTIHSPRPQRADPPWLSMEGRGRCDHCEEGLMIRGSSWRAARACARISVARSDSRGNGRTWKRVEGAASSAARISGATRRRRPEQGQMALLGMRELSVFISDIRNCHNKEQERLRVESGHHTSPIPSRRSTRKTTARLAAFSACTWTAGTTHTVKRYLQLTLNVPSGETSLTFDDRVLDEKCLELQYYQKLNRLLLELEQRSGGVSKESYQTEVIAAAAAGVAAEGLSPEEAKIQAKNVAHLSVALAENAIVILMLVEDHLRSQAQHFCTSLTGDSITSSTSMTSLAASRSNSLNTAGKDPMAAGVSRRASLSSDAGGLPLDTCKLFANSDPLEKWGHGNKQNEND

SEQ ID NO: 80976 - protein, 49 aa, Zea mays
  Coding DNA Sequence Number=SeqID_37601
MAVKKMLIDKMFDTMYLLNLLDGVTWPSSLPPGQMAERVIASAGEDLEE

SEQ ID NO: 80977 - protein, 59 aa, Zea mays
  Coding DNA Sequence Number=SeqID_37602
MAATPRWATGGKSAVGGCDAGKLSPPAENKGRRSNPLNRNLALEIQEEASKNDKMITTN

SEQ ID NO: 80978 - protein, 54 aa, Zea mays
  Coding DNA Sequence Number=SeqID_37603
MGGGLLAAASALRSVLPLFGPPEQKSSSSPLLEQAHPYRVGLFVPAEGEPEFRL

SEQ ID NO: 80979 - protein, 92 aa, Zea mays
  Coding DNA Sequence Number=SeqID_37604
MGSRCGKVHTLQSVETDISACSRGYEIDGFGYDYGAASPLQPNRILAEYVDVYSPLLYTPNPPPGCQHCNHCSGEDEAVEGDFQEFQDYDEF

SEQ ID NO: 80980 - protein, 150 aa, Zea mays
  Coding DNA Sequence Number=SeqID_37605
MGKNNKRKREPTPPSEEFGDSEYSEEEFSSEPEGSPAPVSPPASSDDSDDSQGIAAEVWTYIRAIERAGLEGSDESEYSSDEEDSDGGEEGEDDDDDDDDDDGDGDSSGRSGGDGRGSTKGGNGGSGDSTRGSSRGSTKGGGGGRGRASG

SEQ ID NO: 80981 - protein, 172 aa, Zea mays
  Coding DNA Sequence Number=SeqID_37606
MVALSVEESLAQLLARIDEGNRETYRRLDSMQSTMENMEITLKGQVDKVAWKAIEVSPSTSKFRWWKTPRRCSLQKLRQAGLQLDKFAIEPPILIADRLLVPKQPTSSLQSKSCPDSKTLDQVAPYPALGKTYRGFEKLFTTIYALKVEFPTKLVSGRQLEQQPKQTHRKRD

SEQ ID NO: 80982 - protein, 100 aa, Zea mays
  Coding DNA Sequence Number=SeqID_37607
  Gene Ontology: Mol. function=double-stranded RNA binding; Cellular component=intracellular
  Homolog annotation: Hit_ID=Q5N890; Match level="QueryCoverage=67%, HitCoverage=8%, E-value=2e-14, Identity=64%"; Hit description=C -terminal domain phosphatase-like protein
  Subcellular localization annotation: CTP_CleavageSite=47; ConfidenceScore=5.30e-01
MPIQGTGGVRNIQPNGGLLAITPSVYVTVLQKIGRLRDSRVEFRSTVSSGKSRLFSVEWFPSFQSIGFGREESNSQPGNTLDDEDIELLGDDEDALEDDE

SEQ ID NO: 80983 - protein, 67 aa, Zea mays
  Coding DNA Sequence Number=SeqID_37608
MTTLSSGAHKSVPDASADIGGQGARIGPAGHVSAHHAKVKREWAWAGGEELAQVEVVTECTPHENPT

SEQ ID NO: 80984 - protein, 67 aa, Zea mays
  Coding DNA Sequence Number=SeqID_37609
MAKLVILEFESAEPAALNRDLGRAQSHTFPFFVPYGPILSARRPRVRACSGVRSPTCAVEKSLSHPS

SEQ ID NO: 80985 - protein, 267 aa, Zea mays
  Coding DNA Sequence Number=SeqID_37610
  Homolog annotation: Hit_ID=Q6J9V9; Match level="QueryCoverage=44%, HitCoverage=32%, E-value=8e-18, Identity=49%"; Hit description =Putative uncharacterized protein
MSSPYDTGAGSHTPCKLAGTKEAKPPRAKRVTAQRLQALLHLRLNQWVKGRTAMHAACNYTTEMHPYDFDASSVEAQAHTSCNWRAGCYVRKTALPLTLMSRLLDYGTGAATRGNPAHGPTVPTKHIGHRSVSRGKRRDGTGKGDTSKGILLCEGSGPRALLLNRGSKAGPSEGFDSHLRALGLRAHYWSEVRRLAPRKGSTAASGHSGSAPTTDQGFEGWPPEGFDNRLRTRRARDDSGYVRYMAEARAMLPRYPRTFPRPVGAIL

SEQ ID NO: 80986 - protein, 292 aa, Zea mays
  Coding DNA Sequence Number=SeqID_37611
MASARIAFVSLWEERNLVEVGTCQPSLGFKDFHQAARLHPLTNGERTLTSLAEGADFNNAGPIGRKRPGSGTTSGATSHHWVECGYLPAVRAAVAPRAPGDRPRRRALLGRRSCSWAVPPSLRHDASARRSVPAHSGGLEWGSAGGQVATVVGAEVVAAGEGFPTDEIVSATRGPTSSSLALIACPRPSSVDAGEGLVAAASALRSSLLLFGRPERRSLLLLQWSAAGHPELVVPQALRCGGCSYPREWNRSSICNGTLSAVVCSLWLSGPEHLVKENPRPLCDEPEPEAAV

SEQ ID NO: 80987 - protein, 107 aa, Zea mays
  Coding DNA Sequence Number=SeqID_37612
MRMKLKLMKGKIKKMSRLKMMAMIKGEMQLIKKRRMRKNQGRHTQESTKQSNEITPLTPSSATFIRGVEEALQDSDWVVAMQEELNNFTRNEEPNGSSATSKMSMVW

SEQ ID NO: 80988 - protein, 142 aa, Zea mays
  Coding DNA Sequence Number=SeqID_37613
  Gene Ontology: Mol. function=structural constituent of ribosome; Cellular component=ribonucleoprotein complex; Biological process =translation
  Homolog annotation: Hit_ID=P42795; Match level="QueryCoverage=81%, HitCoverage=63%, E-value=9e-54, Identity=92%"; Hit description=60S ribosomal protein L11-1
  Pfam annotation: Domain name=Ribosomal_L5; Domain location=34-87; Score=90.1; E_value=7e-24; Accession=PF00281.10; Description =Ribosomal protein L5
  Pfam annotation: Domain name=Ribosomal_L5_C; Domain location=91-142; Score=28.9; E_value=4.6e-06; Accession=PF00673.12; Description =ribosomal L5P family C-terminus
  Pfam module annotation: Pfam domain module=Ribosomal_L5::Ribosomal_L5_ C; Domain location=34-87::91-142
MGEGDPLQVVTAARALSWLWRKPLMAASEKKQSNPMREMKVQKLVLNISVGESGDRLTRAAKVLEQLTSQSPVFSKARYTVRSFGIRRNEKIACYVTVRGEKAMQLLESGLKVKENELPRRNFSDTGCFGFGIQEHIDLGIK

SEQ ID NO: 80989 - protein, 114 aa, Zea mays
  Coding DNA Sequence Number=SeqID_37614
MGNGNSNWSHDQKIMDPRHRNSLIVLTGVQEPAGARGPGKPLHRFPIPYASRRRPPPPVLVARVAPTTSGTDPHIGVAVATSRTSLTTSPELYCRRGLYAMSVTQANSGPRAVL

SEQ ID NO: 80990 - protein, 157 aa, Zea mays
  Coding DNA Sequence Number=SeqID_37615
MGSAGPLYIQTGPPGKAQGLHGHEPNSWYGSRTPLYRVQATHGRVPGFWDKEYPDLNQDQAGVRSRYVSGPCRVRFFSPLRRRPDAATWPIARDVSWRTGPDVRPLGRATSALIADKPHRLSTPLAGKVPSRHLMSPIHSTGRRCVASALNEPCPLC

SEQ ID NO: 80991 - protein, 73 aa, Zea mays
  Coding DNA Sequence Number=SeqID_37616
MDAEDMEDVQAPTAVQVVKPVDSFSINQKYFKMCPRKQKSYNEPPLQAKEQYCSYPYKALNNYSMYARCRDSS

SEQ ID NO: 80992 - protein, 147 aa, Zea mays
  Coding DNA Sequence Number=SeqID_37617
MKLFALCFGGQHYVINILLQRCDRFEKYTDNSWASPQWVWARDGLVWTYIRAVERSGLEGSDESEYSSDEEDSDGGGEDEDGDDDDDGDGDGDGSGRGRGCGGGSKVGDDGGSRGSNQGGSSRGNNQGGSSRGSTRGGDGGSNRVSG

SEQ ID NO: 80993 - protein, 238 aa, Zea mays
  Coding DNA Sequence Number=SeqID_37618
  Gene Ontology: Mol. function=nucleoside-triphosphatase activity; Cellular component=integral to membrane; Biological process=transport
  Homolog annotation: Hit_ID=Q7FMW4; Match level="QueryCoverage=67%, HitCoverage=13%, E-value=1e-46, Identity=55%"; Hit description =Pleiotropic drug resistance protein 15
MERLPSFERLRTGLVRPADASDGGNASDRGRRRRHTHEEVDVRAMGLAQRQAFVERVRSATSAPALCPTLANVSLDVAESLLGRVGVKLGKRKTLHILKDGSGVVRPSRMTLLLGPPSSGKTTLLLALVGKLDPTLEVSREVTYNGYGLDEFVPEEGGIHLPTRPRRRSAETETARRRGGGWWQWRAVGGGSASWATPPKAERGGACTAMGGGGVVAKGRDGCDGGGGGGGARSDRSG

SEQ ID NO: 80994 - protein, 153 aa, Zea mays
  Coding DNA Sequence Number=SeqID_37619
MGKNNKRKREPTPPSEDFDDSEYSEEEFSSESEGSPAPVSPPASSDDSDDSQGIAAEVWTYIRAVERSGLEGSDESAFSSDEEDSDGGEDKVDDDDDGDDDDDGDGDGSNGGGGSGGKGGTRGDSSTGSTRGGSSKGSTRGGGGKGSSSKASG

SEQ ID NO: 80995 - protein, 47 aa, Zea mays
  Coding DNA Sequence Number=SeqID_37620
MLCQAPPSAVPRVNGTERDCESGMGTERLRPVDFLERNGSGSEKNIP

SEQ ID NO: 80996 - protein, 436 aa, Zea mays
  Coding DNA Sequence Number=SeqID_37621
MNRHHHSRCHYKRNSGSTSAGTNNPHVGGPAEQQNADGWLADARSGSSDNDFRPGRPNSSSDDLRADAAATRPSPASPPKGRGHAEGRGVGGQSAGGVGYLIGGETSSGCLGGRWHRKQRQSHSGRRAGHAAAASATNGKRPSPRSLREGVGRYPRGDRPQLGALPSPALMMNILEAEGGAEAAARLASPHPGTGAVVDQVFSNTLQGPPRTTRGLGPTRHASWPKAEEAKPPRAVRVTAQRLQALLHFRPDQRVKERTAMQAACNRTKGAHTFDFDASSMEAQTHTSCNRRAGYYVRETAPSHAPVLRLLDCGTSAATRGDPAHDPTVPTEHIGHGSVSRERRRDGRYSQKWASSNGGGRPAEEAVKSSASSRPLLGQRESPLPWREDNAPVFGSSNGSRTHNGCPATHSSRRINSAAGQATPLAGEAGDTSPPP

SEQ ID NO: 80997 - protein, 152 aa, Zea mays
  Coding DNA Sequence Number=SeqID_37622
  Gene Ontology: Mol. function=nucleoside-triphosphatase activity; Cellular component=protein complex; Biological process=protein catabolic process
  Homolog annotation: Hit_ID=P46465; Match level="QueryCoverage=75%, HitCoverage=26%, E-value=5e-41, Identity=75%"; Hit description=26S protease regulatory subunit 6A homolog
MAVDDAEDDQLASMSTEDIIRASRLLDNEIRVLKDELQRTNLELESFKEKIKENQEKIKLNKQLPYLVGNIVEILEMNPEDEAEEDGANIDLDSQRKGKCVVLKTSTRQIYHMKIWYSRFCIESAANIFVIANSHVKRQSRVCIGYPGQLVI

SEQ ID NO: 80998 - protein, 226 aa, Zea mays
  Coding DNA Sequence Number=SeqID_37623
  Gene Ontology: Mol. function=nucleoside-triphosphatase activity; Cellular component=protein complex; Biological process=protein catabolic process
  Homolog annotation: Hit_ID=P46465; Match level="QueryCoverage=100%, HitCoverage=57%, E-value=1e-83, Identity=64%"; Hit description=26S protease regulatory subunit 6A homolog
  Pfam annotation: Domain name=AAA; Domain location=28-196; Score=68.8; E_value=1.8e-17; Accession=PF00004.20; Description=ATPase family associated with various cellular activities (AAA)
IQELVEAIVLPMTHKDRFQKLGIRPPKGVLLYGPPGTGKTLMARACAAQTNATFLKLAGPQLVQLCRFSETSFECLGFLLLFYLWNIVCANFSRDSVFLNVLMFIGDGAKLVRDAYQLAKRESSFEVSGDREVQRTMLELLNQLDGFSSDERIKIHSRKMNVNPDVNFEELARSTDDFNGAQLKAVCVEAGMLALRRDATEVTHEDFNEGIVQVQAKKKSSLNYYA

SEQ ID NO: 80999 - protein, 203 aa, Zea mays
  Coding DNA Sequence Number=SeqID_37624
MKATMRLMSLATSSLIFTLASASLILGDVAAASAYAVELTTMVFIGSSGGRWSKVRSYPHLPTISEEFLHNVVDNVEAEGSMEMDNKINEKITSSHVRALPKNLILPLPVQHIEGDGIRRPALPIVDARRRLGLRGLRWWRSCGQRLKPNLFWDEFSAGGQAPYIRPCPRTNKDPQYNLHTIHELVDSHSDKGSDPYRDQIGL

SEQ ID NO: 81000 - protein, 669 aa, Zea mays
  Coding DNA Sequence Number=SeqID_37625
  Gene Ontology: Mol. function=transferase activity, transferring glycosyl groups; Cellular component=cytoplasm; Biological process =carbohydrate metabolic process
  Homolog annotation: Hit_ID=Q575Z7; Match level="QueryCoverage=63%, HitCoverage=56%, E-value=0.0, Identity=94%"; Hit description =Alkaline alpha galactosidase 2
  Pfam annotation: Domain name=Raffinose_syn; Domain location=231-668; Score=338.5; E_value=1.2e-98; Accession=PF05691.3; Description =Raffinose synthase or seed imbibition protein Sip1
MPRPYASATWGALGLDGSFAVPDMNRTIGRTRQPDLAHGHGLTHPLAIQSDPAPSRTCACALPRLIRAASKQATDLTAADVRDGAEAELQLQQGRRVLVPFQIFSAAPYIYPSFPPAATRILAAGLASVSGAASPSSHPASVRADPSLIRLSSRLAGVLALSFQSTRWFGIGYDFGVSVTPLCWIGSGSRCSFRTLAAAKESSPPSTSVSPTQQQSRSTIEGGEMTVASSVRLAGGNLTVCGRTVLSGVPDAVVATSAATEGAVDGIFLGADFAEPAARHVVSLGDLRDVRFMACFRFKLWWMAQRMGEKGSDVPRETQFLLVESRGVGDEDAAYVVFLPLVEGAFRASIQGGAGDALELCVESGDDDTRAASFERSLFVGAAESDPFAAISGAVAAAKSALRTFRVRAEKKLPGIVDYFGWCTWDAFYQDVTQEGVEAGLRSLIAGGAPPKFVIIDDGWQSVATDTNESAGEDKPPLLSRLTGIKENSKFQNADDPAAGIKTVVRLAKEEYRLKYVYVWHAITGYWGGVRPGEEHYRSSMQFPKVSPGVMENEPGMKTDVLTVQGLGLVHPRAVYRFYDELHAYLAAAGVDGVKVDVQCILETLGAGHGGRVQLTRQYHQALDASVAKNFPENGIIACMSHNTDALYWYAIRSIRSRNADRGELTWDH

SEQ ID NO: 81001 - protein, 141 aa, Zea mays
  Coding DNA Sequence Number=SeqID_37626
MAGSKDHTNVSTTNIIKPIMEALPADDQQPFKDLEREKEVMRQWTEQCDKEEAELLRQLSKRRKKSMKKKIIRQGDIDMKSLLPPLQGPAPPPPGTRQAPDTVGPSESLLGQFGYIADRPAYFVGPFDPTHARAWITQVAP

SEQ ID NO: 81002 - protein, 91 aa, Zea mays
  Coding DNA Sequence Number=SeqID_37627
MGSTEETLESKVANNHGVMEQQAVPVRLVATGLFYIPTQINFYAQYKAKLLQQAGALGIISGGRDLCPLSLDQFRKFIQFIPDDASKTTAD

SEQ ID NO: 81003 - protein, 52 aa, Zea mays
  Coding DNA Sequence Number=SeqID_37628
MVSRCFNDATNGVPGDGWSLMSNDGAEDVPIVVDSFSKQTYWCSCQLLPDVF

SEQ ID NO: 81004 - protein, 320 aa, Zea mays
  Coding DNA Sequence Number=SeqID_37629
MPEDACGESRLLKRDRPPGWSATSWRLAPFSYCSASRIFIRQPGYFPSPMVTKDASRIFIILAGARGEPGPAFAWAIVPLLPPTSRGGNHPPVLWRRRPPAMRGKANCCCPAMVQHSVLCRATVVGRTGGSHNTSYVARAVLVFWDGPVLVFVARTGVRTFRCALGRPTLAGAVLVGRWTPSSVLRWWQLEKVSPPTRSLAPSAFWAFDSLALISGSRPPRGDENESLPAVAFALGPSLMLQRSPVSHPEFVVPQALRCGGCSYPREWNRSSVCNGTLSAGPLCDEPEPEAAVSSWTEAELAREEASSAQEQVTSQAEEA

SEQ ID NO: 81005 - protein, 48 aa, Zea mays
  Coding DNA Sequence Number=SeqID_37630
MERPRKFEGISGKNQDVIVIDDHVRAVQEIHNVAGEMGGASLYGNCKI

SEQ ID NO: 81006 - protein, 73 aa, Zea mays
  Coding DNA Sequence Number=SeqID_37631
  Homolog annotation: Hit_ID=O24587; Match level="QueryCoverage=39%, HitCoverage=2%, E-value=3e-08, Identity=93%"; Hit description=Pol
MCDHRNYRNKINLLPRQWCIPQLKMMYRYLKTRGRIKGEHRKNRPFRVEETLQDPDWVLAMQEELNNFKRNEV

SEQ ID NO: 81007 - protein, 319 aa, Zea mays
  Coding DNA Sequence Number=SeqID_37632
  Homolog annotation: Hit_ID=Q6QP51; Match level="QueryCoverage=73%, HitCoverage=79%, E-value=8e-12, Identity=32%"; Hit description =Putative growth-regulating factor 1
MVTRSAITKQKRWRRKGLGVRFPFSGYSLGLRKPKWEASSRDRRHLWQAKQETLHLHHNDRIKKGTEKGDTPKGILLHEGSGPRAPLLIRGSKAGPSEGFNSRLRALGLRAPYWLAPEGFDSRLRRRARDDPGYVRYITKAQATLLRGSGAALANLAPAKPLTASTYQPENLGLDSKSGLGRHRKLRFARPQGSAPVSASDDGLHLARPQGSDSASAPEDDKLRLARPQGSDSASAPEDDKLRLARPQGSDSASAPEDDELRFARPRARTQPLPQTTVSASPDPGLGLDLDLDLGGASASPDPGLGLTMSQGAPSLPYP

SEQ ID NO: 81008 - protein, 213 aa, Zea mays
  Coding DNA Sequence Number=SeqID_37633
MEGRGMSIIKDGAKAMIVTDKGENATKVRIGKTPFSNRDGKDDITKEPRPSPRGLILPPLSRLKSTSRCRRRPPEPPPALAPNAGPPAPPTPPPARAAPNAAARPSRRPQRVAARPSRRPPEQPRDRAPTPPSPHATTLPRHRRAPGSTAQPCHRTAAPPRLRAPRRLRATAPPRRHHSRPATRGRNAAPEAANARSSSRSAAVRPNAASSPR

SEQ ID NO: 81009 - protein, 497 aa, Zea mays
  Coding DNA Sequence Number=SeqID_37634
MNAVVTSHLPICLYSAAERVPNKSLQAQHADAVLEKSAAESKNRRLVEKVAALEAEKTDLWHRLAEERREANEAIAEAQAARAEAKVARAENSLASQRAEEWEARFNALLGRVDKAEASARSEVGRTHAQFVDAYRDLGARTADFEVPDQEAALRFLEWLQEELVVLPTIVQGFMSFASLVTCEGTLNALAREGCRHYEVFDQSDENFEREIFKAEDPVVKQLAGALFDRMWGPHGREAVKERSDRAIEQMARAEDVEDLGDLVDVPPEAEVDPVPPLSAGEGSSAAPVPTVAGEGPLPAPAPTAEDPPKVAAEPVAEDPMVAAGPSQVEDFGPAQAIATVNDNYVAASTVGAEDDSDDSMSKCFESDDSGSSIVWTEESSDEDLDYFAALDVAAAEASPRGMGGGDLPGASVRHRQRRAVAKRRVSELPRGDRRPRGEVGGGRLRVDGAGKWELLSSPAGASVGEGELRSLFAGEELRIMLFNYKEMGIIPKVEPM

SEQ ID NO: 81010 - protein, 548 aa, Zea mays
  Coding DNA Sequence Number=SeqID_37635
  Gene Ontology: Mol. function=hydrolase activity, hydrolyzing O -glycosyl compounds; Biological process=carbohydrate metabolic process
  Homolog annotation: Hit_ID=A2X6R5; Match level="QueryCoverage=93%, HitCoverage=92%, E-value=1e-179, Identity=62%"; Hit description =Putative uncharacterized protein
  Pfam annotation: Domain name=Cellulase; Domain location=56-340; Score= 17.1; E_value=2e-07; Accession=PF00150.9; Description=Cellulase (glycosyl hydrolase family 5
MWLVSSLRAALCLLLAVLASHRQPAAAVVTLSTSSRWIVDPAGHRVKLACVNWPSHLESVVTEGLGRQPVGAISGMIVSMGFNCVRLTYPIALVTNASLSVLTVRQSLLANGLAETVGGVEAVVNALGEKNVMVILDNHVSTPGWCCSNDDGNGFFGDRDFDPNVWVDGLGSMATIFADVPNVVGMSLRNELRGPRQNPQDWYTYMQRGAEAVHAASPRALVIMGGLSYDYDLSFLAARQVGVSFAAENKLVFEVHWYSFSDARAWETESANEVCGRAARDFARRGGFLLARGFPLFLSEFGADSRGGDPKDNRFFPCAAAVAAEHDVDWAYWALQGSYALRQGVAGMDEVYGVLDWSWSKPRNETVLPRIQALQRPLQGPGYGEALPYTVLFHPLTGLCAVRRAAAVTTTLELGPCNETDAWAYAPPSSTLVLRDAAAAGLPCLRAEGPGQPARLGIRDCGDPMSTWRLATDSGMHVAVDAALGLGGGEDGGGGGGMLCLDVGTDGRSIVTNPCACQRGDGTCDPEGQWFKLVTSTRRVVRRPPTLA

SEQ ID NO: 81011 - protein, 109 aa, Zea mays
  Coding DNA Sequence Number=SeqID_37636
MSSSTTRMEKGQEHDRLAPYPRRRASVGSRQRPWAGQQVGVEEQGKGRKDEWDVPRQRKRWCAHDVKRPRERAIATARVGVGAGVGRIQGGGACSYALYREWGGAEMEA

SEQ ID NO: 81012 - protein, 27 aa, Zea mays
  Coding DNA Sequence Number=SeqID_37637
MSPPDAQVFVVSFSGNEQRHILLLQQG

SEQ ID NO: 81013 - protein, 291 aa, Zea mays
  Coding DNA Sequence Number=SeqID_37638
  Gene Ontology: Mol. function=transposase activity; Biological process= transposition, DNA-mediated
  Homolog annotation: Hit_ID=A7QLP4; Match level="QueryCoverage=50%, HitCoverage=48%, E-value=4e-13, Identity=28%"; Hit description =Chromosome chr13 scaffold_120, whole genome shotgun sequence
MDDILIHEVDSIISVTRIGNQREMSLITHVESTNEWRDFRDTKDKKTRGYVPWNDDMDKVLLDTFVEYYNKGDRCQNGWKSHVYIAAVKNVYEKCNVTITKENISSRSKTFDKHYNVINGLLSTSGFGWDWEKNKLKVDSDTVWDEYVERNKEAKGYRHKVVKFWDLLSLVYNKDQANGEDARTTTESSKEMTKENDIGGKDAPFSVSSSSSLKRQRSDDSFNSMWCEKFDMLTAALKDDGLKLPSSTEVIAALQEVDGLDEDTDLELCDILTSNAHHPNGASVDLVNSTS

SEQ ID NO: 81014 - protein, 109 aa, Zea mays
  Coding DNA Sequence Number=SeqID_37639
MEIEGFVRDYLCPRTKLHYSLPDRSKLMEQMLVNDSLQAKGRGSVENSPKEQGKRSLARLRWLPPCDLEWSGGLEQSDAASRERVGVSDEQGAGRHEQRAMSRVGSGVA

SEQ ID NO: 81015 - protein, 283 aa, Zea mays
  Coding DNA Sequence Number=SeqID_37640
MNMMRLSMIRYLPFSYYDVVLVVFKGARAVSRVPLRGYEIDGSGHDYGAGSFSKNTGSAGVCAGVCASVNEYYTAIPTCSCYSSPSVLRLHYYVALNSYDRKALADQSGFGWDWEKNKLKVDSDTVWDEYIERNKEAKGYRHKVVKFGDLLSLVYNKDQGNGEGTKTAAESSKEMAKENDTGGKDAPYSVSSSSSLKRQRSDNSFNSIWCDKFDMLTSALKDDGPKLPSSAEVLAALQEVEGLDEDIELELYDILTSNAHKFESMMALPMERRKRWLMMQLRK

SEQ ID NO: 81016 - protein, 64 aa, Zea mays
  Coding DNA Sequence Number=SeqID_37641
MTTSEVTHRGQGQVAMQEQSRENLELEIEWGIRRRNYLFLVFADAVAAVQFGNPDGQRNEGPDL

SEQ ID NO: 81017 - protein, 101 aa, Zea mays
  Coding DNA Sequence Number=SeqID_37642
MSLHLQLVYASAAPGSFTLQLLEFLAFQSPLVEYFGSQAGVLELEPSPMERPPGPSPDFPVDEFGYAVELQSRPSFTIGHWQKLKNTGSTIIEPQRPLASS

SEQ ID NO: 81018 - protein, 89 aa, Zea mays
  Coding DNA Sequence Number=SeqID_37643
MALADVPDGGTSAGRGADDGPSAAMEDEAERSPVKMEGNTYQIDRQFGDKDSRGRSPPPAMVRDVRPTGIPVVHVLDPVNHTRDLHDML

SEQ ID NO: 81019 - protein, 95 aa, Zea mays
  Coding DNA Sequence Number=SeqID_37644
  Subcellular localization annotation: CTP_CleavageSite=59; ConfidenceScore=5.23e-01
MARLGHAVANGEGTVAVNTLPRAWCFATSLAATAAAIAVVVALAVAAASTVVLAVVIVVVAAVTAAVALVVAVAAAPFLGRGNRPSRRTMPGGEA

SEQ ID NO: 81020 - protein, 109 aa, Zea mays
  Coding DNA Sequence Number=SeqID_37645
  Subcellular localization annotation: CTP_CleavageSite=75; ConfidenceScore=5.02e-01
MVKVGVEFSPRIIAQASLATENGGSAAAMRLRRGIAHAPQVPTSTSGRGRLPQVPMAPLGPTPRTEVRQRRGSPAAARIGAVALLGASSELGSVLGRWERWSRGHRPPI

SEQ ID NO: 81021 - protein, 309 aa, Zea mays
  Coding DNA Sequence Number=SeqID_37646
  Gene Ontology: Mol. function=cysteine-type peptidase activity; Biological process=proteolysis
  Homolog annotation: Hit_ID=Q8LHX9; Match level="QueryCoverage=93%, HitCoverage=73%, E-value=2e-42, Identity=41%"; Hit description =Putative uncharacterized protein P0022B05.123
  Pfam annotation: Domain name=F-box; Domain location=3-50; Score=20.1; E_value=0.0085; Accession=PF00646.24; Description=F-box domain
MASSLPDHLVEEILVRLPQDEPVHLARASLVCTSWRRVLVSDRDCFLRRCRGFHGAPPLLGYFDLSYGNDAKRFVPATSTTSPVRMPALHRRRWSAVDCRHGRVLIHYEDEDEDRSKRGFIVWDPLTGRQQHLGMPSASYPSHMCLYTSYTGAVLCAKDDGGCDHLDCQAAAGPFRVVCVETNLLRPIFACATSYSSLTGEWNAPAPKPNHDNHDFLRGHAKHSLLVGDAIYFLFQDDRTILRYDLGRHWLSEMDLPPFMWNAALMTAEDGGLGLAALPNNDNRIHTWSWHDDDGSGGGCWVGAEGHRV

SEQ ID NO: 81022 - protein, 103 aa, Zea mays
  Coding DNA Sequence Number=SeqID_37647
MADRERRSAYDRMAHHGSNMFCIRVSGRFDALTDSPWIWPDCSVMFATIGGPRGGTAVGTNCPADRASDSRPKDIVWRNIIIVGTMLRRRRSCGKEIASVEAA

SEQ ID NO: 81023 - protein, 78 aa, Zea mays
  Coding DNA Sequence Number=SeqID_37648
  Subcellular localization annotation: CTP_CleavageSite=48; ConfidenceScore=5.18e-01
MGGTGLPMGQSTRPPLPLCLRCKQGARARVQPYDLGTTAHSIAYSNSRANLGRQPTTLMVRPAQCSTSPTAHLNEFSV

SEQ ID NO: 81024 - protein, 151 aa, Zea mays
  Coding DNA Sequence Number=SeqID_37649
  Subcellular localization annotation: CTP_CleavageSite=74; ConfidenceScore=5.21e-01
MGTPLTDYLLSAGRQTLGKAHLAPPLCVRVLLRELALMSGSRVSYAATTGAQSERVRRVATLPRFDSCRRGSLSSSSLEALEGVRGHRQGAPSKRVGAVGIGKGVLPGNCSSEFNGRAEPQFAVDQAPVRAILGELWLPRFGRFSVTCRNK

SEQ ID NO: 81025 - protein, 68 aa, Zea mays
  Coding DNA Sequence Number=SeqID_37650
MAKIDLTGLRPPACARRLRTPNLPYTLGHLTGAVSPPDMVDGVTWPTTLPPGWTVEWDVAPAGKEHEE

SEQ ID NO: 81026 - protein, 112 aa, Zea mays
  Coding DNA Sequence Number=SeqID_37651
MAHRSAQSTRAGGRPKSGEVDLRLPVKFCQVRGLGKLHKLMAKLTERLARLGSDWSGLATVAEALAAMAGGKELAGAKRGVWLAIVSTGEDLWFDVSKARIPMPSSGTRQRG

SEQ ID NO: 81027 - protein, 133 aa, Zea mays
  Coding DNA Sequence Number=SeqID_37652
MAKAGRGQLGDGGVARANWPRAELSTTKAEKSGTGPGARCQQQEDTAPAPRPRTVRAVTEGTTRRSGDLSQAATTVHLAEPNPRCQAYMADSKDLNSASPNSDTRLTNLSAAEHENLEDDMKKMDEEIRRQQD

SEQ ID NO: 81028 - protein, 238 aa, Zea mays
  Coding DNA Sequence Number=SeqID_37653
MEGKPSRERKSELRRESPPLAGVGEFIRGRESKYKESSSLISCEKQMIRIEFLTLQGLTALAYNAPLTPAAAVHNRGGRKGGGAYRRRDCSGEVVEDVGEVSGIPTVCGSPSERGSRDAREDMGARNWSETHWIARSTRGGGRPKSGEVDLGPPVKSGWVRGLGKLHGLLAELSEALARLEDGWSGLATVAEALAAMAGGIELVGAKERGLAGEEIWSQEIRSVSLPKPEANPRFCRV

SEQ ID NO: 81029 - protein, 83 aa, Zea mays
  Coding DNA Sequence Number=SeqID_37654
MSRAFDDYYIEDCGVILAPKVTQRRIDNSDQFVILATVRMPTSHKYVHVMDGLGEYEQAVKQMFGGSDPAGSCFIATADADSS

SEQ ID NO: 81030 - protein, 105 aa, Zea mays
  Coding DNA Sequence Number=SeqID_37655
MEDRLDLGFGGASTSPNLGRRPTTSTGSAIFTYPEQTRAAENKDPDPIWLAPPALLRRQEDVSKGLNRSDRCPSAKIRRSSDGHDITPAGCQNLSGCHIGMYLGR

SEQ ID NO: 81031 - protein, 63 aa, Zea mays
  Coding DNA Sequence Number=SeqID_37656
  Homolog annotation: Hit_ID=A2Y0V7; Match level="QueryCoverage=65%, HitCoverage=19%, E-value=5e-13, Identity=82%"; Hit description =Putative uncharacterized protein
MASLNHISIVCRSVEASLRFYTDVLGFVPIRRPGSFDFDGACDYRSETSDSPRHACSRCDVPA

SEQ ID NO: 81032 - protein, 88 aa, Zea mays
  Coding DNA Sequence Number=SeqID_37657
  Subcellular localization annotation: CTP_CleavageSite=31; ConfidenceScore=5.55e-01
MASFSTASLAACGSSSSALLPRNPRRAQLPRATDSVEIGAAVLTGTTPRTLQIESRAPECPWGTAPAGGAAVRVLRRRAVGLGDRVGW

SEQ ID NO: 81033 - protein, 55 aa, Zea mays
  Coding DNA Sequence Number=SeqID_37658
MQAACNRARWTRFSDSRHASMEAQAHASRNRRDRERGIPRKGSFPVKEPGSEPPY

SEQ ID NO: 81034 - protein, 108 aa, Zea mays
  Coding DNA Sequence Number=SeqID_37659
MPSRGGQLVRSPAFALDLRGQDPTAFVREAEDGAARIVGRYVPKTEGLRSWDIRGSNDRLNWVFDLNRLPYGGYPGVDVVDRRGKKPMGGTDEGPKQEAASATKKRKL

SEQ ID NO: 81035 - protein, 232 aa, Zea mays
  Coding DNA Sequence Number=SeqID_37660
MAGTGAAPSHGCPTRARRGCAGCPGHHGRAVDRAGEGGQTRVGVTEVSSRHGRALAEPRRARRPSRGRAPAPGPRTHAGRAVAWGTLREQGEIEAAPRLGHATRDGEEGRGKRGREGGRRGRAHLSESRTAGWTSGARRFCVGVRQERTSYARWAPPVATAAGQLPNTHARDGSGASRWGGWAVSQPACGPHAAGKGARLGHARCRVGPRASQPAQERGRREGGPREKGRTR

SEQ ID NO: 81036 - protein, 563 aa, Zea mays
  Coding DNA Sequence Number=SeqID_37661
  Gene Ontology: Mol. function=oxidoreductase activity, acting on sulfur group of donors, disulfide as acceptor; Cellular component =chloroplast; Biological process=amino acid biosynthetic process
  Homolog annotation: Hit_ID=P92980; Match level="QueryCoverage=76%, HitCoverage=80%, E-value=1e-118, Identity=54%"; Hit description=5' -adenylylsulfate reductase 3, chloroplast precursor
  Pfam annotation: Domain name=PAPS_reduct; Domain location=137-305; Score=187.0; E_value=4.7e-53; Accession=PF01507.10; Description =Phosphoadenosine phosphosulfate reductase family
  Pfam annotation: Domain name=Thioredoxin; Domain location=398-509; Score=19.3; E_value=5.6e-06; Accession=PF00085.11; Description =Thioredoxin
  Pfam module annotation: Pfam domain module=PAPS_reduct::Thioredoxin; Domain location=137-305::398-509
  Subcellular localization annotation: CTP_CleavageSite=56; ConfidenceScore=5.40e-01
MASATTSISSHPAALRDVKAARIGGALRQVGVAARGQRARAVPPLRAAEPARRPVAASAAAAPPAAPVADEAAVDYEALARELEGASPLEIMDRALAHVRLRNRHRPSGSLNLVYEFVFRLSTRHQSMAPPPTRNRTTIGAEDVALIEYAKLTGRPFRVFSLDTGRLNPETYQLFDRVEKHYGIRIEYMFPDASEVQELVRTKGLFSFYEDGHQECCRVRKVRPLRRALRGLRAWITGQRKDQSPGTRASIPLVQVDPSFEGLDGGAGSLVKWNPVANVDGKDIWTFLRTMDVPVNALHAQVILKLQHFFDSFLDVLAIDGSLLYHLWPCPSSLDQGYVSIGTSGKAGGGGRTPRPRSAASTRATSTRTARRRRRRRPPRTANGNGSAGAPDIFESPAVVSLTRAGVENLLRLESRAEPWLVVLYAPWCPFCQAMEASYVELAERLAGSGGVKVARFRADGEQKPFAQAELQLQSFPTVLLFPSRTARPIKYPSEKRDVDSLLAFVNSLRALGEFPRARSSSLEQPGHRTVSGAPQAGTGAARPYVRFDLIAYVMGHKRRVSA

SEQ ID NO: 81037 - protein, 130 aa, Zea mays
  Coding DNA Sequence Number=SeqID_37662
MRDAAAALFGVDSTHNPRLVSDAAGSNELDSLTSSGTDDRWREVAVAPLAHRTVIIAERLPEFPKVASSELDFLAHRTLSGGAPDSPGSGADTCAVLASASRSGGDPLLVAHDISYRADPDERSCSPCIY

SEQ ID NO: 81038 - protein, 261 aa, Zea mays
  Coding DNA Sequence Number=SeqID_37663
  Gene Ontology: Mol. function=methionyl aminopeptidase activity; Cellular component=chloroplast; Biological process=proteolysis
  Homolog annotation: Hit_ID=A2YLQ4; Match level="QueryCoverage=89%, HitCoverage=43%, E-value=1e-100, Identity=72%"; Hit description =Methionine aminopeptidase
  Pfam annotation: Domain name=Peptidase_M24; Domain location=98-261; Score=45.3; E_value=1.4e-12; Accession=PF00557.15; Description =metallopeptidase family M24
MSEMDHSRPVQFKGIKKIPDTSRIRIRKYPRSICIRYGIRHRSQEQSSVKSKKRPPLRRGKVSPQLPVPGHIPRPSYVGAKGLPELCKGQLHDAQGITGMRAACKLAARVLDFAGTLVKPSITTNEIDAAVHNMIIEAGAYPSPLGYHGFPKSICTSVNECVCHGVPDSTQLQGYHGGTSRTFACGQVDDSIKHFLNAAEECLEKGISICRDGVNYRKIGKKISKLAYFYGYYVVERFVGHGIGTMYHSEPLILHHGGYHF

SEQ ID NO: 81039 - protein, 103 aa, Zea mays
  Coding DNA Sequence Number=SeqID_37664
  Gene Ontology: Mol. function=methionyl aminopeptidase activity; Cellular component=chloroplast; Biological process=proteolysis
  Homolog annotation: Hit_ID=Q6Z4B5; Match level="QueryCoverage=50%, HitCoverage=14%, E-value=9e-22, Identity=90%"; Hit description =Methionine aminopeptidase
MTNPANENSGRMVEGQTFTIEPILTMEKTECVTWEDGWTTVTADGSWAAQFEHTILFSAMVPVPRHPGHVRCSPQYSFQSFEICCRPTYGKGFPHVAATCSLL

SEQ ID NO: 81040 - protein, 68 aa, Zea mays
  Coding DNA Sequence Number=SeqID_37665
  Homolog annotation: Hit_ID=Q6Z4B5; Match level="QueryCoverage=79%, HitCoverage=15%, E-value=6e-07, Identity=54%"; Hit description =Methionine aminopeptidase
  Subcellular localization annotation: CTP_CleavageSite=38; ConfidenceScore=5.40e-01
MAAGLGARPSATFVAGRFRPLAAPLRPVRSGKFVVPKRCFIVSSRLAWVEDELMEIQKYAFLLLLCLV

SEQ ID NO: 81041 - protein, 176 aa, Zea mays
  Coding DNA Sequence Number=SeqID_37666
  Homolog annotation: Hit_ID=A3BKW1; Match level="QueryCoverage=42%, HitCoverage=13%, E-value=4e-07, Identity=42%"; Hit description =Putative uncharacterized protein
MGRVLTYNGTAQRADSGEARFMAVRDAATRKFALNCSLQHPKRRRSRRRKVFSGWLGQTLEWGHGGSAFMVARSCVGDFISPFNMISYKLGVTKRVFVCAELHEPPDENQNNTNDILPTSCDTVVDVVKRCQRLFPLMDSTGAFDAAVAAWVTQMVVPSSARNATPTGSSPESTTC

SEQ ID NO: 81042 - protein, 131 aa, Zea mays
  Coding DNA Sequence Number=SeqID_37667
MASPDDSWLGCQIKCTLGSSARTHTTSAMVATPAHKSSWSVDDELDGRDGAIVGCGAQNNLRVAEVGDDHEVLLLDDGQCGAAALDHVQVTATRELVVHSDACGHVGLFLEVELAVAKLFSSSMSDANASV

SEQ ID NO: 81043 - protein, 176 aa, Zea mays
  Coding DNA Sequence Number=SeqID_37668
MDPGPHMLCIRFCPKNWMVRTIQTTQINTNYIPLPRQVPVYLVVVEEIPVDLPRIRVENGVILEDSSEEFLPTRTPLAESLAFTARSSTLAPPAPAVQAPAPGGDDLDDSSDDDEDDDEEEDEENLNDEANEEHQNHYVGLWPVTKHYTSMFETGHFPNLLQDVLHALGTYVRPLC

SEQ ID NO: 81044 - protein, 329 aa, Zea mays
  Coding DNA Sequence Number=SeqID_37669
  Homolog annotation: Hit_ID=A2XUN0; Match level="QueryCoverage=27%, HitCoverage=9%, E-value=3e-22, Identity=62%"; Hit description =Putative uncharacterized protein
  Pfam annotation: Domain name=PPR; Domain location=261-295; Score=8.6; E_value=0.75; Accession=PF01535.11; Description=PPR repeat
  Pfam annotation: Domain name=PPR; Domain location=296-329; Score =17.9; E_value=0.039; Accession=PF01535.11; Description=PPR repeat
  Pfam module annotation: Pfam domain module=PPR::PPR; Domain location =261-295::296-329
MRATIFPWPDCGNVFIRQESLQLHEPIRHAVLELGMMAMNGSAHDVVPVPTTESGNGGLDEEAERQQPRAMLACQVIMERVKWPKEEEQAASVPKATVVQVVQLPGAQAHRQPVCIDLDDAQVVFEKMQQSATSVARAIFVNPEHGLYPQIFDLEQFISGKEDTTNNFFHGYYTIGKGMVLVANNFGDDLLARRSEIKQPWPPPQELACLGLNIMVVSVFLATSDLHAMTYIYALSRKGQVYEPDRLFKVAEKNDIRTGVVMDNALTNRRCIDGNMERAYEIMAEMEKKRIALDNVTYNTLMREFCLLRQLDEAHTLIDEMIEGYCCQP

SEQ ID NO: 81045 - protein, 83 aa, Zea mays
  Coding DNA Sequence Number=SeqID_37670
MATPAAAWSPPRCGSCVVDAAGPALGLGSQRKRRLDDDPPAAPPALHLSWRWLLAVRDACCADQEDGGGPGAGVGLEKGLLPS

SEQ ID NO: 81046 - protein, 131 aa, Zea mays
  Coding DNA Sequence Number=SeqID_37671
  Homolog annotation: Hit_ID=Q75HS0; Match level="QueryCoverage=25%, HitCoverage=3%, E-value=1e-07, Identity=76%"; Hit description =Putative uncharacterized protein P0628H02.4
  Subcellular localization annotation: CTP_CleavageSite=25; ConfidenceScore=5.34e-01
MAKPTVGRPGAVGAPYMSGAHRTVRCPLLAVGSATCPAQITRSTVGPADRWLTGQSGANGRLTWRASDTAQGLSGGAPDCPVYAEWVSDIVPVEKKESAEDKVIGVVLTQETEGKEHVVTYLSRRLVDAET

SEQ ID NO: 81047 - protein, 623 aa, Zea mays
  Coding DNA Sequence Number=SeqID_37672
  Gene Ontology: Mol. function=protein serine/threonine kinase activity; Cellular component=cytoplasm; Biological process=protein amino acid phosphorylation
  Homolog annotation: Hit_ID=Q8W5G2; Match level="QueryCoverage=91%, HitCoverage=67%, E-value=1e-161, Identity=55%"; Hit description =Putative uncharacterized protein OSJNBa0002J24.7
  Pfam annotation: Domain name=Pkinase; Domain location=394-614; Score=- 11.3; E_value=6e-08; Accession=PF00069.16; Description=Protein kinase domain
  Pfam annotation: Domain name=Pkinase_Tyr; Domain location=394-580; Score=-85.2; E_value=3.5e-07; Accession=PF07714.8; Description =Protein tyrosine kinase
  Pfam module annotation: Pfam domain module=Pkinase::Pkinase_Tyr; Domain location=394-614::394-580
  Subcellular localization annotation: CTP_CleavageSite=85; ConfidenceScore=5.76e-01
MRWWKRSSSPSCPASSSSASTPASPARASTPRLIGGWGSGPSSRRDGSGASNDPQPRLIRARRMRYVVDDLEVGVSALGVDSPARRDAAAGFALETVSSAPISWSPSNMEVAPARSSSTPVLLPHPLPLPGEGESPCRGPGRPLPPPVPRMLDGEGKGPAADAPGVLETGSQRMTPLLARSTSILIDDPDVHLWFAYYIRVAVQTLPKAHEHNDFRLNGTTCCQRRKAFKEKFQDKNCDETLNFRLNIPAKSAPSSGFSSPVQSPRRLSNVDFSSAAISIQDTNVWSARSLWSSDAMGSSPPCDSPDKFAGGQERSPLSSPLRSPVLKSRNPSAPPSPMHPKLFPENHVSRPDGNGSASFHPLPLPPASVSPKQTNASHQLVPKAEMPSVAGQWQKGKLLGSGTFGCVYEATNRHTGALCAMKEVNIIPDDAKSVESLKQLEQEIKFLSQFKHENIVQYYGSETIEDRFYIYLEYVHPGSIHKYVHQHCGSLTEAVIRNFTRHILKGLAFLHSQKIMHSSCTPLLVGPMIKHRSKASPWSRSFSHGLRWHCDLRADSPHLQPEFLHYAENVQISQYPRHLVCQPHDIKLITTVFKITILSTAAPNLSLKGTPYWMAPENMKCC

SEQ ID NO: 81048 - protein, 79 aa, Zea mays
  Coding DNA Sequence Number=SeqID_37673
MGRSRLLGSSAYPLPPLIQDGLVRGLKPFLYVLNNLFRYTLCPKIILVSNLYGYARNLLARIKPDGDPFSVSCFIWTEI

SEQ ID NO: 81049 - protein, 103 aa, Zea mays
  Coding DNA Sequence Number=SeqID_37674
MTTAHGSPRQSTERRLAYTMDVADAGPARHRRRSHLRNGPPPPVWDSGYARAQRRAVAFLGVDDGSVQLQPRCIERRNVRPDSCAPSNPSAGTGSAALGLMEP

SEQ ID NO: 81050 - protein, 213 aa, Zea mays
  Coding DNA Sequence Number=SeqID_37675
  Gene Ontology: Mol. function=protein transporter activity; Cellular component=Golgi-associated vesicle; Biological process=intracellular protein transport
  Homolog annotation: Hit_ID=Q6Z382; Match level="QueryCoverage=40%, HitCoverage=13%, E-value=3e-25, Identity=56%"; Hit description =Coatomer subunit gamma-2
  Pfam annotation: Domain name=Gamma-COP; Domain location=8-199; Score=- 92.1; E_value=1.1e-05; Accession=PF08752.1; Description=Coatomer gamma subunit appendage domain
MASSLLQATTKFPQAARFIAMYATLASRDVSAAPVELTEAETEYSVNVMKHIFDGHVVLQYNCTNTIPEQLLEQTFVAFEKPEGVIGTDKFSNLLKFIVKEVSGTHPNTDTRTKEQESTNHTWIVYRMTDGNTAVAKNKHPNAASTNGADPNADADDMRGSSRAKVDLRSHRQCLRGGGQQEQTTRSHDDCGCPNQSGEQRQRRAGEAIGCRT

SEQ ID NO: 81051 - protein, 149 aa, Zea mays
  Coding DNA Sequence Number=SeqID_37676
MRSGAEAALGRGGGARGGSDDAPRDPAVMWAVWGTAEMSEGGHGRDGRAGARRGRAAGLAAALTGARQWGGWALGAASGRAVDGRRTGDAGAPGCAASGSEGRRRAAWTGGAPRGGVGLGREGTPAGRSGGAAAVRGGGDNRQAAAAAA

SEQ ID NO: 81052 - protein, 240 aa, Zea mays
  Coding DNA Sequence Number=SeqID_37677
MDESEKGDRAPCETPQSWMWGVPKEEEKRTLEAITIVAILRDRGVMLAGMIENYLHQGVPPLMDKRLSLFKMTAEASSDVSPLSAPLPNDAKIARWLMKAIEVHKGENGVIVPYVFQPQPSSPVLQEDPVPPAKERSGKRDGSRASGAEREMASTIFYKSILVHKSIYINSKSTVQNTVDHFEQEKLFGNFTCVRTVRAPPADRLRHQGMPQTGTMQNSYLYCGLSEAEGSTVWDQAQTV

SEQ ID NO: 81053 - protein, 100 aa, Zea mays
  Coding DNA Sequence Number=SeqID_37678
  Subcellular localization annotation: CTP_CleavageSite=68; ConfidenceScore=5.14e-01
MDSHKEKLQEALVPWTRSLDRTIVASTPRSCCPLASSSYNSPTSPTLFFKQEMELSLVGLQNARKTSLAAARSDTPASSSWKLYLFQNKQVSYLVNQLVF

SEQ ID NO: 81054 - protein, 22 aa, Zea mays
  Coding DNA Sequence Number=SeqID_37679
MACRPANGVGVNGYFSWLDVRQ

SEQ ID NO: 81055 - protein, 257 aa, Zea mays
  Coding DNA Sequence Number=SeqID_37680
  Gene Ontology: Mol. function=protein binding; Cellular component =nucleus; Biological process=transcription from RNA polymerase I promoter
  Homolog annotation: Hit_ID=Q10EQ6; Match level="QueryCoverage=69%, HitCoverage=60%, E-value=2e-68, Identity=64%"; Hit description=SWIB complex BAF60b domain-containing protein, putative, expressed
  Pfam annotation: Domain name=SWIB; Domain location=85-160; Score =149.3; E_value=1.1e-41; Accession=PF02201.9; Description=SWIBMDM2 domain
MGMGMGVNSYPPMYMGDPMELFLYRGYGYGVLIPGGFCPPESLFTILPVLIVTLELYSYMVYQLCYALAQPFYWGNDGKKRGGGFTKLCSLSPALQEFVGASELARTEVVKKLWAYIRENNLQDQNNRRKILPDERLKKIFNVNSIDMFQMNKALTKHIWPLNSEVLAPKYLFDYDLPGPVSPDRSTPKEKPQKRDRSEGKKQKGGSSGAGSGFLVPLQLSDDLVKFIGTGESMLSRSDVVKKMWDYIKGNNLQPHV

SEQ ID NO: 81056 - protein, 253 aa, Zea mays
  Coding DNA Sequence Number=SeqID_37681
MNLDRPRVIQPRSAPDPNPLIPLPILSFSLALDSPATPSRLHPDADRTPLPVHHPSVMAGRTAPAPSPPSLSRPTPSPPLHPRSRHGRYHDQQFGGAGAARYAMGRSPSPPDTDHLHPEPVRETALENGYTKIMLPTCASGIACPMLSATIKLPVPLVPIISKGVLEEEVMVSFVATNGEPTTTATSKLVWWNLVEQMTMTPTSCTSAATLPTRTRAPPSRALYKSGSIIVLGKTDFLRPDMILLLHFYDILT

SEQ ID NO: 81057 - protein, 63 aa, Zea mays
  Coding DNA Sequence Number=SeqID_37682
MAQDEGGRRGKGQADGEARARRGEGAARGGRMARGGQTARGGRDCDKNLRKFRESYDTLCVET

SEQ ID NO: 81058 - protein, 1012 aa, Zea mays
  Coding DNA Sequence Number=SeqID_37683
  Homolog annotation: Hit_ID=A2XCA6; Match level="QueryCoverage=97%, HitCoverage=96%, E-value=0.0, Identity=41%"; Hit description =Putative uncharacterized protein
  Pfam annotation: Domain name=DUF810; Domain location=36-1012; Score =991.9; E_value=2.4e-295; Accession=PF05664.2; Description=Protein of unknown function (DUF810)
MARRRRLSASSLPEAAGAIPSALPPELRWPFARLEALTQDELRESVYEIFFCACRSAPGGGTRPSAAARGSRGGAATPTRPPPEVSSPTSGGAKNMAVTSRLKRALGLRARNTRPTVGAGGRPLTSAEIMRRQMGVSEQTDARLRKTLVRSLVGPQMSRKVDSLVLPLELLRHLKPADFFDAGEHRAWQLRQLRVLEAGLVSHPSVPLDRGNASASALRDTVRSAELQTRPVLDARALSAVVAALCRRSVDACRWADGYPLNVHLYLTLLRAVFDARDETVVLDEVDELMELIRKTWNVLGLNDTIHNVCFTWLFLEKYVTTGETEPDLLSAALAMLEQVRDDARRQAEAGTLEAAHLRVLSATLASMHSWAEEKLLDYHESFGDDQGAGGSIGAMENAVSLAVLAAAMLSQDVPSSFAVAVAAAGGDLSSARSPSSFSAREREIVERYIKSSVRRAFTRLHETGTAEKMDSMIVEVDEDPCETLMYVASQTKELARLEKEVYDRVVRQWHPCPTAVAAATLHGCFGALLKRYVSRMAACGLSSETVRVLHAASKLDKWLLQMASEDDPPPDQPPMTPYDVDSIIFGLVKGWMDERLKVGDECLRRAQEAETWNPRSKAEPYAQSAVDLMKLAKVTVDEMLEIQVASACKEELLQRLVDGIDHLVHQYAMLLASCGSKDSYVPPLPTLTRCNQDSKLVQLWKKAAPPCQVGDLEALDCGRIDIVTSSKKPRLEASRSGRGERDHAVRPATSRGTQRLYVRLNTLHYLLAVLHSIDRALSSSQLQAPQRRRLARSSAFGHARPALDAAVHHVSELAAYRLVFLDSAQFFHQALYLGGVTAAPARPTLRLMKQNLAFLSSVLTEQAQLPAVLEVMRASVEAFLTVVLAGGSGRAFARGDHAAVAADFASLKRLFCSFGVGEEAVERETVRAEGVLALMAVPTEQLIHELLGHYASTPMRAAGDELPQLPMMPMTPTARRWSRSDANTVLRVLCYRDDEPANRFLKKTFNLPKRR

SEQ ID NO: 81059 - protein, 185 aa, Zea mays
  Coding DNA Sequence Number=SeqID_37684
MEVWRSGMTARCVSTDQNATEIFLEHVVMDPGNEETVMGVYSCARPVRCLGAPSLAQYLWEQVRIPLEGSGAFHFLFMYMWHSAGTLWRSKWDQARLGYVSHSELFIWLRLGYMYPWALIVALRPTTSLEATSGAKFPNVYVSVFRDRGVLEPTSEVSPRAPAPMGRREAEREGGGGSEEAGDGS

SEQ ID NO: 81060 - protein, 39 aa, Zea mays
  Coding DNA Sequence Number=SeqID_37685
MSVGFWYASVEHRDGGRWLRLDWVKESSNKYCSRSSRIL

SEQ ID NO: 81061 - protein, 129 aa, Zea mays
  Coding DNA Sequence Number=SeqID_37686
MANDDPVDDENPRSNTTNNSINDKLAEVFDMVSVHKHQYKMPTFAFHTNKTITEALHRPLLRAQASMASPPEVDSYVCFLVSHTRINVLDLVRPLLDLDQSRYCRVCQPSASTYFLFPSIPPELIVAPM

SEQ ID NO: 81062 - protein, 350 aa, Zea mays
  Coding DNA Sequence Number=SeqID_37687
MWRTVSQQLRHASQQLKHAANFADHVASGALTSKFAAKIKHLRAQHTDVVREKSAAENKSRGLAERLAAAEAEKGDLRRQLAEERRDVNKAIADAQAAQAEAKLAWVKASLARQRAVELEARLNILRNRVDKTKVSTRMEVERTHAQFVDVYRELGARTAAFEALGQEVGLRFLEWLQEELGVLPTIVMGLMSFASLITCEEAMNALSHEGCAHFEVFDQSDEGLEREIFQVEDPVLKRSAGALFDRMWGPHGRETVRERSDRAMDQMAHDEEVEDLGDLDITLPDSTLPEASGVELAPPSDAGEGPLATPAPTRAGEDPAPAPMLTGEDASKAVGEPAAEDPMAAAGPS

SEQ ID NO: 81063 - protein, 333 aa, Zea mays
  Coding DNA Sequence Number=SeqID_37688
MEAQAHASCNRRAECFVHATAPPLAPPPRLLDCGTNTATRGDPAHDPAAPAWRGGQCGQKRAGSNDGGRRAGAAVTSSAKLTSHPGAAREPSLTAWRQRARVPFLERLAHGSRKGETPKRILPREGTRLRASLLIRGSKAGPSEGFDSHLRSRGPYTHYWSEVRRPAPRKRSTTASGYSGSAPTTDQGFEGWPPKADGLRLARPRGSDSASATEDRLDLGFGGASTSPNLGRRPATSTGGAIITLPRADSGRREQDRRPIWLAPPDRQSWRPAYSVTTAALSPLTEARGRQQGPNRSDSCPSARLHRSSDGHDITPAGCQNLSGCHNGMYLGR

SEQ ID NO: 81064 - protein, 149 aa, Zea mays
  Coding DNA Sequence Number=SeqID_37689
MGKNNKRKREPTPPSEDFGDSEYSEEEFSSESEGSPAPVSPPASSDDSDDSQGIAAEVWTYIRAVERSGLEGSDESEYSSDEEDSDGGDEDEDDDDDDDDDGDGDGSGSGRGGGDGSRGSGDGSRGSTKGDSSKGSTKGDSGGRGRASG

SEQ ID NO: 81065 - protein, 195 aa, Zea mays
  Coding DNA Sequence Number=SeqID_37690
MMTTSKRDRERGYSERDPSPRRERAPSPPTDQRLAPEGFDNCLRACRARDASGYVRYIYGRGSDYPPEENSAACAAPTVVPPVRVRLTATKTGLRRHRKLRLARPQGSDSTSTSEDGLRLARPPGSDSTSTPDDGLRLARPPGPDSASTSEEPPPRPTSGSDQSRHRGAIITLPLASSGYGEQDRRPIRLALVNK

SEQ ID NO: 81066 - protein, 92 aa, Zea mays
  Coding DNA Sequence Number=SeqID_37691
MAAATCWSWIFPRRGIQPRLADDTLRRRHDTHPRNSVKLQVLRACSVRPQRREALVVALADGGLPRRHGNGTASSEEGVLTRKEANQVNCSN

SEQ ID NO: 81067 - protein, 92 aa, Zea mays
  Coding DNA Sequence Number=SeqID_37692
MPAQPARPHASAPTDWWVLRALKPSAAPLTFSPGESAWLARHFFPLALDRIAGQEQVPQDEALRGCCDEFVSGLGRCLPVNFGLLDRCLLIM

SEQ ID NO: 81068 - protein, 57 aa, Zea mays
  Coding DNA Sequence Number=SeqID_37693
MKPPLLQSRKGIHKSKGFHGGGFITGSNIVVAKDAFCRRVAKLYDVIVFICSRKGGI

SEQ ID NO: 81069 - protein, 125 aa, Zea mays
  Coding DNA Sequence Number=SeqID_37694
  Subcellular localization annotation: CTP_CleavageSite=14; ConfidenceScore=5.42e-01
MAAAVMTVSGTDVAAASRPLGNRALSGSPFPTTMPLLRPFLFSGDESGLGFLYLEPPPLCCVLCRLHLMVGAQAFWTYAGIAYPPVITTDGQDMYLVQQPQFLSIDNCRSWLSAFPVRCVIWVPQ

SEQ ID NO: 81070 - protein, 107 aa, Zea mays
  Coding DNA Sequence Number=SeqID_37695
  Gene Ontology: Mol. function=polynucleotide adenylyltransferase activity; Cellular component=nucleus; Biological process=RNA 3'-end processing
  Homolog annotation: Hit_ID=Q5G7K0; Match level="QueryCoverage=61%, HitCoverage=10%, E-value=5e-15, Identity=60%"; Hit description =Putative polynucleotide adenylyltransferase
MSKVKNNNGYLGVTEPISPSRPTEKDLMQTAEVKKVHGSGADIDTMCVGPRHATQNVRGAPFEILELLYYYDAHVAVLGFKINGVSIDLLYANLAHVVIPKGCLNAT

SEQ ID NO: 81071 - protein, 71 aa, Zea mays
  Coding DNA Sequence Number=SeqID_37696
MGYTSTEHVRRQAKECELRHAVGNPTSSSLYGCAVGLLHACTSSSRAPSTRQVTCYDARENWWRASLVEHN

SEQ ID NO: 81072 - protein, 511 aa, Zea mays
  Coding DNA Sequence Number=SeqID_37697
MHMVGDFLKRRIAPLQRRARLCCWFTGANDIGRIQRGPSTDLFWDEMAVLVPRPPVRLPAPPAVTPSPLDKGKGVASSASALGGTEGLEEERRRRLRHADGSLISEPPQKRQRTVGGAEEASSQAHGAQRRGFFPLCSQGHTSSAGFQAHRRVWLSAAGICWEWCQRSASDCCQDNASSFPCPSGGGGDGSGLVPGKKLRQSPSAVCCPAPTRSLATLGQQSYGSWGALEAEHQRLSDWRTQLEERTKLASRQFLSERSQLEQDHKEYKRDLQKVCARELEASRREKNVTRREEVVSQREALTTEFRAKLSALDQILEAQRVQQTKAVERLQKWQRETDLARRETDLTFQEEMLTRRGEMLAEHELEAEEKEKRLEERIRQFQAVQAAPGPWVMEATRKALEDLQVEHRAEVQRIAAWASEASTTLVLLGMSPIPVSELPASISDALPMLDSAADRLWCLDQILGARLEARGGKLCRAVIEYILTCFRSHDPAISLEPVIAGSVAATEDAA

SEQ ID NO: 81073 - protein, 119 aa, Zea mays
  Coding DNA Sequence Number=SeqID_37698
MQESHQNPCEVWGEGVGSFLPVPQHTFYHEVKEDTIHKMTEESYCKVDLTSFDRCLGFGHADRETPVLQNERRLKPVNTAYMYEIESPRQANGVYKNVKQRPSALTKLRHSDTVPQSLK

SEQ ID NO: 81074 - protein, 416 aa, Zea mays
  Coding DNA Sequence Number=SeqID_37699
  Gene Ontology: Mol. function=DNA-directed RNA polymerase activity; Cellular component=chloroplast; Biological process=transcription
  Homolog annotation: Hit_ID=O82725; Match level="QueryCoverage=60%, HitCoverage=34%, E-value=5e-88, Identity=92%"; Hit description=DNA -directed RNA polymerase
  Pfam annotation: Domain name=Actin; Domain location=13-357; Score= -237.2; E_value=0.065; Accession=PF00022.10; Description=Actin
MTPGKENVNKAGSKDVNTFLSTSTTCKMYYRINIIMIVVNKKENFLDFHQNFRVSDKGGELGNHGEVQCIFNYLRCDPEDHYFLLTESPLTAPETREYTREIMFETFNVPGLYIVVQPILALAAGYTTTKPPADQTPDSCPPAFKHVLRQPIIENGRLKKKHWVIDHLVHEGFESTARHVDIPYLPMLVPPKKWKGFLCLNDQNQRTLMKCRNGSTSIKKAKKTNCELHAERCDTKLKLSVARKMREEDEFYYPHNLYFRGCAYPMHPHLSHLGSDLCRGVLEYAEGRPLGKSGLCWLKIHLANKYGGGIEKLSHEGKLAFVENQLFDIFDSAANPVDGNYWWTNAEDPFQCLVACMDLSDALRSPSPYHAVCHLPIHQLNGRNEHLNYTLGISSRPPPRSPGKLARAVAPSALES

SEQ ID NO: 81075 - protein, 257 aa, Zea mays
  Coding DNA Sequence Number=SeqID_37700
  Gene Ontology: Mol. function=sugar:hydrogen symporter activity; Cellular component=integral to membrane; Biological process =carbohydrate transport
  Homolog annotation: Hit_ID=O23492; Match level="QueryCoverage=65%, HitCoverage=28%, E-value=3e-47, Identity=58%"; Hit description =Inositol transporter 4
  Pfam annotation: Domain name=Sugar_tr; Domain location=1-244; Score= -88.6; E_value=1.6e-05; Accession=PF00083.15; Description=Sugar (and other) transporter
  Subcellular localization annotation: CTP_CleavageSite=80; ConfidenceScore=5.18e-01
MAVAGAIFGAAFGGWMNDKFGRRPSIILADALFFGGVVIMAFSPTPRVIVVGRVFVGLGVGMASMTAPLYISEASPARIRGALVSTNGLLITGGQFLAYLINLAFTKVPGTWWWMLGIAGVPALVQFVLMLMLPESPRWLYRKQLDTTVHTWSAHLAVADGIAQTMRAAGAGSGQRFEVSHDAGVVLSEPVPLAGVPLVAGWAEPEKESLTATTVGVMKQGSTFPANPIFMYLPREPEQISSVAHRRRASTRRSRER

SEQ ID NO: 81076 - protein, 369 aa, Zea mays
  Coding DNA Sequence Number=SeqID_37701
  Gene Ontology: Mol. function=cysteine-type peptidase activity; Biological process=proteolysis
  Homolog annotation: Hit_ID=Q8S456; Match level="QueryCoverage=93%, HitCoverage=44%, E-value=1e-179, Identity=86%"; Hit description =Putative uncharacterized protein 163K15.6
MKSVDRPPSNPKRLTIESSQEKLNIRCIPYDVIVSSWIMSDRQRDAVARLGFASIFDLRTDALESRSLIRWLMDKLDPHDMTIRPGAGKELKITKDTVHLILGLPCAGGGREFTDWYGEVDAAAKLRRDLNVGKEKFDVVKLQDKIVLGNDDELSIRCFFLILFNRLLFPSASWGITNNEVLMTSNMARMSDIDWCQLVYTDLCDVAARWHKRNKTNITATIYGCSLIVLIYYLDHLHHPASPVNKYDVKILLLLTVLYDFIQFRSRSETCYVIAPERPVSAVFNIYVPRIKNLIGNKLQCLPSQQRPMFQSLFDAHDKEVDKYCDSLQLSHQMIVSKQIELSETFGEMIDEVLRAATQRDSQPEVIFQ

SEQ ID NO: 81077 - protein, 125 aa, Zea mays
  Coding DNA Sequence Number=SeqID_37702
MCSSDCREIERENVVVRAAGAWIRLDCGTFSANSLQQRAQSSGSGGIRPPRIRIMSFERMGEITGAARAPSRRTPSQARERPADHCAVFLVAKKMENRWIRDAGLRSSIARWVAQIAYRIRLDNF

SEQ ID NO: 81078 - protein, 91 aa, Zea mays
  Coding DNA Sequence Number=SeqID_37703
  Subcellular localization annotation: CTP_CleavageSite=71; ConfidenceScore=5.49e-01
RGLRLARPQGSSPASASEGGLRLARPQGSASISTSEGGLRLARPQGSASTSTSGGIASSPDPGLGLRRSLRLARPWARTDRTTEDASLPYP

SEQ ID NO: 81079 - protein, 134 aa, Zea mays
  Coding DNA Sequence Number=SeqID_37704
  Homolog annotation: Hit_ID=A3AA52; Match level="QueryCoverage=26%, HitCoverage=6%, E-value=2e-07, Identity=72%"; Hit description =Putative uncharacterized protein
MTLNFKLILDEFNRRNGPKAHFPFIICNNTTVLGPANSGATDDSVKALVASTDPNALLNTVTADVLATPSVDVGGGLFDGGDADADISSNVLDSDTSNSYASMSYQIAVGDTYWIISTTKPQNLTQYQASDSNL

SEQ ID NO: 81080 - protein, 128 aa, Zea mays
  Coding DNA Sequence Number=SeqID_37705
MATESAAEIVCRLPEQCVAHAISLTALGYACHSSAVSPAPFRAAADSDAAWARFLPPDHADDVLASAPALSQAARPFHGVPCQLSEVHKKRTLYQPELPAASESRRLVDSFFSPLRAQLKRCRCGPRA

SEQ ID NO: 81081 - protein, 82 aa, Zea mays
  Coding DNA Sequence Number=SeqID_37706
MSEEKKVAAEMKLSLSEEMHLGFLESIAKTNTEKITIMTQICGSDPSPKIHVNCCCRCFSPALSPLKMHRGGLAISGSGGDI

SEQ ID NO: 81082 - protein, 88 aa, Zea mays
  Coding DNA Sequence Number=SeqID_37707
  Subcellular localization annotation: CTP_CleavageSite=19; ConfidenceScore=5.10e-01
MTQDGSGAPQAVPGTTCVVANQTACTETLFVVCNSNIVVSFLPSEPAEASPGPHPKGDDEFRKMAEAIMDKVVNQLLDEAAEIVLKED

SEQ ID NO: 81083 - protein, 99 aa, Zea mays
  Coding DNA Sequence Number=SeqID_37708
  Subcellular localization annotation: CTP_CleavageSite=61; ConfidenceScore=5.27e-01
MAQWLTRSTLAGGRRESGVRGLASLAKQTSIPRSGSFTEARVMGVGWPLARRGARAGVLWRAQSASNTCRFSSARVPQLAQVANVRILAKIRRESFPGT

SEQ ID NO: 81084 - protein, 58 aa, Zea mays
  Coding DNA Sequence Number=SeqID_37709
  Gene Ontology: Mol. function=aspartate-tRNA ligase activity; Cellular component=cytoplasm; Biological process=tRNA aminoacylation for protein translation
  Homolog annotation: Hit_ID=A2X8E8; Match level="QueryCoverage=98%, HitCoverage=9%, E-value=2e-12, Identity=64%"; Hit description =Putative uncharacterized protein
MRHPCEFVGLELLMLKMEIKEHYFEVCDIIDDLSVSILNHLTENCKKELETINGQYPF

SEQ ID NO: 81085 - protein, 79 aa, Zea mays
  Coding DNA Sequence Number=SeqID_37710
MRAEKRSRKAWLAAIPVLFGATKGAEVWHDDEEEKVEVGRAAKENVSVGVKQVAELNKPVVGSEISDANHDFEEFILVK

SEQ ID NO: 81086 - protein, 245 aa, Zea mays
  Coding DNA Sequence Number=SeqID_37711
MAAPRARSLDPGVGGRGPIVDSFLSEEDEVGGAARVMARLQRELTELEEKKVAQEQRAAESLARVKAIRDGSRMGKLIVCSKVDDLCADELHELLHGLSRVDQEIRALLPPPAPARTTEAGGLMRGPPPPLHSQGRPRPPRRLPWVSSQSQPPSLPILRAPCTLPHPFSFTSPPVQQPSSLRAMSRMLLRHTQLSHRSSSMVPRLPNEAHQYSYQSQGVAAIAGNNISGQTSLLHSSPPLPTSAL

SEQ ID NO: 81087 - protein, 197 aa, Zea mays
  Coding DNA Sequence Number=SeqID_37712
MDKNQNLAYAPYIMALIKAKTRFEGPCEIVHTPFRPFKNEIGFLTRPLTPFPDDEKDVSYDAGEAPEAEAEQMPPPPPPPQPQQYWQPGPGYFDLYFQNMQQGLQTHMDSRFQGMMTHMDQHMDAMQSRFNDNWDALNTEYSEFGSHIQDHVTDPIMNRLNNMQQSFQDNMGALSSQFDNLSTNESMQEISQRQQQL

SEQ ID NO: 81088 - protein, 157 aa, Zea mays
  Coding DNA Sequence Number=SeqID_37713
  Gene Ontology: Mol. function=aspartic-type endopeptidase activity; Biological process=DNA integration
  Homolog annotation: Hit_ID=Q850V8; Match level="QueryCoverage=95%, HitCoverage=53%, E-value=9e-12, Identity=31%"; Hit description =Putative uncharacterized protein OSJNBa0037J17.18
MDTNFHKHQVIDWTFMLGQSVMEDLIPKFETCDLYHFMGQRTDFSEIAVKQFLATAEIDIDEGSITWKTGFKRYSTTFAEFAAANSLNYGTISARIDLYTEDNFEDFVQFYEPARLGIPRRFGETTGLRHHPVVINKIARVTILPKSGDKSKIRDKF

SEQ ID NO: 81089 - protein, 71 aa, Zea mays
  Coding DNA Sequence Number=SeqID_37714
MGKKEELPAQPKQRREGSGVWEKGEGGLPFIEPSSGHVRLHQQMAGDGRATLGAHFRRFPLGIGSRFYNVY

SEQ ID NO: 81090 - protein, 295 aa, Zea mays
  Coding DNA Sequence Number=SeqID_37715
MSYALHSLDCNLADGEYVLIPEQGTIQEEDQEQASEAAIEDLPAAPAIEGKPCYGGYKCGHCTAAAGVSGALYAKAVPFRKWLMMNSPTPASGGDTRFSSDFLSRDGFPSILWEVLNSAGYPTPPLYTVQLYEEHRVPHCRVWLTLEAHPLQPGWRSLDSEIIGLRTDDTVEAAARKTLTTFCGYHPLEMVMHPLGLFPAEKKDNPMWCNRVSHVKDVWAMYPDLVGRVTVQCMSALYCLQALQSDAMAHLANITQTAKLTLDSREDFVVDLSTELVEKDLQVERLSQRITTLEQ

SEQ ID NO: 81091 - protein, 328 aa, Zea mays
  Coding DNA Sequence Number=SeqID_37716
  Subcellular localization annotation: CTP_CleavageSite=24; ConfidenceScore=5.20e-01
MSLMLQHTGVPIPPVQSAPPPALQAAVVPAIQAEPPLHSVGPSSSPLRPVTLVFTLPVISSISTQPPVPPAPAITTTAVAVSVTSSAPVAPAAQPPSESVPAPASTTDPGSETDSDPQLAFALLPRPRPNAPPPPPSSSGLHDTNLRDTHPRRYGFPNPVFDHGATRRTSSPHPHFTGFRERLREGDWVTRAGFSRPVIHATQVDRVGPPANARVRPHRSEYKGSSSLITCEKQTIQIEFYPCKAGELGGGKESSLSRVKLTNQMGQRASPGIKEGGRPKSGEVDLRLPVKFCRVRGLGKLHGPLSGLTEALARLGETGVGWPRWPML

SEQ ID NO: 81092 - protein, 132 aa, Zea mays
  Coding DNA Sequence Number=SeqID_37717
MAVVQSTPSALKFDCNLADGEYVFIPEQGTIQEEDQEQASEAAIEDLPAAPAIEGKPRYGGYKCGHYTAAAGVSGALYAKAVYLARIKLDLNRLLLAGTIHEMVDGVTWPTTLPPGWTVEWDVAPAGEEHEE

SEQ ID NO: 81093 - protein, 269 aa, Zea mays
  Coding DNA Sequence Number=SeqID_37718
MAGEHREDKEGERFVWFGHGGGLTPFGITVKMEGSLVIRTSYCSEVEGFPHLLWSCALRMGIHKKPEFTWEKAETTQTTLLSKSPSPDTASQTLAKMLPEKPSDSYAKTTAGRDPTEDDPTIVYMAGYLHTLDNHYDDLSSHCTHLNSQVESLEQQVKELKKEKASLQESLEIAEGEEANTREAYRTLKMDYDKKLKKLVPTKKIQKRTKSQGCRTERKKEAPPALPPFRIENLSDIEDMSLASLDDLLKEFGDTLEREFGSTLESTRV

SEQ ID NO: 81094 - protein, 112 aa, Zea mays
  Coding DNA Sequence Number=SeqID_37719
MVESTGLADTYICTGVEFLSGGVRTNGEIPGGSRAMRAAGERVAAKEADSAQQPERSADLTRGAQATASNWPVAGLSRAPAEAAIRVHPSAREREGDGRSGETGPRASGKII

SEQ ID NO: 81095 - protein, 145 aa, Zea mays
  Coding DNA Sequence Number=SeqID_37720
  Gene Ontology: Mol. function=nucleic acid binding; Cellular component= nucleus; Biological process=mRNA polyadenylation
  Homolog annotation: Hit_ID=A2ZC11; Match level="QueryCoverage=98%, HitCoverage=27%, E-value=1e-54, Identity=72%"; Hit description =Putative uncharacterized protein
  Pfam annotation: Domain name=RRM_1; Domain location=28-99; Score =109.4; E_value=1.1e-29; Accession=PF00076.13; Description=RNA recognition motif. (a.k.a. RRM, RBD,
MAAAPVGAQNRCVFGDFRTDRLYLSISITVGNIPYDATEEQLVQICEEVGPVVSFRLVIDKETGKPKGYGFCEYKDEETALSARRNLQGYEINGRQLRVDFAENGRNTDRNREKVDDPQIFTVEEPFLPPLEFSVNLRSCIVFVL

SEQ ID NO: 81096 - protein, 54 aa, Zea mays
  Coding DNA Sequence Number=SeqID_37721
  Subcellular localization annotation: CTP_CleavageSite=48; ConfidenceScore=5.16e-01
MAHSGGDGMAQAGRVKGQLGHSARWHKAPNRAGRTTLGRRVPEMLRGRQATRVS

SEQ ID NO: 81097 - protein, 290 aa, Zea mays
  Coding DNA Sequence Number=SeqID_37722
  Gene Ontology: Mol. function=transporter activity; Cellular component= mitochondrial inner membrane; Biological process=transport
  Homolog annotation: Hit_ID=A2Y6Z3; Match level="QueryCoverage=92%, HitCoverage=59%, E-value=1e-124, Identity=84%"; Hit description =Putative uncharacterized protein
  Pfam annotation: Domain name=Mito_carr; Domain location=103-196; Score=80.5; E_value=5.3e-21; Accession=PF00153.18; Description =Mitochondrial carrier protein
  Pfam annotation: Domain name=Mito_carr; Domain location=198-288; Score=91.8; E_value=2.2e-24; Accession=PF00153.18; Description =Mitochondrial carrier protein
  Pfam module annotation: Pfam domain module=Mito_carr::Mito_carr; Domain location=103-196::198-288
MAPGRRRRRGGARKFRGFADCVARTVRDEGVLSLWRGNGTAVIRYYPSVALNFSLKVRGSAPCFVYALGSVYDISLWGRVWKDLYRSILKDAGTSSDNKFTSIALSNFFAGAAAGCTTLVLIYPLDIAHTRLAADIGRTDTRQFRGIRHFIQTIYKKNGIRDIYRGLPASLHGMVVHRGLYFGGFDTAKDVLVPLESPLWQRWVAAQAVTSMAGLISYPLDTVRRRMMMQSGMEVQMYSSTLDCWRKIYRLEGIRSFYRGALSNMFRSTGAAAILVLYDEVKKFMDRGRL

SEQ ID NO: 81098 - protein, 180 aa, Zea mays
  Coding DNA Sequence Number=SeqID_37723
MPLEFDRWSSDFWARLDVRCTPDMYCSMSESARYNSPDCPVYTGQCPVLQEDAALELGSLGNSQRLLRYNSPDMSGVHRTVRCNSGATTTSRQRSPATAINARQSAQKSGTRVVAHRTLYSTCPVRHRTSRQAQKTELQRSNPNGFGDVAGAPDMSGDRWREVVVAPELHRTVRCTPDMS

SEQ ID NO: 81099 - protein, 397 aa, Zea mays
  Coding DNA Sequence Number=SeqID_37724
  Gene Ontology: Mol. function=heat shock protein binding; Cellular component=chloroplast thylakoid membrane; Biological process =response to heat
  Homolog annotation: Hit_ID=Q948S9; Match level="QueryCoverage=61%, HitCoverage=61%, E-value=1e-107, Identity=76%"; Hit description=DNAJ homologue
  Pfam annotation: Domain name=DnaJ_C; Domain location=277-385; Score =90.3; E_value=6.3e-24; Accession=PF01556.9; Description=DnaJ C terminal region
  Pfam annotation: Domain name=DnaJ_CXXCXGXG; Domain location=193-276; Score=69.6; E_value=1e-17; Accession=PF00684.10; Description=DnaJ central domain (4 repeats)
  Pfam module annotation: Pfam domain module=DnaJ_C::DnaJ_CXXCXGXG; Domain location=277-385::193-276
MAGIAYRRAKAKIQPPSSLRVIQMMRPDSPPNPWERSGAEGAYGPAPFKPPSGGSTGDIVEASGVYDLFKSSRKLILQMQRSFPPFGSKRDDSLSCPGFYRCLNSVDWMNGPIRPNFLDFQGVDFEATFGVRRAYSVRDIQDYSNPFDLFESLFEGFGEMGGMGGGRAARNIPMQGDDESYNLVLNFKEAVFGVEKEIEITILEGCNTCDGSGAKPGTKATTSKTCGAHGQVVSSTRTLLGIFQQVSTCNTCGGTGEFSTPCNTCGGDGRVRRTKRISLKVPAGVDSGSRLRVWFEARWANILYTCKVSYIDAILGTTVKIPTVDGTVDLKIPSGTQPGTALVMSKKGVPLLRKSIAHGDQLVRVQVEIPKRLSSDEKKLFEELANLNKAQTTNSRR

SEQ ID NO: 81100 - protein, 100 aa, Zea mays; identical to SEQ ID NO: 79280
  Coding DNA Sequence Number=SeqID_37725
  Homolog annotation: Hit_ID=A2Y700; Match level="QueryCoverage=100%, HitCoverage=100%, E-value=6e-42, Identity=68%"; Hit description =Putative uncharacterized protein

SEQ ID NO: 81101 - protein, 178 aa, Zea mays
  Coding DNA Sequence Number=SeqID_37726
  Gene Ontology: Mol. function=electron carrier activity; Cellular component=endoplasmic reticulum membrane; Biological process =electron transport
  Homolog annotation: Hit_ID=Q9FVM7; Match level="QueryCoverage=83%, HitCoverage=30%, E-value=2e-55, Identity=57%"; Hit description=NADPH- cytochrome P450 reductase
  Pfam annotation: Domain name=NAD_binding_1; Domain location=53-151; Score=48.8; E_value=1.9e-11; Accession=PF00175.12; Description =Oxidoreductase NAD-binding domain
MAIFVNIKISNLERPLDNLCLSRMALVKIHVTCALVYGPSPTGRIHQGVCSTWMKERLALKQSGAELGTSILFFGCRNHNMDYIYEDELQTFLEEGALSELIVAFSREGPTKEYVQHKMVEKAIEIWNIISNGGYLYVCGDAKGMATYVQKMLHTIVQEQLTLVTQEHEMSALMYLVL

SEQ ID NO: 81102 - protein, 87 aa, Zea mays
  Coding DNA Sequence Number=SeqID_37727
  Subcellular localization annotation: CTP_CleavageSite=40; ConfidenceScore=5.23e-01
MTPFSDPVTAATSLPPHPPLRDPAVSFIDIVAPAKSGKKRASNTTCVVGLAAGEAFYIVVVGIVLSWSRLSTRQAFLRMITSSCLTD

SEQ ID NO: 81103 - protein, 65 aa, Zea mays
  Coding DNA Sequence Number=SeqID_37728
MSYTGMCDYFHYVDYFHCTRMYDYFHYDRASYHVLRSPPRLILVNLVLTCGAIPLVCESESLDRF

SEQ ID NO: 81104 - protein, 239 aa, Zea mays
  Coding DNA Sequence Number=SeqID_37729
  Gene Ontology: Mol. function=hydrolase activity, acting on ester bonds; Biological process=nucleobase, nucleoside, nucleotide and nucleic acid metabolic process
  Homolog annotation: Hit_ID=A2WVD9; Match level="QueryCoverage=61%, HitCoverage=96%, E-value=2e-52, Identity=64%"; Hit description =Putative uncharacterized protein
  Pfam annotation: Domain name=UPF0081; Domain location=112-226; Score =22.8; E_value=2.2e-08; Accession=PF03652.6; Description =Uncharacterised protein family (UPF0081)
MTLSHLFLHEQLWKQHGLEQQPSTHILVLRLIASGVSEKDISGSEPSKSVVSVPSLVCIPLPLTPPPLPSALAVAPNLSPTAFFRRRYAMRLLQAEELFRKVLEVGSKNKAARLLGLDVGSKYVGVAISDEKNRVAMPLSVLCRTKTNINLMADDFKTLAIQVSLAGELCKTGKLDDLPYAYWDENFTSKCVEALLHPLNLKDLDDAKTMTDKFAAVCILQGYLDNMNRKLRSTDKSEA

SEQ ID NO: 81105 - protein, 48 aa, Zea mays
  Coding DNA Sequence Number=SeqID_37730
MGFVGDIAIEESAAGDRSPVLDQEHDAGYEVLYHGEIRGILSGCPLKF

SEQ ID NO: 81106 - protein, 102 aa, Zea mays
  Coding DNA Sequence Number=SeqID_37731
MGPYNIFIDFLELHFLFCFFIIVTKHHVTIMTHLHVLPAKSMEEPSSSLVTITSYKVDPNRHCDIDTTDHITSDLDRLVVYERYHDAKQVQVGNGAGPKVHL

SEQ ID NO: 81107 - protein, 319 aa, Zea mays
  Coding DNA Sequence Number=SeqID_37732
  Gene Ontology: Mol. function=chorismate mutase activity; Cellular component=chloroplast; Biological process=aromatic amino acid family biosynthetic process
  Homolog annotation: Hit_ID=A2WVD6; Match level="QueryCoverage=93%, HitCoverage=94%, E-value=1e-139, Identity=83%"; Hit description =Putative uncharacterized protein
  Pfam annotation: Domain name=CM_2; Domain location=78-145; Score =25.4; E_value=6.5e-05; Accession=PF01817.12; Description=Chorismate mutase type II
  Subcellular localization annotation: CTP_CleavageSite=44; ConfidenceScore=5.52e-01
MAFKLATKAAAASPAAAHRGGLARGPEGTSRVAFGPAPRNKGLRAANNSATPVAKYERSFSWEERVDRSEILTLDSIRQVLIRLEDSIIFGLLERAQFCYNADTYDSNAFHMDGFGGSLVEYMVRETEKLHAQVGRYKSPDEHPFFPEDLPEPRLPPMQYPRVLHPIADSININKEIWKMYFDELLPRLVKKGSDGNAGSSALCDTTCLQALSKRIHYGKFVAEAKFQESPEAYMPAIIAQDRDQLMHLLTYETVERAIEHRVEAKAKIFGQEVNIGVEDNGSPPVYKIVPSLVAELYSYRIMPLTKEVQIAYLLRRLD

SEQ ID NO: 81108 - protein, 124 aa, Zea mays
  Coding DNA Sequence Number=SeqID_37733
MCDDVQLCNRCVHELLILARTWFAFSLPSKTGCDISGIKALADCRWLVLGALHEQEQQDSSPSPQREVESKRPPSPAPQPEMPPSPPQGIPAAGGDPDGDGDDNDAGGSSSHDTERSEEPEPEG

SEQ ID NO: 81109 - protein, 70 aa, Zea mays
  Coding DNA Sequence Number=SeqID_37734
MASVLDAILESVKTLAHASAEAPSEQTNDASEAAAMSTTNAPSEAGPLEIAPIVLVEESAPEKSKSPALE

SEQ ID NO: 81110 - protein, 468 aa, Zea mays
  Coding DNA Sequence Number=SeqID_37735
  Gene Ontology: Mol. function=ligase activity; Cellular component =cytoplasm; Biological process=response to auxin stimulus
  Homolog annotation: Hit_ID=P0C0M2; Match level="QueryCoverage=97%, HitCoverage=75%, E-value=0.0, Identity=86%"; Hit description =Probable indole-3-acetic acid-amido synthetase GH3.2
  Pfam annotation: Domain name=GH3; Domain location=1-446; Score=760.6; E_value=1e-225; Accession=PF03321.4; Description=GH3 auxin-responsive promoter
MADHSYICMFIRYVPGLDKGKGLYFLFIKSETKTPGGLPARPVLTSYYKSDHFKHRPYDPYNVYTSPTAAILCTDSFQSMYSQMLCGLVARAEVLRVGAVFASGLLRAIRFLQLHWQELAHDLRTGTLSAKVTEPSIREAVAEVLRPDAGLADLVEAECGKESWEGIITRVWPNTKYLDVIVTGAMAQYIPTLKYYSGGLPMACTMYASSECYFGLNLRPMCDPSEVSYTIMPNMGYFELLPHDPDAVPPSRDDPPPRLLDLADAEVGRDYELVITTYAGLCRYRVGDILHVTGFHNAAPQFRFVRRKNVLLSVDSDKTDEAELQAAVERAARLLAPYDAAIAEYTSQADATTIPGHYVVYWELMVREGGASPDAAVFERCCLEMEEALNAVYRQGRNGDAIGPLEIRVVRGGTFEEVMDYAISRGASINQYKAPRCVSFGPIIELLNSRVVSSHFSPACPTYSPHKK

SEQ ID NO: 81111 - protein, 21 aa, Zea mays
  Coding DNA Sequence Number=SeqID_37736
MSGATGQSGVPFYHWLGHVAR

SEQ ID NO: 81112 - protein, 229 aa, Zea mays
  Coding DNA Sequence Number=SeqID_37737
  Homolog annotation: Hit_ID=A2YQ71; Match level="QueryCoverage=51%, HitCoverage=59%, E-value=4e-18, Identity=44%"; Hit description =Putative uncharacterized protein
  Pfam annotation: Domain name=DUF588; Domain location=80-209; Score =28.1; E_value=3.2e-05; Accession=PF04535.3; Description=Domain of unknown function (DUF588)
  Subcellular localization annotation: CTP_CleavageSite=37; ConfidenceScore=5.01e-01
MAMPTTPKATTSSPAAYYVAKPPPPPPLGYAVHNKAAAAAYDSYDGRHGGMVATTTTTRSSSSAARHHHHHHHHQQPAGARALDGVLLLLRAAASVMAFVAVALVASCRHGDWMEFARYPEYRGLLGASALACAYSAAQATRGFRRMRASGRAGGGLADFAGDQVVAYLLITASAAALPITLRMRSAVLNVFTDAMTAAISLAIIAFAALALSAAFFFSPRNHTSSSSQ

SEQ ID NO: 81113 - protein, 90 aa, Zea mays
  Coding DNA Sequence Number=SeqID_37738
MAKEVYEPKYDSRTEGINGEVLMRVGGGKRHLEEERRQRVELEVRMMTEQMFQYMQTLGAVAGVAPPPLLFTPNAPHWFYSHVESIGVLK

SEQ ID NO: 81114 - protein, 432 aa, Zea mays
  Coding DNA Sequence Number=SeqID_37739
  Gene Ontology: Mol. function=structural molecule activity; Cellular component=cytoskeleton; Biological process=multicellular organismal development
  Homolog annotation: Hit_ID=Q6Z256; Match level="QueryCoverage=92%, HitCoverage=94%, E-value=0.0, Identity=90%"; Hit description=Actin -related protein 2
  Pfam annotation: Domain name=Actin; Domain location=1-404; Score =436.6; E_value=3.4e-128; Accession=PF00022.10; Description=Actin
YVKCGFAGENFPTSVFPCVVGRPLLRYEESLQEQELTDIVVGAACADLRHQLDVSYPVTNGIVQNWDDMGHIWDHAFYSELKVDPSECKILLTDPPLNPVKNREKMIETMFEKYNFAGVFIQIQAVLSLYAQGLLTGLVIDSGDGVTHVVPVVDGYSYPHLTKRMNVAGRHITSYLVDLLSRRGYAMNKSADFETVREIKEKLCYISYDYKREYQLGLETTILVKSYTLPDGRVIKVGTERFQAPEALFTPELIDVEGDGMADMAFRCIQEMDIDNRMTLYQHIVLSGGSTMYPGLPSRSVDNIEKYNLAKKITKRPLHILKQVTTFFTRLEKEILDRYLDVVLKGNKDGLKKLRLRIEDPPRRKHMVYLGGAVLAGIMKDAPEFWITRQEYQEEGLDCSDRFLYHGMHRIKKEVRKFICGNMALFKNLEQQ

SEQ ID NO: 81115 - protein, 66 aa, Zea mays
  Coding DNA Sequence Number=SeqID_37740
MALVPPPMLPLAAERGVAVRPPHERRSRRAQEDRGEDLFTRAEVVAVAGKPKVQRWPPPLALLVWR

SEQ ID NO: 81116 - protein, 94 aa, Zea mays
  Coding DNA Sequence Number=SeqID_37741
MALGPTDRGCPVGWLGCRPLGRAAECREIIDLAKRVSERREQSSKDGSPPCRRPGKERVDDDEVAAVERDLGYQSPEGDLKDVFVRDSYSGGDN

SEQ ID NO: 81117 - protein, 47 aa, Zea mays
  Coding DNA Sequence Number=SeqID_37742
  Homolog annotation: Hit_ID=O48967; Match level="QueryCoverage=89%, HitCoverage=9%, E-value=4e-15, Identity=90%"; Hit description =Putative uncharacterized protein
MGIRSQAGVPLAGVGCAALVDHLHAASWPSKFRPHLLKKYDGDPVKT

SEQ ID NO: 81118 - protein, 210 aa, Zea mays
  Coding DNA Sequence Number=SeqID_37743
MVHGGVDAYNGVLKNSRCRYPKSGDVSVGPDLCEEAPDPCTHNPDPRLRSGTTKPYPVRLRSPLRRRPDAATWLVARDISQRTEPDHDGANRGAPRRDFNGFPGGGRSCFFYTAGSQLPKAGHCCCARRTAAYNCADIPDSVESGFGSIVSSQGVAASPSKLHDLTGGHEAVAGRRRPAARHGTFYLDQVETTVIPRASMSHRRLCAHPQ

SEQ ID NO: 81119 - protein, 118 aa, Zea mays
  Coding DNA Sequence Number=SeqID_37744
  Gene Ontology: Mol. function=P-P-bond-hydrolysis-driven protein transmembrane transporter activity; Cellular component=mitochondrial inner membrane presequence translocase complex; Biological process =intracellular protein transport
  Homolog annotation: Hit_ID=A2YKH8; Match level="QueryCoverage=61%, HitCoverage=20%, E-value=7e-17, Identity=56%"; Hit description =Putative uncharacterized protein
MEATRANVQTTNGYRHLNNRKLSVFNEFSMQIKGEAKRYVVKEDLKVRTKKTTDSIYKRVDEVWSEAEETSKKIRGHPVYKRVDEYTKPVVTKGQEVADDVRERWETSDNPVVQKIQE

SEQ ID NO: 81120 - protein, 138 aa, Zea mays
  Coding DNA Sequence Number=SeqID_37745
MVQAQAFWMQQSRAIPWTSRTYLPERCSLEEEPPWSVQSALAAPFAEEALVAPSAGPEEMLFEATQSAKAASYAKSAQSARVALAALFAEDALVAPSAGPEEMLAEAAQSARDALVAPFTCAHGDICKAGYKRRSISL

SEQ ID NO: 81121 - protein, 114 aa, Zea mays
  Coding DNA Sequence Number=SeqID_37746
MAQDDMGCMDQAWACIGFVLQITHSPSVQNLNGPGRYQAWSSMQTNGPGRYGLYGSRGSSSFPRNFIPPDLGGYINGVINRFDEFCIQKPLDLGLGRILFFIRYLVNSLLLRTY

SEQ ID NO: 81122 - protein, 1262 aa, Zea mays
  Coding DNA Sequence Number=SeqID_37747
  Gene Ontology: Mol. function=metal ion binding; Cellular component =intracellular; Biological process=response to DNA damage stimulus
  Homolog annotation: Hit_ID=A2XFS2; Match level="QueryCoverage=98%, HitCoverage=98%, E-value=1e-167, Identity=35%"; Hit description =Putative uncharacterized protein
  Pfam annotation: Domain name=BRCT; Domain location=1065-1151; Score =6.9; E_value=0.8; Accession=PF00533.17; Description=BRCA1 C Terminus (BRCT) domain
  Pfam annotation: Domain name=BRCT; Domain location=11-84; Score=25.7; E_value=0.00017; Accession=PF00533.17; Description=BRCA1 C Terminus (BRCT) domain
  Pfam annotation: Domain name=BRCT; Domain location=947-1026; Score =19.0; E_value=0.018; Accession=PF00533.17; Description=BRCA1 C Terminus (BRCT) domain
  Pfam annotation: Domain name=PHD; Domain location=1187-1243; Score =22.5; E_value=3.1e-05; Accession=PF00628.20; Description=PHD-finger
  Pfam module annotation: Pfam domain module=BRCT::BRCT::BRCT::PHD; Domain location=1065-1151::11-84::947-1026::1187-1243
MPPHGPEEDAADAHLFAGVRFALHGFDQISASQIERCGGVHAGGWDADCTHVIVSNTLYDDPVCVAARKAGKKVVVDQWVEDSFDLGELADADRVLYAPVRDFKGIPGCDKLHICLTGGWEVEIMGAQAKDSEDETEYAGTCSLSSRRIDRRTPIREISTKSHVDSALHAPSGGPTVSASNVVGATGKHLSTPEQFMKAHDASTKSSDIRTDSGTAPDTKCAAMSVDNDTLKPTRSHIYHNENDEVPADKASRDEAKDDHRRELDTRDSTLRTPSVHKSIAPTIPGDNIENTNRNCFHGFSQINVNSDLQLNSSEENFSKKILHSTNLSRKVDQKDDGHVPDPKPNISQSSVEENLNMCEFNPRSEGNSASRNDQPLGYSRRRSSKSGSLNVHRKKSILSSVSSKAPNEAPDSGSGISSATASDVGRSPTEPTKVDGHVNSGPTMNSTENQMSGCKSNLLSYRRTSLKLVSSAEVEKLPENSVNDKNMVEPDVVKTPALHEATTEEPSPSVCSEVRKESLGVHQNRDAEMTDAQLLSKTEDAAPCSKPDKVVSCQNSGLEGCKDVPVNKITDEHGIFPSKISTSRVKKVGAKRSRNAGSKAASEFTNSRSEVAALKPKHDKVASHENVEAQQGEGCCSPNAAECTPPSPAEALNNKSTNEVLTSSQGPNHKTNESLVASKAESVNMTLQRNKKGNRRKLPNTSNADENQRSSSRTVPNSKSGNLVAKGSRTADFNISDSPTVDETETVPSNSSFNEAVPPGNGEEKHKRLSSSANADDPEACTANKVPNNRVRKVVAKRKLSDVQSHKSGSEPCKTAKVLVSEVKVVSPARVAQSSRNANKVTVVQDLQNTNTGRTNDTVGSFCKDVTEDCSKDMQSSKTRSSRRQKIADLVDGSTDHDKENILVDSNFTSNTKRGNNSMSSKSNTKTLQSSKAVLDESSVIKRNGYGTLDVPEPTWFILSGHRLLRKEYRAILRRLRGRVCRDSHHWSFQATHLVTTEMRRTEKFFAAAAAGRWILKPDYLTASNEAGKFLEEEPFEWHGEGLNIGDTISLDAPRKWRQLRQRTGYGAFYGMQVIIYGECIAPTLDTLKRAIRCGDGTILATSPPYTRFFKSSVDFAVVSAGMPSADAWVQEFMRHSIPCISADYLVEYVCKPGHPLGKHVLFNMHDLAERSLQKLMKNQEDAPGSCSACGSDNREVPMLVCGGDGRSQSSGCGVRTHADCCNPPVEGCDGGEWLCGRCDQQKSAKKAKKTAAKPRVLKQR

SEQ ID NO: 81123 - protein, 436 aa, Zea mays
  Coding DNA Sequence Number=SeqID_37748
  Gene Ontology: Mol. function=catalytic activity; Cellular component =protein serine/threonine phosphatase complex; Biological process =protein amino acid dephosphorylation
  Homolog annotation: Hit_ID=Q7F0H8; Match level="QueryCoverage=94%, HitCoverage=93%, E-value=0.0, Identity=89%"; Hit description=Protein phosphatase 2C-like
  Pfam annotation: Domain name=PP2C; Domain location=38-288; Score =91.3; E_value=3e-24; Accession=PF00481.12; Description=Protein phosphatase 2C
MTTAARERRLPPTLPLATLIGRELRAGGSERPALRYGHAGFAKRGEDYFLVKPDCVRVPGDPASAFSVFAVFDGHNGVSAAVYSKEHLLEHVMSALPPDIGRDDWLQALPRALVAGFVKADIDFQRKGEVSGTTATLVVIDGFTVTVASVGDSRCILDTQGGELQLLTVDHRLEENAEERERVTASGGEVGRLNLFGGQEVGPLRCWPGGLCLSRSIGDMDVGEYIVPIPHVKQVKLSNAGGRLIIASDGIWDALSNEAAAKACRGLPAELAAKLVVKVWLAQFLFSMSMQQALKTSGLKDDTTCVVVDIIPSDHLTSPQLSPKKNHNKLKSLFRRRSHSSVGKLGGKSASIGSVEELFEEGSAMLEERLGRNLSLKAVSAPFRCAICQVDQEPFEDLMRDNGGGYCSSPCAPWGGPYLCLDCRKKKDAMEAIEGD

SEQ ID NO: 81124 - protein, 92 aa, Zea mays
  Coding DNA Sequence Number=SeqID_37749
MEGERRRESGNLGGRENTAARNWPGFGILDFAARVFSLQSPATVLDWMTRLWAPPRNKPEMWDFGTMVWSTETPEVKVRARADEPGAVKSEC

SEQ ID NO: 81125 - protein, 469 aa, Zea mays
  Coding DNA Sequence Number=SeqID_37750
MAASARGRRLAARARKLLAADLDLVLDLDLPPPSTQEHRCLSSAAAATALATSGGAGRLGCRSYLGGAPPMPRVVVQRIERCRGPPRLSLLDKYIWPLIYDTMTCSAAACLISAPKSQLQCPIHAGTVVLRCRFDAAGDGACLKRYTDPSFFFRAHSAKIDEQGTLKQHRRQAEAAAAAGAAGSMFLLMQQTAAHRVEQPNMEQKLQEGSTAQPSPSELERTSSFEAWLSPQARRFPTATAATTHHHLQEPPDDDDGGGGGGATTCSGSISSQVDTTSNAAAVSSSSTVKAVRLNSASLVKGGESNTTRSRYKGKIASRVSSLPRKLFMNTTKHHNDHSRSFRAGSSSLRVTQATDIGDCSPELEAIAVAIPTPAADSKNLLLLLPGSGPVLEPPDNSSAAAAEDAKLRNGPSPIHPSRNILDSRSAQIKDIAISSKLKPASRASSHVTGTGSPTNATILNRADGIRQI

SEQ ID NO: 81126 - protein, 165 aa, Zea mays
  Coding DNA Sequence Number=SeqID_37751
  Homolog annotation: Hit_ID=Q2QSC6; Match level="QueryCoverage=33%, HitCoverage=60%, E-value=4e-12, Identity=66%"; Hit description =Negatively light-regulated protein, putative, expressed
  Pfam annotation: Domain name=Lg106; Domain location=79-148; Score =61.7; E_value=2.5e-15; Accession=PF07844.2; Description=Lg106-like protein
  Subcellular localization annotation: CTP_CleavageSite=27; ConfidenceScore=5.25e-01
MHTSSLSLSLSLSLSLSLSLLPGSRVNCSLVVEQQEPRRTAAAAARRDGRRQQQLIGVGGHGTGGAGCNVDHLRLAFVENKYGGMVPKKPLISKDQERAYFDSADWVLGKQAANSGTARAATAIEFLKPKLKGQAYKSSLAGRDDEERYQVFFSWLHWLGRQIQD

SEQ ID NO: 81127 - protein, 1006 aa, Zea mays
  Coding DNA Sequence Number=SeqID_37752
  Gene Ontology: Mol. function=nucleoside-triphosphatase activity; Cellular component=mitochondrial matrix; Biological process=ATP -dependent proteolysis
  Homolog annotation: Hit_ID=P93648; Match level="QueryCoverage=97%, HitCoverage=99%, E-value=0.0, Identity=91%"; Hit description=Lon protease homolog 2, mitochondrial precursor
  Pfam annotation: Domain name=AAA; Domain location=466-687; Score =160.9; E_value=3.4e-45; Accession=PF00004.20; Description=ATPase family associated with various cellular activities (AAA)
  Pfam annotation: Domain name=AAA_2; Domain location=464-604; Score= -42.0; E_value=0.017; Accession=PF07724.5; Description=ATPase family associated with various
  Pfam annotation: Domain name=AAA_3; Domain location=467-603; Score= -8.1; E_value=0.0026; Accession=PF07726.2; Description=ATPase family associated with various
  Pfam annotation: Domain name=AAA_5; Domain location=466-609; Score= -0.1; E_value=0.0029; Accession=PF07728.5; Description=ATPase family associated with various
  Pfam annotation: Domain name=LON; Domain location=104-314; Score =92.9; E_value=1e-24; Accession=PF02190.7; Description=ATP-dependent protease La (LON) domain
  Pfam annotation: Domain name=Lon_C; Domain location=792-999; Score =348.1; E_value=1.5e-101; Accession=PF05362.4; Description=Lon protease (S16) C-terminal proteolytic domain
  Pfam module annotation: Pfam domain module=AAA::AAA_2::AAA_3::AAA _5::LON::Lon_C; Domain location=466-687::464-604::467-603::466 -609::104-314::792-999
  Subcellular localization annotation: CTP_CleavageSite=3; ConfidenceScore=5.06e-01
MLRAAAAAAAIFPARFAAAPAVAAAEELRSPLLRVIGTLRDGRGSVLLGRRVRFCSNSSASDTEAAVAEAEAKAEDASAAEGEADSKASSAIVPTSTNIDDCLSVIALPLPHRPLFPGFYMPINVKDQKLLQALIENRKRSAPYAGAFLVKDEEGTDPNIVTGSDSAKSIDDLKGKDLLKRLHEVGTLAQITSIQGDHVVLLGHRRLRITEMVEEDPLTVKVDHLKEKPYNKDDDVMKATSFEVISTLREVLRTSSLWKDHVQTYTQHIGDFNYQRLADFGAAISGANKLLCQEVLEELDVYKRLKLTLELVKKEMEISKLQQSIAKAIEEKISGDQRRYLLNEQLKAIKKELGLETDDKTALSAKFRERIESKKDKCPPHVLQVIEEELTKLQLLEASSSEFSVTRNYLDWLTVLPWGNYSDENFDVHHAQKILDEDHYGLSDVKERILEFIAVGKLRGTSQGKIICLSGPPGVGKTSIGRSIARALNRQFYRFSVGGLADVAEIKGHRRTYVGAMPGKMVQCLKSVGTANPLVLIDEIDKLGKGHSGDPASALLELLDPEQNVNFLDHYLDVPIDLSKVLFVCTANVIEMIPNPLLDRMEIIAIAGYITDEKMHIARDYLEKNTRQACGIKPEQGFGGFLDLCEKVFFLIQCPGAVLPPQVEVTDTALLALIENYCREAGVRNLQKQIEKIYRKIALQLVRQGVSNEPDHESVSASVTEESGNGDNTTTKDEILKDPAVEDASVTNNVTNPASEEANEENLTSEAAKEDSTSKGNKGTDGAADKAIEKVVVDSSNLGDFVGKPVFQAERIYEHTPVGVVMGLAWTAMGGSTLYIETKKVEEREGKGALVLTGQLGDVMKESAQIAHTVGRAVLLEKEPDNHFFANSKVHLHVPAGSTPKDGPSAGCTMITSMLSLAMGKPVKKDLAMTGEVTLTGRILPIGGVKEKTIAARRSAIKTLIFPAANKRDFDELASNVKEGLEVHFVDTYSEIYDLAFQSDAGTETS

SEQ ID NO: 81128 - protein, 212 aa, Zea mays
  Coding DNA Sequence Number=SeqID_37753
  Gene Ontology: Mol. function=receptor activity; Cellular component =integral to membrane
  Homolog annotation: Hit_ID=A2XUS4; Match level="QueryCoverage=76%, HitCoverage=32%, E-value=2e-61, Identity=74%"; Hit description =Putative uncharacterized protein
MLFKGWKRLIQDMIRREGPFLETACVPFAGLAILLWPFVVVGVVLTSILSSVPLGAYAAVVAYQSWSLILFMSHESSLILGIAYVFSSMSIFNEYTNDVLDMAPGSCFPRFKYWKGKDESSHGHNVPLLRPASFNREKQEGKRPPSRVTSFKNNIDDFNPFKVTFRATYWCRFWSQLQPRREGQKLIKSSWRNVERCYYSSSATSDGGLRCV

SEQ ID NO: 81129 - protein, 243 aa, Zea mays
  Coding DNA Sequence Number=SeqID_37754
  Homolog annotation: Hit_ID=A3BNN6; Match level="QueryCoverage=61%, HitCoverage=14%, E-value=3e-38, Identity=60%"; Hit description =Putative uncharacterized protein
  Pfam annotation: Domain name=WI12; Domain location=143-243; Score =116.7; E_value=6.9e-32; Accession=PF07107.2; Description=Wound -induced protein WI12
MNLPAANLPVGMTFAPHAEDPSVERQSATTIELASCDAESPFASPAPLFALAAMANGAEAAGGETERIDLLAASKLEKGGATAEGDEIGIDPAAETPEQRNKFLVLRLYEALNARDHAAVQSLLAPDLEWWFHGPPKHQQHMMRLLTTTTTTTTTGSFRFVPRSVDALAASSGTVIAEGHERGCYWVHAWTVGPDGVITQLREYFNTDLTVTRLAAAVAAKCVWQSRRPDSATNSLPGLLLAL

SEQ ID NO: 81130 - protein, 179 aa, Zea mays
  Coding DNA Sequence Number=SeqID_37755
MEEDAGEEGTLQEICDEIPIAVFHPTKGFFSPGLKKAKDQTSTVNTAEVLMLNKEIEQKIISDSQLSEVLDNEGSVDDRAKVAPEKSHIEMMKQRVEGQTFCSNKEINATTNSQLSNQEEGKQDLKHMLDDFPTEGNEEDWHGNIVEEAELYHTEEDGEQEWEKALSKKGKKKIEGTFQ

SEQ ID NO: 81131 - protein, 122 aa, Zea mays
  Coding DNA Sequence Number=SeqID_37756
HEVESARRCSPLPPLEASPAPPLGVPTAEVPIGGDPDDEDGDDNNLSLSTDLSEEQEPEGWVARPITHDAAHMMVSRVQGYDRSIILSLSGTQLRQPCRMPHGRGHHVYDNPDYRTQINLEP

SEQ ID NO: 81132 - protein, 171 aa, Zea mays
  Coding DNA Sequence Number=SeqID_37757
MERVQYCIFVDANDVVMFVWPNTNDLLIKELLDFLGLVTPVAPWRTGLSGPIQKAFISGIQNPKSKLYILAVADIQISPVATQSPDLLVPFLEAFRYQKLGSGVILEDVVEGEGAEAREGDLVQFNYVCRCANGYFVHRCMVEFPDAIALLLGTCTKDVCCTAPDFESDRA

SEQ ID NO: 81133 - protein, 124 aa, Zea mays
  Coding DNA Sequence Number=SeqID_37758
  Subcellular localization annotation: CTP_CleavageSite=53; ConfidenceScore=5.58e-01
MPLCFTSARRPASAPHLSYLAPVPLLVVRSPPPTSTGRCSTQPPPRTLKLLPTAAYRALDGHQICLTHEGEDQICSMMATGDRLRAMYLYEILLLATRSARRASNSSVYRCGSLWLISLQRHTE

SEQ ID NO: 81134 - protein, 75 aa, Zea mays
  Coding DNA Sequence Number=SeqID_37759
  Gene Ontology: Biological process=Mo-molybdopterin cofactor biosynthetic process
  Homolog annotation: Hit_ID=Q2Q066; Match level="QueryCoverage=93%, HitCoverage=66%, E-value=3e-30, Identity=95%"; Hit description=VP15
  Pfam annotation: Domain name=ThiS; Domain location=3-75; Score=52.5; E_value=1.5e-12; Accession=PF02597.11; Description=ThiS family
MSTNPKDLTGVADSAVEVPPGSTAGECLARVLAQFPNLEEIRGSVVLALNEEYAADSTAVADGDELAVIPPISGG

SEQ ID NO: 81135 - protein, 211 aa, Zea mays
  Coding DNA Sequence Number=SeqID_37760
  Subcellular localization annotation: CTP_CleavageSite=57; ConfidenceScore=5.40e-01
MGSSFFSAGKSPKGCITISTGMVATESCQSLHGCRFSGVVRPESNCLGVKRTPTRLKGMSLQSQPDSATRYPMLLIQLHRLQRGRRVTGGVKHFPQDGRKAIVRKKVRAETSVSSLAGVGEFIRERVSKYKRSSSLISCEKQTIRIEFLSLQGGRPNSGENDLGFLVKFCRVRELGKLHKLLAKLTERLARLGSDRSGLATVDEAQVAMAG

SEQ ID NO: 81136 - protein, 158 aa, Zea mays
  Coding DNA Sequence Number=SeqID_37761
PAAEERAEGLTGGDTAPARELVGGEESGLTRAQLINQMGQRASPGIKEGGRPKSDEDDLGFPVKFCRVRELGKRHKLLTKVTEWLARLGNDRSGLATVAEARVAMAGGRELAGAKEGRLAGEGRARANASARSGAWHGVVHEAAQREVEFKRGLAPNL

SEQ ID NO: 81137 - protein, 322 aa, Zea mays
  Coding DNA Sequence Number=SeqID_37762
MSFASLITCEGAVNALSHEGCRHFEAFDQSDEGFEHEIFQVEDPVMKRSAGALFDRMWGPHGRETARERYDWAMDQMAHDEEVEDLGDLDSTLPEASGVELAPPSDVGEGPSATLAPTGAGEDPTPATALTGADALKVVAEPAAEDPGPSQVLTFGPAQATAADNTDFMATSTVVPADDYLFGSVTECFESNDESGSSFSWTEESSDEGLDYFVALDVAAAETSPRVEGFGDLPSASTGYRRRRVVAKHSVGEFSRSGRRRRMGMEHGRLRVDRIGKQELLSSLIGASIGEGDLRNLFEGEELRIMLFNYREMGIIPKVEPM

SEQ ID NO: 81138 - protein, 245 aa, Zea mays
  Coding DNA Sequence Number=SeqID_37763
MVRSPELRQARARVAPGSPELGREEEDATTNAMAGKRPRIHGQRGDNGGEKVSDGQEKLRDECLTSGRSSGRLGAVSGELDGREHDSGSPAVAGDVCRARERVKLRKMRREMVHTLQTTRVNTTRVPPPQQDPSYPVVTEEVPVELHYLTVRNGVILEDSSEEILATPTPYPAPHAFPAEASSSALPMLVTQASTFGGDDPDDSGDDGGDDDDEEDNNDNNGDANNEHDQDDDFVGMWLLWSTTL

SEQ ID NO: 81139 - protein, 339 aa, Zea mays
  Coding DNA Sequence Number=SeqID_37764
  Homolog annotation: Hit_ID=A2YGC2; Match level="QueryCoverage=50%, HitCoverage=73%, E-value=6e-11, Identity=28%"; Hit description =Putative uncharacterized protein
MARIRCTARKSVIPFLPSRLVERPLRRTVSGHSSQLERLHRLLHEKQERRRQEQEQQDSSPLPQQEVEYERPPSPAPQPEMPPAPLQGIPTAGGDPDGDGDDDDASGSSSHDTELSEEPEPEGWIARPITRDAARGCHFHGALDTQLRRAFDRNTWSIEYRCVVYQHHRGLYPDQWEATCLVRRPDDDLRGAEAFSEYYSITERDTAEAAMQDAARKALSQYCSLFSGVADGLDVKYYPRRSTGRAGGVIVSPVGEGNPRLSNMVNLVAVLNTELDHALDELGKVRAEVAKLCAECVARHYLDGGSPALVRIQHPYCSPPRGRFDYGTPDCRTRIDLDP

SEQ ID NO: 81140 - protein, 57 aa, Zea mays; identical to SEQ ID NO: 44635
  Coding DNA Sequence Number=SeqID_37765

SEQ ID NO: 81141 - protein, 120 aa, Zea mays
  Coding DNA Sequence Number=SeqID_37766
  Subcellular localization annotation: CTP_CleavageSite=37; ConfidenceScore=5.04e-01
MVRSTSSSSCSHPRKREAHLLTGHFEGRGPRTQLPVRVHKRSMRLLDLRTRRGLRLVQAVAQAASPRLQLLGALAGKTGLRPRKLGLDLRGLRLSASFVCVPPLLRLPMPEVLLLSLRSR

SEQ ID NO: 81142 - protein, 351 aa, Zea mays
  Coding DNA Sequence Number=SeqID_37767
MCSHCYVAFPQFEVAEDDEDEGALRCAARMSSGRDLVEFIGYGVWPLAHGWVLGEVCPRQMPTLGQQLVRSPAFSLDLHGRDPATFVREVEDGAVRIVGRYAPRTESLRSWDIRGSNVRLNLVFELNCLPYGGYPGDDAAAAADRRGKKLVVVAKEGPSREAAPAAKKRKIAVMDKDRQDAAQKRRAFTRVGDPMREVKRARGGAKSIAPGGSKPPPAAKPAVPGPSKSSAGSRAAASGAGKPPSTEPAKERRPPSPVRTDKAAAGGANFDTDICVDDYLVGLDAEQLAIVPSPVVAPSPVAAVGAKGTSQDPWSKFCASGKISLAAAARDVAGIVSQQLKHAAAFADHVA

SEQ ID NO: 81143 - protein, 62 aa, Zea mays
  Coding DNA Sequence Number=SeqID_37768
MSTQYAQYNLGLHEFLDQMLRIQKLATYEQYHPELYEDKFHDKFKRHMGMVGTEEAEDNADE

SEQ ID NO: 81144 - protein, 120 aa, Zea mays
  Coding DNA Sequence Number=SeqID_37769
  Subcellular localization annotation: CTP_CleavageSite=48; ConfidenceScore=5.46e-01
MAHRSFSGTPEAFSPSFSPLCPWIRGLFPAFEFIVAPSSSLPNSSDPRATLARACLNSGDFTAAERRGAAHSRLFPKSDLLRPIQIERLGPRVPLRARLFARSDLLLPIQIKRLGPRVPL

SEQ ID NO: 81145 - protein, 50 aa, Zea mays
  Coding DNA Sequence Number=SeqID_37770
  Homolog annotation: Hit_ID=A3BDX3; Match level="QueryCoverage=76%, HitCoverage=38%, E-value=2e-12, Identity=84%"; Hit description =Putative uncharacterized protein
MTIFDNHLDKLLEVTGCRKLRDTEFFTRQDPYVVVEYATTKLRTRTCTGS

SEQ ID NO: 81146 - protein, 150 aa, Zea mays
  Coding DNA Sequence Number=SeqID_37771
MTKVVHIVTTAQEKVKPWKETSKSSKTTTNSRWLVLDTLHEVESVRRRSSFAQLEAPPTPLRDAPAVGGATGGGPGGDPNDDDSDHSTESSEPQEAEGWVARPITRDAARGCHFHDALDTLLRQAFDRHTWSIEYRCVVYQHSRGRYPDR

SEQ ID NO: 81147 - protein, 48 aa, Zea mays
  Coding DNA Sequence Number=SeqID_37772
MAHGQSDTTPAIRLGEDCAKLLVLVNSTDDLEIVIVKALKLDDVEEGC

SEQ ID NO: 81148 - protein, 219 aa, Zea mays
  Coding DNA Sequence Number=SeqID_37773
MGPGVADPDGPRSRADGPDMCRSAGLLPICVCSGSCYSAGKASHVGVMILLVETSELSFEPAIEGRFDRSICVVPSGVAKKYVDAFLERQILKKNRRRCSLVRGGRGGGLDHLQTNFRTYPMILANNRSTKLGTLICSAHARTVRPTGADRPDCGPSGLRAGPSAHSNWCSTVIESDRKRYVNDFGNKIPLNRSVRQSLNCYQLKELYTAEFSVHRKIQ

SEQ ID NO: 81149 - protein, 119 aa, Zea mays
  Coding DNA Sequence Number=SeqID_37774
MPVTMHVASFGSTKAARAGGRRGWEAKGWAFFAVPFVRCAWIGCSPRWMAQAQRIGHTSAMQVKVEQHAGCWICTRARGGRRWNFWIQEDDREGGEKRRRCGLLDKSRNAVVKEEEEEE

SEQ ID NO: 81150 - protein, 62 aa, Zea mays
  Coding DNA Sequence Number=SeqID_37775
MRVKWDALSQLIRGTRGVVASPSCRQWGPGTVLALPRLSAELRSDPLPDHLGSGQWGLALPG

SEQ ID NO: 81151 - protein, 291 aa, Zea mays
  Coding DNA Sequence Number=SeqID_37776
  Subcellular localization annotation: CTP_CleavageSite=87; ConfidenceScore=5.31e-01
MQAACNRAKWVHLSDIQRAQHGGPGPRVMQPAHRMLRASNCTATRATATPPRLRNQYRDSRQPYARPSSANLARRRSKRCFTFTIMTASKEAPSLPTDQRFEGWPLEGFNNRLRARGLHTHYWLEVRRPTPWKGSTTASGYSGSAPTTDQGFEGWPSKGDRVRQITRRYFWARLWAPSRPLANGARTSTRITHQQLTEDTMFGALRGQHGAFPLLLAERRRRGVCKKVESVLDRPLALCRGSGAALANPALAKQLTASTYQPENLGPDRAPGLRPARMRERPDQPKHCARH

SEQ ID NO: 81152 - protein, 965 aa, Zea mays
  Coding DNA Sequence Number=SeqID_37777
  Gene Ontology: Mol. function=hydrolase activity, acting on acid anhydrides, catalyzing transmembrane movement of substances; Cellular component=integral to membrane; Biological process=metal ion transport
  Homolog annotation: Hit_ID=A9NIX0; Match level="QueryCoverage=63%, HitCoverage=63%, E-value=0.0, Identity=57%"; Hit description =Putative ATPase-like zinc transporter
  Pfam annotation: Domain name=E1-E2_ATPase; Domain location=213-438; Score=239.6; E_value=7.1e-69; Accession=PF00122.11; Description=E1 -E2 ATPase
  Pfam annotation: Domain name=Hydrolase; Domain location=442-631; Score=94.8; E_value=2.6e-25; Accession=PF00702.17; Description =haloacid dehalogenase-like hydrolase
  Pfam module annotation: Pfam domain module=E1-E2_ATPase::Hydrolase; Domain location=213-438::442-631
MEEQPVAKILAGSAGARRLAFPLALGPCPWPSEMPGPAVEAAARGGGCCGKTAGKWEKTYLDVLGICCTAEVALVERLLAPINGVRAVTVVVPSRTVIVDHDTAAVSQFHIVKVLNKAGLEASVRAYGSSAGAPGRWPSPFIVACGVLLAASLFAPLLPPLRWLAVAAACVGSQPMLLRAFAAAGKLTLDINILMLIAVAGAVALGSYTEAGAIVFLFTVAEWLETLACTKASAGMLSLMSSVPKTVVLAETGQVVGMGDVAVGTVVAVRAGDVVPVDGVVVGGQSEVDESSLTGESFPVPKQAQSEVWAGTINLDGYISVRTTALAENSTVAKMERLVEEAQNSRSRTQRLIDSCAKHYTPGWYDDRAVVVLAAGVVLVPVLLGAPDLEHWFRLSLVLLVSACPCALVLSTPVATFCALLRAARMGLLVKGGNVLESLGEVRVAAFDKTGTITRGEFSIKDFLVVRDKVQMSQLLYWVSSIESKSSHPMAAALVEYAQSKSIQPKPEDVTETCIYHGEGIYGAINGKHIYIGNERIMARTGAAEAILQLRSMGIKSVMLTGDSEAAAKHAQEQLGGVLEELHSGLLPEDKVRLIRGLQARHGATLMVGDGMNDAPALAAADVGVSMGLSGSAAAIETSHATLMSGDVLRVPKAVRLGRRTRRTIAVNVASSVGAKAAVLALAVAWRPVLWVAVLADVGTCLLVVLHSMLLLRDAARARRRCGGASKACCATACKAPKTACCATASKACGATTVKPVATRPQPAGAGKKADRPGGDKHGNGKDDCHRCCHKQSKLPEDAVVIAIPVRAVEHRKDAAAHEKAEGNAAGGCCGGAPASAACCAEAHGGEDEVCIVISARSPCCSTARSRSASPKDAMCCGSGGKDGGAISALEHAGLRPTLAGLEHTNKSTTWNWSTPNTSWLDSLPKNTATWGFTASARAGGVGAREAMGFGASSGKWGRSRHADE

SEQ ID NO: 81153 - protein, 125 aa, Zea mays
  Coding DNA Sequence Number=SeqID_37778
MNKRSALKVPLQTELRFHLRRYEQPHSIGGPAERQKTDERHAVARSSSGDDDNFCSGGLNSSSDDLRADAAARRPPPVPKLVRQGRAEGRRVGALVMKILEAEGGAEAAARFAFRRRRTGGHRLG

SEQ ID NO: 81154 - protein, 70 aa, Zea mays
  Coding DNA Sequence Number=SeqID_37779
MGRREAEREGGRKVAGDGRESGGNPTAFVFVPRPGRVGRCGGSSEVEVESVFRGRGRVRAPGSGEAKTVG

SEQ ID NO: 81155 - protein, 258 aa, Zea mays
  Coding DNA Sequence Number=SeqID_37780
  Homolog annotation: Hit_ID=Q10L75; Match level="QueryCoverage=62%, HitCoverage=9%, E-value=7e-08, Identity=29%"; Hit description =Retrotransposon protein, putative, unclassified
  Subcellular localization annotation: CTP_CleavageSite=38; ConfidenceScore=5.04e-01
MSSFRRNGSSKSPLPGLGPSARLGKLKKLATRFKIGVSKRHRSDQDVDYDPINSEAQSSVDRSFSTDTKDTLLLHLDMEIDITRWTFPKQRFSAIEYASRRTVNQYFVHQCTNIQFFHTQLQFEGLIPKFQTCGLYEFMGQNTHYNEMVVRQFLATFDIDIEEGAIIWMICHIRHSATFAEFGASNSLDYNLISTGIDLCTEDIFEHYEQYCEPVRLGIPRTIGETTGLKHHPAVINKIARVTILPKRGDKSRTIDKF

SEQ ID NO: 81156 - protein, 67 aa, Zea mays
  Coding DNA Sequence Number=SeqID_37781
MARPWRPAMIHGVLARPPRRGNEIDGSWFLTLVMPNRTLAEYVDVYSPLLYTPTPLPQVVRIATTAQ

SEQ ID NO: 81157 - protein, 89 aa, Zea mays
  Coding DNA Sequence Number=SeqID_37782
  Subcellular localization annotation: CTP_CleavageSite=31; ConfidenceScore=5.19e-01
MARPWRPAVIRGVLAHPCSPAPRTIRLKNPKSSQEKTLSSSRLVEASGNEIDGSWFLTLVMVCPHCNHCSGEDEAVEGDFQEFQDYDEF

SEQ ID NO: 81158 - protein, 103 aa, Zea mays
  Coding DNA Sequence Number=SeqID_37783
  Subcellular localization annotation: CTP_CleavageSite=27; ConfidenceScore=5.33e-01
MTSLGDAASLGGSELQPWRGSKTRRPRAKSPTHRRGPRCPLVRPMLRPADHLGPFVMRDEEIEDLVVLESLMATQDAGAEADTKEQSSHARVDGTDLGVTGIS

SEQ ID NO: 81159 - protein, 156 aa, Zea mays
  Coding DNA Sequence Number=SeqID_37784
MPSSTRNIPKDGMISVLRSRHSNQETSKYPRITTCRWPTDWLSWLLDYHGGHPDTPRLTSLPQGRTNTSRLSDSVAVNASVDESIKLTPPRRMVKRVLQSPSIKGSSREFEDSNKEEVTMESLKAELIMLRAKFNTVLERCVEGELWCMDLEDRDP

SEQ ID NO: 81160 - protein, 276 aa, Zea mays
  Coding DNA Sequence Number=SeqID_37785
  Gene Ontology: Mol. function=metal ion binding; Cellular component =integral to membrane; Biological process=transcription
  Homolog annotation: Hit_ID=A3BI13; Match level="QueryCoverage=100%, HitCoverage=99%, E-value=2e-90, Identity=61%"; Hit description =Putative uncharacterized protein
  Pfam annotation: Domain name=C1_3; Domain location=221-251; Score =6.2; E_value=0.098; Accession=PF07649.3; Description=C1-like domain
  Pfam annotation: Domain name=PHD; Domain location=222-272; Score =44.3; E_value=4.4e-10; Accession=PF00628.20; Description=PHD-finger
  Pfam module annotation: Pfam domain module=C1_3::PHD; Domain location= 221-251::222-272
MAGPVSSAPRTVEDIYKDYAARRAGLVRALTSDVDGFYSMCDPGNTGSDLSRSALVALLRSCLCLGFGSLTGFLGVRAEKENLCLYGLPNGGWEVSLPVEEVPPEMPEPALGINFARDGMRRRDWLSLVAVHSDAWLVSVAFFFAAKLNGNDRKRLFNMINDHPSVYEIMADRKGRENNPGVDNSSKSRHSTKRSNDGKIKNSRVAVGECRYENDEDHSETLCGSCSGLYNSSEFWIGCDICERWFHGKCVRITPAKAEQIKHYKCPDCSYKKSRQ

SEQ ID NO: 81161 - protein, 355 aa, Zea mays
  Coding DNA Sequence Number=SeqID_37786
  Homolog annotation: Hit_ID=A2YMU4; Match level="QueryCoverage=12%, HitCoverage=6%, E-value=1e-08, Identity=74%"; Hit description =Putative uncharacterized protein
  Subcellular localization annotation: CTP_CleavageSite=57; ConfidenceScore=5.48e-01
MALGKSWLVVKGPRNLPPFHPWPQSAAPNPPPHPCARNARTPRFLRPQPPQSAAFPSAAAIVSIRRRSAATDNFSHAIPCPAPASAHPLALAPVFEEVVTLPPSSTPPALPHPPNPWSLLDSPDYRGAARRIYGAASVLIGIRRGGSCLPGIGAACLRSEMDRIRDDRRGGVSAGGVPRPPRRRLRSNGGGGPRDSPRSERRRGERLMLFGGGGCASRDHSDDISDESLGGDDAEQELAQRYHQQRRSPSTAPPPPSPPLLHHASTPRLRNVHPVGVNRIISVGVPRVLPDERIHRFVGTDKFVFLAREALDIFKHRGCCRSTDRQPMLCVALFRSGSGSQGGSNNRDREEQIDL

SEQ ID NO: 81162 - protein, 262 aa, Zea mays
  Coding DNA Sequence Number=SeqID_37787
MAKCCEKQTDDYWCPVQHHRSSAPPRPPLVGGYWIQRRCRRFQLNMLIATMKPFCCLLSATVFGVFACLYGLKADRGLQDWFTSCGKGIASLVLEKSKTESIWWLHWCPNTEGVLADVPPSNKMCSSYYYYLQFALIWLYCSRNVYTPKVNEKSMSTPLVSCFLSWSPKEASSTILIVHVAIHGIERAFCAGGDLAALVRSSEVEQQGRGRTLVSGRRAAGSGPAASGRFMPLVSFVWAFHAPGFCTCLVTLTKKGVSLRLL

SEQ ID NO: 81163 - protein, 173 aa, Zea mays
  Coding DNA Sequence Number=SeqID_37788
  Gene Ontology: Mol. function=oxidoreductase activity; Cellular component=integral to membrane; Biological process=electron transport
  Homolog annotation: Hit_ID=O48956; Match level="QueryCoverage=96%, HitCoverage=49%, E-value=8e-48, Identity=67%"; Hit description =Cytochrome P450 98A1
MKINIDENDKSLKESGAKQHFVDEFFTLKEQYDLSEDTVIGLRSMGSVSTCSLCLSEWAVARDPKVWSNPLQYRPERFLEENIDIKGSDFKVPSFGVGRHVCPGAQLGINLVAFMTGHLLHYFEWSLPEGTRPEDINMMEFPRLVTFMGTLLQAVANLCLEKELYNRAHRCKI

SEQ ID NO: 81164 - protein, 178 aa, Zea mays
  Coding DNA Sequence Number=SeqID_37789
MDKRGKRPSEKTVHVSVKLPERGIGLCFTGEAGPRSPDFNRPPATVDRGTPCASLRFLARLDSLDLHEAPYALGLNYAAVDRPEHTPPTSSPACSRGPGDSGHPRRRAVPRRDRQTLPEPTLPFAGTSLAADCNLADGEYILVPEQGAAQEVAPDPAPEPAPEDLPATALEGKPRFYA

SEQ ID NO: 81165 - protein, 133 aa, Zea mays
  Coding DNA Sequence Number=SeqID_37790
  Subcellular localization annotation: CTP_CleavageSite=57; ConfidenceScore=5.29e-01
MEPDTPCSTSPVITASAQAPLLLVRLQPPAGHHLSSLPVRGRRRRRVSKRARAQPWRGSSGRGRPWHGGPDAARQAQQELQRRDRLRGQPASRCVHKPRPRSAPVASTSQCGSALCARAGVLLLPWRAPPACP

SEQ ID NO: 81166 - protein, 227 aa, Zea mays
  Coding DNA Sequence Number=SeqID_37791
  Gene Ontology: Mol. function=G-protein coupled photoreceptor activity; Cellular component=membrane; Biological process=regulation of transcription, DNA-dependent
  Homolog annotation: Hit_ID=P93527; Match level="QueryCoverage=74%, HitCoverage=14%, E-value=7e-85, Identity=94%"; Hit description =Phytochrome B
  Pfam annotation: Domain name=HATPase_c; Domain location=104-216; Score=50.3; E_value=6.9e-12; Accession=PF02518.17; Description =Histidine kinase-, DNA gyrase B-, and HSP90-like ATPase
MGRSPTWRWWPRRVLELTCGCGAGRPPPGGKVGPPGGSDGRRRLWGWEGDAGGCGSSLVLEQSEFSLGDVMNAVVSQAMLLLRERDLQLIRDIPDEIKDASAYGDQCRIQQVLADFLLSMVRSAPSENGWVEIQVRPNVKQNSDGTNTELFIFRFACPGEGLPADVVQDMFSNSQWSTQEGVGLSTCRKILKLMGGEVQYIRESERSFFLIVLEQPQPRPAAGREIV

SEQ ID NO: 81167 - protein, 137 aa, Zea mays
  Coding DNA Sequence Number=SeqID_37792
MGATLGGEAAHRGAREPRPRGWGPGEAAPHEGSRGRAASRQGAGGGAAPREGAATAPGEPGGGAATARGGRGRGAAVQGVGEGAAPRARGAARRGHAYERGGSGRRGEEGEGKREREGEGEGSSPRGPNPAITVSKT

SEQ ID NO: 81168 - protein, 156 aa, Zea mays
  Coding DNA Sequence Number=SeqID_37793
  Subcellular localization annotation: CTP_CleavageSite=85; ConfidenceScore=5.06e-01
MTASEKAGPSKGFNSRLRSRGPYTHYWSEVRRPAPRKGSTTASGYSGSAPTTDQGGNDLVTESHQREASSPRTPSPGDRVRKITRSSPETPCSAPIEGNMALSPSSLQKGDAGTAQTRAKSQKMVNSAPPDPGLGLGLSPGRRRTPLRPTQGSDSG

SEQ ID NO: 81169 - protein, 68 aa, Zea mays
  Coding DNA Sequence Number=SeqID_37794
MATGSGHDLAAEVQLPTSIVVGPGDEDVALTRSSRGPMADVGRVEDGRSRGLSPKGSDGVPTSWRADK

SEQ ID NO: 81170 - protein, 104 aa, Zea mays
  Coding DNA Sequence Number=SeqID_37795
MESHDLRAERESQFVGDNENDGFGIDSGDGKWYSFRLERVVSIATTAQEKIKLWKETSRSSKITTSSRRGLAATPSRLPVKAACIYISFPHFDYCKDYVDVSDI

SEQ ID NO: 81171 - protein, 639 aa, Zea mays
  Coding DNA Sequence Number=SeqID_37796
  Gene Ontology: Mol. function=oxidoreductase activity; Cellular component=mitochondrial envelope; Biological process=aromatic compound metabolic process
  Homolog annotation: Hit_ID=A3A0L9; Match level="QueryCoverage=96%, HitCoverage=88%, E-value=0.0, Identity=63%"; Hit description =Putative uncharacterized protein
  Pfam annotation: Domain name=FAD_binding_3; Domain location=18-351; Score=113.8; E_value=5e-31; Accession=PF01494.10; Description=FAD binding domain
MSMRCFALRFDMDDQDWIKCAVIEKNVEFTRHPRAHFINNRTMEIFRKLDGLARDIERSQPPVDLWRKFVYCTSLSGSVLGSVDHMKQEGQFSSYHVECFMSCTSLYFDKVISPVSVAHFSQYKLVDLLLKKLEGIGFQTCFPSEIGNSTQDLVLESKILMGHKCTSLDQTDEGILVGASVNNGGMIIERKLHCGLLIGTDGARSTVRELAGAIGVLVAHDLENGEFVLQVPFYPPQQMFEDFSAKVCEQIIFKLVGWEPADVHVLDIKPWAMHAEVAEKYICCNNRVILSGDAAHRFPPAGGFGMNTGVQDVHNLAWKLGLLLNGVASPSILQTYESERRPVAIFNTELSVENFKAAMSIPTTLGLDPTVANSVHQVINRSLGSIIPRNVQKAVLEGLFSLGRAQVSDYILNEKNPIGSLRLARLRSILDEGKSLQLQFPAEDLGFHYAEGALVVEASCEKTHEGEKLQHSKRASREYIPSAKVGSRLPHMLVREVPASSEGAFSTLDLVSGDKLEFVLIIAPVKESYEIARATLKIADELTLSARVCVMWPRGSTDAEVEESRSELTPWTNYIDVEEVPRVSGGSWWEMCRISRKSVLLVRPDEHIAWLTELDRVRDAESEIRRVFSHVLCLNSHRV

SEQ ID NO: 81172 - protein, 346 aa, Zea mays
  Coding DNA Sequence Number=SeqID_37797
  Homolog annotation: Hit_ID=A3A0L9; Match level="QueryCoverage=19%, HitCoverage=10%, E-value=2e-13, Identity=61%"; Hit description =Putative uncharacterized protein
MKVRPPSRIGAERRMSGVGGRTMHYTGVDTYALFLRNSRDMRIEGDDAASDGGPGRVGATLGMPGDNFRREAATRGWLVEIIFIVICRLRCCAAGCPLTSRARFPSPPSLRIAAHHQHHSPDAAAAAAAAAPHPSPFPRAAAASVRASSSPPAPLPPGSSAEAACSAAAALFLLYCASVMCQLLSPEGDPLGSALMRKTEEAKRSKATSSSPAAQSGPGPRLQAREGSSVAAYSTTDAEGHTPPIESITSMPSITRGGRGGLFSTHRGALLWLRRCQSPLLSTLAGGGGRSDAPHLPVLIVGAGPVGLVLSFLLTKFGTDLVPPLLIDVPIRASELGSSVERSKVH

SEQ ID NO: 81173 - protein, 36 aa, Zea mays
  Coding DNA Sequence Number=SeqID_37798
MAALTRETRPSASLVSPLLCPHAVADRWGLLAPRGT

SEQ ID NO: 81174 - protein, 79 aa, Zea mays
  Coding DNA Sequence Number=SeqID_37799
MISGLQRLAQNIILSLSGTLPRVANSLDLKYYPRLLTGSTRGVIVSQVGEGNPRLSNMVNLVTMLNTKLDHALDELGKA

SEQ ID NO: 81175 - protein, 585 aa, Zea mays
  Coding DNA Sequence Number=SeqID_37800
  Gene Ontology: Mol. function=heat shock protein binding; Cellular component=intracellular; Biological process=response to stress
  Homolog annotation: Hit_ID=Q2QQ93; Match level="QueryCoverage=95%, HitCoverage=93%, E-value=1e-147, Identity=54%"; Hit description=DnaJ domain containing protein, expressed
  Pfam annotation: Domain name=DnaJ; Domain location=12-77; Score=96.3; E_value=9.5e-26; Accession=PF00226.22; Description=DnaJ domain
  Pfam annotation: Domain name=TIMELESS_C; Domain location=31-574; Score=-204.1; E_value=0.086; Accession=PF05029.4; Description =Timeless protein C terminal region
  Pfam module annotation: Pfam domain module=DnaJ::TIMELESS_C; Domain location=12-77::31-574
MASAAAGTPKRCYYEVLGLSRDCSPTDIKLAFRRLALSLHPDKQPPGSDLAAATAAFQELQHAHSVLSDPQERAYYDSHRSQILFSDPASAGAKSASIVPDLFAFFSSSAFSGFSDTGRGFYKVYGDVFDKVFAQELAYARRMGVPDPAAPPVIGNLDSPYAQVTAFYSYWLGFGSVMDFGWAAEWDAARGESRRVRRLMEEDNKKAMRKARREYNDAVRGLAAFCKKRDKRVVDMVLKKKLEEEKRKAEEKERKKEEDKRKKERAMACQEPEWARAEEVEEGLYDEDEEEEMRAKKEELYCVACNKKFKSDKQWKNHEQSKKHRDKVSELRMAFREEESLKEAEEGEGDWNEVDVGFDFKPTQESDDESAFSDAAEELAEEFEEGLEVHDKENGDKDFDSAEQEVGSYDEASVLEAMLSSCKNRKGGYVAPPEEALSGTAEDDDHHRSSEVNNAKRKGRRRRAAKKEQDESNYAGNEHHGKCEVQPEGSVHGNDVDDIMEGPSSSNVNNGSVSKGDKQNGENTNPKKNKKGTKKKPTVSTDQKSMSKADQKSTSKGKKQKPRMVYNKLVVWEEKPSVLLAPVAF

SEQ ID NO: 81176 - protein, 169 aa, Zea mays
  Coding DNA Sequence Number=SeqID_37801
MDTSMLGRVAALLIRDLSRSQVIFLALARGSLEDMVAGVTWSTTLPPDNFPRYPSTVLRLFTHSRSLTKGLSRHLVGRTAGSRLQYTSQLRGAAVRVAPSASRSLENDLGALIATRSPGVLCDSESSVYAGDSTMEDTDDTCDQLMWTSAPEDVDCGTQKLTCRAVEVY

SEQ ID NO: 81177 - protein, 63 aa, Zea mays
  Coding DNA Sequence Number=SeqID_37802
MTKVRTILNYKKYLQLDRRYLRTRIREGEAQKIRRLTQRRSCEAGKLRHVRRKGNRLEDEKAI

SEQ ID NO: 81178 - protein, 301 aa, Zea mays
  Coding DNA Sequence Number=SeqID_37803
KKEIGSQMEVHCQTSFCQNEDGFPKLLRACTVRLGIRSQPEYDGREFVEHGTEKETVPLGWPGCVHWKSSSCLRTTPQSCTSLHTCSPLMHSMISWLGTTDAEKRNHQLHVDLTTAQARATALESREVIAVEALKQAKDEHVQKLMEAKLVTHNQRRALWIQEPTSSNPVQPRKAEDPQILEGHLVSIRGEKKAWELPKGAIVLEGIPVFPQAMDKQEHPESSQDPPLEMFEPLAMKKILAPSLEVKEEAASTPPTPPHSEELQEPVPLEEEFDPVLPSQSLPEEVINISSLLTHPGDISD

SEQ ID NO: 81179 - protein, 319 aa, Zea mays
  Coding DNA Sequence Number=SeqID_37804
MAENATVISNGYINGYIAFNASSDLEERTKAASHQFAFEQSELERDCKDYKKDLQKVFARELEVARKEKKLAKREEHLDQREEVIMELQGKLNALNKILEEQRADQTATVESLQRLQRKLDGKAQDAALAEEKLKAKGESLDRREADLAGRAANLTRREKDHAFKKEMLERREKLLAKHELEAEEKEWTLEERQRAGVQRIAAWADEASTTLVPLRVSPILVSELPTSISDALPVLDSAADRLRRLDQILGARLEAEGDRLCRAVIEYILTCFRSHDLAISLEPGISGPVADTEDAAREGIQDTVEVVAERFQRDPVDD

SEQ ID NO: 81180 - protein, 288 aa, Zea mays
  Coding DNA Sequence Number=SeqID_37805
  Gene Ontology: Mol. function=DNA (cytosine-5-)-methyltransferase activity; Cellular component=nucleus; Biological process=DNA methylation
  Homolog annotation: Hit_ID=O65343; Match level="QueryCoverage=60%, HitCoverage=11%, E-value=1e-98, Identity=99%"; Hit description =Cytosine-specific methyltransferase
MVMSVVAESYVISKSCELVTVFLYTFHMNHWDWYCNYDNRGIYLIDMLTNDFSGTRRCRAKPQKKEEESTENNKLENGSLDATEEVHHGVEKGDGHVTRKRPRRSAACSDFKEKSIRLSEKKSVVMVKKNRMEEEEVDAVNLTKLGPEDPPPCRKLIDFILHDAEGNPQPFEMSEIDDFFITALIMPMDDDLEKERERGVRCEGFGRIEDWNISGYDEGTPVIWVSTDVADYECVKPSTNYKSYFDHFYEKAQVCVEVFKKLAKSVGGNPNPGPGMNCLLVLFGQPMP

SEQ ID NO: 81181 - protein, 1747 aa, Zea mays
  Coding DNA Sequence Number=SeqID_37806
  Gene Ontology: Mol. function=DNA (cytosine-5-)-methyltransferase activity; Cellular component=nucleus; Biological process=DNA methylation
  Homolog annotation: Hit_ID=O65343; Match level="QueryCoverage=79%, HitCoverage=97%, E-value=0.0, Identity=91%"; Hit description =Cytosine-specific methyltransferase
  Pfam annotation: Domain name=BAH; Domain location=1058-1190; Score =182.7; E_value=9.5e-52; Accession=PF01426.9; Description=BAH domain
  Pfam annotation: Domain name=BAH; Domain location=1227-1363; Score =95.6; E_value=1.6e-25; Accession=PF01426.9; Description=BAH domain
  Pfam annotation: Domain name=DNA_methylase; Domain location=1339 -1732; Score=140.5; E_value=4.6e-39; Accession=PF00145.8; Description= C-5 cytosine-specific DNA methylase
  Pfam module annotation: Pfam domain module=BAH::BAH::DNA_methylase; Domain location=1058-1190::1227-1363::1339-1732
  Subcellular localization annotation: CTP_CleavageSite=52; ConfidenceScore=5.29e-01
MKNYRHSSPFGSKGVERAKSACRSKWNNRILSTPFPMLPIVNFTNLSIWKPRALHPRTTNTLYKSPELTPETTVLSSRVWGFGLGLSAVAAAARRGARGEAGLGGGFWRETSAGAPKTQKIPGSHGRAGRHPSRAPCRSCFPVLFFDNLCSTPTRPLPQAFKHGAHALGPRPLFAGRSSRQHPDPRPRRHRATGVRRPATAPAHPRASEREPASPWFPARARPEIQAADEPCPSPAISDQLVPVIPAATSWCREAALQAYRSIVGRVCCPYPYNHAAAWCCCLEPTMQHNRAGAGAAAGDMVKTPRSPVTTGIYLIDMLTNDFSGTRRCRAKPQKKEEESTENNKLENGPLDATEEVHHGVEKGDGHVTRKRPRRAAACSDFKEKSIRLSEKKSVVMVKKNRMEEEEVDAVNLTKLGPEDPPPCRKLIDFILHDAEGNPQPFEMSEIDDFFITALIMPMDDDLEKEREKGVRCEGFGRIEDWNISGYDEGTPVIWVSTDVADYECVKPSTNYKSYFDHFYEKAQVCVEVFKKLAKSVGGNPNQGLDELLASVVRSTNAMKGYSGTMSKDLVISIGEFVYNQLVGLDETSNNDDEKFATLPVLLSLRDQCRSRVELTKLPSNFSNTSLKIKDSECDETAEDDDDAKLARLLQQEEEWKMMKKQRGRRGTPSQKNVYIKISEAEIANDYPLPAYYKPFSQEMDEYIFDSDDSIFSDDVPVRILNNWTLYNADSRLISLELIPMKSGAENDVVIFGSGFMRDDDGSCCSTAESVKSSSSSSKADQLDAGIPIYLSPIKEWIIEFGGSMICITIRTDVAWYKLRQPTKQYAPWCEPVLKTARLAVSIITLLKEQSRASKLSFADVIRKVAEFDKGNPAFISSNITLVERYIVVHGQIILQQFADFPDETIRRSAFVSGLLLKMEQRRHTKLVMKKKTQVMRGENLNPSAAMGPASRKKAMRATTTRLINRIWSDYYAHHFPEDSKEGDGNETKEIDDEQEENEDEDAEDEGQIEENISKTPPSTRSRKLLSQTCKEIRWEGETSGKTLSGETLYKCAYVRELRIPVGGTVALEDDSGDTVICFVEYMFQKVDGSKMVHGRILQKGSQTILGNAANEREVFLTNDCLEFKLDDIKELVMVDIQSRPWGHKYRKENSEADKVEQVKAEERKKKGQPMVYFCKSLYWPEKGAFFALSRDKMGLGSGLCSSCDNIEPDSDELKIFSKTSFVYRKVTYNVNEFLYIRPDFFAEDEDRATFKAGRNVGLKPYAVCQILSIPEGAGSKKLNPASANISARRFYRPDDISSAKAYASDIREVYYSEDVIDVPVDMIEGKCKWLDVPKENRLATLDIFAGCGGLSEGLQQAGVSFTKWAIEYEEPAGEAFNKNHPEAVVFVDNCNVILKAIMDKCGDTDDCVSTSEAAEQAAKLPEVNINNLPVPGEVEFINGGPPCQGFFGMNRFNQSPWSKVQCEMILAFLSFAEYFRPRFFLLENVRNFVSFNKGQTFRLAVASLLEMGYQVRFGILEAGAFGVAQSRKRAFIWAAAPGEMLPDWPEPMHVFASPELKITLPDGQYYAAARSTAGGAPFRAITVRDTIGDLPKVGNGASKLTLEYGGEPVSWFQKKIRGNMMVKLSNGQMADLIPWCLPNTAKRHNQWKGLYGRLDWEGNFPTSVTDPQPMGKVGMCFHPDQDRIITVRECARSQGFPDSYEFAGNIQNKHRQIGNAVPPPLAYALGRKLKEAVDKRQEASAGVPAP

SEQ ID NO: 81182 - protein, 67 aa, Zea mays
  Coding DNA Sequence Number=SeqID_37807
MGTSTRFYPWGDMVKTPRSPVTTDLALMAILGAAGGNDKASKCGCDIDNGEAGPSLVVVEQQALATL

SEQ ID NO: 81183 - protein, 436 aa, Zea mays
  Coding DNA Sequence Number=SeqID_37808
  Gene Ontology: Mol. function=nucleotide binding; Cellular component =endoplasmic reticulum lumen; Biological process=nematode larval development
  Homolog annotation: Hit_ID=P24067; Match level="QueryCoverage=64%, HitCoverage=43%, E-value=1e-140, Identity=91%"; Hit description =Luminal-binding protein 2 precursor
  Pfam annotation: Domain name=HSP70; Domain location=1-435; Score =327.3; E_value=2.7e-95; Accession=PF00012.11; Description=Hsp70 protein
  Pfam annotation: Domain name=MreB_Mbl; Domain location=65-337; Score=- 266.7; E_value=0.01; Accession=PF06723.4; Description=MreBMbl protein
  Pfam module annotation: Pfam domain module=HSP70::MreB_Mbl; Domain location=1-435::65-337
  Subcellular localization annotation: CTP_CleavageSite=27; ConfidenceScore=5.24e-01
MAGKGAKATAAKSADKDKGKKTDGPVSRSSRAAPQTTTVDFKPYVGPIYNAILGRLVNQDQDQEVKECAISCMSLVVSTFGDGLERELPACLPILVDRMGNEITRLTAVKATKDAGVIAGLNVARIINEPTATAIAYGLDKKGGEKNILVFDLGGGTFDVSILTIDNGVFEVLATNGDTHLGGEDFDQRIMEYFIKLIKKKYSKDNRALGKLRREAKRAKRALSNQHQVRVEIESLFDGTDFSEPLTRARFEELNNDLFRKTMGPVKKAMEDAGLEKSQIHEIVLVGGSTRIPKVQQLLKDYFNGKEPNKGVNPDEAVAFGAAVQGSILSGEGGDETKDILLLDVAPLTLGIETVGGVMTKLIPRNTVIPTKKSQVFTTYQDQQTTVSIQVSSTQYHYLDKHIVPFNEEELKRGELEADKDKMMREYRAQLDALDC

SEQ ID NO: 81184 - protein, 415 aa, Zea mays
  Coding DNA Sequence Number=SeqID_37809
  Gene Ontology: Mol. function=hydrolase activity, hydrolyzing O -glycosyl compounds; Cellular component=extracellular region; Biological process=carbohydrate metabolic process
  Homolog annotation: Hit_ID=Q2R4T2; Match level="QueryCoverage=87%, HitCoverage=89%, E-value=2e-96, Identity=49%"; Hit description =Glycosyl hydrolases family 18 protein, expressed
  Pfam annotation: Domain name=Glyco_hydro_18; Domain location=42-349; Score=128.7; E_value=1.6e-35; Accession=PF00704.19; Description =Glycosyl hydrolases family 18
  Subcellular localization annotation: CTP_CleavageSite=44; ConfidenceScore=5.22e-01
MELVAWLVIVFSVSLAGLLPVVSASTTTPQQQCGGNNVGPAGVRAGYWSPSSNRYSAVGSIDASLYTHLYYSAVTIDETSYAVAPPPPTAEDASLLAAFSGAVKSASPSTRTVLSVGTDEYRVGESNAAFSRMASDAGLRAVFINSSLNLARANGFDGLDLSWIFPATQADMQNLGALLAEWRARITEESVAKSLPPQPQPLLLTATLYFSNHLFGTPDGNLDYPVDAIASSLDWANVLTFGFRGDSGVTAADAPLYDTSSHFSASYGVVSWLDAGAPSVQAGDGDTSVREVVVPQEQGQERARRAGRRRRDEAEEEQPDWDNRVVQRKLEFAARSQLLGYFLWTVGFDDSNSTISRKASESWHQYAQGGFGIMHAGGSNQYVAFNSSSVSLGSCYSRSLSCLLSSVLLLVILFR

SEQ ID NO: 81185 - protein, 47 aa, Zea mays
  Coding DNA Sequence Number=SeqID_37810
MVVAVGARARKLVTGLPKQQKLQVDCPHILNGDLGRSCSVALVLTTE

SEQ ID NO: 81186 - protein, 427 aa, Zea mays
  Coding DNA Sequence Number=SeqID_37811
MTGALVFGTIVLCVQQPGGPTLKNGHLSLGGEWTTLHQQESRWKLAPGSLTSGGDHLCASSDNDLRSKRLASSSDHLRVAQMVSPAEATTSAMGSLTSGGDHLSTDGSGHLRTGVRRLPQRAKMSSLPSSHGSEDKTIQECGRHPHGVQRLSRPDQMAGGGARAIRAGEPGTRQLTALTAGRPRVAEVRLLRKAGERLLPQCWRKKRISPLVPQSVTGKVSPDLLQGSYPMTWGLGPHMSYRLTRSTKKANHRTRGLQLPRSYAPLHFWSNQRSGRRTAAQGACNRPAVKRSLIFAETSGRQGEPPRRKHTTAPRLCAPSASLQLAVQHGGLGPHVIQPVHRLPGVEKSHHRSRQCHVFSGPSQLTEKIGFQNQCNDSRYPAHGPTVTLSTKITGQSTMGIGVAVDMTIGGPTVIASTGAQEQQANR

SEQ ID NO: 81187 - protein, 149 aa, Zea mays
  Coding DNA Sequence Number=SeqID_37812
MGKNNKRKREPTPPSEEFGDSEYSEEEFSSEPEGSPAPVSPPASSDDSDDSQGIAAEVWTYIRAVERAGLEGSDESEYSSDEEDSDGGDEGEDDDDDDDDDDDDGDGSGRGGDDGSRDSTKGGSSRDNTKGSSRGSTKGGGGGRGRASG

SEQ ID NO: 81188 - protein, 225 aa, Zea mays
  Coding DNA Sequence Number=SeqID_37813
MYTGSVTSNTIYKEVCIRGTTDYNAPNMSSGAPYTALNTTLRELAKCDRARYEAPDMFGVSPVAHWIPTRLNSRQWLVHVEGTGHVWCDIGGAPGMSDVDYSEVRHPQTPRRLRVLLYLYRVGQQSCEITSTAFVVWPPLYTGGNEAHDILAERSIVKMMGSPRRLCVLLYLYRVGQQSCEITSTIFVVWPPPYTGGNEAHDILAERSIVKMMGNIQERLKVTHH

SEQ ID NO: 81189 - protein, 67 aa, Zea mays
  Coding DNA Sequence Number=SeqID_37814
MAHQILPLWVHIYTPSALQLGGPHLSLTFAILAKGRSLRTWDEIAHNMKSVVWEKDEPVPKLPVKKL

SEQ ID NO: 81190 - protein, 37 aa, Zea mays
  Coding DNA Sequence Number=SeqID_37815
MTHAVEGEDENWAEGAKKRPEYNEDEAYACDDLICSA

SEQ ID NO: 81191 - protein, 268 aa, Zea mays
  Coding DNA Sequence Number=SeqID_37816
  Homolog annotation: Hit_ID=A2YJJ3; Match level="QueryCoverage=76%, HitCoverage=77%, E-value=2e-76, Identity=72%"; Hit description =Putative uncharacterized protein
MPCCSPSLLGVGPRVRSFLRDYDALQSLALALIYLQIGCALIGSLGALFNGVLVINLVIGLFAVVAIESSSQRLGRTYAVLLFFAVVLDVAWFILFSHAIWTINPDEKYGELFVFSLRLALWMQIIGFSVRFLSSFLWIQMYRLGASSSTPTYFETNHEARISFLSPRSDSVRRSPTADDILGGSIYDPSYYSSLFEDVRNNACNHQGDKQSGSNDSGSTSAGQTPRLKSFANDMEKLISDLIYYKCGYRSLILVYANSIFTVPVSDI

SEQ ID NO: 81192 - protein, 174 aa, Zea mays
  Coding DNA Sequence Number=SeqID_37817
MLKGKCAFGPFLSILVIKCQHKCLNVNQCPWMNKVQIFNKAHLLMASSQEDKMKALMKVLVDCTEDATKSLGGLVEHALDHMHDEEILARTLFAIKDKLELLQQDALEAKVQAFPEVAKYEWDDITVDPPSPSPPPTVTDPSVDEEEFYCPDVSDEWYFSDSDRSTRNSYWNMF

SEQ ID NO: 81193 - protein, 153 aa, Zea mays
  Coding DNA Sequence Number=SeqID_37818
  Homolog annotation: Hit_ID=Q6J9V9; Match level="QueryCoverage=79%, HitCoverage=42%, E-value=1e-53, Identity=83%"; Hit description =Putative uncharacterized protein
MQEACNRAMVVHPFDSVTSGGPARKPGPTCHGSGKGIFRKGILLGQGNGPRALLLFRGSKVAPSGVRKPPKSTRALSPLLIRDSKASPSKGFDSRPRARRVRDDPGYVCYMAKARATLPRYPRTFPRPAGAICNGIPPEGGTEPSNPIKWVRV

SEQ ID NO: 81194 - protein, 385 aa, Zea mays
  Coding DNA Sequence Number=SeqID_37819
MVSAAVPRVKGSALGAGGEISAVAAVKDKAGSVSRRLREASQQLSQVADFADRVALGALTADVSAEVERLRAQHADVVREKSVADSKCRKLAERVAALEGERTDLRRQLVEERREAIQAIAKAKAVQAEAKLARVEGSLASQRAEEWKVRFNALQARMERAEASTCSEVERTRKQLVDSYRELGAQTADFEVLDREVGLRFLEWLQEELLALPTIVEGFMSFASLVTCEGALNALSREGCSHYEVFDRSDEDFGREIYKVKDPVVNESAGVLFDRMWGPYGREVVRERSVRTRDQMARAEDVEDFGPLNHALVASHCADGGESPEGGGGAGSGGSPEGGDGVGSGGSHGGGWVFAGGLVGVGYLYDEAVRLRASGYVHRGVAHLV

SEQ ID NO: 81195 - protein, 267 aa, Zea mays
  Coding DNA Sequence Number=SeqID_37820
MGRHLARAYFAQHPATRQGPYPILDKLLNQIASATHAGHAPQGPFVFILLRYLKLRGTNSTTSIKVLPVFGTIMLREDFDRGLPAVRSRCPDIFCQGHHGIRRQLVDLNVESTQNFPHKLMRGQTKASGEKSLEDDQIAFRLGDLLCPRDTARRFGKPAIQQYGVNQRSCQKPPQNHFERGQRLHHLAMPSAPDDLVELVPRRANVGAKAKTLPFARCLRQSRCAGGCDDRQSSLFVRHAEGRRPMARSPHPAASPNTGAHVQSGPS

SEQ ID NO: 81196 - protein, 57 aa, Zea mays
  Coding DNA Sequence Number=SeqID_37821
MGDPRSSVEDPMLKIAYRFDELLLTVHDKIIMLIGTWRTTRENSATTRVYGRPWLIN

SEQ ID NO: 81197 - protein, 182 aa, Zea mays
  Coding DNA Sequence Number=SeqID_37822
MVGSSASGRGVDDVLDERRRHGLDVGTVGEARVGHDGDRVGVDEHHHLEVDGEMVRGLGPYSRGVIPSWRSTGCPRTPPRFAAGGAMDREEDKSQRRSSGVCYGVRAEEEISGQVVRTDSEIRAIQAAGIAAVLRTKRAIEKEELTMRPHMAAEEKTDHWGPRAEKNSKARAAGMLGCVGKN

SEQ ID NO: 81198 - protein, 292 aa, Zea mays
  Coding DNA Sequence Number=SeqID_37823
MEENTKHNISILDHSHSVFAHSIGILSDLSSVLVDHRGIPSSPVYGAEACLPLETLLDSHTDPGSQQVGTQGRDLALRQVPNQEGLRNSPPAGKDPSRAPDTKVGRSDSLGAGSREWTLVSWGGPEPVQPLSLIPSRSRRVWLPKVVDNLFRCAGINYLHTSKGCGMASSERLANGGDHISTDNDGHLCTDDSPATAITSACTPLWKGPHPRLPTGGDNEAIKAKEPEVRRQMALTVSPAEATTSAVGSLTSGGDHLSTDDSGHLRTSAIPANGGRPGARVKRSLLPSSLRE

SEQ ID NO: 81199 - protein, 182 aa, Zea mays
  Coding DNA Sequence Number=SeqID_37824
MVGSSASGRGVDDVLDERRRHGLDVGTVGEARVGHDGDRVGVDEHHHLEVDGEMVRGLGPYSRGVIPSWRSTGCPRTPPRFAAGGATDREEDKSQRRSSGVCYGVRAEEEISGQVVRTDSEIRAIQAAGIAAVLRTKRAIEKEELPMRPHMAAEEKTDHWGPRAEKNSKARAAGMLGRVGKN

SEQ ID NO: 81200 - protein, 148 aa, Zea mays
  Coding DNA Sequence Number=SeqID_37825
MASRPTETAQRPAQQGRDGGLTTKPHLRMAGLSAGKDSKRATSSKESRAPWEEGWRPGTQAKLSQADGEETECRPRNCGHGRADIECRELELGGWRGRRESGQELASKIPKPAMGRERKEPSAMGGTLLGRGDEHRGAAMEKILDILN

SEQ ID NO: 81201 - protein, 244 aa, Zea mays
  Coding DNA Sequence Number=SeqID_37826
MSGEGRGWLREVLVVTAVYGSTAEVAGIGWSTCASGTGKTLAEVVEIVPCARNKWGNWWDFWFYVSRVEVEDLPGLSAAIMCSHCYVAFPPFEVAEDNEDEGALRYAARMSSGRDLVEEFIRYGVWPLVHGWVLGEVCPRQMPSLGDQLLNFLPYGDYPGDDDTVVVDRRGKRAATAADEGPSRGAVPAAVGGLHLPKVSSDSNQNHSGRSTKNTKVDAVPKLRARELRHDSRKGNRLKREKAI

SEQ ID NO: 81202 - protein, 114 aa, Zea mays
  Coding DNA Sequence Number=SeqID_37827
  Subcellular localization annotation: CTP_CleavageSite=60; ConfidenceScore=5.31e-01
MASVSRPALGLLPISLAQLGLRAPELSPARSASNLPPMVPCSIYCSSRTWNPCRCLAPTCADVVPSSSHRLDLGVQAVVLSLSVYSSWHGHGTSSASRTSNRWAASCSALMPLI

SEQ ID NO: 81203 - protein, 58 aa, Zea mays
  Coding DNA Sequence Number=SeqID_37828
MGRERKEPSAMGGTLLGRGDEQRGAAMEVGAGQEETGSSVRLERKAGGWAHDAKSQIF

SEQ ID NO: 81204 - protein, 117 aa, Zea mays
  Coding DNA Sequence Number=SeqID_37829
  Subcellular localization annotation: CTP_CleavageSite=31; ConfidenceScore=5.24e-01
MQSTTKLQKAIPKGAQQGFGKKKKKQFYASLCTNRREGVFRIRLKNANFVHIKALYTLMESFGLGFVILYILKYYKQNSISKEEPDFRKATTVPQEATRAQKSPCPAITSSRSLIVA

SEQ ID NO: 81205 - protein, 317 aa, Zea mays
  Coding DNA Sequence Number=SeqID_37830
MSSPELRESSARMLKVTGGRWPRNVPIPRAAGEDIRTSRFAREMRIFPYGWNVAAVVSAVMEKDHQDASRKLRLFARVGDPRFEVKMARGVAKSAAPGASKPPLGAKSAAPGPSKPLPVVPVQERRPPSPPCAAETEVGEVEASMDISVDDYLLDGVSIFDAHTGQGLVGSEAGQLAVASAPVVAGPVAVATGVTGSAQDPSAQFCASGEISSAAAAKDVLPLLTTHAQPLPKLEFLCFFPNRAGRISLRHGSRARPCAPVFPAPGRRVLPAMEFAAKDAVELVVFPVQYSRDFLLATVGFAAQRSCSPASVVLGSK

SEQ ID NO: 81206 - protein, 107 aa, Zea mays
  Coding DNA Sequence Number=SeqID_37831
MEESSDEDLDYFAALDVAAAEPSPRMEGSEELPDASTGYRRQRAVAKWRVSGLSRIGRCHCSEMESGRLRVDGTSERELRNLFEGEELRIMLFNYREIGIIPKVEPM

SEQ ID NO: 81207 - protein, 64 aa, Zea mays
  Coding DNA Sequence Number=SeqID_37832
MPWVDENFSSEFLRRCNTHVRRGHTLYCVEARPHGGNPESWENCELAPDLLRNIVPSPEPLRNS

SEQ ID NO: 81208 - protein, 36 aa, Zea mays
  Coding DNA Sequence Number=SeqID_37833
MTVVGSTSEKMYLCQDLVNVGLLTEDPLTGHMPHHG

SEQ ID NO: 81209 - protein, 202 aa, Zea mays
  Coding DNA Sequence Number=SeqID_37834
MDDLEATVPLYVVPTCAGDVAQQPSSRHTPPVLAPRHEDSSSSSNDPIGDLEAQVKQLQTKLRHRNSVWVEDGQRINELRTDIRHLQDELAERDLALDWAVNSCSIAWDREAKARARVEELSTAVDNLQVYCNTLHEEVHELYSRLHPDVPADPVGVGAGPSGTAGEAFGGELDLFKPPPSMNLADEWTPTPDNEAAKDNKY

SEQ ID NO: 81210 - protein, 301 aa, Zea mays
  Coding DNA Sequence Number=SeqID_37835
MEKERVGQGERLGRGGWGRRAGEGRPGGWDPPTGGGGAPQRALGFGEGSRWAAGGPGEGLAGLSSRPRGTGPRGEEGLAPRHEECSSGSNDPIGDLEAQVEQLRTDLRHRNRVWVEDGQRIIELRADVRHLQDELAERDLAIDWAVNSCSIAWDREAKARARAEELSTTVDNLQVYCNTLHEEVHELYSRLHPDVPADPVGMGAGPSGIAGEALGGELDLFKPPPSMNLANERSPTTDSEATKDDKYYRYETSYLDFLETHPPLFVKAKDPLEANKWVRVIEQKFGLIRYIETQKPLFVAQ

SEQ ID NO: 81211 - protein, 134 aa, Zea mays
  Coding DNA Sequence Number=SeqID_37836
MAPRLGVPARHRCGDPARQPARRGTDAAARLGEPPQPALVAWRGDAAILGGAVWPSHGARGAARTMPSSMAPGACGLASVSRGSARRGPVAASLAGSSLVRGMAELPTCAARPARLELPRCSCSHPCTSRSTGL

SEQ ID NO: 81212 - protein, 859 aa, Zea mays
  Coding DNA Sequence Number=SeqID_37837
MPSSSSSAANTPSADASFEDTLSNVAAEELHPGDMVEFGVSRISSVRVQDMQQLGYFGSGVGRVPGAEEVPEPEGELVVFEAFSPLAFVCLHIALWRRSCRDLRSRSAFCGGLSQTLLTALAKKKNWTQDCTVWIVHVYVEDRKTSMEVVELVPCARNKWGNWWDFWFYVSEGKVENHPGLPVAVMCSHYYVVYPQFEVAEDDADEGALRCAARMSSGRDCWAKYALARCPPWVGKDGAARIVGRYVPRTEALWSWDIRGSNVRLNRVFELNRWSYSGYPGDDAVDRRGKRPVAVTEEGPSQEAAPATKKRKIGTAVGGLGVSDSFAVELMGTCAALGGRMSLPELQESLAQMLEVTGGRWPKNVQIPRAAGEDFFTSRMARDLKVFPYGRNIAAVVSIVMERDRQDAPQKCRAVVRIADPMREAKRARGSVKVATSGGSKLVSAAKPAAPRHRRRRQAFNQYHGAGSGEGQLTVVLPPVATTSPTVVAGAKGAARDPWATFCASGEILSAAAPKDVAGSMSQRLREASQQLSQQLKRAADFANHVALGALTADVVAEKSAAESKNRRLSEKVVAVEAEKTDLRCQLAEERREANKSIADAQAAQAEAKVARAEGSLARQRAEELEARFNALRSRVDKAKASTHAEVERTHTQFVDAYRELGARTASFEVPGQEAGLHFLEWLQEELLVLPTIVMGFMSFASLVTCEGAVNALSREGCRHYKVFDQADENFERENFKVEDPVLKQSAGALFDRMWGPHGREAVRERSDLAIEQMAHAEDVEDLGGLDGALQEAAEVDPVLPSDAGEGPSATPAPTAAGEDPAPARAPTGEDALKVVAEPAAEPEAEDPTAAAVPSQVAE

SEQ ID NO: 81213 - protein, 48 aa, Zea mays
  Coding DNA Sequence Number=SeqID_37838
MAVMGSTSDKMYLCQTQAVQAIGQTLAVMQQTQQQLPPPQPQMQVQML

SEQ ID NO: 81214 - protein, 251 aa, Zea mays
  Coding DNA Sequence Number=SeqID_37839
  Gene Ontology: Mol. function=metal ion binding; Cellular component =integral to membrane; Biological process=ubiquitin cycle
  Homolog annotation: Hit_ID=Q655C7; Match level="QueryCoverage=69%, HitCoverage=40%, E-value=2e-46, Identity=61%"; Hit description=Ring -H2 zinc finger protein-like
  Pfam annotation: Domain name=zf-C3HC4; Domain location=142-183; Score= 42.0; E_value=2.1e-09; Accession=PF00097.16; Description=Zinc finger, C3HC4 type (RING finger)
MGAGDGNGTRPKANEVTISCDEGPGHAFPFPKPHAPDPDPPQASDPANYAVAGKILLAAAGAFAGVLLALVALHLYSSTRRRRLGAGQPRLLRSLAIAGGDEDRRDGDGDGAGAPSPRGLDYAVLAAIPVVSIEAGAGAGDCAVCLAELESGEKARALPRCGHRFHVECIDAWFRGNATCPLCRADVVVPPSATAPAEGGAQPEVRIDVAGDAVAAPPNGFRVAPVMGRMHSDQDLEKARRVFASTRFSSF

SEQ ID NO: 81215 - protein, 256 aa, Zea mays
  Coding DNA Sequence Number=SeqID_37840
  Gene Ontology: Mol. function=metalloendopeptidase activity; Cellular component=membrane; Biological process=proteolysis
  Homolog annotation: Hit_ID=Q94DI2; Match level="QueryCoverage=46%, HitCoverage=36%, E-value=2e-56, Identity=89%"; Hit description =Peptidase M48-like
  Pfam annotation: Domain name=Peptidase_M48; Domain location=98-241; Score=7.8; E_value=1.7e-06; Accession=PF01435.9; Description =Peptidase family M48
  Pfam annotation: Domain name=Peptidase_M56; Domain location=119-221; Score=-26.3; E_value=0.007; Accession=PF05569.2; Description=BlaR1 peptidase M56
  Pfam module annotation: Pfam domain module=Peptidase_M48::Peptidase _M56; Domain location=98-241::119-221
MDPLRSAQELFACVALLHGSTALDAGALHARTSPFLLLLLGTVRPHARWFSTDPWTSTRTWTIPGSTGGIRRGLRGSTIDEASPSPPASSPSKKSGELLNTEAPDLYIRKNHVPNAYTLVINGKKPFIVVHTSLVELLTPRELQAILAHELGHLKCDHGVWLTFANILTMGAYTVPGFSMVAGFLEEQLYRWLRAAELTCDRAALLVVQDPKVTVFSDSSAATGMVATFARAAWAQGVPRERCPVEIYRSPLLLSI

SEQ ID NO: 81216 - protein, 119 aa, Zea mays
  Coding DNA Sequence Number=SeqID_37841
  Subcellular localization annotation: CTP_CleavageSite=49; ConfidenceScore=5.55e-01
MTTAALSPLRKQGDVSKDSTAPTAVLPQGSSAPPTATTSHEQGAKTSPAAMTAYSVTEFVNITTSKRSDLWLSNFNTKHYDITIKSLVSFKVSSESGYEYTRVRSGRSLSETEGDYDEG

SEQ ID NO: 81217 - protein, 208 aa, Zea mays
  Coding DNA Sequence Number=SeqID_37842
MVVGGGASLVEIPEIIKKDASTSCFDLIDDSNPCNQVFVENIVVETCSDAKENEKLRQEVARLGKVLNDKKGKAKQIQPPQDNTTMIYRLCHKEGHKSFQCKAMTGDKQKQKPTSKISNTYINKVDKKVATPYLIKKKKNGNVIAIKANKQANKGKGGQRHLGAKGNNFNHEKQQESLNPEREVRSPKDVGEFGGLANLACISCDTSY

SEQ ID NO: 81218 - protein, 94 aa, Zea mays
  Coding DNA Sequence Number=SeqID_37843
MGASSEELATAMETARLCVYGGPCSSAEPERRRKVAWGEEKREGGLPFIEQSSRHVRMHQQVADLGCCTKYLPWSTLYNCCIELEAIQALVREL

SEQ ID NO: 81219 - protein, 127 aa, Zea mays
  Coding DNA Sequence Number=SeqID_37844
MARNPGRLGGRLSVILHTNNPHTPMNDPDTPLATNRSHPFRERSTVGGGGAFLGKMSSREKRAGQEWVTGALLYPTGSRLGERGRSFTFPVMAAISAQFVAGEKEELTQGPHWSVRRGTRESVPQGM

SEQ ID NO: 81220 - protein, 176 aa, Zea mays
  Coding DNA Sequence Number=SeqID_37845
  Subcellular localization annotation: CTP_CleavageSite=27; ConfidenceScore=5.03e-01
MMVIASVATTSFVILLLFSLSSCIHLRATPFSTEGVGSGVYSPYSSDTGLDTDSRSGYCTSTRTFHIMHAPSFSSSSDVPFVFPAFALFFHPNLLPPPTVVAASRPTLVDTSTGDILPMSPPDAQVFVVSFSSNEQAPEIPRHNEIVSSSCHSQSLNCMKRRSNKKSCGRVGRLAP

SEQ ID NO: 81221 - protein, 104 aa, Zea mays
  Coding DNA Sequence Number=SeqID_37846
MPAQTPARTRPGTQHPNAESQGSFLYSIHTRISVELLGVRCKLTVREEDNRDTDPVVPPAVTSRDGAELLSRGVRQSVDKWAQSVSGVGEVIRGIRTVQMTRGA

SEQ ID NO: 81222 - protein, 245 aa, Zea mays
  Coding DNA Sequence Number=SeqID_37847
MGKMDYSAVVVMPPEPDYMSLGLRGFWTAEPPVPEDAAARAQARDRVPLESSPRSEEEEDDDDEGMEVHAGFSPEAGLGSAPASMGPSSGAALPSMGPALSLSKAQASTEPAPVPTEAKEAEVVEEESMPLPTKVVVVPVVASLVPLSGRPLEGIRRGACHSPSCCRPRVRSDPRYLLALDPRAEGCRRGDHCLAFVIGGAAGAKDSEDQASVFACFWIRIHSVRKPIHYKRVTYLVLIHASFAR

SEQ ID NO: 81223 - protein, 108 aa, Zea mays
  Coding DNA Sequence Number=SeqID_37848
MYLVIRLLHLLESLHKNDIRCTARVHQDIVDQKSLDDTRYDNCIVVGIILELKILLGEELKLPVIGKVPQLGCLAKPLSQLWKHGTQPRLKPLSFGISQYHFYTESSS

SEQ ID NO: 81224 - protein, 298 aa, Zea mays
  Coding DNA Sequence Number=SeqID_37849
  Gene Ontology: Mol. function=iron-sulfur cluster binding; Cellular component=chloroplast; Biological process=iron-sulfur cluster assembly
  Homolog annotation: Hit_ID=A2Y2N2; Match level="QueryCoverage=31%, HitCoverage=11%, E-value=8e-27, Identity=69%"; Hit description =Putative uncharacterized protein
  Subcellular localization annotation: CTP_CleavageSite=43; ConfidenceScore=5.06e-01
MTGSKRLASINREKRQSKTRALNARAYNNETVFVQVRLDGRPRAGPRGPARHRLRAARRNAAPAWTSAPTPPCCTHSPARAERTLELFAELRHQGVAPTLVTYNVMLDVYGRMGRSWPWIVTLLNEMHAVGVETDGFTASTVIAACCRDGLVDEAVASTIELYIEYQKERVHMVDDARLAFELSTDLSKEGIEVCMVPSADRPDDAKFVVPLLESDFDFAIAKLVPGCPWRLPQKIHLQAVNWRLDILRPPIGNYSGSVDALAVDGKDCLARYDRLESIGSDIKASIMEKFPTIFSKQ

SEQ ID NO: 81225 - protein, 155 aa, Zea mays
  Coding DNA Sequence Number=SeqID_37850
MESSAKKRLPLNSIGAKGSTQTNKKIQVRVQKKGAKETEENHGLAQWIVRCATGQCPVHQGRSTQTLHLRVSTQPLRYNSPDYPVYHRTVGVPSGATVASATVDSNGRLTQRTVRAELEQRQKAHRTVNSDCPVWHRTVRWPKLSELQRSKPSEP

SEQ ID NO: 81226 - protein, 122 aa, Zea mays
  Coding DNA Sequence Number=SeqID_37851
DVGEWWPQATSASGAARHERRGDRPWQHPKTMISSNMARLGRPSTKTTSDLVALEAFADPIALRSSSSDVLPLIHVYAFHDYVLCLLLTLFMHSLKDFYDDEYDASHVALGFYGNHLYLKVA

SEQ ID NO: 81227 - protein, 139 aa, Zea mays
  Coding DNA Sequence Number=SeqID_37852
MQHRAVQRPYVRLRPLAYVMGIWPRGSIGSLPERGAEVYMVWSGHVSALDLHLALIKAWVFFVPESRDPAEGGPDPTQRGPGPVPGVRSVPMEVLDPARRPGPDMLGSGAFPWGSRPTIDTLEDIVLPSHVATPEPSTW

SEQ ID NO: 81228 - protein, 102 aa, Zea mays
  Coding DNA Sequence Number=SeqID_37853
MRIRHTIRESPTALQRLSIGVIKEKYSIGINKKVQRSDIYMVQVAYLDARYSDEGKKNFEELSAREKVKKTKVPKARGEEDGLQEVKVGQAKKSLGTSRITS

SEQ ID NO: 81229 - protein, 255 aa, Zea mays
  Coding DNA Sequence Number=SeqID_37854
  Homolog annotation: Hit_ID=A2WUZ4; Match level="QueryCoverage=24%, HitCoverage=9%, E-value=2e-12, Identity=63%"; Hit description =Putative uncharacterized protein
MGKGGRWSESSGEEGARRRDGKVGKEDVGHGKVHERVDECRYGSQEVAAGGDGAAAIFLYLCSGRDSPSRDMVDARASTGAEDPTTVDVVVTQLMPEEALQLCTGCVHLYTFLHRLSLCRKLLSGTVFLYKQYPLSMARRGFVLISKIVKTVNIIDAKIRDRMLRSSCSPQGASWVRRAHGPISFEEHVELEKRYRELTDLLVEAERSKATRRSASSWEEDTNIKKLTKKLSVWQSATAFCGQKLQKAETNRGFS

SEQ ID NO: 81230 - protein, 148 aa, Zea mays
  Coding DNA Sequence Number=SeqID_37855
MDLPPGHRPQISLHILALKQSRREFAACVEVVAAVAQIVLCFMPSSPLPSAPFRSQILASPRLTSVLLSSRADASRRRRTGSGGSPGPSAARRPHERMQRPTGCLAHSYARCRIEETCCCNPSNLLNHCETLNHECYFRAAGEMSGGD

SEQ ID NO: 81231 - protein, 220 aa, Zea mays
  Coding DNA Sequence Number=SeqID_37856
  Gene Ontology: Mol. function=aspartic-type endopeptidase activity; Biological process=DNA integration
  Homolog annotation: Hit_ID=Q8W0X4; Match level="QueryCoverage=43%, HitCoverage=5%, E-value=4e-09, Identity=38%"; Hit description =Putative pol protein
MQERGCTNHMMMEKNMFTSYIKNKDSHDMIIFGDENRGKGSDKRKTEMPLIVIKQFTPSINQPDYSTTTNHVPMHEKSPLSHLELSSLRHKKGEKEQSGKASEGDGGEIVLEIGALENRNYVTSKADNDSDTVQADPVYDSANCSLGILGDDAHVSKAYGGSADNTKNISVVPKVGPISSSRIRDMQITEKNVVASSEKTMEICKKEKHKRPLILRMMCK

SEQ ID NO: 81232 - protein, 112 aa, Zea mays
  Coding DNA Sequence Number=SeqID_37857
MGKPTPSLLMLLLGRVIALVPTIIGMGDHVSCCVRRAIFGQVHSESEEIQLKKLGSKQPKVCSVWVHRTVRWCTGQCPVRQAGSGELAALGTSMAVYGYKSPDCPVVHRTVR

SEQ ID NO: 81233 - protein, 290 aa, Zea mays
  Coding DNA Sequence Number=SeqID_37858
MGLSSRTHPLIRIPPRSVRGWLVRPWRLAPRPRACRGASVLLHHHHQTRLHHHHHQVRHRLPRGSSTIISSNSSSSRGSERPASRVAGRSRGPRPPPPLLPKSLPTVNPVPNSRRPLGVVPATCLRLPLPRRRRWAPRFRLPLPRQRRWAPQVPAGGLEAVVPLTATVDPTTSMSSNTPSITAGDAGGASSSIPPPTPEEPEVILGRRLRSGVEPEAAPTPLPRVLSRAHQALRETELAILREWEALATEHQRLSDWHAQLEERTKAASHQFTSDRSELEQEREEYKEDL

SEQ ID NO: 81234 - protein, 82 aa, Zea mays
  Coding DNA Sequence Number=SeqID_37859
MEARMMAEREARLADQQRMAEMFQYMQSLGAAQGFAPPPLLFSPLDPAQFHTPQKQLKKGNLVTLSTVKVIALVKEGTPGYR

SEQ ID NO: 81235 - protein, 69 aa, Zea mays
  Coding DNA Sequence Number=SeqID_37860
  Subcellular localization annotation: CTP_CleavageSite=35; ConfidenceScore=5.42e-01
MDTDCFDTGMGLTPSGTTAKLASSAHAAIRWTPVRCSTRRSSRVFFIASTAWELGAACTAWATCAACVA

SEQ ID NO: 81236 - protein, 47 aa, Zea mays
  Coding DNA Sequence Number=SeqID_37861
MGKPAPSLLMLLLGRVTTLVPTITGKGDHVSGRVRRAICGQVHSGWV

SEQ ID NO: 81237 - protein, 112 aa, Zea mays
  Coding DNA Sequence Number=SeqID_37862
MVAKVERAEMVEAAVAAEMAGAAGLAVAEAGLARAAGLVVEMVDSVAAVGMGFGGVCVRSEEKNVGAHDYRAINGRRVASANDHQAAPDCPVCHRNIRWANGTLAATVGFAK

SEQ ID NO: 81238 - protein, 418 aa, Zea mays
  Coding DNA Sequence Number=SeqID_37863
  Homolog annotation: Hit_ID=O48967; Match level="QueryCoverage=93%, HitCoverage=99%, E-value=3e-51, Identity=55%"; Hit description =Putative uncharacterized protein
MVHIVEHHDFLPEDFMVEEAAASSTPRATNLPGPSATTDVHSARQHTPAQTSRASRATPGALSAARELFRHPPRSTTSPKAMKQWRDDVDRLLGMAHSGSTRPRPRSSRRQYEASASMRSPSVRAAPTDDLRVELNRQRAGEDAPVSMEKSNDLRAELNRRRAGEDARVSMERPRERRQNVEGRNLDYNFAAVAPQTPTGARIQTGVCHRYHSYRWKHHCDGDIFSCRLVWACPDLAHESYPRINLFLGRALRAVHSEFRQRLPITRRGGPPPRSEAGSRRDSLDVYLPLHQELATHDVETVSTLFTLADKGSGAVAQDGKKNKKNHGHEKPRSTAPIVAAATGGQSERNKRPRPQGGNSGSCPMHTNACHNASECREIIKLAKRVSEQNEQSSKDGSPPRRRPGKERSDDGEVAAGE

SEQ ID NO: 81239 - protein, 73 aa, Zea mays
  Coding DNA Sequence Number=SeqID_37864
MPIGSHGCLDGLGILHPKFAFENKSPTLAPTSGELTSTVELMASFNNQAEVASATKLVLPIIGGSGSESANKK

SEQ ID NO: 81240 - protein, 61 aa, Zea mays
  Coding DNA Sequence Number=SeqID_37865
VVPLMGLGVCGSLCQGWFAPWGGVQCIYGGNENDGFGIGYGNGEDEAVEGDFQEFQDYDEF

SEQ ID NO: 81241 - protein, 340 aa, Zea mays
  Coding DNA Sequence Number=SeqID_37866
MSQQMRHASQQLKHAAAFADHVASGALTSEFTAERQRLEGRIERLGAQHTDAVRDKSAVENKSCRMAERLAAAEAEKEDLTHQLAAERRDANKACAEAQSAQAEAKLAWVEASLTCQRAEEMETRLGGLRDRLDKMEASTRAEVERTHTQLVDAYRELGVRTAPFEAPGREVGLRFLGWLQEELEVLPTNMMGLMSFASLNTCEGAMNALSRERCGHFEVFDQSDEGFERRIFQVEDPVLKPSAGVVFDRMWGPHDQETVRERSDRATDQMAHDEEVEDLGDLDSTLPEALRVEPAPSSDAGEGPAVTPALTGAGEDPVPCTALTGSDVWACASNRCWQY

SEQ ID NO: 81242 - protein, 158 aa, Zea mays
  Coding DNA Sequence Number=SeqID_37867
MRGFEDLQQYKTKEKKRQRIWWRQQTDEAEITHYDEEQGTNVAIPIGKEIDGKYVNENVKEFQAEINKWKTYSDGAYGAGVAMPPKIQVMEHLIHNDIIRLADLLMMAATTQLVLVTTICRDMTKTYTLMHGKYSQGHEYRISSYLEGSNMSQYYDYS

SEQ ID NO: 81243 - protein, 73 aa, Zea mays
  Coding DNA Sequence Number=SeqID_37868
MELAHAVECGEHVAREPFLTKHMDHLGECGDGDDRSVGTKEAEKRRAWASTSAAAWSKALEIWMASGWAWSCD

SEQ ID NO: 81244 - protein, 179 aa, Zea mays
  Coding DNA Sequence Number=SeqID_37869
MAHDPTSSLLACCCAVPRWCLLGARQNAQQPQRLRALPARCFVKPSGQHVVMPTGCLLFLRSPNIDVVHPRRGTPCFSWRRRQAAQRSSDVRSDAQIGITIVLANTDWTPTRGAPSIRARTLNHPRKIVGACNNRVTTGHEPTDGVTGFIKTRSPCAFRHNQGWELAQPCMDDYAEAQR

SEQ ID NO: 81245 - protein, 131 aa, Zea mays
  Coding DNA Sequence Number=SeqID_37870
MARRTCWQPWEPRRKKRGRRLLLREGEGAGGDEEAGAKGEKGRTPWEERELAELLLGRDSRGRNVLGAVAAVREETGESIFRKDIREFTYYQNILDFWDDSFIDLSNWFGWDNYRDGQENFFMAMAQLDSP

SEQ ID NO: 81246 - protein, 656 aa, Zea mays
  Coding DNA Sequence Number=SeqID_37871
  Gene Ontology: Mol. function=protein binding; Cellular component =chloroplast; Biological process=iron-sulfur cluster assembly
  Homolog annotation: Hit_ID=Q941V2; Match level="QueryCoverage=26%, HitCoverage=32%, E-value=2e-62, Identity=71%"; Hit description=ABC transporter subunit-like
  Pfam annotation: Domain name=Glyco_transf_8; Domain location=501-656; Score=-57.4; E_value=0.0069; Accession=PF01501.11; Description =Glycosyl transferase family 8
MDHPDPTVRKLLDAMALMENRLTEALAGRGGEQTPASSFASLFDSFEGTTSSSTTALQYVDDVFSSSVGAEYAASPFARTRSPSYDDDEPVFDAWPLFDEEPVDSATTQALFSDDANHCFGDELDTDRTMEFRFPTSEFDIKQVMVVVSNTKDSLEFASARRVEIRTRVTVACEDWVVDHNVDAMTVADMAHLAHDYFTLPLEDKPPLGPYIDTAPSPTSFLPQLMETEEEDEVFHTSPSTCSMMVPNRDATTSMLAMVEATWSDEYALVDLQSVCYYSMFNAKPTLNILDEVDPKLLKTFIPLTEQKHLSDVAIDAVIDSASITITHHEALMAKGVIFCSIPKSICEYPDLVRHYLGSIVLPGDNYYAALNSAVFSDGSFCFVPKDTICPMEISTYFRINNKETNQFERTLIVAVERCTYVLLIELCLQVDGVKVRLPPWPPPVWTFWLPYDVCSGMHCNCRDCAWFKAEFSSSYNGEDGATLLMYKHYAATAISKGIHCLSLRLTDEYSSNAHARNQLLPPELLFLLSDNSLQHYILASDNILAALVVVSSTVRSSSVPEKVVFPIITDTKTSVADLSPLWAINLEGKVNGAVETCRREDNWVMCKRFRTYFNFSHTMIAQRLDPDECDWAYGTNIIDRQFGGRQASGIHTIYG

SEQ ID NO: 81247 - protein, 121 aa, Zea mays
  Coding DNA Sequence Number=SeqID_37872
  Homolog annotation: Hit_ID=Q2QRH1; Match level="QueryCoverage=29%, HitCoverage=5%, E-value=2e-07, Identity=72%"; Hit description =Retrotransposon protein, putative, Ty1-copia subclass
MYVHKNPKSLHKHKINHHFPYKHLHQLKMRIWLKKKIKFKTMSHLKKKASIKGEMKLIKKRRMNKRFKIKDHLTQESTKQLNEITPSTPYLVTLKRGVEDALRDPDWVVAMQEELNNFTRN

SEQ ID NO: 81248 - protein, 36 aa, Zea mays
  Coding DNA Sequence Number=SeqID_37873
MATSCLSVLSPVGHRDLTAEVSPYPFGPGIIACEPS

SEQ ID NO: 81249 - protein, 117 aa, Zea mays
  Coding DNA Sequence Number=SeqID_37874
MAEVKVMRARADGPGAVKGECWVLTDGSEQPGRGGVDRVGGVVEDWRDTRLIVEDVHEVRCARQVLWFEPQNHPALQMLGFAELRLSLKTRRWRFRIEPVAARGVITEGASRRSNSV

SEQ ID NO: 81250 - protein, 94 aa, Zea mays
  Coding DNA Sequence Number=SeqID_37875
MLASPFEVEILPPVSPSEAGPDPAESGNDAEGAVAPSVDDLFVGSRIAYPSESYFSRKVTSEDPAIEAVEKRERFSGRKTFSEENFDAEGVPPF

SEQ ID NO: 81251 - protein, 414 aa, Zea mays
  Coding DNA Sequence Number=SeqID_37876
  Homolog annotation: Hit_ID=Q6QP51; Match level="QueryCoverage=40%, HitCoverage=83%, E-value=2e-30, Identity=46%"; Hit description =Putative growth-regulating factor 1
MQVACNRTAEAHPFGFVASSMEAQAHMSCNRRAGYYVQETAPPLAPMPHLLDCGTSAATRGNPAHGPTVPIKHIDPGLAPRKGSTAAPEHSGFKLITDQGFEGWPLGRVRQPPQSTRAPRPLLIRGSKAGPSEGFDSRPRARRARDDSGYVRYMAEARATLPRSDFVTESHQREASSPRTLSNGTGSGKTPAEIDGRNLGQGFVYSRDGISPRPSPASGGNSSPRRIHASPEGLLKQRAHPRLARSPARAGFVVKQPWPNRLTNRPYHRHIQCEDRVTPYPDKRASVGKVEENSAARPSPTGAPPARVRLTTAKSSLRRNRKLRLARPWASASGGGLRLARPQGSASTSASEGGLRLARPQGSASTSTSGGITSSLDLGLRRSLRLARPWAQTNHATGELKRSFDGHDTAYTGL

SEQ ID NO: 81252 - protein, 266 aa, Zea mays
  Coding DNA Sequence Number=SeqID_37877
  Gene Ontology: Mol. function=metal ion binding; Cellular component =cytoplasm; Biological process=protein transport
  Homolog annotation: Hit_ID=Q10LP6; Match level="QueryCoverage=31%, HitCoverage=67%, E-value=4e-13, Identity=47%"; Hit description=Zinc finger, C3HC4 type family protein
  Pfam annotation: Domain name=zf-C3HC4; Domain location=92-133; Score =45.9; E_value=1.4e-10; Accession=PF00097.16; Description=Zinc finger, C3HC4 type (RING finger)
MESSSSSSLDSNLRFDLYAVLVALGLAAFLAVCFWLLYRLTVSARPQDMMPTTADAGAAGPKGALRQQDVAALPVFVVRAGACAAAPPPVECAVCLAEIGDGERGLLLPACGHRFHVACILRWFRAHSTCPLCRAAAVVVGQQRGAADQTCKAGSAQEQVAVVPPTTSDPSTPSPAPDHARAASAPYELPVTGPYTVSVFLEKGFLSIPGFILAGDNLIAKCPSWFWCILYSSRPALVIFIPRYVFYANLNVLLCSITRSRVRSAL

SEQ ID NO: 81253 - protein, 420 aa, Zea mays
  Coding DNA Sequence Number=SeqID_37878
  Gene Ontology: Mol. function=nucleic acid binding; Cellular component= cytoplasm; Biological process=stem cell maintenance
  Homolog annotation: Hit_ID=A3BJL5; Match level="QueryCoverage=23%, HitCoverage=9%, E-value=4e-29, Identity=61%"; Hit description =Putative uncharacterized protein
  Pfam annotation: Domain name=Piwi; Domain location=30-286; Score= -39.3; E_value=6.5e-07; Accession=PF02171.8; Description=Piwi domain
MSDSQAQITVRRRASRLLLWHLDPSIIRLDLSVMLKEHLCHLSLCRVLFDRLGEEVLCELVGVDGGVEGVARGGAGGGGGCGEERGVEIRVGLVHIQVEALLGIRGSESHGCVAVLDDEAVMRKQLHEAREQLVRQRLLPPKTGPRWLTIMALSVHKVTVKSSSMGWKTLSKTQAADLLQAWTVLYNEKPKITFVVVQKRHHTRLFPSKPKDCQYTDKSGNIRAGTVVDNNICHPTEFDFFLCGHAGAKGTSRPTHYHVLRDDNKADALLLTTLIRVDKRKRCGLVEYQTLPAYLRDNEYIHRHYRCEWPLLQVLLSAFSIHNETLNGNSVSTTKYSILTFLPKGLFEQVVFKVQTSSPLKFLVSTLRDVVFGALESRGIIKAAEESREAIDIGLRDVDLVFITIGIGGDIGSGAALVVA

SEQ ID NO: 81254 - protein, 192 aa, Zea mays
  Coding DNA Sequence Number=SeqID_37879
MGAIQVKAPFTQGQDLASPEPSLGQRQPTQEDSRLARGRQSRSDRSHFAPPLADLTGKQRRLRCSDCCATRQGLGLNLDLGRRTPPRPTPGLGLNLDLGRRSPPRPTPGLGLNLDSGRRSPPRPTPGLGLNLDLGGASVSPDLGLGPTTPQGGPSYEKVATRENGPTHEALALSLPRERLDLRGRNTDRRVI

SEQ ID NO: 81255 - protein, 98 aa, Zea mays
  Coding DNA Sequence Number=SeqID_37880
  Gene Ontology: Mol. function=carboxyl- or carbamoyltransferase activity; Cellular component=ornithine carbamoyltransferase complex; Biological process=amino acid metabolic process
  Homolog annotation: Hit_ID=Q8SA97; Match level="QueryCoverage=88%, HitCoverage=21%, E-value=2e-14, Identity=49%"; Hit description =Ornithine carbamoyltransferase
MALPVDVAGLRPRLGVVEAPPKPRSSLSSVAEAESEPLGRARRRSFGRGQGGVRALGSGEADLSPSPGSGGAEFAVFRDLARVRALGRAERSSPSSGT

SEQ ID NO: 81256 - protein, 69 aa, Zea mays
  Coding DNA Sequence Number=SeqID_37881
MEQQTISIAKAAITIILILGTSFLAAANPIARCYDALKKAYLVSTEFMYLFILDEILVWTLMFEAPRCK

SEQ ID NO: 81257 - protein, 125 aa, Zea mays
  Coding DNA Sequence Number=SeqID_37882
  Subcellular localization annotation: CTP_CleavageSite=46; ConfidenceScore=5.20e-01
MAAPSSLTEAGRRQQGLDRSNSCPSAKLRRTSDSHDITPARSSSTSAAAPDPLLGWRSPTINVVAAPAPLPGWRSLTFNGPNLPSTGRTFHRPTLNPDPLPPTVLPQPHPPLTSSTQLRFRRCKV

SEQ ID NO: 81258 - protein, 174 aa, Zea mays
  Coding DNA Sequence Number=SeqID_37883
  Gene Ontology: Mol. function=hydrolase activity, acting on acid anhydrides, catalyzing transmembrane movement of substances; Cellular component=integral to membrane; Biological process=calcium ion transport
  Homolog annotation: Hit_ID=O04938; Match level="QueryCoverage=48%, HitCoverage=8%, E-value=4e-09, Identity=42%"; Hit description=Ca2+ -ATPase
MQAILLIHVSAKFKSFTIEGSSHLSVAYPSHALDMVPIRTLQMIAKIVVVCNDPIIAHSEHQYVATGMPIEAALKEEEIVIAMILLFWVAVLHNSRRGAEGGGTKQGRRGRQAVRLMSRVVVISAFADGLYVYTLTGLTSKSRESYANTGVLPPSPPSTWAVETHQGKVWRHWD

SEQ ID NO: 81259 - protein, 530 aa, Zea mays
  Coding DNA Sequence Number=SeqID_37884
  Gene Ontology: Mol. function=transporter activity; Cellular component= intracellular; Biological process=transport
  Homolog annotation: Hit_ID=Q7F8U2; Match level="QueryCoverage=58%, HitCoverage=25%, E-value=6e-79, Identity=93%"; Hit description =Putative phosphatidylinositol-phosphatidylcholine transfer protein
  Pfam annotation: Domain name=CRAL_TRIO; Domain location=160-333; Score=99.4; E_value=1.1e-26; Accession=PF00650.11; Description =CRALTRIO domain
  Pfam annotation: Domain name=CRAL_TRIO; Domain location=343-501; Score=8.9; E_value=4.8e-05; Accession=PF00650.11; Description =CRALTRIO domain
  Pfam module annotation: Pfam domain module=CRAL_TRIO::CRAL_TRIO; Domain location=160-333::343-501
MLSFVSSTDLTKLEEALLDINWINAMYETPKSMWMISYMGQQIKNFVNNLEKWWLMSLKWATSRQRALEPPELLLTTHGNLPSVTATENADALLGQGLLVARLKPHSDMSYNPSGCHKLGIVNVGGHCQPILDHKQNLGDTNLCLDFVFDELDDVLRYYPQGYHGVDRESQPVYIEKLGKVDPNKLMQITSVDRYIKYHVQEFERAFRERFTACTLAAKRNIDSTTTILDVQGAGFKNFSKTARELVHRMQKIDSDYYPETLHQMFVVNAGSGFKWIWNSVKGFLDPKTSSKIHVLGSNYQSMLLEVIDSSPNESAFLLLLELEARSEWHKSVAQNAVSKYGNECILNIENSTAEAANNTVKKSIRIDLRSNSHFAPKGVDIYFLLVEGFKNFSKTARELVHRMQKIDSDYYPETLHQMFVVNAGSGFKWIWNSVKGFLDPKTSSKIHVLGSNYQSMLLEVIDSSVIALALDLRLEQLLVFCRGMSSSLQLSALLQSITNRPITYKLSQATSFELAVHMGATAVGAVAPV

SEQ ID NO: 81260 - protein, 102 aa, Zea mays
  Coding DNA Sequence Number=SeqID_37885
  Subcellular localization annotation: CTP_CleavageSite=22; ConfidenceScore=5.53e-01
MALLPPPPPSSLWPPPPGTCTHAAAPKRPTAEPPSPRATGQRRAAWKHAPAPARAGAAPASVSLAACVARARSRALAGNHDRGVAPPTSAGAAPRGRPAASA

SEQ ID NO: 81261 - protein, 120 aa, Zea mays
  Coding DNA Sequence Number=SeqID_37886
  Gene Ontology: Mol. function=carboxyl- or carbamoyltransferase activity; Cellular component=ornithine carbamoyltransferase complex; Biological process=amino acid metabolic process
  Homolog annotation: Hit_ID=Q8SA97; Match level="QueryCoverage=100%, HitCoverage=24%, E-value=3e-23, Identity=53%"; Hit description =Ornithine carbamoyltransferase
MAPPVDVAGLCPKLGDVEAPPKPRSSLSSVAEARAESEPWGRAKRSGVVLLSGRSVERQSDGGHFGSAGGASGEPEICSPSEGGLERDGNPPGPLQLYADGGYQLRIRSLEGTPNYGPRQ

SEQ ID NO: 81262 - protein, 284 aa, Zea mays
  Coding DNA Sequence Number=SeqID_37887
MSFVLFDYFEKWILKTTEYTRHTLQDNLILQARVLTLEGGSNTLGIDDTIGEGLLWEPGPSGRLGRSPRGLGQPSTEGASPTRGVGASVPPTDDPTRLRPTSDNNDPRSGWPNCSSAGLRVGAAVILPSPTPMLEGRGQGPSALRQIPTQILPDEWDTDLCAEAPYRRLPAGGATGSQVNELDTLGLTTPAVDQPRVVEVRPARRASERPLPRTPQERVTHEPAREVELRLDPASTLARMMNILEAEGGTKIAARLLLPTQGLVVAVLGDHRRGSTAGLADENP

SEQ ID NO: 81263 - protein, 57 aa, Zea mays
  Coding DNA Sequence Number=SeqID_37888
MDSGDQSVPHNCCKWNSVNTEVDVKHEVQFPDPERQWLRVIEAPTPKGKSAGKNRQI

SEQ ID NO: 81264 - protein, 640 aa, Zea mays
  Coding DNA Sequence Number=SeqID_37889
  Gene Ontology: Mol. function=DNA-directed DNA polymerase activity; Cellular component=nucleus; Biological process=nucleobase, nucleoside, nucleotide and nucleic acid metabolic process
  Homolog annotation: Hit_ID=O48653; Match level="QueryCoverage=81%, HitCoverage=39%, E-value=0.0, Identity=75%"; Hit description=DNA polymerase alpha catalytic subunit
  Pfam annotation: Domain name=DNA_pol_B; Domain location=9-434; Score =244.7; E_value=2e-70; Accession=PF00136.12; Description=DNA polymerase family B
  Pfam annotation: Domain name=zf-DNA_Pol; Domain location=450-637; Score=80.2; E_value=6.6e-21; Accession=PF08996.1; Description=DNA Polymerase alpha zinc finger
  Pfam module annotation: Pfam domain module=DNA_pol_B::zf-DNA_Pol; Domain location=9-434::450-637
MARSCSRTSVAARSRSREAATAAWMVAMVVTSAEEAGEEVVTPGHVGAARAGKLGGEPWCGWATMVASGRGPRSVMYGAPPTASSLWESKPASTLWGARPATARATVNWVRPITRGAREFNICFTTVERSSDGSVPNLPASKVTGVLPELLRSLVERRRMVKSWLKTASGLKKQQFDIQQQALKLTANSMYGCLGFSNSRFYAKPLAELITLQGREILQNTVDLVQNNLNLEVIYGDTDSIMIHTGLDDISRAKAIAGKVIQEVNKKYRCLEIDLDGIYKRMLLLKKKKYAAIKVALDGSLRENIERKGLDMVRRDWSLLSKDIGDFCLKQILSGGTCDDVVESIHSSLVQVALRLKQNGYSGCSAGDTVPYIICSQQDSDNAHSVGIAQRARHPEELKRDPDKWMIDIDYYLSQQGTSPARLAECLGLDSAKFQPRLTESSNQDTSMMLLSVIDDEDERYRGCEPLRLSCPSCSGTFDCPPVSSLITSASATSVSDPIEGKDATANFWRHMRCPRCLDNTVESKFSPSMLANQMKRQADNFISLYYKGLQMCDDEGCKYSTHSVNLRVMGDSERGTVCPNYPRCNGRLVRQLDQKARLPFEREFVAVGQTIKLALLEIQKIRDRCAFGWVQLKDLAVSI

SEQ ID NO: 81265 - protein, 1052 aa, Zea mays
  Coding DNA Sequence Number=SeqID_37890
  Gene Ontology: Mol. function=DNA-directed DNA polymerase activity; Cellular component=nucleus; Biological process=nucleobase, nucleoside, nucleotide and nucleic acid metabolic process
  Homolog annotation: Hit_ID=O48653; Match level="QueryCoverage=79%, HitCoverage=59%, E-value=0.0, Identity=67%"; Hit description=DNA polymerase alpha catalytic subunit
  Pfam annotation: Domain name=DNA_pol_B_exo; Domain location=328-693; Score=37.9; E_value=6.6e-10; Accession=PF03104.10; Description=DNA polymerase family B, exonuclease domain
MEGSPADAAGSGRRTRTRGAEASGRAAVLQQLRAVRSGQIRASDAIQVKVDAPIYDTVPEEEYNVLVARRRKEAGEFIIDDDGLGYVEDGREEDWSHRALPSSSDEGSEGEDGAPRKRKQTRPPQAKRQPQQSAKVASLSAAAAKTGQQISSMFTSSVFKGRGSDRAKNLALAADSIVDDVIAEFAPDENDREERRRRVARVCAPQPVPTVSYIKPQKVILDAEMVRSENENDMVVELKNDTEMETNLEEIPGSSAELVVNKSLEEPKQEDNGEVKIEKAHRLNAKIKAEECRNNDVTSATEGWMKICGNGENAVGEEGVAVDGNTNVDESSEFELKDGALPFYILDAYEEPFGANSGTVYLFGKELASGLKSEIADKLSDLNVSNFIMTPVKRNYAFERTDLPNGEQYVLKINYPYKDPALPADLRGEHFHALLGTNNSALELFLIKRKVKGPSWLSVSKFVTRPSTQRVSWCKFEVTVDCPKDISVLTTSTNLEVPTVVVGAVNLKTIINEKHNVHEIVSASLICCHRVKIDSPMRPEDWQKRGMLSHFTVVRKLEGSIFPIGLAKEASDRNQKAGSNVLALESSERALLNRLMIELSKLDCDVLVGHNISGFDLDVLLHRAQTCKVPSSMWSKIGRLRRSLMPRLTKGSTLYGSGASPGIMSCVAGRLLCDTYLCSRDLLKEVSYSLTQLAETQLKKVRKEVSPHDIPMMFQSSGELLKLVEYGETDAWLSLELMFHLSVLPLTRQLTNISGNLWGKTLQGARAQRVEYLLLHSFHARKFIAPDKFARNKELNSTKRKMNPDTGGANADDGAADPSVDDEVHNGDQSKARKGPSYAGGLVLEPKKGLYDKYVLLLDFNSLYPSIIQVDLHMLRALMLHGIGGEVDGVDVVAVDEGGALKGAVELVEELAHPGGLCHAVGHNAVLDLCAGAGDDGLPLGGLGDEVGAQEYDIAGSGPVRVGAAGPVSVGVDHELRRWGWSEEQAVVEGAAEAPLLNGVGDVGSGEGEVLKRAGQALEETLGPAFDGNAEEVMEGRQVHRKLPLEGDDRAL

SEQ ID NO: 81266 - protein, 95 aa, Zea mays
  Coding DNA Sequence Number=SeqID_37891
  Subcellular localization annotation: CTP_CleavageSite=56; ConfidenceScore=5.95e-01
MASSSVLAVPSIPLPPPGAYKRTRPSPVFTTPAPAISSAFPRANRASAAVLPPSLRSATLSRSQGTTSPPPIVTGNRTDAITAADIRHRAADRPP

SEQ ID NO: 81267 - protein, 399 aa, Zea mays
  Coding DNA Sequence Number=SeqID_37892
  Gene Ontology: Mol. function=transcription factor activity; Cellular component=nucleus; Biological process=regulation of transcription, DNA-dependent
  Homolog annotation: Hit_ID=Q5N965; Match level="QueryCoverage=53%, HitCoverage=69%, E-value=7e-38, Identity=45%"; Hit description=AP2 domain transcription factor-like
  Pfam annotation: Domain name=AP2; Domain location=185-236; Score =80.3; E_value=6.3e-21; Accession=PF00847.11; Description=AP2 domain
MDADRVKPGSECECVNHAPQTHVRPDDVRSQPLACFIRTSPPCRHSLADQRGPQGGGGAGWPAKRRAGGVQDEGAAAAAGMAMAAAGPGEVMSEYYQAQELSTMVSALTHVVAGAPMGSAPAQRPMHGASGYYAHEMGSYRGAPSPELAGSELSSDTQSAGAAAMEEHQSAAALSSQEGPETPRRRYRGVRQRPWGKWAAEIRDPHKAARVWLGTFETAEAAARAYDEAALRFRGSRAKLNFPEDARLYPASTAGAAAPLAAAASTSPPVYSGGVQGSSDYLRYHQMLLQASTGSQGTLLPFYGGGMSNPYGGGAAMTGSYGGAGGGNTSGSLGSYYSFPASSVSVATVPSSTSSASGYYYSSPHDSQHSEASAAADWNWESALAWPDSSQYPPPPHTQ

SEQ ID NO: 81268 - protein, 197 aa, Zea mays
  Coding DNA Sequence Number=SeqID_37893
  Subcellular localization annotation: CTP_CleavageSite=66; ConfidenceScore=5.89e-01
MASSSVLAVPSIPLPPPGAYKRTRPSPVFTTPAPAISSAFPRANRASVAVLPPSLRGRGIRSPGIYSSGRRARTQPLRDKPLVLGKLRRRQVRPSLDALFTYFSLPLPKPGIWDGNRIACLSPVCEESPQLGASRPYNDDHKRSTETTITPPGQLAHRTLSGARRTIRCPLPTVGAGHVSLADCAADRCAGDRWLTG

SEQ ID NO: 81269 - protein, 201 aa, Zea mays
  Coding DNA Sequence Number=SeqID_37894
  Homolog annotation: Hit_ID=Q6AV43; Match level="QueryCoverage=75%, HitCoverage=73%, E-value=2e-49, Identity=66%"; Hit description =Putative uncharacterized protein OSJNBb0101N11.18
  Pfam annotation: Domain name=DUF538; Domain location=3-130; Score =54.5; E_value=3.7e-13; Accession=PF04398.3; Description=Protein of unknown function, DUF538
MAMSPLPRIVLLLTVVAAATAVGLIPNSVASYSFDEATGAFEIHLAGTCYVHFGSHLVYYERTITGKLSKGAISDLSGVQAQKLFLWVYVTGMVALPDQGTIEFQSGFISESLSASMFDEVPTCGSSVGAQLRGATGVIGELGLLPVAQVEVIDEKLEGRGDGMKTTHDIEDRFMVNGTVGTTQNGSRNMVFAMDLEPTLI

SEQ ID NO: 81270 - protein, 107 aa, Zea mays
  Coding DNA Sequence Number=SeqID_37895
  Gene Ontology: Mol. function=nucleotide binding; Cellular component =protein complex; Biological process=microtubule-based process
  Homolog annotation: Hit_ID=P38557; Match level="QueryCoverage=44%, HitCoverage=10%, E-value=6e-19, Identity=85%"; Hit description =Tubulin gamma-1 chain
MDEQCKQDNKDSIRRTIVEHDKVFRQQVHELHRLYHVQKTLMAECDSHRSLPIDLEPRVVNGIHNSEYRNLYNHENIFVAEHGGGAGNNWASGYHQEYMFKFLFILS

SEQ ID NO: 81271 - protein, 135 aa, Zea mays
  Coding DNA Sequence Number=SeqID_37896
  Homolog annotation: Hit_ID=Q6QP51; Match level="QueryCoverage=40%, HitCoverage=25%, E-value=2e-09, Identity=65%"; Hit description =Putative growth-regulating factor 1
MALSPLPPYGEATKGHITKVEMVIDRPLAPCRGSGAALATRLLKGSVEYSAAHPALTAVPATRARLTTATSASGATGSSASPDLRPRPREVSASPDPKTRPQPRPREESRPCPTPASASGEVSASPDLGLGPTAP

SEQ ID NO: 81272 - protein, 102 aa, Zea mays
  Coding DNA Sequence Number=SeqID_37897
MGDSPNARGVWVLVRRGSWMVILWGRWEPWCVVSLWPGAIHAPAGGIARRSGEASPSTAFYRGQLLEPGAANLMFASGCATAELAVVARLHPGEEGRVSAVG

SEQ ID NO: 81273 - protein, 177 aa, Zea mays
  Coding DNA Sequence Number=SeqID_37898
MWETWYFGCDKTPEEKSFAITSFALFDCFDSGVLKMTRVHNPARPQTATRAEGFPPRRRTPAPHLGPHGQVLRKGSSPSGRLGWPLRSLSQLSPEDLSPAHGLGSETPRLVPLANDLAKLQPPLLHLLILGSHMLLGRRNLFSSRLCLCPRRHRCLWLQLIAERRKVLKLSKRSLER

SEQ ID NO: 81274 - protein, 247 aa, Zea mays
  Coding DNA Sequence Number=SeqID_37899
MGSTRVTFFLLLLEERDLAGVGALQTSLGFKDFHHAAQLQSLTNGGRTELGPASAWAGDPLLPPAFRGEGHPPALRRRHPPAMRVKANCCCQDRVQLSVFHPGDGGRLHRGVAQHVVCREGGTRVLGRSRSRSCGESGSEDLPVRFGAAVARWCGVGGQVAAVGEAASVEAVASTDETVRATCAPDLQLFGFNGWFSSPVRGRERGPFSSSVCPEAIAAAVLPPETEAVATLLVQRSPASHLEFVIP

SEQ ID NO: 81275 - protein, 68 aa, Zea mays
  Coding DNA Sequence Number=SeqID_37900
MGKNNKRKREPTPPSEDFGDSEYSEEEFSSESDGSLALIPLQSTAERLEGDASVLEVTPGDSGLRGPL

SEQ ID NO: 81276 - protein, 568 aa, Zea mays
  Coding DNA Sequence Number=SeqID_37901
  Gene Ontology: Mol. function=methionine-tRNA ligase activity; Cellular component=cytoplasm; Biological process=tRNA aminoacylation for protein translation
  Homolog annotation: Hit_ID=Q9ZTS1; Match level="QueryCoverage=93%, HitCoverage=66%, E-value=0.0, Identity=83%"; Hit description =Probable methionyl-tRNA synthetase
  Pfam annotation: Domain name=tRNA-synt_1g; Domain location=7-352; Score=433.5; E_value=3e-127; Accession=PF09334.2; Description=tRNA synthetases class I (M)
MGVGWEGSQGHRSWTGSQPRLPEEPPSRYHAIHNEVYKWFNIKFDKFGRTSSPEQTEICHAIFHKLMENNWLTENTMQQLYCDMCQKFLADRLVEGTCPNKVCNASARGDQCETCSTLLNPTELIDPKCKVCKNTPRIRDTDHLFLELPLLRDKLVNYINETSVAGLWSQNAIQATNAWLKEGLKPRCITRDLKWGVPVPHEKYKDKVFYVWFDAPIGYVSITASYTPEWEKWWKNPDNVELFQFMGKDNVPFHTIMFPSTLLGTGEKWTMMKTISVTEYLNYEAGKFSKSKGIGVFGNDAKDTNIPPEVWRYYLLMNRPEVSDTLFTWADLQAKLNSELLNNLGNFINRVLSFIAKEAGAGYDSVVPDAPNAGEHTLTKILAEKTSKWVEQYLDAMEKVKLKQGLKSAMGISSDGNAYLQESQFWKLYKEDPAACAIVMKTSVGLVYLLACLLSPFMPSFSDEVLRQLNLSPEENLSLSEEKGEIAKAKSPWDFVPAGHRIGKPAPLFKELKDEDVALHREKYAGSQAERSSKAAADAEANKVANQLKGTKLSGIDLDILIYSPYAG

SEQ ID NO: 81277 - protein, 176 aa, Zea mays
  Coding DNA Sequence Number=SeqID_37902
  Gene Ontology: Mol. function=sequence-specific DNA binding; Cellular component=nucleus; Biological process=regulation of transcription, DNA-dependent
  Homolog annotation: Hit_ID=Q9M4P8; Match level="QueryCoverage=93%, HitCoverage=80%, E-value=6e-89, Identity=92%"; Hit description=M14 protein
  Pfam annotation: Domain name=K-box; Domain location=24-119; Score =89.6; E_value=1e-23; Accession=PF01486.8; Description=K-box region
MMRRLKRREKSMYKTLERYRSSNYSQEVKTPLDTEIKYQDYLKLRTRVEFLQTTQRNILGEDLGPLSMKELEQLEDQIEISLKHISSRKEQELLDLNKDLRKQLQETRPENALRVSWEEGGHSGASGNVLDPYQGLLQHLDNDPSLQFGYHHQAYMDQLNNEDLVDPNEHGRSGWI

SEQ ID NO: 81278 - protein, 262 aa, Zea mays
  Coding DNA Sequence Number=SeqID_37903
  Subcellular localization annotation: CTP_CleavageSite=48; ConfidenceScore=5.19e-01
MATPPPARCPWPCPRPRDALCRRHRVAGVKACPSPTLPAMPAPFPSTVASAPRDCYTPWSEFRVPYPLPPRDRLRSVMLGGPHPTPPLDAYVHAVDFARLTSSLPPISSPPSLVPNPGPRTHSRPRNQGGVDNAGAEVEAGLGLEAMRLQDGHMERVVVGRRMKKGGAILSAQLYADCSLEKRRFLHADTPSSSSLARDKDRSSSACAAAALAWAYGPPRSSGKDPTLSLGDDDKAAASGSSSSSSSARALPATYGAWFTSW

SEQ ID NO: 81279 - protein, 327 aa, Zea mays
  Coding DNA Sequence Number=SeqID_37904
  Gene Ontology: Mol. function=metal ion binding
  Homolog annotation: Hit_ID=Q2QQX2; Match level="QueryCoverage=82%, HitCoverage=95%, E-value=3e-99, Identity=58%"; Hit description=DHHC zinc finger domain containing protein, expressed
MASSSAAESSSRLSDRGTLATPDIVCGLKIQRLLGSARFGASLCPWGVLSWASGGFYAARRSALGLRFMVLLMHVLFVGAVFILDPTLDWRIHGEPWYIGLYGVLVLLTLVQYFYTAGSCPGYVIDVMRAGSMMHATFVNTAALSKQSNSRNGNINSPTSRAQLQKLSTMTPTSSWAQMVMDLYPPGSSSRWYIFEETILCIWTAALCIESLCLDVDKAWWKDFVGVILLAALILILIFLLLLWLFHSYIALTNQTTYEIARRKRIFYLRGVPERVLPFSKGICRNLYDFCCSSQKGYILEAVPPSEELEARAARYTCRDVICCRCC

SEQ ID NO: 81280 - protein, 161 aa, Zea mays
  Coding DNA Sequence Number=SeqID_37905
MKNAPDNSKSIERWCGKNNRNIKRSWWLWGNTISKGYFKTPRPPFLAVANKQIFRGLLGLGVNFASAGSGILDTTGCRHPAVALPVPHQHRRQRPVRLLLQNRACCLHPLSACIDVLNELARAFNKGVKAAMHGLSFLSFQAGVQGTMDMHGCVHYHPNLH

SEQ ID NO: 81281 - protein, 753 aa, Zea mays
  Coding DNA Sequence Number=SeqID_37906
  Homolog annotation: Hit_ID=A2X857; Match level="QueryCoverage=100%, HitCoverage=100%, E-value=0.0, Identity=53%"; Hit description =Putative uncharacterized protein
  Pfam annotation: Domain name=DUF630; Domain location=1-57; Score =60.4; E_value=6.1e-15; Accession=PF04783.3; Description=Protein of unknown function (DUF630)
  Pfam annotation: Domain name=DUF632; Domain location=323-643; Score =341.6; E_value=1.3e-99; Accession=PF04782.3; Description=Protein of unknown function (DUF632)
  Pfam annotation: Domain name=Extensin_2; Domain location=33-338; Score=-136.3; E_value=0.059; Accession=PF04554.4; Description =Extensin-like region
  Pfam module annotation: Pfam domain module=DUF630::DUF632::Extensin _2; Domain location=1-57::323-643::33-338
MGCKGSKLDDQEAVALCRGRADLLAAAVRHRYALADAHGALADSLASVAAALHLLMTAPGQPRLALPAARKAADVDAPPAAAAASASPPHSSSHINFAPSSDSDSGSVTSSPPRRLAAGYDHLSHHHPLPFPHYGYGYAPEPPYGGYPPPGSLRLYYARSRPPPASVAIEQRAPPSERVYHGSVEPAGGHPQYYSYGGEPAGRAAAPPPPSPPRTTSWDFFNVFADYDVYDNYCYDDAGGVGATSAAYTPSRSSREVREEEGIPDLEEEDAVVKQVAGEFSAPGSGARSRRSSIGGVSSGIAQVDQEDSSVVDKQVIGGGNVAPAQRNTASSAPTPRRPVDTTDVAGEIKAQFVRAADAVRALSPLLEIGRRRYHHRSSVYHVSSSMVSAIALPHSDVGGIELLDVGSEKVLGGRSLCSTLEKLYVWEKKLYDEVKAEEKMRLLLTKNAKRLKYLDLKGAEAQKIDPIRNMVRKLSTKLRISVRVITKVSKKINRVRDEELWPQINALIQGFVRMWRDKLDCYQIQCQMISEAKNLDSIVPHGNNRDLALELELEMMKWIVNFSSWVNEQRSFVKALNGWLSLCLDYKVDETVDGVPPYSPGRVGAPLVFVICNSWSQAMDRFSEKEVVTSMQALVSSVRKLLDKQNVEQMEQTIATREREKWNKILEKKTVEINKEADVLNRKLALIPGRHSRLPSAQTYQEHLLDASSLQSSLHRVVQALESFTSNSLQAFEQTLRHAEEERSSRESAKVS

SEQ ID NO: 81282 - protein, 43 aa, Zea mays
  Coding DNA Sequence Number=SeqID_37907
MVDYAVNSYPFAFRWIVLQTHKKPNYVRYRFNAACAEDFYCRA

SEQ ID NO: 81283 - protein, 431 aa, Zea mays
  Coding DNA Sequence Number=SeqID_37908
  Homolog annotation: Hit_ID=A2XMG9; Match level="QueryCoverage=74%, HitCoverage=74%, E-value=2e-74, Identity=49%"; Hit description =Putative uncharacterized protein
MAGSLGCTRPLLQSQAWILAMKKRPIAGRDRARHQGAPGHRAPRPRARAPPAGRRGAPPPRAPVVGAGARVAALRRRARHHPAQGLGLLLRVRARGLPPARRCRHRAVPGAGLPPGLVDARVLLSSHGLACCFSPADDAYFVCNPATRAWHGDPCPPCRITWPRPAVVVLFDVGVYNFRCDYTLVCAFESASGSGIYCFTVFASGIGAWRVANAIAPAEGLVPASGVAAGGTAWWRTDISIAVGYNPAMGRVDLALCPGDSARWEIGSVVGRLHCVVRDGGNVLVFRLDDRRGGWELATAVSVCEILQRPWQPETTFELSDSEDDDEEEATGQAELDHTGAVIAVANRYSRSRVRVPRDDVRLLPFQCGDVEVVLLSGWRVVAFETVTRRRRETVLPVPDQLAAKDWGAVEYIAHTNTLELVGPVVFMEPP

SEQ ID NO: 81284 - protein, 117 aa, Zea mays
  Coding DNA Sequence Number=SeqID_37909
MRLSVVAWQAVPDPTTWTAPGPPRGQERQYTPRWRQWVRTPHGKVPDPWMHSPDHQARFRTSTGGVPVRSGGRQYARAAAYTMLIITRMLLVKLPLHADTTQAADIRAQGDCSGDQH

SEQ ID NO: 81285 - protein, 129 aa, Zea mays
  Coding DNA Sequence Number=SeqID_37910
  Homolog annotation: Hit_ID=Q7XBD4; Match level="QueryCoverage=58%, HitCoverage=7%, E-value=5e-12, Identity=42%"; Hit description =Cinful1 polyprotein
MVKHEISEIEKSRAQKNAEELRDSIERCYEISLECAKNLKNNFAKVGVYSFEQRLIHGDPDGVVQWISGEVKAFDEILTELSPPSKPYNPEADPAMKEALDMIRIANDAVDEAVDKLLNEADDKVLKED

SEQ ID NO: 81286 - protein, 130 aa, Zea mays
  Coding DNA Sequence Number=SeqID_37911
MGKNNKRKREPTPPSEDFGDSEYSEEEFSSESEGSPAPVPLCESSDDSNDSQGLAAKVWTYIRAVERSGLEGSDEEDSDGGGKDEDDDNNDEGGGGGDGDGSGRGGSGGGGSSGGSTRGGSGGGSNRASG

SEQ ID NO: 81287 - protein, 53 aa, Zea mays
  Coding DNA Sequence Number=SeqID_37912
MEALNVSWNGLLALVLNVEGIEESALSTSPRWSTRARVSLPLGPRKNQVLTTR

SEQ ID NO: 81288 - protein, 900 aa, Zea mays
  Coding DNA Sequence Number=SeqID_37913
  Gene Ontology: Mol. function=microtubule motor activity; Cellular component=microtubule associated complex; Biological process =microtubule-based movement
  Homolog annotation: Hit_ID=A2WQN2; Match level="QueryCoverage=99%, HitCoverage=94%, E-value=0.0, Identity=74%"; Hit description =Putative uncharacterized protein
  Pfam annotation: Domain name=Kinesin; Domain location=43-303; Score =225.5; E_value=1.2e-64; Accession=PF00225.14; Description=Kinesin motor domain
EYKYKMGASRPPSTPASKGEHTPMSTPGGSSRAKEEKIFVTVRVRPLSKKELAAKDDVAWECADTQTILYKGPAQDRAAPMSYTFGNKVFGPACQTDVVYEEGAKDVAMSALTGINATIFAYGQTSSGKTFTMRGVTESAVSDIYRHIDSTPEREFVIKISAMEIYNEIVKDLLRPDSVPLRLLDDPEKGTIVEKLQEEIAKDSQHLRHLISICEEQRQVGETALNDTSSRSHQIIRLTLESRLREVSGCVKSFVANLNFVDLAGSERAAQTHAIGARLKEALTHVEQSRNTLFFATCAKEVTNTAKVNMVISDKQLVKHLQTELARLESELRTPDRGSSSDILIMEKDRKIRQMEIEIEELRKQRDNAQSELEELRKKKVDHQPGWNPFDSPQKARKCLTFSGSLEPSNKNKMMMSSIRQSSTAPFMLKHEIRKLEQLQQQLEVEANRAIEVLHKEVECHKHGNQDAAETIAKLQAEIREMQTVRSENRDMEMITDEGNGSDLKDEISRLHMQDNDIAKLEAKLENVQRSIDRLVMSLPNVAMPCNETTPKSNRSKKKKRLLLPLGVSNNINRANLLRAPCSPHSSSRPSESEVENRAPEGDTMSVEGSEKATPTKSEDGDMSSRDETPRYRRSSSVNMKKMQRMFQNAAEENVRSIRAYVTELKERVAKLQYQKQLLVCQVLELESNEGKPNGEDNSGPLQDGPDSWDRLFKEQMQCIIHLWDQCQVSIIHRTQFYLLFRGDKADQIYIEVEVRRLVWLQQHFAEVGDASPGAVEDPAVSLVSSMKALRNEREFLARRMGSRLTDEERERLFIKWQVPLDAKQRKLQLVNKLWTDPNDQAHIDESAGLVARLVGFCEGGNISKEMFELNFAVPTSRRPWLVGWQPISNMIREKTQQLW

SEQ ID NO: 81289 - protein, 267 aa, Zea mays
  Coding DNA Sequence Number=SeqID_37914
  Gene Ontology: Mol. function=catalytic activity; Biological process =nucleoside metabolic process
  Homolog annotation: Hit_ID=A2Y8H0; Match level="QueryCoverage=94%, HitCoverage=93%, E-value=7e-99, Identity=63%"; Hit description =Putative uncharacterized protein
  Pfam annotation: Domain name=PNP_UDP_1; Domain location=42-253; Score= -42.3; E_value=9.1e-05; Accession=PF01048.11; Description =Phosphorylase family
MALSSSGHPATTRLLFSLLLVGSAAGLPERAAIDRVNRRGPSLGLVMSYVDEATALQASGYFQPWRALPFVDLYGRRYHIGSIRGVNVIYALTGQRRLNAAVTVQTLIDVFSVSGIVHYGTAGSCNDSISFGDVSVPRLVAYTGAWTWKVELERCNDTFCLPTAPRIVYGLKGSSADMFLDNAEYRKFLFQEFGVSTMDEESAAVVMTATSPGIPVIVFRGVSDLAGGEPTWSSTSLMNLASINALKVAVEFIAAVGKHSSTASVKR

SEQ ID NO: 81290 - protein, 1540 aa, Zea mays
  Coding DNA Sequence Number=SeqID_37915
  Gene Ontology: Mol. function=cellulose synthase (UDP-forming) activity; Cellular component=membrane; Biological process=cellulose biosynthetic process
  Homolog annotation: Hit_ID=Q9LHZ7; Match level="QueryCoverage=73%, HitCoverage=96%, E-value=0.0, Identity=88%"; Hit description =Cellulose synthase-like protein D2
  Pfam annotation: Domain name=Cellulose_synt; Domain location=310 -1179; Score=2142.9; E_value=0; Accession=PF03552.5; Description =Cellulose synthase
  Subcellular localization annotation: CTP_CleavageSite=34; ConfidenceScore=5.31e-01
MASTGGGGGLRHSNSSRLSRMSFSGGGSDDARAQAAAAPGGDRPMVTFARRTRSGRYVSYSRDDLDSELGAAGVDMSPDRDEQFASYHVHIPATPDNQPMDPAISARVEEQYVSNSLFTGGFNSVTRAHLMDKVIDSEASHPQMAGARGSSCAVNGCDANVMSDERGDDILPCECDFKICAECFADAVKNAGAICPGCKEPYKNTELDDVVGAAADATAGGRPTLSLPPPPGAAASRMERRLSIMRSQKAMTRSQTGDWDHNRWLFETKGTYGYGNAIWPKENEVDAAGGLGGGGADGQPAEFTTKPWRPLTRKLSIPAGVLSPYRLLILIRMAVLGLFLTWRIKHKNEDAIWLWGMSVVCELWFGFSWLLDQLPKLCPVNRATDLAVLKDKFETPTPSNPTGRSDLPGLDIFVSTADPEKEPPLVTANTILSILAADYPVEKLSCYVSDDGGALLTFEAMAEAASFANMWVPFCRKHNIEPRNPDSYFNLKKDPYKNKVRQDFVKDRRRVKREYDEFKVRINGLPDSIRRRSDAYHAREEIKAMKRQREAALDDAVEPVKIPKATWMADGTHWPGTWIQPSAEHTRGDHAGIIQVMLKPPSDDPLYGSTGDEGRPLDFTEVDIRLPMLVYVSREKRPGYDHNKKAGAMNALVRSSAVMSNGPFILNLDCDHYVYNSQAFREGMCFMMDRGGDRIGYVQFPQRFEGIDPSDRYANHNTVFFDVNMRALDGLMGPVYVGTGCLFRRVALYGFDPPRSKEHGGCCSCCFPQRRKIKASAAAPEETRALRMADFDEDEMNMSSFPKKFGNSSFLIDSIPIAEFQGRPLADHPGVKNGRPPGALTVPRDLLDASTVAEAVSVISCWYEDKTEWGHRVGWIYGSVTEDVVTGYRMHNRGWKSVYCVTKRDAFRGTAPINLTDRLHQVLRWATGSVEIFFSRNNALLASRRMKFLQRIAYLNVGIYPFTSIFLIVYCFLPALSLFSGQFIVKTLNVTFLTYLLVITLTLCLLAVLEIKWSGISLEEWWRNEQFWLIGGTSAHLAAVLQGLLKVVAGIEISFTLTSKSGGDDVDDEFADLYIVKWTSLMIPPIVIMMVNLIGIAVGFSRTIYSEIPQWSKLLGGVFFSFWVLAHLYPFAKGLMGRRGRTPTIVFVWAGLLSITISLLWVAINPPSQNQQIEGVNTDVATRVPRWEDQGLTLPLLSSPPHPYLPPSSRRPWRRRRTMRGLHRCPHQLLLVSPPPRSAPACRQSATASSRGLRSSLAVFSAPGARVAAAAREQKWGHVEGDEDGGEEGLGEALHRTRELVECAMFAAVAGLAYFLSNSLAIEVALLPFLHSPLRASSWTQEKGCMQEVAYGTASECDDTLLVTGIRNYFSCFFPLPIVISSLRWGLEASRKTVVATVLLLFTLSGPVKASTYLLMHGVVGLIMGTVWRLETNWIVSIILCSIVRALGACGYVLVSSFLIRENILALITVNIHASLTYILTAAGVNTIPSMGTIYLLFGTLLLLNCGFFVFLLHVMYTVFLAKLGIKPSLRSPRWLDRVM

SEQ ID NO: 81291 - protein, 141 aa, Zea mays
  Coding DNA Sequence Number=SeqID_37916
MGSEQWSHVANAVTALVGGDEKRVAAFIGVWKRPWGKFEAEIRDSTHNTWRLPRQVSDSTDRFVMATIFAMVDKVGQINGHGYSSGFPKCDAHDMQDKNGLERNNFNRQNNVTLIPSSTTVVHTSRSSTPSRWESGTVTFY

SEQ ID NO: 81292 - protein, 58 aa, Zea mays
  Coding DNA Sequence Number=SeqID_37917
MDDIVSPLPCCDEVAVLSRDLIAMDDIVSPSSCCDEVAMLVRGAEQQPVLSVELILMM

SEQ ID NO: 81293 - protein, 160 aa, Zea mays
  Coding DNA Sequence Number=SeqID_37918
MKSIKRSKSLLKEKIKKSETAVPVICSDNYLCDANRSGELPNNLYLLVAQFFLVEVWALDTMVVNSLEKGVLFPFFFGRQNDYNKPLSWNSHFKMALGSARALKKFVGSARRVIIELTRAEEEEGKSPRASSSSSVMQTGPTTAASAYAKFGKTKVIVSV

SEQ ID NO: 81294 - protein, 160 aa, Zea mays
  Coding DNA Sequence Number=SeqID_37919
MAAAMVRRSGEERAAWRRQWFGGGYGRAVGLVRERLRVLRVAQGERADLDEVGEVEEAKTWAKAVMLLIMCGDHHASGEAIKDVLSVRKKMYAVQSLERSPVAGKKNSSTRQLGKTSNEAAGQTDHASSREDAPQKSDRPHTRASGQKKGEGQRTETVAH

SEQ ID NO: 81295 - protein, 74 aa, Zea mays
  Coding DNA Sequence Number=SeqID_37920
MRLHILRGMKAEVILAFADISTHEFDIILLAEMCHLTLALPNAEIDAMELFLDADRRPTLHRNTLEPVNEAVLK

SEQ ID NO: 81296 - protein, 216 aa, Zea mays
  Coding DNA Sequence Number=SeqID_37921
  Gene Ontology: Mol. function=DNA binding; Cellular component =chromatin; Biological process=regulation of transcription, DNA -dependent
  Homolog annotation: Hit_ID=Q84UQ4; Match level="QueryCoverage=69%, HitCoverage=51%, E-value=7e-55, Identity=76%"; Hit description=DNA -binding protein-like
  Pfam annotation: Domain name=DUF296; Domain location=17-140; Score =192.3; E_value=1.2e-54; Accession=PF03479.6; Description=Domain of unknown function (DUF296)
NKPKPPVIITRESANALRAHILEVAAGCDVFEALTAYARRRQRGVCVLSAAGTVANVTLRQPQSSQAGPASPAVATLHGRFEILSLAGSFLPPPAPPGATSLAAFLAGGQGQVVGGSVAGALIAAGPVVVVAASFSNVAYERLPLEDGDEVAPPPPAGADQQQPGGVPFDPAAAAASAGLPFFNLPLGMPPMPMVGHGGWPAGSPGGAGVGRPPFS

SEQ ID NO: 81297 - protein, 115 aa, Zea mays; identical to SEQ ID NO: 44701
  Coding DNA Sequence Number=SeqID_37922

SEQ ID NO: 81298 - protein, 529 aa, Zea mays
  Coding DNA Sequence Number=SeqID_37923
  Gene Ontology: Mol. function=ubiquitin protein ligase binding; Cellular component=cullin-RING ubiquitin ligase complex; Biological process=ubiquitin-dependent protein catabolic process
  Homolog annotation: Hit_ID=Q6Z3T4; Match level="QueryCoverage=43%, HitCoverage=33%, E-value=1e-108, Identity=85%"; Hit description =Putative uncharacterized protein OSJNBa0025J22.9
MTIVRLTHGCYSLTLRMSRRGLRRWDWDARSSNEMAIESPVHTAIAEEVSEKWRRSRGSYAEPRKDGSLLVLPIGSLMACQRWYKSSSPMTPLCSLRPLCDNLLVNLRDPQRPICKMPIGCKMQNLPMRCATHCSILSSPVKICSKMQSLTAKGYELVSNGIDNHLVSVNLKNKALTPHMQKRAEGSPTPKSGRVLGPALGDQQQGTFSVNLWKVAFHDTFNRMCPLSAGGHECGCLPVLAKQVMEQCVARLDVAMFNAILRESASEIPTDPISDPIVNPKVLPIPAGDLSFGSGAQLKNSIGNWSRWLTDKLGIDHDDSEDIGDVEDERRAAAETKSFQLLNELSDLLMLPKDMLLEKSIRKEACPSIGLQLVTRILGNFTTDEFCPDPVLSTVLEELNSEEHPTFSVERFRTLQCSERSFHGEYKIHAPKRSTGAGATENSAVCPPPTAVPPDRVRLTAAESSLRRHRKLRLARPQGSAPASTSEDGLRLARPQGSDSASTSEESPPRPTLGSDRPRYRGGTSLPYP

SEQ ID NO: 81299 - protein, 102 aa, Zea mays
  Coding DNA Sequence Number=SeqID_37924
MEAQAHASCNRRAECFVHATAPPLAPPPCLLDCGTDTATRGDPEHDPAAPAWRDDNAPVFCSSNGSRTRNGRPANYSPRSINSAARQAAPLAGEANDASPSP

SEQ ID NO: 81300 - protein, 369 aa, Zea mays
  Coding DNA Sequence Number=SeqID_37925
MAVRPFTRWFGRRWRSACNRWAVTRSARGGAQLRGGWHLSAIARLQGFSSGSLAASPHQWSPKTVTTSSMVGRSKPGCGLCPALGFKDLHHPCWGRGRAELELYLPYKPAGHLFLQHSGERALTGLAEGADSDNEGPIGRQRRQLQHACWLWRSFRCHLPPLAECGYLPAVRAAVAPRAPGDRPRRRALPGQRLCSWAVLPSLRHDASARRSVLARPGGLEWGSAGGQVAVVVGAEVVAAGEGFSADEIVGAICVPGLRLFGFDSLSSPREWGRGRGPCHSSVCPEESLSSVGLATQGFAQLRNPRLLCDEPELEAAVSAWTEAELARKGLHRPRSRGLPRPRRRSRGGWNLAGSSTGGTDPGVRLPRP

SEQ ID NO: 81301 - protein, 204 aa, Zea mays
  Coding DNA Sequence Number=SeqID_37926
  Homolog annotation: Hit_ID=Q6J9V9; Match level="QueryCoverage=49%, HitCoverage=36%, E-value=1e-14, Identity=49%"; Hit description =Putative uncharacterized protein
MQAASNCTTGMHPFDFDASSVEAQAHTSYNRRADYYVRKTAPPLTPMPRLLDCGTGAATRGNPAHGPTVPTKHIGHRDRERGYSERDPSPRRKRAPSPLLIRGSKAGPSEGFDIRLRALGLRAHYWSEVRRLAPRKGLTAALGHSGSAPTTDQGFEGWPPEGFDSRLRTRRARDDSGYVRYMAEARATLPRYPRTFLRPAGAIL

SEQ ID NO: 81302 - protein, 104 aa, Zea mays
  Coding DNA Sequence Number=SeqID_37927
MAHLLPVIARRGHARAQAVVGLTGAHRPSAPEPSFRIGYARTQEGIISNAIRSTEEIRRASSMLHDQCLDPKRWCTARSTAATSVLSPPMVPLSLRVWLSVFGF

SEQ ID NO: 81303 - protein, 37 aa, Zea mays
  Coding DNA Sequence Number=SeqID_37928
  Pfam annotation: Domain name=zf-CCHC; Domain location=4-21; Score =10.4; E_value=0.04; Accession=PF00098.14; Description=Zinc knuckle
MEDVMCFVCGENGQFAKKCKNRKGKKNQPGSGKVQPS

SEQ ID NO: 81304 - protein, 216 aa, Zea mays
  Coding DNA Sequence Number=SeqID_37929
MDGKYTLQDNPILQARILTAKGSSSALGVDNTFGEARPSLGRRRGPRVSALKDNVITKPGPSPPGSSPRIRPEQEARPITPGPRPAGLRGHQPGPRPRQFNSGVDPANGRPGQAPADQASTATMNKNTGIQSAITKRNSGSTSATTTTTPALGGRTAAARASGRTLLQSCPRPRRRSRGEDKYKEPEARSADGDGDPVGNGDFSSRLHLGTDDRGR

SEQ ID NO: 81305 - protein, 243 aa, Zea mays
  Coding DNA Sequence Number=SeqID_37930
MAVADGQERRSRRQPSLRPIRGQRENPLSRREDDAPVFRSSNGSRTCDGHPANHSPHRINSAGPGKGDTPKRILPHEGTRLRASLLIRGSKAGPSEGFNSRLRARGLHTHYWSEVRRPAPRKGSTTALGYSGSAPTTDQGFEGWPPKAGNDLVTESHRREASSPRTPSPGDRLTGDTMFGAHRGQHGAFPPSSLQKGDAVAARTRAKPRKTVNSAPPDPGLGLGLSPGRRRTPLRPTQGSDSG

SEQ ID NO: 81306 - protein, 211 aa, Zea mays
  Coding DNA Sequence Number=SeqID_37931
  Subcellular localization annotation: CTP_CleavageSite=26; ConfidenceScore=5.25e-01
MSSRFLMHRVFPPSKPPDGGYPPSFRLVVGGTLLCGSWYLSAIIRLQGFSSASPAAPLRRRSPKMVTTSPWMGRSKPGCDLGPTLSFKDVHHPRWGGGRAEPELYLPRGFVGRPLLRRSRERALTGPAGGPDFDNVGLVDGRRRQPQRVGLVGLAPGASSCRKAAAAPCAREGRPRYRVLPGRRSCSGEVLPLHRYGTPARRSVPHSSGRI

SEQ ID NO: 81307 - protein, 517 aa, Zea mays
  Coding DNA Sequence Number=SeqID_37932
MVPKARGEALGAEGEVSALVLVRDEAGVATRRLKGVTEALSQATEALSQVADFASRTASGALTAAVSAEVERLRTQHADAVREKSASDSKCRKLTDRVAALEREKADLRRQLAAERREANEAAAKGQAAQAEAKLARAEGNLAKELAEHLQERLTALESRAKEAEAAMHAEAERTRTQLMDTYRELGARTGDFEEELLELPAVAGGLMSYASLVTCEGAMNALSREGCRHFEAFDQADEEFERDIYKVEDPIVKESAGALYDRMWGLYGREVVRERAETARAQAERGERVDDFGALNSALPDPEPTLAEAVTGVALEPTPETAAIATAAPTSAVAGEDLPPKVAEGAPDAPAAAVPSAEDPAAVAAEPTAEPTAEAPAASGPSQVQGFGSAHATATTEFLAATTAEGGNEYGGSVSEFFDFTDSRSSVEWTEESSEEDLDYFAALDVAAAEASPHAADAPDVPGPRTGRRRRRAVAKRRVSTEEGARLRVSRAGRQELLSLPAAASTGERELRSLFA

SEQ ID NO: 81308 - protein, 116 aa, Zea mays
  Coding DNA Sequence Number=SeqID_37933
  Gene Ontology: Mol. function=nucleic acid binding
  Homolog annotation: Hit_ID=A2YRG0; Match level="QueryCoverage=81%, HitCoverage=25%, E-value=2e-29, Identity=68%"; Hit description =Putative uncharacterized protein
MLSFILHNTFLFHALHNTELKLELHKYGGGLVDIDGRDILSTPDSKQAGGSAKAPLESAAASTALPPHADVYHLGIQSQRSAIASQRSGQLQRPIQKWKGPDKISRIYGDWIDENE

SEQ ID NO: 81309 - protein, 201 aa, Zea mays
  Coding DNA Sequence Number=SeqID_37934
MEEDMEVTEQEERGVVDSDVEGFSIALADLDPVQVNDLLGDEPIVDTSVTTQKTYPTINAIQLMDGVCHLNACILILYSWMTILNYFGNNIPINGSMSGCHREDHPRHRCPSGPFDILGLANDPYQTAILKRRTTSCKTTILQQKNDFSKSMVLIWHVVFSGNLPILRFLLDHGDDLHEEGSLEGHDRFTVLHITTEKDIM

SEQ ID NO: 81310 - protein, 194 aa, Zea mays
  Coding DNA Sequence Number=SeqID_37935
MRRPSSEVEADSEPWGRAKWRPSSEVEAEPDSWGRARRRPSSEVKAESDPWGRARRNFLWRPKLDLAVVSPLSIEWHSSRSGAVFPVRARVRIRCQSILALNAPAIRSVGVAIWPRLLLREDWASGERKKFQKGNPENLTEAALYGIVEDLCTFILKEVIPAEGKYHDASSTLAMPEFRILTEVSRLSLKRDNY

SEQ ID NO: 81311 - protein, 224 aa, Zea mays
  Coding DNA Sequence Number=SeqID_37936
MVVSPWWRFLQRIMPSLERKRFPVMEGTKGVSRLPPTILCSHSYIAFPQFDVKGDANEAALRHASKSSSDNDLVEEFIACDAGRDAAAFVREVEAKAVKIVDKYSTKTEMPRSLDIRGSNVRLNRVFEFNDLRYGPYPEEGSADAGDVDEHKIKCEVKRGAVDDGCSKGKVVVSSVKKTKKVETRMKNPTRVVKASGKFLVELADTCAEPEETMTSGVLWKPLL

SEQ ID NO: 81312 - protein, 150 aa, Zea mays
  Coding DNA Sequence Number=SeqID_37937
MPPSTTPSTTLVPPLPGKASQDEAVKALRWEWVEGCSLTIPLTTTCSRASASLMPTPGKLPEVGAFAKLVSSGASVNSTTSRLCTKKTELENKLEGLQTKRIHVVWEKSSAELMNRHLGEKTSNLEKENEGLSYQLVEVKETISQMHLDV

SEQ ID NO: 81313 - protein, 138 aa, Zea mays
  Coding DNA Sequence Number=SeqID_37938
MGKPVPSLLMLLLSRGRVPLDSPTRWQDGRPSHSSNHFLQRTCKNYATSKAEYTNTQLDLPGGHSVPTHINRPHRFPGNRSGLTALAYNASLTPTGRRAVTALVPTITGMGDLVSGRVRGYVCGQVHSGFNNIMLKRN

SEQ ID NO: 81314 - protein, 188 aa, Zea mays
  Coding DNA Sequence Number=SeqID_37939
  Homolog annotation: Hit_ID=Q6QP51; Match level="QueryCoverage=41%, HitCoverage=31%, E-value=7e-12, Identity=53%"; Hit description =Putative growth-regulating factor 1
  Subcellular localization annotation: CTP_CleavageSite=28; ConfidenceScore=5.20e-01
MQPACNRAKWARPSDSNAPNMEAQAHTSCNRRTGCYVRATTPPLAPLPRLLDCGTSTATRGDPAYDPTVPARRDGQYGRKWAGSIGGGSETGDIFGRRSGRRFAFAIMTASKKGTGKGEYPERDPSPRRKQAPSLPTDQRFKGWPLRGVQQPPQSAWAPRPLLVRGSKAGPSEGFNGRLRPLGLRAHY

SEQ ID NO: 81315 - protein, 273 aa, Zea mays
  Coding DNA Sequence Number=SeqID_37940
  Gene Ontology: Mol. function=carboxyl- or carbamoyltransferase activity; Cellular component=ornithine carbamoyltransferase complex; Biological process=amino acid metabolic process
  Homolog annotation: Hit_ID=Q8SA97; Match level="QueryCoverage=57%, HitCoverage=20%, E-value=6e-16, Identity=42%"; Hit description =Ornithine carbamoyltransferase
MAPPVTWSVRALGWARWRILRGRGRVCLPRPEVESEPLGRARRRPSAEARAESMRWGRAKRSSSSFGAEPESEPWGRAKRSSSSSGAEPESEPRGRAKRSSSSSGAEPESEPWGRAKRSSSSFGAEPESEPWGRAKRSSSSSGAEPESDPWGRAKRSSSSSGAETESEPWGQVKRSFLWRLGPDLAAVSLTLSSGTAVRAAQAALSSCQAGQCSGEATLALNAPAIWSVGVAIWPRLLLGEDWASGEPKLCADGGYQLRFRSLEGTPNYGPRQ

SEQ ID NO: 81316 - protein, 39 aa, Zea mays
  Coding DNA Sequence Number=SeqID_37941
MRELVVARCLQNDDSENPNISGVPCRKVVFKIQLVVSLL

SEQ ID NO: 81317 - protein, 136 aa, Zea mays
  Coding DNA Sequence Number=SeqID_37942
  Subcellular localization annotation: CTP_CleavageSite=62; ConfidenceScore=5.06e-01
MASANVGGTDDGLGDRSLARFIEGGGSKRSNSPPSASPTVPEGRLPYQQGRQYTSKLSTAVLSSSTWARALASRSQAMEQMGFAPIAAVIEPPKSLGPPTVVLVHWTSDNPVDAPDHLTSSVYEFFSLPKSVSPIT

SEQ ID NO: 81318 - protein, 170 aa, Zea mays
  Coding DNA Sequence Number=SeqID_37943
MAHTRKTARKSTGPLGVPHHQLAPRHVGSSNGSNEPIGDLEAKVEHLRTELHYQNRIWAQDSQPIDWAVNSRSIAWDSEAKARARVAELSAALDSLQVYCNTLHEEVHVLYARLHPDVPADAVAMGVGPSGTAGEGPDGELDLFRPPPSMNLADERSPASGNEETKDDED

SEQ ID NO: 81319 - protein, 63 aa, Zea mays
  Coding DNA Sequence Number=SeqID_37944
MCLGILPHRISLRYAYPVIVGELAKKTKKKKKLKKKELHHHLKTHLQGTAFILIFVEQSPTLL

SEQ ID NO: 81320 - protein, 71 aa, Zea mays
  Coding DNA Sequence Number=SeqID_37945
MAFSYLQPAARIWPWEMRLAASGMGGAAQGDLGVISKKNVDQKLIFVSVEWQIRQFLFMAVFRGLSGLKKI

SEQ ID NO: 81321 - protein, 38 aa, Zea mays
  Coding DNA Sequence Number=SeqID_37946
MCRAQRLWSMPKVKVKWVHADGLEAMKDVCRGMDSGTR

SEQ ID NO: 81322 - protein, 195 aa, Zea mays
  Coding DNA Sequence Number=SeqID_37947
MGTEHGVSGELQAGNLSGRPCPVRWGSARGPEARPKQLARRLLDAWAWVPKLACQKSEKRVHLARLHAACMAARPFCPLVWAKMGGRLGNRLSRLLGPDSRRSPWTAAPPEAGSGFAEDVVDVEGATAPFSVKTRACRIRSSCSVCFLWPPRPEEHTLAALAKLRLFSSCFEHLDSVGNRDVCVSESCFSRKGRV

SEQ ID NO: 81323 - protein, 60 aa, Zea mays
  Coding DNA Sequence Number=SeqID_37948
MKPEFRLILSLLETNEGKYDLIEREHEKEIHESMEDLAKTVRNLFTYLLNYHSTLQFVEI

SEQ ID NO: 81324 - protein, 62 aa, Zea mays
  Coding DNA Sequence Number=SeqID_37949
MTYRWHSNTCTSALARGLVEAQWRQHMVVEATTDPEVEEVARGSRLRYALQTFVEDQLLLEK

SEQ ID NO: 81325 - protein, 43 aa, Zea mays
  Coding DNA Sequence Number=SeqID_37950
MASSCCASSSVLQVLLLPLPLPLLVLVPPPTIFVQQPAIKTGS

SEQ ID NO: 81326 - protein, 237 aa, Zea mays
  Coding DNA Sequence Number=SeqID_37951
  Homolog annotation: Hit_ID=Q6QP51; Match level="QueryCoverage=20%, HitCoverage=22%, E-value=7e-14, Identity=73%"; Hit description =Putative growth-regulating factor 1
  Subcellular localization annotation: CTP_CleavageSite=65; ConfidenceScore=5.41e-01
MVAFRGGHPPFKGDSPHLHPQPSRTESSPTRSKVFPLRHGGWVPRVMQTGLGQKEPKPPCAVRVTAQRLQAFLHFRPDQRAKGRTAMQAACNRTEGAHPFDFDAFSMRAQAHTSCNRRAGYCVQETAPPLAPLPCLLDCGTSTATRGNPAHDPTVPTRHIGHGDRKRGYPERDPSPRRKRAPTPTTDQRFEGWPLGGVQQPPQSTRAPRPLLVRGSKAGPSKGFNGRLRPLRLRAHY

SEQ ID NO: 81327 - protein, 212 aa, Zea mays
  Coding DNA Sequence Number=SeqID_37952
MSSSLEEGTERWTSSGWSQKPPGRRDGGRGRVRVRFVVDGGDATLACVPVLFPNSTEKIRVWSTDTFLFLLRFFPSRARFSSALETKEHPAISRPHLPARVLLKRRSCRFPAGQATLTLPFPPAGEASKRISGERRDGYMWVLQTKKALRRASWGPPLKVASTGRWPSSGWSQKPPGRRDGGRRRVRGFCGGIAAWERVVGRFAAEGFAGGR

SEQ ID NO: 81328 - protein, 245 aa, Zea mays
  Coding DNA Sequence Number=SeqID_37953
  Gene Ontology: Mol. function=protein serine/threonine kinase activity; Cellular component=cytoplasm; Biological process=protein amino acid phosphorylation
  Homolog annotation: Hit_ID=Q5ZCI1; Match level="QueryCoverage=62%, HitCoverage=24%, E-value=2e-45, Identity=60%"; Hit description =Mitogen-activated protein kinase 10
AIYLPADQYLNHAEKSDMTIVEAFKRMQVVQHEEPEDVAEENGELDQQALRDPYFKGLARVEREPSCQPIRKVEFDFEHKRMSKEEIRELIFREILEYHPQLLSSYINGTERTTFLYPSAVDQFKKQFSHLEESGGNGPSVPTDRKHASLPRTTVVHSNPIPAKEQPLAVSSRVRPVSDDSCKNPWEKASGPGNVTRTSLTLQGLQAQADPTSIRLAPNACKVGQYQPIAGHGRLHAAVTEGNII

SEQ ID NO: 81329 - protein, 182 aa, Zea mays
  Coding DNA Sequence Number=SeqID_37954
  Subcellular localization annotation: CTP_CleavageSite=23; ConfidenceScore=5.19e-01
MANTRRGFIPASGVAAALPTVVSGFQRRNGRRREILWSRATLMPDSKLAHDPRSLVIASDHHPGIRTAGIAACDGGGVSTIFSSPSAPGEVPNDSVQLRIGGWREGGRRASAFKHHDEVRAEGTGRRKSRRGSHAVYADCYDEEEQSGEWVRSDSASALFLLVGPRKGKNRRRNGPRISFKF

SEQ ID NO: 81330 - protein, 288 aa, Zea mays
  Coding DNA Sequence Number=SeqID_37955
  Subcellular localization annotation: CTP_CleavageSite=60; ConfidenceScore=5.57e-01
MNPRRLHCRRLGVVHKRSAVVFLRRSRTSSILPPPPYRPRSQQNSQCGTGKSGRRVRRTESAARVSPRFTAFEDESDSGSPGALLLEDDPTVVYLTAYLLTLDAQYDFLARHHRQMIARAEDAEKLNRKIHVDLTSAQARVAALESREAIVVEALKQAKDEHVQKLMEAYLVTHNQRRALRIQEPASSNPVQPMKAEDPQILEGHPVSTRGEKKAWELPEGAIVLEGILVFPQAMNKQEHPESSQDPLPELFEPLTMKKILAPSLEVKEEAASTPPAPPPSEELQEPV

SEQ ID NO: 81331 - protein, 480 aa, Zea mays
  Coding DNA Sequence Number=SeqID_37956
  Homolog annotation: Hit_ID=Q2QN63; Match level="QueryCoverage=100%, HitCoverage=100%, E-value=1e-146, Identity=72%"; Hit description =Expressed protein
  Pfam annotation: Domain name=DUF1336; Domain location=223-464; Score =509.3; E_value=4.4e-150; Accession=PF07059.3; Description=Protein of unknown function (DUF1336)
MGACVSSSKKRRSQRSCCIYRRYRGKVLTNTPIVRVGEVENLASSGAAVHLGTSAAARRRSDGSNVTFHLTQLQWRHSELDTENGNVVCQEEAWFDSVSILGSDSDEDFSSVNGDFPAMSNSTGTQLMQCEDASSIADAIQKFELIFDGSSVAQAVGQYLKRDANKIEAERPRVASPEACDVSSGKVEDAKTRNEGSSRRYLIRPRAGLLVPQAGEKISEGCWSVLEPSAFKLRGESFFKDKKKSPAPACSPYTSFGVDIFMSPRKIHHIAQHIELPSVKPNDKIPSLLIVNIQMPTYPAAMFLGDSDGEGINLVLYFKLNDNFEKEISPQFHDSIKRLVSDETEKVKGFPLDSTVPFRERLKILAGLVNPDDMNLSSAERKLVQAYNEKPVLSRPQHNFYVGSNYLEIDLDVHRFSFISRKGLEAFRERLKHGMIDLGLTIQAQKQEELPEHVLCCVRLNKIDFVDNGQIPTLLPCDDD

SEQ ID NO: 81332 - protein, 26 aa, Zea mays
  Coding DNA Sequence Number=SeqID_37957
MRLHTLRDNVVLYPQRCLLLIKGSGK

SEQ ID NO: 81333 - protein, 312 aa, Zea mays
  Coding DNA Sequence Number=SeqID_37958
MEDYDLLESEQIREKDMRAKLQRGLYGLVGSELYEQGWPWRSEGSRSRCSPSSGSSKKKLNLFGFGLLDQGFFGIDVLEGVENSDATESVQDYAISEEIRAVSCEVGARPKVSDPKTVLEKGFQGREELGGMAEVNVLATKKVGGSILIDSQHSNVCDQDEVMERHEEELLELRGRANSEEIKEGDLDGTQLSEVGRVREDKRGSVEAGIVLSARGQSNVVPKNRKMASRSLEALRRREEEKGKLDSMDERGRGYFLDDEADPRWTKVASKKLKKNTRGRFQFWLQGLSLELQEMGYLSWRKPLKDPKRRTI

SEQ ID NO: 81334 - protein, 45 aa, Zea mays
  Coding DNA Sequence Number=SeqID_37959
  Homolog annotation: Hit_ID=Q7XBD2; Match level="QueryCoverage=100%, HitCoverage=2%, E-value=1e-07, Identity=66%"; Hit description =Retrotransposon Opie-2
MAIGDVRPHEQQEQDQPSSSTMVHPQLKMMDSEPFRVEEDLQDPD

SEQ ID NO: 81335 - protein, 193 aa, Zea mays
  Coding DNA Sequence Number=SeqID_37960
  Homolog annotation: Hit_ID=A2YE61; Match level="QueryCoverage=71%, HitCoverage=37%, E-value=4e-18, Identity=47%"; Hit description =Putative uncharacterized protein
MDLELEAAGSGGNGTRAVSLSVDSPTAELGRGDLGGSGGPSQDRTVSRRHVSLRLLGVGDGIAFEVVGRNPVVVRSPDGGGGGGSGTSRVFRRGEKGELRAGDALSLSLKAPAFWAVRAREGNGDGDADVDVEPAVLDAVARRERRTRERKERERERRVAEETMEVTEEEEGAAVDSDVEGFDIDLAAIDPVR

SEQ ID NO: 81336 - protein, 161 aa, Zea mays
  Coding DNA Sequence Number=SeqID_37961
MGAMYLVEIDNDQKNMWCPEREEDEERSGYRRTPALRTDAEWRHTGGRERGSFFVTGSGTSVIRGGVRSGRHTWREHCGVYCGLGERNEQMWCAKGGREEGEQWGKAAARPGGRFVRKGNGGRLPWMEGRGGSAAAMKGERGAAAIDGSFVRDSRWIWEIE

SEQ ID NO: 81337 - protein, 1244 aa, Zea mays
  Coding DNA Sequence Number=SeqID_37962
  Gene Ontology: Mol. function=ATPase activity, coupled to transmembrane movement of ions, phosphorylative mechanism; Cellular component=integral to membrane; Biological process=phospholipid transport
  Homolog annotation: Hit_ID=A2YE62; Match level="QueryCoverage=98%, HitCoverage=98%, E-value=0.0, Identity=82%"; Hit description =Putative uncharacterized protein
  Pfam annotation: Domain name=Hydrolase; Domain location=426-931; Score=7.7; E_value=0.012; Accession=PF00702.17; Description=haloacid dehalogenase-like hydrolase
MGRSGRRRRDRVRWSNLYTFSCFRAQQEHAGDAGPSSDGAGAVGGPGFSRVVYCNNAALQKPLKYITNYITTTKYNIITFFPKAIFEQFRRVANLYFLLTAILSLTPVCPFSPVSMIAPLAFVVGLSMMKEGLEDWRRFIQDMKVNNRYVSTHKGDGEFDYRHWEDLCVGDVVRVEKDQFFPADLLLLSSSYEDGICYVETMNLDGETNLKVKRSLEVTLPLEEDESFKDFQAVIRCEDPNPSLYTFTGNFEYERQVYALDPSQILLRDSKLRNTAFIYGVVIFTGHDSKVMQNSTESPSKRSRIEKKMDLIIYILFTVLVLISLISSIGFAVRIKLDLPRWWYLQPEKSNKLDDPSRPALSGIFHLITALILYGYLIPISLYVSIELVKVLQAHFINQDIHMFDEDTGNTAQARTSNLNEELGQVHTILSDKTGTLTCNQMDFLKCSIAGVSYGVGSSEVERAAAKHMASGADDHDIPLQDIWEENNDDEIELVGVNFSVGTNIKPSIKGFSFVDDRLMQGNWTKEPNSSTILLFFRILALCHTAIPEINEATGSIAYEAESPDEGAFLVAAREFGFEFFKRTQSSVFVREKHTSSKDTVERLHISICYPFVHICSLSLLLYFFVLLFEYNFREFKILNLLEFSSKRKRMTVILQDEDGQILLFCKGADSIIFDRLAKNGRMYEVDTTRHLNDYGEAGLRTLALSYRVLDESEYSLWNAEFLKAKTYIGPDRELQLERVSELIERELILVGATAVEDKLQKGVPQCIDRLAQAGLKIWVLTGDKMETAINIGYACSLLRQGMKQICLSIPTGEQVAQDAKKVAKESLLSQIANGSQMVKLEKDPDAAFALVIDGKALAFALEDDMKHMFLNLAIECASVICCRVSPKQKALVTRLVKEGIGQTTLAVGDGANDVGMIQEADIGVGISGVEGMQICYFFYKNIAFGLTIFYFEAFAGFSGQSVYDDWFMLLFNVVLTSLPVISLGVFEQDVSSEICLQENDTPMEPQSLATGCRSDYQRTILYLDVSQFPALYQQGPKNLFFDWYRILGWMGNGLYSSLAIFFLNLCIFYDQAIRVGGQTADIAAVGTTMFTCIIWAVNMQIALTMSHFTWIQHLFVWGSITTWYLFILAYGMTLRSGDNYQILLEVLGPAPIYWAATLLVTAACNIPYLIHISYQRSCNPLDHHVIQEIKYLKKDVEDQTMWKRERSKARQKTKIGFTARVDAKIKQIRGKLHKKGPSLTIQT

SEQ ID NO: 81338 - protein, 223 aa, Zea mays
  Coding DNA Sequence Number=SeqID_37963
MATPTRGKKRLVVDVEVDSEAEVASAFSRLSVSIVAKRTGDSCGKEHSPSKDLICAATSANPRRGSHIVVPFTPQQQTTCVVNQCSAPRSVSITRFETVRSDLAQAIAKMLAVGKELKDLAEDEIMASPDMAKEVSVNFAMWRVYELAQSLEDEAQRLEDLEAGPSPPLSECFNNQFAEDEDMGGGEWALDDVNSEEIDNASDATHELVGVVVFRRPLEVHVC

SEQ ID NO: 81339 - protein, 289 aa, Zea mays
  Coding DNA Sequence Number=SeqID_37964
MAEDIILDFSKLKKSDMMAIMILSNRVLSHQVTCASFKKASIIRVQFWYLVSDSLDYKGHMHLLAVVVVDEPAKLAAAAATKSSPSPKSRLSPAKGKARTGAAKTRQRRLRWVRSRRPEKNKGKRRKETALRVAVRVKTGHCNAGPPASLYCDYSSIAHAADCLKAGVRHQVPAPWFANSWPRRRLPAGARDPVCDQEPVTPSSSSRSPRRRLQPSSATIVCNLVCNCMEVENRAQSPDSSPGDESEPPHPSLPTISPVQRQDLPVRSSDLSDPQDFLLGDEHRMEVCF

SEQ ID NO: 81340 - protein, 102 aa, Zea mays
  Coding DNA Sequence Number=SeqID_37965
MGRMRRRSRSPPEDGAENLADRLEGEIYATLCDCGMDPDIAVERLISQVDATVLSPSVAPTAYSAANHRCAAAGDEERAPLPPAGRSRCSAIAPARKPVDAA

SEQ ID NO: 81341 - protein, 208 aa, Zea mays
  Coding DNA Sequence Number=SeqID_37966
MGRRGQSCMTSLVSGDIVKNRSESDAPCCEADTVDESEERESCVRYNLHIQITLACYCTPAENTIVANGQTAAAAEAGERMSSIASLENRCIKEPEKFSEAGTTSALLDDAWNDKHYNDQHSSNCFTWNFHCIINLFLHVFRISTLRINCIHVPNKPTTVFQLQAIQNLLDQLSSVPDQCAAIQWLKISLTHYTNKSNRSNYQPEKAH

SEQ ID NO: 81342 - protein, 252 aa, Zea mays
  Coding DNA Sequence Number=SeqID_37967
  Subcellular localization annotation: CTP_CleavageSite=24; ConfidenceScore=5.45e-01
MGAIKVKAQSTQGTRSCLARAQPRAKAADPGGFTSHPRAPSSNGHTFGSPEAQSSQRSNLGQIATPTDPSGAIGSSASPDPRARAQPRRWTTDSASPDPRARTASASEDGLCLARPRARTQPRPRKTVSASPDPGLGLNLDLERRTPPRPTPGLGASDTASASEDGLHLARLRARTQPQPRKTVSASPDPGLKLNLNLNLGRRTPPRPTPGLGLSLDLGRRTQPRPRGASASPDLGLGPTTSQGGHHYPTPS

SEQ ID NO: 81343 - protein, 201 aa, Zea mays
  Coding DNA Sequence Number=SeqID_37968
MKFKEQGVGFWVLVSNKKKKKKRDEQSSADSGPNRPNQGRNAPAPAEAEPLATVQRFTDIYKNNLALLSFLRSKSTAANRIETYSDKHLDQPEGAKTGGPEWRTPNWISPKQFPSNNFTNGALKRRGHGDRRLCGQRNVFPVMGGGLVQLDGSVSIKSMEGCWNNNTEGEIGPELSWPWQGVLRGGENRIGGSLKMELSSD

SEQ ID NO: 81344 - protein, 146 aa, Zea mays
  Coding DNA Sequence Number=SeqID_37969
MAARARYHGSAPPDHPPRYDYTKTLGSRLSCGNAYSPATSPGTLIESAALSEPATPVALSLPSHYDGGARFSWRGHGGLRFYTHGENGVRAGEDHAAEEPGRSWPRISRRASATRATQTILLRKGRLTAWARTAVNCRARARARDR

SEQ ID NO: 81345 - protein, 86 aa, Zea mays
  Coding DNA Sequence Number=SeqID_37970
MGVDNINNDNDELSKEVPLEDLSPTNSKGLEPEGCAYLGGVERARLDVSKEEEDNVKEYNGDNNDDDDGDIDNSEDDVATSRCCLM

SEQ ID NO: 81346 - protein, 62 aa, Zea mays
  Coding DNA Sequence Number=SeqID_37971
MNQGEFHTSPQASPGPLGEPQIEGGTELDGHDFFHFEYTSDLRAGWLQSSSCYRGCRYGKDY

SEQ ID NO: 81347 - protein, 88 aa, Zea mays
  Coding DNA Sequence Number=SeqID_37972
  Homolog annotation: Hit_ID=Q8SA97; Match level="QueryCoverage=38%, HitCoverage=6%, E-value=8e-08, Identity=76%"; Hit description =Ornithine carbamoyltransferase
MARSVRAQGRVRRRLLLRPRPGSGEDAIPPEAEVEAEPWGRARRRPSSDAEVESEPWGRARRRPPSEAEVEAEPWGRARRRPPSETEA

SEQ ID NO: 81348 - protein, 218 aa, Zea mays
  Coding DNA Sequence Number=SeqID_37973
  Subcellular localization annotation: CTP_CleavageSite=50; ConfidenceScore=5.05e-01
MRGKANCCCRARVQLSVLHPGDGCAARGPATSRSSLRRRLHNTSYAARAVAAVVGAEVVAAREGFSADETVGATCGRTPGSLALMACPRPSCGGVGEGLSTAAFALRPSGVEVAHTHGSGTGVPFVMAPWVREQVASQAKEVQRRLELGQVIRERDQPRSHAAKADPAEDPGCEGSSAVLASSFEVEILPPVSPSEAGPDSTEGGNDAEGAAAPSADV

SEQ ID NO: 81349 - protein, 127 aa, Zea mays
  Coding DNA Sequence Number=SeqID_37974
MVAHSFGFVASGMEAQAHTSCNRRAGYYVQETAPPLAPIPRLLDCGTGAATRGNPAHDPTVPIEHNDHGSISRGRKRDGTGKGDISKGILLREGSGPRALLLIRGSKAGPLEGFDSRPRALGLQAHY

SEQ ID NO: 81350 - protein, 84 aa, Zea mays
  Coding DNA Sequence Number=SeqID_37975
MSLTRGGPHDSGAAHESCRRRGSWAEGARIGPDSKPVQTLTQFYMCTLNPQYEMNMFILGDVASNVTKFLLEGILISKSLENFY

SEQ ID NO: 81351 - protein, 109 aa, Zea mays
  Coding DNA Sequence Number=SeqID_37976
MGRKRSSGAVDLGRVMWLVLARREIPGAVAAGRSWGSGAMEQEAEEAATKGREGGAVVGKGDGAESSQGGAPACSQGARPWLHCGRHGSRDTELALPCALRSMGRATLA

SEQ ID NO: 81352 - protein, 237 aa, Zea mays
  Coding DNA Sequence Number=SeqID_37977
MVTTSSVVGRSEPGCNLGPTLSFKDLCHPGWGGGWAEPELYLLHGSAGHLFFQLLVEETILQLCGGGVLQPCRGRRTVAAQLGRNILSSVLTFVARTGVRASRCALERPALAGAALVDRWTSPSVLTSRVLLLPLYRDLFIGNRIVCSSESYFSRKVMSEDSANDVVEKARKIVSAERSPSIKTCSVSGIAYPSVSYLSQKVMSEDPTFEVVEKHERHSGRRTFSKKNFDAGGVPPF

SEQ ID NO: 81353 - protein, 129 aa, Zea mays
  Coding DNA Sequence Number=SeqID_37978
MANWLTLATLTVVFTVFLSRFGGSPKFELASDPLRAILGGWVLDYPTELAVASIYRAQQRWPGNYSGDVRRSEEGGVHWCSEFVSYAVTVTPAINGEPSRSWRCGGSAWTHDARPEGGGQRHTYRIPPR

SEQ ID NO: 81354 - protein, 123 aa, Zea mays
  Coding DNA Sequence Number=SeqID_37979
  Homolog annotation: Hit_ID=Q6QP51; Match level="QueryCoverage=28%, HitCoverage=15%, E-value=6e-08, Identity=80%"; Hit description =Putative growth-regulating factor 1
MSCNRRAGYDVQETTPPLAPMLRLLDYRTSTASQGSPTRDPTVPTKGGDHRDRERGCCGKDPSRRRKRAPIPPTDQRFEGWPLGRVSIAAPERSGSVPITDQGFVGWPLGRVRQSPQSTQSEG

SEQ ID NO: 81355 - protein, 227 aa, Zea mays
  Coding DNA Sequence Number=SeqID_37980
MGSTSAALLLLSLEERGLVEIGALQPSLGFKDFLRAARLHSLTNGQFGGEKQAGPQPPPCPQLQGSSSFGLGRRSTLSGGLPPRGLVTLFFPQRLGEKGILQPCGGVFQPCGGSFPSFVRAAVVPRAGRPRPGPPRTVSRARGSPSTSYAARAVLVFWSDLDEDGSEDLLVRFGAAAVRRRGVGGFEPTVGALRLFGLNGLSSPLVWGHGRGPLHSSVCPEVIAVAV

SEQ ID NO: 81356 - protein, 166 aa, Zea mays
  Coding DNA Sequence Number=SeqID_37981
MIKCLGLGGREKTCACYRQTVSAGLGIGRGSSSTLGVVSTLGGTWSGLGRRPGRKGPPPKGGRQHRASRCLGQAPAAAATSSSAWKAAISRADEVSFRADSASIRANTAASGSGSSQSSQGFSKTEQERPRAARPTEPRDSYASGIRIPHSSPSAKGNSRSVKWFG

SEQ ID NO: 81357 - protein, 565 aa, Zea mays
  Coding DNA Sequence Number=SeqID_37982
  Homolog annotation: Hit_ID=Q6JAD6; Match level="QueryCoverage=99%, HitCoverage=96%, E-value=4e-95, Identity=53%"; Hit description =Putative uncharacterized protein
MPRTKNVSAPGGGDDEDPRRPFRQVKGKTIYLEQQEGRKKRRTDRAAHAAAAAAAAQAELGDQPQTPSDQIAYHVRRLASRPRSSTHTTASTPPPSLPAPVTPVAPSTTTAIPATSTTPASTAPPAPASAPPVPPPRFRERDETEVQPLAADPRLFDLQRATAARMSAQIALRVHRLLDLLAFLLAAGADSEAHLTYLPGLLTLLTTSGRWVATFTGRLTTAAKYLFELITRTLLPRMGYREATTHIQLWLLGALVSHSEFDVVDFLICEIEDTVLDGIRARRQLPYAHYLCHIFAQLIQPPRFQGTLEASRLVFGSYRPAPETPVPASAPVFDSQAEDAALHQFDTQDTTVVVDDDDDDFGVPPPPPMPLRSHDHEAGSSSDAPAAPPAMDPALASILQSITQQQAHLAAEQARLSERMLSMFQNMQDRQDALQHSYSRIRLRAGAFMALMLHHSGVSVPPVQSAPPPPLQAPVVPAIQTGPPIPSVGPSLLRPATLAFTSPVLSSVCPQPPVPPASAVTTTAVAVSVTTSVLAAPAARPQSESVPALASTADPGSETDSDPPP

SEQ ID NO: 81358 - protein, 355 aa, Zea mays
  Coding DNA Sequence Number=SeqID_37983
  Homolog annotation: Hit_ID=A2YGC2; Match level="QueryCoverage=40%, HitCoverage=65%, E-value=2e-08, Identity=29%"; Hit description =Putative uncharacterized protein
MGSRHSACSAKAECRGSFVLLLLVTLLRGEMARLRHTARKSVIPFLPSRLAERPLRRTVSGQSSHLERLHHRLHEEQERQHQQREQQGSSSLLEQEVESAPPAPPWDAPAAGGGPGGDPNDDDDSDHSTEPSEPQEAEGWFARPITRDAARGCHFHDALDTLLRRAFDRHTWSIEYRCVVYQHSRGRYPDRWEATCLVCRPEDDLRGAEAFSEHYSISERDTAEAAMQDEARRALSQYCSLFNGVADGLNLRYYPRRPTGSAESVVVSPIGEDNPRLSSTVNLVAVLNTELDHSLDELSRARTEIAELRAELAERRHLEGGSPAPVGTQYLYRSPPRGHHTYGSPACKTRIDLDP

SEQ ID NO: 81359 - protein, 347 aa, Zea mays
  Coding DNA Sequence Number=SeqID_37984
MQVVELVPCARNKWGNWNEFWFYVAEGAVEGHEGLPVSEMCSHFYSAYPPFEVAEEDADEGALRCAAGLSSGRDLVEEFVAYRKVDEDVRGPGGKDVFARAPGVFGSDAEGSGEGQLAMVAPAAATTTAAAVPKAKGGALSVGGEVSALAVVRDEAGAASRRLKEVTEALNQVADFASRTASGALTAAVAAEVERLRTQHADAVREKSAADSKCRKLADKVATLEGEKADLRRQLAEERRETNEALVKAQAVQTEANLARAEGNLARETNEQGQERITELEKCVERAEARSRAEAERTRQILIDTYRGLGAGTGDFEVPDREPGLRCLEWVQEELQALPLVVEGFMA

SEQ ID NO: 81360 - protein, 71 aa, Zea mays
  Coding DNA Sequence Number=SeqID_37985
  Subcellular localization annotation: CTP_CleavageSite=56; ConfidenceScore=5.18e-01
MACGGNAGLATNSVPWFGIPKLQYAACPRRIPRVGAPPRVQRRRRAHGKVKVPEKRAGVLGEVVALAPEFR

SEQ ID NO: 81361 - protein, 44 aa, Zea mays
  Coding DNA Sequence Number=SeqID_37986
MGTNGHLDLDTGGKILDQKAHQFAFGLGVWEGRIGATPPPPPWR

SEQ ID NO: 81362 - protein, 205 aa, Zea mays
  Coding DNA Sequence Number=SeqID_37987
MAVRRGILMVNTRKGGGIDLPPNRHTRRIFRQPQQQQPEMDPPPPPPAGVGATVATQMRIMQQMTDTMADMHAQSERIYAGRCAKSERRYARCRRFDPGGSLDRRVNCRRVPQPRWVGARRSAKGGNQREAGVKGETRGLRVCPAPRSGALAVGGYKRPRGREREACTCRPVLPARPTLCKMALDLPFIGVRRGSRCTMGDVAVC

SEQ ID NO: 81363 - protein, 23 aa, Zea mays
  Coding DNA Sequence Number=SeqID_37988
MEENDLLGEDLVDYEASPERPES

SEQ ID NO: 81364 - protein, 332 aa, Zea mays
  Coding DNA Sequence Number=SeqID_37989
  Homolog annotation: Hit_ID=A2YLP5; Match level="QueryCoverage=21%, HitCoverage=20%, E-value=2e-30, Identity=93%"; Hit description =Putative uncharacterized protein
MAPPVDVADLCPRQGDVGAPPKPRAESEPWGRARRKSFGRGQGGVRALGGRARRSSFGRGQGGVEFAVFRVLARVRALGSGGAEFAVFRVLARVRALGSGGAEFAVFRVLARVRALGSGGAEFAVFRVLARVRALGSGGAEFAVFRVLARVRALGSGGAEFAVFRVLARVRALGSGGAEFAVAPLARPDCLSDSLCRVAPQSEWRRRRCPSVRLLYADGGYQLRIRRLEEKLFHLRLAAILDDVEAEMSSEKQRRESAPPIISSHKRAEKAQYFLAEVMHNFNGTTEKELSLIVGDYVVVRQETGQNGRHQLYRKTHNDSEILEVGRAVQQA

SEQ ID NO: 81365 - protein, 60 aa, Zea mays
  Coding DNA Sequence Number=SeqID_37990
MATSGLMVGESELGCGLCPSLSLKDFHHQGWGGECAELSCRGLNMYVILARSRFFLIFEH

SEQ ID NO: 81366 - protein, 82 aa, Zea mays
  Coding DNA Sequence Number=SeqID_37991
MGAQKQRANRQSNFGPTCSGQTDLSADIRYPRVTDVDTVCYPWRVTGTGLDIGYKSRIWMSRDTIRGYFTRCHPYLQARILP

SEQ ID NO: 81367 - protein, 207 aa, Zea mays
  Coding DNA Sequence Number=SeqID_37992
MALLDLRERFQLEVALNLVRNPLGWGMLAFAGRTCVGVSSLGDLAAEEFVFFVSKLPSELALSIPSFLVQLLEGLGLQPLLVVSCFILQAAIIAYLCGMFVEATLLPTSSSSIRGEDDYQPREGSSHPQRPLCRRPRCSDAAQGDEDRGEDLFTRAEVVAVAGKPKVQRWPPPLALLDPPSDTSHPLIHARYLRGLVWEAKLCVRTP

SEQ ID NO: 81368 - protein, 460 aa, Zea mays
  Coding DNA Sequence Number=SeqID_37993
  Gene Ontology: Mol. function=structural molecule activity; Cellular component=cytoskeleton; Biological process=multicellular organismal development
  Homolog annotation: Hit_ID=Q6Z256; Match level="QueryCoverage=86%, HitCoverage=94%, E-value=0.0, Identity=90%"; Hit description=Actin -related protein 2
  Pfam annotation: Domain name=Actin; Domain location=21-432; Score =441.6; E_value=1.1e-129; Accession=PF00022.10; Description=Actin
MAWGARKVGKNCYFSPFNVGSLNIQNLQYVKCGFAGENFPTSVFPCVVGRPLLRYEESLQEQELTDIVVGAACADLRHQLDVSYPVTNGIVQNWDDMGHIWDHAFYSELKVDPSECKILLTDPPLNPVKNREKMIETMFEKYNFAGVFIQIQAVLSLYAQGLLTGLVIDSGDGVTHVVPVVDGYSYPHLTKRMNVAGRHITSYLVDLLSRRGYAMNKSADFETVREIKEKLCYISYDYKREYQLGLETTILVKSYTLPDGRVIKVGTERFQAPEALFTPELIDVEGDGMADMAFRCIQEMDIDNRMTLYQHIVLSGGSTMYPGLPSRSVDNIEKYNLAKKITKRPLHILKQVTTFFTRLEKEILDRYLDVVLKGNKDGLKKLRLRIEDPPRRKHMVYLGGAVLAGIMKDAPEFWITRQEYQEEGLDCSDRFLYHGMHRIKKEVRKFICGNMALFKNLEQQ

SEQ ID NO: 81369 - protein, 20 aa, Zea mays
  Coding DNA Sequence Number=SeqID_37994
MTYNIHVIRFNAMGHSAKRV

SEQ ID NO: 81370 - protein, 411 aa, Zea mays
  Coding DNA Sequence Number=SeqID_37995
  Gene Ontology: Mol. function=nicotianamine synthase activity; Biological process=nicotianamine biosynthetic process
  Homolog annotation: Hit_ID=Q8LT22; Match level="QueryCoverage=79%, HitCoverage=90%, E-value=1e-140, Identity=79%"; Hit description =Nicotianamine synthase 3
  Pfam annotation: Domain name=Methyltransf_12; Domain location=214 -313; Score=7.7; E_value=0.077; Accession=PF08242.3; Description =Methyltransferase domain
  Pfam annotation: Domain name=NAS; Domain location=86-366; Score =615.6; E_value=4.5e-182; Accession=PF03059.7; Description =Nicotianamine synthase protein
  Pfam module annotation: Pfam domain module=Methyltransf_12::NAS; Domain location=214-313::86-366
  Subcellular localization annotation: CTP_CleavageSite=49; ConfidenceScore=5.14e-01
MASVGLPCPASCHLIYIYAASGRPLQSSKTKQKQPSSLQRLTPPHSTVMVVMGKEQQHEEEEVQGKVVQEEVQVVQETVVPVPSEEDKEAEAALVHKISSLAAAIAKLPSLSPSPEVNALFTELVTACIPRSSVDVERLGPELQEMRGGLIRLCADAEALLEAHYSDLLASFDNPLEHLSLFPYINNYILLSQLEHGLLARHVPGPAPARVAFVGSGPLPLSSLVLAARHLPGASFDNYDICGEANDRARRLVRGDGALQARMAFRTSDVADVTRELASYDAVFLAALVGMAAEEKARVVAHLGRHMAPGAALVVRSAHGARGFLYPVVDPEEIRRGGFDVLAVHHPEGEVINSVIIARKPVAVDAHATGGVGHAHAHAHGAVLNRPCLCCEMEARAHQKMEEVAVEQLPS

SEQ ID NO: 81371 - protein, 403 aa, Zea mays
  Coding DNA Sequence Number=SeqID_37996
  Gene Ontology: Mol. function=transcription repressor activity; Biological process=regulation of nitrogen utilization
  Homolog annotation: Hit_ID=A2YLP5; Match level="QueryCoverage=61%, HitCoverage=71%, E-value=1e-117, Identity=87%"; Hit description =Putative uncharacterized protein
  Pfam annotation: Domain name=Epimerase; Domain location=6-236; Score=- 67.3; E_value=0.037; Accession=PF01370.12; Description=NAD dependent epimerasedehydratase family
  Pfam annotation: Domain name=KR; Domain location=4-124; Score=-85.4; E_value=0.022; Accession=PF08659.1; Description=KR domain
  Pfam annotation: Domain name=NmrA; Domain location=6-215; Score= -22.6; E_value=4e-07; Accession=PF05368.4; Description=NmrA-like family
  Pfam module annotation: Pfam domain module=Epimerase::KR::NmrA; Domain location=6-236::4-124::6-215
MEKSRVLVVGGTGYIGRWLVRASLAQGHPTLVLLRAEIGLDIDKLQMLLSFKAQGARLVEASLEDHAGLLAAVAHANVVVSAMSGAHIRSHNSPKGDTGRELADALARVAFQERVGVKGDVRQVDFQKDIVRAAEGLVSIGNKHIEVGTKFSEDCYRYGSENNASDEALRKAASLYGGALINIEKEYEDFNRILSSQTIDPLRAMAIGGPLEDARGLAQRYSRMRHEAEILSTEIARRKARVREAPIAEHTTKLQQSEARMIEHKASMAVLGKEAAAALAAVESQQQRVTLQRLVGAAEAEKLFHLRLAAILDDVEAEMSSEKQRRESAPPIISSHKRAEKAQYFLAEVMHNFNGTTEKELSLIVGDYVVVRQETGQNGRHQLYRKTHNDSEILEVGRAVQQA

SEQ ID NO: 81372 - protein, 619 aa, Zea mays
  Coding DNA Sequence Number=SeqID_37997
  Gene Ontology: Mol. function=oxidoreductase activity; Cellular component=extracellular region; Biological process=metabolic process
  Homolog annotation: Hit_ID=Q8H5F0; Match level="QueryCoverage=100%, HitCoverage=100%, E-value=0.0, Identity=83%"; Hit description =Betaine aldehyde dehydrogenase-like
  Pfam annotation: Domain name=Aldedh; Domain location=47-521; Score =476.0; E_value=4.9e-140; Accession=PF00171.13; Description=Aldehyde dehydrogenase family
MAFWWPLLVLAAAYALCRLLLFLIPPTVPSIDVDASDVLAKEDSFIYIPRRGKSTQTDKVQCYEPATMKYLGYFPVVTPDEVKEHVAQSRKAQRIWAKSSFKQRRQFLRILLKYILEHQDLICEVSSRDTGKTMVDASLGEIMTTCEKITWLLDEGEKWLKPEYRSTGRSMLHKRAKVEFYPLGVIGAIVSWNYPFHNVFNPVLAAVFSGNAAVIKVSEHATWSGCFYFRIIQAALSAVGAPENLVHIITGFAETGQALVSSVDKIIFVGSPGVGKMIMKRASETLIPVTLELGGKDSFIVCEDVDLPSVVQVATRAALQSSGQNCAGAERFYVHDDIYSAFVSQIVKTVKSISVGPPLSGRYDMGAICMIEHSEKLQNLVNDALDKGAEIAVRGSFGNLGEDAVDQFFPPTVLVNVDHTMKIMQEETFGPIIPIMKFSSDEEAIKLANDSKYGLGCAVFSGNQKRAIRIASQLHCGVAAINDFASSYMCQSLPFGGVKDSGFGRFAGVEGLRACCLVKSVVEDRLWPYIRTVIPKPIQVYFFPSPHDTSTLDLHGLLGSCGSAMYPVSEHGFEFQQLLVETLYGYSVWDRLRSLVNLIKMVTEQNFAPTSNATTKKRR

SEQ ID NO: 81373 - protein, 90 aa, Zea mays
  Coding DNA Sequence Number=SeqID_37998
MAATSKHGIYEHALSLLVCSSLLNRLPPRTPNLPHQIYLQQHLRQREEPTCDVGPEMSPSVGHLKGYDYTGTCFMTMRLRWVGDSWPHDK

SEQ ID NO: 81374 - protein, 49 aa, Zea mays
  Coding DNA Sequence Number=SeqID_37999
MATSERDMVSTGVAKVVRDLLYFMRREVLHQQGLFYNAVHHKRFLEPPV

SEQ ID NO: 81375 - protein, 116 aa, Zea mays
  Coding DNA Sequence Number=SeqID_38000
MGTAAHSALGLGGARARGWGRRRLASETVALGLGDGEGDGGALGDGHGGALGLGYGEGDGGALGDGLGGARARGRGRGRWRTRRWARRRSGSGTGWRAPRMTVALGDGDGRPARRR

SEQ ID NO: 81376 - protein, 41 aa, Zea mays
  Coding DNA Sequence Number=SeqID_38001
MTMGTWLTTDRRAYTTSHSAYTTSLAPVLANDNKTKGDLTV

SEQ ID NO: 81377 - protein, 177 aa, Zea mays
  Coding DNA Sequence Number=SeqID_38002
  Subcellular localization annotation: CTP_CleavageSite=19; ConfidenceScore=5.23e-01
MAAGALRSPTATGAGRVCSAAQASTEPAPAPLARRRRSIAPTTHCTGHGQAPAHFMYGRGALRRGLQRVHAIASAVTLRDGDRATGAASSPTTPRCRTATPELESGRALYHVASNFTELVPIHMRAVFVVVFFFFGEVLIRGLVLQTSSEKFSIYRWPMQVALLLGRIHAYEHDCAL

SEQ ID NO: 81378 - protein, 839 aa, Zea mays
  Coding DNA Sequence Number=SeqID_38003
  Gene Ontology: Mol. function=heat shock protein binding; Cellular component=endoplasmic reticulum membrane; Biological process=protein folding
  Homolog annotation: Hit_ID=Q5QMV0; Match level="QueryCoverage=7%, HitCoverage=15%, E-value=7e-21, Identity=83%"; Hit description =Putative Altered Response to Gravity
  Pfam annotation: Domain name=CSD; Domain location=58-128; Score=14.6; E_value=0.0001; Accession=PF00313.13; Description='Cold-shock' DNA -binding domain
  Pfam annotation: Domain name=DnaJ; Domain location=588-623; Score =5.4; E_value=0.0012; Accession=PF00226.22; Description=DnaJ domain
  Pfam module annotation: Pfam domain module=CSD::DnaJ; Domain location= 58-128::588-623
MVTFEQKGVERWEKRMEMLDRLGSRLEVMEADQLRLKEQADRVATATRKVEAMSSKKKMKGTLEWFNATTGSGFVTSVDHGEFLYFLQPSLKSHELSGDQNLKIGEAVEFGIMGDRYGYLRAFDITPLGGGMLSGGFDIYASWNNNLDWVVENSDDDHSGHSCGPVLLESMDPPVFDEMSHPCSEESGHESGVNLEGKDDQAHINCEQDVVHDALWMLVGMSHQASIQPVFNVVGLTAAWDEEMQSKTHMQEGLLKQLAQGGEDLKESASKGAHVEGEASWPDPTSEATEVIKNGGSMEDFLPASACSVLGGRLEKEQNAEGRVAVSKVKELVEGFSSGSVSRDFISSRVGQMIFDESEGLLMSGPYGDYVQYKNAALLYNVRDHYGRQNKGSVQLGITGLTQWWLNAFSSGNSGMAVQSQPNIQRNSMNKLRGLSFRMVYDKGKENIVADTFSQGGSIMATYGDLVVQIDIPKFVVTNSYALDMLPIVTIHSPHGAVYSVQWGKVKRLHQFGKQCLVSEQAKEEQQLFGGFWHLFSVLQGIWEGLKSDFLEDFLIPEGYDFIMMLQCVAQDHLPRWKTLLPFVELWYRPDKNASNPEASELFKEVAYSYNILSDPEKQRQYDNVEFEALENEGVDMEIELSHLGTPLWYLVAKDQSDPLVAGRRSVINSHRKMERSGWWGDHEGQSTSVPSIVSGHEGALETRLGRAVRSIEQQQRRCLHLVKPAVGKQGTTPIHGGGSTTSDRAVAGSRTLATGLQPATTKAVTPVNQDMALVVVAALLGPTPRSPPVRRTRSGSNVARVSLVWCFLAWRQHAKGGVQRHEHLAADDVRHSKTERRK

SEQ ID NO: 81379 - protein, 178 aa, Zea mays
  Coding DNA Sequence Number=SeqID_38004
MWPTARDVSQRVEPDVRPLGRTFIAEEARRLSSWQVMCRLSIKYTMSTPLTSDVPHQHLMCPVHSADGRRPSHPAGDVPVRSGGSRYARATTYIVFIITREASVARQYYACCGYQDARRLCTGVCYSSSPLIQKLFLKIKNHFNFIWLTMLSFPAELNFSCDELLQLQLSFSAELDFS

SEQ ID NO: 81380 - protein, 326 aa, Zea mays
  Coding DNA Sequence Number=SeqID_38005
  Homolog annotation: Hit_ID=A2WY58; Match level="QueryCoverage=30%, HitCoverage=20%, E-value=1e-28, Identity=69%"; Hit description =Putative uncharacterized protein
  Subcellular localization annotation: CTP_CleavageSite=52; ConfidenceScore=5.41e-01
MPRFLHALPPPAIASALPLRRNQLHRPRRRAHTPPGPNCCPRTSLPLVHPILLATLAPPRANPSLLFTLPCSVVGETTQIYYELARLGADMRVIEGRRAALARNATRATAEATGDGLEPSTPAPWRGHRGQATPRTSSPRRQQNLLPPSAEGRLAVATSALASDPRSRFTATNSLPRSIFFCLNSVLWEQRARDGGGAQPLGVSSVSIVICNKALMTSVGFNFPSSDGVARLNSFLRRQRAVVAVLAAGDRTAERPTKLVLSDASKSVSLIVAAICYAWMLPSKGDGQAAVLVVNMRRSRMAWCRQAAWLLYHVGVDASALLFTDE

SEQ ID NO: 81381 - protein, 489 aa, Zea mays
  Coding DNA Sequence Number=SeqID_38006
  Homolog annotation: Hit_ID=Q6QP51; Match level="QueryCoverage=40%, HitCoverage=88%, E-value=3e-11, Identity=33%"; Hit description =Putative growth-regulating factor 1
MKLRSSNGKSGGLRVFPIRGLGRWKDTMHKGGRRHGRLPRGHPPFKGDSPYLRPQPSWAEPSPTRSKVLPLLRGGWVPRVMQAKPPRAVHATARRLRAFLHFRPDQRVKGRAAMQAACNRAKWAYPSDFQRTQHGGLGPRVMQPACRLPRASNCTATRTTTTPPRLRNQCHNSRQPYGQRENPLSQREDGAPVFRSSNGSRTCNGRLANHSPRCINSAAGQAAPQAGEASDALPSPQGPRQKRHAASFDFAPSLPTDQRFKGWPLEGVQQPPQSAWVPRPLLVRGSKAGPSKDSTAASSHSGSAPTTDQGGNDLVTESHQREASSPQTLSKGDRVRQITRSAACAAPTVVPLGRVRLTAAKSGLRRHRKLRFARPQGSDSGSAPEDGELRSARPQGSDSGSASEDGELRSARPQGSDSGSAPEDGELRSARPQGSDSGSAPEDGELRSARPQGSDLGSAPEDDELRSARLQGSDLGSAPKDDELRFARP

SEQ ID NO: 81382 - protein, 327 aa, Zea mays
  Coding DNA Sequence Number=SeqID_38007
  Gene Ontology: Mol. function=nucleotide binding; Cellular component =intracellular
  Homolog annotation: Hit_ID=Q5JMX4; Match level="QueryCoverage=79%, HitCoverage=38%, E-value=1e-123, Identity=86%"; Hit description =Putative GTPase
  Pfam annotation: Domain name=EFG_C; Domain location=120-210; Score =55.1; E_value=2.4e-13; Accession=PF00679.15; Description=Elongation factor G C-terminus
  Subcellular localization annotation: CTP_CleavageSite=61; ConfidenceScore=5.03e-01
MQLGRVHPSFSWNGFIPQNRLAVGLREHCAAVQNAMSSACAANQTAKGGSLTGAKIGNRLMAEAETNLAINVLPGPLSESYEVQGRGELQLGILIENMRREGFELSVSPPKVMYKTERGERLEPIEEVTVEVGEEHVGFVLETITHRKGEVVDMGPVPGTTGRTRIFMTCPSRGLVGVKGIFSSFTRGTGFMHRAFQAYAKYRGPLGSVRKGVLISVGKGLITSHALMSLEARGILFVSPGMEAYEGMIVGEHSRDSDLEVNPVRTKELTNIRAPGKDENVRLSPPRLMSLEEAIGYVAADELIEASIMFLILERTLQKFQLLILFL

SEQ ID NO: 81383 - protein, 202 aa, Zea mays
  Coding DNA Sequence Number=SeqID_38008
MNRRPAFKVPLQMEPRFHLRRYEQPHTIGGTAEQQKTDERLAVARSSSDDDDDFCSGGPNSSSDDLRADAAAMRPSPMPSLKSQGRAEGHRVGDQSVGGTGYLVGRETSFGCHGGRRRWERLRSHSAQRARHAVAANATNGERPSPRSLREGAGRRPRRDRPQLASLSAPARMINIPEAEGGAGAAARLASPHPGVGGHRLG

SEQ ID NO: 81384 - protein, 106 aa, Zea mays
  Coding DNA Sequence Number=SeqID_38009
MEERVAGPGAEEAGVEGVEESGCQGDRVKSEIGETFTSNLINGDKRDREIENFTERPRLGQISRHNTKLTPGVSQRRRRRDGRFLLNLVGVAAKLNHRGVAMTHHD

SEQ ID NO: 81385 - protein, 83 aa, Zea mays
  Coding DNA Sequence Number=SeqID_38010
  Subcellular localization annotation: CTP_CleavageSite=48; ConfidenceScore=5.64e-01
MAAAGQWELPPNPSQWNSSDTTSKGAPMATSLAAALLNSLNASLLCPRRAVRRRPAPLRPWTPRPDRRLPLLSPPHGATLIVA

SEQ ID NO: 81386 - protein, 118 aa, Zea mays
  Coding DNA Sequence Number=SeqID_38011
MAPPRCAHTLLHLLLGLLSATGGAWSCLAPIKEAADLSSMAVFPIAAGVQIFPMAPSPLSSPSTSTAPPRHQPPRTPAAPLDFPSRSPVLPASTLHDAHSLALILATSLCNGLAVGLA

SEQ ID NO: 81387 - protein, 97 aa, Zea mays
  Coding DNA Sequence Number=SeqID_38012
MAKPGHTTAPGPLLRKQQPTRPSIPVAGMEAKSHHQPNQGGTCKNYATSKAEYTNTQLDLPGLTALAYNAPLTPVAAVQWPHLYPPYLEWETQSQVA

SEQ ID NO: 81388 - protein, 83 aa, Zea mays
  Coding DNA Sequence Number=SeqID_38013
MAPPRCAHTLLHLLLGLLSATGGAWSCLAPIKEAADLSSMAVFPIAAVPSRSPVLPASTLHDAHSLALILATSLCNGLAVGLA

SEQ ID NO: 81389 - protein, 97 aa, Zea mays
  Coding DNA Sequence Number=SeqID_38014
MAKPGHTTAPGPLLRKQQPTRSSIPVAGMEAKSHHQPNQGGTCKNYATSKAEYTNTQLDLPGLTALAYNAPLTPAAVVQWPHLYPPYLEWETQSQVA

SEQ ID NO: 81390 - protein, 115 aa, Zea mays
  Coding DNA Sequence Number=SeqID_38015
MAMSALFEAILLLILKDGQGGDERKVSEAMRSMPQGTEQAKKDGPAVCAHEDAHLLTLVKPDKHGDEHRMAVRARTRAKPRKTANSAPPDPGLGLGLSPGRRRTPLRPTQGSDSG

SEQ ID NO: 81391 - protein, 392 aa, Zea mays
  Coding DNA Sequence Number=SeqID_38016
  Homolog annotation: Hit_ID=Q6J9V9; Match level="QueryCoverage=28%, HitCoverage=46%, E-value=5e-07, Identity=36%"; Hit description =Putative uncharacterized protein
  Subcellular localization annotation: CTP_CleavageSite=73; ConfidenceScore=5.60e-01
MQAACNRAKRAHFSDSQHARHGGPGPRVMQPARRMLRACSCTATCATTAPPRLRNQYRDSRRSGQRFTFAIMTASEKGPGKGDTPKRILPREGTWLRASLLIRGSKAGPSEGFNSRLRARGLHTHYWSEVRRPAPRKGSTVASGYSGSAPTTDQGGNDLVTESHQREASSPRTPSLGDRVQQITRSSPGTPCSAPTEGNMALSPLLLAERRRRGRLGGCSRKPGSGHTVDSVNIPARELGTRPYTWATASSHEGTTRPAEALREALRPRRSQNHSSKASGATPGGARTRAKSQKTANSAPPDPRGSDSAPASAVGLRLARPRGSDSTPVTEDRLDLDFGGAYTSPNLGRRPATSTGGAIITLPRADSGHENKTGVPSGSLRQIGNDGAPHTL

SEQ ID NO: 81392 - protein, 352 aa, Zea mays
  Coding DNA Sequence Number=SeqID_38017
  Subcellular localization annotation: CTP_CleavageSite=78; ConfidenceScore=5.37e-01
MSLRSLMHRVFPPSKPPDGGYPPSFRLVVGGTQLRGSWYLSAIVRLQGFSSYSPVAPLRRWSPKTVTSSPWMGRGKPGCDLGPALSLKDVHHSCWGEERGEPGLYLPRGPAGHLFFQLLVVATILQLCGGDVLQPCRGWRTVAAQLGCNIPPSSSLSWRGRERGPASALWSGPLFGFNSWFASLEREREREPSGGRVRPGTMAAAAEVAGGSPGARRPAGFPVWRWNRSSVCSGTSNVSVFVHCGCRGLNIIWTFLSVTELFCASESCFSRKVMSEVSVSRRRRSPSAQSALPLTRTLTRPWGSVTDAVEKARRIAPAEELLNMKTCSVRGITYPNASYLSQKVMSEDPLSK

SEQ ID NO: 81393 - protein, 92 aa, Zea mays
  Coding DNA Sequence Number=SeqID_38018
MGVDAGEERHRSAYGAGAKVDGGGGWVVPCASAGRGGFSEGEGKLAVDAREGACAARLAASGGGRAEPGLHLLTRNVPVRCHGTQIATLQWT

SEQ ID NO: 81394 - protein, 152 aa, Zea mays
  Coding DNA Sequence Number=SeqID_38019
MAAAEARRRSAVWALLPLLLRLLHPVALVLANTEGAVRRCARLALLALLALLLLTTRRRVGPSAAGWFPGALSAPTGPTSNRWVGLAHHDARGKCRSRGVWLGAIPGPRGAVSAFGQTNSNLLLLCRGFGCLATGRVVLLLAANFVLSETKT

SEQ ID NO: 81395 - protein, 131 aa, Zea mays
  Coding DNA Sequence Number=SeqID_38020
MEQDSGSVTRWYSGASKILQWLGRLYASSRLLLLFSKGGYERCRYNEAHIEISVVLTDGEYNFVVDLTLGNGKVETGRTAVSCQRIFQKENQVDETWIPTSPVLEELQGQWARVTSLLFPTPIGIPFLESS

SEQ ID NO: 81396 - protein, 229 aa, Zea mays
  Coding DNA Sequence Number=SeqID_38021
  Gene Ontology: Mol. function=transcription factor activity; Cellular component=nucleus; Biological process=regulation of transcription, DNA-dependent
  Homolog annotation: Hit_ID=Q9M4Y9; Match level="QueryCoverage=55%, HitCoverage=47%, E-value=7e-22, Identity=47%"; Hit description=AP2 -related transcription factor
  Pfam annotation: Domain name=AP2; Domain location=128-180; Score =72.6; E_value=1.3e-18; Accession=PF00847.11; Description=AP2 domain
MSTYISLSLERSSSVVRDAAKSAPPGSGVSAPYPRAGAGAGTSLSLSGAAAAHGHGQYLPLNEDDSLDMVLFDVLREASGSAPGATYQPPSSSLPTLKALASGASRKGGGNNGNGSRAAHAPKAATGRHYRGVRRRPWGKYAAEIRDPARHGARLWLGTFATAEEAAAAYDRAAFGMRGAKALLNFPPPAAGCGNAATATAKQAAGSQVNNGECDLLEENGSSHDSECF

SEQ ID NO: 81397 - protein, 409 aa, Zea mays
  Coding DNA Sequence Number=SeqID_38022
  Gene Ontology: Mol. function=triacylglycerol lipase activity; Biological process=lipid metabolic process
  Homolog annotation: Hit_ID=Q943F9; Match level="QueryCoverage=86%, HitCoverage=86%, E-value=1e-177, Identity=85%"; Hit description =Lipase (Class 3)-like protein
MPIDLLPAPAPAEEEVKAVEEDEEMVVEVEGEGCGGGAVVVAVADAEAEGHPYDFHVSGPRNLPPPNWKDIIRSSWKGPNYKRMVMACFIQAVYLLELDRQDQKGEEDGLAPKWWKPFKYKVTQTLVDERDGSIYGAMLEWDRSSALSDFILIRPSGAPRAVLALRGTLLQKPTMKRDLQDDLRFLVWESLKGSVRFVGALAALQLAVEKFGSANVCVAGHSLGAGFALQICKELAKQGVFVECHLFNPPSVSLAMGVRSMSEKASYLWKKVKGSLPLKEETTTLETAKAEANDKKRLRTENKWVPHLYVNNSDYICCHYNAPSCPSTSTDGSSDEQQQQRKASEIASDVVAKLFVTSKGPQKFLEAHGLQQWWSDGMELQLALYDSKLINRQLKSIYTATAIPSSTRS

SEQ ID NO: 81398 - protein, 236 aa, Zea mays
  Coding DNA Sequence Number=SeqID_38023
  Gene Ontology: Mol. function=nucleic acid binding
  Homolog annotation: Hit_ID=Q5NKP8; Match level="QueryCoverage=97%, HitCoverage=38%, E-value=8e-61, Identity=55%"; Hit description =Putative uncharacterized protein 9C20.4c
MKVVNQASMSKAGSDKALDTMDELLEMLGRLEPDIGCEDAGGATTGEGNHGEEDDVGNAEDEHVSQCDNKEHVAVHSRQQDGGLNIDGHHQSELQMTLVGNDDCEGTQYGDVRKRLEYDVDGISLLRPINARPKGRTIKTSEQRVLKLGAKGEKKKTRKCQKCGIADGHNSRTCLSIEENRVKLASLADRKRGRPPGSRNKNSTMAPQWNETSTSKKHKHTDSEEHGSDDDNLAGL

SEQ ID NO: 81399 - protein, 198 aa, Zea mays
  Coding DNA Sequence Number=SeqID_38024
  Gene Ontology: Mol. function=cysteine-type peptidase activity; Biological process=proteolysis
  Homolog annotation: Hit_ID=Q8S456; Match level="QueryCoverage=84%, HitCoverage=15%, E-value=7e-37, Identity=51%"; Hit description =Putative uncharacterized protein 163K15.6
MSPTNAPVSSPPVPTPDNKQHDQEVHVPSDDIKVSEQFDKTPLTKGFIDCIRDDDVLYNPDTLINTLILNVNVGTVLNIEEFEQHSSNPQPFSTSVLKEQLEPMLPLDEVLNQIKLILVPMLRRSHWTLYAINFELRRIDILDSNPYGTLLGGTTWKQIDNDQLLINGTKDEPLDQRAFVLHYLTFHRNNRVSPSLQN

SEQ ID NO: 81400 - protein, 234 aa, Zea mays
  Coding DNA Sequence Number=SeqID_38025
MAWQRGRGVGSASGPRGRERDMSQGEWVSWGEPSQRKCYGLQNRIVGVTQEHSTGTKALERAVHTARTRQGLGSTAVAFWLREGSSGEHGQREPERERERAEGLIALAFDGFEVPGLRRLVGKGLEIHEKPATKVSPVVNAMARKVSEPFHRILPEDDVHVRFHDVLHCPGGPSYGRIDGYQLPRSCLGSYLSTFETLMLDCHLIARSQGKGLILHTSLGPPSGLLERSHGGSF

SEQ ID NO: 81401 - protein, 493 aa, Zea mays
  Coding DNA Sequence Number=SeqID_38026
  Gene Ontology: Mol. function=transporter activity; Cellular component= integral to membrane; Biological process=transport
  Homolog annotation: Hit_ID=Q2RAV7; Match level="QueryCoverage=90%, HitCoverage=95%, E-value=0.0, Identity=71%"; Hit description =Transporter, putative, expressed
  Pfam annotation: Domain name=MFS_1; Domain location=69-439; Score =54.1; E_value=4.9e-13; Accession=PF07690.7; Description=Major Facilitator Superfamily
  Pfam annotation: Domain name=Nucleoside_tran; Domain location=171 -452; Score=-147.2; E_value=0.07; Accession=PF01733.9; Description =Nucleoside transporter
  Pfam annotation: Domain name=Sugar_tr; Domain location=72-483; Score=- 184.5; E_value=0.09; Accession=PF00083.15; Description=Sugar (and other) transporter
  Pfam module annotation: Pfam domain module=MFS_1::Nucleoside _tran::Sugar_tr; Domain location=69-439::171-452::72-483
MAGRRGDSAAAPLLENKAAPASASEAEAGGGYHHHNNNYYYYVDGCPGCAVDRRKAASPGIPYANFIYVWIVTLCTALPISSLFPFLYFMIRDLNVAERTEDIGFYAGFVGASFMFGRCLTSTAWGIAADRIGRKPVVVFGISSVSGERFMCPRVVFNTLFGLSVNYWMAIATRFLLGALNGLLGPIKVSTAWGIGLIIGPALGGYLALPAENFPAIFSPDSVFGRFPYFLPCLCTSVFAAAVLVSCIWMPETLHRHKVHESTSQDVEKVQESGIRKKKSLFRNWPLMSSIIVYCIFSFHDMAYTEVFSLWAESDKKYGGLSLSSEDVGQVLAVTGASLLVYQLFLYPRINKVLGPIKSSRIAAILCIPILFAYPYMTYISEPGLSIILNIASAIKNNLAVTIITGTFILQNNAVPQDQRGAANGLSMTGMSFFKALAPAGAGIVFSWAQKRQHAFFFPGDQMVFFLLNVVELVGLILTFKPFLAVPERCDSR

SEQ ID NO: 81402 - protein, 387 aa, Zea mays
  Coding DNA Sequence Number=SeqID_38027
  Subcellular localization annotation: CTP_CleavageSite=46; ConfidenceScore=5.30e-01
MAGDTGGKSRLQKEAIVWLQRFSSGSPAASPRRWSPKTVTSSPIARRSEPGCDLGPALSFKDVHHPGWGGGRADPELYLPRGFVGQPLPQYSGERALSGPAGGSDFDNAGLVDGGRRQLQRVGLVGSARGAPSRHKGGCRAARTGGPPKTSRAARAAFVFWGCPAFAPVRHLCAEIGAPLIREDQSGDLPVGRRLLSSVRRWRRLEKSSSPARSPPPSAPGASGSLYLFSPLERRRGRGQGCSGVRPEAIAAAVRPPGAGVVVTAAGAGDGEPSVGLLLLHRPPNHSPVGYLNRFTKRESPRAKVTSEHGQRQSWFRKEDLVGRSLAGSSTGGTDAGVELPRPQAGPMSLGDSWLRLRDLAEGVVDTEGAAALFNCQDSSLQDRIIL

SEQ ID NO: 81403 - protein, 98 aa, Zea mays
  Coding DNA Sequence Number=SeqID_38028
MSGAPPDMSGAPPDSVRCTRGLHAEILTFGKIQRRFAIIHRTVQCSKEGRLRNSPASGNRNGCSAIIHRTCPVRAQKTELQRSEPNGLGDVASAPDMS

SEQ ID NO: 81404 - protein, 292 aa, Zea mays
  Coding DNA Sequence Number=SeqID_38029
  Gene Ontology: Mol. function=calcium ion binding; Cellular component =plasma membrane; Biological process=G-protein coupled receptor protein signaling pathway
  Homolog annotation: Hit_ID=P27164; Match level="QueryCoverage=52%, HitCoverage=81%, E-value=2e-55, Identity=70%"; Hit description =Calmodulin-related protein
  Pfam annotation: Domain name=efhand; Domain location=126-154; Score =35.7; E_value=1.7e-07; Accession=PF00036.23; Description=EF hand
  Pfam annotation: Domain name=efhand; Domain location=15-43; Score =41.4; E_value=3.2e-09; Accession=PF00036.23; Description=EF hand
  Pfam annotation: Domain name=efhand; Domain location=51-79; Score =33.8; E_value=6.2e-07; Accession=PF00036.23; Description=EF hand
  Pfam annotation: Domain name=efhand; Domain location=90-118; Score =39.7; E_value=1e-08; Accession=PF00036.23; Description=EF hand
  Pfam module annotation: Pfam domain module=efhand::efhand::efhand::efh and; Domain location=126-154::15-43::51-79::90-118
MEEVEQQLTKKQIEEFREAFSLFDKDGDGTITTKELGTVMRSLGQSPTEEELQEMVDEVDADGSGAIDLQEFLTLLARQMREASGADEDELREAFHVFDQDQNGFISRDELRHVLQNLGERLSEEELAEMLREADADGDGQINYSEFAKVMLAKRRNQELEEHGSESSHSKGLCPSSLVSLAPKNHGQSNETNSWAWLRKSTGLEEERDTSFAEFEIWGESRLRRHRATRRADEVEAGREVDFLGNDWASGRADSWAKWRSATWDDGLGEEDGGGWTTVAWATSLAKRTAVA

SEQ ID NO: 81405 - protein, 235 aa, Zea mays
  Coding DNA Sequence Number=SeqID_38030
  Subcellular localization annotation: CTP_CleavageSite=28; ConfidenceScore=5.34e-01
MQSACNRAKWAHPSDSNAPSIKAQAHTSCNRRAGCYVRATAPPLAPLPRLLDCGTSTATRGTGKGGYHERDPSPRRKWALSPLLIRGSKAAPSEGFNSPLRALGLHAHYWSEVRGPAPRKGSTAASGHSGSAPTTDQGVRLTAAKSGLRRHRKLCFARPQGSDSGSAPENDELRFARPQGSDSGSAPEDDELRFARPQGSDSGSAPEDDKLRFARPQGSDSGSAPEDDELRFDRP

SEQ ID NO: 81406 - protein, 104 aa, Zea mays
  Coding DNA Sequence Number=SeqID_38031
  Gene Ontology: Mol. function=nucleic acid binding
  Homolog annotation: Hit_ID=Q5NKQ1; Match level="QueryCoverage=54%, HitCoverage=9%, E-value=2e-10, Identity=44%"; Hit description =Putative uncharacterized protein 9C20.4a
MADDREEEAGDDSSASLHRAAPDTCSGLPAAPTSRIISPNCGASPRINIVTPPAELRAPGVNDGNTTVIETMPESIDSTMVPRIGMTFGNVDEAYNFYSRYAYE

SEQ ID NO: 81407 - protein, 157 aa, Zea mays
  Coding DNA Sequence Number=SeqID_38032
MRDTQSQATRIKSWRGAEGVMLTPEYSVVLARCLNGLQRSMTREPKRQGRIPSDEPLLRVKHLVLPQNSYPFQGKPLVTAPSLVYKRRRVSPNQGHGDNNTRRLSLVGNTWHIDVQNQHCLEAWDSSVSRPLVTPTMSIEQQGVGSASHERLKVGTL

SEQ ID NO: 81408 - protein, 381 aa, Zea mays
  Coding DNA Sequence Number=SeqID_38033
MVTTSLMVGRSKPGCDLCPALSFKDLHHPSWGGGRGKSGPASAWAGDPPLPPASGGGNHPPAMRRRRPPAMRGKANCCCLARVQHSVLHPARTGVRTCRCALGAAVARWCGVGGQVAIVVGAEVVAAGEGFSADDTVNATCAPGLRLFGFNGWFSSPTRGRERGPSSGSVRPGAITAAVLPSETEVVVAAAVVGGKPPEVASQVEEVQQRQLELGQVVRQRDQPRSHTTEAMSRADVLGGQLAEAMERPVEVSARAGTLEETLAAMAQARCWRPPSRWRSFRPCRRPRPGQIPPKAEMTPRVLLLPLLMSEPAGIDLFVGSRIVYLSESYFSREVMSEDSVIDIVEKARKSFWQKSFRALRLVRQQNRLSERELLIAEGDE

SEQ ID NO: 81409 - protein, 158 aa, Zea mays
  Coding DNA Sequence Number=SeqID_38034
MQPGCLMKILEAERWLKGANLREVALFQQQDEGNAGTPHPWAWKVARNRTTGTHPFNFVASSMEAQAHTSCNQRAGYYVRETAPPLAPMSRLLDCRTSVAIRGNPAHGPTMPIEHIGHGDRERGYFERDPSPRRKRALSPPTDQGLEGWPLGRVRQPP

SEQ ID NO: 81410 - protein, 41 aa, Zea mays
  Coding DNA Sequence Number=SeqID_38035
MAVGGLLSHGASDSPVRAAWRCITPYVLVRMLYVVDYKGAL

SEQ ID NO: 81411 - protein, 367 aa, Zea mays
  Coding DNA Sequence Number=SeqID_38036
  Gene Ontology: Mol. function=structural molecule activity; Cellular component=cytoskeleton; Biological process=phagocytosis, engulfment
  Homolog annotation: Hit_ID=Q2R2F0; Match level="QueryCoverage=59%, HitCoverage=39%, E-value=3e-28, Identity=38%"; Hit description=AT hook motif family protein, expressed
  Pfam annotation: Domain name=Actin; Domain location=1-234; Score= -197.2; E_value=0.00048; Accession=PF00022.10; Description=Actin
MEKIWHHTFYNELRVAPEEHPILLTEAPLNPKANMEKMTQIMFETFNCPTMYVAIQAVLYLMTVTQVYVTKEFSARIQIWYGENVLEVKKNPNWICPVCRGICNCSICRTKKGWFPTGSAYSKVVCSLCLTYLVARKRNGVDPMQAACIFGSNVGSMYVPICQRSNNPNSLASSFVQVVELGYKSVSHFLIATHRASSDNSEDSSPAVKEKSLSAKSESSCISDHDGPDANERPEDGETSSKAKVKKATRLKVKNSSDGDKEDSRSESVVTSECQDGHQANTEAGCVTPSSKPVSRKRKERILIEENKGLLSASSFDRPRARRQEEGSNPSPDVGYISEILKLIPEEFGPRRSLLSLVFDVQLLKIM

SEQ ID NO: 81412 - protein, 842 aa, Zea mays
  Coding DNA Sequence Number=SeqID_38037
  Gene Ontology: Mol. function=transferase activity, transferring glycosyl groups; Cellular component=intracellular; Biological process=multicellular organismal development
  Homolog annotation: Hit_ID=A5ARU1; Match level="QueryCoverage=77%, HitCoverage=100%, E-value=0.0, Identity=54%"; Hit description =Putative uncharacterized protein
  Pfam annotation: Domain name=TPR_1; Domain location=185-218; Score =19.5; E_value=0.013; Accession=PF00515.19; Description =Tetratricopeptide repeat
  Pfam annotation: Domain name=TPR_1; Domain location=219-252; Score =17.3; E_value=0.045; Accession=PF00515.19; Description =Tetratricopeptide repeat
  Pfam annotation: Domain name=TPR_1; Domain location=263-296; Score =37.6; E_value=4.4e-08; Accession=PF00515.19; Description =Tetratricopeptide repeat
  Pfam annotation: Domain name=TPR_1; Domain location=297-330; Score =43.9; E_value=5.9e-10; Accession=PF00515.19; Description =Tetratricopeptide repeat
  Pfam annotation: Domain name=TPR_1; Domain location=331-364; Score =44.4; E_value=3.9e-10; Accession=PF00515.19; Description =Tetratricopeptide repeat
  Pfam annotation: Domain name=TPR_1; Domain location=365-409; Score =14.7; E_value=0.091; Accession=PF00515.19; Description =Tetratricopeptide repeat
  Pfam annotation: Domain name=TPR_1; Domain location=410-443; Score =32.0; E_value=2.1e-06; Accession=PF00515.19; Description =Tetratricopeptide repeat
  Pfam annotation: Domain name=TPR_1; Domain location=444-477; Score =32.6; E_value=1.5e-06; Accession=PF00515.19; Description =Tetratricopeptide repeat
  Pfam annotation: Domain name=TPR_2; Domain location=151-184; Score =13.5; E_value=0.63; Accession=PF07719.8; Description=Tetratricopeptid e repeat
  Pfam annotation: Domain name=TPR_2; Domain location=185-218; Score =17.2; E_value=0.063; Accession=PF07719.8; Description=Tetratricopepti de repeat
  Pfam annotation: Domain name=TPR_2; Domain location=219-252; Score =15.0; E_value=0.28; Accession=PF07719.8; Description=Tetratricopeptid e repeat
  Pfam annotation: Domain name=TPR_2; Domain location=263-296; Score =27.8; E_value=4.1e-05; Accession=PF07719.8; Description =Tetratricopeptide repeat
  Pfam annotation: Domain name=TPR_2; Domain location=297-330; Score =30.6; E_value=5.5e-06; Accession=PF07719.8; Description =Tetratricopeptide repeat
  Pfam annotation: Domain name=TPR_2; Domain location=331-364; Score =35.4; E_value=2.1e-07; Accession=PF07719.8; Description =Tetratricopeptide repeat
  Pfam annotation: Domain name=TPR_2; Domain location=377-409; Score =15.9; E_value=0.16; Accession=PF07719.8; Description=Tetratricopeptid e repeat
  Pfam annotation: Domain name=TPR_2; Domain location=410-443; Score =23.4; E_value=0.00084; Accession=PF07719.8; Description =Tetratricopeptide repeat
  Pfam annotation: Domain name=TPR_2; Domain location=444-477; Score =31.7; E_value=2.6e-06; Accession=PF07719.8; Description =Tetratricopeptide repeat
  Pfam annotation: Domain name=TPR_3; Domain location=328-364; Score =16.1; E_value=0.088; Accession=PF07720.3; Description=Tetratricopepti de repeat
  Pfam module annotation: Pfam domain module=TPR_1::TPR_1::TPR_1::TPR _1::TPR_1::TPR_1::TPR_1::TPR_1::TPR_2::TPR_2::TPR_2::TPR_2::TPR _2::TPR_2::TPR_2::TPR_2::TPR_2::TPR_3; Domain location=185-218::219 -252::263-296::297-330:...
  Pfam module annotation: Domain location=:331-364::365-409::410 -443::444-477::151-184::185-218::219-252::263-296::297-330::331 -364::377-409::410-443::444-477::328-364
MYVSGSTTPLIMIAAPTSPGLKQTAGGATVADPKTGCGEEGAAVTNLRGEGMGADLSGGGHGGAVAAGGDARHHAPQPSVLGGGADWLVFGGRADLEEPARNAPSPALFLLPPAGLDDRAAQPEPNPKPAQLAGGLMIIFIGYLNGVAVDEERHLALAHQNYRSGKYREALEHGNVVYEKNPRRTDNLLLLGAIYYQIRNYDMCIAKNEEALAIDPHFAECYGNMANAWKEKGDIDLAIRYYLTAIQAYSCYIEALRIDPHFAIAWSNLAGLFMEAGDLDKALMYYKEAVKLKPSFADAYLNQGNVYKALGMPQDAIMCYQRALQARPDYAMAYGNLATIYYEQGQLDMAIRCYNQAIVYDPQFIEAYNNMGNALKDAGRVEEAINCYRGNYADAITCYTEVLRIDPTAADALVNRGNTFKEIGRVNEAIQDYVQAATIRPNMPEAHANLASAYKDSGHVETAIISYKQALRLRPDFPEATCNLLHTLQCVCDWENRDGMFRDVEEIIRRQIKMSVLPSVQPFHAIAYPIDPLLALEISQNDGTEWRQRIQSEAEHFVDVSAMTSDNIAKLINQDKIQILINLNGYTKGARNEIFAMQPAPIQVSYMGFPGTTGAAYIDYLVTDEFVSPSSYAHIYSEKLVHLPHCYFVNDYKQLYKMDPEIFDTWCNILKRVPNSALWLLRFPAAGETRVRAYAAARGVRSDQIVFTDVAMKNEHIRRSALADLFLDTPLCNAHTTGTDILWAGLPMITLPLEKMATRVAGSLCVATGLGEEMIVSSMKKYEDRAVELALNPVKLQALTNKLKEVRNLERAYYKMWNLYCSSRHPEPFKVVEDDNESPFDR

SEQ ID NO: 81413 - protein, 143 aa, Zea mays
  Coding DNA Sequence Number=SeqID_38038
MGKSNKRKREPTPPSEDFGDSKYSEEEFSSESEGSPAPVSPPASSDDSDDSQGIATEVWTYIRAVERSGLEGSDESEYSSDEEDSSDSSEEGGGGDGGDDDDDGGDGDDGDDGGDGGSRGGSKGGNSGSSRGGNSKGSNKASG

SEQ ID NO: 81414 - protein, 342 aa, Zea mays
  Coding DNA Sequence Number=SeqID_38039
MSKIRSTGAGWREHRSIGARRWEQPSREHRSSLCAAHGEAGARDGQRDLETLRAGSTGLPEIAVHRAGRREQGALEFVVRRARRGRRPGRRDPETERAGTREHRTTGVRRAPRQEEGAGSTGGTPRLGARSRRPPHKEAGRRSESREGVRVRADTPQRSPGTLGKDIVSVTRRRNGCFSLPSAPWHSANLFAKYSAKPSIPVVRVRCSKLYYTVGSRLRLLKGRDLASPEGLLKQRAHPRLAGSPARAGFVVKQPWPNRLTNRPYRRRIQCEDRLTPYPDTRASVGKVEEDNAARPSPTDVPPARVRLTTAKSSLRHNRKSPPRPTPGLGLNLDLGRWLKVA

SEQ ID NO: 81415 - protein, 90 aa, Zea mays
  Coding DNA Sequence Number=SeqID_38040
MVWRTGMSGVPPNSVRCTREINSELATFGFLGLPLRYNSSDCPVQHRTVRCAKRSNGYIANSRLQKVNNELQCADCARRSQSKRRWRTGQ

SEQ ID NO: 81416 - protein, 80 aa, Zea mays
  Coding DNA Sequence Number=SeqID_38041
MPGSKDLNDVSPGNNTRLTMDDLSGDEREEFEDYLKKLREETRMWTVQLLMPDCPTSVTPNHSDTEATSFGYVYIGQGVA

SEQ ID NO: 81417 - protein, 142 aa, Zea mays
  Coding DNA Sequence Number=SeqID_38042
  Gene Ontology: Mol. function=phosphotransferase activity, for other substituted phosphate groups; Cellular component=endoplasmic reticulum; Biological process=metabolic process
  Homolog annotation: Hit_ID=A2X6H5; Match level="QueryCoverage=95%, HitCoverage=16%, E-value=1e-67, Identity=92%"; Hit description =Putative uncharacterized protein
MAGRPRPQTELHSPSASTRRRERWLVVLGVALHAVYMLSIFDIYFKSPIVHGMDPVPPRLSAPPAKRLVLLVADGLRADKFFEPDERGRYRAPFLRGVIEEKGRWGVSHARPPTESRPGHVSLIAGFYEDPSAVTKGALPRC

SEQ ID NO: 81418 - protein, 387 aa, Zea mays
  Coding DNA Sequence Number=SeqID_38043
  Homolog annotation: Hit_ID=Q6QP51; Match level="QueryCoverage=11%, HitCoverage=25%, E-value=4e-08, Identity=63%"; Hit description =Putative growth-regulating factor 1
  Subcellular localization annotation: CTP_CleavageSite=73; ConfidenceScore=5.16e-01
MQAACNRAKWARPFDSNKPSMEAGRSSGHVVSQAYVPSRGSEGALSHGVKTVRPTGGASDGRSKRRFAFAVMTASKKAPSLPTDQRFEGWPLGGVQQSPQSTWAPHPLLVRGSMAGPSKGSTAASGHSGSAPTTDQGNGHTIGSPEAQSSPRSNLGHIATPTDQIVGETPPRPTLGLGLGLSPGRRRTPLRPTQGSDSGSAPEDGELRSARPRARTRAQPRKTVNSAPPDPGLGLGLSPGRRRTPLRPTQGSDMGSTPEDDELRLARPQGSDMGSAPGDDGLRFARPQGSDSALASADGLRLARPRGSDSTTATGDRLDLDLGGASTSPNLGRRPTTSTGGAIITLPRADSGYGEQDRLQHSSDGHDTTRTGCQNPSGCHDGMYLGR

SEQ ID NO: 81419 - protein, 185 aa, Zea mays
  Coding DNA Sequence Number=SeqID_38044
  Homolog annotation: Hit_ID=A2X6H7; Match level="QueryCoverage=36%, HitCoverage=92%, E-value=2e-18, Identity=65%"; Hit description =Putative uncharacterized protein
  Subcellular localization annotation: CTP_CleavageSite=28; ConfidenceScore=5.31e-01
MASLTMMASFAAVAVAAPSRRGTFAVVRSAKVDRCQEPATLAATEARPAADGRRAVMLAAAAAAVAAIGGAGAAMAGPKNGTPEAKKKYAAICVTMPTAKKTVPELLPSRAPPPRAMGGGKSFFCPSIFSFLRKWRRYDDDMADWDGGYARKVRSSDEDYGGWWVGEPDVDRKASDFINNFHQKN

SEQ ID NO: 81420 - protein, 444 aa, Zea mays
  Coding DNA Sequence Number=SeqID_38045
  Subcellular localization annotation: CTP_CleavageSite=40; ConfidenceScore=5.72e-01
PPPPQLPASSPRCRDPPSSPLPPGPSPRRPCSPSSLGVAPAVQLPGPPAPDFSAACCYCSDRHLLSSPGWARAVLTRPRCLASSRPCCAPIWRAHHWGPHLLRSPTVPPSAAPVTGSGAVLFPARRRALPVLPRSAHIFDLLHCPAAVSFSILYQRRRFSLCWRYNRPPPLVPVGRWSPAVGHCRPLLPVMAPWALPSAVVPCCRASSALAPSRAARPNPGGCACVTPTSVVSTLTGSMASPPPYMSLTSPAALVVVRALLHDDQLIRGMFVSFDPAWNPILRDCVELHPQASLPASYWENPCTQPPTFSTTSHKRRHLASHPCLHLARPRRSRPSTCGLDAPARTSAYATYGPVDPAYATRGPVDLACAMRGYVDHACATRDPTYATHNPVDLVCAMCGPVDPACAICSHVHPARATCGPVDPAYTACGPDDFGPVDKRDPFR

SEQ ID NO: 81421 - protein, 96 aa, Zea mays
  Coding DNA Sequence Number=SeqID_38046
MAQEDVTTAATEGVVSPSMVEELERKAAEAEARLREKEENAALKRQIESYHVRWLEHEIRAKALTVARLTPVAADRELPFLARDPARMRFCDDNNA

SEQ ID NO: 81422 - protein, 437 aa, Zea mays
  Coding DNA Sequence Number=SeqID_38047
  Gene Ontology: Mol. function=tRNA-pseudouridine synthase activity; Cellular component=cytoplasm; Biological process=pseudouridine synthesis
  Homolog annotation: Hit_ID=A7NVZ5; Match level="QueryCoverage=58%, HitCoverage=84%, E-value=1e-100, Identity=70%"; Hit description =Pseudouridylate synthase
  Pfam annotation: Domain name=PseudoU_synth_1; Domain location=140 -234; Score=46.6; E_value=8.9e-11; Accession=PF01416.11; Description =tRNA pseudouridine synthase
  Pfam annotation: Domain name=PseudoU_synth_1; Domain location=273 -380; Score=96.7; E_value=7.4e-26; Accession=PF01416.11; Description =tRNA pseudouridine synthase
  Pfam module annotation: Pfam domain module=PseudoU_synth_1::PseudoU _synth_1; Domain location=140-234::273-380
  Subcellular localization annotation: CTP_CleavageSite=16; ConfidenceScore=5.20e-01
MPGAAPTGGARRWPVLAARSAAWGRDTPTRSAVAAREPARPGPDSVEAARTAATTALAEAMTAGERGGAPIVGAMKGVRRGWRSLGKGAAAGSTCSRVRPTAAGVAHFSKWSCKAIKGFDKDEKGAEFFDYPGRLANLEASQCWQYQPSIPTIQYFLEDALICITKLDRKKLCLVGAGRTDTGVHAWGQVAHFTTPFSYSCLSSIHSAMNGLLPPEIRVREISAARPEFHARSSTKSKVYRYKIYNEAIMDPFHNHYAYHSAYKLNPHAMQEAANYFVGIHDFTSFANAAHNDGERRPTKKITRFDVTEMGAVLQLEVEGTGFLYRQVRNMVALLLQVGKEALPPDIVPAIIAARDRKELAKVALSAPPHGLYLMSVNYDEEILKPPEGSPPISFGRTHHLNELSSRNVSSFSFRCLLGFSWFRTVNRGLSWPASFC

SEQ ID NO: 81423 - protein, 135 aa, Zea mays
  Coding DNA Sequence Number=SeqID_38048
MSVVHTVLICRGCFLGNARVMMGVVYTAAWVYCLPVEWTGTPPVEWTGHHLPTEWTGLIKCGGGTSPASGMDRRRALSAINVETAQPRGLTSGSTGWLTSHAPCHVAASGLRLSGEQKRMRYGPDTCRLRTPAWP

SEQ ID NO: 81424 - protein, 103 aa, Zea mays
  Coding DNA Sequence Number=SeqID_38049
MPKLLPIKLRHSDMSQDEGVNRPKDEMTNKPMIVCVMIVIDCEGHKWGPASPLAPQPVSQSRPDAWIPEIRDYLKEGILPEDHVSTERIMRLAKRYTVVEGDL

SEQ ID NO: 81425 - protein, 1122 aa, Zea mays
  Coding DNA Sequence Number=SeqID_38050
  Gene Ontology: Mol. function=voltage-gated potassium channel activity; Cellular component=integral to membrane; Biological process=potassium ion transport
  Homolog annotation: Hit_ID=A2WUH9; Match level="QueryCoverage=50%, HitCoverage=94%, E-value=1e-134, Identity=48%"; Hit description =Putative uncharacterized protein
  Pfam annotation: Domain name=Ion_trans; Domain location=71-280; Score= 73.9; E_value=5.4e-19; Accession=PF00520.22; Description=Ion transport protein
  Pfam annotation: Domain name=Ion_trans_2; Domain location=191-286; Score=60.7; E_value=5.1e-15; Accession=PF07885.7; Description=Ion channel
  Pfam annotation: Domain name=cNMP_binding; Domain location=381-471; Score=61.3; E_value=3.2e-15; Accession=PF00027.20; Description =Cyclic nucleotide-binding domain
  Pfam module annotation: Pfam domain module=Ion_trans::Ion_trans _2::cNMP_binding; Domain location=71-280::191-286::381-471
MVGAGTTQVLVSNSVALCMRSAAAMMPLVEAAATGYGCWQAFLVAPVLYSAWASPFELAVERAVTFPLLVADLVADAFFFVDIAVSIVVAWLPLRGSSCATNLFYDDRKKAYVRNLRPWTLAMDVASTIPFQVIYLLGTSWGAAAAWLSPCRYLSLLRLWRLRRVSELFAKLEKDVRLNYYWTRLVKLVGVTLLAVHAAACVLLWMASHYSGPKERTWLSRGFETSSVWAGYTRAVYWSLTTLTTVGYGDLHPANPGEMAFAVFYMLFNLGLAAYIVGNMTNLAVSDSTALLALRDTLRGVSMFGAVNRLPEALTEQMAETVRLNFDMTEQLLQQQLLSEMPRAVRSGIAQHLFRDTVEGAYLFRGVSEGLVVDLVADVTPQFFPPKADIVQQNETPTDFYIIVSGSVDVLATAPDGTETVVSRACRRGMAGEIGVMLNIPQPFTVRCRRLTQAVRVSQGHLLRVVRPHTADADRVFCNFVRQHLGSPVWKVARKETPLFGEIADELEVGAATAASMSRRRSEMFDFDPEADRLRMSLRREAKRRVVIRHKSLNAAGKLVFLPGSMRELRRVAEAKLGEVVTTVLTVDGAEVEDIDVLRDGDHLFPYVHVLLRHGVVCGLVEDRAERSHSYKNLAIHPTRVSNPRSDALCTHVYKEDLCNKQDIPVICLIHTCLSTDSPLSTAIERNTLSALSQGEIREGEEEEHAVLDKNSKIDLHINSKVWSIPFSCAYAVCAKFFTLLMMRCWKRSPLGKPQRFHRCTRSLNAVCKCKMCTSAFSIDGQRWFRCQWWSVDSPLHPRRHRRRCLTRNRPHRPPWMSIWRHHHRLRPLQRQLLVVRHLHQCLWSSEPLLPVVGSPRVPSMLHVDGLSSLAIAQVVWPRLPPPTGGPNGPRSGRHVGRLGGGGGARRGKPQHGRDLRGMVLGRPGAHALAALGTASAWPMQARSARGALGVVPPERGRGSRPRRGRAPGRTARSFRRRSPTWGATEAPARRPTLPASSCVAHRDPRRAGRPTHAIKRWSGRARHRPQRGPEWVAWTWWRARSALGGRTWQGRGPDSSAEPGEIRRRLELLLGLAPGGSSRLCAGPHQASARRGSHGCSALDRSGRRRTKAAAGRSSLPGGGG

SEQ ID NO: 81426 - protein, 113 aa, Zea mays
  Coding DNA Sequence Number=SeqID_38051
MDLARREKDLAFKEEMHERRENLQTEHELEVEEKERMLEERILGAHLEAKGDRLCRAVIEYILTCFWSHDPAIFLEPMIAGPVADTEDAAREAVQDVVELVAECFQRDPADDE

SEQ ID NO: 81427 - protein, 46 aa, Zea mays
  Coding DNA Sequence Number=SeqID_38052
MWWLCAGALVQAEFLTGIMLAVDQLRLETALSTPRIQVQRTKEIDN

SEQ ID NO: 81428 - protein, 330 aa, Zea mays
  Coding DNA Sequence Number=SeqID_38053
MALGSIGQWLKERCAGTDEREICLRPFLGEASRIRDDEHSASCSTGALFDNRLDRVLTVALGPASGEDTSLQVGPNSDWRLARCPCVPVDAITAVFCGGPEEMWYWRKRRCDFFAPRNWHAGCMTCGPSPRCQRLDHRLQRSRGGKQPRGGYRLLERQFASLTAGCGGDERAYNRGAVARSLCGEVVAAVGAEVVAFAGEPLGTSYPRDPTGVEVLGHPSQSGGAYRPTVRNQAERLHGLRTTPGDKCPFSSSGPQVAGPTGLIAPNTRVPVTKWWSVQAFGPIGRAYEGGPHRVGVHKSGPVGSPEGFPGEGRLWPRRPGSTGSLWGYI

SEQ ID NO: 81429 - protein, 253 aa, Zea mays
  Coding DNA Sequence Number=SeqID_38054
  Subcellular localization annotation: CTP_CleavageSite=32; ConfidenceScore=5.23e-01
MMVLTSVATTSFAILLLFSLPSCLHLRATPFSAEGVGACASSPYSFDTSPDTDSRSGYCTSTRTFHIMRAPSFSPSSDVPFVFPAFATFFLPNLLPPPTVATASRPTLVDAGKVKNRFRTSRGTEASAVPHSGSPPRLPERFAAQSLRIGFNPVDLSARRRHGTPEVAFDSAGAVEAGMGLGEAAGRLLAAVDWEREAYPAYDDFLALPAFVLFFPTVRFLLDRFVFKVRLPLPSFVFPSVVSVKVFDSGAER

SEQ ID NO: 81430 - protein, 267 aa, Zea mays
  Coding DNA Sequence Number=SeqID_38055
  Gene Ontology: Mol. function=sequence-specific DNA binding; Cellular component=endoplasmic reticulum membrane; Biological process=lipid biosynthetic process
  Homolog annotation: Hit_ID=Q6EUN0; Match level="QueryCoverage=91%, HitCoverage=78%, E-value=1e-121, Identity=85%"; Hit description=ASC1- like protein 1
  Pfam annotation: Domain name=LAG1; Domain location=44-255; Score =342.5; E_value=7.3e-100; Accession=PF03798.7; Description=Longevity -assurance protein (LAG1)
MRLIHGQGHQRANNDTEEARKKIRKFKESAWKCVYFLSGELLSLSVTYNEPWFTNTRYFWVGPGEQVWPDQKIKLKLKAVYMYAAGFYTYSIFALMFWETRRSDFGVSMSHHVATVVLIVLSYVFRFARVGSIVLAIHDASDVFLEVGKMSKYSHCDWLANVSFLFFVISWVLLRLTYFPFWILRSTSYEVLLTLDKKKHNFDGPIYYYVFNSLLFSLLVLHIYWWVLIYRMLVRQIKTRNVGDDVRSDYERTSIVPHEIHRSRAMG

SEQ ID NO: 81431 - protein, 133 aa, Zea mays
  Coding DNA Sequence Number=SeqID_38056
MVGGSDGAPGGGRGQRRRSGRRLGAAGPATVGAGGAAGVAGGGTGPPGTVGGDGRWRTGGPGATAVWAVGGQRASRVGMAIGPVGMDTRGFRTHRIWIRVQKLTRGSYRVGYPKYIGSVNYNVIETNETFTML

SEQ ID NO: 81432 - protein, 59 aa, Zea mays
  Coding DNA Sequence Number=SeqID_38057
MVVGRLQSYGAPDSPTVRCAFSRVPDFCALWRALIAIAELLRPGAPDTVRWYTGQSGEL

SEQ ID NO: 81433 - protein, 622 aa, Zea mays
  Coding DNA Sequence Number=SeqID_38058
  Subcellular localization annotation: CTP_CleavageSite=32; ConfidenceScore=5.29e-01
MSSSSSSAAAMPPAGSSSPAAASSEETLSSLMAEELRAGDSVDFGVSRMSSARVEDMQRLGYFGGGVARAPGTEKVPEPEGELVVFEAFFAAGLRLPAYRIARGLHKSARRLSGLLKPGQRGSGGRRRLRPPAEASPPLAAKSGVPASSKAPETAAGAGGSKPAKAVPPPSRVAEAAKAARALPSAGKRVADFATDICVEDYLGGSDEGQLVMVAPAAATAVATAAPKAKGGALSAGGEVSALAVVMDEAGDVTRRLKEVTEALSQVADFASRTASGALTAAVAAEVERLRTQHADAVREKSAADSKCRKLADKVATLEGEKANLRRQLAGERRETNEALVKAQAAQAEANLARAEGNLARERAEQLQERLTALESRVERAEAMSRAEAERTRQLLVDTYRGLGAGTGDFEVPDREPGLHCLEWVQEELQALPTVVEGFMAYASLVTCEGAMNALSREGCRHFEVFDQVEEDFERDIFKVEDPVVKESAGAIFDRLWGEHGREVVRERAETARVQAARGERVDDFGALNSMLSDPEPTPAEAVPGPVLGPTPETAGDAPGASASAAAGEGLPPEVAEGAPDASAAAAPSAEGPAAVAAEITAEATAEPTAEAPATSGSSQVA

SEQ ID NO: 81434 - protein, 313 aa, Zea mays
  Coding DNA Sequence Number=SeqID_38059
  Homolog annotation: Hit_ID=A2Y5A8; Match level="QueryCoverage=99%, HitCoverage=90%, E-value=8e-63, Identity=48%"; Hit description =Putative uncharacterized protein
MSTECSDLGDEFWLPEEFLDDDFFSEEEKAAVAARSESDEEDSLAGLSRRLAGLLGDDGERKPPTAKAEVAVIGSPQSTLCGLPKSGQESPNGGASKGTSPPSSPPLEQKPADPWDVLYEAAGQVARIRAASSVPVQVPANAYAFSKPSPPPPPPPQIAPPSAKFHLLKQHQLLKLQRQRHLAAWSARQSACAKPVGCGGGDAPLGLNPAAWPPLQKPPPPPPPQQHQAPAHPASGMRAVFLTPPGAKRERNGTGVFLPRPAGAPAAEPKRKTAGACSTVLVPARVVQALNLRLEDLGAQPRYYPGGFVLDHG

SEQ ID NO: 81435 - protein, 304 aa, Zea mays
  Coding DNA Sequence Number=SeqID_38060
  Gene Ontology: Mol. function=phosphotransferase activity, alcohol group as acceptor; Cellular component=cytoplasm; Biological process =metabolic process
  Homolog annotation: Hit_ID=Q6YX79; Match level="QueryCoverage=34%, HitCoverage=11%, E-value=2e-17, Identity=49%"; Hit description=GHMP kinase-like protein
MAGRLVEEVQDGDVDGGGEVTAPPQHLVFAYYITGHGFGHATRAIEVRRRSLRPLAACLPGAGAYRFLTPSSPGVCTHNSIAPLRFSEFLILVRGVQYHQTTVVPGESILKTEAEWLNSIKADLVMLYPSRVGQLQMLAFDPCASRISATDAGGGKKPKELKQKKGKNPFSLEYNDSAPASAPRLVVLREPTGRDITERYELGAKLRRGEFEVTSTSWRVFAQFMQKWMVRNRQFAVVENPGFWNWTFSLVDEDDKLLAQIDRNWRGTGFEPFIQYWALPLPDDTAMMVLSHKSQQIHVAVWCI

SEQ ID NO: 81436 - protein, 117 aa, Zea mays
  Coding DNA Sequence Number=SeqID_38061
MLALLLLLLKKYWWNSLLELIPMGVALLMLNPMGVTLPELTPMDVGLEVSRAASRASSTLEGGLRSQEIAPVDIPSSSHRLASRDLGFPSFFSNLQIWPGGILNLRKSIPKLLRLQK

SEQ ID NO: 81437 - protein, 146 aa, Zea mays
  Coding DNA Sequence Number=SeqID_38062
MGKSKKGGSSSHHSGDKGKREPTPPSEDFGDSEYSEEEISSESEGSPVYTSPPASSDDSDDSQGIAAKVWTYIRAVERSGLEGSDESEVSSDKENSSDSSEEGSGGDGDDEGNGDDGGDGDGDGDGGKGDGKGDGKGGSGSSKFSG

SEQ ID NO: 81438 - protein, 208 aa, Zea mays
  Coding DNA Sequence Number=SeqID_38063
MTMRYGGRNEEEIALTHQLAVAGNFPLTGAPDSPVRQRCATACDDDVQLCIAMYVSSDAGTYMVRIRFTSKTRWLVLDALHRPLRRTVPGQSSHLERLHRRLHEEQERRCQEQEQQDSSLSPQQEVESRRQPSPAPQPEMPPAPPQGIPAAEGDPDEDGDDDDAGGSSSHSVELSEEQEMEGGIARPITRDAPPFSHFHDALDTLLRP

SEQ ID NO: 81439 - protein, 211 aa, Zea mays
  Coding DNA Sequence Number=SeqID_38064
  Subcellular localization annotation: CTP_CleavageSite=66; ConfidenceScore=5.47e-01
MSSRSLMHRVFPPSKLPDGGYPPSFRLVVGGTQLRGSWYLSAIVRLQGFSSCSPVAPLRRRSPETVATSPWVGRSKPGCDLGPTLSFKDVHHPRWGGGRAEPELYLPRVFVGRPLLRRSRERALTGPAGGPDFDNAGLVDGGRRQPQRVGLVGLAPGAPSCRKAAAAPCAREDRPRYRALPGRRSCSGAVLPLHRYGASTRRSVPHSSGRI

SEQ ID NO: 81440 - protein, 43 aa, Zea mays
  Coding DNA Sequence Number=SeqID_38065
MTTDRPLELLHMDLFDLIAYISIGGRKISNPRDVKEILETGSK

SEQ ID NO: 81441 - protein, 265 aa, Zea mays
  Coding DNA Sequence Number=SeqID_38066
AYPVYVHRRSGQVRRPWTGFSGEAKSDSLLGELHQGMHGLFRGSGVAGKGSAGRSTVAGDRVAAGALSAGQTPAISGSGVKGSHSANKKIKFWIQQRSKRGNRRHLWSGAPDCPVCHRTVSGAPEDSNANSPPSGISRGDSAIIHRTVRCTPDSVRCSEGGRPQELAIFGKLQRLVRYNSPDMSGVHRTVRCNSGATAIRRQRLPALQLMRALRAQKAGAPILAHRTRNSACLVCTGQPGGPTSQKFQRSESNGSNDVAGAPDMS

SEQ ID NO: 81442 - protein, 188 aa, Zea mays
  Coding DNA Sequence Number=SeqID_38067
  Subcellular localization annotation: CTP_CleavageSite=62; ConfidenceScore=5.28e-01
MAAHVNMGSYSWLRYFTQGATTIVFRNLSGLLRIKMVRTLQTTRINTSYAPQPRQVPVYPVVVEEAPADLPPIQVENVINLEDSSEEQLPTPTPLAESLAYAAGSSMSASSAPAFQAPAPGGDDPDDSGDGDDEDDDEDDGEDGHINEEADYAQQDHFMGIGPVVEHYTSMFETGRFPNLLQAVLVRS

SEQ ID NO: 81443 - protein, 322 aa, Zea mays
  Coding DNA Sequence Number=SeqID_38068
  Homolog annotation: Hit_ID=A2XFR6; Match level="QueryCoverage=50%, HitCoverage=52%, E-value=1e-25, Identity=38%"; Hit description =Putative uncharacterized protein
MDPGTHMMVRTLQTTRINTSYAPQPRQVPVYPVVVEEAPADLPPIQVENVINLEDSSEEQLPTPTPLAESLAYAAGSSMSASSAPAFQAPAPGGDDPDDSGDGDDEDDDEDDGEDGHINEEADYAQQDHFMGIGPVVEHYTSMFETGRFPNLLQAVLYELGAYARPLYETRRVSEPPRACYYITRIHVRVMDAGDRGLRTLSAHESLIPLSTYAASVSDAARRTLWSLSHTYRQQLQNTRFRHLPQRLRAGVVAGLNTDLDSATLDLYSVHLELENAHARISALEAQLQGLDPPEAQVPAVALSPPRKRMRYGEPGSVTRLL

SEQ ID NO: 81444 - protein, 157 aa, Zea mays
  Coding DNA Sequence Number=SeqID_38069
MGKNNKRKREPTPPSEEFGDSEYSEEEFSSEPEGSPAPVSPPASSDDSDDSQGIAAEVWTYIRAVERAGLEGSDESEYSSDEGDSDGGDEGEDDDDDDDDDDDGGSSGRGGGDGRGSTKGSSRGSTKGSSGGSGDSTRGSSRGSTKGGGGGRGRASG

SEQ ID NO: 81445 - protein, 283 aa, Zea mays
  Coding DNA Sequence Number=SeqID_38070
MNSVGLNSAQVGPQTGETRARLRPRPRCARSTTVDGDEHISGELKAGHSEAFTVAWKTNLGEERNLGTMLANRRQGLVLWLRDNLAELTRASIYRAQRRWRPIWRKHAGRPERGEVTEANYRGGHWVMSYDGHWVITMTRDDMQAFEHGAEEHLHVFDAFWVRQSTPAPDPAPPAARQAVPASPARARAYKSPSGVDRTPPRTLDLTGARNHRHLPRARRARGHPSAGHRRPANRALPSHARPSEETVHASVKLPEQGIGLCFAGEASPRSPDFARPPVNVDR

SEQ ID NO: 81446 - protein, 216 aa, Zea mays
  Coding DNA Sequence Number=SeqID_38071
  Pfam annotation: Domain name=SlyX; Domain location=124-192; Score= -4.7; E_value=0.025; Accession=PF04102.3; Description=SlyX
MTLEPHPLQPGWRSLDSESFGYRAEDTIEAIALHGLTTFCGFHPLELSTHRIGLFPAEKEDDPMWKDRVEHAKDISAIYPVMRGEAMSHLMALLEATKITLDNREELVVDLSTEMVEKDLQVEQLSNEIQELEELVGTRENTIEVLEDQLINTQQQLAEANQHLDMHHQEIQDMEANEDVDIGEERSLPPVWTLLAQGDHLPPSRVLPHLLTRSQG

SEQ ID NO: 81447 - protein, 272 aa, Zea mays
  Coding DNA Sequence Number=SeqID_38072
  Gene Ontology: Mol. function=catalytic activity; Cellular component =peroxisome; Biological process=metabolic process
  Homolog annotation: Hit_ID=A3AE78; Match level="QueryCoverage=33%, HitCoverage=12%, E-value=7e-40, Identity=88%"; Hit description =Putative uncharacterized protein
MVEYKFLRSTWWLHTGDIGYFDEGGQLFIVDRLKELIKYIGFQIAPAEVEGLLLSHPEILDAIVIPLPNAEAGEVPIAYVVRSPDSSLTKVDVQKFIEKQVTATSPTGTHKLANPNGAFLLIKLQNRGGCLQLRRYSLLSIIFFIVYLRCTREAMFRQHCGSDIGGGYELYVDEAKPRGDDQRGDGRSSGCSGGRFGDRSGGRRGGGRFGERSGGRDGGGRCDGRRGGRDGGRGFGNKQSAGTPSAGKKTTLVMIDDERGGCCKRRNDLLIQ

SEQ ID NO: 81448 - protein, 319 aa, Zea mays
  Coding DNA Sequence Number=SeqID_38073
  Gene Ontology: Mol. function=ubiquitin-protein ligase activity; Cellular component=ubiquitin ligase complex; Biological process =protein amino acid phosphorylation
  Homolog annotation: Hit_ID=Q6K9X8; Match level="QueryCoverage=65%, HitCoverage=24%, E-value=4e-43, Identity=49%"; Hit description =Putative uncharacterized protein OJ1136_C04.3
  Subcellular localization annotation: CTP_CleavageSite=47; ConfidenceScore=5.53e-01
MMNTTPGIQPYLLVAQATPSGQATTQGVNFGMSAPCLQGRTQNNPTISNHKSSFNVLFICAGRLDMSNCFARAVEHIGRAPRGAPGPGRRERVGTTAAAVARAVRRRLRACSVLAFLHSTLPRPTVHGDVRPTNILVLEDNVPHGWSCKLTGLGARGLVEEQEQPRPGAVDRAYVEPRYLATTGELNPHRDVYALGVVLLWLVTGRPAFLVRKAAREAVDGRASWQEVARGWPTERVREVALLGLRCCGVDVEAEQRPRLPAALLLEEAAMSAAPSRSPSSLSESDGAPSYFLCPILKEVMRDLQISSDGFTYEAEAIW

SEQ ID NO: 81449 - protein, 84 aa, Zea mays
  Coding DNA Sequence Number=SeqID_38074
MESHDLRAERESRLVGKVHKLCRVFETDISAVLTVMSGQGSSSGNEIDGSGYDYGTGCQHCNHCSGEDEAVEGDFQEFQDYDEF

SEQ ID NO: 81450 - protein, 134 aa, Zea mays
  Coding DNA Sequence Number=SeqID_38075
  Homolog annotation: Hit_ID=A2X801; Match level="QueryCoverage=71%, HitCoverage=33%, E-value=9e-27, Identity=64%"; Hit description =Putative uncharacterized protein
MDIRLCTAKEILLHEDFLFLQKELKFSGVHLFMMDGVTQAVENLKKEWGQAVSQLDENITAIESCGKTGKGTEEANCLPRLNGSAQDALQLLKSLQFQLDLLAQQLPTFDEVQSGQATLKSWDEQYKKIFLETW

SEQ ID NO: 81451 - protein, 707 aa, Zea mays
  Coding DNA Sequence Number=SeqID_38076
  Gene Ontology: Mol. function=cysteine-type peptidase activity; Biological process=proteolysis
  Homolog annotation: Hit_ID=A2YCU1; Match level="QueryCoverage=69%, HitCoverage=67%, E-value=6e-68, Identity=30%"; Hit description =Putative uncharacterized protein
MDIVVEEGNADVGNTAEPSYEVVARSGCSAQLSTNDTNEHELDIESEDSKVSVGNAAKQSHDVVGVDIDCIFNHVKVSTEADLGPQPDYKCTPEDVQLIEYIKTLLGKQVVVDIDSAWLNRNDMECLFHGDIQVSGEALSAYIHCIRDEEHLLHREGGKVFLENTFISSLLKRNGDPKVFIPMNIENFHWYLAVLNAKKSELKGLERQIKLAAEHKELYQGKWSNLDVASWPVIEKITTQMQTDGVSCGLWMINYMEYWTGSSLSDNVTQDDITMFRFKLPAILWDSRLNTKKRHQNLDHNVDEDGESSSDVQIIDTPLTSTNTQELMFVLCTYIMGIDNAKYLKKHWIQSTKPYPISLSLQKLKDILDVNKPMDTDCFNMAVRMIACNDALFLLEDKYHYMDLQFCSITKFGRDPRLRAKPDINMLAKLLECWPDMEYDVSDCKQILLPFSFMGHFTLYVLNMDTRSIYIMDSMPIPSWFKGDHPSMHYIHNIHYIVNNMNAAMELANPTWKDDIYMWRRIVPTWVPRTLNWDLSGFLVINFMHDWNGIRLPCICIHCSLSPLPAYEPAFDWENERSLIFGQRVPESIPTISNSGLKITVKSVCVKMIDAGAEHTVAVTEDDDLYGWGWGRYGNLGIGDRNDRLLPEKVSSVEVGMQLLCCEVVEKTDAVVYRGKPIALTRLSAKHVPQKLKGKCALGPFLSVLVI

SEQ ID NO: 81452 - protein, 331 aa, Zea mays
  Coding DNA Sequence Number=SeqID_38077
  Homolog annotation: Hit_ID=A0EVG2; Match level="QueryCoverage=9%, HitCoverage=3%, E-value=4e-07, Identity=81%"; Hit description=Milt1a putative polyprotein
MNMIDFEGKKVLVRPNTADKGKGKETIIGNADESAFIPFVSFGDLDNNTFKGRIRVERDLALCGRLNEEVGHLGDVDPRAIDLAMRIAERMFLKMKEDETKNKIEEEEDDRWKPNDESTSSQGSSFKSTSHMCFIANGSDSESGSEDEEEQESDSEDEDDLQQFFAQLSKKNRMSLLKLTKRAEEQKEMLHKQEDFLIRKIEDLEKLTKEHEKLKCSHYDLVQRARTRAKSQKTANSAPPDPRGSDSAPASAVGLRLARPRGSDSTPATEDRLDLGFGGAYTSPNLGRRPTTSTGGAIITLPRADSGHRNKTGVPSGSLHQIGNDGAPHTL

SEQ ID NO: 81453 - protein, 170 aa, Zea mays
  Coding DNA Sequence Number=SeqID_38078
  Homolog annotation: Hit_ID=A2YPC6; Match level="QueryCoverage=85%, HitCoverage=7%, E-value=9e-54, Identity=71%"; Hit description =Putative uncharacterized protein
MRLMVLVMTMVLLQTRQTPNSILVAGSDNQRSQWTKDVVEYLQHILDEFCSKEGAFVHPSFREQSSPGPIAGTNQIKMKTEASPAAGDIEEPLVHFKWWYMVRLIQWHLTEELLVPSVLIEWLSNQLQERDSVDVLELLLPIMLGLVDTISLSQTYVKLEERMKLDFNRL

SEQ ID NO: 81454 - protein, 61 aa, Zea mays
  Coding DNA Sequence Number=SeqID_38079
MQFERPSSMSLLQLSQMANSWSYCISVALAVVPPTVTMQYEEGKTVDLYVPRKWYVCLILL

SEQ ID NO: 81455 - protein, 252 aa, Zea mays
  Coding DNA Sequence Number=SeqID_38080
  Gene Ontology: Mol. function=3,4-dihydroxy-2-butanone-4-phosphate synthase activity; Cellular component=chloroplast; Biological process=riboflavin biosynthetic process
  Homolog annotation: Hit_ID=Q6Z234; Match level="QueryCoverage=90%, HitCoverage=46%, E-value=1e-107, Identity=77%"; Hit description =Putative riboflavin biosynthesis protein ribA
  Pfam annotation: Domain name=DHBP_synthase; Domain location=1-66; Score=-93.3; E_value=5.7e-05; Accession=PF00926.10; Description=3,4 -dihydroxy-2-butanone 4-phosphate synthase
  Pfam annotation: Domain name=GTP_cyclohydro2; Domain location=71-240; Score=384.1; E_value=2.1e-112; Accession=PF00925.11; Description=GTP cyclohydrolase II
  Pfam module annotation: Pfam domain module=DHBP_synthase::GTP _cyclohydro2; Domain location=1-66::71-240
MGRHPTVVPAHSHSHTHSLTVLKRAGHTEASVDLAMLAGLPPVAVLCEIVDDADGSMARLPKYRRKRDRLIERASVARLPLKWGNVHAYCYKSVIDGIEHIGMMKGDIGDSQDILVRVHSECLTGDIFGSARCDCGDQLAMAMEMIEKAGRGVLVYLRGHEGRGIGLGHKLRAYNLQDDGRDTVEANEELGLPVDSQEYGIGAQILRDLGVRSMKLMTNNPAKYSGIKGYGLSIAGRVPLITPITSENLSDR

SEQ ID NO: 81456 - protein, 402 aa, Zea mays
  Coding DNA Sequence Number=SeqID_38081
  Gene Ontology: Mol. function=3,4-dihydroxy-2-butanone-4-phosphate synthase activity; Cellular component=chloroplast; Biological process=riboflavin biosynthetic process
  Homolog annotation: Hit_ID=Q6Z234; Match level="QueryCoverage=38%, HitCoverage=26%, E-value=2e-57, Identity=79%"; Hit description =Putative riboflavin biosynthesis protein ribA
  Pfam annotation: Domain name=DHBP_synthase; Domain location=238-399; Score=163.0; E_value=8e-46; Accession=PF00926.10; Description=3,4 -dihydroxy-2-butanone 4-phosphate synthase
MSDDFVVPVHFEVGQEPRFCLLDHLLLVLLKLELFDSRQCVPSRLYDVAWARTVRTADRPTSGPDRPPAQNGAQQQQIEVSDNTCCFAPPSSGPAAQASMPSIAPPSSSVAALTRQPVQFFKGCSVSKETKGPVRSFFTANSKSTTVKSADLKVASSFKNDGGYPAGGVSWKDDTLLPKSTTIRGQDHPVADPVLPMDSMITPEILSANVERVIDMFADDDTDTELDLDSPTEDFTSIAEAIEDIQQGKLVIVVDDESRENEGDLIMAASLVTPEAMAFIVRHETGIVCVSMKEDDLERLSLPLMVTTKENEKLCTAFTVTVMMILQQLLSIELNSKDAKEGTTTGVSAKDRAKTVMTLASPDSKPEDLNRPGHIFPLKYREGGVLVRLCVCECEWAGTTVG

SEQ ID NO: 81457 - protein, 120 aa, Zea mays
  Coding DNA Sequence Number=SeqID_38082
MRPLLLSLSHLDFPRSNLPLPLPPISSWCPRDWRRRSPEFGPRAEEGSDPPELLAPEEGQEPDPSEINLLCQESFDEGKSIFPLMHYLPISLYHCLSLDYGMGIELHGEHERARINYYFD

SEQ ID NO: 81458 - protein, 150 aa, Zea mays
  Coding DNA Sequence Number=SeqID_38083
MGKNNKRKREPTPPSEEFGDSEYSEEEFFSEPEGSPAPVSPPASSDDSDDSQGITAEVWTYIRAVERAGLEGSDESEYSSDEEDSDGGEEGEDDDDDDDDDDGDGGSSGRGGGDGRGSTKGGSGGSGDNTRGSSRGSTKGGGGGRGRASG

SEQ ID NO: 81459 - protein, 157 aa, Zea mays
  Coding DNA Sequence Number=SeqID_38084
  Gene Ontology: Mol. function=catalytic activity
  Homolog annotation: Hit_ID=Q5NKP3; Match level="QueryCoverage=32%, HitCoverage=20%, E-value=2e-16, Identity=78%"; Hit description =Putative uncharacterized protein 9C20.7
MEDAPIGLGMALAVAAAVRQEINLILGDEVARQLPTPTPNAGPSGTTSRPPLLSPSHKSLLLIKAEALALASLIDDEKKLDDCQFELWKQYYVATCVAVFGKLRRSRCLDTVQSGCTALFIFKQGDLMVVANAGDSRVVLGTACDNGAVTTSSSLST

SEQ ID NO: 81460 - protein, 138 aa, Zea mays
  Coding DNA Sequence Number=SeqID_38085
MGKNNKRKREPTPPSEEFGDSEYSEEEFSSEPEGSPAPVSPPASSDDSDDSQGIAAEVWVYIRAVERAGLEGSDESEYSSDEEDSDGGDEGEDDDDDDDDDGDDSGRGDGDGSRDSTKGDSSRGSTKGGGGGRGRASG

SEQ ID NO: 81461 - protein, 32 aa, Zea mays
  Coding DNA Sequence Number=SeqID_38086
  Homolog annotation: Hit_ID=Q7XBE0; Match level="QueryCoverage=87%, HitCoverage=2%, E-value=8e-07, Identity=92%"; Hit description =Putative gypsy-type retrotransposon
MAPKRKTANSSAAVIPAIDPNSQLPFAGCFTF

SEQ ID NO: 81462 - protein, 131 aa, Zea mays
  Coding DNA Sequence Number=SeqID_38087
MGKNKKGGSSSHHSGDKRKREPTPPSEDFGDSEYSEEEFSPPLSQRVWTYIRVVERAGLEGSDESEVSSDEENSSDSSEEGGGDGDGEGDDDDGGDGDGKGGGGNGDGLGGSKGSNKASVLAPLVLNVSID

SEQ ID NO: 81463 - protein, 65 aa, Zea mays
  Coding DNA Sequence Number=SeqID_38088
MGSRHSACSAEAECRGSFVLLLLVTLLRGEYFLSEEVLFGIITWVLWLSTLQPLLRKDEAVEGDF

SEQ ID NO: 81464 - protein, 125 aa, Zea mays
  Coding DNA Sequence Number=SeqID_38089
MPLDRVRLTAAKSGLGRHRKLRLARPQGSDSASAPEDDELRLARPQGSDSASALEDDEFRLARPQGSDSASAPEDDELRLARPQGSDSTSTSEDRLDLDLGGASASPYPGLGPTTSQEGPSLPYP

SEQ ID NO: 81465 - protein, 214 aa, Zea mays
  Coding DNA Sequence Number=SeqID_38090
  Subcellular localization annotation: CTP_CleavageSite=14; ConfidenceScore=5.52e-01
TPRSPGRGYGPQVSSAEPRTPSRPSRGRSAPYRAQLRLALLAAWPAVRLRWRMSCLGPVTAWRTPAAVRPTPGARVPSLVRASCACCVEKCLRAATRPTGSRARYTLPSSSSPPGVRLVGSRAPAAFASCRRRPMAGGTEDTSLALLVSDVAHAEGRRRVGVTRPRIGPPERTTSSPARRLRAEAGAGPSARTCYLVDPASSHMLVSKIKPCMC

SEQ ID NO: 81466 - protein, 58 aa, Zea mays
  Coding DNA Sequence Number=SeqID_38091
MEKLLKLADVTPLSPFLFVSFCVWGLRLPVAAKLKEKIEKMFKGEKIQKQQNVQKAGN

SEQ ID NO: 81467 - protein, 200 aa, Zea mays
  Coding DNA Sequence Number=SeqID_38092
  Gene Ontology: Mol. function=glucose-6-phosphate isomerase activity; Cellular component=cytoplasm; Biological process=gluconeogenesis
  Homolog annotation: Hit_ID=P49105; Match level="QueryCoverage=91%, HitCoverage=29%, E-value=6e-83, Identity=85%"; Hit description =Glucose-6-phosphate isomerase, cytosolic
  Pfam annotation: Domain name=PGI; Domain location=1-163; Score= -199.4; E_value=0.028; Accession=PF00342.10; Description =Phosphoglucose isomerase
GRVIPCDFIGVVKSQQPVYLKGETVSNHDELMSNFFAQPDALAYGKTPEQLHSEKVPENLIPHKTFKGNRPSLSLLLPTLSAYEVGQDFVLIWGINSTYTLQLLSIYEHRIAVQGFIWGINSFDQWGVELGKSLASQVRKQLHGTRMEGKPVEGFNHSTSSLLARYLAVKPSTPYDTTVLPKVQQQLAGCRYSFAGNSWD

SEQ ID NO: 81468 - protein, 259 aa, Zea mays
  Coding DNA Sequence Number=SeqID_38093
  Homolog annotation: Hit_ID=Q0WWS3; Match level="QueryCoverage=15%, HitCoverage=51%, E-value=8e-17, Identity=95%"; Hit description =Putative uncharacterized protein
MKNVAKCDTWCELQNPANHRVFERKLRPKPSGGGHVCLGVTPKDTPNTPPRGEGRGVWPPAPHGEVGRSRGCRRTAPGAARGGRHQVVVLGAASRRAAGHSALRTHRATELALGPRPQRRPQRRTGPKFSGKGRLGGRETDSEQVPRGKDEKDFEKRVKECLKLPGGKRMGAGDAHRPYAERLLLVRRSARGVDRCRPRRRPKPGGPRRPRQPSSARTKPEMRKEADEREALTGPHRWPTLIFCEGFELEHACRDPKEW

SEQ ID NO: 81469 - protein, 258 aa, Zea mays
  Coding DNA Sequence Number=SeqID_38094
MRKKHGSVPKLHTCSGPDSHNEQKTLAFEVPLRTELRFPSPQVRTTPFHGEGLRSNRRPTAGSPPPILTTATVGRRCRDLALAPADARGARTGTPARWPGARVVAVIPSVTGTSRAASASAPMAGTPAPRQIPAQILPNEWGAGLRAGRRPDAKAGPPQNTNAALTARGIMGGPPVHTMRRSPSGRRGRRKPGQRLRHAGGDDARRRSAPRCLSPRRPQGQRAPPPPNAAGKGDPRTLAEGRAPAQHGSRPSGDDEHP

SEQ ID NO: 81470 - protein, 74 aa, Zea mays
  Coding DNA Sequence Number=SeqID_38095
  Subcellular localization annotation: CTP_CleavageSite=49; ConfidenceScore=5.06e-01
MSKNTRFIPRFGHTTKVPYFLVEAPTKSRVSFNPNPPFVDHKDQRVKGRAAMQAACNRTKGAHPFGFDASSMEA

SEQ ID NO: 81471 - protein, 88 aa, Zea mays
  Coding DNA Sequence Number=SeqID_38096
MESHDLRAEWESRLVGGNETDGFGYDDGAGKVVVIIATTAQTKMKLWKETSRSSKTTTSSRRGLAATPSRLPVKAAFIYVSFSHFDLL

SEQ ID NO: 81472 - protein, 94 aa, Zea mays
  Coding DNA Sequence Number=SeqID_38097
  Homolog annotation: Hit_ID=A3C4M6; Match level="QueryCoverage=67%, HitCoverage=10%, E-value=9e-28, Identity=93%"; Hit description =Putative uncharacterized protein
  Pfam annotation: Domain name=Nodulin-like; Domain location=8-92; Score=-120.0; E_value=0.00062; Accession=PF06813.4; Description =Nodulin-like
  Subcellular localization annotation: CTP_CleavageSite=62; ConfidenceScore=5.05e-01
MAGTRWGRWLGLVTAVWVQCISGNNYTFSNYSHARKTNMGLTQLQLNGLSVAKDAGKAFGLLAGRRPTTSPPGSSSPSAPSSLVHWHLDNSLQT

SEQ ID NO: 81473 - protein, 166 aa, Zea mays
  Coding DNA Sequence Number=SeqID_38098
MEAEVLESGRSGWWWREIRAHATAAAMRTRREAGWWGIRRGREGDRGGGFGRARDPRAGEESWRGHRAHGEEIMARRSAGKRVARRREVGKAHGEEIKLEVGAELGRPSSSRRGGWKLQSASRKGRAGGRGGERCGDRGRMGVGGGLERAHRTGEELHGILDDRDS

SEQ ID NO: 81474 - protein, 394 aa, Zea mays
  Coding DNA Sequence Number=SeqID_38099
  Homolog annotation: Hit_ID=A5BKB8; Match level="QueryCoverage=17%, HitCoverage=19%, E-value=6e-14, Identity=63%"; Hit description =Putative uncharacterized protein
MANGPKTDFRPRPRKRARGRAQDPPVVPPRETWKFGCTREGKRNSPKSWEGVSSAEPRTPSRPSRGRSAPYRAQLRLALLAAWPAVRLRWRMSCLGPVTAWRTPAAVRPTPGARVPSLVRASRACCVEKCLRAATRPTGSRARYTLPSSSSPPGVRLVGSRAPAAFASCRRQPMAGGTEDTSLALLVSDVAHAEGRRRVGVTRPRIGPPERTTASPARRLRAEAGAGPSARTCYLVDPASSHMLVSKIKPCMCNVPARGRPFGPKDPSSDRACPRTATPEASSATDRAQVLWKGTPGRVRAPSGPDPVAPRGAVNESGCLGMQPKSGGFELEHACRDPKDGELCLSGAKPEETLVEARSDTDDSWSPHEFYRVKPMIRGIGGATPSTYSQTLNR

SEQ ID NO: 81475 - protein, 122 aa, Zea mays
  Coding DNA Sequence Number=SeqID_38100
MGKGNKRKREPTPPSEDFGDSEYSEEEFSSESEGSLAPVSPPASSDDSDDSQGIAAEVWTYIRAVERSGLEGSDESEFSSDEEDSDGGEGEDDDDDDDDDDGGDGNGDGSGSGGGSGGKASG

SEQ ID NO: 81476 - protein, 31 aa, Zea mays
  Coding DNA Sequence Number=SeqID_38101
MVNSSRDRTKARDMERTTGSQIGEQEEVAGE

SEQ ID NO: 81477 - protein, 23 aa, Zea mays
  Coding DNA Sequence Number=SeqID_38102
MARVARTLLAKDRLKGVVRWYTD

SEQ ID NO: 81478 - protein, 235 aa, Zea mays
  Coding DNA Sequence Number=SeqID_38103
  Subcellular localization annotation: CTP_CleavageSite=80; ConfidenceScore=5.17e-01
MTSGQTLLRQGPRPRPHSRGKDKLSKPKSRSTDDKQPPTHRQIPTQVLPDGRAPTSAQRRRAGVACNRTTETHPFDFDASSMEAQAHTTCNQRAGYYVRKTAPPLTPMPRLLDCGTGAATRGNPAHGPTVPTEHIGHGSVSRGRRRDGQSGQKRAGNNGGTRRAEAAVKSSAGSRPHLEQQGSPLPRREDDTPVFPPSNGSHNDYPANHPSRRINFAAGQATPLAGHAGDVSPPP

SEQ ID NO: 81479 - protein, 101 aa, Zea mays
  Coding DNA Sequence Number=SeqID_38104
MPEHTDPAFSRPISQGWGANRYRHHGEAIREKLTADGARRSLAPGVRRIGGGPEAPVMFSTIPDVDRPTPTIPDGDPHITVTLRISPTPSTTSLEQSRRRV

SEQ ID NO: 81480 - protein, 305 aa, Zea mays
  Coding DNA Sequence Number=SeqID_38105
  Gene Ontology: Mol. function=transcription regulator activity; Cellular component=nucleus; Biological process=regulation of transcription
  Homolog annotation: Hit_ID=A2YA20; Match level="QueryCoverage=71%, HitCoverage=65%, E-value=3e-67, Identity=64%"; Hit description =Putative uncharacterized protein
  Pfam annotation: Domain name=HLH; Domain location=123-164; Score =22.5; E_value=0.00063; Accession=PF00010.17; Description=Helix-loop -helix DNA-binding domain
MLSTLPSAWADLGAGAAEDLAAQSHFGDDSSALLASRLRQHQIGGGDVKSSASHQSQVMLQLSDLHRHGGLGGEESGLFTDRSAPAPEEMEGGFKSPNSAGGDHSLFNGFGVHGAATVQPPFGQLRRERIAERMKSLQELVPNANKTDKASMLDEIIDYVRFLQLQVKVLSMSRLGGAAGGMAPLVASMASSEGKSNGSGGGGNTNATTKSGNGGGLRVAEHQVAKMMEEDMGTAMQYLQGKGLCLMPISLASAISSATSSASLLSRPPPAAAAGGGGGQMHGANGGAAAAATTISSPASANSSG

SEQ ID NO: 81481 - protein, 299 aa, Zea mays
  Coding DNA Sequence Number=SeqID_38106
MLACRESEKRVHLARLHAACMAARLFRPLVWAKVEGLFPFRKATRSSCSLMHRVFPPSEPPDGGKPPSFRLVVGGTQLRRSWYPSAIIRLQGFSSCSPVAFLRWWLPKTVTTSSWVGRSNPGYDLGPTLSFKDVHHPHWGGCRAEPALYLPRGFVGHPLPWHSRERALTGPAGGPDFDDAGLVDGRRRHLQRVGFVGLAPGGPSCQRAGAAPCTRVDHPRCRAPLGRRSCSGVALPLHRDGAFTRRPESLGSVGLAVRGSSSLVKETPRPLFDEPRPGVAPRPRTVLAPLEDGWPRPQG

SEQ ID NO: 81482 - protein, 101 aa, Zea mays
  Coding DNA Sequence Number=SeqID_38107
MPGADFIPHATESGSPMLAMVGTSAGHCTTAVGVSGALYAKAVRPERERGIDGDGCHVWGRSTLICRTIQEMVDGVTWPTTLPPGWTVEWDVAPAGEEHEE

SEQ ID NO: 81483 - protein, 1232 aa, Zea mays
  Coding DNA Sequence Number=SeqID_38108
  Homolog annotation: Hit_ID=Q6QP51; Match level="QueryCoverage=9%, HitCoverage=68%, E-value=1e-15, Identity=42%"; Hit description =Putative growth-regulating factor 1
  Subcellular localization annotation: CTP_CleavageSite=57; ConfidenceScore=5.54e-01
MTEPRDSYTSGIRIPHSSPSAITAPSVSTTPSTKSNLASDGNAVGGYPLRRTTSAPRPDHRRQGLLQESGSCRQLGRPPRSLSQLSPEDISPARGLGNSTPTSVPLVDGLARLRPTKSSFRANSASVRADTAAPGFGSSKSGRGFPLTKQEKPRAARPTEPRDSYASRIRIPHSSPSHEATHTWLSGSVSRQASPSARNEEKHGSMPKIHTCSGPNSHNEQNTGTQGAITNGTPVPPPRVRTTPHIGGPAGRQAPGDSPATSVAAAMVPGRTRPQEGSRGADDLDGGEAFSSCHHISTDDGVRLSTNAAPASAGRSKAHRQVLAPVLATKARRRTECCILAGQQQSPSPAWLEDASSAELEDGLHHQKLEEEVASRPVREVEPRLTSLSAPARMMKILEAEGGTKIAARLASPHHQTGGHRLGHRGLSLLQHAPRSSPYDTGAGSHASCKLARGRRSQTAARAVRATAQRLRAILHFRPGQRVKGRTAMQAACNCTKGAHPFDFDASSMEAQAHTSCNRRVGCYVQETAPPLAPLSCLLECGTSTATRGNPANDPTVPTRHIGHESVSRGRRRDGRYGQKWAGSNGCGRQAEAAVKSDWERGYHERDPSPQRKRALSPPTDQRFEGWPLGGVQQPPQSAWAPRPLLVRGSKAGPSEGARDDPGYVRYITKARAMLSSSLETPCSAPSKGNMALFPPPPCRKATQGRAIGNSASPDPRAWTRAQPQKTTNSASPDPRARTRAHPGRRRTPPRLTPGLGLGLGPERRRTPPRLTPGLGLGLGPGRRRTPPRPTLGLGLSPGLSRRSPPRPTQGLGLDLGLERQTRPRPRRSLHLSQPRARTDHVTGGAIITLPQANSGYGEQDRRPIWLAPINSDPIDGEFAAPTWIAAGRIGPRWRWPLTDHEPRARASYPVIAGLISPWNSHTRDSHRCQEEVCAGFLPRFARLRSRQAFEHGQKNTSTCSTSPERARARPAPDPTRPAPCQATPVSPARARSYKASQGFSRTPPCTLDLNGARDRQSLPGTRRASGLLSTRHRRQANRAIPRPVQPSRETLRASVKLPARGIELCLAGETKSRSPDFNRPSTNIDRAPRPEQPPPTSSPAFARGPADSGHHRRRAIPRRDRKDLPKPTPPFTGPPSPPGAGYTTPPQYTVQLFEKHRVPRCRVRMTLEPHPLQPDWRSLDSESFGYRAEDTIEAIALHGLTTLCGFHPLELSTHPIGLFPAEKEDDPMWKD

SEQ ID NO: 81484 - protein, 237 aa, Zea mays
  Coding DNA Sequence Number=SeqID_38109
MTWEFPSQYVKGPTQQGVESVVEMTTTSGITSDGSGDPSFWLLLFRKLCAVARTATIIVVSVWSLAAVRVPYGGSRAVSPGDSTILSPCDTVDAPQGERRWHTLPMSCDPFLSWVDQTLKHYQGGCLRFHGKTGQGLPGCQRWRLPTPWRSSAGGEGTGMPGALGAGKGLGGFGVAWRTRSWARNWRRSTGGWRSAARWLGGGAAQLQRAIAHIQGQKRKKYGQGEVGYLERGLWDL

SEQ ID NO: 81485 - protein, 25 aa, Zea mays
  Coding DNA Sequence Number=SeqID_38110
MTGDGSGVECTHAMLTRGAMGLHRF

SEQ ID NO: 81486 - protein, 40 aa, Zea mays
  Coding DNA Sequence Number=SeqID_38111
MAGEIELAGAKERWLAGEGFKLGIKVNIPDLGSRSEFQKF

SEQ ID NO: 81487 - protein, 74 aa, Zea mays
  Coding DNA Sequence Number=SeqID_38112
MRLVVGVTSTDEVDDARDGNGNTLEEDPKIFKVTPEGKEDDDDDNNGDDEEDYDDYDNNNDEGDDGSDDDNGGI

SEQ ID NO: 81488 - protein, 160 aa, Zea mays
  Coding DNA Sequence Number=SeqID_38113
MVTRLDVLGTAIATIAEVDEAASDGGEEMDYGVRCGAPDCPVHHRTVSGAPRESDSELARRLSAAADNALQEEQPLAEAIVAPGVLLVAVVAEAIAVSLLLLRLGDSLDLATLDGDRRGCCCSGTWRRRQRPWQGSEYRGGVLVAQLELPGSGFGLVDKD

SEQ ID NO: 81489 - protein, 365 aa, Zea mays
  Coding DNA Sequence Number=SeqID_38114
MESHDLRAERESRLVGGNETDGFGYDYAAGKRYSFRLERMARLRHTARKSVIPFLPSRLAERPLRRPVAGQSSHLERLHHRLHEEQERRRQEQGQQGSSFSLQQEIESVRSCSPVLPLEAPPASPLGAPASGVAAGGDPDDGGGDDSSSHDTDFSADQEPEGWVARPITRDAARGCHFHGALDTLLRRALTDHSREVYPDRWEATCLVRRPENSLQGAEACSEHYSISERDSAEAAMQDAARRALSHYCSVLGGVADGLNLKYYPRRPSGSTGGVIVSPVGEDNPRLSSTVNLAAVLNTELDHALDKLSRARAEIALLRAERAERRHLDDGSPTPVGSQHPYRSPRHGHQSYGNPDCKTKINLEP

SEQ ID NO: 81490 - protein, 561 aa, Zea mays
  Coding DNA Sequence Number=SeqID_38115
  Homolog annotation: Hit_ID=UPI0000F34A83; Match level="QueryCoverage =98%, HitCoverage=97%, E-value=2e-12, Identity=33%"; Hit description =UPI0000F34A83 related cluster
  Subcellular localization annotation: CTP_CleavageSite=21; ConfidenceScore=5.00e-01
MTVADAREQRARRQPSSRPIRGQRESPLSRSNGRRFAFAETTAPKKAPSLLTDQGFEGWPPEGFNSRLRSRGPYTHYWSERLGGCSRKPGSGRTVDSVNIPARELGPRPYTRATASSHEGTTRPAEALRKALRPRRSETTPPRPRGLHPAGALVRTHRNQMQPRNAGPLAKKCDESLQASANTPFEARGLLSGTIIRGTLKTPNSQLVTPISIKLQRPDGARTRAKPRKTANSAPLDPGLGLGLRPRKTTNSASPNPRGSDSASADDLRLARPRGSDSASADDLRLARPRGSDSASADDLRLARPRGSDSASADDLHLARPRGSDSASADDLRLARPRGSDSASADDLRLARPRGSDSASADDLRLARPRGSDSASAMEDRLDPGFGGASTSPNLGHRPATPSRSAIITLPRADSGRREQDRATSARTQPFQQLSLRQAPLLLRQPRHHASRVPRSLRLPHWHGLLREGWATRGRERGQALSWGRSLPSPAWTLVTPYCKRTRPGRGTNTKAAGFPPLSRRTPASSLLPPFALAHALDPSGLGHAAHSLVGLGTPRSRNAD

SEQ ID NO: 81491 - protein, 184 aa, Zea mays
  Coding DNA Sequence Number=SeqID_38116
MALPVGVAGLCPRLGDVEAPPKPGSSLSSMAEAESEPLGRARRRSSAEAESEPLGRARRRSSAKAESEPLGRARRRSSAEAESEPLGRARRRSSAEAESEPLGRARRRSSAEAESEPLGRARRRSSAEAESEPLGLGEAEFVVFRGLSPSPSPGSGGAEFAVFRGLARARALGRAERSSPSSGA

SEQ ID NO: 81492 - protein, 117 aa, Zea mays
  Coding DNA Sequence Number=SeqID_38117
  Gene Ontology: Mol. function=hydrolase activity
  Homolog annotation: Hit_ID=Q656M7; Match level="QueryCoverage=93%, HitCoverage=67%, E-value=5e-20, Identity=50%"; Hit description =MutT/nudix-like
MASWIGGGVEVLVISSRKKGPAGGALIPKGGWELLDESMDEAARREAKRRRLAWSGTPAPRWAAATTPRTRASSFVLPLRVTAELDRWPEMAARRREWVPAAQAIARCPHPWMRTSR

SEQ ID NO: 81493 - protein, 81 aa, Zea mays
  Coding DNA Sequence Number=SeqID_38118
MDGTLAVAVWPIAVAVWASGGSWLRPAVGVRGLEIAAGCGVQGQVSVNGTERDCASGLGTERLRLVDFLERNGSRSEENIP

SEQ ID NO: 81494 - protein, 275 aa, Zea mays
  Coding DNA Sequence Number=SeqID_38119
MQLLACSIRRAGCATRGPGLPCGRVGSRKTRPHPSTGGTQDGGLRLDGGGKRTGPRPLPLPQPQGFSSPGLGRGVCRVEVGPRVGGSPLLHLVTGGRSGCRPRRWHLQRAWLTDASGFGAARGAGVCHGSWKRFFHRRDSQGWPRTDPQLYGLLPVLASRVLGHGRGPPGSSIRPEVITAAVRPPGAEVFIVAAAGAGDDELLIGLLLLRRPLPHGVGLFVPAEEGTGVPFCNGTSNARESLGSVGLAVRGSSSSVKGTPRPLFDEPRPGVAISV

SEQ ID NO: 81495 - protein, 154 aa, Zea mays
  Coding DNA Sequence Number=SeqID_38120
  Subcellular localization annotation: CTP_CleavageSite=37; ConfidenceScore=5.15e-01
MSGAPEDSNSNSPPSGISRGTRAIIHRTVRCTPDSVRCAKKERPQELASFENLQRLVRYNSPDMSVVSLPHCNHQYHADFNICHDLHGLIIEEHVSQLPVEVPSYIVSHQNNPRVTGVGDDHEVPLFEDGQRGAAALDRVQTVAAPELVEHNDT

SEQ ID NO: 81496 - protein, 93 aa, Zea mays
  Coding DNA Sequence Number=SeqID_38121
MEHKNRSSQAHSKIPLQRFEMGEARDVCEGEGEVRGVRDQLNCPSGPVQPVLTSEFRRENPSSTARRQVQLVYGQRGSQLKLSSAEVEKAQLS

SEQ ID NO: 81497 - protein, 135 aa, Zea mays
  Coding DNA Sequence Number=SeqID_38122
MNRLSHGVHDLPVRRCPSMPRGALPLVARPQAEIPHGGHARWGVGHVPYGQGPRESGFDSYFLGGPQFLSCGDHFPPLRLGMTDVFPTTFYGQIPQNWYYPQCPNPNDVPFAHPDPPLDFEVAQEARSFELRYFL

SEQ ID NO: 81498 - protein, 130 aa, Zea mays
  Coding DNA Sequence Number=SeqID_38123
MAFDDDAVGGDGQDIDDGSTSEVSHFADDLTTEIEELNVALVNQDKLLTLGDRERKDFKFKYESTLRELEYARASVVVSDETECDAELAERNVRIALLEKTSSVSAPTPTQCALCEGLQLALDSRRHDKT

SEQ ID NO: 81499 - protein, 109 aa, Zea mays
  Coding DNA Sequence Number=SeqID_38124
MEVVFGWCLRSGVEQEAAPVPLPRMLSHAHQVLSDTWAAILQQWEALEAEHQRLSDWRTQLEERTKSVSRQFLSERSQLEQDRKEYKRDLQKGVRQGAGGIPEGEEGDQ

SEQ ID NO: 81500 - protein, 111 aa, Zea mays
  Coding DNA Sequence Number=SeqID_38125
MPPGAGVAAAGSLAGHGKLLVLYWQQPGVDRWHHSQFKEKGTTLTWGPRPSSDPRSEIAVPAAVAAAVVVVAAGGPGGDHPQMVMVVAGQMVVVAVVAAGQMVVVAAGLED

SEQ ID NO: 81501 - protein, 20 aa, Zea mays
  Coding DNA Sequence Number=SeqID_38126
GFVECFRHSAKLLIPVVHPN

SEQ ID NO: 81502 - protein, 62 aa, Zea mays
  Coding DNA Sequence Number=SeqID_38127
MLWVIFYEKLILYIFAGLVPEQSLKNKKKVENEAAQEEILKLKSEVSGFGSTMLKKKNLSRY

SEQ ID NO: 81503 - protein, 161 aa, Zea mays
  Coding DNA Sequence Number=SeqID_38128
MERKIVKSLMSYAIKLPLSVWLVVKTYGQEMVRKYGEEKNLIVNVLARAAKTLLSLGAPDSVRWCSQGAAKRFREELRQQQMAFVQQQLEYMAAYNAQAQQAMNGTGVMGHNTPPLVMLAPGGASGGEGATKEENPNRIDDFVNNFFTSGGSDHNSNVPYM

SEQ ID NO: 81504 - protein, 149 aa, Zea mays
  Coding DNA Sequence Number=SeqID_38129
MAERLCGDSGAAACLVGKMGKESANEGWGVLGVWGLHFKARVRKVKKEMGREEKRELRKKKCRVGFLTQGRCSGRLGMTSGGSCQLDDDETRRQRSPVYTGRGSNVDRTKRPGEGETEVGSRCVALMRSSLWQRRQQWLDDDGITTLRW

SEQ ID NO: 81505 - protein, 235 aa, Zea mays
  Coding DNA Sequence Number=SeqID_38130
MEVVFGWCLRSGVEQEAAPVPLPRMLSHAHQVLSDTWAAILQQWEALEAEHQRLSDWRTQLEERTKSVSRQFLSERSQLEQDRKEYKRDLQKWVQQTKAVERMQKWQQELEGKASDAALAEEKLKAKEQSLDRRETDLARREMYLTFREEMLTRRGEMLAEHELEAEERERKLEEQIRQFNAAQAAPGPQAVEATRKALEYLQAEYRAGVQRITAWAGEASTALVLWGIDIPRVH

SEQ ID NO: 81506 - protein, 298 aa, Zea mays
  Coding DNA Sequence Number=SeqID_38131
MVGCLSEQASVSLGVGSPRNSGEVGVQVAPEERVLPALPRILLGLLLSPSAITSSGVPSFPKDAFFRGFSYLRDLVSRDRLLRIPFSGRVMSSNVPASVPPSAGFSLRWFFSRRGRFVVRDGGPEERKERLAFPWSPSSSRSVSIPFVGEVDSGVFRVSELPAPAFPEIIFFRRAGGSVFPAFSEFVGGDFFSGRSARRCRIPSSSATDEIVPKQNTDPGRTVILLWKVTAIELAWIVDTPPTWRASCRCFGSDRTPGVTPQGSGRLEMRNTLRPDEYLSAVTRGLSGTEAQRVYVSG

SEQ ID NO: 81507 - protein, 159 aa, Zea mays
  Coding DNA Sequence Number=SeqID_38132
  Subcellular localization annotation: CTP_CleavageSite=22; ConfidenceScore=5.40e-01
MAPRKPCDDGGSQLSYGSRRTSARTRPPRQLSLRQAPSLLRPPRHHTSWVPRSLRLPHRHGPLREGWPRGDEDETGALLGPLASLTRVDACNPLLQAHPTWTRDEHEGRGISTSLTPASGHLASPFALAHALDPSGLGHAATFTRRLGDPPFSKRRHII

SEQ ID NO: 81508 - protein, 34 aa, Zea mays
  Coding DNA Sequence Number=SeqID_38133
MPSSAEPQNTWVGCLVVPTPDSVACWSNLRFDLI

SEQ ID NO: 81509 - protein, 92 aa, Zea mays
  Coding DNA Sequence Number=SeqID_38134
MPRAARAAFVFWGGPAFAPGWCPHAERRGGGGLRNPRRRRDHCHHPRPGPPALRACPRPSSVGVGEGKLAAAPTLRLALLRLGHPERESSSS

SEQ ID NO: 81510 - protein, 51 aa, Zea mays
  Coding DNA Sequence Number=SeqID_38135
MGKPVPSLLMLLLSRVTALVPTITGMRDHVSGRVRRAICGQVQSGGFELQQ

SEQ ID NO: 81511 - protein, 139 aa, Zea mays
  Coding DNA Sequence Number=SeqID_38136
MGKPVPSLLMLLLSRCRVPLDCPTRWQDGRPSHSSNHVLQRTCKNYATSKAEYTNTQLDLPGQHGSSSLISCEKQTIRIEFQPCKNWSCKKPGLAFQSWGRQILDGRFWCWILGYLLSNSLLRHEDVLSVSEVAIYRMQ

SEQ ID NO: 81512 - protein, 91 aa, Zea mays
  Coding DNA Sequence Number=SeqID_38137
MAPRILCDNGGSQPLTEARGRQQGLNHSDSCLSARLHRSSDGHDITPAGCQNLSGCHNGMFIKRRVIKGEHKMITLWRKKHLKPLQLKSER

SEQ ID NO: 81513 - protein, 108 aa, Zea mays
  Coding DNA Sequence Number=SeqID_38138
MPSSSSSATNTPPADASSEDTLSNVAAAELHPGDTVEFGVSRISSVRVHDMQQLGYFGSKVGRVPGAEKVPEPEGELIVFEAFFTVGLRLPAHRCVVEVLQRFEVQVH

SEQ ID NO: 81514 - protein, 119 aa, Zea mays
  Coding DNA Sequence Number=SeqID_38139
  Homolog annotation: Hit_ID=Q6QP51; Match level="QueryCoverage=50%, HitCoverage=31%, E-value=2e-12, Identity=56%"; Hit description =Putative growth-regulating factor 1
MREVEPRLASLFAPARMMNILEAEGGTKIAARLASPHPGAGGHRLGGSKRRFAFAIMTASKKALSLPTDQRFKGWPLGGVQQPPQSAWVPRPLLVRGSKAGPSEGFNGRLRPLGLRAHY

SEQ ID NO: 81515 - protein, 165 aa, Zea mays
  Coding DNA Sequence Number=SeqID_38140
MTKSWVVSGIILERRQPNFTRTGAIASPLQLTGWTPLVIIRTLRNSLVCGLMSLWQLHVGPDYQDRLLRRVKLRAQQNLRVRHDSLAGITATRSPYFFSRVSPHSPPRGTRESSPPPSLRHRAQYVAPGGSQLPRADSSAVHQPQSMRPRFKPRPPPLPSPNLEK

SEQ ID NO: 81516 - protein, 104 aa, Zea mays
  Coding DNA Sequence Number=SeqID_38141
MNSRLPKRSTVPGLERLLETAHLELDGKLFVNTQQAPTWRANCRRFETGGSLDRRVNCRRVPQPRWVGARWSAKGGGNQRETGVRGGNPAAFVFVPRLGRVRLQ

SEQ ID NO: 81517 - protein, 199 aa, Zea mays
  Coding DNA Sequence Number=SeqID_38142
MEKDHQDAAHKRRAVVRIADPMREANKARGSTKVAAPGSSKPVPAAKLAAPGHSKASASAKVAASGASKPPPGGPVKGRRVGWGQLAVVPPPVATTSPTTVVEAKGASRDSWATFCASGKILSAAAAKDMAGSMSQQLRQASQQLSQQLKQAADFADHIALGALTTDFAAEVESLRAQHADAVREKSAAERKVACCRRR

SEQ ID NO: 81518 - protein, 579 aa, Zea mays
  Coding DNA Sequence Number=SeqID_38143
MARLRHTARKSIIPFLPSRLAKRPLRRPVAGQSSHLERLHHRLHEEQERRRQEQQGSSFSLHQEIESVRSCSPVLPLEAPPAPPLGTPASGVAAGGDPDDGGGDDSSSHDTDFSADQEPEGWVARPITCDAARGCHFHDALDTLLRRALNRRTWSIEYRCVVYQHSRGVYPDRWEATCLVRHPENSLQGAEACSEHYSISERDSVEAAMQDVVMELPLDAQSSGRRLDVNERVEQCRAVVGVLHVLAWFVPVLQMQHRRDGFPKLLKACIVRLGIRSQPEYDGREFVEHGTEKCVVTVYIGSSPHHVEWSVTAAGHGFKDTCQVVARKALRALCQIYEEEVADTPLRFFLPFQRDRPAWMARMRALEEQQLFEDNPTIVYLTAYLLTLDAQYDFLARHQRQMIARAEDAEKRNRQLHVDLTTAQAHATALESREVIAVEALKQAKDEHVQKLMEAYLVTHNQRRALRIQEPAPSNPVQPMRVEDPPPRFLKAMDKQEHPESSQDPLPELFEPLTMKKIPAPSREIKEAASTPPAPPPSEELQEPVLLEEEFDPMLPSQSPPEEVMNISSLLTHPGDVSD

SEQ ID NO: 81519 - protein, 248 aa, Zea mays
  Coding DNA Sequence Number=SeqID_38144
MPLEQEGRCSSMEVGSKIQMSHAEVVAPAAAALVMKRELYIASRIRQRESLPQQTPEKPERSKKKSDLQCSEPRLPPADQEQRVHLPGELRCPPLPQRHGHRSLGEMRQTRSRIVKLLFWLLRPQRRKERSSSLRQSHSTSMSFSSGEEWNQLPSPTMNQPHQEKNLFSENLADEGTDARIFGDITKPESGTQRSPCHDMRSQRWERLQKNGSSGKGGIPNDVIVGKLKSRLSRKRDNAERILFSNET

SEQ ID NO: 81520 - protein, 456 aa, Zea mays
  Coding DNA Sequence Number=SeqID_38145
  Homolog annotation: Hit_ID=Q6QP51; Match level="QueryCoverage=35%, HitCoverage=76%, E-value=6e-12, Identity=37%"; Hit description =Putative growth-regulating factor 1
MQPGCLMKILEAERRLKAGANQVFSNTLQGPPPTTRGLGPTRHASWPGAEEAKPPRAVRVTAQRLQALLHFRPDQRVKRRSAMQAACNRTKGAHPFDFDASSMEAQAHTSCNRRAGYYVQETAPPLVPLPRLLDSGTGTVTRGNPAHDPTVPTKHIGHGSVSRGRRRDGRYDQKWDGSNGGGRRAQAAVTSSASSRTGKGDTPKGILLREGSGPRAPLLIRGSKAGPSEGFNSRLRTLGLCTHYWLAPEGFDSRLRRRARDDPGYVRYITEARATLPRGSGAALANSAPAKPLTASTYQPENLGLDSKFGLRCHRKLCLARPQGSAPVSASNDELRFARPQASDPASAPEDDELRLARPQGSDSASALEDDELRLARPQGSDSASAPEDDELCLARPQGPDSGLASDDGLRLARLGARTRPRKTDSTSTSEEPPPRPTQGSDRPRHRGGHHYPTPS

SEQ ID NO: 81521 - protein, 434 aa, Zea mays
  Coding DNA Sequence Number=SeqID_38146
  Subcellular localization annotation: CTP_CleavageSite=30; ConfidenceScore=5.29e-01
MSSSSLMRRVFPSSKPPDGGYPPSFHLLVGGMQLRGSWYLSAIVRLQGFSSCGPVASPRWWSPKTVTASSWVGRSKPGCDLGPTLSFKDVHHPRWGGGRAEPALYLPRGFAGHPFPRCSRERALTGPAGDPNFDNVGLGRRRASSPPACRARRLGSRWPLLSEGGCRAVCTGGPPKMSRAARAAFVFWGGPAFAPGWRPHAEVDTPLAREGLSGDLPGSRWALPSVPRRRRLEKSPSPTGSPPPSAPLAPSSSHLSSPLERRCGRGQDCSSAHPEACAAAARPSKAGVVVVVVRTGGGEPLVSLLLLRRPSPMEWGCSSSLVKETPWPLFDEPRPGVAISVRTEAELARKWEPGWPEPSRVVCQRGRRRSRSVEASGRAGALGRWSAEAPGVTGRAACSGRIPGEVPGAASPSEAGSDLAEGVVDAEGASPLPA

SEQ ID NO: 81522 - protein, 184 aa, Zea mays
  Coding DNA Sequence Number=SeqID_38147
  Gene Ontology: Mol. function=endonuclease activity
  Homolog annotation: Hit_ID=Q9AY32; Match level="QueryCoverage=34%, HitCoverage=95%, E-value=6e-23, Identity=90%"; Hit description=RRNA intron-encoded homing endonuclease
MVQGGPAAETLQRQEIPSAPWALPAIYVMEILHVARSSPGQRARRSSNGDGETSSGRRGFMAAALGRARSEGEVEEGSAGAQMREGERASGVLGPSGRGRTTAKAFAKDVFINQERKLGARRRSDTVLVSTINDADQGSAGVTNRTPLAPYEKSKSLGSEGSMVARLKLKGIDRRAPPGVEPAA

SEQ ID NO: 81523 - protein, 309 aa, Zea mays
  Coding DNA Sequence Number=SeqID_38148
  Homolog annotation: Hit_ID=Q6Z8F0; Match level="QueryCoverage=19%, HitCoverage=53%, E-value=1e-12, Identity=69%"; Hit description =Putative uncharacterized protein P0459B01.18
RAPTRTLHRRSGSASDAAREGLPLVSFLAHLRLLRHSAPRGAPEARGYRPCRRRLPGAPRAPGLWPPARATTVHAPSRSADQQEPFRIRPRTWARSVAEDASPDYNSGGEAARFSSWAAPGSLAVTRGILGRMAGHAPGRCTENNLMSPTTCCVRRGSPVAPASAHLALRRGGPDATSLAPRWGVGSVFWRDAQADVPSARRLRAQLAFKNSMVRGILQFTPGIAFCYVLHRCESRDIRCRESCRLRCNRCPGSGRRADRSAGQEVVLVFLGARGAVGSFSRPPFPAGGSGGGGQRAGPEPGGTGDSFA

SEQ ID NO: 81524 - protein, 338 aa, Zea mays
  Coding DNA Sequence Number=SeqID_38149
  Homolog annotation: Hit_ID=Q652R5; Match level="QueryCoverage=37%, HitCoverage=48%, E-value=3e-22, Identity=49%"; Hit description =Putative uncharacterized protein P0603C10.50
  Subcellular localization annotation: CTP_CleavageSite=26; ConfidenceScore=5.73e-01
HSSPSFGSRQACSNSNPSQKIRVGQRCGSRVGWGARRPLRRSAPRGAPEARRYRPCRRRLPGAPRAPGLWPPARATTVHAPSRSADQQEPFRIRPVRVASPHPLPSQQFQALFDSLFKVLFIFPSRYLFAIGLSPVFSLGWSLPPDLGCIPKQPDSLTAPRGATGSGPDGALTLPGVPFQRTWARSVAEDASPDYNSGGEAARFSSWAAPVRGQARSLDGSLGPNGRPRTGTLHREQLDVAHHVLRPARFAGSPCFGPPHPAARGARRHVPRPTGGVLGVCFGVTPRQTCPPPEGFGRNLRSKTRWFAGFCNSHQVSHFATFFIDARAEIFIAESRVD

SEQ ID NO: 81525 - protein, 203 aa, Zea mays
  Coding DNA Sequence Number=SeqID_38150
  Homolog annotation: Hit_ID=A5B938; Match level="QueryCoverage=20%, HitCoverage=36%, E-value=1e-08, Identity=73%"; Hit description =Putative uncharacterized protein
GYTLIDTTLGNGYLGSRIDEERSKMRYLCELQNPANHRVFERKCARSLLAEGTSAWASRQKTLPTPPRGARDVASGPPRRRASVPARSRPFGPKDPSSDRACPRTATPAQIGRQTPSKAKYRRETDREQVPRGKDEKDFEKRVKECLKLPKGKRMGAGDAHRPYAERLLLVRRSARGVDRCRPRRRPKPGGPRHPRQPSSART

SEQ ID NO: 81526 - protein, 65 aa, Zea mays
  Coding DNA Sequence Number=SeqID_38151
MARGQGGTEGKREEAHGDGRAGLFGLAFGLKTRSSPWRAGRKQRFGHGRENGLSPSAWKDTEAAT

SEQ ID NO: 81527 - protein, 382 aa, Zea mays
  Coding DNA Sequence Number=SeqID_38152
MGISSPWAERESRLMGKVVRIVTTAQEKVKPWKETSRSFKTTMNFRWLVLDTLHVIKSVIPFLPSRLAERPLHRTVSGQSSHLERLHHRLREEQERRRQHREQQGSSSPPQREVESVRPRSSVAQLEAPPAPPRDVPAVGGATGGDHDNDDSDHSTESSEPQEAEGWVARPITRDAARGCHFHDALDTLLRQAFDRHTWSIEYRCVVYQHSRGRYPDRWEATCLVRRPEDDLRGAEAVSEHYSISERDTAEAAMQDAARRALSQYCSLFGGVADGLNLRYYPRRPTGSTESVVVSPVGEGNPRLSSTVNLVAVLNTELDHSLDELSRARTKIAELRAELAERHHQEGGSPAPVGTQHPYRSPPRGHHTYGSPVCKTRIDLDP

SEQ ID NO: 81528 - protein, 212 aa, Zea mays
  Coding DNA Sequence Number=SeqID_38153
  Homolog annotation: Hit_ID=Q0WWS3; Match level="QueryCoverage=19%, HitCoverage=51%, E-value=8e-18, Identity=97%"; Hit description =Putative uncharacterized protein
MKNVAKCDTWCELQNPANHRVFERKLRPKPSGRGHVCLGVTPKDTPNTPPRGEGRGVWPPAPQGEVGRSRGCRQTAPDAARGGRHQVVLGEASRRAAGHSALRTHRATELALGPRPQPEVGSSGRKSTAHRAVSGAPPAALENPEDRIPSTPGRTHNRIRSPRGPGPEPVGCWRNARAARAARAGRRVPAGGRTGNNPLEGLPRASNNRLRT

SEQ ID NO: 81529 - protein, 187 aa, Zea mays
  Coding DNA Sequence Number=SeqID_38154
MLELLAWRERAAACRPGGRTGNGPLGGLPRASNNRLRTETHLHVFDAFCPRQSTLTRAPACPAPRPSQTSAVARARAYKALPGFGYTLPHTLQTSPELARRRLPVRSESAAAQSLCHRRPASGAIPNSVQPSEKTVHTSAKLPERGIGVYFAGEASPRSPELSTPPEYVDRVNRSTILRFLVHTVAT

SEQ ID NO: 81530 - protein, 105 aa, Zea mays
  Coding DNA Sequence Number=SeqID_38155
  Subcellular localization annotation: CTP_CleavageSite=16; ConfidenceScore=5.07e-01
MANGPKTDFRPQPRKRARGRARDPPVVPPRETWKFGSTPTTGYGWLPPARRPGRVAAQWDGPLLDAFFVSPALGGPSVAVLASRPAAPSAVGCFGWLDRSGYAGA

SEQ ID NO: 81531 - protein, 192 aa, Zea mays
  Coding DNA Sequence Number=SeqID_38156
MANGPKTDFWPRPRKRARGRARDPPVVPPRETWKFGSTREGKRVTLAKPLILSKNAVSSHLRWVSWGPGKMPWFSEGRTPQSPGRGYAPQPRRAMAGYRQPDALDEWLHSGMARCSMRFPFIPRSVDLRSPSSQADPPRPARRDALDGSTVAATLAHELSWTRDCLGDPRCRAADSRRPCPIARACILCLLR

SEQ ID NO: 81532 - protein, 51 aa, Zea mays
  Coding DNA Sequence Number=SeqID_38157
MALSHPDFGAPRPGREHNHQVGAHVKCKAYQRGWLKLSIAFKVGQNFISNY

SEQ ID NO: 81533 - protein, 376 aa, Zea mays
  Coding DNA Sequence Number=SeqID_38158
  Gene Ontology: Mol. function=nucleotide binding; Cellular component =Golgi apparatus; Biological process=small GTPase mediated signal transduction
  Homolog annotation: Hit_ID=A3BR61; Match level="QueryCoverage=11%, HitCoverage=20%, E-value=4e-17, Identity=100%"; Hit description =Putative uncharacterized protein
  Pfam annotation: Domain name=Arf; Domain location=224-310; Score= -86.1; E_value=0.0054; Accession=PF00025.12; Description=ADP -ribosylation factor family
  Subcellular localization annotation: CTP_CleavageSite=31; ConfidenceScore=5.47e-01
MDRAFTQGSQCWGVRRPQQGKRRPWTSPSPRLSSKKSPSTNIKPRPRDNAGYLRQRRCPDIPPKPSQRDIDMLATAKVVLDATPTGRAHGIGHHLAASAPLPQASVAAPPDDNSAAASTQPLQPLPSRAARSTVQEGRKILPKSQPTGRPMALPTGASTEAHALPRDSTCHGAQRSSHGSCRTRTPGGRARHRRETRTRRQRASPPRPCPPPAASTWAHSTATATKTMSRARIRALATPTSGCLAATVLGVRASIPVCLGVDLPGALDDAAITESLELHKIKSRQWAIFKTSAIKGEGLFEGLDCLRFTRAANQTQTQIKSTHVVTRDETMQLTNHMNYFHRSRYNGLSFFLYTITGGMLGGQEPPDRLYWLLVVP

SEQ ID NO: 81534 - protein, 287 aa, Zea mays
  Coding DNA Sequence Number=SeqID_38159
  Gene Ontology: Mol. function=nucleic acid binding; Cellular component= nucleus; Biological process=RNA processing
  Homolog annotation: Hit_ID=Q6YW21; Match level="QueryCoverage=78%, HitCoverage=72%, E-value=3e-96, Identity=79%"; Hit description =Putative mec-8
  Pfam annotation: Domain name=RRM_1; Domain location=51-118; Score =8.4; E_value=0.025; Accession=PF00076.13; Description=RNA recognition motif. (a.k.a. RRM, RBD,
  Subcellular localization annotation: CTP_CleavageSite=25; ConfidenceScore=5.16e-01
MAGAGIHPFQQWPPTAAAPPPPGAAASVAVPPPPPVPGAPGTVGPDEVRTIFITGLPADVKERELHNLLRWLPGFEASQINFKGDQPMGFALFSTAHQAIAAKTALQDMVFDAETKVALHTEMAKKNLFVKRCVGIDANAVDQSKRLRTGGDYTHSPYAPPFHPPPPAVSMWGTPGYITAPPPYNPYAAYPVPPVAMTSPAPVTGPTAYAPVQNTKDNPPCNTLFIGNLGDTVVEEELRSLFSVQPGFKQMKVLRQDRNTVCFIEFEVNAKAWLCTFWLENLSDAKI

SEQ ID NO: 81535 - protein, 402 aa, Zea mays
  Coding DNA Sequence Number=SeqID_38160
LAGELQRRLAAFESRAEGAEAAARAEAERTRTQLMTSYRELGVRTSDFEVPEREAGLRCLEWVQEELQELPTVLAGLMSFTSLVTCEAAMNALSREGCRHFEALDQVDEDFGRDIFEVEDPVVKESGGALFDRMWGSYGREVVRARAEAARAQAERGERVDDFGALNSAPPEPETTPAEAATGVAPVTAEDAPGVLVPAAAGEGLLPRVAEGASDAPAAAVPGVEDPAETTAEAAAEAPAAAGPSQVQDFGPAHATATTGFLAASTAEGGNECGGSVSEFFDFTDSGSSAEWTEESSEEDLDYFAALDEAAAEAALHAVDAPGVPGPSTGHRRRRAVAKRRISAEEGARLRVSRVGRQGLLSLPAVSGVGEGELRSLFAGEELRIMLFNYREMGIIPKVEPM

SEQ ID NO: 81536 - protein, 79 aa, Zea mays
  Coding DNA Sequence Number=SeqID_38161
MVEKGHGSHGGTTVARSAITKRRGWRQSGKGTGKGDTPKGILLCGGSGPQALLLIRGSKAGPSEGFDSRLRALGLRAHY

SEQ ID NO: 81537 - protein, 61 aa, Zea mays
  Coding DNA Sequence Number=SeqID_38162
MRIRFKMMKMKIKRLSHLKKRVEDALRDSDWVVTMQEELNNFTRNEVPNGYSATSKMSMVW

SEQ ID NO: 81538 - protein, 66 aa, Zea mays
  Coding DNA Sequence Number=SeqID_38163
MKAHSTIIHRTIRCATGLSEDDMKKMDEEIQRQQDQVLKVAKKWFLSHFKVDCHQKAVRDREINTD

SEQ ID NO: 81539 - protein, 131 aa, Zea mays
  Coding DNA Sequence Number=SeqID_38164
MPRSNVSCGSSSKVVLNITTNGEEWPGVRRGGSGDVCDDRRSGESADNPVSSGKARSRQGLGTAGLGGAWHGHGRSGELRCGRGREWGNDGGLDWEMRASSVGERERVGLSFYRGRGEGERVPMEGEGRPA

SEQ ID NO: 81540 - protein, 180 aa, Zea mays
  Coding DNA Sequence Number=SeqID_38165
MSSQEVTLELLLGDDSNYKSWIKHYQVADYNNPTQKERYNTPYKEKHVQYKIALASMVTREKETQRKYENLWETSTRHIDMIQQLLALGNTMQQHECNNHDTFGAPANIEPKAKKFLYPKIQGVTSSEVPDPEIIVFDTTISDACDSGARTMEKEGDREKVGGVQIEDLSQAKRIRPIAG

SEQ ID NO: 81541 - protein, 144 aa, Zea mays
  Coding DNA Sequence Number=SeqID_38166
MASQVKTILYEPTPRAETPPPSDGYPQRRISALTVHTAVVEVCLVADVRAWSKWRGGVGLLFLKVTLGTGFQSVKSTFIFRRKRFFVFEQFGFPAGTSTAVLPFFLITGSIFRYPRMFNFKARVEMLHYHAPHSAVPDLDLWGV

SEQ ID NO: 81542 - protein, 128 aa, Zea mays
  Coding DNA Sequence Number=SeqID_38167
  Subcellular localization annotation: CTP_CleavageSite=35; ConfidenceScore=5.08e-01
MADVADSVVGTRGPISSGHKKGVARSLPSPPLRPRANIRNQADLHYRHVNREGRDPPPGIAVTGGGLRSRSRLVEYRLRLGKPSVPSNWVVRLRCDANRSPLLSRHRESAPRRVPVYWVFILGKLPPY

SEQ ID NO: 81543 - protein, 239 aa, Zea mays
  Coding DNA Sequence Number=SeqID_38168
  Homolog annotation: Hit_ID=Q6QP51; Match level="QueryCoverage=26%, HitCoverage=29%, E-value=2e-14, Identity=64%"; Hit description =Putative growth-regulating factor 1
MQAACHCTKGTHTFDFDASSLEVQAHTSCNRRAGYYVQETAPPLAPVPHLLNCGTGAATRGDPAHDPTVPTEHIGHGSVSRGRRRDGRYGQKWAGSNGGGRRAEAVVKSSASSRPLLGQRENPLPRRKDDAPVFRSSNSSRTHNGCPANHSSHHINSAAGQATPLGPGKGILRKGSFSAKEAGPEPPTDQRFEGWLLGRVQQPPQSTQAPRPLLVRGSKAGPSEGFNDRLRPLGLRGHY

SEQ ID NO: 81544 - protein, 171 aa, Zea mays
  Coding DNA Sequence Number=SeqID_38169
MGTIQAKAPLKGHDPASPEPDLGQRQPTPEDSRLARGSPQATDATSTRPRHNSGLGLSLGSGRRWTPPRPTPGLGLNLNLGGITTTPKLESGPATSPGGPSLQRQLRLRGTKPASHLARPSKQVMMTPRTLHDNGSSQPLTSARRRQQGPDSPDSCTSAGLQLSSDGHNIT

SEQ ID NO: 81545 - protein, 49 aa, Zea mays
  Coding DNA Sequence Number=SeqID_38170
MKLLRKCVISLKMTRTEDLNAESFVREIPTMMMNATLQATPWPLSYKPP

SEQ ID NO: 81546 - protein, 85 aa, Zea mays
  Coding DNA Sequence Number=SeqID_38171
MEARRASRYRVHGRRSWRLRNPKPGVKKKTCEVKVDRVEKRYGASRITTKEHDLQLMRVLELIVCNLDQVMKTEFWSPTSTLKGN

SEQ ID NO: 81547 - protein, 169 aa, Zea mays
  Coding DNA Sequence Number=SeqID_38172
MEQRRCAGLLLGAGHGARSSLEVVVAASREEEGVLCRASAAPRELLWQGTEGGGSCAGRGAEHRELRTPWLLAEQRRRSTTEGASQRRVEVQPWLLLPLRKGGQGWSPWAGARLQGAARHGERAQGKVELLLREEENREKREWRLKIFEGWDCKIAKCKEGALLFIDMG

SEQ ID NO: 81548 - protein, 143 aa, Zea mays
  Coding DNA Sequence Number=SeqID_38173
  Gene Ontology: Mol. function=transferase activity, transferring glycosyl groups; Cellular component=integral to membrane; Biological process=protein amino acid glycosylation
  Homolog annotation: Hit_ID=A1C0L4; Match level="QueryCoverage=93%, HitCoverage=48%, E-value=2e-64, Identity=71%"; Hit description=UCW98, putative galactosyltransferease
  Pfam annotation: Domain name=Galactosyl_T; Domain location=1-112; Score=-46.4; E_value=0.0016; Accession=PF01762.12; Description =Galactosyltransferase
MAALNREVEEYDDFVLLDLEEEYSRLPYKTLAFFKAAYALYDSDFYVKADDDIYLRPDRLSLLLAKERSHPQTYIGCMKKGPVFTDPKLKCNEDVTIGSWMLAMNVNHENTHALCEPDCTESSIAVWDIPKCSGHLLSYFLDG

SEQ ID NO: 81549 - protein, 27 aa, Zea mays
  Coding DNA Sequence Number=SeqID_38174
MAPPALVNATAGVWDLSLFGHENHIKI

SEQ ID NO: 81550 - protein, 342 aa, Zea mays
  Coding DNA Sequence Number=SeqID_38175
MGIEHGVSGELQAGPTRSEAAVEPFGGPAFEPLISKEARSLVPSQGRILFEPGRTPPPAVTQDGDLQLDGGGKRAGLRPLPLPQPQGFSSSRPRWRMRRIRGLPPRGSDLPSSSPGVWGRNGILRLRGDFLQPCRERRAAAARSDCGNDHPRPGRRSSFSSSFGAGATAEVLSPTEDESQPFEPGDGDLGLLAELAISSVEKPPVSLLLLRRPTPMEWGCSYLRRGNRSSVCKGTLNANAFVHYGFRGLNIRGLGSGWRPWKIVGRGPRGIRLSRLLGPDSRRGPWRRWPGRGDDVVLRSGGLRTASLSEARSNLAEGVVDAEGAAAPFQRQDLSLQDQNVL

SEQ ID NO: 81551 - protein, 182 aa, Zea mays
  Coding DNA Sequence Number=SeqID_38176
MPRGSIGASPEREAEAYTVWSGHVFALDPRLALIKVWVFFIPESRDPTVSGLDPTQRGPEPILGVRFAPVEVLNLTRRSGLHIQGSGTFPWGSGPTIDTLEYIIFSGHVAVPEPSTWWGRALFTTRLEIAAWVSRLYIVVRGTPVSGYQQWPPGPPQGRVRACRWGQSLISDWCTASVHLLT

SEQ ID NO: 81552 - protein, 384 aa, Zea mays
  Coding DNA Sequence Number=SeqID_38177
MSWEELEVLVKGITGESFVPESLILPQGIPALCDDPGFEDGDLGHAADLQQERRGAPRHSPHPLDKGKGAVGSSSALGGTGGSEEEKRHRLRHADGSFISDPPRSVKGLLVGPRRPAPKPKERRGASVLCHHHHRGHHQQQQQQKQRSPRFQGRWNVQGPKASSPSAPKVAPPPPQAAAAETAPPGSHAPAGGPAAAAPTSSDVAAAEGVPTALTATTASTTAMPSSTPSAAAEEAPTAPAPTIEVDARGASSSIPSPTPEETEVVFGRRLRSDAKPEAAPVPLPRVLSRAHQALHETKAAILREWEALEAEHQRLSESRTQLEERTKAASRQFASERSELERDLKDYKKDLQKVYTQELEVGQKEKRLAKKEEALNQREEVVT

SEQ ID NO: 81553 - protein, 938 aa, Zea mays
  Coding DNA Sequence Number=SeqID_38178
  Gene Ontology: Mol. function=protein serine/threonine kinase activity; Cellular component=intracellular; Biological process =protein amino acid phosphorylation
  Homolog annotation: Hit_ID=A2X9J0; Match level="QueryCoverage=77%, HitCoverage=65%, E-value=0.0, Identity=53%"; Hit description =Putative uncharacterized protein
  Subcellular localization annotation: CTP_CleavageSite=62; ConfidenceScore=5.29e-01
MKNFLRKLHIGDSAAGDGASSPSAPTPPPTKKGGGIEHRHASGLSGWLSSVTSRPHPPTPLSASAAPAAAAPEVEESALTTALASSVEEKRVAEEDEERARRESRKEAEMEKKEKQQAELENYHMQLALEMSVREDPEAMQIEVAKQISLGSCPIQSSPAEVIAFRYWSFNALSYDDKILDGFYDICATGDELAMSTIPSLMDLQALPFSHGGKTDAVLVDRALDSELVALEQKAVIMAVEFRSKKSEFVDRSLVQTLANLVSNYMGGPVIDPESMLLKYRNMSSALKADIRSAVVPLGQLTVGLARHRALLFKVLADSLAVPCRLVKGRQYTGSDDGALNIVKFNDGRECIVDLMIDPGTLISSDGADLGRELEDSLVVDNQHVNKDDTSTQLLSSFSEASSSMHSSFENGSLEKGFICNAGHFGPYEATTAHSDNDVLGSGVSSSFDELSVSTYACENIPIIHESNTDHTMTEKSKDKSITSNNSSSCSPPSSEIGSTPAVRRKKVKDVSEYMISAAKENPQIAERIHAVLLESGVVPPPDLFSEESKEQPKDLIVYDTSLFQTTDEMIRTMNELESTAHDGCAGLGPSLPPDPGHELQTKIVPYRMPPDLKPVQGLGVYHKFDFRDNINPSIPLYEPSPAPQENPLQLIKQMPVTAAAVATAAVVASSMVVAAAKSNSDIKLDVPVAAAATAAAVVATTAAVNQQYEYLDPGCQLLCLPSSSNKLIQKGRHDLLDDDQLETNHGQDNALEREKDLVQAPQEAERISDRSTGTESARSEISLDKIAEFEIQWEELTLGERVGLGSFGEVYRGEWHETEVAVKKFLQQDISSDALEEFRTEVTVDEIKGASGSGHGRGEDLYRHRDDISTTEQERPGSVAPLLRGDPMVTELDTIMENRVHGPFKCHERALEKLATMKGDMHTDCGGTKDGHRQSMR

SEQ ID NO: 81554 - protein, 127 aa, Zea mays
  Coding DNA Sequence Number=SeqID_38179
  Homolog annotation: Hit_ID=A6N128; Match level="QueryCoverage=34%, HitCoverage=67%, E-value=2e-07, Identity=63%"; Hit description =Putative uncharacterized protein
MKSIFNLPKGKWPEELVKVVWNHNTVVSRSDTRLESELFQSGISLMARAPRKGAFFAFHLSCAGKAQSQSQGTVKLHRVFLSRYPFVEGGSSFSWEYGMGYILQRRSACRHSRFRFVDPPAFAFASL

SEQ ID NO: 81555 - protein, 303 aa, Zea mays
  Coding DNA Sequence Number=SeqID_38180
  Homolog annotation: Hit_ID=Q6QP51; Match level="QueryCoverage=30%, HitCoverage=31%, E-value=7e-10, Identity=46%"; Hit description =Putative growth-regulating factor 1
MTVAGEREQQSRRQPSSRPIRGQRENPLSRREDNALEKRATLRLRRNNRAKKKAPSLPTDQRFEGWPPEGFDSRLRSHGLYTHYWSEVRRPAPQRVPRSPQATRAPRPLLIRGSKAGPRRVHSRLRRRARDDQGYVRYITEARAALPSSLETPCSAPIEGNMALPPPPSSLRKGDAGAVNIPARELGTRPYTRAMASSHEGTTRPAEALREALRPRRSETTPPRPRGLHPAGALARTHRNKMQPRKAGPLAKKCDESLQASANTPFEARGLLSGTIIRGTLKAPNSQLVTPISIKLLRPDGCD

SEQ ID NO: 81556 - protein, 81 aa, Zea mays
  Coding DNA Sequence Number=SeqID_38181
  Homolog annotation: Hit_ID=A6N1F2; Match level="QueryCoverage=56%, HitCoverage=58%, E-value=2e-09, Identity=71%"; Hit description=Imp biosynthesis protein
MPYSQEKLEPPSTKGYLYPKLTQLRWKAKKAPFRGARAISEIPLWKSSDSNLVSDLRAKGQSQVLIEPILASSGVIASSPN

SEQ ID NO: 81557 - protein, 232 aa, Zea mays
  Coding DNA Sequence Number=SeqID_38182
  Subcellular localization annotation: CTP_CleavageSite=5; ConfidenceScore=5.21e-01
MSSCSLMHRVFPPSKPPDGGYPPSFRLIVGGTQLRGSWYLSAIVRLQGFSSHSPVAPLRWWSPKTVTSSSWMGRGKPGCDLDPALSVEGVRHPRWGGERGEPGLYLLRGSAGHLFFQLLVVAIALQPCGGDVLQPCWGRRTVATQLGCNIPPSSSHSRRGRQRGSADLPVGRLNRFTKRESPRVKVTSESGDPWTASPSEARSDFAEGVVDAEGAAAPFQCQDPSLQDQIVL

SEQ ID NO: 81558 - protein, 109 aa, Zea mays
  Coding DNA Sequence Number=SeqID_38183
MAEAITGVPDPVLQTTPPWPRRVLHDENGKAKIWGGFVPRAMKGEGAGHGDGASAELYRGEQSNPQRNSEACGERQQQPNMPNAEATGEIFQARRCARGHWRSLLGRSR

SEQ ID NO: 81559 - protein, 189 aa, Zea mays
  Coding DNA Sequence Number=SeqID_38184
MHCVLPPSEPPDGEHPCCLRLVVGGAQPRGGWYLSAIARLQGFSSGIPAASPHQWSPKTVTTSSMVGRSKPGCDLCPALSFKDLHHPCWGGGRAEPELYLPYGPMGHLFLQHPEERALTGLAEGRTSTTRGQSAASVVSSSVFGSPAQLALAQLSVPPRTAVRSVAICPSYGRLLRRAYRGTAQDVARC

SEQ ID NO: 81560 - protein, 124 aa, Zea mays
  Coding DNA Sequence Number=SeqID_38185
  Subcellular localization annotation: CTP_CleavageSite=68; ConfidenceScore=5.04e-01
MEYTTIFRAFSTVSITEPYGRVRVHVQTSVGGAAAPSASTPPSAESDPASDSNTVEGSPPRRKMSALRLGHRRQGLLQEPGPSRRLDRPLRSLSQLTPEDISPAHGLGCLTPGLVPPVDDLARL

SEQ ID NO: 81561 - protein, 106 aa, Zea mays
  Coding DNA Sequence Number=SeqID_38186
MSDDLVVPVHFEVGQELCFRLLDHPFLVLLELELLVSRQGVNYSREPAAMLSGQARTVCGPEPDGPRPGARRRCSLGRRKIAGGAWISLPGETPSGRRDPRSCLGS

SEQ ID NO: 81562 - protein, 97 aa, Zea mays
  Coding DNA Sequence Number=SeqID_38187
MSDDFVVPVHFEVGQELCFRLLDHPLLVLLELELLVCRQGADGPRHRAGRSATWREAAVLSGQARTVRGTGPDGSAEIAGDGLDLAPGRDPVGEERS

SEQ ID NO: 81563 - protein, 258 aa, Zea mays
  Coding DNA Sequence Number=SeqID_38188
MWAVTQSELVRSNPRVMKAGEHREDKEGECFVRFGHGGGLTPSDITVKKKEIGSQMEVHCQTSFCQNEDGFPKLLRACTVRLGVRSQPEYDDREFIEHGTEKCVMTVYIGSSPHHVEWSVTAAGHRFKDTCQVVARKALRALCQIYEEEVADTPLTFFPPFQRNRPVWMARMRALEGQQLLEDDPSVVYLTAYLLTLDAQYDFLARHHRQMIARAEDAEKRNRQLHVDLTTAQARATALESREVIAVEALKQAKDEHV

SEQ ID NO: 81564 - protein, 649 aa, Zea mays
  Coding DNA Sequence Number=SeqID_38189
  Gene Ontology: Mol. function=hydrolase activity; Biological process =metabolic process
  Homolog annotation: Hit_ID=Q67IZ3; Match level="QueryCoverage=13%, HitCoverage=25%, E-value=5e-21, Identity=65%"; Hit description =Putative PrMC3
MDVASNDRAVSPDVAVRPFLPPLAKKTDDNGGSSKKLPNLVYFGGGFCLHTAVSFVFHAYLTSLDRSACPRHRRIVVSDEYRLVPEHPLAPSRDSRGRGSSRGRRRRQAAQVAGAGASRGKARSAPDDVVVTVALRSSHIRRRDASRQMRVSMTGATHQVVVEKAIATFVVQHDGSVVVMHACQSGVDEVVEDETMMLAMRLCWTKQRGRCGDTSRFLESRQREPRLMGNEPQCRQWSAMAMAMVLPEEATQRQPSCLAMHYAMDEKRLGRMTKRRDTGRRSDYATCHASCTVEEDEEAGVEGARVDWRWTMETQPNPGPGKQKKDIAPTDMGNSSGYRGAAQRCDHPDRLAGVTPAAQRGRGSPSPGIARAPRQGHSLGAVATSLARAHDSSMSAQARRVAPVRSIGSESQSCHHGSARPDRKRGFDPDTTITTTACGGAGSSWCRSTGANPSSADEDDLPRGDAMVAVGDRYPPGPLEAQDHPSPWIRIMLRNHFIRGRRRRNSTSYHGSTGEKAFLNNLQESRSKVGKSATSGTPSEDYLLQAGSRGSVYLENSAVHLFYGKMDTDHKEKGSKRGKGSSSCSPEWNLPLSPTMNQPRREKNLFSGNLVDEGTDAEIFGDIMKLESGTQRSPCHKMRSRRWEKPQKN

SEQ ID NO: 81565 - protein, 275 aa, Zea mays
  Coding DNA Sequence Number=SeqID_38190
  Gene Ontology: Mol. function=hydrolase activity; Biological process =metabolic process
  Homolog annotation: Hit_ID=A2Z237; Match level="QueryCoverage=96%, HitCoverage=36%, E-value=1e-104, Identity=62%"; Hit description =Putative uncharacterized protein
  Pfam annotation: Domain name=Abhydrolase_3; Domain location=82-253; Score=61.1; E_value=3.7e-15; Accession=PF07859.4; Description =alphabeta hydrolase fold
MANADAGDGDEVILDAPGFIRVYRSGRVERFLPVDFAPPSTDAATGVSSKDVAILPDACLLVRIYLPLPPSSGSYSGKLPVLVFFHGGGFCLGSAFDAAEPWLTAHADLGRVHVGGESAGANIAHHAAMRAGREELGHGVKLSSLVMIHPYFLGGESSETDDMGVALLRELVRLWPVVCPGTSGCDDDPLINPMAEGAPNLASLGCRRVLVCVGGKDPMRGRGRLYCEKLKRSGWRGEVDDWEADGQGHGFHLSCPMSAEAEAQVRVIAEFLTYG

SEQ ID NO: 81566 - protein, 32 aa, Zea mays
  Coding DNA Sequence Number=SeqID_38191
MEKLARVRDMLLKKPVSQANLETGYMICEAAV

SEQ ID NO: 81567 - protein, 142 aa, Zea mays
  Coding DNA Sequence Number=SeqID_38192
MAARFQRLREEGNIGNPLILEDFQLDNEWVNNKKEIVREGDDLAWAHVHDAIGASSSLQGRNFPRRVQYESVYSRRCQAAATQEERVMEEQGNEGNEHDDEEYIPNDDDEVDDFGESPHNSPTQDGAGGEENAMDDLDLGDI

SEQ ID NO: 81568 - protein, 87 aa, Zea mays
  Coding DNA Sequence Number=SeqID_38193
MAQAGSRWHDGLGCGLETSTGAPEGTRLRWSGPAASLAHIGEQLSEQQGRERKIRGAGRCLRAHASLTLDAGRSDTYKYPRTVPVRG

SEQ ID NO: 81569 - protein, 158 aa, Zea mays
  Coding DNA Sequence Number=SeqID_38194
MGKSKRGGSSSHHSGDKRKREPTPPSEDSSNSEYSEEEFSESEGSPAPASPPTSSDDSDDSQGIAAEVWTYIRAVERAGLEGSDESEYSSDEENSSDSSEEGSGGDGGDDDDDGGDGDSGGGSGKGGDDSGKGGSGDGGGDGGGGSKGSSKGSNKASG

SEQ ID NO: 81570 - protein, 107 aa, Zea mays
  Coding DNA Sequence Number=SeqID_38195
  Gene Ontology: Mol. function=transporter activity; Cellular component= integral to membrane; Biological process=transport
  Homolog annotation: Hit_ID=Q9ATL5; Match level="QueryCoverage=82%, HitCoverage=34%, E-value=2e-42, Identity=96%"; Hit description =Aquaporin TIP4-2
  Pfam annotation: Domain name=MIP; Domain location=1-90; Score=-101.2; E_value=0.0036; Accession=PF00230.11; Description=Major intrinsic protein
MQVTPVHALGAGINPMQGLVMEVILTFSLLFVTYAMILDPRSQVRTIGPLLTGRIVGANSLASGNFTGASMNPARSFGPAMATGVWTNHWDRPATRRVPGRLRVRVV

SEQ ID NO: 81571 - protein, 146 aa, Zea mays
  Coding DNA Sequence Number=SeqID_38196
MLVYCGVEWGHLFCAPVARCSRDCRSLRSSDSGMRKWRAPITNNAHVRGYVLVMWLLAPTGKNHLVWSLRRHERPRQRARRSAIWAQERLLLCVHPDCPRLELERSTMAQRVVFFAANIDLASQAGPIGEEISYGVLASTGHPRRL

SEQ ID NO: 81572 - protein, 142 aa, Zea mays
  Coding DNA Sequence Number=SeqID_38197
MAAIASPLLPQASLLTRARKLVVACGGAGRVGGDMERWWRRIPGGTKNGSLEGRGVNAPLEGEGDGVRQALEISREKARNGRRGDAVEQIQQANKNKEIQTTDVATCIASDLVADPWRPGLQRRKETWTCLCRSLDCNVGSK

SEQ ID NO: 81573 - protein, 148 aa, Zea mays
  Coding DNA Sequence Number=SeqID_38198
MEHNGSETQMRACHGRLATVPRSPLSHQTETQGKELKDTPTASTTRLQSKHPPSRAKMAAGLVVKPSWACIVIIVLIVTLSSGAASGEARRLLMAEKHAAEGACAGGCSPPVQGLTATTTSKMATTDGRPTAPGHSPGIGNKIAGNTR

SEQ ID NO: 81574 - protein, 336 aa, Zea mays
  Coding DNA Sequence Number=SeqID_38199
MNAKACAAQRHHARFCLWAYAARSMPRGSIGSPPERGGGVYMIIRSGLDTCRHRTPAWVLIKARVCSVLEPWDPIVGGSDPIRGGVRIPFQGSGLHTWRSWTNLGGLDCISRGPTLSHGGSDSLLRPWGLSLSLNTWRLRTHPCGGVRRCCGPRVVARGWGESWLGPTHSTFTTRLRDSRVGTVPLYSSKGGAYRGGFGGSQVAPTSSQPHDGNIAGLGGLRLILSPPTRQNRPSRAVRVNRGLRKSSSQGNLVLSVTRLLAGVPLDSMGSVECGYQVARGDSCASAWELLTGVNLLRRFIAAWGCEWPYAGAAVTIVGRCFVDVIGRGKTMIRDR

SEQ ID NO: 81575 - protein, 100 aa, Zea mays
  Coding DNA Sequence Number=SeqID_38200
MHQEDDEIDDDLQHILVFMLGEYRKRKNEDQPFRQLAYGVPVVYVDEYLRIGESMAIESLRKFVRASHGRQQRLMADGEMPMWEPGETLVWKPGLLFELL

SEQ ID NO: 81576 - protein, 286 aa, Zea mays
  Coding DNA Sequence Number=SeqID_38201
  Gene Ontology: Mol. function=protein serine/threonine kinase activity; Cellular component=integral to membrane; Biological process=protein amino acid phosphorylation
  Homolog annotation: Hit_ID=Q65XU5; Match level="QueryCoverage=84%, HitCoverage=36%, E-value=3e-62, Identity=50%"; Hit description =Putative uncharacterized protein P0033D06.1
  Pfam annotation: Domain name=DUF26; Domain location=198-253; Score =34.4; E_value=3e-07; Accession=PF01657.8; Description=Domain of unknown function DUF26
  Pfam annotation: Domain name=DUF26; Domain location=94-147; Score =39.2; E_value=1.5e-08; Accession=PF01657.8; Description=Domain of unknown function DUF26
  Pfam module annotation: Pfam domain module=DUF26::DUF26; Domain location=198-253::94-147
MQRRRPRAAHRCRFLTAAAASFHIHLLLLSAVSAAGVDDDADTPAILDTVCAATQTVDPEAFDMSFDTTMEMIYQNVKSSGFGAVGSGEGSNTVFGLAQCMSYLSPTDCQLCYGQARVKLPHCLPADGGRIYLDGCFLRYGGDNFTAAATDASDAAVCSNATAPAGFAAAAAALVRNVTAAAPGAKDYYYAAASGRGAYAAAQCWRSLNASACAACVGSARDQLVRECLPAAPEGYGLNAGCVVRYSTRAFYLPVNAGGGSGSGRSSGDYIFYLVLTFEFPRFTWL

SEQ ID NO: 81577 - protein, 113 aa, Zea mays
  Coding DNA Sequence Number=SeqID_38202
  Gene Ontology: Mol. function=ubiquitin-protein ligase activity; Cellular component=ubiquitin ligase complex; Biological process =protein ubiquitination
  Homolog annotation: Hit_ID=Q6ETF7; Match level="QueryCoverage=96%, HitCoverage=27%, E-value=5e-29, Identity=54%"; Hit description =Putative photoperiod responsive protein
MARSPAAVRALRASTESGASAKALRVLESTVGCAEGRAALCANAEDAIPAVDRRAADAAVAAEGGLTRLLLLMQSGCSPAARQMALELLKIYRVNTKSCLAGYDSKTTHIMPF

SEQ ID NO: 81578 - protein, 132 aa, Zea mays
  Coding DNA Sequence Number=SeqID_38203
  Gene Ontology: Mol. function=binding; Cellular component =mitochondrial inner membrane; Biological process=transport
  Homolog annotation: Hit_ID=A2Y4C0; Match level="QueryCoverage=38%, HitCoverage=15%, E-value=8e-18, Identity=84%"; Hit description =Putative uncharacterized protein
  Pfam annotation: Domain name=Mito_carr; Domain location=12-92; Score=- 2.9; E_value=0.0056; Accession=PF00153.18; Description=Mitochondrial carrier protein
MAGDAGSGVDWESLAEATSGAIGSLVSTTVLYPLDICKTKFQAELQTHQGAQKYRYFPFIPSLSLFSGRLIRATRLVWLARRRMVLKLNGRVDADLLRSGLERVLRNAPYPTLDMSCFLKWVVDLATPFHTN

SEQ ID NO: 81579 - protein, 182 aa, Zea mays
  Coding DNA Sequence Number=SeqID_38204
MATSSADKTEATTMTAMRRAAMKETQNSICPRKNDLTNYWALGPFVRPFTSLVDPGDIYPPQAPDLWVDLEVINSKIQGPKNDSLLSSLVLITRPTKVRLCACALEVGILDCKTLDLLGAPEVHPMGVAPDLQMDFLRIIRSKVFLSLAKTGMRLFCIMLWRSALCHQYFAAQVFTACSAQM

SEQ ID NO: 81580 - protein, 164 aa, Zea mays
  Coding DNA Sequence Number=SeqID_38205
  Gene Ontology: Mol. function=protein serine/threonine kinase activity; Cellular component=integral to membrane; Biological process=protein amino acid phosphorylation
  Homolog annotation: Hit_ID=A3AZM4; Match level="QueryCoverage=62%, HitCoverage=19%, E-value=2e-38, Identity=71%"; Hit description =Putative uncharacterized protein
MGDQIREPLFVEITITMCWAIWILRNGCKAFHKKEFALVILRAKAKYHQLMGLQFLLFYKKSTMIWSHYNTGTLMELLDLNLREQCSEEDALRVFHVGLLCTQASPNLRPPMWKVVEMLSGGREVLPRPTQPPFINITGPNIKSDNFGSPFSLNQLSMSGVQAR

SEQ ID NO: 81581 - protein, 326 aa, Zea mays
  Coding DNA Sequence Number=SeqID_38206
  Gene Ontology: Mol. function=racemase and epimerase activity, acting on carbohydrates and derivatives; Cellular component=integral to membrane; Biological process=carbohydrate metabolic process
  Homolog annotation: Hit_ID=Q304Y2; Match level="QueryCoverage=42%, HitCoverage=30%, E-value=1e-54, Identity=79%"; Hit description=UDP -glucuronic acid 4-epimerase
  Pfam annotation: Domain name=Epimerase; Domain location=135-309; Score=-39.6; E_value=0.00032; Accession=PF01370.12; Description=NAD dependent epimerasedehydratase family
  Subcellular localization annotation: CTP_CleavageSite=74; ConfidenceScore=5.64e-01
MAARQERLVSTAFLSRAPISSTVPTRRTSSDDLVAAAFASPAALTSNSSASLAASILASRPLPPCFTRASDAVEAAASAARPVATRFLFESSMPSEAKIKASTLVAASMPSTPVSSALLQRTDATVSATRSAPGIDSFNSYYDPSLKKARRALLGSHGVFVVEGDINDGRLLAKLFDVVPFTHVLHLAAQAGVRYAMENPAAYVHSNVAGLVSLLEACKDADPQPAVVWASSSFVYSLNDRVPFSGLRGRGHRGRSRGHGAGDPGPPHPPPSPIRHQHRSRRWKVSGAAALMAGSRDRGALMAGSVDCGSRVRRPRCWGSDSQDRR

SEQ ID NO: 81582 - protein, 42 aa, Zea mays
  Coding DNA Sequence Number=SeqID_38207
MAVREMLAACWMSQKGKPKAGQRGHHYDWRNGKRHYTSGRRS

SEQ ID NO: 81583 - protein, 75 aa, Zea mays
  Coding DNA Sequence Number=SeqID_38208
MENGVTSRKMGDEWGRWRMPAYYSAVAGSTSMHDGVQVEPAGAGSVPTTGWAAGAAFDEMMGACLRGVETATDWK

SEQ ID NO: 81584 - protein, 254 aa, Zea mays
  Coding DNA Sequence Number=SeqID_38209
MSRPALAESRHESAAEGEGSLGWLTKRTKRQGHSADEETGTALGQGGAFAECRANRHSAKGAPVSLKHNLNVEEATLARSLCQPTVSQEHLMQGGLTPYPDARSSVDRAELSPASGATGSSASPDPRARPPSRPRKMDSASPDPQGSDSASAPEDDELRLARPQGSDSASAPEDDELRLARPQGSDSASAPEDDELRLARPQGSDSASAPEDDGLRLARPRARTDHVTGGAIITLPLASSGYGEQDRRPICSPR

SEQ ID NO: 81585 - protein, 73 aa, Zea mays
  Coding DNA Sequence Number=SeqID_38210
MKDRWVIAKPKDEDDVRKKTLGDALNLAKNDEARNKRKHKPMVKQDKDIETDEVLEKDLSKPEAQGAEDVSPA

SEQ ID NO: 81586 - protein, 57 aa, Zea mays
  Coding DNA Sequence Number=SeqID_38211
MAAVGALQRGVGGGSALQRGRGAMVVRMEAGTRARGTSFKGKLPGIFLGKALFLEMG

SEQ ID NO: 81587 - protein, 276 aa, Zea mays
  Coding DNA Sequence Number=SeqID_38212
MTASKKVRHVIRFRILFLFHFLSLTTGTGKRGYPKRDPSPRRKRAPSPLLIRGSKAGPSEGLNSRLGALGLRAHYWSEVRRPAPRKGSTAASGHSGSAPTTDQGFVGWPSKGAIGNSASPDPRARTHAQPPEDDELRFARPQGSDSGSALEDDELRFARPQGSDSGSAPKDDELRFTRPQGSDSGSAPKDDELRFARPQGLDSALSSADGLRLARPRGSDSTSALEDRLDLDLGGASTSPNPGLGPTTSWESPSLPYPKLTQATGNKTGVPSGSLR

SEQ ID NO: 81588 - protein, 742 aa, Zea mays
  Coding DNA Sequence Number=SeqID_38213
  Homolog annotation: Hit_ID=A8I426; Match level="QueryCoverage=99%, HitCoverage=51%, E-value=0.0, Identity=75%"; Hit description =Required to maintain repression 1
  Pfam annotation: Domain name=Neuromodulin; Domain location=107-284; Score=-56.5; E_value=0.03; Accession=PF06614.2; Description =Neuromodulin
MDRATPRVCGRRGVSQAAVEAAPSSSRARRRDKAPAVVMDLGDDDCGGGGARKTVGGAAGRCEGSTKAPLPLLPPMMVPAGAVALRTRSRRRAMLAAAVVEEAPTKKKKKEGAIPDAAEAPRGHGSKAAATSMATSSHKRRAGTSRSTSRDKRRARSGRASEPARVGRARKRKRNELEAPARRERVKAPCVSESDDNSGRGDDASHDGDAEPRVGVAIGTDLVNGDHPAAKEVVEGAGDEDTGDGGNSGLASTADVFAEEMAPFEDDYDDEMLEEQLVGDVIRAYSNGRNFDSDGVDWEAEDEMEFNDDADNSDFMDDADDSDFMDDAYEGGNSKPIQNHAKLEIQDWVNQKVVLSGGRCEARGEGDLEEELDVGKEADEEDVEPKSEAAPGSDKRVLQLEILGSDEEIKVLENMSSAPSRMASVQSKLPTIPSCVAWRTRSSWGVNQDRLSYDTYFEELSDEPKEDDDDTEVELDEVEDDNNDDDSSDAYDKDDEEKEEEEEEAERRKLNNRICTSDEDMINITVPTSRYDMFKKKNSSRYDIEWVEDEDASVDMLQPVSFKKDSSWKPVAVGNDTFTEQQKRSRFTWELERRKKLKLEMKTNPLHERDLDSDPNSSGSDQIRKYGFKSDGSHKVDRKKKHTSPKSGKKPSSAIILKRQSLLKLLVDKMSGDKSLASFPFDQNPQLQFIFKEMHPLVFSFGDEDLVAADRPEQDVGLDMLWADFDFALESENIGTYYDDEV

SEQ ID NO: 81589 - protein, 107 aa, Zea mays
  Coding DNA Sequence Number=SeqID_38214
MRGARATAEISPPAARGSGSDRGSLSWCRVTQEEALDDFVDDGIDDLVVSLYQMDLDRTLFLLRSYLLLEKIKKYTMHISRSDGLLSHLSQQERLVGAFITIVCATL

SEQ ID NO: 81590 - protein, 169 aa, Zea mays
  Coding DNA Sequence Number=SeqID_38215
MCIVGAFAQATALQNTGAFQNSERGAILSKQIARVFAIGLESLLGIAMVSMHGDTAGPSSSQEDLAATMKKCISNRPQDHPFTQQQLPASSLQDYTCDSDSCRREALATECCTSTANRGHRAGGQKQPATTVGHRDVYGPSKYTRLLQATKDTLREEGSLAERLPQWKR

SEQ ID NO: 81591 - protein, 41 aa, Zea mays
  Coding DNA Sequence Number=SeqID_38216
MPCALEKIENRHALYRTIDSLGPRLEVVTDELGRDYLIGGV

SEQ ID NO: 81592 - protein, 344 aa, Zea mays
  Coding DNA Sequence Number=SeqID_38217
MQAACNRTKGAHPFDFDASSMEAQAHTSSAGEGATVDKYGQKWVGSNGGGRRAEAAAARARTTAAPRTTRPVALTLRQGRRHLWQAKQATLHLRHDDRVKKGTGKGDTPKGILLREGSGPRAPLLIRGSKASPSEGFNSRLRALELRTHYWSEVRRLAPRKGSTAASGHSSSAPTTDQGFVGWPPKGSDSRLRARRARDDPGYVRYITKARAMLPRLGAALANPAPAKPLTASTYQPENLGLDYAPGLRPGSDSASAPEDDELRLVRPRARTQPRLRKTTNSASPDPRAQTQPWPQTTVSASPDPGLRLDLDLGRQTRPRRSLRLTRPRARTDHVTGGPSLPYP

SEQ ID NO: 81593 - protein, 259 aa, Zea mays
  Coding DNA Sequence Number=SeqID_38218
MGNTRVAFVLPSLEERNFAEVGSPAASPRRWSPKTVTTSSMVGRSKPGCDLCPALSFKDLHHPGWGGGRTEPELYLPRGFVGHLPPQHSGERALTGLAGGSDFDNAGLVGGERRQLQRVELAGSAGSGSAPGAPSRRESSHRAARTGGPPKTSRAARAAFVFFGCPAFAPMASVVGAEVVAAEEVLVADGITATIRAPGLRLFGFDVWNPRPLFDEPEPEAAVSVWTEAELARKEDFVVRSLAGPSTGGTGVGVELSRP

SEQ ID NO: 81594 - protein, 248 aa, Zea mays
  Coding DNA Sequence Number=SeqID_38219
  Homolog annotation: Hit_ID=Q6QP51; Match level="QueryCoverage=39%, HitCoverage=42%, E-value=2e-09, Identity=40%"; Hit description =Putative growth-regulating factor 1
MQAACNRTKGAHPFDFDASSMEAQAHMSCNRRAGCYVQETAPPLAPLPCLLDCGTSTATRGNPAHDPSVPTGHIGHGPVSRGRRHDGQYGQKWAGSNGSGRRAEAAVKLSAKLTSPPGTAREPSPTTTGGTFGRRSRQRFAFATMIASKKAAKSGLGRHRKLRLARPQGSDSGSAPEDDELRLARPQGSDSASAPKDEELRLARPQGSDSASTSEDRLDPDLGGATVSPDPGLGPTTSQGGHHYPTPS

SEQ ID NO: 81595 - protein, 672 aa, Zea mays
  Coding DNA Sequence Number=SeqID_38220
  Gene Ontology: Mol. function=nucleic acid binding; Cellular component= nucleus; Biological process=regulation of transcription, DNA-dependent
  Homolog annotation: Hit_ID=A8I426; Match level="QueryCoverage=80%, HitCoverage=37%, E-value=0.0, Identity=98%"; Hit description =Required to maintain repression 1
  Pfam annotation: Domain name=DEAD; Domain location=75-286; Score= -33.3; E_value=0.013; Accession=PF00270.20; Description=DEADDEAH box helicase
  Pfam annotation: Domain name=Helicase_C; Domain location=481-560; Score=44.5; E_value=3.7e-10; Accession=PF00271.22; Description =Helicase conserved C-terminal domain
  Pfam annotation: Domain name=ResIII; Domain location=71-280; Score= -33.7; E_value=0.032; Accession=PF04851.6; Description=Type III restriction enzyme, res subunit
  Pfam annotation: Domain name=SNF2_N; Domain location=77-412; Score =32.9; E_value=1.2e-10; Accession=PF00176.14; Description=SNF2 family N-terminal domain
  Pfam module annotation: Pfam domain module=DEAD::Helicase _C::ResIII::SNF2_N; Domain location=75-286::481-560::71-280::77-412
DQMQILFLGKPGDQIHVSITVFAEKSAWPNDKGVKNTLMFHDLYEQGVNDTEQSQDIHQYGTVWNLIPGVISTMYEHQREAFEFMWTNLVGDIRLDEIKHGAKPDVVGGCVICHAPGTGKTRLAIVFIQTYMKVFPDCRPVIIAPRGMLFAWDEEFKKWNVDVPFHILNTTDYTGKEDREICKLIKKEHRTEKLTRLVKLLSWNKGHGILGISYGLYTKLTSEKPGCTEENKVRSILLDNPGLLVLDEGHTPRNERSVMWKTLGNVKTEKRIILSGTPFQNNFLELYNILCLVRPRFGEMFLTKSRVGRRHYVSKKQKDKFSDKYEKGVWASLTSNVTDDNAEKVRSILKPFVHIHNGNILRTLPGLRESVIILKPLPLQKSIIKKVENIGSGNNFEHEYVISLASTHPSLVTAINMSEEEASLIDKPMLAKVRSNPYEGVKTRFVIEVVRLSEALREKVLIFSQFIQPLELIKEHLRKFFKWREGKEILQMDGKILPRYRQASIEAFNNPNNDSRVLLASTRACCEGISLTGASRIVLLDVVWNPAVGRQAISRAFRIAKSGLGRHRKLRLVRPQGSDSASAPEDDELRLARPRARTQPWLQKTTNSASPDPRARTQPWPQTTVSASPDPGLGLDLDLGRQTRPRPRRSLRLARPRARTDHVTGGPSLPYP

SEQ ID NO: 81596 - protein, 221 aa, Zea mays
  Coding DNA Sequence Number=SeqID_38221
  Gene Ontology: Mol. function=structural constituent of ribosome; Cellular component=intracellular; Biological process=translation
  Homolog annotation: Hit_ID=A9PHB0; Match level="QueryCoverage=42%, HitCoverage=35%, E-value=1e-26, Identity=64%"; Hit description =Putative uncharacterized protein
  Subcellular localization annotation: CTP_CleavageSite=61; ConfidenceScore=5.42e-01
MAPCTLCDDGGSQPPYGSKRTGGHNVSVSPPTCTTCRHAPSSATLDLLILLLVLFSLAFLLASSLSHVARSLSPLLATPPAVAALAHATAALPYLAAAAVLAATAFLSCSRLPRRRCRNPRCRGLRKALEFDVQLQTEDAVRACAGSTVGGADASMWREIEALPWKGGQGGNNPDYECLRAELRRMAPPNGRAVLLFRSRCGCPVAKLEGWGAPKTKRRNK

SEQ ID NO: 81597 - protein, 199 aa, Zea mays
  Coding DNA Sequence Number=SeqID_38222
MTASKKAGPSEGFNSRLRARGLHTHYWSEVRRPAPRKGSTAASGHSGSAPTTDQGWARVGGAHRWVDRVANRLGLLVSVLFPNATESREIAAARRGAWRRPFPPPRSELRKLNRSSRDPFSPHLPSSHERLPQKPPPPLFRPRKNRVEISGTQGATRQRGIPRRKHFSAAGRTAPEVDYVKTPLKKSPLPRILVSSRLK

SEQ ID NO: 81598 - protein, 119 aa, Zea mays
  Coding DNA Sequence Number=SeqID_38223
MVTAGFWVGKSKPGYDLGPTLSFKDVHHPRWGGSHAEPALYLPRGFVGRPFPRRSGVEALAGPADGADLDNVGLIDGGRRYLQRVGVVGRASGGPSCRRAFPMEWGRSYLRRGEPEFRS

SEQ ID NO: 81599 - protein, 145 aa, Zea mays
  Coding DNA Sequence Number=SeqID_38224
  Subcellular localization annotation: CTP_CleavageSite=44; ConfidenceScore=5.10e-01
MKPWKETSRSSKITTSSRRGWLVLDTPHGSLSSPSYPPALLSVRFAVPWPAPPAPPLGAPAPGVAAGGDPDDGGGDDSSSHDTDFSADQEPEGWVARPITRDAARGCHFHDALDTLLRRALNRRTWPIEYRCVVYQHSRGVYPDR

SEQ ID NO: 81600 - protein, 115 aa, Zea mays
  Coding DNA Sequence Number=SeqID_38225
MVLVSGILSVWKGYIGLITWVNAKTWLSTTSPLQPNRMLAEYVDVYSPLLYTPNPPHPQVVSIATTAQEKMKLWKETSRSSKITTSSRCGLAATPSRLPVKAAVIYVSFPHFDLL

SEQ ID NO: 81601 - protein, 337 aa, Zea mays
  Coding DNA Sequence Number=SeqID_38226
  Gene Ontology: Mol. function=nucleic acid binding; Cellular component= nucleus; Biological process=poly(A) tail shortening
  Homolog annotation: Hit_ID=A2Z474; Match level="QueryCoverage=46%, HitCoverage=35%, E-value=2e-57, Identity=71%"; Hit description =Putative uncharacterized protein
  Pfam annotation: Domain name=RRM_1; Domain location=203-272; Score =83.3; E_value=7.6e-22; Accession=PF00076.13; Description=RNA recognition motif. (a.k.a. RRM, RBD,
MSRLILSARCVSSSPDFADDQDPPQPPPTLQPQGAPSAPSDALLRMEQEILKFIHDPSRTEYEFDGLPTSYLRLAAHRLAQHYFLQSIDIPDNSLPDGTGSRIILRKTTFDCRLPVVRLADIPVNLPQEDISVARVAIKQRPQKNFHGMNSSSAHSSRDNLQKSVVERKEEYNKARAQIFNNSNRNPNATTSENKEEMDSRLVFVGNVDYACTPEEVQQHFNSCGIVNRVTILTDKFGQPKGFAYVEFVEVEAVQEAIKLNESELHGRQLKVALKRTNIPGMKQPRGRGFNQYRPYAFLYLRVHDSGSHQVTPPRHDDFADRCLNSSGGATNNNLMS

SEQ ID NO: 81602 - protein, 73 aa, Zea mays
  Coding DNA Sequence Number=SeqID_38227
MACQGHQIAGTLRAKAGISWWHGIGEQIYVTALGSTGRERARGSCEISEIKNVKLIPQHAKAGFIQRFRENIR

SEQ ID NO: 81603 - protein, 112 aa, Zea mays
  Coding DNA Sequence Number=SeqID_38228
  Homolog annotation: Hit_ID=Q2QMU2; Match level="QueryCoverage=90%, HitCoverage=34%, E-value=8e-10, Identity=37%"; Hit description =Retrotransposon protein, putative, unclassified
MAHETPLPTPEAHLASGLDADHITALHAQATGLHNIRALVSIVLDPASSSLFGAMLSLTTVVLSWFHDTITIELQDIIRDQSDTGHQSWLALEEQFLENRDARALHLDTQFH

SEQ ID NO: 81604 - protein, 572 aa, Zea mays
  Coding DNA Sequence Number=SeqID_38229
  Gene Ontology: Mol. function=cysteine-type peptidase activity; Cellular component=transcription factor TFIID complex; Biological process=ubiquitin-dependent protein catabolic process
  Homolog annotation: Hit_ID=Q33AW7; Match level="QueryCoverage=60%, HitCoverage=39%, E-value=1e-143, Identity=71%"; Hit description =Ubiquitin carboxyl-terminal hydrolase
  Pfam annotation: Domain name=UCH; Domain location=201-508; Score =138.8; E_value=1.5e-38; Accession=PF00443.20; Description=Ubiquitin carboxyl-terminal hydrolase
  Subcellular localization annotation: CTP_CleavageSite=21; ConfidenceScore=5.24e-01
MAARLPLGGGGRARLPAGQSVAGARSPVGWRRCQQGAAVVRGRGGGGVASKEGRGRWWGRGPPPVARGGQRRLEGGRKKKMSNLALYHVGNPNPRIGCGDVLIDLELGQTHYRGGERILLEMKLGGGSSGFSARSTNDELALIPLEPSTSSFSIAGGPTFSNGFSSGIGSSFSQDNSFSPLLRDGEDGYNSLSNGTKDDTHGLSGLHNLGNTCFMNSAIQSLVHTPPLVQYFLEDYTCEINKENPLGLQGELAIAFGELLRKLWSSGRTSIAPRAFKSKLSRFAPQFSGYNQHDSQELLAFLLDGLHEDLNRVKEKPYIEAKDADGRPDDEFAEECWNYHKARNDSIIVDKFQGQYKSTLFTRMITVTVFSGTGDVLPMPYTVTVQKNGNCRDLTKALADVCCLKNSETLLLAEVYERRIYRYLTNPIEGLHIIKDEDILVAYRLPVGHEKLLRLEILHSRADSGVTHGDGDAVNEDDATKFGVIPGDGHTVVQDVVTKLAGDVAHRDGDAGCQDGVMKVACGAAHGDGDTGCQDDVTKVTCGAIHGDGDTGCQDDAKKLATEAMGSDRNPS

SEQ ID NO: 81605 - protein, 55 aa, Zea mays
  Coding DNA Sequence Number=SeqID_38230
MAFGLLSGTLLGEHVDEEGHLRVDDHLHVDYKYKVEIEERLDGLRRERHGALHGE

SEQ ID NO: 81606 - protein, 312 aa, Zea mays
  Coding DNA Sequence Number=SeqID_38231
  Homolog annotation: Hit_ID=Q6JAD6; Match level="QueryCoverage=74%, HitCoverage=40%, E-value=7e-58, Identity=46%"; Hit description =Putative uncharacterized protein
MKRKLDRATRAAVAAPAERAEQASTTPASTAPATSVTPPVPPPHFREHDETEVRALAADPRLFDLKRASTTRIDPDHQWMRFRFECEDVTIHIAHIRELFGFPQSTTRLHSLCYGISDPPCRPHDGVSPTIAYIATLFRPPFTNGSRRSLADFTTTTKFLYELMRRTFLPHMGYREATTHIQLWLLGAFVSHSVFDVVDFLICEIEDTVLDGYTRLYQTCVGFHRLEPKDAAHPSALVSSSTPMDPLGPEWIPQPPHHVPPCSHDHEAGGSNVVPPSTPPAIDPALAAILKSSTQQQAHLAAEQAYQVAILQ

SEQ ID NO: 81607 - protein, 55 aa, Zea mays
  Coding DNA Sequence Number=SeqID_38232
MTFLDHSHLGALADARAPMSLSSRGFFGCGEGVFLDSYAEGGSLAGGVNSRSQRG

SEQ ID NO: 81608 - protein, 167 aa, Zea mays
  Coding DNA Sequence Number=SeqID_38233
MRLQSHPHPTARYPVFLEQLHHVLGRRSVTCSLQYLPQDEGKTLSCETVRVGKCVPSTSGYVGNHPCEGSHSTVQPGGRVDGQVTPATMSSKKGAHRLGIQCPTDPGYRRAVTALVPTIRNGRLRLRSREEGNLRSLSALGVDLWVIRRIAHRRVSPCGQQAPSCTV

SEQ ID NO: 81609 - protein, 206 aa, Zea mays
  Coding DNA Sequence Number=SeqID_38234
MHVLTTFYGFHPLEMSTHPIGLFPAKKEDDPMWKDRVDHTKDVLALYPRHTAHLTVRCMSALYRLQALRGEAMSQLMGLVESTKITLDNREDLIVDLSTELVEKDLQVEQMANHIHELNDQVEARDNTIEVLEDQLRNTQQQLEEANQHLDLHHQEIEAMEADEADEDVDIEGGEEQEPASSLDTTGSTHPGGPPSPESSVASFAR

SEQ ID NO: 81610 - protein, 251 aa, Zea mays
  Coding DNA Sequence Number=SeqID_38235
  Subcellular localization annotation: CTP_CleavageSite=86; ConfidenceScore=5.28e-01
MGHRRPLGLPISSSLETPCSAPSKGNMALFPPPPCGKATQGPDPGGFTSRPSAPSSNGHTFGSPEAQSSPRSNLGQIATTTDRIAGAFNAKGSDSGSAPEDDELRLARPRARTRAQPRKTTNSASPDPGLGLGLSPGRRRTPPRPTQGSDSGSAPEDGELRLSRPRARTQPQPRKTDSTSTSEEPPPRPPRARTDHVIGGAIITLPLASSGYGEQDRRPIRLAPRSSDGHDITRTGCQNLSGYHDGMYLGH

SEQ ID NO: 81611 - protein, 32 aa, Zea mays
  Coding DNA Sequence Number=SeqID_38236
MAGGWSDGEDALCTIGSSADGGDLIPRLKCCI

SEQ ID NO: 81612 - protein, 260 aa, Zea mays
  Coding DNA Sequence Number=SeqID_38237
MRDEFVEDTADMSGPHASKEKTARRLKPELRDPPVNDSWREEWKRMRTVTAECSQHASEGVRADTRERLFGGPPMSVPPSVQDRAGSREGSTSRGFGAQGGGRGDRAGVVVVVGFGSDVDVDDGARAAKLRRGGGEQQRESRVRRAPGRRWRGQGEEAAGPGRAQGGPTCADGPRHRARRFVTWAQEQIPPLHASGRSVPEAGRSAIAQRVFFSAKNPRTHLGRDPFEGKSSKALLQVGRPPGAPLIGVESKRYCCGRLN

SEQ ID NO: 81613 - protein, 90 aa, Zea mays
  Coding DNA Sequence Number=SeqID_38238
MVRGSSPWVSASGCHAGRVDQREAQGPAAMGRLRTREGARECGTMTTRIGETARWDPPGGEGGKVGLALRNLARGVDEKGVRAVMGQMGH

SEQ ID NO: 81614 - protein, 608 aa, Zea mays
  Coding DNA Sequence Number=SeqID_38239
  Gene Ontology: Mol. function=nucleic acid binding; Cellular component= nucleus; Biological process=nucleotide-excision repair
  Homolog annotation: Hit_ID=Q2QNI2; Match level="QueryCoverage=100%, HitCoverage=52%, E-value=0.0, Identity=81%"; Hit description=Zinc knuckle family protein, putative, expressed
  Pfam annotation: Domain name=FbpA; Domain location=9-554; Score= -193.8; E_value=0.0058; Accession=PF05833.2; Description=Fibronectin -binding protein A N-terminus (FbpA)
MVKARMTTTDVAAEVKCLRRLIGMRLANVYDITPKTYLFKLMNSSGITESGESEKVLLLMESGVRFHTTQYVRDKSTTPSGFTLKLRKHIRNKRLEDVRMLGYDRIILFQFGLGSNAHFIILELYAQGNILLTDSEYTVLTLLRSHRDDNKGLAIMSRHRYPVEACRVFGRTDFAKLKDMLTKPDKADDKEEITSGSTDAQETSQSTNDEVLVTEISEKSLSKKEKKAAAKAKQFGSNAKVNNGAQSNKATLKTILGEALAYGPALAEHIILDAGLVPSTKVGKDPESTINDSTVQSLMESITRFEDWLVDIISGQRIPEGYILMQNKMTAKNITPLEEASINHKIYDEYCPVLLNQFKSREYNEFATFDAALDEFYSKIESQKVNQQQKAKEESAAQRLNKIKLDQENRVHTLRKEVDHCVKMAELIEYNLEDVDAAILAVRVSLANEMSWEALTRMIKEERKAGNPVAGLIDKLNFERNCITLLLSNNLDDMDEDEKTAPVEKVEVDIALSAHANARRWYEMKKKQESKQEKTITAHDKAFKAAEKKTRLQLAQEKTVAAITHMRKVHWFEKFNWFISSENYLIISGRDAQQNELIVKRYMSKGDL

SEQ ID NO: 81615 - protein, 164 aa, Zea mays
  Coding DNA Sequence Number=SeqID_38240
MSARRVRRSWKGDSTLSGDTPGDLPTQSTLRSGARYRSYKEKKTTLRHHGLSGQHARKASLLPPSRGPSGPEPRSVRTLAASIARRPGDPSQTAAIVHLAEPNPRPIRSVAMTNPKDHNNVVLDINTGLTNSPADEDEKLEAHMKRLDEEFQRQQANISKVAEK

SEQ ID NO: 81616 - protein, 148 aa, Zea mays
  Coding DNA Sequence Number=SeqID_38241
  Subcellular localization annotation: CTP_CleavageSite=30; ConfidenceScore=5.15e-01
MYKYSGSSGSGATNIGRDTKCYFNSWKPCSASSVQEKGPDFCSNLKKGSALSASLEMKRLRAANDPVSFWTSLTQAGGLIASIALIFSGFASMPRYETRNPSNFPAETPKTHLSGFRFVRVARSSSKTRVKSSTRVDPLLVLTMMSST

SEQ ID NO: 81617 - protein, 278 aa, Zea mays
  Coding DNA Sequence Number=SeqID_38242
  Homolog annotation: Hit_ID=Q6J9V9; Match level="QueryCoverage=26%, HitCoverage=31%, E-value=9e-15, Identity=54%"; Hit description =Putative uncharacterized protein
MAAPRIARPVALTPRQGKRRLWQAKRASFHLRHNDHVKKGTGKGDIPKGILLREGSGPRALLLIRGSKAGPSEGGSKAGPSEGFDSRPRARRARDDSGYVRYMAEARATLPRGSVIGTEVPDLPSASGATGSSASLDLGPRPQEEVFASPDPRARPPARPQKVVSASPDLRAQPQPRPRNQINLVLNPMNGRKSWRLRTKNMLHHDASKVRRSISTNHGIIISSNITGVIIVTLTVGSTNVAIIRSNVLVNSVSWRVPAKEVYQHVQQVSRKVYDSRQ

SEQ ID NO: 81618 - protein, 144 aa, Zea mays
  Coding DNA Sequence Number=SeqID_38243
MRWKGRATRHKAERRRSPAYLSDFAAVNMPRSRSRGENESEDLPLRFGAAAARWCGVGGQVVAVVGAEMVAAGEGFSADETVGATCSRTSSSLALTACPRPSYRDVGEGLLTAAFAMRSSLLLFSRPRRRSLSRRWCIGHRRAT

SEQ ID NO: 81619 - protein, 267 aa, Zea mays
  Coding DNA Sequence Number=SeqID_38244
  Gene Ontology: Mol. function=RNA-directed DNA polymerase activity; Biological process=RNA-dependent DNA replication
  Homolog annotation: Hit_ID=Q7XBD9; Match level="QueryCoverage=22%, HitCoverage=2%, E-value=1e-08, Identity=62%"; Hit description =Putative gag-pol
MASCSNPAMTLSDVPPLTAYRDALGNLPLVECCHCSNMMIGQVSYKNHSFRERFYKCPIFKHFFYWEEQYVEYSITKSKLPPCFLKLGIAPMCPLLWVMFKDIAEGEATRLEEIDTLEEEWLNIVIQLARYQQSLRCYHDSKDTSERRAAQVISFLGGALHCHRARAAKTHEHDSGQGFVYSREQSRLARAQPRVGTEVLDEVTSRPRASSGSGHTLGKPEAQLRQASSRSNLGQIASPTDRIVGAFNARIARHLILTHVPQSARLK

SEQ ID NO: 81620 - protein, 43 aa, Zea mays
  Coding DNA Sequence Number=SeqID_38245
MVSVTILASKSASAREGAAPPSQYLKGVCGYSEILNICSDVEM

SEQ ID NO: 81621 - protein, 194 aa, Zea mays
  Coding DNA Sequence Number=SeqID_38246
MTPRTRRTARKHTGPIGVPCHQLALRHEDSSSGSNDPIGDLEAQVNRLQAELRRRTDIWVTDGDRINELRSDVRRLRDQLADRDLALDWVVQSHSLAWAKEAKAQARVEELSSAIDDLQAYCNTLHEEVHVLYSQLHPSEPADPVGTEVGPSHVAGEAFGGELDLFRPPPSMRLVDEWSPTPDDEAARSNRKQE

SEQ ID NO: 81622 - protein, 400 aa, Zea mays
  Coding DNA Sequence Number=SeqID_38247
MNNNTGIQSAVTNGTPVPPPQVRTTPLDGGGPAEKQKTDERRAVARSSSSDDDDFCSGGPNSGSTDLRADAAAKRPPPMPKLVRQGRAEGHRVGGRSVAGPGYLVGGITSSSCRGRRRRSERLQSHSRPRARHGAAAGATDDDRPSLRSLSEGAGHRPRRGRPQLGTLSSPALVMKILEAEGGAEVAAPARFPPPSSWRSPSWVTAGGGVQPSCMMKILEAERWLKDQRAKEEGSHAGGMQPRQVGALLRLPTRPAWRPRPTRHATGAPTASCMQLHRHLRHHRASSTAEPIPRLEATQRTTQQRQPGAAVSAAKNGPAVMTVAGGQEQQSRRQPSSHPIQGQRENPLSRREDNAPVFRSSNGSRTRNDRPANHSPRRINSTAGQAAPLAGEAGDASPSP

SEQ ID NO: 81623 - protein, 601 aa, Zea mays
  Coding DNA Sequence Number=SeqID_38248
  Gene Ontology: Mol. function=nucleic acid binding; Cellular component= nucleus
  Homolog annotation: Hit_ID=Q2QNI2; Match level="QueryCoverage=87%, HitCoverage=42%, E-value=1e-161, Identity=58%"; Hit description=Zinc knuckle family protein, putative, expressed
  Pfam annotation: Domain name=zf-CCHC; Domain location=373-390; Score =34.9; E_value=2.9e-07; Accession=PF00098.14; Description=Zinc knuckle
MAFVLQVCHSKAWDSKIVTSAWWVYPHQVSKTAPTGEYLTVGSFMIRGKKNFLPPHPLVMGFGILFRLDESSLASHLNERRVRGEDEALHEMEAESRKKQSNPESDEDIGSEGANKETHEDESNGQTTNIQQNNDLELPDLSSNIGTANSSELLPEIQAEETLDNGSSILKEETIEASVSSQLDDLLDKTLCLGPAKVSGKSSLLTSIPSSLAEDDDDLEVKRPTIRDKPYISKAERRKLKKGQVNDETATDSQNGEAVETPGTSKQEKGKAETKATDSKASQPDTSQQEKGKANTKATGSKLSQPGNSQQEKGKGSTHAGNAKVSRGQKGKLKKIKEKYAEQDEEEREIRMALLAFETFTPCTLPGEDDSSKICYKCKKAGHLSRDCPESTSEVDRNDGSISRSRDDTGTNTAPAGGNSPMDEDDVQEIGDEEKEKLIDLDYLTGNPLPNDILLYAVPVCAPYNALQTYKYRVKITPGTAKKGKAAKTAMSLFLHTPDATNREKELMKACTDPELVAAIVGNAKITAPGLTQLKQKQKQKGKKKSVDVVVCQLSLEAHLGVYAACQGVHPFGVTLVRPERQARSRGPKLHVYDAIAIYSS

SEQ ID NO: 81624 - protein, 163 aa, Zea mays
  Coding DNA Sequence Number=SeqID_38249
MSSEQGSGRYFLSSALQRRPNAVKMCKDLYIIDGCEGVLPQVDHDGSANELHGMVSRRFVEVLSMVVGIRRERKSWDFDVAFDLLITNTLFRKRESHLMTYSSANTLCAPVGINKQDCENKAVEIERRDVTTLKGGGHLKGRWRKQHMREDGSLHSKGGLKGA

SEQ ID NO: 81625 - protein, 153 aa, Zea mays
  Coding DNA Sequence Number=SeqID_38250
MTGKKTTTSLWRMRKRRASSDGGTPKKAKVVVEDEEEAGLEDEEEATVTLSMEKDALECDICCLPFQSEVFMASQITMHEEVDLRAIERALTKSWLGGGASVFGSSSMHLSLLSSVGLSGALSVHPFGALFTRLVPDRLLLSAKEGIDHQWLS

SEQ ID NO: 81626 - protein, 111 aa, Zea mays
  Coding DNA Sequence Number=SeqID_38251
MPTRRSRGLRKFVCCWTSPNVSPVLIDVLEKFKVQIHQLTLNAMVALTKFVWATTTFGETTLVEVFATACTGRRGMQVLLTISLGDALLLRRRGRLREGGGVSPCMKNKWE

SEQ ID NO: 81627 - protein, 207 aa, Zea mays
  Coding DNA Sequence Number=SeqID_38252
MVISRLEIYSPEAESQPTSPNSINPPRYAPYFSKESVTRWKNQLADMAHVPKGNQNVHIWLSGADPWHGMCRMVLHSTFDVLRARAVLDPTLCLHLILKLFCVTCSGRDLVEEYLPCVIWQLSRRWSVTPVARRDFDGFLKPILGPAFSVDLGDRSRDVFMVETEKEVEYLVGLVPEHEVENGIKLSGGKVRQNRVFSQMRIMYEAQ

SEQ ID NO: 81628 - protein, 187 aa, Zea mays
  Coding DNA Sequence Number=SeqID_38253
  Pfam annotation: Domain name=zf-CCHC; Domain location=99-116; Score =28.9; E_value=1.9e-05; Accession=PF00098.14; Description=Zinc knuckle
  Subcellular localization annotation: CTP_CleavageSite=20; ConfidenceScore=5.01e-01
MAACIDLTYGKAVSTALSVEAKYANSGKTKGFGGERPNQGQAKKPRFVIRPSNQNRPFSRPPSFPFKQPIIIRPNNAPTTPKQPGAPGTRFPALPSSSTGCFNCGKSGHFIKDCPYPRQNQANNQQGSGNSAPGKGSTSGKNTKKTGRVYYTQVATTPEGEPVMMGPGYRCNFGNELANPIQGNSHH

SEQ ID NO: 81629 - protein, 83 aa, Zea mays
  Coding DNA Sequence Number=SeqID_38254
MGGGDSHARTKEGGVYDAEGASHACTAMEDVGVVGGDAEKGLTPNHACAEGDDTGEGERGHTHVVEGGSGILRSTGKIGLRLC

SEQ ID NO: 81630 - protein, 59 aa, Zea mays
  Coding DNA Sequence Number=SeqID_38255
MDSPPRCDCGDRVVIDEDIVKHFVCPNIDYLYGWRKCRFREWLYGPLSHWPEAERLDVA

SEQ ID NO: 81631 - protein, 265 aa, Zea mays
  Coding DNA Sequence Number=SeqID_38256
  Gene Ontology: Mol. function=3'-5' exonuclease activity; Cellular component=intracellular; Biological process=nucleobase, nucleoside, nucleotide and nucleic acid metabolic process
  Homolog annotation: Hit_ID=Q7XE52; Match level="QueryCoverage=87%, HitCoverage=25%, E-value=1e-35, Identity=41%"; Hit description =Nucleolar protein, putative, expressed
  Subcellular localization annotation: CTP_CleavageSite=64; ConfidenceScore=5.30e-01
MEADEASAPPPPPWMQNKSAAAIEASSGPLSAAASRLSARSRALPSSRDFHFYNNFPAFKSPVGAAAAKADASLGVLGGASILPTRQQPFPVGGDLDDAHDWLVALNDDLLERFGASTDEFKTLRRKEETSGRRAAPQAGDGFQVVCGKKKKKVGDGGEERVGRVEAFGGFGSVRMVTKDKAAAPGVKAKVPFHIRTIPRPQDVYCIVVDNSSKPFEHILLDRSEDGTRVVHPLRPSHPRVRATHKPHAVLGADSVQPPARALNL

SEQ ID NO: 81632 - protein, 27 aa, Zea mays
  Coding DNA Sequence Number=SeqID_38257
MEAQDLRCIRARDKDKVTEGVGAHGQL

SEQ ID NO: 81633 - protein, 459 aa, Zea mays
  Coding DNA Sequence Number=SeqID_38258
  Gene Ontology: Mol. function=acetylglucosaminyltransferase activity; Cellular component=membrane; Biological process=isopeptide cross -linking via N6-(L-isoglutamyl)-L-lysine
  Homolog annotation: Hit_ID=A2Z7Q7; Match level="QueryCoverage=98%, HitCoverage=98%, E-value=1e-154, Identity=62%"; Hit description =Putative uncharacterized protein
  Pfam annotation: Domain name=Branch; Domain location=65-331; Score =263.4; E_value=4.8e-76; Accession=PF02485.12; Description=Core-2I -Branching enzyme
MGLSSIRREVLVSAVFTALLVASILLLPSLLLTGAGPIRWPSLSPSKDAGIGEEEEQQARYPVTFAYLISASTGDASRAARLLAALYHPGNSYLLHLDREAPAEEHRRLAELVSGRGVYARAGNVWIVGRPNLVTYRGPTMLTTTLHAVAVLLRLRRRWDWFINLSASDYPLVTQDDLMEAFAGLPRDLNFIQHTSHLGWKIKKRARPVILDTALYEDGRAELIRPVNISTNLRRLPTAFKLFTGSPIQAETIAVGNGKAKHARIRPPILSRAMTTLSRAGSAWTMLSRAFAEYVTMGWDDNLPRTLLLYHANIVSSPEFYFQTVACNSRRFRNATVNHDLHFIRWDTPPKQHPLYLTARDYRRMLLSGAAFARKFRDGDPVLDRIDRDILRRRDPAAHFAYGGWCSEAGDQNGGAALCSNPQEPGRRGAVKPGAGSRRLKAMLRKTLSPRNFRRQQCR

SEQ ID NO: 81634 - protein, 84 aa, Zea mays
  Coding DNA Sequence Number=SeqID_38259
MEKVRRCGTAATTKARDGGVWLRGDHMEKRRRCGTAATTKARGGGIWLRGGGMEKRSRCGEEELAPAAIQTAATVSACSQPNTP

SEQ ID NO: 81635 - protein, 116 aa, Zea mays
  Coding DNA Sequence Number=SeqID_38260
MSQGHISLSNRHKAKDISTIKDGVKTGPANGREEGTSKGHTGWNWDRTCKATRSEKKSREIGKSQLPNWVERKGRLLKDAFKSCVRCSFPLCSVFFVNFNCKGERLQVVEIPRKRD

SEQ ID NO: 81636 - protein, 111 aa, Zea mays
  Coding DNA Sequence Number=SeqID_38261
MAWALAATDACSDLRASAKALKSLESPMAGTQDAIEDVGEVGAAAGGGGEVVAAGVVVDWEEDHRDRDSRLSRALSPRAAGPRLRNSYPSSVFSGEVFLRRRLREYREMGD

SEQ ID NO: 81637 - protein, 538 aa, Zea mays
  Coding DNA Sequence Number=SeqID_38262
  Gene Ontology: Mol. function=3'-5' exonuclease activity; Cellular component=intracellular; Biological process=nucleobase, nucleoside, nucleotide and nucleic acid metabolic process
  Homolog annotation: Hit_ID=A2Z7Q9; Match level="QueryCoverage=96%, HitCoverage=69%, E-value=1e-160, Identity=56%"; Hit description =Putative uncharacterized protein
  Pfam annotation: Domain name=3_5_exonuc; Domain location=1-158; Score= 9.7; E_value=1.3e-05; Accession=PF01612.11; Description=3'-5' exonuclease
  Pfam annotation: Domain name=HRDC; Domain location=119-188; Score =68.1; E_value=3e-17; Accession=PF00570.14; Description=HRDC domain
  Pfam module annotation: Pfam domain module=3_5_exonuc::HRDC; Domain location=1-158::119-188
VDLEHNHYRSFQGLTCLMQISTRTEDFIVDTLKLRKYLGDYLREFFRDPTKKKVMHGAGRDIIWLQRDFSIYVCNLFDTGQVCKRSNEICLQLYEKEQLTDTSYLHIHGLKENELNATQLSVLSSLYRWRDGIARAEDESTGYILPNKTLLEIAKEMPVTSGKLKRMIKSRNSILERNLNHVINNIRDAIAASGAFESIVEQLKKGKLEELTLADVKNSSEDTEMIPAVDVDNIEDPSDESAVVPAVITNVGAAPCITSEASLGNMHLEDPVPKTKDSGASSGFTGLTDNKKLSNDQQQAAKATVQVSKRPTAFGALFGKAAAGRRPDLFLGFSNVQGKTKVDKITSSVVLPFHHFSGGAKLSSAALPAKESLHSEPDSIQHSDPACQLEEVIQLDMGTDEQQPPENGNEDDGHCETEDTEMSKSPSGDPSVTEQRFRSLNEERNVKQNQKTPREFEFSVPVVPFDYAEARKNLVSSLPKAERRKDDAVARAINTDAGDKQRGSKKPPGGGENEGNFQHPRRRQAFPPSGNRNATYHQ

SEQ ID NO: 81638 - protein, 397 aa, Zea mays
  Coding DNA Sequence Number=SeqID_38263
MAERYQLLRSCVPPTMRRKDGGYPPSGGLEGGKTRCIREREDMVAFQGGHPPFKGDYPYLRPQPSRAESSPTRSKALPCGVGAGSHMSCKPAQSRRSQTAVRGGASGRRSRRHFAFAVITAPKKGPGKGDTPKRILPCEGTRLRATLLIRGSKAGPPEGFDSRLRSRGPYTHYWSEVRRSAPRKGSTAASGYSGSRRLAPEGFTAASDAERGMTMGTLGHFRDQRERSCNGIPSEGGIEPSDPVARGPGPVDHTQRLGGCSRKPGSSQTVASVNIPARELGTRPYTRATASSHEGTTRPAEALRKALRPQRSKTTPPRPRGLHPAGALARTHRNKMQPRKAGPLAKKCDESLQASAHTPFEARGLLSGTIIRGTLKAPNSQLVTPISIKLQRPDGCN

SEQ ID NO: 81639 - protein, 298 aa, Zea mays
  Coding DNA Sequence Number=SeqID_38264
  Subcellular localization annotation: CTP_CleavageSite=60; ConfidenceScore=5.47e-01
MVAIQGGHPPFKGNSPHLRPQPSRTESSPTRSKVLSLRHGGWVPCVMQAGPGQKEPKPPRAMRATAQQLQAFLHYRSDQRVKGRTAMQAACNRTKGAHPLDFDAFSMEAQAHTSCGQKQQSSRQQAHAPSWDSERTLSHGDRWHLWQAKQATLHLRHNDRVKKGTRKGDTLKGILLREGSGPQAPLLIRGSKAGPSEGFNSRLRALGLRAHYWSEVRRPPPRKGSTVALGHSGSAPTTDQGFVGWPPKGSDSRLRARRARDDPGYVRYITKARAMLPRTDWQTGSDRGEQCRNRLNRF

SEQ ID NO: 81640 - protein, 181 aa, Zea mays
  Coding DNA Sequence Number=SeqID_38265
MNCELSGAESSTVWHHARTIMRGLSTIKSLINPKQLSPASGAIGSSASPDPQGSGSTSTLDDGLRFARPQGSDSASAPEDDGLRFARPQGSDSALTSEDDELRLARPQGSDSASAPEDDELRLARPQGSDSASAPEDDELCLARPQGSDSASAPEDDELRLARPPGSDSTSTSEEPPPRPT

SEQ ID NO: 81641 - protein, 152 aa, Zea mays
  Coding DNA Sequence Number=SeqID_38266
  Gene Ontology: Mol. function=nucleic acid binding
  Homolog annotation: Hit_ID=Q2QU58; Match level="QueryCoverage=44%, HitCoverage=14%, E-value=2e-14, Identity=52%"; Hit description=Zinc knuckle family protein
  Pfam annotation: Domain name=zf-CCHC; Domain location=48-65; Score =11.0; E_value=0.033; Accession=PF00098.14; Description=Zinc knuckle
  Pfam annotation: Domain name=zf-CCHC; Domain location=95-112; Score =4.3; E_value=0.34; Accession=PF00098.14; Description=Zinc knuckle
  Pfam module annotation: Pfam domain module=zf-CCHC::zf-CCHC; Domain location=48-65::95-112
MHKTPSKEYQAFQEGHEQIHGEKINVHMIFSNNVPMCFNKERSKRSDRRCYGCKEKGHEIDSCPHMKNQDLARSRKMTIKKDESKRQMHCKDKHHICYNCREKGHLFKGIRINLSGNQAKGLQPSDIQRMPHRKNEALENGLKRFYLALERI

SEQ ID NO: 81642 - protein, 219 aa, Zea mays
  Coding DNA Sequence Number=SeqID_38267
MFFEDLRKPKAPNSSRGATWPEKMIYPRMQSVGPDLHEEASDPCTHSLDPRIRSGTPKRRPNAATWLAARDVSQRVEPNAACLSSPLPNSTPVLQGALCPSSLMRGQGDFGQAKLAVVWAADPSWPANGHSAETALAGDETTRGGMSCGGASIVGKDEAVSNSTGAEVMVERGRTVAGGDRVDAVRGEGEGADIRAPLEEGEQARESEREARLTSGAER

SEQ ID NO: 81643 - protein, 155 aa, Zea mays
  Coding DNA Sequence Number=SeqID_38268
MAMLGPLIHGAMNTSYLLLTAELACLISWPRAQLIPSSSLDRLLLLWHSSLSCSRKPFGYRADPDDALVPYPCAPPCDAAGPLRRGWHGNPPMVSMEMVASVMALISSLRDLGMGIVPRLFHEGRGDNEDDGFDYDYGLCILSVWKGYFWVNNLG

SEQ ID NO: 81644 - protein, 212 aa, Zea mays
  Coding DNA Sequence Number=SeqID_38269
MAMTWPWEEVSAMESREGRSCVLLVERTKGDRRHVLNAIAERISGMGDHGHARLFPRKRNMSRTGWATRRVRLAANPLNSSVDMHLVKMLSTLILTNLEELEVANRIGARGKGIDRKGEIKLEKRWLCSAKDSLVWVHRTVRWCTGQCPVRQAGVCQLAALGKQLTAYGYKSPDCPCKGERLQVVEIPRKRDIVNKAKHRVFKWVFGPLERG

SEQ ID NO: 81645 - protein, 305 aa, Zea mays
  Coding DNA Sequence Number=SeqID_38270
MLDEVARWDDLVTGLRPTEWVLDMVYRLLGWDAPAFGGRICVGAILPGELATREFVLFLSSTSPVGWCHRSCLSSAGGARPRGGGALPPVLGFKDIHQPCSGGERAGLRLRLSHELVTRLFLQQSEEKDDHQPCEGWRRTSATRHRPDRMRRLPSRFQLHGLDGLVLTIIGGRGQGPLRHGACTEARFVKAADQHTKERVGNGPQEGLVWEAKLCVRTPWMVVLDTRTPVIEWWSVQAHDQQAGLMRADLTGLAYTDALVVRKRYSFSRSKIVTPGSAYSRHLEGHFCMDLSEAWTRGEAVSGGR

SEQ ID NO: 81646 - protein, 171 aa, Zea mays
  Coding DNA Sequence Number=SeqID_38271
MAGCRAAPYAGAQLRRREERRGRGQGCCRGRPSLCAQGGAQGEKGKGAYLVTEWLARARQRRVPGELETAWGRTRDELSTRLGDETGEFGHQGKVAGVHGAMAERAEHARAWDAIRPGAWAAGQASGGWNRSPRFGWGRARMGLTSQPTAQGGRMACACGWCGSGYGECWS

SEQ ID NO: 81647 - protein, 70 aa, Zea mays
  Coding DNA Sequence Number=SeqID_38272
MGTEHGVSGELQAGVAVDLALIVGQLPKHQVAHLEVSGPDPSGVVASQGLLALVLGEPYSRSVGKMASAP

SEQ ID NO: 81648 - protein, 432 aa, Zea mays
  Coding DNA Sequence Number=SeqID_38273
  Gene Ontology: Mol. function=protein binding; Cellular component =integral to membrane
  Homolog annotation: Hit_ID=P16916; Match level="QueryCoverage=100%, HitCoverage=33%, E-value=0.0, Identity=81%"; Hit description=Protein rhsA precursor
  Pfam annotation: Domain name=RHS_repeat; Domain location=17-63; Score= 26.5; E_value=0.0001; Accession=PF05593.5; Description=RHS Repeat
  Pfam annotation: Domain name=RHS_repeat; Domain location=72-122; Score=5.2; E_value=8.8; Accession=PF05593.5; Description=RHS Repeat
  Pfam module annotation: Pfam domain module=RHS_repeat::RHS_repeat; Domain location=17-63::72-122
MWPDNRIARDAHYLYRYDRHGRLTEKTDLIPEGVIRTDDERTHRYHYDSQHRLVHYTRTQYAEPLVESRYLYDPLGRRVAKRVWRRERDLTGWMSLSRKPQVTWYGWDGDRLTTIQNDRTRIQTIYQPGSFTPLIRVETATGELAKTQRRSLADTLQQSGGEDGGSVVFPPVLVQMLDRLESEILADRVSEESRRWLASCGPDGGADAKPDGPARKGQQNGAQKYDEWGNLLNEENPHQLQQLIRLPGQQYDEESGLYYNRHRYYDPLQGRYITQDPIGLKGGWNFYQYPLNPVTNTDPLGLEVFPRPFPLPIPWPKSPAQQQADDNAAKALTKWWNDTASQRIFDSLILNNPGLALDITMIASRGNVADTGITDRVNDIINDRFWSDGKKPDRCDVLQELIDCGDISAKDAKSTQKAWNCRHSRQSNDKKR

SEQ ID NO: 81649 - protein, 180 aa, Zea mays
  Coding DNA Sequence Number=SeqID_38274
  Gene Ontology: Mol. function=metal ion binding; Cellular component =cytoplasm
  Homolog annotation: Hit_ID=A2YQ28; Match level="QueryCoverage=50%, HitCoverage=47%, E-value=1e-18, Identity=56%"; Hit description =Putative uncharacterized protein
  Pfam annotation: Domain name=PHD; Domain location=77-133; Score=-5.7; E_value=0.061; Accession=PF00628.20; Description=PHD-finger
  Pfam annotation: Domain name=zf-C3HC4; Domain location=88-130; Score =38.5; E_value=2.5e-08; Accession=PF00097.16; Description=Zinc finger, C3HC4 type (RING finger)
  Pfam module annotation: Pfam domain module=PHD::zf-C3HC4; Domain location=77-133::88-130
  Subcellular localization annotation: CTP_CleavageSite=79; ConfidenceScore=5.57e-01
MASLQAALLLLPAFSVVAVAARWVCRALARSHLACLPSGSPSFRYLVSSSPSSSSVVDKGGGELPVALYSRRTKRRRCVGEEEEEERCVFCLSSIEEGSEVRELRCRHLFHRACLDRWVRARPAATCPLCRGRLLTSLPWEVAGYYHDEEEEEEVEMEEESDMMLFMACVHSRSSWLWPS

SEQ ID NO: 81650 - protein, 784 aa, Zea mays
  Coding DNA Sequence Number=SeqID_38275
  Gene Ontology: Mol. function=microtubule plus-end binding; Cellular component=cytoplasmic microtubule; Biological process=keratinization
  Homolog annotation: Hit_ID=Q10M62; Match level="QueryCoverage=92%, HitCoverage=87%, E-value=0.0, Identity=51%"; Hit description =Expressed protein
MWSPEGNPFSREYAIRTPKDHSAMENDSPRSKYCSCSAGHSPVSSPVAIQCRSTRLGNLLNRNEVLDRYIDRGHGDAIVDEKQKQCVPTVSNLGRPPRPHSTVPSIPRPFKETTESYPDVDLNDAFLWRLAQEGIGDTHKITTMCSASRRHINMSDASERESATTVEDIYEDLQDVRLPNVICPSTCPNSAVEETDDMLLQRVKEVESRFTIPCGDEYEFSMLRYKSSTSNDMFQLIQQLTEDRKQLAYELSSEIKARVTERFAAKEQYKQLKKELDNRTRRLEKEKSEVQTTLEGEMDRRSDDWSIRLSRFQSEEERLHERVRELAEQNVSFQREVTSLGATKAEALMKAASLETQNSKLNDDLEKLKNEHEKLHYSSTDLQARFAEIVEERDHIREYLKAKEGENKALHKVIARLQTTCNEQERTITGMRQGCIDELGRKFVEYSTNDKTRKLQMELIRLTGVEQKLRGEIRSCNLEVKSLRQENIALLNRLQGAGNGASFSSIRLDQELQARVDNLQMQGLSLLDKISQLCTKLLDLMKHKRHENEYLCGNDVSTFSDYIFEYQSIKGGIEGLKLSLKAINSILAEKQNAKEKSGEIVAEGSPSKDQTDDFGLKLKEEAMLNRVLKEAVLSKEVAIEQLQSDLASSLRIQDVMRNEIQRVQDELSCITHKAKQLELQVSKKDESIDEIQQDFQESAKELAALRGTLKTVTEERDLSWQEAKQLRRNISIMQDEVVSLKKKIEALDEDILVKEGQITILQDSIDKPFDIICSPRSMREFDMA

SEQ ID NO: 81651 - protein, 202 aa, Zea mays
  Coding DNA Sequence Number=SeqID_38276
  Pfam annotation: Domain name=VQ; Domain location=98-128; Score=42.6; E_value=1.4e-09; Accession=PF05678.5; Description=VQ motif
  Subcellular localization annotation: CTP_CleavageSite=32; ConfidenceScore=5.48e-01
MDAISCLAPLLATSIADAAIARALHFSSSSSSSSSVAATTTTIISPDSSSASSHHNDLPPVPVPVPPHAASFHPVRQNHHQALALAPRGARAGKRRSRAPTTTYISTDTANFRLMVQQITGAQEADGGDVAGVDVTALQVQAAALLGAAAAGSPQLLPGDDEASALRRHQLHPLDLQQQPCFPTLDSWNVMYETNSSGAGML

SEQ ID NO: 81652 - protein, 329 aa, Zea mays
  Coding DNA Sequence Number=SeqID_38277
  Gene Ontology: Mol. function=protein serine/threonine kinase activity; Cellular component=myosin complex; Biological process =protein amino acid phosphorylation
  Homolog annotation: Hit_ID=Q7XYY6; Match level="QueryCoverage=14%, HitCoverage=4%, E-value=5e-20, Identity=91%"; Hit description=EDR1
  Subcellular localization annotation: CTP_CleavageSite=41; ConfidenceScore=5.30e-01
MERPTVSSPRPPLGQLHDLSSTLVGCRVRPSVSSTISTPLSQAAASESVPLGQLHDLHFFDFNALDYGDIWCRVRFSSPLAPFLHFAEVRKLPSPFVVGHSVLPLSTHIQCDVYSFGVILWELATLRMPWSGMNPMQVVGAVGLQDRRLDIPKEVDPLGGEDDNFAIVFAAMGVNMEKTQFLQRGFEENNSMERDTLFLNLTYSLSGPRRRVPRDRDIAYPGRGNGRPRTHVVVFLVVRSHFHRAKGQRQTTRSPGCLPLSSPDAPMPPPPPPSVRGFLDAHFASPDDLAAAPALAELLRRECDGLDASLRRAEARLGAAARVLARALL

SEQ ID NO: 81653 - protein, 111 aa, Zea mays
  Coding DNA Sequence Number=SeqID_38278
  Pfam annotation: Domain name=zf-C2H2; Domain location=23-50; Score =17.5; E_value=0.049; Accession=PF00096.17; Description=Zinc finger, C2H2 type
MHQTPLDTIHYSPTWRSEARILFLCNYENCGKTFADVNALRKHAHILLQHGMVAAFARAAWLKEYHEKVLVEIYRSIPYLRDATPLFPLRSFQAASAWVVDPFLSLLCFLQ

SEQ ID NO: 81654 - protein, 141 aa, Zea mays
  Coding DNA Sequence Number=SeqID_38279
MGEVAPLIPATRRRTMSRKAAGAVEADRPAEDVSEEKTLKITIALNQEAEAVAIASKEEKGLQDEPKGEKEDKKTLVERYIVKETQPNESLYEKKPEEPTLVLTSLVIEILQPGANHIVTNLNMSKMHLLLRLGTTQKANR

SEQ ID NO: 81655 - protein, 232 aa, Zea mays
  Coding DNA Sequence Number=SeqID_38280
PVRALLLPLQKANDVWGLLTRPFFLTVTNGADYMQRVERRRECAAAVCVRESRNTPSIGARGWPWNIAVDRGRCEDHLRADFGLFARAISHRKSNTAAGPPFAVAGTFYNRIVGKKFSSVLASSSSSCSTDQFRFRGTSSVDDRMPARASAVLVGGAAALSTWEKRVWGKRRGAFIRRSTAEINWRIAFCRIELGPSDRDRMAVIALGFIKPGASDLDPADRAAYRFAAIQA

SEQ ID NO: 81656 - protein, 127 aa, Zea mays
  Coding DNA Sequence Number=SeqID_38281
MTACPMILRREPYPCHCRFLPPRPPPSHAHGRFCQKTHAVDLLMAWGLWASHASPGEKQRDDLGSLLAGGNFAVEPTNGWRPGRVGITGCSGSCSADTTAEWERSLLCLPHVRKMKEDRWMRNEEWR

SEQ ID NO: 81657 - protein, 162 aa, Zea mays
  Coding DNA Sequence Number=SeqID_38282
MEGRGMSIIKDGAKAMIVTDKGDNATKVKIGKTPFSNRDGKDDISKGRHKITSWKDLEITKRGQGSKVMIGKDIKGRGNKGGQGHVNRNISNRYWDIKVSGPTVSTTLIPLMSHPVLKAADWGEVASLILELIEVLELLEIRLDDFFFYLSIDYTQRQPSVL

SEQ ID NO: 81658 - protein, 43 aa, Zea mays
  Coding DNA Sequence Number=SeqID_38283
MAERACSDPYACSDPYCFWRKEKVRHTCSDPYVVALVAKLVAL

SEQ ID NO: 81659 - protein, 131 aa, Zea mays
  Coding DNA Sequence Number=SeqID_38284
  Gene Ontology: Mol. function=2-polyprenyl-6-methoxy-1,4-benzoquinone methyltransferase activity; Cellular component=mitochondrial matrix; Biological process=ubiquinone biosynthetic process
  Homolog annotation: Hit_ID=O49354; Match level="QueryCoverage=89%, HitCoverage=52%, E-value=7e-38, Identity=51%"; Hit description =Hexaprenyldihydroxybenzoate methyltransferase, mitochondrial precursor
  Pfam annotation: Domain name=Methyltransf_11; Domain location=1-86; Score=15.8; E_value=0.0028; Accession=PF08241.3; Description =Methyltransferase domain
PLARMGATVTAIDVVDKNIKIASIHAASDPTTASIEYCCATAEGLVKEKRLFDAVISLEVIEHVANPLEFCESLSALTIPNGATVEEMAGFVYNPLSGEWSLSDDISVNYIAFGVKKGEASSTNDREANLS

SEQ ID NO: 81660 - protein, 386 aa, Zea mays
  Coding DNA Sequence Number=SeqID_38285
  Homolog annotation: Hit_ID=Q6J9V9; Match level="QueryCoverage=23%, HitCoverage=32%, E-value=5e-10, Identity=47%"; Hit description =Putative uncharacterized protein
MHAACNRTKGAHPFDFDASSMEAQAHTSCNRRAGYYVRENAPPLAPVPHLLDCGTGATTRGDPAHDPIVPTEHIGHGSVSRGRRRDDRYGQKWADSNGDGRRAETAVKSSASSRPLLGQRESPLPRREDDALDRWHLWQAKQATLHLRHNDRVKKGTGKGDTPKRILLREGSGPRAPLLIRGSKAGPLEGFNSRLRAHGLRAHYWLALEGFDSRLRARRARDDLGYVRYITKARATLPSLGRHRKLRLARPQRSGLSLGSGRRRTPPCPTLGLGLSLGSGRRRTPPRPTPGLGHSLGSERRWTPPRPTPGLGLNLDLGRRAPPRPTPGLGLSLDLGRRTRPRPRRSLRLARPRARTDHVTGGAIITLPLASSGYGEQDRRPIWFAP

SEQ ID NO: 81661 - protein, 172 aa, Zea mays
  Coding DNA Sequence Number=SeqID_38286
MEGDRWAQALATELGLLVSVEMKGHTSTGGVLLTRRFAFSSHVGQHPRSMTPGPRPPVSEAGPLPLAEGGRRAELGSCLPHGLVTRFFLQHLEEKDVHQPCGGGELRLCGASRPACATSRRASCPLAWMVLSSLPYGDGSDGLFAMASALRWSPLLASHWRAAGAEMVTAAG

SEQ ID NO: 81662 - protein, 198 aa, Zea mays
  Coding DNA Sequence Number=SeqID_38287
  Homolog annotation: Hit_ID=O48967; Match level="QueryCoverage=60%, HitCoverage=35%, E-value=8e-27, Identity=45%"; Hit description =Putative uncharacterized protein
MGGTGATMCPRRWDAPGHQKLVRTPMGVAYPYYRMFCTHDDSRVTEKQRREAKTISVWALLHSERGGMMVQIVEHRAETSVDFLLGSCCATPPSSTASPGAMKQWRDDVDRMLGMAHSGSTRSRPRSSWRQHKASASVRSPSMRAAPTKDLRAELSRRRTAEDAPVSQERSNDLRAELNRRRVGEDARVSLERAQEHR

SEQ ID NO: 81663 - protein, 665 aa, Zea mays
  Coding DNA Sequence Number=SeqID_38288
  Gene Ontology: Cellular component=chloroplast
  Homolog annotation: Hit_ID=Q5N7A8; Match level="QueryCoverage=99%, HitCoverage=99%, E-value=1e-140, Identity=46%"; Hit description =Putative uncharacterized protein P0529H11.42
  Pfam annotation: Domain name=DUF740; Domain location=6-642; Score =303.8; E_value=3.4e-88; Accession=PF05340.3; Description=Protein of unknown function (DUF740)
MTLRMEPPVPPPRRSVSTTCDLHPEETFTGFCAACLRERLTGLEANAAAAAAPGRKSTSAIRSLFSRPFAAAAGGGPSGSGAAALPDLRRCKSFSCGSGGDALAAAGGAYEPQRRSCDVRGRSTLWALFHQDDRERVRDGTAFVAFPASSSTAAAALAAEVLAPPPPPPACVAEMFLEEEIAVAEDSDEIVPVMEPVLVADTSEEMETGVNAARDVRAMKDHIDLESSQSQQPKKPPPKEMEIAGSFWLAASVFSKKWQNWRRKQKLKKQEAAGSKAAAAAMPPPEKPSKPSFLRRSRFRRGEAGSEFAGGRRSCDTDLRFSLDAGRMSVDGMGFAWDQPRASWDGYLFGAGAGAGIALGRAPPPLSRLPPILSAMEDSPAGIVERSDGQIPVEDDSQPEPDPDANVPGGSAQTRDYYMDTSSRRRRSLDRSSSVRRSFEVTDPKPVAVPVPVPVPATAPAAMVNGKESPLMGSSEFYHFHHAEDLFDHRFSTNSLVEDFSASLDAAFPGPAKKPPRRWRKAWSLWGLIHRRAAGRGNGADRAFSEPWPELRVRGHSGRMQRCNSNACARSSFSSNSGGGLGSSRRSYVVDAHGHAKRRREEGAALERNRSARHSPGPGTADSGMLRLYLTPVRSASGRRTAVFPVKGRRPLRSPSLARTMLGLY

SEQ ID NO: 81664 - protein, 54 aa, Zea mays
  Coding DNA Sequence Number=SeqID_38289
MERGTPEGIRVRERTGRGRVNGTERDCESGIGTERLRPIDFLERNGSGSEENIP

SEQ ID NO: 81665 - protein, 510 aa, Zea mays
  Coding DNA Sequence Number=SeqID_38290
  Gene Ontology: Mol. function=helicase activity; Cellular component =nucleus; Biological process=RNA-dependent DNA replication
  Homolog annotation: Hit_ID=Q5JMH8; Match level="QueryCoverage=84%, HitCoverage=38%, E-value=2e-92, Identity=41%"; Hit description=DNA binding protein-like
MGDVLIPSLRCGNLSVTICVRVSRFWDFSDPQDDARLLHCDMVLLDEEGNSIHATIYPPFIEKFRPLIKEGSVYNMTYFRVRASNNLYKPVPNDIMITFTNWKKLEQVIEIPPAFPTLTYSLTHIDQIHSRIDHKDYYTDAIGIVTSVSNVSPHRSKGQQASSLKRNISICSARCMCLCLMFHVRTENSRGASVNVVLWGAQATLFPGERIYENGQNSPQIVLFVGTLVKKYADGLCLTGSSPCKWYINPSIPEAETLMSSARGDHKPVKWNATVTSSQLISPVAEEQKVSYIKYLHPFENKGKEFLVTVTIRKIDNKWWYNSCRKCACTAVTHGDSYKCTNRDCANIAMPVQRYKILVIAGDETADTDFILFGRVAQRIVKRPCDMLIANTPSGFIPDAITKLLERTFVWNVSFSGHTINSGNVCFQVNATIKELGNQNVDISTSTAGTQQSSFMFSQGASSSMKDTPHKTDTLSSPLTPLTPQGSIATTKYLVNFDHDATLITLLIDC

SEQ ID NO: 81666 - protein, 396 aa, Zea mays
  Coding DNA Sequence Number=SeqID_38291
  Gene Ontology: Mol. function=catalytic activity; Cellular component =nucleus; Biological process=regulation of transcription
  Homolog annotation: Hit_ID=Q5JJP7; Match level="QueryCoverage=19%, HitCoverage=25%, E-value=2e-21, Identity=68%"; Hit description =Putative transcription factor PCF3
  Pfam annotation: Domain name=TCP; Domain location=247-381; Score= -10.0; E_value=5.1e-07; Accession=PF03634.4; Description=TCP family transcription factor
MTVLHHSHLPTDTKAERKGWWPHTSVSTAEIAALCRASERVTQTCSGRWCACGHRRSLIVSFTYREHRRGGESHGRCSTHRPGRTAGRVGRCSGGRPPGGSRDRKGQAPLSRLGPVTISPHPLCHPQSSPSSGQAGAPVTKQKKGSESTKPDLVCFLLPRLGGSWCLCVSVCGDGPQVPPPPPLNKTEPTTATTTTTSTAQQQQLDPKDYHQQQQPAQHLQIQIHQSPQQDGGGRGKEEEQLQVVAQPGERRQQPLAPKRSSNKDRHTKVDGRGRRIWMPALCAARIFQLTRELDHNGEREDMERNRVRAWRLSSSVVARTAAGAAGAGRGIAGGGMRPRILPPARYGGGIGMEEESRDGTGRPVFAAGMAAGGSWQTSGRTGLGSGGSLQSSLNS

SEQ ID NO: 81667 - protein, 164 aa, Zea mays
  Coding DNA Sequence Number=SeqID_38292
MPDVARGSHRDMEAARTQAGQRVPPLQYSQKKYEAAKNQAMRLPAARLRDALPFVCAPLQIWSRRLLAPSPPRAVACRAAAWNSPPDLAVDLVVNASDEVTMTPSVPSVEACGGRPSPSLYSYSAPYFARCVPMSSSSQTPCLGLPRFDADGVRRVLLKSLRAS

SEQ ID NO: 81668 - protein, 320 aa, Zea mays
  Coding DNA Sequence Number=SeqID_38293
  Gene Ontology: Mol. function=protein kinase activity; Biological process=protein amino acid phosphorylation
  Homolog annotation: Hit_ID=Q10NJ0; Match level="QueryCoverage=57%, HitCoverage=33%, E-value=1e-48, Identity=49%"; Hit description =Protein kinase domain containing protein, expressed
MALRGGERAQNRQEEELARRHTRNNGGSSPEEGAKAVGRARRPEEEAHCWRRDRRRKVEDSRVNKTRPVTASSPMDANGGTRSAAFPPAVVNATHRARCCELYDIVIDGSKKFEPHYYSYVATWKGEISQLSANIKYICVLICIIDPVERLTVEEFVHHPFLSEHAPERTLSRTLSEIRDGFPINNISPTRPSSQSSQEDCMPFPLDDESSGQEEGPIPDSKSPMKSYGFPTDFPIIDSLEFVDQEYVFVSGPHPEGSSSSTNASQQLNLPAKYDNLSVSPPKLTFLSAPIPINGLPINRQQSAGTGSFDNHYSPASVTS

SEQ ID NO: 81669 - protein, 400 aa, Zea mays
  Coding DNA Sequence Number=SeqID_38294
  Gene Ontology: Mol. function=ligase activity
  Homolog annotation: Hit_ID=Q6ZD68; Match level="QueryCoverage=98%, HitCoverage=68%, E-value=4e-75, Identity=41%"; Hit description=DNA ligase-like
  Pfam annotation: Domain name=DRMBL; Domain location=109-221; Score =31.6; E_value=8.8e-07; Accession=PF07522.5; Description=DNA repair metallo-beta-lactamase
MFLFEGPFGSVLHITDCLSALTPHLARRIDYLFLARCSLRFPATQDSIRQVIDCIWKHPSALVVYLVCDMLGQEDVLVGVSKAFGSKIYVDREKNSDCHQRLAHVTPEILAADDAAPSTRFHVLSFPRLSEQATEILAQARAARQLKPLIIRPSSQWYAYYDPPPPEEASTQQQQQKPVLTEAMCDELGVWHVCLSMHSSREELEQALGILKPKWVVYTMSSCMVVDLSYAVLLTVEAVEKLEEVFSACAPSNDISQALEEGAEATVVDFEYESVEIIGDDELEAKDSANELEFCRHSKPIQVVGLTEAATREQNPVSDESELLNDIKSDGGVEVVDLTEGGKKEHNLGAETEHDRGNREAELGAQEQNLNARARLTVGVCRPKVIADEGTEATEGNESS

SEQ ID NO: 81670 - protein, 173 aa, Zea mays
  Coding DNA Sequence Number=SeqID_38295
  Gene Ontology: Biological process=response to biotic stimulus
  Homolog annotation: Hit_ID=Q65WX2; Match level="QueryCoverage=77%, HitCoverage=63%, E-value=1e-33, Identity=60%"; Hit description =Putative uncharacterized protein P0486C01.3
  Pfam annotation: Domain name=Bet_v_I; Domain location=21-167; Score= -30.2; E_value=0.00072; Accession=PF00407.10; Description =Pathogenesis-related protein Bet v I family
  Pfam annotation: Domain name=Polyketide_cyc; Domain location=32-166; Score=41.4; E_value=3.2e-09; Accession=PF03364.11; Description =Streptomyces cyclasedehydrase
  Pfam module annotation: Pfam domain module=Bet_v_I::Polyketide_cyc; Domain location=21-167::32-166
  Subcellular localization annotation: CTP_CleavageSite=73; ConfidenceScore=5.25e-01
MPYTAPRPSPQQHSRVLSGGGAKGGVARGVAIAAPVGAVWSVVRRFDRPQAYKHFIRSCRLVGGGDVAVGSVREVRVVSGLPATSSRERLEILDDERRVLSFRVVGGEHRLANYRSVTTVHEAGAGAGTGTVVVESYVVDVPHGNTADETRVFVDTIVRCNLQSLARTAERLA

SEQ ID NO: 81671 - protein, 79 aa, Zea mays
  Coding DNA Sequence Number=SeqID_38296
  Gene Ontology: Mol. function=phosphoinositide binding; Biological process=cell communication
  Homolog annotation: Hit_ID=A5B8C3; Match level="QueryCoverage=65%, HitCoverage=42%, E-value=3e-11, Identity=59%"; Hit description =Putative uncharacterized protein
NQTPPYSDGLNDKSSPPIRGPYYLENNKIEIKRFDKERRHDFIEMLKGFVITQVSYSDHFANMWTKVTEETEVYANRSS

SEQ ID NO: 81672 - protein, 303 aa, Zea mays
  Coding DNA Sequence Number=SeqID_38297
  Subcellular localization annotation: CTP_CleavageSite=68; ConfidenceScore=5.03e-01
MTSHAPAGDPTAATPVLGGVVVAEEVPTGGFAPTLDTGGDTGGASSSNPRLLRRRWRWCLGGNSGQVLSETEATNLREWEALEAEHQRLSDWRTQLEERTKSASRQFTSERSQLERDHKEYKKDLQRVCARELEATRREKKVARREEAVTQREALTTEYQAKLSALDQALEAKWAQQQELEGKASNVALAKENLKEKELSLDRRETDLISIINFPLVLGPLGGRLDVSVSAINPNLPVRLGVRSPGVSGGGSTALGGGSTGPDVSDLPAGQSASQSGSQTGRQFADLSGDGSTGFLRGFWSNG

SEQ ID NO: 81673 - protein, 114 aa, Zea mays
  Coding DNA Sequence Number=SeqID_38298
  Gene Ontology: Mol. function=translation elongation factor activity
  Homolog annotation: Hit_ID=Q69S66; Match level="QueryCoverage=86%, HitCoverage=8%, E-value=3e-34, Identity=68%"; Hit description =Putative translation elongation factor EF-1 alpha
MGAAERDGVAIKKLSRLFKSVLGFEVDNSTFTEAQIRAMFYPKFKNDKSDQKTRTKMIDMVSHGLANLKVTLKHSSSLFMYDGHHGGAYVKNSFGNVYAALICADYYMLSVCYA

SEQ ID NO: 81674 - protein, 127 aa, Zea mays
  Coding DNA Sequence Number=SeqID_38299
  Subcellular localization annotation: CTP_CleavageSite=52; ConfidenceScore=5.20e-01
MLRQSTSFGPTCRLASSPEVGPGATVGHNSPQPRATTLGQQQHLTPPHGRVRCRHMSRERPPRMRTRPLEWDPDPLYGVQATHSGVLGSQDRAYLGLNQDRGGGIFGLKSGITVDQNNTKVGEAPKV

SEQ ID NO: 81675 - protein, 303 aa, Zea mays
  Coding DNA Sequence Number=SeqID_38300
MNALSREGCRHYEVFDQADEDFEREIYKVEDPVVKESAGALFDRMWGPHGREVVRERSETARGQAARNEKVEDFEALNSAQPDSESNPVAAVSEAPPPETVEGALDAPAATAAGSGSSPTAAPRAEDPVKMAAEPAAEDPATAGSSQVQDFGPAHTTATANLLAASTVDDGNKSDESASKFSNFGDSGTSVEWTEESSDENLDYFAALDVAAAEASPRAVDAEVVPGPSAGRRRRRAVAKRRVSEADGGRLRVGRVGRQELLSLPAVASAGEGELRSLFAGEELRIMLFNYREMGIIPKVEPM

SEQ ID NO: 81676 - protein, 72 aa, Zea mays
  Coding DNA Sequence Number=SeqID_38301
MGSRHSACSAKAGCRGSFVLLLLVTLLRGERYLIRDGWFTDDKDDGYDYGNGKEEGVEANLQEFQDFDEFED

SEQ ID NO: 81677 - protein, 138 aa, Zea mays
  Coding DNA Sequence Number=SeqID_38302
MVNVSRYPFPFFLLCLGELPYSLVVVEPPLPLRPDESPRREAHAAAYSQPGRVICPACSAPCAPSDAPGHPRCRPVLPARLFAALRGGLHGLPVAACATAGVVACEACQRQPRRGSLGVACTTCARLASGSPGVARSA

SEQ ID NO: 81678 - protein, 72 aa, Zea mays; identical to SEQ ID NO: 81676
  Coding DNA Sequence Number=SeqID_38303

SEQ ID NO: 81679 - protein, 419 aa, Zea mays
  Coding DNA Sequence Number=SeqID_38304
  Homolog annotation: Hit_ID=A2XQD7; Match level="QueryCoverage=25%, HitCoverage=14%, E-value=4e-07, Identity=31%"; Hit description =Putative uncharacterized protein
MAAIPRTSEVMERSEPMHVGPMPPSNLRLHQSGLNSGNLRKENRRHDSKSHHLSGRVEIEEQSIVNQEFCACNNDSSFEFVDLRSMKIKHTPMMLRWKSGRNQSLNPWKIHGDLIPSWITPPRGDAVLPQFRDSRGCIEEKCKAVVKKTEEVEGLWGKIPESDISRNANAESAHLCSPPNPKPHTYISSPVHTSKPQIERFVGHFWGRSQKSYASVVKANCAPIVVVKMQPRGAGRRGAAHGYGRGSGRDHVWRRIEDGAIQNQKGGRTIEEADMGEDGDTLNQGNPSPWEGQVNRSEEKNEDSWKVNAKGCLQKGWFRISGIPMEQRSLVTIAKVGGLVGKVIEIDERTRLRNEYVRARIACRDVTVVPGVVESSLGLFLYDFFFEREIHSEEDEQSLEAGIRVDDSYQKAAKRSKYE

SEQ ID NO: 81680 - protein, 138 aa, Zea mays
  Coding DNA Sequence Number=SeqID_38305
MGERCRGGGSSAEGVAVPRWELGLRTVAKPPGGPRWAWHPPTGMLSSGKVSSLCASLNPILGSFDIEKAKPAPSVFGSWLRPWLRTHARELGWGYELEARDVTWEGAQEAERRCAWGASVGVWGREQNHAPWCTLGSI

SEQ ID NO: 81681 - protein, 272 aa, Zea mays
  Coding DNA Sequence Number=SeqID_38306
  Homolog annotation: Hit_ID=Q6J9V9; Match level="QueryCoverage=47%, HitCoverage=45%, E-value=4e-58, Identity=86%"; Hit description =Putative uncharacterized protein
MRLQKPKQKASANGMVKNHRQPLIWAYKGLGEIHPKLRPNPSRNSNSKGKRHLRHAKRAPFRLCHDDRVKKGTGKGDISKGILLSEGNGPRALLLIRGSKVAPSGVRQPPQSTRALSPLLIRGLKAVPSEGFDSRPRARRVRDDPGYVRYMVEARATLSRYPRTFPRPAGTICNGIPPEGGTKPSDPIEWVRVQQITCRERLTTVAVTPEFSLGRNEELRLARPQVSTSASASGGGLRFTRPQASTSALASGGVAASPDLYLGINYATGDTS

SEQ ID NO: 81682 - protein, 132 aa, Zea mays
  Coding DNA Sequence Number=SeqID_38307
MTVVVVVLRGEQYHVVAAVEGHELEASEAEHRPGLKRLLKATHLELNGKVIPTLNAHAIRLVGKTIWARSLHDKVCPSWASGEPRVRLLTEGTLGRGVNPSGTTVLARDWARMRSRPLVDEAYALSVVYGLF

SEQ ID NO: 81683 - protein, 245 aa, Zea mays
  Coding DNA Sequence Number=SeqID_38308
  Gene Ontology: Mol. function=nucleotide binding; Cellular component =plasma membrane; Biological process=small GTPase mediated signal transduction
  Homolog annotation: Hit_ID=Q40787; Match level="QueryCoverage=71%, HitCoverage=89%, E-value=2e-94, Identity=94%"; Hit description=Ras -related protein Rab7
  Pfam annotation: Domain name=Arf; Domain location=1-167; Score=-90.4; E_value=0.011; Accession=PF00025.12; Description=ADP-ribosylation factor family
  Pfam annotation: Domain name=Miro; Domain location=10-119; Score =22.1; E_value=8.6e-05; Accession=PF08477.4; Description=Miro-like protein
  Pfam annotation: Domain name=Ras; Domain location=10-169; Score =248.6; E_value=1.4e-71; Accession=PF00071.13; Description=Ras family
  Pfam module annotation: Pfam domain module=Arf::Miro::Ras; Domain location=1-167::10-119::10-169
MASRRRTLLKVIILGDSGYVNKKFSNQYKATIGADFLTKEVQFEDRLFTLQIWDTAGQERFQSLGVAFYRGADCCVLVYDVNSMKSFDNLHNWREEFLIQASPSDPDNFPFVLLGNKVDVDGGNSRVVSEKKAKAWCASKGNIPYFETSAKDGTNVEDAFQCIVKNALKNEPEEEFLLLCTQGRISHAVSQSVDFICAVPSVASYLVNTVGQNKSKPELKFVSVWDGGRLFLAFCFNASCHTRAG

SEQ ID NO: 81684 - protein, 182 aa, Zea mays
  Coding DNA Sequence Number=SeqID_38309
  Gene Ontology: Mol. function=nucleotide binding; Cellular component =intracellular; Biological process=small GTPase mediated signal transduction
  Homolog annotation: Hit_ID=Q9LEC5; Match level="QueryCoverage=87%, HitCoverage=95%, E-value=8e-68, Identity=70%"; Hit description =Putative Rop family GTPase, ROP6
  Pfam annotation: Domain name=Miro; Domain location=8-120; Score=23.3; E_value=6.7e-05; Accession=PF08477.4; Description=Miro-like protein
  Pfam annotation: Domain name=Ras; Domain location=8-136; Score=154.5; E_value=2.8e-43; Accession=PF00071.13; Description=Ras family
  Pfam module annotation: Pfam domain module=Miro::Ras; Domain location= 8-120::8-136
MSVTKFIKCVTVGDGAVGKTCMLICYTSNKFPTDYIPTVFDNFSANVSVDGSIVNLGLWDTAGQEDYSRLRPLSYRGADVFVLAFSLISRASYENVLKKGEELRRQIGAAAYIECSSKTQQNVKSVFDTAIKVVLQPPRRREATPARRKNRRGSGCSIMLQGLTIARMQCLCKRLFAGIGLL

SEQ ID NO: 81685 - protein, 342 aa, Zea mays
  Coding DNA Sequence Number=SeqID_38310
  Gene Ontology: Mol. function=protein serine/threonine phosphatase activity; Cellular component=mitochondrial inner membrane; Biological process=intracellular protein transport across a membrane
  Homolog annotation: Hit_ID=A3B5S8; Match level="QueryCoverage=67%, HitCoverage=70%, E-value=7e-74, Identity=58%"; Hit description =Putative uncharacterized protein
  Pfam annotation: Domain name=NIF; Domain location=196-323; Score= -18.8; E_value=1.2e-06; Accession=PF03031.9; Description=NLI interacting factor-like phosphatase
  Subcellular localization annotation: CTP_CleavageSite=47; ConfidenceScore=5.58e-01
MSRLLLRHRSFLLPGARSDASHPFTAASSSSRSSYTSRFSPLAYHASAAATAAGAQSEGAAAESTPAAGDQPSSTPPPAARGRWGLLKFGALAAVAGAIGGVGYVTYAYSLNEVEEKTREFRKNPRLLIPEDASTFELSFVGYVFIFCTFLSLLRGVQSWAAVPVSAIELYLDIRSTIEDHVRGFTEPTSDKLLPDLLPQDQHVFTLVLDLNETLVYSDWQYVEPVFERLNSRGTISHRLSRPATKYVDGKHYRDLSKLNRNPAQVIYLSAHALESCLQHENCVEIKPFKLEDKNDTQLLDLIPFLEYVAMARPSDIRTVLASYQGHDVAAKFIERSKEHQR

SEQ ID NO: 81686 - protein, 208 aa, Zea mays
  Coding DNA Sequence Number=SeqID_38311
MENHNKSLPTRSRSSFSEFVSNPPICEEGCSSRNRMWPSLDKPVIEAKLNPDDDVVDAGLEDVVEGGHGVKTTRFVVDVEDEEEEEGLSMSAVDGILEEGVHEELLLELPEINVIDVCIDYPDEVPSTCLMAGPEVMELPLDAQSSGRRLDVDEHVEQCRAVVGVLHVLARFVLMLQMQHLRGIHTYREEAPRTELLGSRRRLGEGER

SEQ ID NO: 81687 - protein, 99 aa, Zea mays
  Coding DNA Sequence Number=SeqID_38312
MDYGGRMTWRFGVMSLENPDERNENTGVTQKRMPRQREQYGNTVHLFIGIGRSTCKITLMPFTFINNSIVILQGLVWLFIFKSVSPSRHDTEALLHIAS

SEQ ID NO: 81688 - protein, 1454 aa, Zea mays
  Coding DNA Sequence Number=SeqID_38313
  Gene Ontology: Mol. function=ATPase activity, coupled to transmembrane movement of substances; Cellular component=integral to membrane; Biological process=transport
  Homolog annotation: Hit_ID=Q6Y3I1; Match level="QueryCoverage=99%, HitCoverage=99%, E-value=0.0, Identity=89%"; Hit description =Multidrug resistance associated protein 1
  Pfam annotation: Domain name=ABC_membrane; Domain location=298-568; Score=71.7; E_value=2.4e-18; Accession=PF00664.14; Description=ABC transporter transmembrane region
  Pfam annotation: Domain name=ABC_membrane; Domain location=885-1178; Score=75.8; E_value=1.5e-19; Accession=PF00664.14; Description=ABC transporter transmembrane region
  Pfam annotation: Domain name=ABC_tran; Domain location=1254-1419; Score=122.7; E_value=1.1e-33; Accession=PF00005.18; Description=ABC transporter
  Pfam annotation: Domain name=ABC_tran; Domain location=642-789; Score= 57.6; E_value=4.1e-14; Accession=PF00005.18; Description=ABC transporter
  Pfam annotation: Domain name=MMR_HSR1; Domain location=1255-1367; Score=-20.1; E_value=0.074; Accession=PF01926.14; Description=GTPase of unknown function
  Pfam module annotation: Pfam domain module=ABC_membrane::ABC _membrane::ABC_tran::ABC_tran::MMR_HSR1; Domain location=298-568::885- 1178::1254-1419::642-789::1255-1367
MAVVLGWSSSWICGEEDGGRLTLTVASKCVQRTLIDCVNVVLFIAYVCTLAAACVRRRQRSADASSGRSGAPSRWVLLVVSTCCVAAAVAYCVTALQDAYDIKTAVPYFVRGLVWIALAASLHAQPTRPARVVAVLWWVLLSLLATAYNSEILAGGHSLDLAEMIAWPVSLLLLLCALGSLLPRGDGHHYRDASNGSSGLSEPLIGNDRTVPTSELYRAGLFGQLAFSWLNPLLRVGRSKALDLGDIPLIATDDTAHHTSQQFTEAWSRHVSDKARSRRGVGSNSLALVLGKCFLSEILLTGFYAFLRMLSIAVAPLLLFGFVWYSNQEERDLRVGLSLVGCLLLAKLVESLSQRHWFFSSRRTGMRIRSALMAVIFQKQLRLSIQGRNNHSTGEIVNYIAVDAYRLGDAISWLHMGWTSPLQLVFAVATLFWALKLGALPGLVPLVIFGFLNVPFAKMLQGYQAKFMVAQDERLRSTSEILNSMKIIKLQSWEDKFRSTIESLRDGEFKWLRQTQMKKAYGAVMYWMSPTVVSAVMYTATAIMGSAPLNASTLFTVLATLRVMSEPVRMLPEVLTMMIQYKVALDRIEKFLLEDEIREDDVKRVPSDDSGVRVRVQAGNFSWKASGADLSLRNVNLRVNRGEKVAVCGPSWLREIFTPVEVFGSVAYVSQSSWIQSGTVRDNILFGKPFNKELYDKAIKSCALDKDIENFDHGDLTEIGQRGLNMSGGQKQRIQLARAVYSDADISSSNFIHEMECVMTALAEKTVVLVTHQVEFLTETDRILVMEGGQVSQQGKYSELLGSGTAFEKLVSAHQSSITALDTSASQQNQVQGQQESDEYIVPSALQVIRQASDIDVTAKGPSAAIQLTEEEEKGIGDLGWKPYKEYINVSKGAFQFSGMCIAQVLFTCFQIASTYWLAVAVQMGNVSAALLVGAYSGLSIFSCFFAYFRSCFAAILGLKASKAFFGGLMDSVFKAPMSFFDSTPVGRILTRASSDLSILDFDIPYSMAFVATGGIEVVTTVLVMGTVTWQVLVVAIPVAVTMIYVQRVFELTHSFQFNQNMKRHYVSSARELVRLNGTTKAPVMNYASESILGVVTIRAFAATERFIYSNMQLIDTDATLFFHTIAAQEWVLIRVEALQSLTIITAALFLVLVPPGAISPGFAGLCLSYALTLTSAQIFLTRFYSYLENYIISVERIKQYMHLPVEPPAIIPDSRPPTSWPQEGRIDLQDLKIRYRPNAPLVLKGITCTFAAGNKIGVVGRTGSGKSTLISSLFRLVDPAGGRILIDKLDICSIGLKDLRTKLSIIPQEPTLFRGTALEKCQLKTAISTTSALLDTVVSDDGDNWSAGQRQLFCLGRVLLRRNKILVLDEATASIDSATDAILQKVIRQQFSSCTVITIAHRVPTVTDSDKVMVLSYGKLLEYETPAKLLEDKQSAFAKLVAEYWANTKRNST

SEQ ID NO: 81689 - protein, 136 aa, Zea mays
  Coding DNA Sequence Number=SeqID_38314
  Subcellular localization annotation: CTP_CleavageSite=47; ConfidenceScore=5.45e-01
MDAVSLDFLWPRHPSFMKQQLPLSLPGSSSPSRCCSLPPLQADAPTKAASPTTAPCPWPSLSLQRGCYRPPHASSKQCPPLSAASGCSQPLPCSYGHFQPSPMADPNSSHGRRSLPAPVFSMVAALWNHATSAAPM

SEQ ID NO: 81690 - protein, 193 aa, Zea mays
  Coding DNA Sequence Number=SeqID_38315
MRGRWARHGSREGSWGTAAGAGNPGCGELEQGHRRRAERDAEQGAEHAMAGRTRGKVTGNAQELHGWRLKTTWRPAARRAQEEAPRSAEQNEEQGLGRGMGAVAPWEQADYASRVEGWEWREERGAAGQAAMGAGELWPALETTTGRALGASMAELSPAREDAGALARELCEREMGTGERARQGRKKREQTCV

SEQ ID NO: 81691 - protein, 261 aa, Zea mays
  Coding DNA Sequence Number=SeqID_38316
  Gene Ontology: Mol. function=hydrolase activity, acting on acid anhydrides, catalyzing transmembrane movement of substances; Cellular component=integral to membrane; Biological process=metal ion transport
  Homolog annotation: Hit_ID=Q10QZ3; Match level="QueryCoverage=39%, HitCoverage=11%, E-value=6e-30, Identity=68%"; Hit description =Copper-translocating P-type ATPase family protein, expressed
  Subcellular localization annotation: CTP_CleavageSite=19; ConfidenceScore=5.12e-01
MAKRTNPQQWLFSHSQNPVACAKSGRFVTALLRVLPGDGDADRSNEPTPPDDARRTPSTQVEKVGLARYNVWRCGLSATSKVGQGGELSESEEPWASHYCRGAPATYRPGPTNQRRCYISRLPLLRADPLSSATARLLFPRVEMAAVNLLAESAAVRLRASAPPGAGEELAARLTECRFPATARRGGAVAGAGESARKWREMAARKEEFLLRSRGRVAWTIVALCCGSHASHILHSLGIHVDHGINRLVLKGIEQTGSSVM

SEQ ID NO: 81692 - protein, 73 aa, Zea mays
  Coding DNA Sequence Number=SeqID_38317
MALRRGVPALEVPRNYSSLSATAELSPLLEPYDPLADPIMKEALDVMSVANSIVDEVVDRLLNEAAEKILKED

SEQ ID NO: 81693 - protein, 190 aa, Zea mays
  Coding DNA Sequence Number=SeqID_38318
  Homolog annotation: Hit_ID=Q7XBD4; Match level="QueryCoverage=100%, HitCoverage=18%, E-value=6e-75, Identity=73%"; Hit description =Cinful1 polyprotein
MECVKKMKASFASVGAFSSEESFTRGNPEGAIEWINHEAEAFEEILNSRGDICASSGARGIASILEKKGCEHIKILAQSEATLSFEDAKDPSAEASMAGGKFFTDIWDNGGREMAREIIQKSEKGIHDARKVAEAVEKSAEPEGQIDPTKASPGPHPKGDDEIKKMAEAIMDQVVNQLLNEAADVVLRED

SEQ ID NO: 81694 - protein, 170 aa, Zea mays
  Coding DNA Sequence Number=SeqID_38319
  Subcellular localization annotation: CTP_CleavageSite=64; ConfidenceScore=5.31e-01
MPSSKKKHMSVTLMDGLSPAHSFSPVVASVDRDAATDRRTVRAPRRCPPPHLAGLSAHTVLVPQAATSTKHLQPSPSVLFLPSPPELCPRSPSAIGATAQHPDWTVRAPPSERFAGVTSSAFAPCPTTQPELRPTPRLLRPWSCLVSPRPSSSVHHKVEDNPNILLTRKS

SEQ ID NO: 81695 - protein, 50 aa, Zea mays
  Coding DNA Sequence Number=SeqID_38320
MAMMGSTSEKMYLCQVMKQSSFAISARRWCQSRRKISKLVGGRMFFLPVM

SEQ ID NO: 81696 - protein, 65 aa, Zea mays
  Coding DNA Sequence Number=SeqID_38321
MALVLEKAGCDHVKFVHEANFGVTVEDIKGPLKSILSAMKRFFFELWDKGGQHLAALEAKEYTRK

SEQ ID NO: 81697 - protein, 172 aa, Zea mays
  Coding DNA Sequence Number=SeqID_38322
MLLFRHGGKTSSSPPPPGGLTAAIVVVARWTKEYHVVATVEGHELETPETEQRPGLKRLLETTHLELDGKLFVNTQQAPTWRANCREEPEPYVHANVAVGEVLEPSACDVVVVGGALEPYRSTAVGATRTLLTSPCFRRELRTAVVMDARGVPSLLVYRGEPDGTPVLFPIA

SEQ ID NO: 81698 - protein, 85 aa, Zea mays
  Coding DNA Sequence Number=SeqID_38323
MAALCSPTLAVNGGPWRGVEKLDLVACAKSSRFVTALLRVLRGDGDADRSDEPTPPDGTRRTPSTQAESMPRKPDLPVPRRDARD

SEQ ID NO: 81699 - protein, 181 aa, Zea mays
  Coding DNA Sequence Number=SeqID_38324
MAMMGSTSEKMYLCQIWREPRLPSAKQRDRMVYPDISWPLDMKEAEVEMSLRTRAHDGAGTSRGWKDTPNPLLVPPTLAEAIAALVNAITDNTRFLREMAGNQFQQHGGRGQPQGPRDSTGSSDDSGGSNGEESERERRGRAWVERKREKLGVGFIEEREGEERAAGVLHGHQWRQFHRGE

SEQ ID NO: 81700 - protein, 538 aa, Zea mays
  Coding DNA Sequence Number=SeqID_38325
  Homolog annotation: Hit_ID=Q6QP51; Match level="QueryCoverage=19%, HitCoverage=54%, E-value=6e-30, Identity=57%"; Hit description =Putative growth-regulating factor 1
MQVACNCTTGTHPFDFDVSSMEAQAHTSWTGKGDTPKGILLREGSGLRALLLIRGSKAGPSEGLAPRKGSTATSEHSGSAPTTDQGFEGWPLKGFDSRPRACRARDDSRYVRYMAEARAMLPRGVKPLLRGLEGYIRQGRSDRSHFALPLTDLTGKQRRLPRSDCCATRQGLGPHLGLGRWSPPRPTPGLGLNLDLGRRPPPRLTPGLSLGPDLRRNRVLTQPRPRPQEESPPRPTLGSDRPHHRGYIIALPLASSGYGEQDRRPIWLAPHGVILEDSSEELLPMPTPLAQSLAFAARSSTSAPPTPAVQAPTPGGDDPDDSGDDDDEDDDDDEDEDEQVNEEANYAQQDYFMGFGPVTEHYTSMFEMGHFPNLLQDMLHALGTYVRPLYETRRVCEPPRACYYITRIHVRVMDAGDRGFRTLPAHESLTLLSTYAASVSDAARRTLWSVSHTYWQQLHDMMFRHFPLRLSGGSQTSIVPGGAGEDRLNTLAGVMAGLNTDLDSATLDLSRVHLELENAHARIAALEARLQGRDPPEA

SEQ ID NO: 81701 - protein, 445 aa, Zea mays
  Coding DNA Sequence Number=SeqID_38326
  Gene Ontology: Mol. function=hydrolase activity, hydrolyzing O -glycosyl compounds; Biological process=carbohydrate metabolic process
  Homolog annotation: Hit_ID=A2YKM7; Match level="QueryCoverage=46%, HitCoverage=21%, E-value=1e-75, Identity=69%"; Hit description =Putative uncharacterized protein
  Subcellular localization annotation: CTP_CleavageSite=71; ConfidenceScore=5.56e-01
MGWSPRPPPITRSTASLRLVPHFSHFRFSFHRAQESRGGGGSRRRTLRCCGGTAPAAAAGAAEGRMAAATAADMVWVRVLEDGVFRFDASEAARAAAGPSLSFADPRRREAPHDGADMPAVVPVCEVAAGGSQKVVIKSPEVIVPCYNFTNQGRTRKPFKGVLSSEQVFTWNTDAWGFGPGTTSLYQSHPWVLAVLPDGKALGVLADTTRRCEIDLRQESTIKFSALSAYPVITFGPFNTPADVMTSLSHAIGTVSMPPKWSLGYHQCRWSYDSSEKVLKEKDGPGALVGIDNRIRRLWCLLGPLLPMVSSWSLDGDWVKVEGRCARRLARRPSNPTLRPAFVDLCGRRFNCFSLDHQSVSKKISVVAGSKRAMEGDSVVGGFIAGEGAKRYTRRGQQRRRAKAGGGLDDHIRLSVDRRRCRRWFLLLLRWTLLASEIHWALWEG

SEQ ID NO: 81702 - protein, 80 aa, Zea mays
  Coding DNA Sequence Number=SeqID_38327
MEAASNTLAMVKEHGRPAAGCERPPAIEKKPEGTVGRSVHGEGSRPMAGGEEEGRQHVCANLGEEGGSTMADGWGGVPDS

SEQ ID NO: 81703 - protein, 93 aa, Zea mays
  Coding DNA Sequence Number=SeqID_38328
MPKVTVDEVEGVSSSGYGRREGQASVTPKLTGMAKRGGVAVGARDGQGDRAGEDVVARVAKTTVPSGGRGSGDEDVGCGNMGRERWGGEANGI

SEQ ID NO: 81704 - protein, 69 aa, Zea mays
  Coding DNA Sequence Number=SeqID_38329
MGKKRAFVACIEDEQANAESGTAAAIPGGCVSVLSRAEQCLNDQVEECWRWGPYVNEKREMRISGEGLS

SEQ ID NO: 81705 - protein, 335 aa, Zea mays
  Coding DNA Sequence Number=SeqID_38330
  Gene Ontology: Mol. function=hydrolase activity, hydrolyzing O -glycosyl compounds; Cellular component=endoplasmic reticulum; Biological process=carbohydrate metabolic process
  Homolog annotation: Hit_ID=A2YKM7; Match level="QueryCoverage=79%, HitCoverage=27%, E-value=1e-127, Identity=80%"; Hit description =Putative uncharacterized protein
  Pfam annotation: Domain name=Glyco_hydro_31; Domain location=5-334; Score=149.2; E_value=1.2e-41; Accession=PF01055.17; Description =Glycosyl hydrolases family 31
MGSLMLGAGRGRQERGHLASSYSSGSGRLDTGIVPKALPCSLDYKLVTKFEDEDIMLNSMDASLVIPPIRFPDPISMVDDLHSIGCKAIWMLDPGIKKEEGYFVYDSGSKSDVWIQKADGSPFVGEYASHSLHSGEVWPGDCVFPDYTSEKTRAWWASLVKDFISIGVDGIWNDMNEPAVFKTTTKTMPESNIHRGDADIGGVQNHSYYHNVYGMLMARSTYKGMEMGNAAKRPFVLTRAGFIGSQRYAATWTGDNLSNWEHLHMSLPMVLQLGLSGQPLSGPDIGGFAGNATPKLFGRWMGVGALFPFSRGHTETGSIDHEPWSFGKEARYVHR

SEQ ID NO: 81706 - protein, 84 aa, Zea mays
  Coding DNA Sequence Number=SeqID_38331
MANYIADTMSLPNFNMARKKLVLKEFCHGRGYELRSRGPAVLGTDALDTSRAKKRSVHDALTSRNWVNDIRGAISKAQENCASF

SEQ ID NO: 81707 - protein, 227 aa, Zea mays
  Coding DNA Sequence Number=SeqID_38332
  Homolog annotation: Hit_ID=Q53P05; Match level="QueryCoverage=29%, HitCoverage=5%, E-value=1e-06, Identity=40%"; Hit description =Retrotransposon protein, putative, unclassified
MTHMSTLYSTFGEDTMWEQRFIKWERCFIKFNCTKEECIVVLEQSSVELEKWLPLVDTALDDVKLKLRKMNKQWDHAMLELAGSDQGLLCKSDVSSDHQIQFLPLTARVGTMVIFVIEIRGLGLTTFIPGPVKGRGGPLLRNAQGSYLQCNYSTACSSGDSANSFINQSTVSRLGLVTVSAAPIQVQVANGGLLSCSIVVPQAFWSLQGCHFVQDLQVLALPTFDIL

SEQ ID NO: 81708 - protein, 82 aa, Zea mays
  Coding DNA Sequence Number=SeqID_38333
MASSSRSEEIEVVDAEANLEQQQDDRQQDGAVEPENLTEGASAQKHGNKRTRSVANSSTDQSQPNSHKSKEMKLNIRPELKK

SEQ ID NO: 81709 - protein, 105 aa, Zea mays
  Coding DNA Sequence Number=SeqID_38334
MWALDALKIFFPAIATTGRFLRHCRANLSKSGSLVQGDCGSSITDPVARIEYISHTIRSNLCPRMWIQWSNATRTPSASPFCIRDPGPFGNRTHRPPWDYSESGE

SEQ ID NO: 81710 - protein, 403 aa, Zea mays
  Coding DNA Sequence Number=SeqID_38335
  Homolog annotation: Hit_ID=Q2QQ41; Match level="QueryCoverage=42%, HitCoverage=59%, E-value=3e-11, Identity=28%"; Hit description =Putative uncharacterized protein
MARERMGRARKLSFPHAGKTSSVPPPAGGLSTAIVAAARRWKEYHVVAAVERQELEAPETEHRPGLERSLETAHLELDGKLLVNTQRAPTWRANCRRFETGGSPSRRLARVWRKEGIRRLVYPDRTTGHRRGFAATHPQLLRPRLFDDYRDEDFYGLPRKYSIVARVEVKFPIEPRFRDRQHFILSDINGAKIEAITYMYETVKHFDNLLHEKHDYKMHNVKFSLHPGEFNFRHLNGPMELCLDQQTIVEPYTVPIQMAPFPKQILLNLADIAELPNRTLVDIMAIVVHLDTIHRTMWGPFRKIVIMDARGYLHIIKVWGDLLNKNALRWALAKEDYGIIIGTMFRRFRRQECLESSDHTTIHFNPFHHNTHHFGHVINCGIHCSNSKSFGGAEQPSVCGYIS

SEQ ID NO: 81711 - protein, 324 aa, Zea mays
  Coding DNA Sequence Number=SeqID_38336
  Gene Ontology: Mol. function=DNA binding; Cellular component=nucleus; Biological process=regulation of transcription
  Homolog annotation: Hit_ID=A3B4L8; Match level="QueryCoverage=43%, HitCoverage=50%, E-value=2e-40, Identity=60%"; Hit description =Putative uncharacterized protein
  Pfam annotation: Domain name=Myb_DNA-binding; Domain location=213 -262; Score=21.5; E_value=0.0032; Accession=PF00249.22; Description =Myb-like DNA-binding domain
MPTRSKLLKLGRQKFCKEAHKAASKATANKDKRGEGSITTTTSPLRPQRKYNSSSLDGVDGRTRISRTGQRRASRCLLRARSSGGSKIERRSELSFVLVEKRPPIRIVEGARWPLSLKFKRSRGGGRITPGHFGICRCRCLHCPSAPLPLHKYPSSPLRADQGLPAFRLRQGEAKPLVGSLRALMTELWMEVLPPYFAGQAGGWFLLDRRAGPGAWTLEENKMFERALARVDWDAPDRWERVAAVLPRRTVADVAAHYDDLEVDVGSIEAGFVPFPRYGGCGGGTSQSAAGFTFEWDGDAGGTGFNKRSCYVVGGGGKRECRGP

SEQ ID NO: 81712 - protein, 223 aa, Zea mays
  Coding DNA Sequence Number=SeqID_38337
MPRRTDEQEEDPEVRAPSPSQDFAMTPLCNHLDHDKGLGNLSSLSRLLNNDPFREPRRRRRSGQGPGSLAPPPRNLGTTARASSGLRIDYTPGAAIRFGNLDFAHGSLNLAPPGQRERHMPASPSEVDEIRRQITVHIGPNPTPVAIPPRLHHAPMVIATLVACGHLPTFDELEFVRVADDGGGLIFDTLCTDSDHSSPASEERRPPSFCGPIGGTSKVGRHT

SEQ ID NO: 81713 - protein, 192 aa, Zea mays
  Coding DNA Sequence Number=SeqID_38338
  Gene Ontology: Mol. function=transferase activity, transferring glycosyl groups; Cellular component=integral to membrane; Biological process=protein amino acid glycosylation
  Homolog annotation: Hit_ID=Q8W0S0; Match level="QueryCoverage=17%, HitCoverage=5%, E-value=2e-12, Identity=97%"; Hit description =Putative galactosyltransferase family
MDPRRIPVLFRLAKQLSSFASSKDSYMVLAAAAYLLLISLKFRRVLDLAATDLADDPAVAAFSSPSSADHLPPPGSASATSSSSALFPVCPFWHRYDRVSLPDLASRNRSALDRMADDAWRSASPPGRTPLPSRGTPGRCSSRLQLLCLHFRRRLLHGACCRELRRPQRWCRGITEASVLAMTRCESKGADF

SEQ ID NO: 81714 - protein, 197 aa, Zea mays
  Coding DNA Sequence Number=SeqID_38339
  Gene Ontology: Mol. function=nucleic acid binding; Cellular component= nucleus
  Homolog annotation: Hit_ID=A2X8G8; Match level="QueryCoverage=75%, HitCoverage=9%, E-value=5e-41, Identity=51%"; Hit description =Putative uncharacterized protein
  Subcellular localization annotation: CTP_CleavageSite=44; ConfidenceScore=5.09e-01
MASGGGTPSAGRRTGGLGRRISHCRKSIKNKKKTSKLKPLKRVCLSPKSEVILEETSIDNAPSTEIKVMNRHTIILTSFKEVQEKSSSISEALSPRLKEDLNDSDSKSVARTKSDGRTFIPCIPVKSVIVIKPERLKRKGIGSQDCASDSWTSEEDAVLCGTVHEYGPLWELASDFLQYLPDSSLYMGRYHHPCALL

SEQ ID NO: 81715 - protein, 120 aa, Zea mays
  Coding DNA Sequence Number=SeqID_38340
  Gene Ontology: Mol. function=hydrolase activity, acting on acid anhydrides, catalyzing transmembrane movement of substances; Cellular component=integral to membrane; Biological process=copper ion transport
MAHLQLMALTGGADDEMEEVALLGSYDEEAGVGPEAEGDRAEAGMRRVQVRVTGMTCSACTGAVVGRRGGGAGSACGRAIHGEGRWIRVRAGVSGIRGVDVEAGAVYIVDLIISRDRDRE

SEQ ID NO: 81716 - protein, 279 aa, Zea mays
  Coding DNA Sequence Number=SeqID_38341
MARERLGRARMLFFPHAGKTSSIPPPAGELSAAIVAAARRWKEYHVVAAVERHELEAPKTEHRPGLERSLETAHLELDGKLLVNTQQAPTWRANCQRFETRGSLSRRVGRRGGSSEAEVESVFHGRGRARAPGSGEAEVVRQRPGRSPSPGSGEAGFVVFRGLSPSPSPGSGGAEFAVFRGLSPSPSPRSGGAEFAVFRGLSPSPSPGSGGAEFAVFWGHSPSPSPGSGGAEFAVFRGLSPSLSPGSGGASYGAFGKAWLPLYADGGYQLRIRRLEGYP

SEQ ID NO: 81717 - protein, 347 aa, Zea mays
  Coding DNA Sequence Number=SeqID_38342
MSKNTRDTRFIPRFGHTTKVPYFLVEEPTKSRVSFNPNPPFADHKGQAHTLIFAQTSGRKERIQVYNGDAAECYVSSGGELAPWVHANVAAGENLAPSWCGVVAVGGVTEPGGGTAVGIVGLLLTSPRFRKGAESRRRHGLAGRHHCLSGGASQMGRRSCSLRPKSARGRARAPGSGEAEVVRQRPGRSPSPGSGEAGFVVFRGLSPSPSPGSGGAEFAVFRGLSPSPSPGSGGAEFAVFRGLSPSPSPRSGGAEFAVFRGLSPSPSPGSGGAEFAVFWGLSPSPSPGSGGAEFAVFRGLSPSPSPGSGGASYGAFGKAWPPVSLTLCVKCPCDSVGRCGDLVRVAS

SEQ ID NO: 81718 - protein, 145 aa, Zea mays
  Coding DNA Sequence Number=SeqID_38343
  Subcellular localization annotation: CTP_CleavageSite=45; ConfidenceScore=5.47e-01
MNAPPSIDGMNAPPSIYGLRSPKSPTFHRRARRGIGARLDLPFMRTAAPRPSIDGRRGADFVSGGLTGGDLGIGARPREWTAGDGSGGKTYGDLVGDCGRGSGSGKRARERTAGDGRTIECGRLQSTHMSSRDLWCKLYLKCRTF

SEQ ID NO: 81719 - protein, 86 aa, Zea mays
  Coding DNA Sequence Number=SeqID_38344
  Subcellular localization annotation: CTP_CleavageSite=57; ConfidenceScore=5.61e-01
MWALDALKIFFPAIATTGRFLRHFRANLSKSGSLVRISSSVGSWSPAISRRSRASVACGELRGHGILYPDLGRVHYPAIRGALRIV

SEQ ID NO: 81720 - protein, 267 aa, Zea mays
  Coding DNA Sequence Number=SeqID_38345
  Subcellular localization annotation: CTP_CleavageSite=47; ConfidenceScore=5.23e-01
MAPLATWSVRALGRARWMLLRGRGRVCLPRSRSSPSPGSGEAETVVRGQGRVRALGSGRGGVLRLPEPRPSPSPKVGRGGVHRLLGPSPSPSPGVGRGGVRRLPGAEPESEPWGWARRSSSSSGAEPESELSGRARRSFLWRSRPDLAAVSLTLSSGTAVGATQAALSSCQAGQWSGEAILALNAPEIRSVGVAIWPRLLLGEDWASGEPKLCADGGYQLRLGVFKSNPKVDGGFYFQKVQGLLCKMAWPKGYGWRWTIGSTVEGTD

SEQ ID NO: 81721 - protein, 259 aa, Zea mays
  Coding DNA Sequence Number=SeqID_38346
  Homolog annotation: Hit_ID=UPI00015558E9; Match level="QueryCoverage =42%, HitCoverage=3%, E-value=1e-06, Identity=42%"; Hit description =PREDICTED: similar to splicing coactivator subunit SRm300, partial
MAERSSRYDTGAGSHVSYKLAQGRQGQTAAHGQRVKGQTVMQAACKRTQGTHPFDFDASSMEAQAHTSCNRRAGYYVQETAPPLAPVPRLLDCGTSAATRGDPAHDPTVPTEHIGHGDREKGYSERDPSPRRKRAPSPPTDQRVRLTAAKSGLGRHRKLRLARPQSSDSGSAPEDDELRLTRPQGSDSGSAPEDDELRLARPQGSDSGSAPEDDELRLAPPQGSDSGSAPEDDELRLARPQGSDSTSAPEDDELRLARP

SEQ ID NO: 81722 - protein, 21 aa, Zea mays
  Coding DNA Sequence Number=SeqID_38347
MAPPRLGQDTVAQLGLSPGID

SEQ ID NO: 81723 - protein, 90 aa, Zea mays
  Coding DNA Sequence Number=SeqID_38348
MTPWCWSRLDRTDDGVMKNDFYRPRRSPTRGTAAAKTTVFVGASFGEGDEPDMRAPATSDPTATQAREWLSEHGYARKLGRTVCNRSWFE

SEQ ID NO: 81724 - protein, 396 aa, Zea mays
  Coding DNA Sequence Number=SeqID_38349
  Gene Ontology: Mol. function=protein binding; Cellular component =nucleus; Biological process=jasmonic acid mediated signaling pathway
  Homolog annotation: Hit_ID=Q60EH4; Match level="QueryCoverage=100%, HitCoverage=65%, E-value=1e-171, Identity=78%"; Hit description =Putative LRR-containing F-box protein
MTELEVMPADLKLLAKSCKSLISLKISDCDLSDLIEFFQFATALEEFAGGTFNEQGELSKYVNVKFPSRLCSLGLTYMGTNEMPIMFPFSAILKKLDLQYTFLTTEDHCQLIAKCPNLLVLAVSSPAHVRNVIGDRGLGVVADTCKKLQRLRIERGDDEGGVQEEQGGVSQVGLTAIAVGCRELEYIAAYVSDITNGALESIGTFCKKLYDFRLVLLDREERITDLPLDNGVRALLRGCTKLRRFALYLRPGGLSDAGLGYIGQCSGNIQYMLLGNVGETDDGLISFALGCVNLRKLELRSCCFSERALALAILHMPSLRYVWVQGYKASQTGRDLMLMARPFWNIEFTPPNPKNGGWLMEDGEPCVDSHAQILAYHSLAGKRLDCPQSVVPLYPA

SEQ ID NO: 81725 - protein, 63 aa, Zea mays
  Coding DNA Sequence Number=SeqID_38350
MSKGKQDVATNKTVENRRKSLGDPSPSKKSLGILVRQGLSHRRPIDGGAGVLKVDTMMKNNGA

SEQ ID NO: 81726 - protein, 154 aa, Zea mays
  Coding DNA Sequence Number=SeqID_38351
MGKSNKRKREPTPPSEDFGDSEYSEEEFSSESEGTPAPVSPPASSDDSDDSQRLAAEVWTYIRAVERSGLAGSDESEYSSDEEDSSEEDGGGEDDDDNDDDVGGDDSDGGDDSDGGGRGGSKGGDGGSSKGGNGGSGRGDSGGSSSKGSNRASG

SEQ ID NO: 81727 - protein, 68 aa, Zea mays
  Coding DNA Sequence Number=SeqID_38352
MVPPRLGQDTVAQLGLRPSSLHRTVQVPYRFIMLPIGFCPLDLDRMAQGDPTSTDSCYSQMSPQTSFK

SEQ ID NO: 81728 - protein, 1570 aa, Zea mays
  Coding DNA Sequence Number=SeqID_38353
  Gene Ontology: Mol. function=helicase activity; Biological process =viral genome replication
  Homolog annotation: Hit_ID=Q1EPC6; Match level="QueryCoverage=92%, HitCoverage=95%, E-value=0.0, Identity=63%"; Hit description=DNA helicase homolog, putative
  Pfam annotation: Domain name=DUF889; Domain location=1314-1550; Score= 455.4; E_value=7.9e-134; Accession=PF05970.5; Description=Eukaryotic protein of unknown function (DUF889)
MKNHFATVDLAVPNVNLDDDSDWLHRNETFKSDDAFTTRDLLTPGGVHETFGNTPNHNLGRAAYFRERYKNLTPAERELRRERLRLYNNTPKRKESKIEYIRKRRALLADTLSQESIAMESPTYTPKVVHPTTDAIEPDGSAVTPCDWVIPDIASNPFLPASTKTEDADSLRMSTRPLRRKQHVPRGERQAILARRNWQFEASISRNMATATEDTISDAEEGDDWTHTQSKPRVISNVDDDDGVVFEDDADENEGYLFAGQYEDTDEDIEIDGSQDESTATDVPDPYDKVYSNIPEETHMLKTVPNCSYCTAKKFEYESPGFCCRGGKVELAPLETPTQLKRLWDSADSDARHFRDNIRFFNGHFSFTSLYCCLDSMTTNVRDSGIYTFRAQGMMYHNIKSFGREGGAEHKHLELYFYDDDPTLEHRYRKCREEHQQKDKEVIRQIVDILRGNPYSEHLRTMGHVDNLDDYRIALNLDQTLNQKTYNTPLTSEVAAVWIEGSEGRGQFSKSVMLHGKDSSSHCIRSYHGCYDALSYPLFFPRGELGWHANIPKVGVSMDEVDAYRATHRASNANDEDAESPSHLCVSVRDYYCYKFQIRPGVFNPILHGKRLFQQFAVDTYIKIESSRLDYIRRNQDRLRADLYQGLVDSMVDGDIRAEKTYFFTMTCNPNWDEIRRELLPGQTPQDRSDLVVRVFHAKLQELKHRLTKQDILGKVRAYVYVVEFQKRGLPHAHFLLIMQRKYKLTCPEQYDLLISAEIPSNKYPELRKMVIKHMMHGPCGSLNPNCPCTKGRNSCKNHYPRPFSDTTLQGKDSYPIYRCRDDDRKEKVRGCELDNRWVVPYNPYLLRLFNCHINVEACGSIKAVKYLFKYIYKGHDRASVVMRDASKADDDVDEIKQYRDARWVTPPEALWRIYGFELSQISPPVMQLQLHLPNMHMVAFHERQMVERVVNRPGADRSMLIAYLRRIGYTRRLVASYIVTSLSGTLGRVVRAKYGNEGNEIQVDKSGERYYLCVLLNHVTGAASYVDLRTVDGVTLPTFREAAEIRGLLESDNTLDECLTERALFQMPSALRRLFATILVYCEPSDVAVLWQKHKYSMSEDYQHRSQNKTHVEQMVLIDIRNMLQSMGKDIKTLPLPPIIDAYDDAIGTAREVYEEEIIQPTVGDVALKDSLNEEQRAAYDKIMSAVDTDQGGLFFVDGPGGTGKTYLYRVLLATLRNQGKIAVATATSGVAASIMPGGRTAHSRFKIPLTIDDGAVCSFTKQSGTAELLRKASLIIWDEASMTKRQAVEALDNSMRDIMGRPALPFGGKTIVFGGDFRQVLPVVRKGSRAQVVASSLRMSYLWESMSHLKLVSNMRAKNDPWFAEFLLRVGGGTEETNIDGDIRLPDDVCVPYTGSDNDLDNLIDFAFPNLNENMSDSTYITSRAILSTRNDWVDMINVKMIDRFQGEHMVYHSFDSAMDDPHNYYPPEFLNTLTPNGLPPHVLKLKIGCPVILLRNIDPANGLCNGTRLVVRGFQRNSIDAEIVLGQHVGKWIFLPRIPLCPSDEEMFPFQFKRKQFPVRLSFCNDG

SEQ ID NO: 81729 - protein, 311 aa, Zea mays
  Coding DNA Sequence Number=SeqID_38354
  Gene Ontology: Mol. function=cysteine-type peptidase activity; Biological process=proteolysis
  Homolog annotation: Hit_ID=Q109R5; Match level="QueryCoverage=82%, HitCoverage=24%, E-value=1e-31, Identity=32%"; Hit description=Ulp1 protease family, C-terminal catalytic domain containing protein
  Pfam annotation: Domain name=Peptidase_C48; Domain location=80-292; Score=25.0; E_value=1.9e-06; Accession=PF02902.10; Description=Ulp1 protease family, C-terminal catalytic domain
MESLFVGLSHNKPKKSVATAIVREVLSHDWLLLDYICTQGDLALIDFIKEIPCEPRVEVVLIDDAFVERKWMECLFQPNAYLGDEVIDCYINLIKAQKHLKCRSGGRVHIENAFQFNFLKRDGDVEIKTEELYPIKDMTQICSAERRVLLYLDHDMVFIPINIRETHWYLAVIHARNMEIQVLDSLGSSQDRKDLTDSIKGLQRQIDMISQRMELKDHRWPDLQVASWPLREIDMGYAKQTDSSSCGLFLLNYIEYWTGDELSDSFTQVFSDSELWIWSTTRTKAEPDESRGQPKLYAGKLRRDGTRGNRP

SEQ ID NO: 81730 - protein, 327 aa, Zea mays
  Coding DNA Sequence Number=SeqID_38355
  Homolog annotation: Hit_ID=A5B6J0; Match level="QueryCoverage=47%, HitCoverage=22%, E-value=8e-10, Identity=34%"; Hit description =Putative uncharacterized protein
MALAFFLIKKYEGASSPDSNGDDGGDREEVLPRVRPGVVYLEDCWKTCLEGIHPGWLLAFRVVAFFVLASLLVVDIITDGWSIFLYYTHLAHFHPRISSTTNNKNNYAKMMLSDGAEPHLMNIQFQKKMQLQVPTSVGMLFPLACDATRPARSPSGPVMASTTSSCSRKSFQHGDQSLSAPDDSCRLTLGLGPTPNLYSADSHSFGGNKAYQSATLLSQHCATTDPGLMLGLSRCSSRNLQSTRASGSNNYSPARKTVIILPLIDEGSTSAKRKKGVYLLPLLFVPRSEDLCLNETSTDTYAQQHVGTECDTESGHDRSLKSSRDSA

SEQ ID NO: 81731 - protein, 134 aa, Zea mays
  Coding DNA Sequence Number=SeqID_38356
MQVQWLLKRCKGCIRTLHFSWRWPEVPEAISSAADSNMDHAISSSGHGAWSDCVDSSGDMQSAGRLLIPLQVLVPGSLKDAPSCGLAGNGRDDGVSRNQSCGLVVPEGRVHGGGLMSMLGVGGNLGSNPDGSKA

SEQ ID NO: 81732 - protein, 62 aa, Zea mays
  Coding DNA Sequence Number=SeqID_38357
MEARRASRYQVHGRRSKRPRNPKPWVKKKIFKDVGAQKCQSRSSQADLMIYESSIILNHAKC

SEQ ID NO: 81733 - protein, 127 aa, Zea mays
  Coding DNA Sequence Number=SeqID_38358
  Gene Ontology: Mol. function=DNA binding; Cellular component=nucleus; Biological process=regulation of transcription
  Homolog annotation: Hit_ID=Q60EH1; Match level="QueryCoverage=98%, HitCoverage=45%, E-value=1e-27, Identity=53%"; Hit description =Putative uncharacterized protein B1122D01.8
MGLKNYGRGDWRNISRNFVRSRTPTQVASHAQKYFIRLSSGGKDKRRSSIHDITTVNLPDDDDDGDDDDTGGGNPPVISEQLGVLVDSRPPPPHPYRHLLLPHPYGNVKLEPRHGGFLDDSVLMQSH

SEQ ID NO: 81734 - protein, 43 aa, Zea mays
  Coding DNA Sequence Number=SeqID_38359
MGARCMRLALLSLVRLLGASGDENDGFGYDYGNGKEEGIEADL

SEQ ID NO: 81735 - protein, 279 aa, Zea mays
  Coding DNA Sequence Number=SeqID_38360
MEVWHVPRLPSGRQPDLEACLGTSWLLDMRGAVVEVMIPLGIWSRLGRPPHYPPQPPLPESQSSSSQPSLEVEARSPGPSAPRGHAGTRPRHCGSPRPGSQAAPRRPGPKPQPRAPVAPSRLPGGAAAARPQAPTARPRGPVQAPRRRRGGQAPAPRPRPALQQAAARCPGGQDGHQSASLQASIFIPLPRCTLPRAVELRLRGCDRRPSTGYPIPDGYPLHPNMPPEVAAMGAGTSGAASGGPYGELDLFGAPPSMNLADDRSPEAGGGARAAKDEHN

SEQ ID NO: 81736 - protein, 219 aa, Zea mays
  Coding DNA Sequence Number=SeqID_38361
MAPDEAVELGGLHSNSMAADNAPPGAAPDGALDVCAGVCCCAACIAAAPGVGRNWEDLSFDGKGHHTQVNLTLGSLCHLHYPSIVKVSYGDTIDELRYWLPDGEDYMGHAERVFQNNAKKLVKDAIYYARIQATNLYFQNHPEEAGPLNKKEGSSKIYLTEDQYREVMVPWMALVPDVYYAWKLQVAKSLVTLRSTRRATKDQTLTTLTSSAARQPQIG

SEQ ID NO: 81737 - protein, 108 aa, Zea mays
  Coding DNA Sequence Number=SeqID_38362
MVSKSYKIEQIKQEAQTAYQMWSGADLYSLLRHTCTLLPSIKPKHLRTSPQQSLSSSPPQRDFVLFAQLHLKEAPNNRIGGAVIRKSYMKNVDRPLSNPKRIIIHSTQ

SEQ ID NO: 81738 - protein, 492 aa, Zea mays
  Coding DNA Sequence Number=SeqID_38363
  Subcellular localization annotation: CTP_CleavageSite=46; ConfidenceScore=5.15e-01
MAPSPLDKGKGAASSASAPGSSRGLEEERRRRLRRADGSLVSEPPRSARGLQVGPRRPTPRPTTRRGASALRCRRHHHHPGMITPGSTSNSNSSSRSGDRLASRVTGRSRAPFSTSLIIMPTSLNPSSVCQGFFLRCSQGHASSARYQAHRQPGVQRQRLQRQVASQWQRRSQLEDSRPLPTLGVTQEARLAPTPRLLQRRWRWCLGSDSGRVPSKKRRQSPSLACCPVPTRFLVKLRQQSCESGRRMKLSTSASVTSAPNWRSIPRRHPDSSPPSGPNSSETARSTRETSRGRETDLARRETDLAFREEMLTRRGELLAEHELEAEEKERKLEEQIRQFNAEQAALGPQAMEATKKALEDLQAEHRAGVQRIVEWAGEASTALVPLGMSPIPVSELRVLISDALPVLDSAADRLRRLDQILGARLEAEGCKLYRAVVEYVLTCFRNHDPIISLAPVIDGPVAATEDVARESVQDAVEMVAARFQRDPADAE

SEQ ID NO: 81739 - protein, 236 aa, Zea mays
  Coding DNA Sequence Number=SeqID_38364
MFGALRGQHGAFPPPPCGKATQGRMKKAESILDRPLALCGGSGAALANPAPAKPLTASTYQPENLEPDYAPRLRPENSVACPAPTAVPLDGVRLTAAKSSLGRHGKLRLTRPRARTQPRPRKTDSASPDLRAQTQPRPRKTVSASPDPGLGLNLGLGRRSSPRPTQGSDSASTPEDGLRLARPQGSDSASTSEDELRLARPQGPDSTSTSEEPAPHPTSVSDPPRHREGHHYPTPS

SEQ ID NO: 81740 - protein, 200 aa, Zea mays
  Coding DNA Sequence Number=SeqID_38365
MPSWLGQNPRRRRAPPPAHEARPTPTIPDANPHIGMTVATSPTSSTTSPELIRHRYVVVQTYSKSINGKRKKRELVKVINLTHTDFSKDLDKLFTKTLKIATSLTESTCSFPSKELSKKKFRSQLKSLPPRILPQPQLLKASPGMLQDMVDGVTWPSTLPPGWTVEWDAASTGEDQEEYWARPCPIPQYRRYRLSAAFYL

SEQ ID NO: 81741 - protein, 293 aa, Zea mays
  Coding DNA Sequence Number=SeqID_38366
MGSARGSSVLSSLEERNFAEVGTFQPSLGFKDFHQAARLHPLAGGHPRRALGSLAQLALARLPVPPPAARAVVAPHAPEDRPRRRALLGRRSCSWAVLPLLRYDASARRSVLTRPRGSEWGSAGGQMASIVGAEVVAAEEVLVADGITATIRALGLRLFGFDSLSSPLEWGRGRGARCSSVRPEAIAAAVWPPGAEVVVAAAGAGVGEPPGVSSPRRPSNVGGCSYLQGRNRSSVCNGTLSAGVCSLWLSGPEHESLGSVGLAARGYSFLVKGTFGRSTMSWSRRQRCQHGQR

SEQ ID NO: 81742 - protein, 230 aa, Zea mays
  Coding DNA Sequence Number=SeqID_38367
MDEGTPLGGLESEDNAEPSHGLHAVLSSLWGRGHLAHRLRIRFPEDEGVRRPKQSNRPRRLTRPAGRGSGHGLTTLGTVSAVPATLPRPRGSVPRPLGSDISGGAAAPSASTPPSTESNPASNGNTVGGSPPRRNLLAPRLGHHRWGLLREPGPSRRLNRPLRSLSQLSPEDISPARGLGNPTPASVPPVDGPARLRPTKLLFEPSLPLSVLAPLPPAPAHRRAAEGSFN

SEQ ID NO: 81743 - protein, 113 aa, Zea mays
  Coding DNA Sequence Number=SeqID_38368
  Gene Ontology: Mol. function=cysteine-type peptidase activity; Biological process=proteolysis
  Homolog annotation: Hit_ID=Q5NKQ2; Match level="QueryCoverage=98%, HitCoverage=12%, E-value=9e-35, Identity=61%"; Hit description =Putative uncharacterized protein 9C20.3a
MDLGGRKLPWAKVIMSRLNKALQHVRPRSYFPKFGNFAIDLSPNCPTMEAGSNDCGFYVMGYIIFDDCVEGSLRSDIEAGDTREIRSLALHYITFHRKNKAISLLVDIQRFKV

SEQ ID NO: 81744 - protein, 118 aa, Zea mays
  Coding DNA Sequence Number=SeqID_38369
MACDGYGVRVRVKGWKRGGTGRGEGTCRPAMPSPQLAKYTGRPRSPPAPPLDAVWLFVGKPHPTGGPRPQCPRHPPARGKRGMGTDSGAPVVGACELAKWAAMGGFIWWAKCGFRGPV

SEQ ID NO: 81745 - protein, 344 aa, Zea mays
  Coding DNA Sequence Number=SeqID_38370
  Pfam annotation: Domain name=zf-CCHC; Domain location=170-187; Score =27.2; E_value=5.9e-05; Accession=PF00098.14; Description=Zinc knuckle
  Pfam annotation: Domain name=zf-CCHC; Domain location=285-302; Score =28.5; E_value=2.5e-05; Accession=PF00098.14; Description=Zinc knuckle
  Pfam module annotation: Pfam domain module=zf-CCHC::zf-CCHC; Domain location=170-187::285-302
MSDLGMSTTSDVTKCKECGVLASQNNTINKTADEQTFKTQKDAQPNQQTSDLGTCCCCEYYGIPCRQISTNESETTKQKNRILFSGINRQMSPQEQLIADSLIPNALSVDELQSIPKRKHHKDAQPQEETQECYIDGWTITCSQFQPCRRIRSKKRKGKHGKSQELTSRKACYQCGREGHYFRNCPEKSSLSGTSEIKLSQSPDMGYEPKCIETSINIVKNNKRNRIMFGYMSSSPQPQAKAPKSHGYPTEESSQAQLHEIQTINEPSPPVGQAKLTRKELKARGACYYCKNEGHLIRECPKKRLDRLEKKAAKHDLINSLEDPPFYKYDDEGRLISIHCGAKK

SEQ ID NO: 81746 - protein, 129 aa, Zea mays
  Coding DNA Sequence Number=SeqID_38371
MGRRAGSTGVEGAWRPWEVQRACREKRRLIGEARLASSPRAGEKLEGEKGAVRAETWRRAPGTEEQGEATADGRSFGVPGKKGVMLQPWGGRAHSHGAGKGVGFLLAVEQGTLGRGGRLGVWRRHGRRS

SEQ ID NO: 81747 - protein, 48 aa, Zea mays
  Coding DNA Sequence Number=SeqID_38372
  Subcellular localization annotation: CTP_CleavageSite=21; ConfidenceScore=5.01e-01
MAEQQPYAAPSLPWQVAFFPMAMPRTSASFTPGETATILVRFRIGIMF

SEQ ID NO: 81748 - protein, 141 aa, Zea mays
  Coding DNA Sequence Number=SeqID_38373
  Gene Ontology: Mol. function=protein serine/threonine kinase activity; Biological process=protein amino acid phosphorylation
  Homolog annotation: Hit_ID=A2XUJ2; Match level="QueryCoverage=54%, HitCoverage=13%, E-value=6e-15, Identity=46%"; Hit description =Putative uncharacterized protein
  Pfam annotation: Domain name=LRR_1; Domain location=38-60; Score=8.7; E_value=7.4; Accession=PF00560.24; Description=Leucine Rich Repeat
  Pfam annotation: Domain name=LRR_1; Domain location=63-86; Score=8.8; E_value=7.3; Accession=PF00560.24; Description=Leucine Rich Repeat
  Pfam module annotation: Pfam domain module=LRR_1::LRR_1; Domain location=38-60::63-86
MAPRRLPEQVCIVSVSISLQGLGLSGELATSSLCRVRGLVALSLASNGFEGQVPAGLAALSGILQVLDLEENVLSGVLHPALFDNLTSLLNWRKSRVAIVSVGVACFIVFLMILSVIGLFRLTQTCFDKRRAAMLPFRTTT

SEQ ID NO: 81749 - protein, 153 aa, Zea mays
  Coding DNA Sequence Number=SeqID_38374
MGRRAGSTGVEGAWRPWEVQRACREKRRPIGEARLASSPRAGEKLEGEKGAVRAETWRRAPGTEEQGEATADGRSFGVPGKKGVMLQPWGGRAHSHGAGKGVGFLLAVEQGTLGRGGRLGSEKANRDILKLLSIRGFEFGSDMRYLAESDKID

SEQ ID NO: 81750 - protein, 185 aa, Zea mays
  Coding DNA Sequence Number=SeqID_38375
  Pfam annotation: Domain name=zf-CCHC; Domain location=60-77; Score =14.2; E_value=0.011; Accession=PF00098.14; Description=Zinc knuckle
MDELFSKLKSTEIDHQTRAKIENPEEQVESLRDEELALMASQFTLFHNNRQNQQRGASKDGCFNCGNLDHLVAIFPKKGKSEAGPCEHHSDRCKGKWEYTFVKHKSNDLDHDSDDTSSSSSDEETNRRVKDKLNGLLFLVDTADNLCTMVLGDDVDKLLRLASRERIDFKFKYESMLNELEPNRA

SEQ ID NO: 81751 - protein, 108 aa, Zea mays
  Coding DNA Sequence Number=SeqID_38376
MASKDDIDLSVNAWEVSTTAPTLLQRLILLDRLLVTDEVLDSLPPRTAVPKWRFSHGLEMPQEQAEGLVALTLDELDVPRLHCFFKKGLKVHDKVAAEVVLVVDAMAR

SEQ ID NO: 81752 - protein, 141 aa, Zea mays
  Coding DNA Sequence Number=SeqID_38377
  Subcellular localization annotation: CTP_CleavageSite=35; ConfidenceScore=5.61e-01
MAAPSSSLPRPALRPFPYGASPGPGSTICVLPALPSNASWSSSLRAPSQRLCAAPLLAPCTPELAQLGLLPTRVLGFLLAQPFLPASFGSLRLAQVCCSSPMVVGHCCAASWCRDPRRDLLYRAELRSAVDACRLFDTLRG

SEQ ID NO: 81753 - protein, 57 aa, Zea mays
  Coding DNA Sequence Number=SeqID_38378
  Subcellular localization annotation: CTP_CleavageSite=36; ConfidenceScore=5.31e-01
MAVAAKSLSPSRLFCARSSFGCALPFSSSSRRGKVRAERHRPFHDFKPDLIMVIGVD

SEQ ID NO: 81754 - protein, 78 aa, Zea mays
  Coding DNA Sequence Number=SeqID_38379
MPRQETCRVPATLHCTHHEYIVSSSQVASASAMLLKVNVGAPKAKSAGNTASNPYTIKKGVIPCAAVGQKLACQTSLD

SEQ ID NO: 81755 - protein, 248 aa, Zea mays
  Coding DNA Sequence Number=SeqID_38380
  Subcellular localization annotation: CTP_CleavageSite=27; ConfidenceScore=5.43e-01
FSVPAFPERSHLKIHPPPPPPPGPAITSALVSSPMPTGETLAVETQAPAPQTQTPTTTASSSPSSTHRRHRTFSSSSSSSSSLSTLSSAASSPSPSPRGRAVPFSWEHHPGIPKARFLGGAGAASSAPTPLPLPPPLRVPETSRARHQQHARRRRACGKPMPADDAGGDPFAAALAECTRERGGAGSDAGLMDALFPARPTTSSSVPSSRRWSIASAGGVVGLLDLYGCRSVVGVAEGAFVVRRPVKV

SEQ ID NO: 81756 - protein, 75 aa, Zea mays
  Coding DNA Sequence Number=SeqID_38381
MVVCNATVNSEQCNCAQKSEQVLEGAPDSEHDLSGAPLDCPVARCQKLQRSELNGLVTWLVHRTVSGAPATSPGR

SEQ ID NO: 81757 - protein, 136 aa, Zea mays
  Coding DNA Sequence Number=SeqID_38382
  Homolog annotation: Hit_ID=O48967; Match level="QueryCoverage=42%, HitCoverage=12%, E-value=8e-13, Identity=62%"; Hit description =Putative uncharacterized protein
MVWIIEHRAETLEDFVMEQEVASSAPRVHDRPDSGTAPVHAVQQHTPAQASRTPSRVASMVLSAARELLRHPLALRHHRGHEVVARRRRPAARHGTFYFDQVEASVIPAPTRSDGVCALALRKGCTDRRPPGGAQP

SEQ ID NO: 81758 - protein, 139 aa, Zea mays
  Coding DNA Sequence Number=SeqID_38383
  Subcellular localization annotation: CTP_CleavageSite=30; ConfidenceScore=5.37e-01
MQAACNRTNGRTLSTPTCPTRGPRPTRHVTGASVTTCEKLHRHLRQYRAFSTEEPMPRLKATLRMAQQCQPSTLITGQSAAGEGATDRRHLWQAKQATLHLRHNDRVKKRDRERGYSERDPSPRRKRAPSPPTDQRFEG

SEQ ID NO: 81759 - protein, 144 aa, Zea mays
  Coding DNA Sequence Number=SeqID_38384
  Subcellular localization annotation: CTP_CleavageSite=41; ConfidenceScore=5.62e-01
MGRNARGPLSWTRPHRGMPSSPVFVWCRLKRRVSLPALSVRAAAKQRRLRAKGGVSAFAPTGPPQATDTPSARPRPSLHQEATLAKSPRQPTKSQGHLMQSAACVAPTAVPLDRVRLTAAKSGLRRHRKLHFARPQGSDSGSAL

SEQ ID NO: 81760 - protein, 520 aa, Zea mays
  Coding DNA Sequence Number=SeqID_38385
MGGLGVSDGFARELMRTCAASGERMSSPELRESSARMLKVTGGCWPRNVPIPRAASGDAFTSRMVRKWRVFPYGRNIAAVVSAVMDKDRQGAAQKRQAAIRIVDARPKRQKRGSATAAAPGGGKPPLAAKSGVPASSKAPEAAAGAGGSKPAKAVPPLSRVAEAAKAARALLPAGKHVADFATDICVDDYLGRSDEGQLATVAPDAAVATAATVPKARGEALGSGGEAAVLAVVRDEADATVRRLKEVSEALSQVADFASRTASGALTAAVSAEVERLRTQHADAVCEKSASDSKCRKLADKVAALEREKADLRRQLAAERREANEAVAKEQAAQAEAKLARAEGNLAKELAEHLQERLTALESRAKGAEAAMHAEAERTRTQLMDTYRELGARTGDFEVPDREPGLRCLQWVQEELLELPVVAGGLMSYASLVTCEGAMNALSCEGCRHFEAFDHADEDFERDIYKVEDPVVKESAGALYDRMWGLYGREVVRERAEAAMAPCFIFVCLAFVGCGARVW

SEQ ID NO: 81761 - protein, 119 aa, Zea mays
  Coding DNA Sequence Number=SeqID_38386
MESHDLRAERESRLVVMRLMVLVMTMVLENSAACAAPTAVPLDRVRLTTAKSSLGRHRKLRLARPQGSGSNSTSEDGLRLARPQGSDLASTSKDGLRLARPQGSDSASTSEDGLRLARP

SEQ ID NO: 81762 - protein, 134 aa, Zea mays
  Coding DNA Sequence Number=SeqID_38387
MPYFSVVALARVFHPRVAAIPIPARIEGALHVPQARACVALGAPLLGERGALLHHALSVNFTFESIFYRRQIPIDILSALQIILDLGTCSLDYLVRVKVWRLVCLRVSDLTLAISVQRKNKILLLESDNKLSVW

SEQ ID NO: 81763 - protein, 90 aa, Zea mays
  Coding DNA Sequence Number=SeqID_38388
MDKDESTKELNRIALVLAAQKEDLLLMYETLLLANLDFKICTMEATVHDGSPAHLAVLPVGAQTSAVALGHHLPHGNLDPAPWGRDLRVL

SEQ ID NO: 81764 - protein, 50 aa, Zea mays
  Coding DNA Sequence Number=SeqID_38389
MAACEAVQWLRPRLTTNSARVDDRQSTLKHTALALAYESAKKGNQVVEVV

SEQ ID NO: 81765 - protein, 93 aa, Zea mays; identical to SEQ ID NO: 62563
  Coding DNA Sequence Number=SeqID_38390

SEQ ID NO: 81766 - protein, 294 aa, Zea mays
  Coding DNA Sequence Number=SeqID_38391
MTSHKSSDGGNAHSHTDGLAREGFPCILWEVLEGAGYTTPPQYAVQLFEEHRVPRCRVRMTLEPHPLQPGWRSLDSESFRFRAEDTIESIALHGLMTFCGFHPLELSTHPIGLFPAEKEDDPMWKDRVEHAKDVWALYPGQTAHLTVRCMNALYRLQVVRAEAMSQLMGLVESTKIILDNREDLVVDLSTELVEKDLQVEQMATQIQELEEQVGARENTIEVLEDQLLTTQQQLEEANQHLDMHHQEIQDMEAEGADEDVDIEGGEVSEPASSLDTAGSGIPPSLESSVASFSK

SEQ ID NO: 81767 - protein, 140 aa, Zea mays
  Coding DNA Sequence Number=SeqID_38392
MDNQVTPATMSSREPVKIMPQARLSILILSQTYPYNGSSSLISCEKQTIRIEFLSLQVTAIVPTITGMGDYVSGRVRSKVCGQVHSGIRTLILIPISSRRPHIPMDPCPRTIIIPLSKWIRSIPDLARVLEKSLDFYRDP

SEQ ID NO: 81768 - protein, 121 aa, Zea mays
  Coding DNA Sequence Number=SeqID_38393
  Gene Ontology: Mol. function=transferase activity, transferring glycosyl groups; Cellular component=integral to membrane; Biological process=protein amino acid glycosylation
  Homolog annotation: Hit_ID=Q8W0S0; Match level="QueryCoverage=100%, HitCoverage=18%, E-value=8e-61, Identity=92%"; Hit description =Putative galactosyltransferase family
VQNLTATNIMKCDDDTFVRVDVILRHIKLNNGDKPLYMGNLNLLHRPLRTGKCAVTNEEWTEDIYPPYANGPGYLISGDIAKFIVSQHANRSLRLFKMEDVSMGLWVEKFNATKPVQYSHS

SEQ ID NO: 81769 - protein, 129 aa, Zea mays
  Coding DNA Sequence Number=SeqID_38394
  Homolog annotation: Hit_ID=Q7XD75; Match level="QueryCoverage=41%, HitCoverage=14%, E-value=3e-11, Identity=67%"; Hit description =Expressed protein
MAPYVGCDVLPRGLEEYSSPVIRFYEFRICAFNSRGNCSASMNICSSVHLWKSTDAKPSVTTEAFDNSAGTVDGVNAAKVAAMKDAELVNRNIAAFGAGTGRLSTDQKKKLLWVTSLPPQLHQEQLTYL

SEQ ID NO: 81770 - protein, 187 aa, Zea mays
  Coding DNA Sequence Number=SeqID_38395
  Gene Ontology: Mol. function=kinase activity
  Homolog annotation: Hit_ID=Q8H451; Match level="QueryCoverage=62%, HitCoverage=34%, E-value=2e-24, Identity=48%"; Hit description =SKP1(S-phase kinase associated protein) interacting partner 6 (SKIP6)- like protein
  Subcellular localization annotation: CTP_CleavageSite=51; ConfidenceScore=5.10e-01
MASGWSLPFGVILFLSLSLLGVQKLNPTFAAWELASSPLLCIKAWPPVLVSSSASTATNGARLFLVGGSISAVSSVSVQILVHQPRLSSTREFAATVTHSGALFVAGGCVPWSPFWAEALDLSTPNAKWRAVASPAHLHAKWMHGCVALNGRIVVAGEPRAPMALTGCQWPAARGPQVFGRLSAPDW

SEQ ID NO: 81771 - protein, 110 aa, Zea mays
  Coding DNA Sequence Number=SeqID_38396
MQIIERKCEAQKGAGIRSNLHFYVVLWTVGEKTLDKLTDQPGNLIPLDRAGVPDLSFNSLARARVTGPGGRGGAWTGEDGVWAGEGAAGVDVLVLVLMSSSLPLKVCSRI

SEQ ID NO: 81772 - protein, 262 aa, Zea mays
  Coding DNA Sequence Number=SeqID_38397
MGGSSARLAAHFAEQPAGTTTNSEEGGSLLVFHGRKWGALDRESWAQGTARGVHGGGRSGHGMLLLAALRRIATTGKKSRGAELLGADHGEKNNRGVKKGKGHGGRWRRHGRGRAELLLGHGKEGSSQGVACREMWRARGAGRRRAPRHGWPREEAELGVCSSLRDGEAELGEGSRCSTLLGKKGVAAGMPSVGSRGPAMGERPAPWEEGSRAPCVLGKKAPCCAWGKKPGRKMLWRLKEMEGWECKTAKDKGEGSIFIEKP

SEQ ID NO: 81773 - protein, 700 aa, Zea mays
  Coding DNA Sequence Number=SeqID_38398
  Gene Ontology: Mol. function=hydrolase activity, acting on ester bonds; Cellular component=nucleus; Biological process=lipid metabolic process
  Homolog annotation: Hit_ID=A2WM15; Match level="QueryCoverage=20%, HitCoverage=60%, E-value=4e-49, Identity=70%"; Hit description =Putative uncharacterized protein
  Pfam annotation: Domain name=Lipase_GDSL; Domain location=154-301; Score=81.1; E_value=3.7e-21; Accession=PF00657.13; Description=GDSL -like LipaseAcylhydrolase
  Subcellular localization annotation: CTP_CleavageSite=81; ConfidenceScore=5.63e-01
TAPASPSLRVQVMSLLFARLGVPRILRRTHRNTPQPSDAIHASFSGSPRMGARPRSRSALPRLSFLPRRRPRPRLICLLPDAAEVVAVAPPVHCTAPEPPSCISEFGSEAPRDSQSSSLDLAVEVVGPLDQRASRCRAADSPTRAKEPDMRPRLVLFGDSITELSFASGGWGAALTDRFARQADMVLRGLSGYNTWWALKVLPWAMEGAAGADPAAVTVFFGANDASLPDQVQVHQHVPLKEYQSNLRAICAYFKERWPSTAVILITPPPIYEPARIRKPAHASPAPIPDRRVNDEAIQSVESATPACFGLAAAATYCGCACTECRCFCGSGCSLDDGEAEENLYLGSRSARSRRSASVAPTGVGGPHIRSDLARCAPHPRAGRALALPEGDTYRKIVTFWWDIKGSGSADICDTFDMIKEPGELIVSPKKSDVSPGVAEGKACAAADLSSLIASKEARSQNDINNDRPKTSLCHADSMKIKVSDELPVKQWTYCDHMSDLHSSFTSANNDIAKEMNEVLFKSLSADTSALDLLASSDLLSQRKIDLIGKERLGVRKTRLRLKEQILTMKFKTYRHLWKEDVRLLSTKKQRLKSNKRIDQNNRTSQIGSQRQRFSNHSRLAMPGRQRSAALDVGEVQDTGESVLLDVRERGVPLHVSLGVGGVEVVLGLEGEVPVHDAGAAGHLGGGGRVSGGLDDDPND

SEQ ID NO: 81774 - protein, 139 aa, Zea mays
  Coding DNA Sequence Number=SeqID_38399
  Homolog annotation: Hit_ID=Q2R6H5; Match level="QueryCoverage=67%, HitCoverage=7%, E-value=2e-07, Identity=38%"; Hit description =Retrotransposon protein, putative, Ty3-gypsy subclass
MQSSDQVVELGEFKTTFRGHHILMGIMDRKFNEFLALTLGSRTVLQYAQAFNDLFRANSYNELVNLAISQEDCITARLAEKKRKTPMAGPSAQPQRFRIVSDTQSRGPQQQHGRWVIRPQQQQQAPNRSQPPAQRNHNQ

SEQ ID NO: 81775 - protein, 94 aa, Zea mays
  Coding DNA Sequence Number=SeqID_38400
MSPDISASVPLSAGFPLRRFFSGRGRLVVEDGGRLHSPDEEDVGVVEGDFFLGGSAMRCRVPSSSATDEIVPKQNTDPGRRVILRWKVTAIELA

SEQ ID NO: 81776 - protein, 72 aa, Zea mays
  Coding DNA Sequence Number=SeqID_38401
EEFSVKSPGAPDTVRWHTGQSVPLNLEVRIPGRIIIGRYPLDHRCTWAAPPHANGNRDDVSTTVDPEMKGWE

SEQ ID NO: 81777 - protein, 53 aa, Zea mays
  Coding DNA Sequence Number=SeqID_38402
  Gene Ontology: Mol. function=hydrolase activity, acting on acid anhydrides, catalyzing transmembrane movement of substances; Cellular component=proton-transporting ATP synthase complex, coupling factor F(o); Biological ...
  Gene Ontology: Cellular component=process=ATP synthesis coupled proton transport
  Homolog annotation: Hit_ID=P56760; Match level="QueryCoverage=86%, HitCoverage=56%, E-value=6e-10, Identity=76%"; Hit description=ATP synthase C chain
  Pfam annotation: Domain name=ATP-synt_C; Domain location=8-53; Score =5.5; E_value=0.0041; Accession=PF00137.12; Description=ATP synthase subunit C
MNPLIAAASIIAARLAVGLASIGPVVGQGTAAGQAVEGIARQPEAEVHWYLLM

SEQ ID NO: 81778 - protein, 107 aa, Zea mays
  Coding DNA Sequence Number=SeqID_38403
  Subcellular localization annotation: CTP_CleavageSite=82; ConfidenceScore=5.26e-01
MGHPICPTVQIQSPKGYSYIYSQPFISGSKVVDTSSRFPVARGGAAQVQQWSTAGITPSDARERQSPVQDPNTARTDPALCRSASLVVLPQAHEGMTLRIIGPLGLS

SEQ ID NO: 81779 - protein, 136 aa, Zea mays
  Coding DNA Sequence Number=SeqID_38404
MGKSNKRKREPTPPSEDFGDSEYSESEGSPAPVSPLASSDDSDDSQGIAAEVWTYIRAVERSGLEGSDESEYSSDEEDSSDSSEEGGGDGGDDDDDGGDGDDGDDSGGGGDGGSKGGNGGSSNGGGSSKGSNKASG

SEQ ID NO: 81780 - protein, 88 aa, Zea mays
  Coding DNA Sequence Number=SeqID_38405
MRGFLALGYKPDRRRFSLYSRRIYTVLGTATIESVDRREGVWRVEWGVGVDLAHDWRSGIREEPVTEDPGDQQIEVDKQELIDGKLCP

SEQ ID NO: 81781 - protein, 171 aa, Zea mays
  Coding DNA Sequence Number=SeqID_38406
  Gene Ontology: Mol. function=DNA-directed RNA polymerase activity; Cellular component=chloroplast; Biological process=transcription, DNA-dependent
  Homolog annotation: Hit_ID=Q9XPS7; Match level="QueryCoverage=72%, HitCoverage=11%, E-value=9e-60, Identity=89%"; Hit description=DNA -directed RNA polymerase subunit beta
  Pfam annotation: Domain name=RNA_pol_Rpb2_7; Domain location=79-156; Score=131.1; E_value=3.2e-36; Accession=PF04560.11; Description=RNA polymerase Rpb2, domain 7
MGSNLREILDNVSYPEILLSFPNAKKKKRIESKEKAILEFYQQLVRKIIHQVDEKIHGRSTRPYSLVTQQPIRGRAKQGGQRIGEMEVWALEGFGVAHILQEILTYKSRHLIARQEILNATIWGKRVPNHEDLPESFRVLVRELRSLALEMNHFLVSKKNFEVNREDVRSE

SEQ ID NO: 81782 - protein, 129 aa, Zea mays
  Coding DNA Sequence Number=SeqID_38407
MARGLLDMGQISDEQEQGGQASGRTVSKCYGFATRRKARKPEPRCLPPFYTQDATLREARSPTVHVRQRSHQKPPRNHFERGQCLHHLATSSTPDDSVELVPRRANVGAKAKTLPFAPGLRHLAAPMEA

SEQ ID NO: 81783 - protein, 122 aa, Zea mays
  Coding DNA Sequence Number=SeqID_38408
MAPVAVAGWIDHCGRTNCSLNLGLHREFPSPVGRLLRNLLQDRCRCCWVVVDRLGAIGSDLYGQDQIAPLVFPYRTDVDQRSRLSAGYLFGLSGHSRKSRIQGLSVDLSKSELEPLISDLRH

SEQ ID NO: 81784 - protein, 112 aa, Zea mays
  Coding DNA Sequence Number=SeqID_38409
MAPVAVAGWIDHCGRTNCSLNLGLHREFPSPVGRLLRNLLQDQIAPLVFPYRTDVDQRSRLSAGYLFGLSGHSRKSRIQGLSVDLKEPVTEDPGEQQVEVAEQELIEGKLCP

SEQ ID NO: 81785 - protein, 128 aa, Zea mays
  Coding DNA Sequence Number=SeqID_38410
  Homolog annotation: Hit_ID=Q6L3A5; Match level="QueryCoverage=61%, HitCoverage=5%, E-value=2e-08, Identity=45%"; Hit description=DNA -directed RNA polymerase subunit beta''
MASPRWVSPATEVGGRGRGRWILRRQWRLEVAHPFGRTLEKDLEEEYGSLENKYRTREGEGEYEILEEESEEEYGSSEDGLEKEYGTLEEDSEEDSEDDLEDEYGSPEEDSILKKRVLLSIKEQKNLV

SEQ ID NO: 81786 - protein, 279 aa, Zea mays
  Coding DNA Sequence Number=SeqID_38411
  Gene Ontology: Mol. function=cysteine-type peptidase activity; Biological process=proteolysis
  Homolog annotation: Hit_ID=Q2QQ41; Match level="QueryCoverage=95%, HitCoverage=90%, E-value=8e-29, Identity=32%"; Hit description =Putative uncharacterized protein
MARSDRLNQHRTVPAIRPFPPFVLFDDIQDVNNLPQVKSIFARVVVKFPRRHDSQHFILQDITGSKMEAISSRNNVPRFDALLTQGCTYTLYRVGFCLNREAFQFRNIGHGLEIGLITHTIVEPFIKSIQFPPFPKFLMPFHEVYEQPHKSFVDIIGIVLHLEPLKHIGGRPYREAILMDSRWDLIVVGIWTDLLQRNALRWSLARVDNNIIIGTMLHLNHTHGCLETSDYSTVHFNPDHHTTYHLKTIRRSLIQNPRSRIVDRLLENRRAHLPTVISD

SEQ ID NO: 81787 - protein, 22 aa, Zea mays
  Coding DNA Sequence Number=SeqID_38412
MEGTSGIDNKYTTVQFTRKVHK

SEQ ID NO: 81788 - protein, 87 aa, Zea mays
  Coding DNA Sequence Number=SeqID_38413
MSSSSSSAANAPPVDSSSEDTLSDLAAVELQPGHTDMQQLGYFGDDIGRIPAAEEIPEPEGELVVFEAFFIAGFPLLCIVCSGGPAK

SEQ ID NO: 81789 - protein, 683 aa, Zea mays
  Coding DNA Sequence Number=SeqID_38414
  Pfam annotation: Domain name=Transposase_28; Domain location=26-178; Score=-57.7; E_value=0.024; Accession=PF04195.3; Description =Putative gypsy type transposon
  Subcellular localization annotation: CTP_CleavageSite=26; ConfidenceScore=5.06e-01
MPSSSSSAANTSLAGASSKDTLSNVAAEELHPGDTVEFGVSRIFSVRVQDMQQLGYFSSGVGRVPGVEEVPEPEGELVVFEALFTVGLRLPAHQFVVEVLQRFEVQVHQLTLNAVVALANPRGKDVFARASGVFGANAGGSRIQMREAKKARGSANAAAAGGSKPVPAAKPAAPGHGKASASTKAVAPGGSKPPPGGVVKGQRPLLPARRIADFGTDISVDDYLVGSGEGQLAVVPPPVVTTSPTAVVGAKGAVRDPWATFCGSGEILPAAAAKDVAGSMSQRLREASQQLSQQLKQATDFADLVASGALTADVAAKVERLRAQHADVVREKSAAESKNHRLSEKVAAMEAEKTDLRRQLAEERREANKAIADAQAAQAEAKVARAEGSLARQRVEELDARFNTLRSRVDKAESSTRAEVERTHAQFVDAYRELGARIADFEAPGQETGLRFLEWLQEELLVLPTIVTGFMSFASLVTCEGAMNALSREGCRHYEVFDQADENFEREIFKVEDPVVKQSAGVLFDRMWGPHGREAGRDRPDRAIEQMAHVEDVEDLIGLDGALPEATEVLGFGPAHATATDNAIFVAASTVAADDDSFGSVSKCFESDDSGSSIVWTEESSDEDLDYFVALDMAAAEPSPRAEGSEELPGASTGYRWRRAVAKRRVSELSRSGGRSSSRGRDW

SEQ ID NO: 81790 - protein, 120 aa, Zea mays
  Coding DNA Sequence Number=SeqID_38415
MGKNNKRKREPTPPSEEFGDSEYSEEEFSSESEGSPAPIPLRESSDDSDDSQGLAAEVWTYIRAVERSRLKGSDESDGRGGGSGSKDGDGGGSRGGSGGGGSSRGSTRGGSGGGSNRASG

SEQ ID NO: 81791 - protein, 291 aa, Zea mays
  Coding DNA Sequence Number=SeqID_38416
  Homolog annotation: Hit_ID=Q10M62; Match level="QueryCoverage=36%, HitCoverage=12%, E-value=5e-18, Identity=50%"; Hit description =Expressed protein
MSFSARVPRSRSVEIFSMVREGQVGGLAPHGGMDVEPVLEECLHPGLSHTGLPIWYIKIGSLVNPGSATVDKDNDDEERGRHTSKMTKEEEDEEYLEEEEDALAGAGGNTFSFTTFMLLTPLILVRGRLDSDGEVTSEVDQVRALQEEVVIQKGVSNKGETAARKEPTFSESSPVISELVLVSAHNNEIMREVAKGENSSVQEVLVTDVSQDLEKQLKEEAMLNKVLKETVLSKVVAIDKLQSGLASSLRIQDVMRNEIQRVQDELSCITHKAKQLELQDNFSQVQIRSTM

SEQ ID NO: 81792 - protein, 202 aa, Zea mays
  Coding DNA Sequence Number=SeqID_38417
  Subcellular localization annotation: CTP_CleavageSite=32; ConfidenceScore=5.28e-01
MGPAPSAALFAARITHPGYSRSLPETLTCGPSSSELSNLPAPNPSREPCGVGPLRSVSVGPGSWGYKSQGEAPQGHTHRVPRKTYALWCWDHQVGQPRCHGGENRVASNVDRGCDLAQALGAARDLLWGVREGSFWALGPLAMGGWTRPPPVALGKRAQYSAPVFHPLCIIAWVHQRPGESVRAFGAGGATPNRAEFVVGVQ

SEQ ID NO: 81793 - protein, 87 aa, Zea mays
  Coding DNA Sequence Number=SeqID_38418
MARPSLGQLLWASNSAQPRHMDGSEAAMCPEKVAYRTRGMGSGPPRMGFGPPTGGPKVPGQRIPRPCSGRGPVPTRVQAQPGADLTA

SEQ ID NO: 81794 - protein, 151 aa, Zea mays
  Coding DNA Sequence Number=SeqID_38419
MWTALKPPCVQRRWHIRPLEWDRTPSYRVWATHRGVPRSRDREYAGLAQAEVWCRHVSKPKDPSAKAGGSDSLGAGFKEREPVPWGGPELCGRLAWFRTQSLHTPPLCDGYPSIWSYSPVGSTTWGPALKNGHLSPGVVWSRVAAQPGTVP

SEQ ID NO: 81795 - protein, 515 aa, Zea mays
  Coding DNA Sequence Number=SeqID_38420
  Gene Ontology: Mol. function=nucleic acid binding; Biological process= DNA integration
  Homolog annotation: Hit_ID=Q2QLU6; Match level="QueryCoverage=73%, HitCoverage=68%, E-value=2e-15, Identity=22%"; Hit description =Putative uncharacterized protein
  Pfam annotation: Domain name=zf-CCHC; Domain location=473-490; Score =18.5; E_value=0.0024; Accession=PF00098.14; Description=Zinc knuckle
MDYSRAQGLHLTDALVPHQKRNHTRKPLCNSKDLQRLMDCCWVPGNMVPKEGPKTPQEWPARQEYDELVRDIYSRLNLIINELNSIGINKLGDADIVRKIISLLPQQRYGSIITILHNMEDLSNMTPTIVIGKIAAFEMSRKMSRGEEPTSSRPYAFACDERKGKNKAPTPSSSSEEEEEEESDDDEDNQPCTSSSEDEETIRRVGKEKAKKERMLRMWGKGPLQGQLSNFGRTQKGEEQRQGANNDESSSDDEGEGKPSLDELAEAVDFFQDVCTKQKAQLKTLKKKLVNSQNDYKGLQEKFETFANLNSELSTKIELLESSAPSTATDDSLIKKNEKLKAKLASSQEAIENLLEKMEILSIHNNELTTKLENIGSTPAASLVEIPEIIKKDASTSCFDLIDDSNPCNQVVVENIVVETCSDEVAKENEQLKQEVARLGKALYDKKGKAKQIQPPQDNTTAGVNKPMEGETVICRLCHKEGHKSFQCKAMTGDKQRQKLKQKPSSKISNTYIKK

SEQ ID NO: 81796 - protein, 397 aa, Zea mays
  Coding DNA Sequence Number=SeqID_38421
  Pfam annotation: Domain name=Transposase_28; Domain location=225-386; Score=-42.0; E_value=0.0015; Accession=PF04195.3; Description =Putative gypsy type transposon
LRLLAYVTGSWPRSSIGSPPERGAEAYADPAVGGPDPTQRGLGPAPKVRFVPTEVLDPTLRFGPCMKGSGTFPCGSGPTVDISEDNVFSGHVVALELSTWSGRVLFTKRLEIAARAPRLHTVAREPVPKEDDSWARATILEAGSLVSAEVKRRTTAGGDEEAHYSRRWPALHTAVLLLRTRRLTPKEYDSWARAPVLKAGPLLSVEMKRHGGSLLAWRFAFIAHRGWRPRTAMALLDPPECFQSEVALNLVRNLLGWGAPAFARRIHVGAPPLGDLAAGEFVLFASNFPSGLALPISSFFVLLLEELDLQSQHFTPCFILQAVVFAYLCEMSAGATLLPPAFRRKGLDVSRLASIPKKELVSRPPRSHPLIHATRPAGFGLGSQAVCPDPMNHSSRY

SEQ ID NO: 81797 - protein, 71 aa, Zea mays
  Coding DNA Sequence Number=SeqID_38422
MERPPGKTVLPQGFNGDALGRLIRKASGRLPYLKGARAVGEWPRSVTLPRLLGRGVWEVAIPWQMGNMTCG

SEQ ID NO: 81798 - protein, 202 aa, Zea mays
  Coding DNA Sequence Number=SeqID_38423
  Subcellular localization annotation: CTP_CleavageSite=32; ConfidenceScore=5.29e-01
MGPAPSAALFAARITHPGYSRSLPETLTCGPSSSELSNLPAPNPSREPCGVGPLRSVSVGPGSWGYKSRGEAPQGHTHRVPRKTYALWCWDHQVGQPRCHGGENRVASNVDRGCDLAQALGAARDLLWGVREGSFWALGPLAMGGRTRPPPVALGKRAQYSAPVFHPLCIIAWVRQRPGESVRAFGAGGATPNRAEFVVGVQ

SEQ ID NO: 81799 - protein, 179 aa, Zea mays
  Coding DNA Sequence Number=SeqID_38424
MATVGALERGRGAMVVPMEVGHMCMEARVSGGVDDPDVCGMVPRIFASLYDFKGKLPGIFLGKRLRGLQESGDLQLSWVELGCMKRALGSTRLYVGCSCTGLSCGEIHMKLTVALLCIFCSGNHLTVVPSQEIILCILGEQIGSNVYSHDTLLCAMLDEFMTIILWLAPNSEANCACSQ

SEQ ID NO: 81800 - protein, 100 aa, Zea mays
  Coding DNA Sequence Number=SeqID_38425
  Homolog annotation: Hit_ID=Q84R50; Match level="QueryCoverage=75%, HitCoverage=7%, E-value=4e-07, Identity=38%"; Hit description =Putative GAG-POL
MVLVAERTAQHPQGSKKVPLGQGGGLTTRMVMEGQEFEDSRSTAGVRTIQKPVYYVSEVLHEAKARAILHNSNATGNIAKWAAELAEFQLDFQPCHAVKS

SEQ ID NO: 81801 - protein, 277 aa, Zea mays
  Coding DNA Sequence Number=SeqID_38426
  Subcellular localization annotation: CTP_CleavageSite=61; ConfidenceScore=5.35e-01
MPTVVPTPRLTGPWLSPLTGTVGSCAGLPRVAVLVPQSRRRNIGASGGEKALTDLAEGRTSATRDRSAASVIRSSVPGLLAQLALSRPPTLPPAAWSGRGRLLRRAHWRTVQDALRRMGDVRVLGLSCPHSGTMPPRGGRGLPVREDLSGDLPVQAEASAIHRRGAGAQVAAVVSAEAVAAGEGFSADETIGASCGRTPGSLALMACPRPSSRDVGEGLVTAASALRSSLLLFSRSEQGSLSLLSGVAGKPPGIFYPASLPVWRLFVPAGMELESRL

SEQ ID NO: 81802 - protein, 388 aa, Zea mays
  Coding DNA Sequence Number=SeqID_38427
  Gene Ontology: Mol. function=anthranilate synthase activity; Cellular component=chloroplast; Biological process=tryptophan biosynthetic process
  Homolog annotation: Hit_ID=Q10B97; Match level="QueryCoverage=98%, HitCoverage=99%, E-value=1e-102, Identity=74%"; Hit description =Anthranilate synthase component I family protein, expressed
  Pfam annotation: Domain name=Anth_synt_I_N; Domain location=65-213; Score=32.9; E_value=2.7e-07; Accession=PF04715.4; Description =Anthranilate synthase component I, N terminal region
  Pfam annotation: Domain name=Chorismate_bind; Domain location=161 -378; Score=287.6; E_value=2.4e-83; Accession=PF00425.9; Description =chorismate binding enzyme
  Pfam module annotation: Pfam domain module=Anth_synt_I_N::Chorismate _bind; Domain location=65-213::161-378
  Subcellular localization annotation: CTP_CleavageSite=54; ConfidenceScore=5.33e-01
MATVSLALSLRFAPSSRPLNLHRRRPDAVTCRATTATFHRLDAVVREEESKFRRAAAEGCNLVPITRSIFSDHLTPVLAYRCLVKEDDREAPSFLFESVEQGSEGTNMGRYSVVAAQPAMEVLAKANKVTVMDHELKSRREHLVPDPMKIPRTIMEQWNPPQVTDGLPDAFCVLSQRLERRTFADPFEIYRALRIVNPSPYMAYLQARGCILVASSPEILTRVQKVSKPGSVKVEKLMNIERYSHVMHISSTVTGELRDDLTCWDALRAALPVGTVSGAPKVRAMELIDELEADMRGPYSGGFGGISFNGDMDIALALRTIVFPTASRFDTMYSYANGKSRQEWIAHLQAGAGIVADSKPDDEHQECLNKAAGAARAIDLAESTFLQE

SEQ ID NO: 81803 - protein, 414 aa, Zea mays
  Coding DNA Sequence Number=SeqID_38428
  Gene Ontology: Mol. function=hydrolase activity, acting on ester bonds; Cellular component=plasma membrane; Biological process =pathogenesis
  Homolog annotation: Hit_ID=Q10B96; Match level="QueryCoverage=97%, HitCoverage=70%, E-value=0.0, Identity=91%"; Hit description =Phosphoesterase family protein, putative, expressed
  Pfam annotation: Domain name=Phosphoesterase; Domain location=1-275; Score=353.7; E_value=3.2e-103; Accession=PF04185.5; Description =Phosphoesterase family
MSGFKPDAVPVYASLADEFAVFDRWFASVPTSTQPNRLFVHSATSHGLTFNARKDLIHGFPQKTIFDSLEENGLSFGIYYQNIPATLFYQSLRRLKHLVKFHQYTLKFKLHAKLGKLPNYAVIEQRYFDCEMFPANDDHPSHDVARGQRFVKEVYETLRASPQWNETALIITYDEHGGFYDHVPTPVVGVPQPDGIVGPDPYYFKFERLGVRVPTFLISPWIDKGTEDALIFLEAVDDFLHVEISLIHKPNGPQDTSQYEHSSIPATVKKLFNLHSNFLTKRDAWAGTFENYFKIRRTPRTDCPEKLPEVTKSLRPFGPKEDSSLSEFQVELIQLASQLNGDHVLNTYPDIGRTMTVGEANRYAEDAVARFLEAGRIALRAGANESALVTMRPALTSRASMSSDIGILMSTSMA

SEQ ID NO: 81804 - protein, 237 aa, Zea mays
  Coding DNA Sequence Number=SeqID_38429
MVYLSLFVAGSIHFKNSKEVAVVPLSARGCQFPSVPPSLNYLIGSATSWIDLFDESLCTLIGSLELNVLFSESPKTENRNLKKREKEKRGKNLTMGQLPLGGPFYITPLRGPCREPRRRQAGLACRPPVGTKLRGFPLVGEAALSDGILPCAARRDCWEAVMRFGSRDLVNLALHALAACWYRHMGPDTKLYASGAVDSTGGIFVSAALKSWRLLRPMLVSVPIYDLRAPPPYDLSG

SEQ ID NO: 81805 - protein, 125 aa, Zea mays
  Coding DNA Sequence Number=SeqID_38430
MAVAEMKVQDVPGKTAGRSSSSSVDVLEIQKSKEKGVEQSLEGKETTSAAEGNAGGLKERQMMDVMQAIEKDPAIGFGGKKLLRLLMPKILPKLKLLKPDLKLNTSGPQCQRVTRLYLMWLPRKT

SEQ ID NO: 81806 - protein, 48 aa, Zea mays
  Coding DNA Sequence Number=SeqID_38431
MTQTRSDIERRPMAEQELRMQEVRIPKGPQRGQIPRMSSLALDLVRLR

SEQ ID NO: 81807 - protein, 118 aa, Zea mays
  Coding DNA Sequence Number=SeqID_38432
MDDLGLAAPRGCAPSLFIQELRLLYFPSFVLRRSRISKVGNHRELVQRLHWRLGLARRSRIARVIFRQIGIISTRRKIGHLSFINFNSLARAQVTGQVEGVAPGLGKMVPGLEKVLLV

SEQ ID NO: 81808 - protein, 120 aa, Zea mays
  Coding DNA Sequence Number=SeqID_38433
MTQTISDIERRPMAEQELRGGTRQEGPNQAAARSTDKPHECDGDAVCYQRQHELQGSKERTAKNTRFSSRRGMDLTRQGPPGSARMQTSVRVLHVNDKREGAHTVVGCAGRVDQRRQELG

SEQ ID NO: 81809 - protein, 92 aa, Zea mays
  Coding DNA Sequence Number=SeqID_38434
MEQVLRGSVCDKGRGPGVAGDDGGGGCAAKGGWATVVRCKGGMGGSASAHGGGHACGGHSLFQASRVSFPVSSWGFNSNDFATFQGSYTGLS

SEQ ID NO: 81810 - protein, 38 aa, Zea mays
  Coding DNA Sequence Number=SeqID_38435
MAAVRVCKGSVGDRSAPQRGYEWKRQCPCMRAPVRRAQ

SEQ ID NO: 81811 - protein, 78 aa, Zea mays
  Coding DNA Sequence Number=SeqID_38436
VGKTDWDRSWAAVAVPVGQLRVCGCSCALEGRWVRHYGLVTIVHGFVPESLTVRGGPGRGIHSAIAGKTPPMMFAVLP

SEQ ID NO: 81812 - protein, 585 aa, Zea mays
  Coding DNA Sequence Number=SeqID_38437
  Gene Ontology: Mol. function=diacylglycerol kinase activity; Cellular component=nucleus; Biological process=activation of protein kinase C
  Homolog annotation: Hit_ID=A3AD43; Match level="QueryCoverage=87%, HitCoverage=77%, E-value=1e-171, Identity=75%"; Hit description =Putative uncharacterized protein
  Pfam annotation: Domain name=PPR; Domain location=156-189; Score=7.4; E_value=1; Accession=PF01535.11; Description=PPR repeat
  Pfam annotation: Domain name=PPR; Domain location=260-294; Score =29.3; E_value=1.4e-05; Accession=PF01535.11; Description=PPR repeat
  Pfam annotation: Domain name=PPR; Domain location=297-331; Score=4.4; E_value=2.3; Accession=PF01535.11; Description=PPR repeat
  Pfam annotation: Domain name=PPR; Domain location=363-397; Score =39.6; E_value=1.1e-08; Accession=PF01535.11; Description=PPR repeat
  Pfam annotation: Domain name=PPR; Domain location=398-432; Score=0.1; E_value=7.6; Accession=PF01535.11; Description=PPR repeat
  Pfam annotation: Domain name=PPR; Domain location=434-468; Score =15.9; E_value=0.1; Accession=PF01535.11; Description=PPR repeat
  Pfam annotation: Domain name=PPR; Domain location=500-534; Score=2.4; E_value=4; Accession=PF01535.11; Description=PPR repeat
  Pfam module annotation: Pfam domain module=PPR::PPR::PPR::PPR::PPR::PP R::PPR; Domain location=156-189::260-294::297-331::363-397::398 -432::434-468::500-534
  Subcellular localization annotation: CTP_CleavageSite=60; ConfidenceScore=5.55e-01
MAAAIIMPPHTDPPRPATASNPTAPASHPQRQRDAPTPSLRALFLRAVDPSRPSSWSTAVADLLSSGDPVAALAVFAAALRANPAALRPALPPALRAAAAATSLSAGRQLHLLALRSGLFPSDAYCASALLHMYHHCFRPLDARRAFDEIPTPNPVIVTAMASGCMRNNLVYTTLSIFRSMVASGSAGVVDEAAALVALSASARVPDRGITGGIHALVSKIGLDGQTGVANTIIDAYAKGGGHDLGAARKLFDMMDRDVVSWNTMIALYAQNGLSTEALGLYSKMLIVGGDVRCNAVTLSAVLLACAHAGAIQTGKRIHNQVVRMGLEDNVYVGTSVVDMYSKCGKVEMAWKAFQKIKGKNILSWSAMIAGYGMHGYGQEALHVFTDMRKSGLKPNYITFITVLAACSHAGLLSEGRYWYNTMKTEFGIEPGVEHYGCMVDLLGRAGCLDEAYGLIKEMKVKPDAALWGALLSACRIYKNVELAKICAERLFELDATNSGYYVLLSNIYAEAGMWKEVERMRVLVKTRGIEKPPGYSSVELKALGGTPGKRHRLVTLGGCRLLDGSGVVSVELSKKIVEELRCRL

SEQ ID NO: 81813 - protein, 120 aa, Zea mays
  Coding DNA Sequence Number=SeqID_38438
MRRSMHFVNKFQDLRPPNHRRKFTCPDLHARSCVVKASGESGVQPWLARWIRGGVARARFIAWGASARNSQSNRAADISAGCCNDRKDCWDLQRTGNKEPVYATPPINETRHEQVHGGTG

SEQ ID NO: 81814 - protein, 65 aa, Zea mays
  Coding DNA Sequence Number=SeqID_38439
  Subcellular localization annotation: CTP_CleavageSite=24; ConfidenceScore=5.12e-01
MTYYKFYFSNLNLSQSFVYTGLYASSMDQSRKRSMLSNLPALKIVYKSYPLNRNLVLEICKRKRM

SEQ ID NO: 81815 - protein, 182 aa, Zea mays
  Coding DNA Sequence Number=SeqID_38440
  Subcellular localization annotation: CTP_CleavageSite=26; ConfidenceScore=5.45e-01
MGAIKAKAQSTQGTRSRLARAQPWARAADPGGFTSRPRENSAACPAPTAVPLDRVRSTAAKSSLGRHSKLRLARPQGSDSTSRPDDGLHLALPQGSDSTSTPNDGLRLARPQSSDSTSTSDDGLRLARPQGLDSASTLEESPPRPTPGSDRPRHRRAIITLPLASSGYGEQDRRSSDGHDIT

SEQ ID NO: 81816 - protein, 215 aa, Zea mays
  Coding DNA Sequence Number=SeqID_38441
  Homolog annotation: Hit_ID=Q6J9V9; Match level="QueryCoverage=53%, HitCoverage=32%, E-value=1e-10, Identity=42%"; Hit description =Putative uncharacterized protein
  Subcellular localization annotation: CTP_CleavageSite=48; ConfidenceScore=5.43e-01
MVAIQGGHPPFKGDSPHLRPQPSRNESSPTRSKVIPLRHGGWVPRVVQAGPGQKEPNRRERSVQLSSGYKHSSTFAQTSGDRERGYSEGILLHEGSGPRALLLIRGSKAGPSEGFDSRLRALGLRALLLIRGSKAGPSEGFDSCLRALGLRAHHWLTPERFDSRLRARRARDDSGYVRYMAEARATLPRLGGCSRKSGSGQTVDSVNIPARELGT

SEQ ID NO: 81817 - protein, 194 aa, Zea mays
  Coding DNA Sequence Number=SeqID_38442
MGAQAHTSCNRRAGYYVQETAPPLAPLPRLLDCGTSTATRGNPAYDPTVPARRIGHGPVSRGRRRDGRCGQKWADSNGGGRRAEAESCRQPSSCPLMGRRENPLLRREDGAPVFRPSNGSHTRNGRHANHSSRRINSAAGQAAPLGPGKGDTPKGILLREGNGPRAPLLIRGSKAGPSEGFNSCLRALGLRAHY

SEQ ID NO: 81818 - protein, 300 aa, Zea mays
  Coding DNA Sequence Number=SeqID_38443
MTIIRSRSDGSRYSYPKRYAVTKSGHQKEIQRSGDHLPQPNPGHGGAAHPLGHKIAGECNSPPKRAIIQNDKHYTLSTEGRTQWKVAKRWRNPKRGQPHRTVFTDLRGGVSHRKEGSGLIGCGIERPRRRWQGVAKEDSRTSENPARDGPPTHGQGTLVDVPNFSVPDGDDGDELLFSPGRLELKLSPLALNNPRMNAKLVRAENDAARRPYTEITGPQLTPRITANSRPSGVALHRRNLRAMARCGWFLGLDGSAPCGFPRTTESVSMLRSRRDGADPARGPRFPVAHSGWRWAARALD

SEQ ID NO: 81819 - protein, 97 aa, Zea mays
  Coding DNA Sequence Number=SeqID_38444
  Subcellular localization annotation: CTP_CleavageSite=42; ConfidenceScore=5.86e-01
MASSSALAVPSIPLPLPGTYKRSRPSPVPSTPALAISCASPRANRASAAALPRRSMLEPLHTLTVMRHSSPPPIAPDCLTGDLTAVNTRHRAVDRPP

SEQ ID NO: 81820 - protein, 166 aa, Zea mays
  Coding DNA Sequence Number=SeqID_38445
  Subcellular localization annotation: CTP_CleavageSite=53; ConfidenceScore=5.89e-01
MASSSALAVPSIPLPLPGAYKRSRPSPVPSTPAPAISSASPRANRASTAALPRRSVLEPRHTLTVTRHSSPPPIAPDCLTGNLTAVNTRHRAADRSPYVPVCQIGPTPVIPCPRPCLATTSPPRNRTHGREPPQNSTAGRTPVDPPPSIAIRAVKPSPLAAEEGRA

SEQ ID NO: 81821 - protein, 197 aa, Zea mays
  Coding DNA Sequence Number=SeqID_38446
MGRRETEHEGGRKPEGDRRKRGNPRPSCLSRAQVGRKERIQPESEPWGRAKRSSSSSGAEPESEPWGRAMRSSSSSGAEPEFEPWGQAKRSSSSSGAEPESEPWGRAMRSSSSSGAEPESEPWVGRSGVRRLPGLSPSPSPGSGEAELPMALEARLGCCQPHSAKWRSSRSGAGGAVLLLGRPEELRSDCGHFGSVD

SEQ ID NO: 81822 - protein, 221 aa, Zea mays
  Coding DNA Sequence Number=SeqID_38447
MNKNTGTQGAHYKQNSGFHVRGYEQPPHIGGARGATSSERLASDLCGNSHGPRTDAATGRLSCHHVSTDGGVRLSTNAAPASAGRSKAHRQVLAPVVATKARRRTECCILAGQQQFAFPGIEDASSTELEDGLHHQKLEEEVASRYSHFGPLGQSSARAAHLHPLCATGNLGPRAGIVLGSDQFRVHPRVVECEWGKLELVAAGGEEKFVAVGYREVGNVH

SEQ ID NO: 81823 - protein, 137 aa, Zea mays
  Coding DNA Sequence Number=SeqID_38448
  Gene Ontology: Cellular component=nucleus; Biological process =ribosome biogenesis and assembly
  Homolog annotation: Hit_ID=A3AYT6; Match level="QueryCoverage=37%, HitCoverage=14%, E-value=7e-14, Identity=71%"; Hit description =Putative uncharacterized protein
MVLEDRVQERSRVFPLLAQAEKLREKLRQEFLRKGTELAHGVADTLFAVPPTEDLDGPIVHLPSPAVRLPREKHLDAGTSLPGLVAAKVGADVTLTDIAQNAEEIIQHLKHSCPAHLYATSMSPPVVQQENIKIAPK

SEQ ID NO: 81824 - protein, 155 aa, Zea mays
  Coding DNA Sequence Number=SeqID_38449
  Gene Ontology: Mol. function=structural molecule activity; Cellular component=protein complex; Biological process=microtubule-based movement
  Homolog annotation: Hit_ID=P29512; Match level="QueryCoverage=68%, HitCoverage=23%, E-value=1e-51, Identity=91%"; Hit description =Tubulin beta-2/beta-3 chain
  Pfam annotation: Domain name=Tubulin_C; Domain location=1-63; Score= -11.9; E_value=0.019; Accession=PF03953.8; Description=TubulinFtsZ family, C-terminal domain
MSTKEVDEQMINVQNKNSSYFVEWIPNNVKSSVCDIPPRGLSVASTFIGNSTSIQEMFRRVSEQFTAMFRRKAFLHWYTDEGMDEMEFTKSESNMNDLVSEYHQYQDATADEEAEYEDEEAIQDDVIMRVKVDVLLLPTSLDEQQAPALSNARVR

SEQ ID NO: 81825 - protein, 75 aa, Zea mays
  Coding DNA Sequence Number=SeqID_38450
MPNYAFFDCLGMRSVSEAESASTSSSCPSKPAEQSGSTSSGSLEDMVAGVTWPSILPPGWTVEWDPTSDEEEHEE

SEQ ID NO: 81826 - protein, 233 aa, Zea mays
  Coding DNA Sequence Number=SeqID_38451
  Gene Ontology: Mol. function=hydrolase activity; Cellular component =mitochondrion
  Homolog annotation: Hit_ID=Q6H4N6; Match level="QueryCoverage=99%, HitCoverage=99%, E-value=3e-69, Identity=63%"; Hit description=MutT -like protein
  Pfam annotation: Domain name=NUDIX; Domain location=41-192; Score =57.7; E_value=4.1e-14; Accession=PF00293.19; Description=NUDIX domain
MSSDAVAASSRKGRLKQRYDNEFRLVAGSGVCLFDFPRSWIHWCVPYRVNKKDDEGGNPCSSLGDDTAAEVEVLMISTPNRADMVFPKGGWEDDEDVYQAACRETTEEAGVKGIINRAALGHWVFKSKSSQNSTTSTSGACKGYIFGMEVTEELESWPEQDTHDRRWVSPAEAYQLCRYDWMREALTALLERLSVLQPVAAAAAAATPELAADQSGMYMMLQASSDGGAVALC

SEQ ID NO: 81827 - protein, 229 aa, Zea mays
  Coding DNA Sequence Number=SeqID_38452
  Homolog annotation: Hit_ID=Q53RK1; Match level="QueryCoverage=42%, HitCoverage=25%, E-value=3e-34, Identity=75%"; Hit description =Putative uncharacterized protein
  Pfam annotation: Domain name=DUF573; Domain location=83-179; Score =19.4; E_value=2.7e-06; Accession=PF04504.5; Description=Protein of unknown function, DUF573
  Subcellular localization annotation: CTP_CleavageSite=67; ConfidenceScore=5.78e-01
MALDQQALPVPVPVPVPVLPNPNSTAPADLTSPSASAARKLPIKRRSPRPSSSPPSSSSPASSDPLRAPAPGGGGSDQQQPPFKFQRIWSESDELRFLQGLLGCGTQGLVFPRDLNVFYDRFSESMPQPYTCAQLSEKLCRLKNKFCSISARVAGGIDPARLAPHDRDVLHLYSRMWGPEEHFPSLNFMNGYPNVSGHDDSVDNPKNNMFPVIYGGPVQSGGSTSITGS

SEQ ID NO: 81828 - protein, 280 aa, Zea mays
  Coding DNA Sequence Number=SeqID_38453
  Gene Ontology: Mol. function=metal ion binding
  Homolog annotation: Hit_ID=A5BQL0; Match level="QueryCoverage=55%, HitCoverage=33%, E-value=3e-07, Identity=28%"; Hit description =Putative uncharacterized protein
MEVCDLRKVPDAAAPADPRPCRQSGDGGGGQVTEAILAFGLLQQRCEDEVLEVAQRYHELVTEPAQQPCALDLAPTEHPHRGLLSRIMPHLELHRRLNLPGQGHEVIPVVSSLNLQYQHPMNVPGVPHAANRFTDHGASSSRAGSLENRIISSEEVPRRYVVPTNYSDLVPPPAVDLRRLVPEPLNWSSDVRGTAISGSIPPVSRTNNSSTVNPPAGFNHQNLTRRHPRNLSEEIGRLSRALCGHQPPRLRSGFLLERQNDGVWGVPSSTRAREGRRLME

SEQ ID NO: 81829 - protein, 352 aa, Zea mays
  Coding DNA Sequence Number=SeqID_38454
RIGALQVVSELLGWPQDMEVRYQTSFCQNEDGFPKLLKACTVRLEIRSQPEYDGREFIEHGTEKCVVTVYIGSSLHHVEWSVTAAGHRFKDTCQVVARKALRALCQIYEEEVANTPLRFFPPFQRDRPIWMARMRALEGQQLLEDDPIVVYLTAYLLTLDAQYDFLARHHRQMITRAEDAEKLNCKLHVDLTSAQACVAALESREAIAVEALKQAKDEHVQKLMEAYLVTHNQRRALQIQEPASSNPVQPIRAEDPQILEGHPDMDKQEHPEASQDPPPELFEPLTMKKFPAPSLEVKEEAASTPPAQSPSKELQEPVQLEEEFDPVLPSQSPPEEVINISSLLTHPGDVSD

SEQ ID NO: 81830 - protein, 157 aa, Zea mays
  Coding DNA Sequence Number=SeqID_38455
MAQAPPRPRSEDEELEEEQVSPWFVPPALPSPPCSPDSARIWYYLAHRAVLDNTATTTRHRCGAVGAICDAPSRFYGLSEIRKNDEVTCLSIITIFIIPHKISPVSNLSMFDYNDYHRTIDCILQIAVKKLNPESVQGLQEWQDNMENFNPFGENGE

SEQ ID NO: 81831 - protein, 50 aa, Zea mays
  Coding DNA Sequence Number=SeqID_38456
MGGGGGASQYQFYGGLQAQPEVGAARVVFLVVFKPEGGNMEEKDLEFMHH

SEQ ID NO: 81832 - protein, 206 aa, Zea mays
  Coding DNA Sequence Number=SeqID_38457
MGKSKKGGSSSHHSGDKRKREPTPPSEDFGDSEYSEEEFSSEFEGSPVHASPPVSSDDSNDSQGLIAEVWTYIWAVERAGLEGSDESEYSLDSSEEGGGGDGGDGDIDGGDGDGGEGDGRGGDGGGKGGSGDGGDDSKGSSRGSNKGSSKGSNKRLSPLESRCCFGSVSRVIIGGVGAFRSDSQVIAGHVGVLEITTERLLVMSAF

SEQ ID NO: 81833 - protein, 208 aa, Zea mays
  Coding DNA Sequence Number=SeqID_38458
MKRMTRRTRWRGRGHETGIRERETAGKKLQAGRGNSGEEFRPPGEAIDRDRARSSSSGGGGALWTNTEALNGVRPAGRRVGATSKCGHKPVRQNWLKAGANRKNQARGRVSHLGAELGVAWCGFRRPILAQFRCTWPLRGKVHASEVSILHCRTLKFIGCTECAAPSFEWIFADNPLEGLHFKSSQKLLLSSTCAFSEVHPMGVAPEL

SEQ ID NO: 81834 - protein, 87 aa, Zea mays
  Coding DNA Sequence Number=SeqID_38459
MGIEQSSEGKKAASETGGNAGGQKKWRMMAIMKAIHKTPPPASVEKIVAPANAEADEATPEAENIGAIMLEIDRIIADVAPEKDIAE

SEQ ID NO: 81835 - protein, 149 aa, Zea mays
  Coding DNA Sequence Number=SeqID_38460
MGSDAIHGPTAQQTTGPGTRDRVVADSDLISFLLWTPLLLLLNTLAFPKSLMVLSKKPTAEIRSVAEGTREGERALTGGLGGVSGREGDGLTDRAQRQGTQALTGGSGRRSLELGRVRATMVPGSPELARNEEDDSANSLAGSWPRDQD

SEQ ID NO: 81836 - protein, 261 aa, Zea mays
  Coding DNA Sequence Number=SeqID_38461
MPPAPPQGIPAAGGDPDGDGDNDDAGGSSSHDIELSEEPDPDGWIARPITRDAARGCHFHDALDTLLRQAFDRHTWSFEYLCVVYQHRPGLYQDEWEATCLVRRPDNDLRGAEAFLEHYSITKRDTAEAAMQDAARRALSQYSSLFSGDIPSQGPGYHNYPRRSTDSARGVIVSSVGEGNPRLNNMVNLAAVLNIELDHALDELGKVRAEVAKLRAECAARHYLDGGSPAPVGIQHPYRSPPRGRFDYGTPDCKTRIDLDP

SEQ ID NO: 81837 - protein, 88 aa, Zea mays
  Coding DNA Sequence Number=SeqID_38462
MAPDLAPEPALEDLPAPVLEGKPRGLYPSRDLRRGLPFQLWWVEVRSLHDDSRGSLEDMVAGVTWPSILPPGWTVEWDPASAEEEHEE

SEQ ID NO: 81838 - protein, 308 aa, Zea mays
  Coding DNA Sequence Number=SeqID_38463
  Homolog annotation: Hit_ID=A2YGZ2; Match level="QueryCoverage=24%, HitCoverage=95%, E-value=8e-14, Identity=60%"; Hit description =Putative uncharacterized protein
MASASVGGTGGGFGVASLPWEAADVASQFIDPVAIRDPYANPALEFCLKLINFRFKILDRIITPTTAILVSWGKLMTWHTNWAKKGFAPIPAVTEPPKSLGPPTVVLVQRTSDNPVGAPESLDKFGRSHRRLRWHARSRRTRDVGKLNRLVTPSDVGKINRMVIPKQLLADPTPFSPNSQRAMQAKKLTLLQTMAATGVFSAISFWYPLNLPPPEDSRWYGFMFGRESARRELGGIIDDLRSNKPTNTPAGPDAHSKPWWGMVFCCSSFAILNLNVVKLVLWILLGCRRKNKPWSYQFFPFFHNVYTT

SEQ ID NO: 81839 - protein, 203 aa, Zea mays
  Coding DNA Sequence Number=SeqID_38464
  Gene Ontology: Mol. function=DNA binding; Cellular component=nucleus; Biological process=regulation of transcription
  Homolog annotation: Hit_ID=Q8RUX5; Match level="QueryCoverage=95%, HitCoverage=73%, E-value=2e-29, Identity=41%"; Hit description=One repeat myb transcriptional factor
MDMDPRFNVDWSANEIEMVRSLIACHGASNSTNDDIVDELQAMFPGKDKRQVTDLYVELVVEMINSGAEMSSNQLLLNSGGVHSRTMDGYLADEMKAKRMLLEEQRRRKLVVVPRQDNQQRAGRNFLRGLRVYMCGNWKNISKDFVTTKTPVQVSSHAQKYFRRQESTTRKQRYNINDVGLYDVEPWEEQQQHNSSIVASVTS

SEQ ID NO: 81840 - protein, 121 aa, Zea mays
  Coding DNA Sequence Number=SeqID_38465
  Gene Ontology: Cellular component=small subunit processome; Biological process=rRNA processing
  Homolog annotation: Hit_ID=Q8S1Z1; Match level="QueryCoverage=79%, HitCoverage=51%, E-value=5e-29, Identity=60%"; Hit description =Probable U3 small nucleolar RNA-associated protein 11
MADRRIITWEFWKDAIRSKSGEHGVKLKEKPEFTNPDEFYFKMINSRTVGGIHRPKPEDNKYTEEELLLLKNKDMGYILQSIQCEKRWLFYFREEAKEIQSRIGQSNKMRDLDNIPSRTKK

SEQ ID NO: 81841 - protein, 48 aa, Zea mays
  Coding DNA Sequence Number=SeqID_38466
MRINSQPLKVLLTQGSVIEPIVVVRGNEMVLVARQGKWEVAAHPPSLS

SEQ ID NO: 81842 - protein, 74 aa, Zea mays
  Coding DNA Sequence Number=SeqID_38467
  Gene Ontology: Mol. function=kinase activity
  Homolog annotation: Hit_ID=Q6QP54; Match level="QueryCoverage=97%, HitCoverage=23%, E-value=2e-15, Identity=65%"; Hit description =Putative kinase
MGHRSCSLWPESARGRVMMAPPVDVAGLRPRLGDVEAHRKPRSSLSSVAEVESEPTGSGETRVRRLRPGAESEP

SEQ ID NO: 81843 - protein, 46 aa, Zea mays
  Coding DNA Sequence Number=SeqID_38468
MALVDVPDGGTSAGRGADDGPSATMEDEAERSPGEEDDEERSPDEV

SEQ ID NO: 81844 - protein, 201 aa, Zea mays
  Coding DNA Sequence Number=SeqID_38469
MATPARGKKRLVVDVDLELDSEVEVASAFSRLSVSVVAKRTGDGCGFEHSTGKQRTTSKEWTSGKELTCAATSELTAGVNHCSAPRSVSITRFETVRSDLAEAITKMRVVGKELKDLAGDEIMDSPDTAKEVSVNFAMWRVYELAQSLEDEAQRLEDLEAGPSPPLSEWFNNQFAEDEHMGGGEWALDDVSSEELSDRQMK

SEQ ID NO: 81845 - protein, 65 aa, Zea mays
  Coding DNA Sequence Number=SeqID_38470
MKANSHHQPNQGGTCKNYAISTNTQLDLTGLTALAYNAPLTPAAAVQWPHLYPPYLEWETQSQVV

SEQ ID NO: 81846 - protein, 184 aa, Zea mays
  Coding DNA Sequence Number=SeqID_38471
MATTGPHTARSRLGKWGNKEGGGEFTSAWMRWGRMRSTGTIVEGGGPARTGQRLRWAGYRATQNRCAGRLVTGRPVEDGGEGEPFGGEEGPAERGWPCAKGRDEQVFWKPLWNDRDVGRVGAMRFASWVESWGRRIGGGRLGASVRWAPTIACARVGCWRGMARDGLRVACWGAGLARLLLPGP

SEQ ID NO: 81847 - protein, 16 aa, Zea mays
  Coding DNA Sequence Number=SeqID_38472
MAPPWVQPCRLRRKFI

SEQ ID NO: 81848 - protein, 137 aa, Zea mays
  Coding DNA Sequence Number=SeqID_38473
MRWSLQQWGRPKPLTQATRPPSLQPSYTKGAIPGSVPGTDYHRQVLERNEARAMAHRLLPGLLVGRAHVCALETLEISRAAGRRLMKPCLCTSNDFPSSAQSYPTSPTQMSSVSQPNQIIGPTYTNPCPQGLRGICK

SEQ ID NO: 81849 - protein, 148 aa, Zea mays
  Coding DNA Sequence Number=SeqID_38474
MDGRGSAGSERAQWHLGGRSRAPSLGWSRCKERLAAMEGAWMGREMVGRCSTVGKWERLSRGGALAIEEWSSFLGKKEGVEGGGHRSFCPAQGKLGRRAPWMAERRAAARLGRRQGEGVVAARENRVVGQIHNRSCPSSRTLLSTTSF

SEQ ID NO: 81850 - protein, 212 aa, Zea mays
  Coding DNA Sequence Number=SeqID_38475
MGCPQGSAFRRTGKFIKHYKCRKNSEDSGVLTTGFDDGRQGLRRPGEARHGDVGAAWIDDEAALAELEQVVALWFSLRATSTVSARRGVVVGFLMWCGVREQQGCGCMGRCKESDVEITLWIHSATTRSGAAQMEQRAGAKVDDVVPDIVLHTDISTNTEKERAGCCTDGGEGSVCPSLGGTRAPLGFSGWCAAGNGVSGKGRKGCCSWVPS

SEQ ID NO: 81851 - protein, 201 aa, Zea mays
  Coding DNA Sequence Number=SeqID_38476
MQYNGSSSLISCEKQTIRIEFLSLQVTALVPTITGMGDHVSGRVRGKVHCQVQSDPLKQARVLDLGLPPEQLLAPARGLTRVLGSSLSKLHGLTRKLSEGLDRTEEDGKGAGHGGCSRAALAGRGEVAGAKGGLGEVRRGTEEATGKAAEHWDGLYSRGVGVVTGGRGRAGVRARACSKRPGCQTAPNTWELASAMVQRQI

SEQ ID NO: 81852 - protein, 120 aa, Zea mays
  Coding DNA Sequence Number=SeqID_38477
MRVLSSSLSKLHGLTRKLSEGLDRTEEDEKGAGHSGSSRAGRGEVAGAKGGLGEVRHGTEEATRKAAEHWDGLYSRGVGVVTGGRGRAGVNMWGLCSKVMKYITTFIFGPSHDHRVYMAF

SEQ ID NO: 81853 - protein, 65 aa, Zea mays
  Coding DNA Sequence Number=SeqID_38478
MVSHSGYGGYKCGHCTTAVGVSEALYAKAIGSLEDTVAGVTWPSILPPDWTVEWDPTSAEEEHEE

SEQ ID NO: 81854 - protein, 219 aa, Zea mays
  Coding DNA Sequence Number=SeqID_38479
  Subcellular localization annotation: CTP_CleavageSite=75; ConfidenceScore=5.04e-01
MAAPPTTRPVALTPRRDRRRFWQEQRATLRLRRNNRAKKGWPPEGFNSRLRSRGPYTHYWSEVRRPAPRRVPRPPQATRAPRPLLIRGPKAGPRRVHSRLRRRARDDHGYVRYITKARAALPSSLETPCSAPIEGNMALSPLLLAERRRRGVCKKAESVPDRPLALCRGSGAALANPAPAEPLTASTYQPENLGPDRTPGLRPVRMREQPDQTKHCARH

SEQ ID NO: 81855 - protein, 141 aa, Zea mays
  Coding DNA Sequence Number=SeqID_38480
  Subcellular localization annotation: CTP_CleavageSite=44; ConfidenceScore=5.38e-01
MSPVRWVLTVGASDIGATGQSGGAPDRSCSLSGAPSDACSTSARAVGTVPIHCSRCRRPLALGAVAPLGAPDNPVNYSGAASQIPEGGKFRVKFPGALDTVRWHTGQSDAPDQGCLWVVFCSFYLNPFLDFYWFVLNLWHL

SEQ ID NO: 81856 - protein, 105 aa, Zea mays
  Coding DNA Sequence Number=SeqID_38481
MPVDVVGAANQATPELRSSGKESVQGPAAHIGIGLHLGAGIDGAGVQQGDGAAASLRPAGCVGAAVAYNSYIDNYRYRAYSLAPVASYTCAPYGVPTSSSASRLR

SEQ ID NO: 81857 - protein, 285 aa, Zea mays
  Coding DNA Sequence Number=SeqID_38482
  Gene Ontology: Mol. function=kinase activity; Cellular component =nucleus; Biological process=cell division
  Homolog annotation: Hit_ID=Q6K1Z6; Match level="QueryCoverage=69%, HitCoverage=51%, E-value=6e-43, Identity=47%"; Hit description =Putative cyclin-F2-1
  Pfam annotation: Domain name=Cyclin_N; Domain location=90-223; Score =50.5; E_value=5.9e-12; Accession=PF00134.14; Description=Cyclin, N -terminal domain
MCTVPPIVLPCCLAGGDVMKKKTMATHVEVAVFPHVPNNPMYASNTSPRTPAGAVVLAAPLSYGDDATDDVDVVATNTKQQPPQYDYDADIDATLRTMEKETIERPSPDYLSDRQAGEMLMMDRADLVEKMHRFCTSYDLAPGALHRAVSFVDRFLSAKKINRDERQIRLLGAAAVFAVAKYEDRNTMQKINVDGVAMYAGCTRSEAVDQERELLATIGFCLSAPTAYTFVDHFMRHSQEEGTATVRSLAHHLANMALQDYRCVAFLPSVVAASAILLARMVLNC

SEQ ID NO: 81858 - protein, 343 aa, Zea mays
  Coding DNA Sequence Number=SeqID_38483
  Gene Ontology: Mol. function=kinase activity; Cellular component =nucleus; Biological process=cell division
  Homolog annotation: Hit_ID=Q6K1Z6; Match level="QueryCoverage=63%, HitCoverage=57%, E-value=2e-45, Identity=43%"; Hit description =Putative cyclin-F2-1
  Pfam annotation: Domain name=Cyclin_C; Domain location=226-333; Score= 55.7; E_value=1.6e-13; Accession=PF02984.10; Description=Cyclin, C -terminal domain
  Pfam annotation: Domain name=Cyclin_N; Domain location=91-224; Score =49.8; E_value=9.3e-12; Accession=PF00134.14; Description=Cyclin, N -terminal domain
  Pfam module annotation: Pfam domain module=Cyclin_C::Cyclin_N; Domain location=226-333::91-224
MCTVPPIVLPCCLAGGDVMKKKKTMATHVEVAVFPHVPNNPMYASNTSPRTPAGAVVLAAPLSYDDDATDDVDVVATNTKQQPPQYDYDADIDATLRTMEKETIERPSPDYLSDRQAGEMLMMDRADLVEKMHRFCTSYDLAPGALHRAVSFVDRFLSAKKISRDERQIRLLSAAAVFAVAKYEDRNTMQKINVDGVAMYAGCTRSEAVDQERELLATIGFRLSGPTAYTFVDHFMRHNQEEGTATVRSLAHHLANMALQDYRCVAFLPSAVAASAILLARMVLNCWTETPVAAAGYTLEELSGCIEAICDMHEHQRVWPGCAQMMRHWEISAQFSYLLPPLT

SEQ ID NO: 81859 - protein, 191 aa, Zea mays
  Coding DNA Sequence Number=SeqID_38484
  Homolog annotation: Hit_ID=Q2HW33; Match level="QueryCoverage=50%, HitCoverage=26%, E-value=3e-08, Identity=40%"; Hit description =Protein phosphatase 2C-like
MYYLADEPDVHFVWQSNQESSSRALDKYYIKDCGVISAQEVTQRRTNSNDQFIILAIVGTNDFLFLLSFPVDMPVDVVGAANQATPELRSSGKESVQGPAAHIGIGLHLGAGIDGAGVQQGDGAAASLRPAGCVGAAVACERRFLSTRCSTPAPVVCLEVRGRLLPWRHVRGCWVCYLRLVEKQVFWEEIS

SEQ ID NO: 81860 - protein, 172 aa, Zea mays
  Coding DNA Sequence Number=SeqID_38485
MYYLADEPDVHFVWQSNQESSSRALDDYYIKDCGVISAQETNDFLFLLSFPVDMPVDVVGAANQATPELRSSGKESVQGPAAHIGIGLHLGAGIDGAGVQQGDGAAASLRPAGCVGAAVACERRFLSTRCSNPAPVVCLEVRGRLLPWRHVRGCWVCYLRLVEKQVCWAEIS

SEQ ID NO: 81861 - protein, 86 aa, Zea mays
  Coding DNA Sequence Number=SeqID_38486
  Homolog annotation: Hit_ID=Q7XBD3; Match level="QueryCoverage=30%, HitCoverage=5%, E-value=7e-07, Identity=96%"; Hit description=Zeon1 gag protein
MDEYIRADNDFRQRREEAYRFSEMTRAKLPPTVRATAQRSRALLHFRPGQRVKGRAAMQAACNRTQGGAPYRLRCIQHGGPDPHVM

SEQ ID NO: 81862 - protein, 75 aa, Zea mays
  Coding DNA Sequence Number=SeqID_38487
  Subcellular localization annotation: CTP_CleavageSite=48; ConfidenceScore=5.04e-01
MQAACNRTQGGAPYRLRCIQHGGPDPHVMTGGTFGRRSRRRFTSAIMTASKKGSEKGILRKGSFSAKEAGPKPPY

SEQ ID NO: 81863 - protein, 101 aa, Zea mays
  Coding DNA Sequence Number=SeqID_38488
MQAACNRTQGAHPIDFDASSMEAQTHTSCNRRTGYYMQETAPPLTPVPRLLDCETSTATRGDPAHDPTVPTEHIGHGSGSEKGIIRKGSFSAKEAGPKPPY

SEQ ID NO: 81864 - protein, 48 aa, Zea mays
  Coding DNA Sequence Number=SeqID_38489
MAHCYTSYCTPGPSPYAYKRKVQGSLTKSINVNISTSSANRNMLNGWM

SEQ ID NO: 81865 - protein, 201 aa, Zea mays
  Coding DNA Sequence Number=SeqID_38490
  Homolog annotation: Hit_ID=Q2HW33; Match level="QueryCoverage=35%, HitCoverage=21%, E-value=2e-08, Identity=48%"; Hit description =Protein phosphatase 2C-like
MYYLADEPDVHFVWQSNQESSSRALDKYYIKDCGVISAQEVTQRRTNSNDQFVILAIVGTNDFGLGSSEFVDGSLTRGTEQEWVPHVVGAANQATPELRSSGKESVQGPAAHIGIGLHLGAGIDGAGVQQGDGAAASLRPAGCVGAAVACERRFLSTRCSNPAPVVCLEVRGRLLPWRHVRGCWVCYLRLVEKQVCWAEIS

SEQ ID NO: 81866 - protein, 284 aa, Zea mays
  Coding DNA Sequence Number=SeqID_38491
  Gene Ontology: Mol. function=kinase activity; Cellular component =nucleus; Biological process=cell division
  Homolog annotation: Hit_ID=Q6K1Z6; Match level="QueryCoverage=69%, HitCoverage=51%, E-value=6e-42, Identity=46%"; Hit description =Putative cyclin-F2-1
  Pfam annotation: Domain name=Cyclin_N; Domain location=90-222; Score =47.3; E_value=5.5e-11; Accession=PF00134.14; Description=Cyclin, N -terminal domain
MCTVPPIVLPCCLAGGDVMKKKTMATHVEVAVFPHVPNNPMYASNTSPRTPAGAVVLAAPLSYGDDATDDVDVVATNTKQQPPQYDYDADIDATLRTMEKETIERPSPDYLSDRQAGEMLMMDRADLVEKMHRFCISYDLAPGALHRAVSFVDRFLSAKKINRDERQIRLLGAAAVFAVAKYEDRNTMQKINVDGVMYAGCTRSEAVDQERELLATIGFCLSAPTAYTFVDHFMRHSQEEGTATVRSLAHHLANMALQDYRCVAFLPSVVAASAILLARMVLNC

SEQ ID NO: 81867 - protein, 99 aa, Zea mays
  Coding DNA Sequence Number=SeqID_38492
MELADDDGAVKRIRLNYVAYAQQLVLDQRAACDEVEDECGATDEPRVHQKNRAGRELRAGTRQPQQGSSGLGRWGNSTAGVAVWTEQREKRLGTRGPSR

SEQ ID NO: 81868 - protein, 192 aa, Zea mays
  Coding DNA Sequence Number=SeqID_38493
  Subcellular localization annotation: CTP_CleavageSite=33; ConfidenceScore=5.50e-01
MSSLKHSSYSKNSKNTLVLYSAYNFPGQTKTIHSSLFSPTVNSTILNHRCEFSKENVFQNGYDEGLSPLSPLSGMIRDSLVWEGLKSLDPNLHGLCPRVMMVREHREDKEGNVLSWFGHGGGLVPFGITAKTNDFLFLLSFPMDMPVDVAIVTNQATPGRSPSKGRRRTSASAFISVRALMAQEFNKATTWL

SEQ ID NO: 81869 - protein, 82 aa, Zea mays
  Coding DNA Sequence Number=SeqID_38494
MACRVGRERESDRAPVWILNERVMVGLGSLVDGELRCLRCRRWAEKDLVATRISHPCRCSAAGPLVPWSENISILTIGYFLT

SEQ ID NO: 81870 - protein, 149 aa, Zea mays
  Coding DNA Sequence Number=SeqID_38495
  Gene Ontology: Mol. function=enzyme inhibitor activity; Cellular component=cell wall; Biological process=cell wall modification
  Homolog annotation: Hit_ID=Q10MP6; Match level="QueryCoverage=71%, HitCoverage=18%, E-value=1e-35, Identity=64%"; Hit description =Pectinesterase family protein, expressed
  Pfam annotation: Domain name=Pectinesterase; Domain location=1-107; Score=-148.0; E_value=2e-10; Accession=PF01095.10; Description =Pectinesterase
MLHNCTIEPHPDFEANAGGKIPTYLARPWKEYSRTLYIQNDIGGFIDPKGCLEWNSDFALETLFYAEADNRGAGTDMSKRAKWGSIKTVTYEEGQKEFTVETLHPGPAVHLQVRGAIHPGIAAAGATRQDTLIDHPWLLASRISNHNWV

SEQ ID NO: 81871 - protein, 492 aa, Zea mays
  Coding DNA Sequence Number=SeqID_38496
  Gene Ontology: Mol. function=D-alanine-D-alanine ligase activity; Cellular component=cell wall; Biological process=peptidoglycan biosynthetic process
  Homolog annotation: Hit_ID=Q7XI67; Match level="QueryCoverage=63%, HitCoverage=32%, E-value=1e-139, Identity=81%"; Hit description =Putative uncharacterized protein P0034A04.101-1
  Pfam annotation: Domain name=Dala_Dala_lig_C; Domain location=228 -396; Score=-96.1; E_value=0.0022; Accession=PF07478.4; Description=D- ala D-ala ligase C-terminus
  Pfam annotation: Domain name=Dala_Dala_lig_N; Domain location=77-196; Score=56.1; E_value=1.2e-13; Accession=PF01820.12; Description=D-ala D-ala ligase N-terminus
  Pfam annotation: Domain name=IQ; Domain location=401-421; Score=24.8; E_value=0.00032; Accession=PF00612.18; Description=IQ calmodulin -binding motif
  Pfam annotation: Domain name=IQ; Domain location=430-450; Score=23.3; E_value=0.00089; Accession=PF00612.18; Description=IQ calmodulin -binding motif
  Pfam module annotation: Pfam domain module=Dala_Dala_lig_C::Dala_Dala_ lig_N::IQ::IQ; Domain location=228-396::77-196::401-421::430-450
  Subcellular localization annotation: CTP_CleavageSite=53; ConfidenceScore=5.50e-01
MLLSRPQTLPLPRARLSSPTLRHLRALAAPLRALVSSPPLGFTSAARGPAPLRAAVSESDREQREAGVEAGEQGRPLRVGLVCGGPSGERGVSLNSARSVLDHIQGEDLVVCCYYIDCAMKAFAISPAQLYSNTPSDFDFKLESLAQEFDSLSDFAEHLATNVDIVFPVIHGKFGEDGGIQELLEKANVPFVGTPSKECQRAFDKHNASLELNAQGFLTVPNFLVEKDKLAKPELEAWFQTVNLNKENGKTIVKPTRAGSSIGVVVAYGVNDAAQKAEEIISEGIDDKVIIEVFIEGGTEFTAIVVDVGIANNSEPVVLLPTEVELQYSNNSDTKEDTIFNYRKKYLPSRQGSFSMTSVADDLRTWHEDLACARADLEQARSVILQLRDLLAAKVKSDQRSAAATRLQAAARGFLARRLVQKVAAAARLQAAACRLQATARGFLARREARQAAVRLQAAVTVLIHSHVDSKNTFGWVALSPLELAAAQAVGP

SEQ ID NO: 81872 - protein, 145 aa, Zea mays
  Coding DNA Sequence Number=SeqID_38497
  Gene Ontology: Mol. function=N-acetyltransferase activity; Cellular component=chromatin; Biological process=metabolic process
  Homolog annotation: Hit_ID=A2YQ80; Match level="QueryCoverage=83%, HitCoverage=19%, E-value=7e-30, Identity=50%"; Hit description =Putative uncharacterized protein
  Pfam annotation: Domain name=PHD; Domain location=74-117; Score=50.2; E_value=7.2e-12; Accession=PF00628.20; Description=PHD-finger
MADSLKESLAELYVINGQYEKALSLYAEDGRSLSLCLVELMRRDDVGAAAANRNRNGSVMRVKEKCSEEEGDSVCSVCIDGGELLLCDKCPSAFHHACVGLQATPEGDWCCPLCRCGVCGGSDLDDDTAEGFTDKTIIYCEQCER

SEQ ID NO: 81873 - protein, 640 aa, Zea mays
  Coding DNA Sequence Number=SeqID_38498
  Gene Ontology: Cellular component=anchored to membrane; Biological process=root hair cell differentiation
  Homolog annotation: Hit_ID=A1DZD9; Match level="QueryCoverage=100%, HitCoverage=100%, E-value=0.0, Identity=95%"; Hit description =Brittle stalk-2-like protein 8
  Pfam annotation: Domain name=Phytochel_synth; Domain location=219 -403; Score=330.5; E_value=3e-96; Accession=PF04833.6; Description =Phytochelatin synthetase-like conserv
MAMLPVVVRMAAMPFIFLVLLAHTASAQPDAGCNGILLTYTLQRRDKIRPHVAAPNSQPYSFSASATVVNAGTRPLRSWALLLTFVHGEILVSVDGAVLTSGAALPYNTTAGDAAGRPTPTSFTGYPQTDLLTPIATAGDPAKTQATVSLVGTLFAGPEPYVPLPSFLSLADPSYTCPPATNATSSPTNLTTCCSGFLPRRTGDLVITYDVLQSYDTTYLALVTLENDALLGRLDAWQLSWRWEHGEFISSMRGAYPREVDTAECLYGPQGQYYKDLDFSKAVLNCDRRPVVHDLPPSRANDTEIGRIDHCCRNGTILPKSMDVARSKSAFQMVVYKMPPDLNRTKLYPPTGFNVTGAASALNPEYACDPPISVSPSEYPDPSGLTSITVAVATWQVVCNITTSPKKPPRCCVSFSSFYNESVVPCRTCACGCPSSAPTCSTTAPAMLLPPQALLMPFDRRASEALEWADQKHLGVPKPMPCGDFCGVSVNWHVATDFTGGWSARLTLFNWDGTDMPDWFTAIVMDKAYDGFEQAYSFNATGVGNSTIFVRGAQGLNFLLGERNMSGVDYPVPGKQQSVFSFTKKKTPGIDIIAGDGFPSKVFFNGDECAMPLRIPSQGTSVVVPMQLCLLVSAFMLLLL

SEQ ID NO: 81874 - protein, 347 aa, Zea mays
  Coding DNA Sequence Number=SeqID_38499
  Gene Ontology: Mol. function=nucleoside-triphosphatase activity; Cellular component=protein complex; Biological process=protein catabolic process
  Homolog annotation: Hit_ID=P46466; Match level="QueryCoverage=100%, HitCoverage=73%, E-value=1e-170, Identity=90%"; Hit description=26S protease regulatory subunit 4 homolog
  Pfam annotation: Domain name=AAA; Domain location=111-315; Score =267.2; E_value=3.3e-77; Accession=PF00004.20; Description=ATPase family associated with various cellular activities (AAA)
  Pfam annotation: Domain name=AAA_2; Domain location=108-256; Score= -40.8; E_value=0.014; Accession=PF07724.5; Description=ATPase family associated with various
  Pfam annotation: Domain name=AAA_5; Domain location=111-261; Score= -15.9; E_value=0.046; Accession=PF07728.5; Description=ATPase family associated with various
  Pfam module annotation: Pfam domain module=AAA::AAA_2::AAA_5; Domain location=111-315::108-256::111-261
SLEEIIDESHAIVSSSVGPEYYVSILSFVDKDQLEPGCSILMHNKVLSVVGILQDEVDPMVSVMKVEKAPLESYADIGGLDSQIQEIKEAVELPLTHPELYEDIGIRPPKGVILYGEPGTGKTLLAKFSNSMYLGSDYLKLFLQAVANSTSATFLRVVGSELIQKYLGDGPKLVRELFRVADELSPSIVFIDEIDAVGTKRYDAHSGGEREIQRTMLELLNQLDGFDSRGDVKVILATNRIESLDPALLRPGRIDRKIEFPLPDIKTRRRIFQIHTSKMTLADDVNLEEFVMTKDEFSGADIKAICTEAGLLALRERRMKVTHADFKKAKEKVMYKKKEGVPDGLYM

SEQ ID NO: 81875 - protein, 385 aa, Zea mays
  Coding DNA Sequence Number=SeqID_38500
  Gene Ontology: Mol. function=P-P-bond-hydrolysis-driven protein transmembrane transporter activity; Cellular component=mitochondrial inner membrane presequence translocase complex; Biological process =intracellular protein transport
  Homolog annotation: Hit_ID=Q69V11; Match level="QueryCoverage=98%, HitCoverage=82%, E-value=1e-165, Identity=75%"; Hit description =Mitochondrial inner membrane translocating protein-like protein
  Pfam annotation: Domain name=Tim44; Domain location=225-378; Score =182.1; E_value=1.4e-51; Accession=PF04280.6; Description =Mitochondrial import inner membrane, translocase subunit TIM44
MFFCRTKKTTETIYKRVDDVWSEAEETSKKVTANIKEKMFAAKEEVKESFGVGKEESTSCRDGLPEGSKHEKTEASSHSDGTTEDATDSHTLFTKLKSTISSASPVVSGAFAKLKDTKVSTLAKQGYEIVKDELSSNSSRKKKHQARHASAKVEKSTRTDLVLTPTKKTVLGEKWEEFKNKIRGHPVYRRVDEYTKPVVTKGQEHITLGLQSTNLNESLLEETSAAVTFREIRQRDPSFSLSDFVADVQEMIKPVLTAYSKGDAETLKNYCTKEVIERCKGEREAYASQGIFFDHKILHISEADVLETKMFGSSPIIILRFQTQQIYCVRDREGQVTEGGQDTIQTVFYSWAMQLMDSDEVPEEESYYPVWRLREMQQAGIKALI

SEQ ID NO: 81876 - protein, 26 aa, Zea mays
  Coding DNA Sequence Number=SeqID_38501
MWDVLEAKYRVPNIDSREKFLFVDRE

SEQ ID NO: 81877 - protein, 124 aa, Zea mays
  Coding DNA Sequence Number=SeqID_38502
MTRSESRIDEPQALKGVYSLQREVDRRFMRTAGDVHRMHVQSGDVESIWRRKVDEVVESPILLLAGSIPEEDVLRRGGEAPTFWRLPRVGCEGMEEPSPSILPEPRPLLERERRGGGEGTGDSS

SEQ ID NO: 81878 - protein, 316 aa, Zea mays
  Coding DNA Sequence Number=SeqID_38503
PGTGKPENKDDIPTSSFGDGGQTDSKDIVRFKVHVKSVAMIPPIIEVGVKPFLYDIFFKIDNITDEGWNDESINLGKRASVDRQGFSDLSFEKSVKKAKSGDDESGMDDTGKSPLKVSSVHVNVARSQSEHSDSMKIGKSSEGAKGYLDSQGNEDDDYNESEDDLLDSQDLEEFIKDEELIPFPPQEKRKMNTNVSVSEDVGKNVGVKKGGSMEGELAEGVRRSSRLESNDEMKIADKAAARAMAKDAFINKDILDSDMDNNSHNESVDNALTDLDDVMVLRKGREIGLFSSSSPHQGIDGEWSDKSGIIVYRWND

SEQ ID NO: 81879 - protein, 433 aa, Zea mays
  Coding DNA Sequence Number=SeqID_38504
MGSTCIAFVLLLLEERDPAGVGALQTSLGFKDFHHAARLQSLTNASRMFIIRAGEGAHRVGACLCVGWRPASSSGVRGEGHPPALRRRRPPAMRGKANCCCQDMVQLSVFHPGDGGRLHRGVAQHVVRREGGTRVLGRSRSRSCGESGSEDMPVHFGAATARWCDVGGQVAAVVGAEVVVAIGEATSAEAVASANETIRATCAPDLRLFGFNGWFSSPVRGPVLPPETEVVVALLVRWSPVIHLEFVIPQALCLWPLYDELKPEAAMSAWIEVKSARKEASSAREHVASQAEEVQQRRLELGQVVRERDQPRSHAAEAMSRAEVLRGQLAEATEWPVEASARARTLVENLAVRAQTRFRRPPSRWRSFRPCCCLRPGQIPPRVLLLPLPMSEPAGTVCLKHATPLSKQSKSTKDVLAKDFSEENFDAEGVPPF

SEQ ID NO: 81880 - protein, 161 aa, Zea mays
  Coding DNA Sequence Number=SeqID_38505
  Homolog annotation: Hit_ID=Q6J9V9; Match level="QueryCoverage=57%, HitCoverage=31%, E-value=1e-25, Identity=68%"; Hit description =Putative uncharacterized protein
MQEACNRTTVVHPFGFVVSGGPAWRPGPTRHATDATGKRHLWQVKRASLHLRHDDRVKKGSRKGVFRERTLLSEGNGPPSPPTDQGFEGWPLGRVRQLPQSTRAPRPLLIRGSKAGPSEGFDSRPRARRVRDDSGYVRYMCRKRVTPKRGGELGLLKLSLN

SEQ ID NO: 81881 - protein, 519 aa, Zea mays
  Coding DNA Sequence Number=SeqID_38506
  Subcellular localization annotation: CTP_CleavageSite=49; ConfidenceScore=5.28e-01
MVAFQGVTLLLKAPLPTCVLSHRGLSLLQHAPRSSPYDTGAGSHASCKLAQGRRSQTAARGARNCPAVTSIPPLSPRPTGERADRHAGGMQPHQAGGSSGHVVSQAHVPSWDSKRTLSHGVKTARPCSVPRTARARATAAPRTTRPVALTPRRDRRHLWQEKRATLHLRHNDRVKKVRHVIRFRILFLFLFLSLTTGTGKGDSLKGILLREGNGPRAPLLIRGSKAGPSEGFNSRLRALGLHAHYWSEVRRPAPRKGSTAASGHSGSAPTTDQGGNDLVTESHQREASSPRTPSKGDRVRQITRGSLETPCSAPSKGNMALPPSLRKGDAGAAARVALTAVPLNRVRLTAAKPGLRRHKKLRLARPRARTRARPRKTTNSASPDLGFGLGLGPGRRRTPPRPTQSSDSGSAPEDDELRLARPRARTWPRPRKTTNSASPDPGLGLGLGPGRRRTPPRPTQGSDSTSASADGLRLARPKGSDSTSTSEDRLDLDLGGASASPNPGLEPTTSQEGPSLPYP

SEQ ID NO: 81882 - protein, 268 aa, Zea mays
  Coding DNA Sequence Number=SeqID_38507
MVGRSEPGCNLGPALSFKDLHHPGWGGGRAEPELYLPRGFMGHLLPQDSRERALTGLAGGSDFDNAGLVGGEHRQLQRVGLTGSAGSGSAPGAPSRRKSGCRAARTGGPPKMSRAARAAFVFWGCPAFAPVRRLCAEVGAPLVREDPSGDLLVGRRLLSSVLRWRRLKKSSSPMGSPPPSVLRASGSLALIAYPRPSSGDVGEGIVAAAFALRPSLLQFGHLERRSLSLLPERAAVGDLEPCRPAGPPMWGVVRTRGGGTGVPFVMAP

SEQ ID NO: 81883 - protein, 130 aa, Zea mays
  Coding DNA Sequence Number=SeqID_38508
  Subcellular localization annotation: CTP_CleavageSite=23; ConfidenceScore=5.27e-01
MRRRSFLSFSLSFSLLFFLSLPRCGPTPAGPAAPGAPPWAQLAHAAPPPPLFPQTLSLSLSFSLIFSPPTLSRRRPYPCPKPPPPPAGRPSPSLPRRGLERFLECLSVRTCSMDDRPGKQCNHKGGMGCP

SEQ ID NO: 81884 - protein, 87 aa, Zea mays
  Coding DNA Sequence Number=SeqID_38509
  Homolog annotation: Hit_ID=Q5GAU8; Match level="QueryCoverage=36%, HitCoverage=23%, E-value=3e-10, Identity=90%"; Hit description =Putative uncharacterized protein
MTDAEKEVATERRMDSPPRCDCGDRAVIDEDYDKQFCCPNIDYPYGWRKCRFKEWLYGPLSHWPEPEETRKCSWESYDDKGERLEAA

SEQ ID NO: 81885 - protein, 227 aa, Zea mays
  Coding DNA Sequence Number=SeqID_38510
  Gene Ontology: Mol. function=nucleic acid binding
  Homolog annotation: Hit_ID=Q5NKQ1; Match level="QueryCoverage=100%, HitCoverage=44%, E-value=8e-33, Identity=61%"; Hit description =Putative uncharacterized protein 9C20.4a
MKLLHSRKMKEAKEALGCMGQKDTTTLYMFEIRVAGAYTRAVITRFQETVKYATAYRIDRDTEGDEHDWVPDIGTGESCGTSACDDIQVEAYEIDEMAIDNLRKLDDGNEKLEFHMEGVNLARPDKAKPKGRTIKSSEQQVLKLGAKGAKKMSRKCQKCGIADGHNSRTCLTVEDNRVRLANLSGRKRGRPPGSRNKIIAAAPQWNETSTSKKRTVDVGDDDSSGRE

SEQ ID NO: 81886 - protein, 84 aa, Zea mays
  Coding DNA Sequence Number=SeqID_38511
MTNSGGERYRGRSGRWPDSRRRRLVGGARAELGRSAAGRSAELEGGARGGRRGPGPGRPCGGQPELGQAAAATRRQTRGQAAAA

SEQ ID NO: 81887 - protein, 434 aa, Zea mays
  Coding DNA Sequence Number=SeqID_38512
  Gene Ontology: Mol. function=protein serine/threonine kinase activity; Cellular component=cytoplasm; Biological process=protein amino acid phosphorylation
  Homolog annotation: Hit_ID=A2YWT2; Match level="QueryCoverage=98%, HitCoverage=98%, E-value=1e-140, Identity=62%"; Hit description =Putative uncharacterized protein
  Pfam annotation: Domain name=Pkinase; Domain location=8-375; Score =195.2; E_value=1.6e-55; Accession=PF00069.16; Description=Protein kinase domain
  Pfam annotation: Domain name=Pkinase_Tyr; Domain location=8-369; Score=-44.9; E_value=1.2e-09; Accession=PF07714.8; Description =Protein tyrosine kinase
  Pfam module annotation: Pfam domain module=Pkinase::Pkinase_Tyr; Domain location=8-375::8-369
MEIDLHAVRAVRVLGRGAMGTVFLAVNGAGGEAYALKVFDKRSPAVASRPSAGTDAARRARWEVSVLSRLAHPHLPSLLGCAETPDLLAWALPYCPGGDLNELRHAQPDRVFSPAAIRFYVAEVVSALAELHAAGIAYRDLKPENVLLRADGHVTLTDFDLSRQLPPRSPSAASTSTSSSCSATSSPPPQAQSHGRSQHRHVKNIFKRSESAVTASTSGQEEPRNLAWYLSKRIDGGADQIKKAKSARVSPMDRGKKLSSFCSAAAAGERSFSFVGTEEYVAPEVVRGDGHEFAVDWWALGVLVYEMSHGRTPFRGRGRKETFRNVLLREPEFTADARRRWPELTDLIARLLEKDPARRLGFAGGADEVRAHPFFAGVAWDLLGEVSRPPYIPAPADDTVSCEGFSVVEYFDRLHQPPLSPAEYSPEEELLPEF

SEQ ID NO: 81888 - protein, 103 aa, Zea mays
  Coding DNA Sequence Number=SeqID_38513
MAKLGELVDNNKDAVPRARTRLSGVPAEQRLLRANGRLQNALNALQCAPESEQRLMAHRTVNSACPVHHRTVRCPRRQKLQRSESNSQVTWQAHRTVRCAMRQ

SEQ ID NO: 81889 - protein, 321 aa, Zea mays
  Coding DNA Sequence Number=SeqID_38514
MAEGCLESRHRFHSREGATLAQVADDDHQFDGGEKQAGLRPLPRPQLQGSSSSLLGRRAGQVGACLRVGRGPLLPSVIGGEGRSPSVELATALCLAPRSERLWRCFRCHLPPLGRSAAARLPHGCRLRRVRADHVQVLPAPSAAQHVVRREGGTRVLGRSRSRSRGENGSEDLPVRFGATIARWCDIGGQVAAVVGAEVVAAREGFADETVGATCGRTSGSSALTACPRPSCGDVGEGLPTAAFALRSSLLLFSHPRRRSLSLLVQRSPTSHLEFVVPQTLWCGGSSYPQEWNRSSVCNGTLSVGVCSLWLSRPEHLGIWA

SEQ ID NO: 81890 - protein, 135 aa, Zea mays
  Coding DNA Sequence Number=SeqID_38515
  Subcellular localization annotation: CTP_CleavageSite=8; ConfidenceScore=5.33e-01
MALPPFLLAERRRRGENNVARSAPTVVPPARVRLTTTKFSLRRNRKLRLARPQGSASASTSEGGIRLARPQGSAPTSASEGGLRLARPQGSASTSTSGGKASSPDPSLGLKRSLRLARPWAWTDRATGDASLPYP

SEQ ID NO: 81891 - protein, 261 aa, Zea mays
  Coding DNA Sequence Number=SeqID_38516
  Gene Ontology: Mol. function=drug transporter activity; Cellular component=membrane; Biological process=multidrug transport
  Homolog annotation: Hit_ID=Q5GAV3; Match level="QueryCoverage=71%, HitCoverage=14%, E-value=1e-30, Identity=45%"; Hit description =Putative integral membrane protein
MASPPIDSALTLALEHQTRSLLFELDKQLSAMDVKWESCVRELESQVSVSSHRLDSITTDLHVDVEFQFSSAADHLHQIEADVKTRVAALQSTMHVFELWRPRVEASVESLHSSIDSIRAEVSKMGIRWSTNARADGSGQPGLLDAHRSGSGRVPAPEEPPNRPRFGSCFENYYRDSGHVHPGADAHYPVTGMWSSPHSPSFSFNAHGGIVREAAESSRRPDPVRGDSSYAGRSSWKLVVPQSARWDQPRSLAPESSKTPT

SEQ ID NO: 81892 - protein, 152 aa, Zea mays
  Coding DNA Sequence Number=SeqID_38517
MGKIKKGGSSSHHSGDKRKCEPTSPSEDFGDSEYSEEEFSSESEGSPVRASPPASSDDSDDSQGLAAEVWTYIRAVDRDGLEGSDESEYSSDEKNCSDSSEDGGADGNGEDDDNDRGDGDSGEGDGKGGDGGGKGGSGNGGDGSKGSNKASG

SEQ ID NO: 81893 - protein, 191 aa, Zea mays
  Coding DNA Sequence Number=SeqID_38518
MARTRKTVRKSTGPFGVPQHELAPRHEGSSSGSNAPIEDLEARVEQLQSELRHRNRAREQDNHRIAELSDDVSRLQYEISEQDSAIDWAINSCLIAWDRKAKALAHVAELSAALESLQVYCNTLHEEVNVLYALLHPDVPSDVAAMGAGPSGTANGGPDGELDLFRPPPSMNLADERSPAAGNEATMNDED

SEQ ID NO: 81894 - protein, 139 aa, Zea mays
  Coding DNA Sequence Number=SeqID_38519
MEFVQRSLWSGSLPSSFADPQGPGGTIFLLCSKMTERWNGESSRQLSGGTIYRQALWTESSTSFWHSLRETRQCYNTDEKKRDRFRRGLSTKLRDRLNNVRSNSYNELVNMAISQEDCITACQAEKKRKTPVAGPSAQP

SEQ ID NO: 81895 - protein, 133 aa, Zea mays
  Coding DNA Sequence Number=SeqID_38520
MAEWSCICDGMRADGPVHWIATRGLGCDSFHGDEAWIAFGVQRIWAGHPRCMRRTIGRGGRARGSSTMGFLRAGLLRGVDSSKGMCFLLWQRQDFSFHGRLRLGPCRCRGSGGRTRMGKKGDTNMWVVCAVRR

SEQ ID NO: 81896 - protein, 31 aa, Zea mays
  Coding DNA Sequence Number=SeqID_38521
MEKCKPIKTPMPTNGHLDLDEGGCGSWELKD

SEQ ID NO: 81897 - protein, 158 aa, Zea mays
  Coding DNA Sequence Number=SeqID_38522
MSTNCFLLCINQQWGKIARSMGQSSDDYKVYTSTSRRRHGNSLGKLALYTAIEGVQTSTVEFTSFFGPRIKVEIGYPDYVLKEGEGGTIVFGMSSLLIFSPQELDYLICGQQEIWELEELRNDIVDLKEMYRDQVDLLVTQDPDRVTIERSTRILFHT

SEQ ID NO: 81898 - protein, 138 aa, Zea mays
  Coding DNA Sequence Number=SeqID_38523
MTAVIASLSTNRQISGKWGSVDDELPMHGASHVPGQGLTGVGPPAGYPRLVVGYRPTRWAVQWLGARGLEGACVPWRRGGLGCDGRAWDGPRWPARLGKGARWGGESMIEGASVTRPEVAQRLSGRWPLKTSPTVSRG

SEQ ID NO: 81899 - protein, 153 aa, Zea mays
  Coding DNA Sequence Number=SeqID_38524
MARVACTLRGKRLDGGVSVLSVGVKKQQIFVASVPRWCLKKKIKTEATGGKAPAGLSEVRWTRTTVGGPNDFGSSITVHADVVVTAEANEFLSCELCVVVCDDGVRDSKAMDDVCEESHHMLGLDVAEGSDLDALGKFVDGDQQVCEAPRCLL

SEQ ID NO: 81900 - protein, 164 aa, Zea mays
  Coding DNA Sequence Number=SeqID_38525
MWKFMYCIRDCTLTYLQTLSEWELDLLEQRTPSRTRGQDGAGTSRGRETTPNPPPVPPTLAEAIAALVNATADNTHFLREMAGQQLQQQGGRAHPQGPREASYLDFSEMRPPLFVKAEDPLEADKWIRVIEQIFGLICLLVIKLPGTSLNWHFGSTTFQKECFI

SEQ ID NO: 81901 - protein, 264 aa, Zea mays
  Coding DNA Sequence Number=SeqID_38526
MTSHGSSDDGNALSHTDGLAREGFPRILWEVLQGAGYTTPPQYAVQQFEKHRVPHCRVRMTLEPHPLQPGWRSLDSESFGYRAEDTIEAIALHGLTTFCRFHPLELSTHPIGLFPAEREDDPMWKDRVEHAKDIWAIYPGQTAHLTVRCMNALYRLQVMRGEAMSHLMALLEATKITLDNREELVVDLSTKMVEKDLQVEQLSNEIQELEELVGTRENTIEEIQDMEANEDVDIEGGEEPASSVDTAGSGRPPSPESSVASFAH

SEQ ID NO: 81902 - protein, 121 aa, Zea mays
  Coding DNA Sequence Number=SeqID_38527
  Subcellular localization annotation: CTP_CleavageSite=77; ConfidenceScore=5.03e-01
MYDSTAGMAGIARSTCAGGCPRRRRVCQPNHGDLVQSKGTWITRSTHSGGVVNSGDRGLASPTKQASIPRSRSFTEVCSLVSEGWTGSGKAGLAGLRRQGLGWPRTRRARAIDGELSSGEV

SEQ ID NO: 81903 - protein, 61 aa, Zea mays
  Coding DNA Sequence Number=SeqID_38528
MGKPVPSLLMLLLSRVTALVPTITGMGDHVSGRVRGKVCGQVHSSIRLTDLPYFSDLITLC

SEQ ID NO: 81904 - protein, 436 aa, Zea mays
  Coding DNA Sequence Number=SeqID_38529
MERDRQDAAQKHRTVVRIADPMHEAKKAQGSAKAADSGGSKPVSAAKPAAPGHGKVSAGAKSAAAGGSKPPPGGLVKGRRPLSPTRRIADFGTDINVDDYLVGSGEGQLTVVPPPVVTTSPTAVVGAKGAARDPWATFCASGEILSAAATKDVAGSMSQRLREASQQLSQQLKQAADFANLIASGALTADVAAEVERLRAQHADAVREKSAVESKNRRLSEKVAAMEAEKTDLRRQLAEERREANKAIADAQATQAEAKEKLLVLPAIVTGFMSFASLVTCEGAMNALSREGCRHYEVFDQADENFEREIFKVEDPMVKQSAGALFDRMWSPHGREAVRERSDRAIEQMAHAEDVEDLVGLDDALPEAAEVDPVPPSDAGEGPSATPAPAAAGEDPAPAPAPTGEDALKVVAESALSRQPRTPQPRPGLCRWLNRC

SEQ ID NO: 81905 - protein, 216 aa, Zea mays
  Coding DNA Sequence Number=SeqID_38530
  Gene Ontology: Mol. function=polynucleotide adenylyltransferase activity; Cellular component=nucleus; Biological process=RNA 3'-end processing
  Homolog annotation: Hit_ID=Q5G7K0; Match level="QueryCoverage=73%, HitCoverage=22%, E-value=1e-56, Identity=68%"; Hit description =Putative polynucleotide adenylyltransferase
  Pfam annotation: Domain name=PAP_central; Domain location=64-209; Score=-135.6; E_value=0.0043; Accession=PF04928.8; Description =Poly(A) polymerase central domain
MHASLTAKGYEVVSNGIDNHLVSVNLKNKEAKGTRAGLMGTTILAMLSVRRVCEGCGMSKVKNNSGYHGVTEPISLSGPTEKYLMQTAEVEKYLSDARLDERQDEAILREEVLGKLDQTVKAWIKKATRISGYGEQFVHEANAKIFTFGSYRLGWLKGTALNMEYFFRWLHDILAEMPEVSELHPVPDAHVPVLGFKINGVSIDLLYANLAHAVIP

SEQ ID NO: 81906 - protein, 401 aa, Zea mays
  Coding DNA Sequence Number=SeqID_38531
  Homolog annotation: Hit_ID=A2ZYI1; Match level="QueryCoverage=83%, HitCoverage=93%, E-value=1e-148, Identity=77%"; Hit description =Putative uncharacterized protein
  Subcellular localization annotation: CTP_CleavageSite=20; ConfidenceScore=5.16e-01
MATSRGRQGMARRKTPGATSAKTTSSSRLRVFYRRNFEDTAADNPILYFIDQTMLHLRGLKEPHDTAAVSTKPAKRYPLALWIGILGLIMLVAVYIFSLSLKQNGMLFGLMQTNLIEKEREKPCHDPSIPDTEIPYLHYPMPNTYDRKECACTGVRFFAILSMQRSGSGWVETLLNSHPNISSNGEIFSVKERRSNITAITKTLDRLYNLDWYSSAAKNECTAAVGLKWMLNQGLMKHHQEIVEYFNRRGVSAIFLLRRNLLRRYVSILANAHDSAMKQLNGTHKAHVHSKHEAEILAQYKPTIDKKTLITELKRSDKLAADALVNFKNTRHVVLYYEDVVSNRTMLMDVLDFLRLPKRKLFSRHVKIHTKRLCDHIDNWADVTDFLKGTPFESFLNGSRR

SEQ ID NO: 81907 - protein, 693 aa, Zea mays
  Coding DNA Sequence Number=SeqID_38532
  Gene Ontology: Mol. function=nucleic acid binding
  Homolog annotation: Hit_ID=Q6ZK85; Match level="QueryCoverage=95%, HitCoverage=96%, E-value=0.0, Identity=60%"; Hit description=RNA recognition motif (RRM)-containing protein-like
  Pfam annotation: Domain name=RRM_1; Domain location=528-598; Score =62.8; E_value=1.2e-15; Accession=PF00076.13; Description=RNA recognition motif. (a.k.a. RRM, RBD,
MDEADDDARTFKVGFTAAGEKQFRELVREKLRGFRRGLDDTLLDYVTIMLQNGKRKDQASMELHVFLGDDSAVFVSWLWEHLSLNMHLYVQAQEQTQVVKDDEAPKEVSGKDKSSDMFPRSKCQTHSEHPIESSAATTRKRDKREWKGIGRAGNEKFPLRNVLTDILHGEEKKSQKSNEIRYPSSKQQNGRKRDRDDEPQQAKRDTSSRPMLGGGASRRLLQFAVRDAVKAVQPASTSAEPASKRLRSVVATTSAENMRDRRSEKSQDYLNDRRSERSQDNSSDRRSERTRPMLQVQGAALALRAAAEAAADSTKARSTGSVFKRLGQGNVVKQPSRSREEKRDYADFEPVTTANEHGSDRYVNNEESEEEYRELTMADRVAGMNVDSGSEDDVDRDEGVTRYQTSISHEDTFSSFAEKKTVSAQCSVELETDAIRPSSVNHEEQPVPSLTNTTSKAVSISVDVNMVEPPSYETPKDVHVVEKPYVAPMNSNATSVATNTKELGHAEVQKDSQRSAPSGMSHIYRYKIHLRVVHFAATKDSLSRHFNKFGAVLKVVIVTNAATGQPTGSAYVEFLHKESAERALSLNGTSFMTRILKVVRRSSHEAAHFYGWPGIGRSSLYGRHGRMAYPRAVHPGGSFRGRAPMKAGARSLQWKREPSGTDSSAGPPAGNIGEHTIADIMRTECVKQKSEKT

SEQ ID NO: 81908 - protein, 75 aa, Zea mays
  Coding DNA Sequence Number=SeqID_38533
  Gene Ontology: Mol. function=acyltransferase activity; Biological process=metabolic process
  Homolog annotation: Hit_ID=A3BTD7; Match level="QueryCoverage=69%, HitCoverage=10%, E-value=6e-11, Identity=65%"; Hit description =Putative uncharacterized protein
  Pfam annotation: Domain name=E3_binding; Domain location=3-41; Score =13.1; E_value=0.00093; Accession=PF02817.8; Description=e3 binding domain
MGKKGIANPHAKKLAKQHMVDLAKVTGTRTYDRITLTSIEAAAGIQPKSEPAPGGVHGYYNLVEDKYDILCGPRF

SEQ ID NO: 81909 - protein, 140 aa, Zea mays
  Coding DNA Sequence Number=SeqID_38534
MMMMKIFTSIGIRALVGNAASLGGRVPRNVVVVWRTAIARVEDTVHPLLSGVGGWGWDSQGASIPKIKNKMVSFADPVITAIWPPDVSKGHITAIWPPDVSKGHITTKSSISTGGMDLATQAIITPRDPQTPQNATKLHI

SEQ ID NO: 81910 - protein, 158 aa, Zea mays
  Coding DNA Sequence Number=SeqID_38535
MEENDVLACHAAVDNHGADVGALRKSTSRASKVVVGEVRFVLPGGVGMRGAVDAERGRGFFDRGTNSKIGAAVAHVPRPPSASSVSAALGGIFLAARGLTSGVLVGDVVHLLLIAAVPTGVWLRSPRPRATGLWSVFGFPLRLIFALVEFFGFGVFFE

SEQ ID NO: 81911 - protein, 167 aa, Zea mays
  Coding DNA Sequence Number=SeqID_38536
MAPREDCAAHGDSLPGAVAALPCPCQAPRPADSRGRLSPRQHCATSGNREKAQPLWFVGTATLGPTPRRADSPPRDPRFGSAGNRRGELCQAPRPVDSRGRLLPGQRRATGSSREKARLLWFAGTATLGPTPRLADSSSRGPRFGSAGNRRGELVKGEAHARRPAAR

SEQ ID NO: 81912 - protein, 163 aa, Zea mays
  Coding DNA Sequence Number=SeqID_38537
  Gene Ontology: Mol. function=inositol or phosphatidylinositol kinase activity; Cellular component=mitochondrion; Biological process =cellular iron ion homeostasis
  Homolog annotation: Hit_ID=A2WVS8; Match level="QueryCoverage=100%, HitCoverage=99%, E-value=7e-53, Identity=64%"; Hit description =Putative uncharacterized protein
  Pfam annotation: Domain name=Frataxin_Cyay; Domain location=53-163; Score=136.2; E_value=9e-38; Accession=PF01491.7; Description =Frataxin-like domain
  Subcellular localization annotation: CTP_CleavageSite=41; ConfidenceScore=5.17e-01
MASRKLLVGLTARRQLQSRTQQLFWATSLPEATTSRSLMVAAAMARLSDRLAMQEDEFHKLADETIHDLLEKLEEYGDSIQMDGFDIEYGNQVLTLRLGDLGTYVINKQTPNKQIWLSSPVSGPSRFDWDATANGWIYKRTGVNLVRLLEKEIGELCGTPVEL

SEQ ID NO: 81913 - protein, 110 aa, Zea mays
  Coding DNA Sequence Number=SeqID_38538
MAVEIDVSTAANDSNGPSEILAPGVRYISRPHLEFLISHRRVRCFPTRSYVVLAIDPDIAEVPDLSVSGDNSDLAKDDPCDPTRTSKPEAPMQSLNQIHVVTDLADARSA

SEQ ID NO: 81914 - protein, 50 aa, Zea mays
  Coding DNA Sequence Number=SeqID_38539
MQIIERKCEAQKGAGISSILLHGPESLAQVEGVAPGLGKMVPGLEKVLLV

SEQ ID NO: 81915 - protein, 66 aa, Zea mays
  Coding DNA Sequence Number=SeqID_38540
MGGRPQGYWGRAATLECVPNGPNLIHDPLGQNRVTQHHGQKRQKLSRKLMEVVSWGTLAFTRHMMC

SEQ ID NO: 81916 - protein, 88 aa, Zea mays
  Coding DNA Sequence Number=SeqID_38541
  Subcellular localization annotation: CTP_CleavageSite=49; ConfidenceScore=5.07e-01
MPGPTIALGLADEALCALTLNPAIARCSGRVPSPLVGSSSAIALRLHAVASSWSGSMAGTTTLPQLLEQQAMLQHAFDACFLSGEMPG

SEQ ID NO: 81917 - protein, 196 aa, Zea mays
  Coding DNA Sequence Number=SeqID_38542
  Homolog annotation: Hit_ID=Q10JP7; Match level="QueryCoverage=33%, HitCoverage=5%, E-value=3e-07, Identity=53%"; Hit description =Retrotransposon protein, putative, Ty3-gypsy subclass
MTMLMAPATKTLRNKKVDWGPSNDISNISNKASTSSNLKISLGEEHTLESRTTRLQEGEDDEDITAINTPHQRPPSPFNHGPVKRVCARVWEVNHLEFEKATRQLKLLHLRGFRNYNKCKFKRAYLSAPKVHQESMTETKRGVQKLPREFRSPLELLSIPLFKQLAATKELGVLFDVQGCSWHGKSSNNRSRCNYR

SEQ ID NO: 81918 - protein, 118 aa, Zea mays
  Coding DNA Sequence Number=SeqID_38543
MFLLAQSFFAPSHLHDEDITAINTPHQRPPSPFNHGPVKRVCARVWEVNHLEFEKATRQLKLLHLRGFRNYNKCKFKRAYLSAPKQLAATKELGVLFDVQGCSWHGKSSNNRSRCNYR

SEQ ID NO: 81919 - protein, 289 aa, Zea mays
  Coding DNA Sequence Number=SeqID_38544
MTFHGSSEDGDALTHTDGLAREGFPRILWEVLQGAGYLTPPQYAVQLFEKHRVPRCRVRMTLEPHPLQPGWRSLDSESYGYRAEDTIEAIALHGLTTFCGFHPLELATHPIGLFPAEKEDDPMWKDRVEHAKDIWALYPGHTAHLSVRCMNALYRLQVKRGEAMSHLMALLEATKITLDNREEIVVDLSQELVEKDLQVEQLTDEIHELEELVGTRENTIEVLEDQLLNTQQQLAEANAHLDMHHQEIQDAEADEDVDIEGGDEPASSVDTAGSGRPPSPESSVASFAH

SEQ ID NO: 81920 - protein, 80 aa, Zea mays
  Coding DNA Sequence Number=SeqID_38545
MQYNGSSSLISCEKQTIRIEFLSLQVTALVPTITGMGDYVSGRVRGLWCWVRGNLLGSSLLRHEDVLSVSKITVYRNAMN

SEQ ID NO: 81921 - protein, 53 aa, Zea mays
  Coding DNA Sequence Number=SeqID_38546
MLRLGISVIGIGSFNSGGISGLEIVTVRENRRCYPARRGGRNLVGELRWATQG

SEQ ID NO: 81922 - protein, 226 aa, Zea mays
  Coding DNA Sequence Number=SeqID_38547
MANGPKTEFQPRPRKRARGRARDPPVVPPRETWKFGSTREGKRNSPKSWEGVSSAEPRTPSRPSRGRSAPYRAQLQLALLAAWPAVTRRAQRGGMLWMARPWRLRWRMSCLGPVTAWRIPAAVRPTPGARVPSLVRASCACCVEKCLRAATRPTGSRSRYTLPSSSSPPGVRLVGSRAPAAFASCRRRPMAGGTEDTSLALLVSDVAHAEGRRRVGVTRPRIGPPE

SEQ ID NO: 81923 - protein, 284 aa, Zea mays
  Coding DNA Sequence Number=SeqID_38548
MAHRTVRCTPDSPVPPATSSVPLDSTVEASDMWALLGVRCTPDSYCSLSGVPVWARLPSVRAERALNARQRAVGAEKSEAGEFRSRASFGAPDTVRCTPDSPVIFSAATPGKKPRLRSSAQGSLVHRTLSAAARKRAEGLTGGETVPVKWPRGGPRDAREAMSARNWSETHWLVRSTRGDGRPKSGEVDLGPPVKSGRVRGLGKLHGLLAELAEALAGLEGGWSGLATAAEALAAMAGGIELAGAKGKWLAGEGECWAKREIWSQEIRSVSLPKPEANPRFGHV

SEQ ID NO: 81924 - protein, 196 aa, Zea mays
  Coding DNA Sequence Number=SeqID_38549
  Homolog annotation: Hit_ID=Q0WWS3; Match level="QueryCoverage=20%, HitCoverage=51%, E-value=5e-17, Identity=95%"; Hit description =Putative uncharacterized protein
MKNVAKCDTWCELQNPANHRVFERKLRPKPSGGGHVCLGVTPKDTPNTPPRGEGRGVWPPAPQGEVGRSRGCRRTAPDAAREASLATDRAQVLWKGTPGRVRAPSGPDPVAPRGAVNESGCLGMQPKLGGFELEHACRDPKDGELCLSGAKPEETLVEARSDTDDSWSPHEFYRVKPMIRGIGGATPSTYSQTLNR

SEQ ID NO: 81925 - protein, 133 aa, Zea mays
  Coding DNA Sequence Number=SeqID_38550
MARQRFGHGRENGLSPSAWKDTEAATSPRPSPAPPRGLAVAGRHPTAPSSGWRCWLPGRPWFGHDAATTGYGWLPPARRPGRVAAQWDGPLLDAFSVSPALGGPSVAVLASRPAAPSAEGCFGWLDRSGYAGA

SEQ ID NO: 81926 - protein, 324 aa, Zea mays
  Coding DNA Sequence Number=SeqID_38551
MRKKRLGKDEERKVTPEFVNMSKEILYPQIQGVTSHLERLHHRPREEQERRRQHREQQGSSSPPQQEVESVRPRSSVAQLEAPLAPPRDAPAVGGATGGDPDDDDSDHSTESSEPQEAEGWVARPITRDAARGCHFHDALDTLLRQAFDRHTWSIEYRCVVYQHSRGRYPDRWEATYLAVSEHYSISERDTAEAAMLDAARRALSQYCSLFGGVADGLNLRYYPRRPTGSTESVVVSPVGEGNPRLSSTVNLVAVLNTELNHSLDELSRARTEIAELRAELAERHHQEGGSPAPVGTQHPYRSPPRGHHTYGSPVCKTRIDLDP

SEQ ID NO: 81927 - protein, 154 aa, Zea mays
  Coding DNA Sequence Number=SeqID_38552
MGFYRSLTTSRRDCIDPCRHTRSEGAAAAVARAWRRSTKAERQPNRGCVDQRWSSLRDDAEAAAAARNQMEGARHGRALARSQGVARVRGGCDSHGDGGATLSSGVSWASPAPTGVSAGQNKTPGELRFEGKQGGSDSNHWGAEHRGHKSGHGC

SEQ ID NO: 81928 - protein, 325 aa, Zea mays
  Coding DNA Sequence Number=SeqID_38553
  Homolog annotation: Hit_ID=A2YGC2; Match level="QueryCoverage=44%, HitCoverage=63%, E-value=3e-08, Identity=31%"; Hit description =Putative uncharacterized protein
EVESGRQPSPAPQPEMPPAPPQGIPAAGGDPDGDDDDASGSSSHSTELLEEQEPKGWIARPITRDATRGCYIHDALDTLLHRAFDRHTWSIEYRCVVYQHRRGLYPDQWEATCLVHRSYNDLRGVDAFLEHYSITERDTGEAAMQDAARRALSQYCSLFSGVADGLNLKYYPRHSIGSAGGVIVSPVGEGNPRLNNMVNLATMLNTELDHALDKLGKVRAEVAELSAECAAHHYLDGGSPAPVGIHRPVVASIMVSLIALGYRSRPAPDARHAARNPSPSRRRAQPRVRSHARTPRRSRRQPSRPTSVRHLELRSFNQLFLFPPR

SEQ ID NO: 81929 - protein, 22 aa, Zea mays
  Coding DNA Sequence Number=SeqID_38554
MALCLRPPCSGRGRLSCNAINQ

SEQ ID NO: 81930 - protein, 70 aa, Zea mays
  Coding DNA Sequence Number=SeqID_38555
MRNKGDAKENELKLPVLEGHPAGGGWALGRGSAGEFLPVPKGRVGRLEKQQNDKILNSLLATSFDEPLEL

SEQ ID NO: 81931 - protein, 109 aa, Zea mays
  Coding DNA Sequence Number=SeqID_38556
MEASVARDARMLPTDLLMDGKADLAQIGRGSDGAEPFVDGGMDGVVRWGRGEGGVRARRGEVVRGADGPEETEASVAERILERKVSVAERRGRHQPLAERAPLSCERLQ

SEQ ID NO: 81932 - protein, 202 aa, Zea mays
  Coding DNA Sequence Number=SeqID_38557
  Gene Ontology: Mol. function=transferase activity, transferring glycosyl groups; Cellular component=chloroplast; Biological process =biosynthetic process
  Homolog annotation: Hit_ID=Q6ER83; Match level="QueryCoverage=58%, HitCoverage=14%, E-value=3e-43, Identity=75%"; Hit description =Putative digalactosyldiacylglycerol synthase
MASPVVVVAALLAAALAAFCGTDPLRTGSMVDFPGFEPHLVDLPDPTEMPMHADERERLRGAEVRFHGEVQEPESVTFDPYKVFKNPSISDVMCTTTAEALAMGKFVICAEHPSNEFFMSFLNCLANKTLEEFVARVKEAMDREPQPLTPEQRYNLSWEAVTERFMEYSDLEKVLNNEAAQPEQGRKRNNKRTSQPNLSSIF

SEQ ID NO: 81933 - protein, 151 aa, Zea mays
  Coding DNA Sequence Number=SeqID_38558
MAVKACADEEGEGMMAELSTGTHGSATSRWKKKRGRGQARGRKGELRETRAIECSAKWSGRSYWACLRVRTKCRARRPRVRACATWQTRYVLLVGAKETKRELRSVAHFSRIAALSTGYNSVIGSRVIRLLDFELRTSKLWFVRALQNSGN

SEQ ID NO: 81934 - protein, 54 aa, Zea mays
  Coding DNA Sequence Number=SeqID_38559
MSQGIIRIKPKGKAGLQKCSSGTPRSYPGTEVVVPGYNFVKLFDFSFNMIEGLG

SEQ ID NO: 81935 - protein, 486 aa, Zea mays
  Coding DNA Sequence Number=SeqID_38560
  Gene Ontology: Mol. function=zinc ion binding; Cellular component =COPII vesicle coat; Biological process=ER to Golgi vesicle-mediated transport
  Homolog annotation: Hit_ID=A7QQS7; Match level="QueryCoverage=64%, HitCoverage=38%, E-value=1e-98, Identity=59%"; Hit description =Chromosome undetermined scaffold_144, whole genome shotgun sequence
  Pfam annotation: Domain name=Sec23_trunk; Domain location=291-486; Score=124.5; E_value=3.1e-34; Accession=PF04811.6; Description =Sec23Sec24 trunk domain
  Pfam annotation: Domain name=zf-Sec23_Sec24; Domain location=216-256; Score=72.4; E_value=1.5e-18; Accession=PF04810.6; Description =Sec23Sec24 zinc finger
  Pfam module annotation: Pfam domain module=Sec23_trunk::zf-Sec23 _Sec24; Domain location=291-486::216-256
MGAAERDGVAIKKLSRLFKSVLGFEVDNSTFTEAQIRAMFYPKFKNDKSDQKTRTKMIDMVSHGLANLKVTLKHSSSLFMYDGHHGGAYVKNSFGNSVIFFIPAVARCGGAWDQHQLAEEEDVDPLPEGHHHILLLPRSASRAARRTPMWAADPSAAPAAAVVADPDGPDAVRLTWNTWPRSKVEASRCVVPLAATISPGRVPDPSAASPPPLPYPPLRCKAPCSALLNPFARVDFAAKIWICPFCFSRNHFPLHYSAISESNVPAELFPQCSTVEYIVGGAGVPGVGSSPPPPVFLFVIDTCVIEEELGYVKMAMRKATALLPEHALVGLVTFGTQVHLHELGFSDLSKIYVFRGTKEISKDQILDQLELSGAGRPGFPMMPQQPSGPQVNGMHPSVTAGVNRFLLPVSECECTLSTLLDELQPDQWPVEAGNRAIRCTGVALSVAAGLLGACMPGTGAMIIALLGGPCTEGPGMIVSKDLSEPV

SEQ ID NO: 81936 - protein, 585 aa, Zea mays
  Coding DNA Sequence Number=SeqID_38561
MRGPRGKDVFARAQGVFAGRRDRQEAAQKRRAIIKLPEARPKRARGTAKAAAPGGSQPTLAAKSVAPGSSKVPDVVKAAGAGGAKFASAEDAKARELPSPGKRVADFGTDISVDDYLTGSGEGQLVVVPPAVATTVSATVPGAKGSALSAGGEISALTAVKDEAGTVSRRLREASQRLSQLSWARLRFLPPSLGLWSYHADAVREKSAADSKCRKLTEKVAALEGERTDLRRQLAEERREANQALAKAQSAQAEANLARVEGSLASQRAEEWETRFNALQARMERAEASTRSEVERTRKQLMDSYRELGARTADFEVPDRESGLRCLEWLQEELLAPPTIVEGFMSFASLVTCEGAMNALSREGCSHYEVFDRSDEDFEREIYKVEDPVVKESAGALFDRMWGPHGREVVRERSDRARDQAARDEKVEDFGALNSARPEAESNPVAAGAEVGPTPPPETVEGSLTAPAATVSGGGSSPTAVPRAEDPPKTAMEPAAEDPTAAESSQVQDFGPAHATATANFLAASTVDAGNESDESASKFSDFGDSGSSVEWTEESSDEDLDYFAALDVAAAEASPLVFYAEVVP

SEQ ID NO: 81937 - protein, 69 aa, Zea mays
  Coding DNA Sequence Number=SeqID_38562
  Gene Ontology: Mol. function=structural constituent of ribosome; Cellular component=ribonucleoprotein complex; Biological process =translation
  Homolog annotation: Hit_ID=Q41852; Match level="QueryCoverage=49%, HitCoverage=41%, E-value=4e-11, Identity=97%"; Hit description=40S ribosomal protein S21
  Pfam annotation: Domain name=Ribosomal_S21e; Domain location=1-69; Score=30.3; E_value=4.9e-06; Accession=PF01249.9; Description =Ribosomal protein S21e
MQNEEARPRTGSSLPRSCLCPDQHWPLGCEWHVRCHFTTFALSGFVRAQGDADSSLDRPWQKKKAEIKQ

SEQ ID NO: 81938 - protein, 150 aa, Zea mays
  Coding DNA Sequence Number=SeqID_38563
  Subcellular localization annotation: CTP_CleavageSite=40; ConfidenceScore=5.10e-01
MARGRREHTDLDLSKVPKVQHKPIQSLRKGSNKKSKRQPKAALVWRTGLSGVPPDSVRCTRVDQLKLASFGNLGEPLRYNSPDCPVCQRSNGYFAPTVVCKETVKVNSARLRAQKSEQAPEGAPDSEQDLSGAPPDCPVAQLSEAPMVEP

SEQ ID NO: 81939 - protein, 251 aa, Zea mays
  Coding DNA Sequence Number=SeqID_38564
  Gene Ontology: Mol. function=zinc ion binding; Cellular component =COPII vesicle coat; Biological process=ER to Golgi vesicle-mediated transport
  Homolog annotation: Hit_ID=A7QQS7; Match level="QueryCoverage=55%, HitCoverage=18%, E-value=2e-52, Identity=67%"; Hit description =Chromosome undetermined scaffold_144, whole genome shotgun sequence
  Pfam annotation: Domain name=Sec23_BS; Domain location=68-173; Score =163.2; E_value=7.1e-46; Accession=PF08033.3; Description=Sec23Sec24 beta-sandwich domain
MTTSMVHGRCSAQYMHKVFVQMSKMGGAVLPNDLYKRCGSYEEAASVEEPESELFSKEPELYQTGPICLSGTIEINYSKDIKVQGIIGPCTSLEKKGAVCADTIVGQGNTTAWKMCGLDRNTSLTVFFDVSPSERSSQPGHQNPHLYIQFVTSYQHPEGQMRVRVTTICRKWVDGSTNTEELVEGFDQETAAVVLARYISFKMEMEHVSLSYCYDWKSISHTPKALRGTSARASSRPRGWRNNCLDRVLRD

SEQ ID NO: 81940 - protein, 261 aa, Zea mays
  Coding DNA Sequence Number=SeqID_38565
MLPLGRPGKVVSQKDSVTGRGASRVRAAGPISIGVDNKLGRCGMLDQMTEVKGAVKVAKNPLDNGKVEGARVSAAKELGLKSEPSLTSRTPTLVDDVLQLDGESPEDPGEDDIVHPQLGKAKRGAVSENMVVESLALQGEEEQIPSTGVRGGGVADDRHQGSDVLDTGGLGVEVCDHRSLIVTDDLSGGGLMRWTTKEELSLGELVSESLQRSTLLLPGESRSPLPCLADGHGRTGNNNKGGMRRRHICLRGGLEVANTSV

SEQ ID NO: 81941 - protein, 335 aa, Zea mays
  Coding DNA Sequence Number=SeqID_38566
  Homolog annotation: Hit_ID=A2XFR6; Match level="QueryCoverage=48%, HitCoverage=46%, E-value=1e-07, Identity=29%"; Hit description =Putative uncharacterized protein
MRVKWDALSQLIRGTRGVVALSSCRQRGPGTVLALPRLSAEVVHIVTTAQGKTKPWKETSRSSKTMTSSRWLVLDTLHLEAPPAPPRDAPAARGGPGGDPDDDDSDHSTESSEPQEAEGWVARPVTRDAGRGCHFHDALDTLLHQAFDWHTWSIEYRCVVYQHSRGRYPDRWEATCLVRRPEDDLRGAEAVSEHYSISERDTAEVAMQDAAWRAVSQYCSLFGGVADGLNLRYYPHRPTGNTESVVVSPVGEDNPRLSSTVNLVAVLNTELDHSLDELSRARTEIAELRAELAERRHQEGGSPAPVGTQHPYRSPPRGHHTYGSPACKTRIDLDP

SEQ ID NO: 81942 - protein, 220 aa, Zea mays
  Coding DNA Sequence Number=SeqID_38567
MTLEPHPLQPGWCSLDSESFSFWADDTIEATAMHVLTTFYGFHPLEMSTHPIGLFLAEKEDDPMWKDQVDHAKDLWALYPGHTAHLTVRCMSALYRLQALRGMAMSQLMGLVESTKITLDNREDLVVELSTELVEKDLQMAGRARRGQNQRIPPPPPQPPTMQELMAQQNEILRQLAQRQPPPQHYGVVITTSVPRQQQPTRSFSSLSRRCSPGRKTARC

SEQ ID NO: 81943 - protein, 104 aa, Zea mays
  Coding DNA Sequence Number=SeqID_38568
MGLFPVAAMGKQERRNTKEDEEAERGFSFHGEEGEPTGWKTSRALQGGPGCSSSKQGEQQQGRHGRGGAELPAAAACQGEEEGRRWPLREILGAMEERRQGVGA

SEQ ID NO: 81944 - protein, 153 aa, Zea mays
  Coding DNA Sequence Number=SeqID_38569
MPDPAPTLTPIKPLEAMTVLPRSLPVRSEHEFAGVPSAHSVPVAARARPPWTSHSGPPPSNPTPRLASLELRKAFRALRSNTILLEVPECRPQNPSDRRRAWTELHDCNLADGEYVLISEQGVAQEGVQETAPEHVAEDLSAPAFEGKPQFYA

SEQ ID NO: 81945 - protein, 503 aa, Zea mays
  Coding DNA Sequence Number=SeqID_38570
MVQVRAADFADLVTSGALTTDVAAEVERLRAQHADAVREKSAAESKNHRLSEKVAAMEAEKTDLRCQLAEERREANKAIVDAQAAQAEAKVARAEGSLARQRAEELEARFNALRSCVDKAESSTRAEVERTHAQFMDAYRELGARTADFEVPGQEAGLRFLEWLQEELLVLPTIVTGFMSFASLVTCEGAMNALSHEGCRHYEVFDQADENFEREIFKVEDPVVKQSAGALFDRMWGPHGREAVRDRSDRAIEQMAHAEDVEDLVGLDGALPEAEEVGPVPPSDAGEGTSVIPAAGEDPAPAPAPTGEAAPKVVAEPAAEPAAEDPTSVAGPSQVLGFGPAHATATDNAIFVAASTVATDDDLFGSVSKYFESDDYGSSIVWTEESSDEDLDYFVALDVAVAEPSSRAEGSEELLSASTRYRRRRAVAKRRVGELSRSGRHYRSEVGRGRLRVDGIGKRELLSSPIGVSVGEEELRNLFEGEELRIMLFNYREMGIIPKVEPM

SEQ ID NO: 81946 - protein, 130 aa, Zea mays
  Coding DNA Sequence Number=SeqID_38571
MSSSSSSAANTPPADASSEDTLSNVAAEELHPGDMVEFGISWISSKRKIGHKIAQFGSCTFTPRTGKTSIEVVELVPCARNKWGNWWDFWFDVSEGEVKDHPGLPVAVMCSHYYVAYTPFEVAEDDEDCW

SEQ ID NO: 81947 - protein, 193 aa, Zea mays
  Coding DNA Sequence Number=SeqID_38572
MEFQTRPVTHLVIVFVCGAEVDSLSRYELWHKALGAATPSPPCSPSVPASARLPHASTSHATICPTSSSCRPPPAVRSVAFFRAPRRRLSPQPLLSIDETLLTRHGAIVVVGDLSTAGATEAGHAAGALGEEQRLAQCGVPRCLRCRKGDEHGVDALGDGVTAPTPSTLLYGALTPASGMTGIAAPLTPPRCR

SEQ ID NO: 81948 - protein, 86 aa, Zea mays
  Coding DNA Sequence Number=SeqID_38573
MAAAGYNLYLSKMAALVVLRVVPFPLSRAFPGTQEAADDDDDHHVERDTDARKVTHWDGMPSSLTSQVLTIGRRLPIHPLPVQSQQ

SEQ ID NO: 81949 - protein, 26 aa, Zea mays
  Coding DNA Sequence Number=SeqID_38574
MRLHTLRDDVVFYSQRCLLLIKGSGK

SEQ ID NO: 81950 - protein, 69 aa, Zea mays
  Coding DNA Sequence Number=SeqID_38575
MAPTKRKHTTGANVVETVAKWKHSQEFHARVPIRPVLFIGCSQRGLMLTEDSTIKDLDYAFQDADNIIK

SEQ ID NO: 81951 - protein, 79 aa, Zea mays
  Coding DNA Sequence Number=SeqID_38576
MSHAFDNYYIEDCGVILAPEVTQRRTDNNDQFVILATVGAIYSTVHVHASSDVAHDLHTHDGRCSSLPPLGCGPGAGPL

SEQ ID NO: 81952 - protein, 203 aa, Zea mays
  Coding DNA Sequence Number=SeqID_38577
  Gene Ontology: Mol. function=heat shock protein binding; Cellular component=plasma membrane; Biological process=protein folding
  Homolog annotation: Hit_ID=O65160; Match level="QueryCoverage=68%, HitCoverage=27%, E-value=3e-18, Identity=43%"; Hit description=DnaJ -related protein ZMDJ1
MAYNRALLGYAAGRLGVGAVGDRSVGAWLLGWSGVAAPVCVCPCVREREDGVGYDKEYCICLSAYDDGAELHEISCGQHFHCTCIDKYLYIIATWPVQIQQSEKQLYQPIVGIMQSAKKGWVKVPDYKSFQTGRFKVINDDGMSIMKGKLYIHFTVEFSDSLVLEQCKAIESVLPPKLSSNLIDMEIDEVRRQPCINVNNIEE

SEQ ID NO: 81953 - protein, 128 aa, Zea mays
  Coding DNA Sequence Number=SeqID_38578
MGKSKKGGSSSHHSGDKRKREPTPPSEDFGDSEYSKEEFSSKSEGSSVHASPPASSDDSDDSQGIAVEVWTYIRAVERAGLEGSDESEASSDEGDSSDSSEEGSDGDDGSKGDDGSGKGGSGSSKASG

SEQ ID NO: 81954 - protein, 111 aa, Zea mays
  Coding DNA Sequence Number=SeqID_38579
MPMRNRTRIDVASPGVNKDDDGAAQKQQTTDGHHGVLHISSSTLRTSERSKGRGYRRKATRVPFLGEGLCAGLLFLDRRAGRREESAMARVVWGREMLLLLAHREEGGGAP

SEQ ID NO: 81955 - protein, 163 aa, Zea mays
  Coding DNA Sequence Number=SeqID_38580
MGRRKERESSMAEKREEGIDHGSLHTWAGARLAWPGQTAARTTLAGLQAAAMGNEAGAGRASRPAAARRSSWRGGRGSRPGATEPGRACRGLRSAGGKAGHGRWKERDGAGRSGTELQQRRCGQGALARRPIQPGPMLRTQGEGRDERTPEIGMGTSSTCCTR

SEQ ID NO: 81956 - protein, 225 aa, Zea mays
  Coding DNA Sequence Number=SeqID_38581
MTLEPHPLQPGWRSLDSESFGYRAEDTIKAIALHGLTSFCGFHPLELSTHPIGLFPTEREDDPMWKDRVEHAKDIWAIYPGQTAHLTVRCMNALYHLQVMRVEAMSHLMGLLEATKITLDNREELVVDLSTEMVEKDLQVEQLSNEIQELEELVGTRRRKSPPSVFSVLPTRRDPAVGSGISLGHWESKHGDFGRGGVLGPRNSSSVRLPRCHAVAGSPTFTSVF

SEQ ID NO: 81957 - protein, 50 aa, Zea mays
  Coding DNA Sequence Number=SeqID_38582
MGKPVPSLLMLRLSRVTALVPTITGMGDHVSGRVRGKVYCQVQSGFITLC

SEQ ID NO: 81958 - protein, 190 aa, Zea mays
  Coding DNA Sequence Number=SeqID_38583
MDMWLPAKGNWLLGSIGGITTADELAVFLLGAISILPASRVGGEWQRGFGSGKARTRARKAKAAKSAALMGYSRARYRFKKCPVITRRLFPKPQHAMWKPGSYLQNTGAPPHHSAIVLKVARAACYHSVLPPKRRFRVQSLDITSKMPTSPSSRSALPPKRRFRVQLLGITSKNANVAFQSVGVASKTLI

SEQ ID NO: 81959 - protein, 390 aa, Zea mays
  Coding DNA Sequence Number=SeqID_38584
MDEGTPLGGLESEDNAEPSHELHTVLSSLWGRGHLAHRLRIRFPKGEGLRRPKQLNKPERLTRPAGRGSLHGLTTLGAVSAVPVTLPRPRGSVPRPPGGRLGASATTRLPRAAQAHASLGRAVRHRQGSEARDIQAGQQSRRGLQQRLEHPTAMSLLPLRCFQVVRTPGSHTKSNHQGRVSLASVKPDPPSGARRGEPPLLQNFPRKRSFCQNVFRAFRLLRKWDPENDGVHAFSTISITESYGQVRVHAQTSMEGEQQHPWRQLHLRRSSTEPRTATRSEDLRSEKRRQLSEGRRQLRARAITARVSSRNLARADGSAGCPEASASCLPRTSARLMASATRLRHWSRQWTAQPGSGRRNLLLEPTLPLSTLTQLPPAPAHRRAVEGSFN

SEQ ID NO: 81960 - protein, 113 aa, Zea mays
  Coding DNA Sequence Number=SeqID_38585
MRRMEDAVMSSTPGDYVYARVLVPLKSGCDKDLPVRFGAAYARWCGVGGQADATVGADVVAVGESFSAVEAVSAAYGPTSGSLALMSGSRPLSGDANESLPVAASVLGPWLLL

SEQ ID NO: 81961 - protein, 218 aa, Zea mays
  Coding DNA Sequence Number=SeqID_38586
MVRSTVTVRLPPHAEATAAPPWERTAISPDRIPIARHPGFGGFAPTADLTALHAPSGDGQGRRFIFPARTPHRPKKTESEVEFVAELVGRELGCQRSFPPREVRPCRGVRPVLFCAKQSTRKGDDPADERGHQTVLDNNSSPSPAWLEDASSAELEDGFHHQKLGEEVASRPVREVEPRLTSLAAPARMMKILEAESGVEAAARLASPHPGTGGHRLG

SEQ ID NO: 81962 - protein, 242 aa, Zea mays
  Coding DNA Sequence Number=SeqID_38587
  Homolog annotation: Hit_ID=Q6QP51; Match level="QueryCoverage=52%, HitCoverage=59%, E-value=5e-07, Identity=34%"; Hit description =Putative growth-regulating factor 1
MQAACNRTKGAHPFDFDTSTMEAQALTSWTGKGDTPKGILLREGNGPRAPLLIRGSKAGPSEGFNSRLRALWLRAHYWSKVRRLAPRKGSTAASGHSGSAPTTDQGFVGWPPKGSTATSDAKRGMTLAKSDLGRHRKLRLARPQGSAPVSASDDGLRFARPQGLAPVSAPEDDELRLARPQGSDSASAPEDDELCLARPQGSDSALALDDGLRLARPRARTRPLPRKTDSTSTSKEPPPRPT

SEQ ID NO: 81963 - protein, 156 aa, Zea mays
  Coding DNA Sequence Number=SeqID_38588
MMVLASVATTSFAILLLFSLPSCLHLCATPFSAEGAGACASYPYSSDTSLDTDSRSGYCTSTRMFHIMRAPSFSPSSDIPFVFPAFALFFLPNLLPPPTVTAVSRPTLVDAGMTRVGHAPSLSPCVPSRRTWWRLLRLGYLGDEESRSEILDNQGP

SEQ ID NO: 81964 - protein, 317 aa, Zea mays
  Coding DNA Sequence Number=SeqID_38589
  Gene Ontology: Mol. function=calcium ion binding
  Homolog annotation: Hit_ID=Q6H739; Match level="QueryCoverage=41%, HitCoverage=57%, E-value=3e-58, Identity=86%"; Hit description =Calcium-binding EF hand-like protein
  Pfam annotation: Domain name=efhand; Domain location=78-106; Score =27.4; E_value=5.1e-05; Accession=PF00036.23; Description=EF hand
MNIIYVSRQGGFAPYKIVKIAEMGGIISGDSPRHSSPASKLEKKMVDAMQQRALKGTSVKSFNSVIMKFPKIDESLRNCRTIFQEFDEDSNGEIDQLELKRCFQNLGIESTDEEIKDLFEACDIYEHMGMKFNEFIVFLCLVYLLNDPAVSEAAAGGSSSLLGTLVPSIDCSSLLVEPPLSGCRLFSRRNNPCALLQAPSSPNPIVPPLPPPRPQSTACTFRGATAPNLGRLLFSRRNTSPLLPCGQSVLDGRNPHLLSSSATNDIISNTNNQPSLIMVHPYTTVRKILCSHDIGDEGFQLQQVDVPLQIHVQQVRP

SEQ ID NO: 81965 - protein, 86 aa, Zea mays
  Coding DNA Sequence Number=SeqID_38590
MKEVENDLRVLHRMANIMEGVGGGLHALAKMFLNGDPNISGRLIVIFHCEVESGVIDRAEDPSFDAAVRLIPVCVGGIGGEHPIDV

SEQ ID NO: 81966 - protein, 105 aa, Zea mays
  Coding DNA Sequence Number=SeqID_38591
MGELGEGLLLAVDQGEDEPRESRAREGGRESCLAADADGHGAREESLGKGAMGGEGAPCCSRSQEEPGGRRAMAGRGEELLPSTLHTQRKQRPRGEQGGARQRSG

SEQ ID NO: 81967 - protein, 152 aa, Zea mays
  Coding DNA Sequence Number=SeqID_38592
  Subcellular localization annotation: CTP_CleavageSite=76; ConfidenceScore=5.12e-01
MPCSEPDSRRSGGYALSIVGVGTRAAETRANAAETHSVSSISSRSPRPSPAPPSRLAVARSAPYPRPAPAGAVGCLAGHGSAVTQPRPAMAGYRRPDALDEWLHRGDGPLLDAFSVSPALGGPSVAVLASRPAAPSVEGCFGWLDRSGYAGA

SEQ ID NO: 81968 - protein, 105 aa, Zea mays
  Coding DNA Sequence Number=SeqID_38593
MGELGEGLLLAVDQGEDEPRESRAREGGRESCLTADADDHGAREESLGKGAMGGEGAPCCSRSQEEPGGRRAMAGRGEELLPSTLHTQRKQRPRGEQGGARQRSG

SEQ ID NO: 81969 - protein, 88 aa, Zea mays
  Coding DNA Sequence Number=SeqID_38594
MQLVDDLKGDGHNQWMLAKRQIALLTRPETRSPIPVMVGTSAVTARQPIGVSEALYAKAVYLARFKNSIRIVCFSQLMRLLDPCCYIE

SEQ ID NO: 81970 - protein, 89 aa, Zea mays
  Coding DNA Sequence Number=SeqID_38595
  Homolog annotation: Hit_ID=A2X1T9; Match level="QueryCoverage=60%, HitCoverage=46%, E-value=1e-19, Identity=81%"; Hit description =Putative uncharacterized protein
MRSALFLRMKSLISRGRCRKINAIGNGYRKEEIQMILCEEIKSACEYRPFEKCDYSARIANEICCKKLEYVIEKLDTMQQNLEQSTDDV

SEQ ID NO: 81971 - protein, 94 aa, Zea mays
  Coding DNA Sequence Number=SeqID_38596
MGPLLVELCPKPCSATFGTIVGDDATTVCTTRPTYDTGGCLHKCRVLHFYHTLGAGPSLSTRPGSLSSMFVPDDASVTLDEIERLGQHDIIGSS

SEQ ID NO: 81972 - protein, 98 aa, Zea mays
  Coding DNA Sequence Number=SeqID_38597
MAAVVAGCGGTGRGRGAALLGVGARACAALLGLVRGHVLGVARLGLVRQRRVSARLGAAAARLGVGHGRRRGAARGGSGGVGGKDRDDDGAGRFIGPH

SEQ ID NO: 81973 - protein, 194 aa, Zea mays
  Coding DNA Sequence Number=SeqID_38598
  Homolog annotation: Hit_ID=Q0WWS3; Match level="QueryCoverage=21%, HitCoverage=51%, E-value=4e-17, Identity=95%"; Hit description =Putative uncharacterized protein
MKNVAKCDTWCELQNPANHRVFERKLRPKPSGGGHVCLGVTPKDTPNTPPRGEGRGVWPPAPQGEVGRSRGCRRTAPGAARGGRHQVVLGAASRRAAGHSALRTHRATELALGPRPQPEVGSSGRKSTAHRAVSGVPPAALENPEDRIPSTPGCTHNRIRSPSALNVKVKKFNQARVNGGSNYDSLKVAKCLVI

SEQ ID NO: 81974 - protein, 180 aa, Zea mays
  Coding DNA Sequence Number=SeqID_38599
  Homolog annotation: Hit_ID=Q0WWS3; Match level="QueryCoverage=22%, HitCoverage=51%, E-value=5e-16, Identity=92%"; Hit description =Putative uncharacterized protein
MKNVAKCDTWCELQNLANHRVFERKLRPKPSGGGHVCLGVTPKDTPNTPPRGEGRGVWPPAPQGEGSGWGLATRPGRMRNGSCWSADRLGAWTVVARAGGQSPGALGAPGSRRRRGRYPRASGAPLGALRRNGLRAPHPTRLETRTKESDMRASRRVQKPEMRKEADEREALTSRTAGRP

SEQ ID NO: 81975 - protein, 81 aa, Zea mays
  Coding DNA Sequence Number=SeqID_38600
MKDCPSRIRTGLSFFTACTLIKYNHSRLYGQSLDPNLHEKEIADRPPSTSICITFESQRIGTLQQCTSQTANSWDKFSSSG

SEQ ID NO: 81976 - protein, 170 aa, Zea mays
  Coding DNA Sequence Number=SeqID_38601
MEVRYQTSYCRNEDGFPKLLRAYTTRLGIRSQPEYAGREFFEHGTEKMRALEGQQLLEDDPTVVYLTAYLLTLDAQYDLLARHHHQMITRAEDAERRNRQLHVDLTTSQARVAALESREVIAVEALKQAKDEHVQKLVEAYLVTHNQHRALQIQEPASSNPVQPMRAEES

SEQ ID NO: 81977 - protein, 165 aa, Zea mays
  Coding DNA Sequence Number=SeqID_38602
MAWDGMREPLAPLFIGKDGTEGAGGGFYRRAVCEVVFGVRCGGDGTGATRQQGRRREGSGVVGGDGGGGCAAKGAWAVVVRMEMGARVWGARGQGFDSHGRSHGLSDWTDRKHTSSAMTSINKSNVLNERGIEFSKSWTTRIQGLSDYCCSASELDPNSGCFGCL

SEQ ID NO: 81978 - protein, 184 aa, Zea mays
  Coding DNA Sequence Number=SeqID_38603
MSCLGIPGYPEYRGMEFMEHGKKKYMVTVYIGSSNRQPGWCSMAIGHRSKDTCHLVAREALSTLCSVYREEVGTTPMRFFPPLHNTHQEWKARVQALREQRHGGDLTTAYLALYLLALDERCDKIITQLRKTTMQVEKAETLLLKCQKDLADARSRNAATRNMERMAFADVTRSLRGTPVITSI

SEQ ID NO: 81979 - protein, 91 aa, Zea mays
  Coding DNA Sequence Number=SeqID_38604
MDKEEHPEPSQDPPPELFEPLTMKKILAPSPEVKEEAASTPPAPPPSEVTLELQERVPLEEEFDPILPSQSPLEEVINISSLLTHPGDVSE

SEQ ID NO: 81980 - protein, 35 aa, Zea mays
  Coding DNA Sequence Number=SeqID_38605
MALPRCLLRAAEEFGRIQPGPLIGSRTETNRVWLF

SEQ ID NO: 81981 - protein, 495 aa, Zea mays
  Coding DNA Sequence Number=SeqID_38606
  Gene Ontology: Mol. function=metal ion binding
  Homolog annotation: Hit_ID=Q5Z5K6; Match level="QueryCoverage=86%, HitCoverage=74%, E-value=4e-53, Identity=34%"; Hit description=Zinc finger-like
MGEGEYGNRMWWMGMEEAAGRGAEGVIAGCADGAMMSGGALALLDDRADKKRAGFIVLISDGLDGQFKWGDESITPTDPIRGLLRKYPVHTFGLGKAHDPRALHYIANISYGIYSSITDNLENKIIEAFAVCLAGFKTVVAVDVCVDIRSSSLLITKIDSGGYILRGSTGGILVGTLYAGEVKDFIVYFSYHTGSWSSGYHTTLNGIAASVTYKEAPGRQSTATDSCSVSLPIHVTDTVYPPENPCPPYPMVLQQMVRLKVLDLLISVLKEFLVLKGEAASAVHGKEGGDDPVLQAIAASLLQRKWKEFKQSDESWKEAPRNFVNLGGIDEDISAMVGILKRGLGVGCIHSWLSSYQMQRATITGLPGSHMVATGQFRTPAMNAMVQEAHRHLAKEASAQDAGTSIVCKRAVELLDGVNKRFDLWCKLDHDLPRTNQPSSHQEEGHESRDITDVLHGNINRARQHDIYMAADHAIKQWRSFLTSVEKTHGHGPDK

SEQ ID NO: 81982 - protein, 855 aa, Zea mays
  Coding DNA Sequence Number=SeqID_38607
  Homolog annotation: Hit_ID=A2WR89; Match level="QueryCoverage=96%, HitCoverage=97%, E-value=1e-179, Identity=48%"; Hit description =Putative uncharacterized protein
  Subcellular localization annotation: CTP_CleavageSite=74; ConfidenceScore=5.52e-01
MAADHALPLASSAPSWPVSTHPSAASAAAAAVYYFGLSFALAQGRASGGFDLGGARRRGCRWSRAMELALQEKVAALERQVAELRCRRAEDARANEKVAGIFASHEQRWFAERKSLRRQVHAVVAAARAREAKREEETAELRRQLEEQRDTVALKDRALEQEVQRRQGAEERLRAAEKAEEELRERAGKEAMEHAAEVRKHKAAFVELVSAQRQLEADLARAARLADTAEAELRAALERRDEAASTAADLSAEAARLRRDADHKDKILSAMLRKSKIDMEDREMLVREVKMCKARRKQAELEADRWRKMWESRGHRRGSSRSSARGVADLPAGSSDKLLATDAAVACATNETKILFVDHAEGDAKKDHRKTPAKELNAIECVDRYASHVVDDKPAVEEYQGLQEWFQMETEKYTALIQHRHTAEIEAFTEQLRLKDEKLEAFRWRAVSMDVEAARLRSRIHELEGRLARHEKHSAALEALLQDRESENRALEEQLETLQAQALGVEICTPARGSGQDDGLDDQCIACSPVDAVQRTMSSGSSRHQEGAEVSKYETKLDELVTLSPEDHKEDATEALVVSVGDLACAVAAAATSVEHERRHDAPASRQSFRSEIEEEEEVYTEPGNAHTTGSSQEATSELALVVVPPGHKSSAWKTDIHALAVSYKIKRLKQQLLVLERLANECKDEEAAATKPSGSEASCSGGGGSRQQPRSRYHTMMSFLSKHVRRYQSLDDKIDDLCARMEESKRSAGRGAGEESQSQSAALGQFLEETFQLQRFMVATGQKLLETQSRIAAGLARDRCCCGDGEDGVDMKRLMEVAGALLRDVQRGLEVRIARIIGDLEGTLTFHGILRSTR

SEQ ID NO: 81983 - protein, 109 aa, Zea mays
  Coding DNA Sequence Number=SeqID_38608
MATAESLVRREQWVARWAWWRWRDESGDGGPASTRKLSWQWMIEGKAVAGTEAVNVGELGFQMERTGQRTEERELAALVFMALSPPLLLYWIKYCNGVKDWKRGDNSTP

SEQ ID NO: 81984 - protein, 103 aa, Zea mays
  Coding DNA Sequence Number=SeqID_38609
  Gene Ontology: Mol. function=protein binding; Cellular component =cytoskeleton
  Homolog annotation: Hit_ID=Q5JKN2; Match level="QueryCoverage=77%, HitCoverage=24%, E-value=3e-29, Identity=80%"; Hit description =Putative protein ABIL2
MRASSSAPSSSPSSQYIVELFHRGAAGMSGATVEEVQIQEALLFSETIKGLKTLRSQLYSAAEYFELAYTQQDEKQAVTNNLKEYAVKALVNTVDHLGSISFK

SEQ ID NO: 81985 - protein, 429 aa, Zea mays
  Coding DNA Sequence Number=SeqID_38610
  Homolog annotation: Hit_ID=Q5JK91; Match level="QueryCoverage=40%, HitCoverage=54%, E-value=7e-16, Identity=39%"; Hit description =Putative uncharacterized protein OSJNBa0024F24.32
  Pfam annotation: Domain name=Extensin_2; Domain location=29-334; Score=-121.4; E_value=0.015; Accession=PF04554.4; Description =Extensin-like region
  Subcellular localization annotation: CTP_CleavageSite=47; ConfidenceScore=5.11e-01
GRFFHASLVQRNRAPSAFWQRTGYRLRSGIGRDPSCNRERMPSRRIAASIYQGGRGRPGGSPVTITPSDTLLSPAPSLPPLRFFGHSRLLHRHCIYRVADADAYVSVLHSPRPPATVRELYYSHPSPTQRREKPAPLPPPPALLAVRARSRSRVADLGFGAAFPGGPPDTPPRRSPVTVPFLWEEAPGKPKAPPPPTAAAPAATNAGPVPEGGGGGGDDEQHDDQARPVPVPLKLPPRLQQVASFAAADTPLLPSPKAVLQGPYYYGCAGDGSRRPPPRWFRSGGAFRRTPSAGVGLFSRTWSKPAPAPAPASGKSRHGDDHERDAAGPDAPWCSPASSSSSSSVSTCFGGDEHGRGKPCADGREVSSEEDGGSPPRGSVRITRLRRNRSLPSVTTSNLWASIRRSFEQITPWSYKFGRSRPPGANATE

SEQ ID NO: 81986 - protein, 391 aa, Zea mays
  Coding DNA Sequence Number=SeqID_38611
  Gene Ontology: Biological process=regulation of transcription
  Homolog annotation: Hit_ID=A2WRA0; Match level="QueryCoverage=95%, HitCoverage=95%, E-value=2e-55, Identity=39%"; Hit description =Putative uncharacterized protein
  Pfam annotation: Domain name=RWP-RK; Domain location=229-280; Score =63.0; E_value=1e-15; Accession=PF02042.6; Description=RWP-RK domain
MAMVPCGGDDAEWCNMMEAINHLMMSSMSSPHVAMGASSCREEDDDSLYLPMYYSSAPPPAVVSDQYCPEQLPPLPAAGAMTGLDEALMLPFTDIDLEAFDNAEEQKPPVDQMVMMPPTVEHPAAAGTRAPIIIDGTATVGQNVGGGVVHAHQKAAMTTIEDSSCFRRGASCVDDDMAVVIHHVERRRQAGSTAVALLPPPQPSLPRPRARASGGAGERSAPAAAGKTRMDHIGFDELRKYFYMPITRAAREMNVGLTVLKKRCRELGVARWPHRKMKSLKSLMANVQEMGNGMSPVAVQHELAALETYCALMEENPWIELTDRTKRLRQACFKESYKRRKAAAGNAIETDHIVYSFGQHRRYKQQLLPPPTAGSTSADDRHGQSSRFFCY

SEQ ID NO: 81987 - protein, 177 aa, Zea mays
  Coding DNA Sequence Number=SeqID_38612
MGRGKRGKGWPRHADGKRKRPPSPPSEDFGDSEYSEEASSEYDRSPAPASHVASSKDSDDSMGLSTVARAYWRSIEHAMLDGSDDSEETSSEEVEDSSDFEEWSGGKGDGSEDDSSNGNDDGKGDGEDGDNEGNSDGKGEGDCKGDGDGRGDGDDKGDDSGKGDDDDGKAGCIMLLV

SEQ ID NO: 81988 - protein, 147 aa, Zea mays
  Coding DNA Sequence Number=SeqID_38613
MPPEPPSPVRSPSELCPRIAEPSLDQGFNATTKTTTVRVEIKIGCKIGRENMSPSISGKGGGDMMSNRTPGDTLVVLLGRTVLLIVAQWFVIGARERDTETGDFLQVRAALRGVIPYFLGWLCMRGVLQVVSPERRGANEMKMMGSP

SEQ ID NO: 81989 - protein, 213 aa, Zea mays
  Coding DNA Sequence Number=SeqID_38614
  Homolog annotation: Hit_ID=Q8RYS9; Match level="QueryCoverage=92%, HitCoverage=70%, E-value=1e-73, Identity=69%"; Hit description =Putative uncharacterized protein B1156H12.26
  Pfam annotation: Domain name=F-box; Domain location=84-131; Score =29.5; E_value=1.2e-05; Accession=PF00646.24; Description=F-box domain
  Subcellular localization annotation: CTP_CleavageSite=55; ConfidenceScore=5.44e-01
MDGARVLIAASATAVCCLACAVWIFRSSSSSFPASSNKHQPPPANFCGCASCGCRDAKSANGEMAVGGENKKKAPEPAPPEAPSMMEQLVPEITTHALSYLDYTSLCRLSMTNSAMRRAADDDGAWKALYHKDFTVEQGTINPPNGWKAYYAATKAIINLNAEFYNIIREGSLPAMSRFWLNADYVKCIHATGEFCTGEILIGSPAEPGCGKF

SEQ ID NO: 81990 - protein, 402 aa, Zea mays
  Coding DNA Sequence Number=SeqID_38615
  Homolog annotation: Hit_ID=A2ZU93; Match level="QueryCoverage=100%, HitCoverage=100%, E-value=4e-89, Identity=49%"; Hit description =Putative uncharacterized protein
MEGYDREFYQFSDQLRLQTAAFSGLSLGDSIWSPAGRRNNSNDVLFAASASPADAAAKSNAVVGLKLNDGGPGLIGSGKLAFGGGAGGGGTNKADRYNNNNLPNTDNKTVYNTSSSSFMGNGSSYAKNNNNNADMLAFDKMGSYGYNGGGNTNNNSNGVEVKSYFNKSAGRAASNNNNNNNSHAGGGNKKGGAGEYGRKKHAKSEGAAAATDKQRFKTLPASEALPRGQAIGGYIFVCNNDTMDENLRRELFGERYYIIIFGGYDDEHHQQQQHTDCLMGGMDWNSIDAGLPSRYRDSVRAIRPGLPLFLYNYSTHQLHGIFEAASFGGTNIDPTAWEDKKCPGESRFPAQVRVATRKIYDPLEEDAFRPILHHYDGPKFRLELSVTEALALLDIFADKDDA

SEQ ID NO: 81991 - protein, 178 aa, Zea mays
  Coding DNA Sequence Number=SeqID_38616
MEQDADPTTSLLGGGPASTNLEDVIGGCDDVRVGGRLLDEDEEEEEDGLTMSAIDHALEEIIPKDRLSETPEVESSIVRSEVSDDVPLASDPVGQEITRTFSHASSTLEGGLVHEDTLALDVVGQSHSAPLGTTEGASASEGAAKDDPAPEGGAKDDPTPKGGAEDNPAPKDAGPGSS

SEQ ID NO: 81992 - protein, 109 aa, Zea mays
  Coding DNA Sequence Number=SeqID_38617
  Homolog annotation: Hit_ID=Q7XBE0; Match level="QueryCoverage=88%, HitCoverage=10%, E-value=5e-09, Identity=37%"; Hit description =Putative gypsy-type retrotransposon
MVTNLSTALVGPVTLEASDPDAGNPSPADGAEASPSDALNVVPVNTPSTGSASTLPALGLPLFLSNLQNVFDSVSAQLKSCGAPVPDKVLSLMQWNPLLLQRQIDDLKA

SEQ ID NO: 81993 - protein, 52 aa, Zea mays
  Coding DNA Sequence Number=SeqID_38618
MACFRTDDVARDGRVEARGSAALEGDDAGARGGGSSRRSRLASERGSGRGLR

SEQ ID NO: 81994 - protein, 39 aa, Zea mays
  Coding DNA Sequence Number=SeqID_38619
MPNWGSLHDTQLKIDRRTQGQIANPYKVHTAQVQGHSLS

SEQ ID NO: 81995 - protein, 174 aa, Zea mays
  Coding DNA Sequence Number=SeqID_38620
  Gene Ontology: Mol. function=phenylalanine ammonia-lyase activity; Cellular component=cytoplasm; Biological process=phenylpropanoid metabolic process
  Homolog annotation: Hit_ID=A2X7F7; Match level="QueryCoverage=35%, HitCoverage=8%, E-value=4e-15, Identity=67%"; Hit description =Phenylalanine ammonia-lyase
MVKEQAGWPSVSIFIEAAATSLLSVPLDRASADAHLSLLLPITLCPLPHLYPWLPVPDLLPLRPPHPHYVESSVLVPQGTPHVRGRATDATIICARDGGYLGLLSLCPSHLHCAVEATRAAIEHDTRVIPNRITEYRSYPLYHFMHEELGVVYLIGEKMCFPDEEINKVLVAIN

SEQ ID NO: 81996 - protein, 125 aa, Zea mays
  Coding DNA Sequence Number=SeqID_38621
MAEVKVMRACADGPKAVKGECWVLTDGSEQPGRGGVDRVAGMVEDWWGTRLIVKDVHEVRCSRQVWWFGSQNHPVLRMAVFAEFGPQNSAVVVPEEIGDGTRHDRGGCIKVKQLRVKDVVVGSKT

SEQ ID NO: 81997 - protein, 91 aa, Zea mays
  Coding DNA Sequence Number=SeqID_38622
MDPCRWCSLVREEAVARVTVGNTAPFPMNYSSEFSDHRQTASRHDRWSPRRDLCACYRKVACTGTRLAERLRSRHRILLTRHRAGTAGGRK

SEQ ID NO: 81998 - protein, 341 aa, Zea mays
  Coding DNA Sequence Number=SeqID_38623
  Homolog annotation: Hit_ID=A2YGC2; Match level="QueryCoverage=48%, HitCoverage=69%, E-value=1e-10, Identity=31%"; Hit description =Putative uncharacterized protein
MARIRCTARKSVIPFLPSRLAERPLRRTVPGQSSQLERLHRRLHKEQERRRQEQEQEQHDSSPSPQQEVESERPPSPAAQPKMAPAPPQGIPAAGGDPDEDGDDDDAGGSSGHDTELSEEPEPEGWIARPITRDATRGCHFHDALDTLLRWAFDRHTWSIEYCCVVFQHRRGLCPDQWEATCLVRHLDDDVRGAEAFSEHYSITERDTAEATMQDAARRALSQYCSLFSGVADGLVLEYYPRRSTSSAGGVISSPVGEGNPRLNIMVNLAVMLNTELDHALDELGKVRAEVAELCAECAARHYLDGGSPAPVGIQHPYRSSPRGRFDYGTPDYRTRIDLDP

SEQ ID NO: 81999 - protein, 96 aa, Zea mays
  Coding DNA Sequence Number=SeqID_38624
  Gene Ontology: Mol. function=kinase activity
  Homolog annotation: Hit_ID=Q6QP54; Match level="QueryCoverage=63%, HitCoverage=21%, E-value=2e-16, Identity=72%"; Hit description =Putative kinase
  Subcellular localization annotation: CTP_CleavageSite=25; ConfidenceScore=5.20e-01
MEPGGGTAVGAVESLLTSSCFRGASQMGRQSCSLRPELARGRVMMAPPVDVAGLRPRLGDVEAPPKPRSSLSSVAEVESEPLGRARWRSSAEARAE

SEQ ID NO: 82000 - protein, 162 aa, Zea mays
  Coding DNA Sequence Number=SeqID_38625
MQIIERKCEAQKGKKTLDKLTDQPGNLIPIDVAEVPDLSASRDNSDLAEDDPCDPTTTSKPEAPMQSLNQLPMFNSLARARVTGPGGRGGAWTGEDGAWAGEGAAGVDVLVLVLMSSSSDRQSGSAEGTIGSSASPDPGLGLGLSPGRRRTLLRPTQGSDSG

SEQ ID NO: 82001 - protein, 81 aa, Zea mays
  Coding DNA Sequence Number=SeqID_38626
MQIIERKCEAQKGAGIRRRPGATRTCWSDEAEVPDLSASRDNSDLAEDDPCDPTTTSKPEAPMQSLNQLPVVTDLADARSA

SEQ ID NO: 82002 - protein, 56 aa, Zea mays
  Coding DNA Sequence Number=SeqID_38627
MEKAWPCSSGFRGEERWRIGSHHGPNLREALEVAREREEGREACLMADTGGSSGGE

SEQ ID NO: 82003 - protein, 147 aa, Zea mays
  Coding DNA Sequence Number=SeqID_38628
MVWRLERQVHRLLITTIWGGGRRCAIRIQQPQGCCALAIVTPAPVVAALAVPRTTLNLQAIENKQEQDNKQTRTDLIKLGSCFKGSLVWCIDGSDVLIMKMTWGEETLGEQEHGKMDLGLELHGVGEKEQRAPSWRPEGTTGEFDKG

SEQ ID NO: 82004 - protein, 83 aa, Zea mays
  Coding DNA Sequence Number=SeqID_38629
MDDVGEERHRLLGPDAVQRSDLDPLGEFVDGDHDADINTNTSTSTPAAPSPAQAPPLPPGPVTRARARELNYIMLLKNEGPEE

SEQ ID NO: 82005 - protein, 106 aa, Zea mays
  Coding DNA Sequence Number=SeqID_38630
MPKRKFSEKRARTLMNFFLYFPEFFDNFVEPQTDRRKKTLDKLTDQPGNLIPIDVAEVPDLSASRDNSDLAEDDPCDPTTTSMPEAPMQSLNQLPVVTDLADARSA

SEQ ID NO: 82006 - protein, 318 aa, Zea mays
  Coding DNA Sequence Number=SeqID_38631
FKVVLGTARAATTGAGETVYLSLKAPHHLGCAPPMLHVTRPQPPMPGPTIALGLADEALCALTLNPAIARCSGRVPSPLVGSSSAIALRLHAVASSWSGREQPLTSTAPSGVVHQAGFPTFLPLPAPSSASLKSGHGGCQFNIAAPLRRRSSRAVPSPWPASNVDGRAPLRFPLPWRGCPHGEAQALTSSAPVELHCCAFWSPGRRPLLFLPHAVQLQAEIHFALFLLAQSFFALSHLLPLLGPPYAAPPQCSTALDLNHQCRARPSPLARPTKPYYPRPRHGWVQRPSSLPFGWILIGHFPQAARYGLPVVRVCSRK

SEQ ID NO: 82007 - protein, 117 aa, Zea mays
  Coding DNA Sequence Number=SeqID_38632
  Gene Ontology: Mol. function=mismatched DNA binding; Cellular component=nucleus; Biological process=mismatch repair
  Homolog annotation: Hit_ID=A7Q0A6; Match level="QueryCoverage=72%, HitCoverage=9%, E-value=1e-26, Identity=68%"; Hit description =Chromosome chr7 scaffold_42, whole genome shotgun sequence
  Pfam annotation: Domain name=HATPase_c; Domain location=30-108; Score= 18.5; E_value=0.00065; Accession=PF02518.17; Description=Histidine kinase-, DNA gyrase B-, and HSP90-like ATPase
MAGGGGGRGESSPAIKPISKAVVHRICSGQVIFDLSSAVKELVENSLDAGATSVEVSLKAYGEEWFKVADNGCGISPSNFRVRAAAAPMRGSTNFPHFAVVDVATKARLFANHVAGT

SEQ ID NO: 82008 - protein, 83 aa, Zea mays
  Coding DNA Sequence Number=SeqID_38633
MARYPRIKVGIAVDQNNTKVGTEPKHLRTSPQHWRPPPVNSLPFLELFNTFGKHHLRHAAEEGFSCRGWHAAATGPQSRRPFS

SEQ ID NO: 82009 - protein, 206 aa, Zea mays
  Coding DNA Sequence Number=SeqID_38634
  Subcellular localization annotation: CTP_CleavageSite=31; ConfidenceScore=5.08e-01
MTAIAAKSSQGPLYTDHSPTALAPFGKASVAAQIKINGLGSINPNRAQINGPEPITFTPPTLTAAPPLPRLTTHRSHVVRPIWAPTTSIEGPTHNSDDGETDKGLTVGRDGTYHTPIKLGNRATMAAASLTWFATWDERRDATRFYNLGKREPSPGSSAFVAEEKILQALRIGDMAEDLGPLSLTHATRAFLWRQLGPRGLAGAGW

SEQ ID NO: 82010 - protein, 830 aa, Zea mays
  Coding DNA Sequence Number=SeqID_38635
MPSSSSSAATTPPAAASSEETLSSLMVEELRAGDSVDFGVSRMTSACVEDMQRLGYFGGGVARAPGTEEVPEPEVAEEDADEGALRCAAGQSSGRDLVEEFVAYGVWPLAHGWALGEVCPRQMPFHGGREVRSPAFALNLRNRDPVAFVRDAEDGAVRLVGRYVLRTEGQRSFDIRGSNDRLNRVFELNQLPYDGYPGQDEADRRGKKPAVETGDDPAPAAAPSSKKRKLGTAMGGLGVSDSFARELMRTCAVPGERMSSPELRESSARMLRVTGGCWPRNVPIPCAADEDCFTSRMVRQWRVFPYGRNIGAVVWAVMDKDRQGAAQKRQATVRLHEARPKRQRGAAKAAAPGRGKPPLAAKAGASAPSKAPEATAGAGGSKSTKVVPPASGVAEASKAARALPLSGKRVADFGTDITVDDYLGGSDEGQLAIVAPGAAIATAAIVPRARGEALGAGGEVSALAVVRDEAGVATRRLKGVTEALSQATEALSQVADFTSRTASGALTAALSVEVERLRTQHADGVREKSASDSKCRKLVDKVVALEKEKADLRRQLAGERREANEAIAKEQAAQAEAKLARAEGNIAKELAGHLQERLTALESRAKGAEAAMRAEAERTRTQLMDTYRELGGAAGTPRCHGGFMSYASLVTCEGAVNALSREGCRHFEVFDQADEDFERDVYKVEDPVVKESVGALYDRMWGPHGREVVRERAEIARAQAARGERVDDFGALNSALPDPEPTLAEAVTGVALEQTPETAAIATAAPTSAAAGEDLPPKVAEGAPDAPAAAVPSAEDPAAVAAETRRRQRRSPTAEPTAEAPAASELSQVA

SEQ ID NO: 82011 - protein, 57 aa, Zea mays
  Coding DNA Sequence Number=SeqID_38636
  Subcellular localization annotation: CTP_CleavageSite=11; ConfidenceScore=5.07e-01
MARRDPAPAPCAAALASASAPGAVLAPAPPLPPSAVLAPAPASPVAAQWLAPAPHAA

SEQ ID NO: 82012 - protein, 70 aa, Zea mays
  Coding DNA Sequence Number=SeqID_38637
AYFRGFLAHERTPPKKAGDKQKEHNEESAGSIKSHRKGDKKKKKMKKVVYYETDSSSPSTSGAESTSLKH

SEQ ID NO: 82013 - protein, 127 aa, Zea mays
  Coding DNA Sequence Number=SeqID_38638
  Subcellular localization annotation: CTP_CleavageSite=18; ConfidenceScore=5.21e-01
MGEESQIVSTSTNLTPKSSSNKVESRGRFKCGSDRSGPVEPPPRAVEPPLDTPGDLTASLTGRLQIRSQRGQRPVELPLQDQFSWSRPESFGEKTPAQLPGGKFSWVWSKRSTAEVEVQLELKVQLS

SEQ ID NO: 82014 - protein, 103 aa, Zea mays
  Coding DNA Sequence Number=SeqID_38639
MSYSTASTEKGQEHDRLAPYPRQRRLTAATVGMGQQIGVEEQGEGREDEWDVRRRQKRWCAHDVKRPRGRAIATARVGVGRIWVGGACFYALCREWGGAEVEA

SEQ ID NO: 82015 - protein, 328 aa, Zea mays
  Coding DNA Sequence Number=SeqID_38640
  Gene Ontology: Mol. function=zinc ion binding; Cellular component =nucleus
  Homolog annotation: Hit_ID=Q2R448; Match level="QueryCoverage=91%, HitCoverage=87%, E-value=1e-71, Identity=48%"; Hit description=MYND finger family protein, expressed
  Pfam annotation: Domain name=Sel1; Domain location=120-152; Score =5.3; E_value=3.8; Accession=PF08238.3; Description=Sel1 repeat
  Pfam annotation: Domain name=Sel1; Domain location=153-191; Score =11.6; E_value=0.59; Accession=PF08238.3; Description=Sel1 repeat
  Pfam annotation: Domain name=Sel1; Domain location=192-227; Score =11.6; E_value=0.6; Accession=PF08238.3; Description=Sel1 repeat
  Pfam annotation: Domain name=zf-MYND; Domain location=270-314; Score =31.6; E_value=2.9e-06; Accession=PF01753.9; Description=MYND finger
  Pfam module annotation: Pfam domain module=Sel1::Sel1::Sel1::zf-MYND; Domain location=120-152::153-191::192-227::270-314
MRKPTRRRGTSAKGSSGGGISKAATLPAKQMVLSGYRGTVDAFDCLPDDLVLAVLAGIAARARCPADLAAAALPCRRFRDLAAHPAVLSRASAAAVAVPAGRWSDAAHRFLRRCAASGNLHACYLLGMVLFYCIGGRATGAALLARSAAGGHAAALYALAVVQFNGSGGDKADKDPRAGVALCARAAWLGHVPALRELGHCLQDGYGARRAAATGRYFLLHAAARELVSSHCRNGEDDAASRFMVEWWALPSKTGAQGDGNDADADARLCSHPRCGRRETRRHEFRQCSACGSAIYCSRACQALHWKRAHRSQCAAAASRWLAAGNAQ

SEQ ID NO: 82016 - protein, 143 aa, Zea mays
  Coding DNA Sequence Number=SeqID_38641
  Subcellular localization annotation: CTP_CleavageSite=55; ConfidenceScore=5.59e-01
MASSPVLAVSPTPSLPRAPIKGPARAPSSPHNSSHPHCPPPRAVQASAAVPLPCSAEEGSDPPELLAPEEGQEPDPSEINLLCQESFDEGKSILPLMHYLPISLYHCLSLDYGMGIELHGKHERVALTITSIKRYGTSKKGYK

SEQ ID NO: 82017 - protein, 245 aa, Zea mays
  Coding DNA Sequence Number=SeqID_38642
MGSARVAFVLSSLEERNFAEVGTFRPSFGFKDFHQAARLHPLTDGHPKTVTTSLMVGRSKPGCGLCPALSFKDVHHQCWGGDGPLLPSVMGGGRSPFEALAAAACLALRPERLRRCFRSSGATSHQGSRKRFFCRRDSRCHPRTDLRLYGLGSLSSPFEWRCGRGPYRSSVCPEVIAAAVWPPGAEVVVAAAGAGVGEPPGVLSSRRPSNVGGCSYLRGRNWSSVCNGTLSAGVCSLRLSGPEHL

SEQ ID NO: 82018 - protein, 296 aa, Zea mays
  Coding DNA Sequence Number=SeqID_38643
  Homolog annotation: Hit_ID=Q6J9V9; Match level="QueryCoverage=48%, HitCoverage=41%, E-value=3e-09, Identity=36%"; Hit description =Putative uncharacterized protein
MQAACNCTKGAHPFDFDASSMGAQAHTSCNRRAGYYVQETALPLAPVPRLLDCGTGAATRGNPAHGPTVPTEHIGHGSVSRGRICDGRYGQKWAGSNGGGRRAEAAVKSSDMRHLWQAKQATLHLRRNDRVKKGTGKGDTPKGILLHEGSGSRALLLIRGSKAGPSEGFDSRLRALGLRAHYWSEVRRLAPRRGSTAASDHSGSVPTTDQGFVGWPPKGSTAASEHAERGMTLGTSDTWPRLELRSRGTLGHFRDQQERFCNGVPSEGGIEPSDPIERNRVRQITCRYFWSAPLGY

SEQ ID NO: 82019 - protein, 98 aa, Zea mays
  Coding DNA Sequence Number=SeqID_38644
  Homolog annotation: Hit_ID=A2X6T6; Match level="QueryCoverage=75%, HitCoverage=6%, E-value=7e-14, Identity=49%"; Hit description =Putative uncharacterized protein
  Pfam annotation: Domain name=B3; Domain location=14-97; Score=9.8; E _value=0.0061; Accession=PF02362.12; Description=B3 DNA binding domain
MASAECLNRAGKHEADRRALSNAVRQRRHGCDVIMLKDPKKRLWLVVYHDSPLFVGFIEGWKHLVAANDLRAGDVCELVNGPDDGEPVYSVRMCGHKT

SEQ ID NO: 82020 - protein, 273 aa, Zea mays
  Coding DNA Sequence Number=SeqID_38645
HLERLHHRLREEQERRRQEQQSSSLSLHQEIESVRSCSPVLPLEPPPAPPLGAPASGVAAGGDPDDGDGDDSSSHDTDFSANPEPGRMGCSTHHSRRCSRHSRGVYPDRWEATCLVRCPEDSLQGAEACSEHYSISERDSAEAAMQDAARRALSHYCSVFGGAADGLDLKYYPRRSSGSTGGVIVSPVGEGNPRLSSTVNLAAVLNTELDHALDELSRARAEIALLRAERAERRFLDGGSPAPVGTQHPYRSPQRGHQSYGNPACKTKINLEP

SEQ ID NO: 82021 - protein, 245 aa, Zea mays
  Coding DNA Sequence Number=SeqID_38646
  Subcellular localization annotation: CTP_CleavageSite=63; ConfidenceScore=5.63e-01
SDGVPSGSTPPTTSIVATSIDVTAVATGPISQANFMAFQQLLVQQFAALTVSINDMSSSTPPPASATTSVAALTYGMLGYGGIAPLPTTIAHYHHHRSLPIYHNTSSIVDLHLGATSVKHAPTGDGTLSPSVPARTAPHLQAVTPGHPSNLAVARGEEGDCTSKWLQALVAVDIGTWGRDLVLSDGHQQSRRPTVSKCKHARAHCLSPPHSATGCHGGVSAGHWCDPFQVAIHVLPFRPDGVHGT

SEQ ID NO: 82022 - protein, 152 aa, Zea mays
  Coding DNA Sequence Number=SeqID_38647
MGKNNKRKREPTPPSEEFGDSEYSEEEFSSEPEGSPAPVSPPASSDDSDDSQGDSRGGSDESEYSSDEEDSDGGDEGEDDDDDDDDDDDDGDGSGRGGGDGRDSTKGSSRGSTKGSSRGSTKGSSGGSGDSTRGSSRGSTKGGGGGRGRASG

SEQ ID NO: 82023 - protein, 316 aa, Zea mays
  Coding DNA Sequence Number=SeqID_38648
MSPRELRARTYRGPVFLCGGGVVRVQRLHTVGEGTPDSGYRQWPLGPPQRRILYDMWGLAPVSKGGNLGLDRNLRPVVIHKDDYQPCGGEKRAGLQPPLPSASRMFIIRAGEEGGKLRLRGVDRLRRRQLPRVWLLGLGGFGAASGAASCRLDGAWLFVHRTGDSRAVRSEDGSEDLFARARSAAVRRYGTGAQVVAVVDAEVVAVAEVAATVGADVVAPASEPPGASYPAALTGVEVVHTCRVEMELDFHLKTDVILSLFVRLDVLRLDTSVSEKVVNNPREANSLGSGPGGGACRPTVRDQAERLHGLWTTPGD

SEQ ID NO: 82024 - protein, 176 aa, Zea mays
  Coding DNA Sequence Number=SeqID_38649
  Gene Ontology: Mol. function=cysteine-type peptidase activity; Biological process=proteolysis
  Homolog annotation: Hit_ID=Q6J9V9; Match level="QueryCoverage=36%, HitCoverage=22%, E-value=1e-21, Identity=78%"; Hit description =Putative uncharacterized protein
MAVRLLAINESHMLKDEMIKDKKHYMDMHFWRMVGFGKLPKYHQDPTLEELAKTLGCWPSLNYYITGCKYVLMPWKFNGCYSLFVIDHGKKHVTFIDFTPTQDWCKHMPYKRVNTSYFVLQAMVMWGSARRMEFDRDAKILRRNFVIDLLSYEDNSCRYAIPPNIQQRLINIARKD

SEQ ID NO: 82025 - protein, 325 aa, Zea mays
  Coding DNA Sequence Number=SeqID_38650
  Gene Ontology: Mol. function=DNA-directed RNA polymerase activity; Biological process=transcription
  Homolog annotation: Hit_ID=Q07DU9; Match level="QueryCoverage=47%, HitCoverage=13%, E-value=5e-79, Identity=94%"; Hit description=DNA -directed RNA polymerase
  Pfam annotation: Domain name=RNA_pol_Rpb2_1; Domain location=103-255; Score=-27.1; E_value=3.7e-05; Accession=PF04563.6; Description=RNA polymerase beta subunit
MEELQKDSALPSNSSDSEPEAMELDDNGAGKSHSIEGNRDSPIDTDEGQPSMDVDIKGKSSLNDDVNGKSSSEPFSNPPINMSVESLEKFCKEASRSFFDEVGLISHQINSYNEFVSHGLQELFDSLGEVIVEPGYDPSKKGSGSWKHAIIKFGRVKLEKPVFWTGKDEVSVDFKPWHARLQNMTYASRLRVEVTIQVYSLEKSDKSKTGNDGGYFLVKGMEKWGAKKSSNNRVDREVRTGKGMNSGVGGSLDRHRGGEDSSLAVRAQDEACITARVSGRRHEGARVPASGAMVSWAEGDTIASCWARLRLYPTGILIGAHNQNL

SEQ ID NO: 82026 - protein, 594 aa, Zea mays
  Coding DNA Sequence Number=SeqID_38651
  Gene Ontology: Mol. function=helicase activity; Cellular component =nucleus; Biological process=viral genome replication
  Homolog annotation: Hit_ID=Q1EPC6; Match level="QueryCoverage=80%, HitCoverage=29%, E-value=0.0, Identity=69%"; Hit description=DNA helicase homolog, putative
  Pfam annotation: Domain name=DUF889; Domain location=261-497; Score =433.5; E_value=2.9e-127; Accession=PF05970.5; Description=Eukaryotic protein of unknown function (DUF889)
  Subcellular localization annotation: CTP_CleavageSite=39; ConfidenceScore=5.49e-01
MPLPIPCPRHPLPLDPLPPADPARARPPTPTPSRFPALRARITRRSRTPARPPPPRLDSHRESSRHAAPYARGYRPHIPPPMPRPLRKQPPQTPARPRAIRPELSANHRHGYANMISIQASNNRPHQSAVILSVVDTSNGSVFFVDGPGGTGKTYLYKALLAVLRSQDKIAVATATTGVAAFIMPGGRTAHSRFKVPLTIDDGAICTFTKQSGTSKLLQKASLIIWDKTSMAKRQSIEALDNIMRDIMGRPGLPFGGKTIVFGGDFRQVLPVVRKGSRAQIVAASLRSSYLWESMCHLKLVRNMRAKSDPWFVEYLLCVGGGTEEVNNDGDVRLPDEVCVPYTGDDRDLDRMIDDIYPSLNENMSNTSYITSRAILTTRNDGVNMINMRMIDRFQREQMMYHSFDTAVDDPNNYYPTEFLNTLTPNGLPPHVLKLKIGCPIMLLRNIDPANGLCNGTRLVVRGFQKNSIDAETVLGQHAGMRVFLPRIPLCPSDDEMFPFHFKRKQFPVRLSFSMTVNKSQGQTIPNVAVYLAEPVFSHGQLYVALSRATTRLNVKVLVIPVTDDKMKKGVEKKSTINGVTYTKNIVYKEVLTP

SEQ ID NO: 82027 - protein, 32 aa, Zea mays
  Coding DNA Sequence Number=SeqID_38652
MGVPDFLCALACIQCAAGEVPEGARSLETPEQ

SEQ ID NO: 82028 - protein, 87 aa, Zea mays
  Coding DNA Sequence Number=SeqID_38653
  Subcellular localization annotation: CTP_CleavageSite=27; ConfidenceScore=5.63e-01
MLAFSFPGQSKGRSRPGSINQNPRRPTATVAPCRLPNLSDSGGGRVEPARNLSASVLCLQRMPRWLGPFCIFLHLAICKMMDSSLQV

SEQ ID NO: 82029 - protein, 140 aa, Zea mays
  Coding DNA Sequence Number=SeqID_38654
MAQLNTFCARHFATKSVLRGSTETEEWSPRMWLSLSPNGGLGLRLRRKKGQRVESRGRNLCGRGAGQDPTTDAGILGTLSPGAAKSLDNTTDAWVVGETRSCGGLGPLLSFVVAQAFGRKPLDRFQPVEDLEDSFLFAFA

SEQ ID NO: 82030 - protein, 69 aa, Zea mays
  Coding DNA Sequence Number=SeqID_38655
MSKELEEVRTLLEKNSDRFNRVSEALNVRIKAEVGKNVKLSETGIFNSVGAVSKEVVEDIPRALECVEK

SEQ ID NO: 82031 - protein, 150 aa, Zea mays
  Coding DNA Sequence Number=SeqID_38656
MLVDYTMVLDGPSVSVEGPTQQGVESVVEVTPASGVMSDGSSDPSLRLWLLRELRAMARTATGGVVVSDSVRGASLAEVQGKAASQTLSPAEARGKSPAAPARGVGAAAPRVGDDAVSAGDWTDLALCDAVDASPGEKAKMGSQTYVQCT

SEQ ID NO: 82032 - protein, 148 aa, Zea mays
  Coding DNA Sequence Number=SeqID_38657
MGKNNKRKREPTPPSEDFGDSEYSEEEFSSKSEGSSAPIPLRESSNDSDDSQGLAAEVWTYIRAVERSRLEGSDESEYSSDEEDSDGGGEDEDDDDDEGSGDGDGSGKGGGGGSKDGDGGSSRGSNRGGSSRGSTRGGSGGGSNRASG

SEQ ID NO: 82033 - protein, 229 aa, Zea mays
  Coding DNA Sequence Number=SeqID_38658
MAMMGSTSEKMYLCQLCNRFRISLSPMICNVCKTGETFLERRTARKHTGPIGVPSHQLAPRHENSSSGSNDPIGDLEAEVSRLQAELRRRTAIWVVDGDRINELRRDVRHLRDQLADRELALDWVVQSRSLAWDKEQKAQARVAELNLAVEELQTYCNTLHEEVHVLYSQLHPSEPANPDESEAGPSHVAGHALGGELDLFQPPPSMRLVDEWSPTPDDEAAKSNGKQE

SEQ ID NO: 82034 - protein, 155 aa, Zea mays
  Coding DNA Sequence Number=SeqID_38659
  Subcellular localization annotation: CTP_CleavageSite=33; ConfidenceScore=5.06e-01
MAQWLTRSTLAGGRRESGNRGLASPAKQTLIPRSGSFTEVCSVFSEGRTGLGKAWLAGLRRQGLGWPRTRRARANEGLSLICESPWQICPRYGDLWTPNQSLVHRCALVMVTPEVLQEATTLLPRMVQLRWGLGSAWSIAVIGQQTKTRALEAPL

SEQ ID NO: 82035 - protein, 74 aa, Zea mays
  Coding DNA Sequence Number=SeqID_38660
METPRKCCASTDHAHESSMRESEAMLAAEFFIAIEDEGFKPADSEEWSDGVFDNCDIILSIMEDEEAMSPLARG

SEQ ID NO: 82036 - protein, 103 aa, Zea mays
  Coding DNA Sequence Number=SeqID_38661
  Subcellular localization annotation: CTP_CleavageSite=72; ConfidenceScore=5.24e-01
MFVGFVKNVGTDVLKSVKFDGTHVLNVKFDGTHVLKVKNVGAVELTSLSSSKNRRRLYSSVHPRSYEQSSMPVARVKSLTGEGRAHHAKYCKSHQQHWIDRFS

SEQ ID NO: 82037 - protein, 447 aa, Zea mays
  Coding DNA Sequence Number=SeqID_38662
  Gene Ontology: Mol. function=nucleotide binding; Cellular component =intracellular; Biological process=small GTPase mediated signal transduction
  Homolog annotation: Hit_ID=P0A3B2; Match level="QueryCoverage=98%, HitCoverage=80%, E-value=0.0, Identity=82%"; Hit description=GTP -binding protein typA/bipA
  Pfam annotation: Domain name=EFG_C; Domain location=301-389; Score =79.3; E_value=1.3e-20; Accession=PF00679.15; Description=Elongation factor G C-terminus
  Pfam annotation: Domain name=GTP_EFTU; Domain location=1-102; Score= -28.4; E_value=5.7e-06; Accession=PF00009.18; Description=Elongation factor Tu GTP binding domain
  Pfam annotation: Domain name=GTP_EFTU_D2; Domain location=125-195; Score=53.7; E_value=6.2e-13; Accession=PF03144.16; Description =Elongation factor Tu domain 2
  Pfam module annotation: Pfam domain module=EFG_C::GTP_EFTU::GTP_EFTU _D2; Domain location=301-389::1-102::125-195
MDSNDLEKERGITILAKNTAIKWNDYRINIVDTPGHADFGGEVERVMSMVFDLFVNLDATDEQLDFPIVYASALNGIAGLDHEDMAEDMTPLYQAIVDHVPAPDVDLDGPFQMQISQLDYNSYVGVIGIGRIKRGKVKPNQQVTIIDSEGKTRNAKVGKVLGHLGLERIETDLAEAGDIVAITGLGELNISDTVCDTQNVEALPALSVDEPTVSMFFCVNTSPFCGKEGKFVTSRQILDRLNKELVHNVALRVEETEDADAFRVSGRGELHLSVLIENMRREGFELAVSRPKVIFREIDGRKQEPYENVTLDVEEQHQGSVMQALGERKGDLKNMNPDGKGRVRLDYVIPSRGLIGFRSEFMTMTSGTGLLYSTFSHYDDVRPGEVGQRQNGVLISNGQGKAVAFALFGLQDRGKAVPRSRCRSFKKFRLSVFIARSNDLDCKLPDR

SEQ ID NO: 82038 - protein, 64 aa, Zea mays
  Coding DNA Sequence Number=SeqID_38663
  Homolog annotation: Hit_ID=P0ACN0; Match level="QueryCoverage=100%, HitCoverage=27%, E-value=8e-26, Identity=92%"; Hit description =Uncharacterized HTH-type transcriptional regulator yihL
  Pfam annotation: Domain name=GntR; Domain location=7-64; Score=32.3; E_value=1.8e-06; Accession=PF00392.12; Description=Bacterial regulatory proteins, gntR family
MAENQSTVENAKEKLDRWLKDGITTPGGKLPSERELGELLGIKRMTLRHFVFYLEAESKIFRKD

SEQ ID NO: 82039 - protein, 174 aa, Zea mays
  Coding DNA Sequence Number=SeqID_38664
  Homolog annotation: Hit_ID=Q6QP51; Match level="QueryCoverage=36%, HitCoverage=29%, E-value=6e-13, Identity=60%"; Hit description =Putative growth-regulating factor 1
  Subcellular localization annotation: CTP_CleavageSite=28; ConfidenceScore=5.04e-01
MQAACNRTKWAHPFDSNAPSMEAQAHTSCNRRAGCYVRATAPPLAPLPRLLDCGTSIVTRGNPAYDPTVPARHIGHRTGDTFGRRSGRRFAFAIMTALKKGSGKGIPRKGSFPAKETGPEPPTDQRFEGWPLGGVQQPPQSVRAPRPLLVRGSKAGPSEGLNGRLRPFGLRAHY

SEQ ID NO: 82040 - protein, 873 aa, Zea mays
  Coding DNA Sequence Number=SeqID_38665
  Gene Ontology: Mol. function=RNA-directed DNA polymerase activity; Biological process=RNA-dependent DNA replication
  Homolog annotation: Hit_ID=A3BQI5; Match level="QueryCoverage=28%, HitCoverage=23%, E-value=2e-17, Identity=31%"; Hit description =Putative uncharacterized protein
  Pfam annotation: Domain name=zf-CCHC; Domain location=204-221; Score =17.5; E_value=0.0034; Accession=PF00098.14; Description=Zinc knuckle
  Pfam annotation: Domain name=zf-CCHC; Domain location=223-240; Score =9.8; E_value=0.05; Accession=PF00098.14; Description=Zinc knuckle
  Pfam module annotation: Pfam domain module=zf-CCHC::zf-CCHC; Domain location=204-221::223-240
MEAPTAGGIRVWVGATIIFLVILRFRMGARSGMTVTLPLPPSGLPPPDASFPPPIGPSPAPIPRPATTPLPSPASKDPSPGVQRGGRPEELRYAPCPPSSGLSPALTPRPATTQLPSPTSEDYPLGVVHGGRSKEQRWMEDGGACASSAASLVQGDVGRKSYREALFSPKPAASRDVGGWVTVVRRRSSTLKSLPRPVPVDLCGRCFNCFSTEHRAAVCRNRVRCFFCRLPGHRVGVCPRWRTDPPIPGRTLVWRPMAMKPSEKTVCGRDMAVAGGSGPATTTGEGAKKRTRRGQRKRKSGAGGQLPPPPAFGLDKPVSFVGRCGRIDRAEEELRRALIVSVVGREDSGCAVEVRDAIASRFCLEAGSLRIRRVAPNSFLVFFPSVAVADRVVGEGQSLHVPPLRLHIRRWSRQAFAIGGGQPLVPVGVELRGIPAHLWGIEAAEAVLGAFCLIHGFLPGLVKEEDMSVLRLKVWCRSPELLPAVVDLLAEEPMVCGEDGSWVPSTLVFPVSVVVLHSDGSSASGVDPPAPPPSGFVDEDSDHEHHVGWPGRPASSVRVPIHLRLGQRSRSGQVDDMSVEAVHQDLVEVGSVDAPALPIVSVEEREAPELEAPGHPPVLALDLAEDLRVSCQEDWSSHVVISPAGPCLDNPLVGVLMTDLAEVVTVGQHGSGFSYLLADGVSANVEEAVTAGQHGSGFSQLVAVGSPAVVSARVRRFESCQSSRDDRWRSKPPVFKVYSRRRLSQAQVVQEDLLLQSVVEMVPPLEEFKSAVTKPSDGLLPPPPHRRTKSRKKAMPSDFRPRRSRRVAKFPPELGSNAAAQVCRHLGFCDDMENISLKDACNYAKLFDSGLLSAHVAALAALFGWEVPQVGAI

SEQ ID NO: 82041 - protein, 227 aa, Zea mays
  Coding DNA Sequence Number=SeqID_38666
  Subcellular localization annotation: CTP_CleavageSite=39; ConfidenceScore=5.56e-01
MRTFHIMCAPSFSSSSDAPFVFPAFALFFHPNLLSPPTVAAANQSTLVDSAVYYLCRLQMPKSSSCSSPTMYIHDPFGHIYVRMIVMVLTSVATISFAIILSLSLTSCLHLRATPFSYSFDTSPDTDSRSGYCTSTRTFHIMRAPSFSPSSDVPFVFPAFALFFLPNLLSLPTVATASRPTLVDAGTGRVGHTPGLSPCVSSRRTWWRLPHLDYPGNEVSRSEILDN

SEQ ID NO: 82042 - protein, 380 aa, Zea mays
  Coding DNA Sequence Number=SeqID_38667
MGQRALAFTKLLLRDFFCNFLGKHRLPVVYAKSEDLTAKFQGRRVNLQKTGGLFKKFARAKGYRAPPPLDLGSTPGIRSAGGHPSVRRRERLTGGAGRAKRARATDRRGRAGRAGAGSGQAGPGGRGRPTGGAGRAQAADRRGPVARKAGCGGDTRPSDFRLMTKIRLGLFKKRIVRSEMDDGDRAASFGPLLRPAEVAAPAPAAGELAGDKGRGGSAGLRATGMVWEIGEGAGTYWRGLSRDRGTGGGGPRRTSSAATPTDSDEELSAAGSKGRKGRGRGRFLTSRRTPGTSRWRRRRDDGSGRRWRTTAAVRRTAGERGQRKSGRERGNWSVSRVADVEAKLTVAEGTAGLRRRRGNGLGTAAGNGGGALACAQRGGG

SEQ ID NO: 82043 - protein, 310 aa, Zea mays
  Coding DNA Sequence Number=SeqID_38668
MACLRHTARKSVIPFLPSRLAERPLRRTVSGQSSHLERLHHRLREEQERQRQQREHQGSSSPPEQEVESVRRHSSIPQLEAPPAPPRDASAVGGATGGGPGGDPDDDGGSDHSTESSEPQEAEGWVARPITRDAAHGCHFHDALDTLLRQAFDRHTWSIEYRCVVYLHSRGRYPDRWEATCLVRRPEDDLRGAEAVSEHYAISERDTAEAAMQDAARQSVVVSPIGEDNPRLSSTVNLVAVLNTELDHSLDELSRARTEIAELRAELAERHHQEGGSPAPVGTQHPYRSPPRGHHTYGSPACKTRIDLDP

SEQ ID NO: 82044 - protein, 191 aa, Zea mays
  Coding DNA Sequence Number=SeqID_38669
MGERVRASGARGSSGQGRVSSELHARRGRGEGGREQLGGGYAGTTGLTARARDAEREKKAGAGAREAGLTGWAHGQRESEGAGARGEAAAPTGGAGRAEREGGGYAGGDRADRLGPLRRERRGERRAREVGRLGRKAEGGRVLSNHFDILFGFKQDVGAKHLSLSRLVPMQRSPTTPSVECLKRYEMGHLC

SEQ ID NO: 82045 - protein, 149 aa, Zea mays
  Coding DNA Sequence Number=SeqID_38670
MEGGGQEGRGMGGGCTKNGGVRGRAARVMGKIGYHTSQPLQSPHEARRRRGLSLTPRRVATASASCILLLPSCVLTLQSLSALRRSSPWPLPRHQLRAALDVSRDAAFDDALDTGRPQHQHKNLFTSKERRSSQIAIRVKSKPDSFVCW

SEQ ID NO: 82046 - protein, 172 aa, Zea mays
  Coding DNA Sequence Number=SeqID_38671
MVVAELPAPNFLPWTRPPPRVKGGQLPDVADHGCPAAGDFLPSAPPSEHPNSAPPCSIFVVPAPSSAHSGELLLAIRRGARRLFVKMRSKPRAAGSLFREAQWTARRRRSPWFAVFAQPLCRRRSPPERNPAFCEKKANHSTLVGCAKLCTNRNHRRSCKRRLGLFMGRKMK

SEQ ID NO: 82047 - protein, 435 aa, Zea mays
  Coding DNA Sequence Number=SeqID_38672
  Subcellular localization annotation: CTP_CleavageSite=28; ConfidenceScore=5.10e-01
MQSACNRAKWAHPFDSNAPSMEAQAHTSCNRRAGCYVRATAPPLAPLPCLLDCGTSTATRGNPAYGPTVPARRIGHGPVSRGRRRDGRCGQKWADSNGGGRRAEAAVMSSAKLTGSKADPSEGFNSRLRALGLRAHYWSEVRRPAPRKGSTAASGHSGSAPTTNQGGNDLVTESHQREASSPRTPSKGDRVRQITRSSLETPCSAPSKGNMALFPPSSLRKGDAGAHFAAPLTGLTRGQRRLRRSDCYATRQSEADSSQGSDSSSAPEDDELRFARPQGSDSGSAPEDDELRFARPQGSDSGSAPEDDELCIARPQGWDSALASVDGLRLARPRGSDSTSASEDRLDLDLRGASTSPNLGLRPTTSQEAPSLPYPKLTQATGNKTGVPSGSSRLQRSSDGHDTTRTGCQNLSGCHDGMALSQNVGRAGKDGTALA

SEQ ID NO: 82048 - protein, 216 aa, Zea mays
  Coding DNA Sequence Number=SeqID_38673
  Gene Ontology: Mol. function=DNA binding; Cellular component=nucleus
  Homolog annotation: Hit_ID=Q84PW9; Match level="QueryCoverage=51%, HitCoverage=31%, E-value=9e-12, Identity=44%"; Hit description =Putative transcription factor Myb1
MRLFGVTIAPAPEADPPVRDPSPNPPVAAREDVMRKCKSMGNLAALGAVVDGGGGGADGGGAGDGYLSDGGLMQSSGKRRRAQERKKESAGELRIILIREEKGPKWTKERVWRTPYPFGPVPRAPEGTPSPTPAAAAAAAAAAANAAVPVSQANLTTACTSNTFLSQPKPSDTPSLPPKGGPPSEEDGLELTVAPPSQQNMTNMSSQNAVGVIQVI

SEQ ID NO: 82049 - protein, 218 aa, Zea mays
  Coding DNA Sequence Number=SeqID_38674
MGRRETEREGGRKPEGDRCKRGNPRPSCLSRAQFGRKEMIQGNDGASCDVIGPSPGLGEVEAPPRSRSSLSSEAEVESEPLGRARRRPSAEARAESEPWGQAMRSSSSSGAEPESEPWGRAKRSSSSSGAEPESEPWGRAKRSSSSSGAEPESEPWGRAMRIFLWRLRPDLAAVSLALSSGTAVGAAQAALSSCQAGQWSDEVTAVTSALSTEGRASG

SEQ ID NO: 82050 - protein, 247 aa, Zea mays
  Coding DNA Sequence Number=SeqID_38675
MVGRSEPGCDLGPALSFKDLHHPCWGGGWAEPELYLPRGFVGHLLPQHSRERALTGLAGGSDFDNAGLVSGERRQLQRVGLAGSAGSGSAPGAPSRRKSGCRTARTEGPPKTSRAARAAFVFWGCPAFAPVRRLCVEVGASPVREDPSGDLPAVKGNPRPLFNEPKPKAAVSVWIEAELAQKEDFVGRSLAGPSTGGTDAGVELPRPQAEPMPSGDSWLRLRGDRPEPSARAGFLEKALAAMARAWC

SEQ ID NO: 82051 - protein, 170 aa, Zea mays
  Coding DNA Sequence Number=SeqID_38676
MQSACNRAKWAHPSDSNAPSMEAQAHTSYNRRADCHVRATAPPLAPLPRLLDCGTSTATRGNPAYDPTAPARRIGHRPVSRGRRSDGRCGQKWANRTGKGGYPERDPSPQRKRAPSPPTDRRFEGWPLGGVQQPPQSARAPRPLLVRGSRAGPSKGFNGRLRPLGLRAHY

SEQ ID NO: 82052 - protein, 313 aa, Zea mays
  Coding DNA Sequence Number=SeqID_38677
  Gene Ontology: Mol. function=transporter activity; Cellular component= integral to membrane; Biological process=transport
  Homolog annotation: Hit_ID=Q84S07; Match level="QueryCoverage=55%, HitCoverage=55%, E-value=7e-29, Identity=45%"; Hit description =Aquaporin NIP3-3
  Pfam annotation: Domain name=MIP; Domain location=73-309; Score =124.3; E_value=3.6e-34; Accession=PF00230.11; Description=Major intrinsic protein
MADDGRRRNVSMDFSVSIPSAAAASMLVDKENTSDDRISIIIPHSRSPSSKILPLGFQRNEAPSDHSPARPVSAKRVALALTKKVAAELLGTFLLVFTVLSALITNEAHGRSAGRARRGSGPGGTAVVVVVSSIFHVSGGHVNPAVSVAMAVFGHLPPAHLALYAAAQLLGSVAASFVAKALYAGPANLLGPTVATVPSVGASQAFWVEFITTFVVLFVVTALATDPKAVKEMVAVGAGAAVMMSALISGYMDRVTDKVSTQNGGRESTGASMNPARTLGTAIATGTYTKIWVYMVAPPLGAIAGCGAYHALK

SEQ ID NO: 82053 - protein, 386 aa, Zea mays
  Coding DNA Sequence Number=SeqID_38678
  Gene Ontology: Mol. function=aminoacyl-tRNA ligase activity; Cellular component=cytoplasm; Biological process=tRNA aminoacylation for protein translation
  Homolog annotation: Hit_ID=Q84PX0; Match level="QueryCoverage=90%, HitCoverage=88%, E-value=1e-156, Identity=72%"; Hit description =Putative tyrosyl-tRNA synthetase
  Pfam annotation: Domain name=tRNA-synt_1b; Domain location=61-360; Score=77.3; E_value=5.2e-20; Accession=PF00579.16; Description=tRNA synthetases class I (W and Y)
MDSTPAPEAAPGASSSSPAAAAAAEGLAGGVAAMTLDERFEMLRGIGEECIQEDELRRLLENKPVPICYDGFEPSGRMHIAQGVVKTINVNKMVNAGCKVKIWIADWFAQLNNKMGGDLKKIQTVGRYMIEIWKAAGMNLDGVEFLWSSEEINKRAHEYWPIVMDIARKNNVKRIMRCCQIMGRSDQDDLTAAQIFYPCMQCADIFFLKANMLPGFKEGQEKMSKSDPSSAIFMEDDELISLLENINEVNAKLLYASMLAQEWFEFNAILLGSVEMAQVNVKIKQAFCPPKIVEGNPCLEYIKYIVFPWFGRFEVIRKESNGGNKTFTCMNELISDYETGALHPADVKPALAKAINEILQPVRDHFNNNNEAKVLLNTVKKYRVTN

SEQ ID NO: 82054 - protein, 150 aa, Zea mays
  Coding DNA Sequence Number=SeqID_38679
MVLSVAARGPARVVDLARAAAVASSTPETASACFRASASPCGTTAGGPPHLHARGLQGGDPGVDGAWAGGPAAAALRGRPVPRRRRGGRGVARALTALTRAPPRGARGQSTTEDEVPADSASETDLLLTDCSDDSDTGAEDTAFGTADAE

SEQ ID NO: 82055 - protein, 120 aa, Zea mays
  Coding DNA Sequence Number=SeqID_38680
MDLEALDARRRGERDDGYGQFPNSSDEIELLHLVTLVRDNNRLTWTQPVTNYNYALYKSLQHYLRPLWIKRSFYLYVGLQRRSSIKRNLRPFPGDDFSRSCFFTQDLRRNEAWAQQDVDA

SEQ ID NO: 82056 - protein, 141 aa, Zea mays
  Coding DNA Sequence Number=SeqID_38681
MAKTTRETGEDTAAAGVGAEAAGSTSNLLAPTDLSRHRRLAVGDRSGGQPWCLCACLDPRLDGLVPYSTRIKKVEKEIKEMAKKISDLCELLKPEAVWSSPRVSRSQFCIKPYNSYSAFFEALDSLHRRDGPSFHPTETEA

SEQ ID NO: 82057 - protein, 189 aa, Zea mays
  Coding DNA Sequence Number=SeqID_38682
  Gene Ontology: Mol. function=protein serine/threonine kinase activity; Biological process=protein amino acid phosphorylation
  Homolog annotation: Hit_ID=A3BKN0; Match level="QueryCoverage=22%, HitCoverage=5%, E-value=2e-13, Identity=85%"; Hit description =Putative uncharacterized protein
MWRIEEGNSGFSLYAFSQIKEATGNFSSENKLGQGGFGPVYKLLQLDPCDGGVHQASSSRSSIHHRRRMVTRAPRGEHHIGRGHESPTVDTTQSLPAAAVGEPARSQGPSRQCHAATEATPAHEGDAGPMLTLIDGADMAVVRPDRQPGTRRQPRPLERLRKATCGGSGPPAPTYASVSVGWKLGPSRR

SEQ ID NO: 82058 - protein, 208 aa, Zea mays
  Coding DNA Sequence Number=SeqID_38683
MTNIFNTLIFFNAGEVFRFGSLSCMADQEGILHRITDPSRKSFSDGTDRGGRLAPPNLSENYSDELKGTKTSTNLHPTQDCAGWAAAHLVESLLHWLGGWDVAHLADSLLLRLGDSLLRRLWEATPLAHQLEGYVIAHLTDHFVSSGAAAHVTNTTRRNKLLDPQPDYLNQLGVRGLYGGYHQMFFEDYKSRYAQRLISLFPTVTSHR

SEQ ID NO: 82059 - protein, 145 aa, Zea mays
  Coding DNA Sequence Number=SeqID_38684
MAIHPRIYVTRRAKVLPCSQSSPNLTAQHRRSAIAGTPRLPSPIAILRAIKCYPMRDGYVGVQDVVTKLADDATQGDGDVGCQDDVIKVPCGVAHGDGDASCQDDAAKLAAEAIGLDGNPNYLSWFQKLGDNRFVFGGDASADSL

SEQ ID NO: 82060 - protein, 19 aa, Zea mays
  Coding DNA Sequence Number=SeqID_38685
MESLARLSSAEINEIPDPT

SEQ ID NO: 82061 - protein, 203 aa, Zea mays
  Coding DNA Sequence Number=SeqID_38686
MGRICPGVSQLSDSPRCQEEVCAGPLQRFARLRPLATFEHWKKQTATCSTPSAAPEHARARARAAPKPSQCPATPSPVQPSEKTVHVSVKLPERGIGLCFTGEADPRSPDFNRPPATVDRGTPCTSLRFLARLDSLDLHEASYALGLNYAAVDRPEHTPPTSSPACSRGPGDSGHLRRRAVPRRDRQTLPEPTLHFAGTPSPP

SEQ ID NO: 82062 - protein, 203 aa, Zea mays
  Coding DNA Sequence Number=SeqID_38687
  Subcellular localization annotation: CTP_CleavageSite=41; ConfidenceScore=5.05e-01
MEEPQAMAVTPRSITTADALAVGGYKRSRGRERLSVSPFSRAATFSYEGPGPSFYSCKEKAQVESEPWGRARRSFLWRLGLDSAAVSLTLAGGTAVGAGQTALFSYQAILALNAPAIRLVGEAIWPRLLLREACPSWASGESKVRPLLEEALGQGVNPPGSTVPARGWARARQDRVPGVDRALTCIALIRPLQLVLMVITSRV

SEQ ID NO: 82063 - protein, 163 aa, Zea mays
  Coding DNA Sequence Number=SeqID_38688
MWDAMGANMRMTDGHPIVEQAHEIHVLVKELEIFCYTLTEKFVITKEGQVIVAPRVIVKALEQASRRLAKAVAYVGATMENSKGLLVFPAGEMYNRLVLILYSCRRFGPARTLNRLVNLTLRVPAQMDGCKMKHERGMRLILSCTGVLVVGVTSFAGEGLALK

SEQ ID NO: 82064 - protein, 70 aa, Zea mays
  Coding DNA Sequence Number=SeqID_38689
MAMDFQREVERREEEDDDNFVNLVRANYNDDEDGYDHAYGNGCLWCNLCSCKEGVEADLQEFQDVDEFED

SEQ ID NO: 82065 - protein, 142 aa, Zea mays
  Coding DNA Sequence Number=SeqID_38690
MELRSSNEEAERRRISPIRGLGRREDPALKEERATLHLRLNNRVRKGTGEGGYPERDPSPRRNRAPRPSLLIRGSKAGPPRVQQPPQIAWARHPLLVRGSKASPPKGSMAASGYSGSAPITDQGFEGWPPKGSQSPQTPSEG

SEQ ID NO: 82066 - protein, 562 aa, Zea mays
  Coding DNA Sequence Number=SeqID_38691
  Gene Ontology: Mol. function=protein disulfide oxidoreductase activity; Biological process=cell redox homeostasis
  Homolog annotation: Hit_ID=Q10PH6; Match level="QueryCoverage=96%, HitCoverage=90%, E-value=0.0, Identity=72%"; Hit description=Ternary complex factor MIP1, putative, expressed
  Pfam annotation: Domain name=DUF547; Domain location=315-460; Score =236.0; E_value=8.5e-68; Accession=PF04784.5; Description=Protein of unknown function, DUF547
VQVLEKRLNDQFVMRRALEKALGYKPCAIHASSENCIPKPTEELIKEIAVLELEVICLEQHLLTLYRKAFEQQFSPASSACDMESNKQPARSFSGILSEAPELSFSTPRKHHQLNQSSRMVLARKSTPTASTSETSNEKINIGRSHSSLLHRSVRVSPSANNLARALKPCHTSPLSFVEEGKCMDPGVVSLADILGTRVADHVPQTPNKISEDMIKCITAVYMRLRDVPAVQHAFFPSPCSSFSSASGLSSKYTADIWSPRCRKESFVEEWQDNGLGNGESRELALPYDSVVEVSALCKGDQRSADVKDMLRKYMSLVQLLESVDLSGMKHEEKLAFWINVHNAMMMHAHIEYGIPQSNSKRILLTKVSYIISGQRVNAELIEYQILCCRAHSSGQWLRLLLYPKWKSRDKDELQGFAVDRPEPLVHFALSSGSYSDPVVRLYSPKSVFQQLEAAKEEYVRANVGVRGRGQHKIILPKALELYARDAGLGAQEVVAAVECHLPEGLRDAVRRSQQQAGRARAVEWKPHNLAFRYLLAKELVGGSPACSRPLEPVSAPLRAGP

SEQ ID NO: 82067 - protein, 297 aa, Zea mays
  Coding DNA Sequence Number=SeqID_38692
  Gene Ontology: Mol. function=metal ion binding; Cellular component =ribonucleoprotein complex; Biological process=ubiquitin cycle
  Homolog annotation: Hit_ID=Q10PH9; Match level="QueryCoverage=94%, HitCoverage=46%, E-value=1e-133, Identity=82%"; Hit description=IBR domain containing protein, expressed
MSASMFSEKCAKVFTSSTGRDHTWSTISGHSCGRFTDDQTKKTEQARRDLYRYMHYHNRYKAHTDSLKQEAKLKNEIQGKISISENKESKIKDYSWVINGLNRLFRSRRVLSYSYPFAFYMFGDEIFKDEMTPEERELKQNLFEDQQQQLEFNVERLSGFLEKDFQLFTDDEVMDTMKHVINLSNVVDRLCKQMYQCIENDLLYPLRTPHNIAPYKSKGIDRASELNISWDPGEQSSQSTKHSQDEHRNKQASNISGKRTHELHGSSSSNKRERVDVNGGGGALFDLNVPAEVVDKI

SEQ ID NO: 82068 - protein, 271 aa, Zea mays
  Coding DNA Sequence Number=SeqID_38693
  Gene Ontology: Mol. function=protein serine/threonine kinase activity; Cellular component=integral to membrane; Biological process=protein amino acid phosphorylation
  Homolog annotation: Hit_ID=A2XE42; Match level="QueryCoverage=84%, HitCoverage=32%, E-value=7e-65, Identity=54%"; Hit description =Putative uncharacterized protein
MVRGSAAAAALLLLPWLLHAAAAGNGSCARSCGGLTVQYPFGFSPGCEIRLGCDPADGTAWLGKTRELGLLVSNVTARALFLTLRPNCSRRLNASVEALFTKAYAPGSQNGLVVSSCSSASQADHIRNCSVPPSAYLDNSSQCGRAAADSIRCPVLTRPTSVPDRFLNRTRMQALAAECTGLVSAVSYLDAPAPALLLATMELEWWMLGPCRCSSHANCTQVTTPVAGQEAFRCDCPKGSEGDGFAEGVGCREGLIRQNPLPMGLEGIERD

SEQ ID NO: 82069 - protein, 548 aa, Zea mays
  Coding DNA Sequence Number=SeqID_38694
  Gene Ontology: Mol. function=monooxygenase activity; Cellular component=chloroplast; Biological process=electron transport
  Homolog annotation: Hit_ID=Q6RW10; Match level="QueryCoverage=87%, HitCoverage=99%, E-value=0.0, Identity=91%"; Hit description=Allene oxide synthase
  Pfam annotation: Domain name=p450; Domain location=15-483; Score= -132.7; E_value=3.8e-06; Accession=PF00067.13; Description=Cytochrome P450
MATSVRGFSSALRDVPGSYGLPLVGAVRDRLDFYYFQGQDKYFESRVERYGSTVVRMNVPPGPFMARDPRVVAVLDAKSFPVLFDMDKVEKRDLFTGTYMPSTSLTGGHRVCAYLDPSEPTHAKVKQLLFSLLLSRKDDVIPVFRSNFSSLLATVESDLAEGGKAEFNKLNDVTSFDFIGEAYFGVRPSATDLGKGGPTKAAKWLIWQLHPLLTLGLPMVLEEPLLHTFHLPPFFVKGDYGALYKYFSTVAKQALDTAEGLGLSREEACHNLLFATTFNSYGGLKVLFPGILANVASAGEKLHERLVAEIRGAVAEAGGKVTLAAVEKMELAKSVVWESLRLDPPVKFQYGHAKKDLQVQSHDAVFQVKKGEMLFGYQPCATKDPRVFGATAKEFVPGRFLGEEGSKLLQYVYWSNGRETENPTVDNKQCPGKNFVVLVGRLFLVELFLRYDTFTADIGKDLLGSSVVFTSVTKATSGSSASPDPRPQPQPRPREKVSASPDPRPRPQSQEKVPASLDLSLGLERSHRLVRPRPRTDYATGDTSLPYP

SEQ ID NO: 82070 - protein, 69 aa, Zea mays
  Coding DNA Sequence Number=SeqID_38695
MATATCLGFVRRDGRGRIWPGLFEREKKAGTRERVAAVSLYGGRAWRIGQSIPDYPEVHGGFMLGGAGG

SEQ ID NO: 82071 - protein, 63 aa, Zea mays
  Coding DNA Sequence Number=SeqID_38696
MATTTCLGFVRRDGRGRIRPGLFEREKKAGTRERVAAVSLYGGRAWRIGRSIPDYPKVHGGFM

SEQ ID NO: 82072 - protein, 129 aa, Zea mays
  Coding DNA Sequence Number=SeqID_38697
  Subcellular localization annotation: CTP_CleavageSite=89; ConfidenceScore=5.82e-01
MPTLKPSPRRSSETTSVGTTFLKAIHPNSSSRVTLRDIGTRTSIRINSSFSGSSLNSSSSTTRTTNLEETSITGRTARHLAFLPQQPIRATIQPQHKEEVEDVSTLENKSTKRRIARRKQPNNSQFPTP

SEQ ID NO: 82073 - protein, 120 aa, Zea mays
  Coding DNA Sequence Number=SeqID_38698
MALALMVRTIQTTRINTNYIRQPRQVRVYPVVVEEIPVDLSCIRVDNGVILEDNSEAFLPRPTPLAESLAFAAGSSASASPAPAVQAPTPGGDDPDNSGDDDEDDEEEEENINDEANDEQ

SEQ ID NO: 82074 - protein, 165 aa, Zea mays
  Coding DNA Sequence Number=SeqID_38699
MAWRIHAHTPQVLVKHPEQQSGSRRWCSQFALTTAPFSPSELGDGIRGVARLCAKAGLELWTLDSYSPRPPMVVTRGLLELVPRSRARIAGTPNRVHGVPERGFRDRDDKWVPQVNCTSDGIGNLRAVFAMTAPRVPQVGDVFSVGGFARKLRLIGPASRIQPKR

SEQ ID NO: 82075 - protein, 57 aa, Zea mays
  Coding DNA Sequence Number=SeqID_38700
MARVACTLRGKRLDSGVSMLSVGVNPVRKQQTFAAFALRWCQMKNLKSEASGGCCPP

SEQ ID NO: 82076 - protein, 100 aa, Zea mays
  Coding DNA Sequence Number=SeqID_38701
MNNAPVLNKLTGIRFCVTLVLLPSIKPKMINTRKGGRIDLPANPHNWRVIRQQQAEMNPMNPPSTRIDPVVAAQMQMLQQMANTMMDMQAQMRQEHQEMR

SEQ ID NO: 82077 - protein, 227 aa, Zea mays
  Coding DNA Sequence Number=SeqID_38702
  Subcellular localization annotation: CTP_CleavageSite=5; ConfidenceScore=5.11e-01
MAVAPCSSLAPTPKLTSTPDILSKLSLSYVPPHHTLDFSFRRTGPWDPRTDPVKLSGEPEGEGANRRASRVADDKAELTEATGAASVQRRRQNGRTDTANGGGTPWACARCEESAEGYECASEGRGGRAGAGQLEKGWGGDGRGLGVRHGCGVHSDARVVRGRFRGEGSDRRDPPIGSVLIGRPHWATGKREESVRAWAGADRWGLPVMGGGRTRARLKWAELGYSS

SEQ ID NO: 82078 - protein, 57 aa, Zea mays
  Coding DNA Sequence Number=SeqID_38703
MAGGKELAGAKEGCLADDGFELGIKVNMLDLWLKVADNKFILLIFSFLLKLQSLTQQ

SEQ ID NO: 82079 - protein, 553 aa, Zea mays
  Coding DNA Sequence Number=SeqID_38704
  Homolog annotation: Hit_ID=Q7XBD4; Match level="QueryCoverage=45%, HitCoverage=25%, E-value=3e-07, Identity=24%"; Hit description =Cinful1 polyprotein
MSYGGQPSVEVFAKQYCLHWQKRKIGQKIAQFGSCTFTPKSGKTSMEVVELVPYARNKWGNWWDYWFYVLEAEVEDHPGLPVAIMCSHYYVVYPSFEVAEDDENEMALRIAARSSSGRDLVEEFIGYGVWPLAHGWALGEVCPREMPSLGGRKVRSPRFALDLRGRDPASVVREAEDGAVRIVGRYVPKTEAQRSWDIRGSNDRLNRVFELNSLSYGGYPGEDVVNRRGKKPAALTEDDPTPEAAPATKKRKLGTAVGELGVSDSFAMELMGTCAAPGGRMSSPELRESSARMLEVNGGRWPKDVPIPRAVGEDFFTSRMARDLRVFPYGRNIAAVVSAVMNKDRQEAAQKRRAVIRLPEARPKRARGTAKATASGGSQPALAAKLAAPGSSKVPESVKAAGAGGTKSAPDGAAKARELPSPGNVDDYLVGSGEGQLVVVPPAVATTVSAAVPGVKGSALSAGGEISAVTAVKDEASTVSRRLREASQQLSQAADFADRVASGALTTDVFAEVERLRAQHADAVREKSAADSKCRKLAEKVAALEGERTDLRH

SEQ ID NO: 82080 - protein, 58 aa, Zea mays
  Coding DNA Sequence Number=SeqID_38705
MGCAGAVLPAGSTVVDPFHHLHRGHADEPATMRGLATAAWVVVGSRVNCRRGINSERL

SEQ ID NO: 82081 - protein, 180 aa, Zea mays
  Coding DNA Sequence Number=SeqID_38706
MRRQAKSGDEKRLKNNQFALGLGDLLHPRDPTNPAAKIPQPLHILNAGQRYPRNTEFPVSPGSNSAAAAVPERSSEDASAVGVVVADKEEDSMATYHQRRRAVSFTRASSPTNRSKEGRRSSEQFESEARVFAAHRKGATLRETRNPTVRRQPTVMSKTPAEPLRARAASPPSSDVFGTK

SEQ ID NO: 82082 - protein, 165 aa, Zea mays
  Coding DNA Sequence Number=SeqID_38707
MGKNNKRKREPTPPSEDFGDSEYSEEEFSSESEGSPAPVSPPVSSDDSDDSQGIAAEVWSYIRAVERSGLEGSDESEYSSDEEDSDGGDEGEDDDDDDDDDDGGDGSGSGGGDGSRGSTKGDSSRGSTKGSSRGSTKGGGGGGSTEGSSRGSTKGGGSGRGRASG

SEQ ID NO: 82083 - protein, 243 aa, Zea mays
  Coding DNA Sequence Number=SeqID_38708
MARAEDVEDFGPLNIVQPKAEANPVVAEAEVDPAPPPETGEGSPAAPAAAVSGGGSSLATAPMVENPPKAATEPAVEDPMAVAGSSQVQDFGPAHATATANFVAASTVVAGNESDESAFKFSDFDDSGSSVEWTEESSDEDLDYFAALDVAVAEASPHVTDAEVLPGPSAGRRRRRAVAKRRVSEVDGGRLRVGRAGKRELLSSPVGASVGEGELRSLFEGVELMIMLFNYREMGIIPKVEPM

SEQ ID NO: 82084 - protein, 154 aa, Zea mays
  Coding DNA Sequence Number=SeqID_38709
MTITVRSIRIGRHTPPLAEAHKPPVSRLRSNLHYRWLFAVAARNTKAAMFWENKLARDGSMGENGSRGLPFNPRGFGLEGEGGRPHPRSWRQYSRLPLRELGVGDASDRPGLPVSGPRRSREWSKGVAGSGSRGAATTEYARRGGGVWSRGPTR

SEQ ID NO: 82085 - protein, 188 aa, Zea mays
  Coding DNA Sequence Number=SeqID_38710
MALARAYKAHSGVDHTLPRTLKPHRSSVHHRLPASVHAPVKLPEQGIEACFAGEASPRSPEFTTPAGVRGPDRRDLADTPAADENTRLRTRTEQFRPSPSSSHCNLADGEYVLVPEQGAAQEVAPDPAPEPAPEDLPATALEGKPRNPFEMDTSSLEDMVAGVTWPSILPPGWTVEWDPTSAEEEHEE

SEQ ID NO: 82086 - protein, 69 aa, Zea mays
  Coding DNA Sequence Number=SeqID_38711
MGRVIGCDKARTSSSEGRGVPWANTGAQDGAELAGHCVRHDEPVRINSGKAELVKHFANRTLDRELNPK

SEQ ID NO: 82087 - protein, 91 aa, Zea mays
  Coding DNA Sequence Number=SeqID_38712
MAEVWTYIRAVERARLEGSDESENSSDEEDSDGGVEGEDDDDDDDDGDGSGRGGGDGSRDGTKGGSSRDSTKGSSRGSTKGGGGGRGRASG

SEQ ID NO: 82088 - protein, 84 aa, Zea mays
  Coding DNA Sequence Number=SeqID_38713
MGLEIFFASGAPGSEPGHEGSGNKSKAGDIPTSERWWRRKQEERVPRSAGPGGRWLRLEPWRLLPEWSASQNWALPNSLPKLLD

SEQ ID NO: 82089 - protein, 176 aa, Zea mays
  Coding DNA Sequence Number=SeqID_38714
  Gene Ontology: Mol. function=metal ion binding
  Pfam annotation: Domain name=AT_hook; Domain location=99-111; Score =16.8; E_value=0.03; Accession=PF02178.10; Description=AT hook motif
MEQRGGNAASQSHSISFHRPKKEVSDNNCVYPNEVHHTARERTQCLDEKVLKVESPQKKTAPKKLSPKKKQKKQKKQSRKIETRRNQIVLKCKKKIGKKGKRGRPRKNPTDLSKNEPSKIHESEPSNVSKNKPVKRISKRLHDKYMKSNSNVSENAASSSKRKRTFSQYSYWLNGL

SEQ ID NO: 82090 - protein, 707 aa, Zea mays
  Coding DNA Sequence Number=SeqID_38715
  Homolog annotation: Hit_ID=Q10CL9; Match level="QueryCoverage=85%, HitCoverage=83%, E-value=1e-155, Identity=50%"; Hit description =Expressed protein
MSFTPVPRFRGAAYSQLCPQSSSCAEHLGFAAQGLPVNAAEFGLNNDSSLVGGYQQFDYLLGPPQTEVCEGMWMKNINTSIIHRRRPSNASCLDHTEELTSYENDEGAISFGSSCSTGIASYPYSTPLQRNSHISDTRDGTWDALVQMQEALEASNSDNGLNEECSDLTFNHAELSGGNAVKHKVVWDNGSLNSPSFTSNLLSFPGDTETTLTSASTVYCTFQNFADLQHKMNNNEQNKLSSEVELPRQKVPMTNHVNGSGGEMHSAEWGTNPGLIESSGFMPSNEDRQNDISHQPSSSFVYSADGTVDHCSKKSPLMYECEEQMEIDSLLNSFGVSTDSFSQTYGMFERSNNLVEFDMKTELDESGSAACFNNNAPYMQTGPPESAISDGSSYPEQYQSTSQTCGLVYASASQWQNMSSSGLPLLDCRKSIGEPTSIISLGGNGKGHLLPTSEDTLLQKPQSVAPDARLEMTDNVADCYLESAASLDGHSCPLGASACHDEAMAAKDLQTAQHGVVTDCTFGIHTSNHAGHSDMLLPITQTTSVQEPGLSLSKDLNSSCIRGTEVKKVDLTATYNSERHGILRLKSFEQKTPESMGMKTYIYHCGDHSQIVDPQQSIILAASKPSHSSVLPVDKSDGKVVSQQKKRKRAAENLLAWHDHIMPGHGSMHRRRLPNQSSTSGKEGSRILSEVLETYESRLGKLEISLL

SEQ ID NO: 82091 - protein, 622 aa, Zea mays
  Coding DNA Sequence Number=SeqID_38716
  Gene Ontology: Mol. function=ATPase activity, coupled to transmembrane movement of substances; Cellular component=integral to membrane; Biological process=transport
  Homolog annotation: Hit_ID=Q8LKU6; Match level="QueryCoverage=96%, HitCoverage=96%, E-value=0.0, Identity=87%"; Hit description =Putative ABC-transporter-like protein
  Pfam annotation: Domain name=ABC_membrane; Domain location=19-311; Score=185.4; E_value=1.4e-52; Accession=PF00664.14; Description=ABC transporter transmembrane region
  Pfam annotation: Domain name=ABC_tran; Domain location=385-570; Score= 221.1; E_value=2.6e-63; Accession=PF00005.18; Description=ABC transporter
  Pfam module annotation: Pfam domain module=ABC_membrane::ABC_tran; Domain location=19-311::385-570
MGKNMRIKTAPKANRVPLLGDGETSRALSDLEEGSDVQPKYGGKIIDIVSRDVRRPEDKAQALEDVKGTILYIVTIVLVGSVCTALRAWLFNSASERVVARLRKDLFSHLINQASKFVLFKVYHEIAFFDVTRTGELLSRLSEDTQIIKNAATTNLSEALRNVTTTAIGLGFMFSTSWKLTLLALVIVPVISVAVRRFGRFLRELSHQTQAAAAVASSIAEESFGAIRTVRSFAQEYHEISRYGEKVEETLKLGLKQAKVVGLFSGGLNAASTMSVVIVVIYGANLTINGYMTTGSLTSFILYSLTVGSSVSALSGLYTTVMKASGASRRVFQLLDRVSSMTNSGDKCPINEKDGEVELDDVWFAYPSRPSHMILKGITLKLAPGSKVALVGPSGGGKTTIANLIERFYDPLKGRILLNGVPLVEISHQYLHSKVSIVSQEPTLFNCTIEENIAYGLEGTTNFADVESAAKMANAHNFICGFPDQYKTVVGERGIRLSGGQKQRIAIARALLMNPRVLLLDEATSALDAESEYLVQDAMDSLMKGRTVLVIAHRLSTVKSADTVAVISDGLIVESGTHDELLDRDGIYTALVKRQLQGPKFEATSSISEASEIEAEPSSNGQ

SEQ ID NO: 82092 - protein, 516 aa, Zea mays
  Coding DNA Sequence Number=SeqID_38717
  Homolog annotation: Hit_ID=Q8LKU4; Match level="QueryCoverage=32%, HitCoverage=57%, E-value=5e-67, Identity=73%"; Hit description =Putative uncharacterized protein 170F8.6
MASRLSDNVLQTMTEKIMRSDKTSKRNFQHGNEALKDSVAEGAACSSLARREHSTRENGASRSKILKRSNVKSPVDSCTEQGTDMDYHKMKSADLLGNLEEVYQERTCLGYCSSQKLEEYWENENVSSLNSSSLQAGKKRKKRRGRKKHNRRKKANLQDSPASTAADNSGLVTFSENCTSALKLEEQRKKQDQNKTSMTNLLLINNAKRSEPFDVNLEGAIEKSCELAKNSFDNTLENRYELAKNSFDNTLENRYELAKSNSDYINMVRNGLQEQDLACLSNSHNVNYLKPSHLAEEYTEKLKHVFSLGKSLRPPKKKLLILDLNGLLVDINEDYHNAHMADAKYVQDMSKCTFTGHKTLENKHKPLVLKELRKLWNVEEQDLPWEVGDYSPSNTLLVDDSPYKALRNPVFVQPLMPSFSKFTYTEYETPTAFLYLVQPHTAIFPHSYSYLNWNDDSLGPNGDLRVYLQNLAAADNVQHFVRDNPFGQPFITESDPHWNFYAQIADRGRAPLTCCA

SEQ ID NO: 82093 - protein, 191 aa, Zea mays
  Coding DNA Sequence Number=SeqID_38718
  Subcellular localization annotation: CTP_CleavageSite=86; ConfidenceScore=5.84e-01
MSSPGFSGSVADPPCAYEGSVDSFSTTPRRTSSSTPSPSTTPSLPVDPWQRRNTDSPSPHLRSSLWAVGWSSWELWLAQLVNRSIASATPPGISLAPPPRGGLLGYRLWGVGNHRGYPRGHTEGVRAVAKLTGWAKPRQFLTGARAPSRIRTAPWTGHLRGRILDEQATVETEVQQVEIAEQELVEGKLCP

SEQ ID NO: 82094 - protein, 147 aa, Zea mays
  Coding DNA Sequence Number=SeqID_38719
MRNPCLPTPMMVTSSLLSFFCMGQPMPNFHFQFDLNIPPEDGINAEENVAANADDGWDPWPVEQAQPPVPEVVPNNVNDVINEEEQFSYQLSGLENLPSDDSVGYFNDIIIPQGVQLQQEEGPAEAILALPAFPPDNINLEGNNVEG

SEQ ID NO: 82095 - protein, 242 aa, Zea mays
  Coding DNA Sequence Number=SeqID_38720
  Gene Ontology: Mol. function=transferase activity, transferring glycosyl groups; Cellular component=cytoplasm; Biological process =metabolic process
  Homolog annotation: Hit_ID=Q8LKT5; Match level="QueryCoverage=97%, HitCoverage=50%, E-value=8e-98, Identity=71%"; Hit description =Putative glucosyl transferase
MPPMCPSQMPWSIDGDVAGQEVAYQLVTRNTQAARVHAEVIVCNSFRDAEAAALELFPSILPIGPLFADEELMRPVAQMLPEDTGCLPWLDARADGSVVYIAFGSFAIVNPRQFEELALGLERTGRPFLWVVRPGFTAGNELSKQAWFDEFQCRVAGRGMVVSWCPQQKVLAHRAVACFVSHCGWNSTMEGVRNGARFLCWPYFVDQFANRSYVCDIWRTGLAVSPGEDGVVTKEEIIKTMF

SEQ ID NO: 82096 - protein, 211 aa, Zea mays
  Coding DNA Sequence Number=SeqID_38721
  Gene Ontology: Mol. function=structural molecule activity
  Homolog annotation: Hit_ID=Q245U8; Match level="QueryCoverage=96%, HitCoverage=32%, E-value=7e-19, Identity=37%"; Hit description=Phage tail fiber repeat family protein
  Subcellular localization annotation: CTP_CleavageSite=32; ConfidenceScore=5.21e-01
MDQMTNSQMMNNSPMINFADQFYETDQMTNSRMMTNSANQLYDMDQMTNSLMMTNSLVMTNYPVMTNSPMMTSSPVMTNSPVMTNSPVMTNSWMTTNSLMTNSVDQLYETNQMTNSPMMTNSSVMTNYRMMTNSTMTNFSDQLYETDLMTNSRMMTNSPRMTNYPMMTNSPMMTNYDDQLSANQLRPTNSPLSNPVRQRSKSRATDPRQLR

SEQ ID NO: 82097 - protein, 73 aa, Zea mays
  Coding DNA Sequence Number=SeqID_38722
MDAGDQVYEGGPHQVDHRSWFYPCNHRCARCWRATTYAVEVDKAGFTGDGGKEVEISKHDAASWSKTLTTGEC

SEQ ID NO: 82098 - protein, 188 aa, Zea mays
  Coding DNA Sequence Number=SeqID_38723
  Subcellular localization annotation: CTP_CleavageSite=38; ConfidenceScore=5.17e-01
MHHASAAGSYSSTAARGATVDQVHVPPHRHGERVRKRSAAAVRGQGQRGDLERGRGGVEVEEKFESGGGGHSEEAWAEDIQQELVGESRDGGFGLGILDVGGREGDRDGGVAGGVGGDAGPREPREGARVAALRGHGFLADAGAGIARTGARAGGARESRERSHGEAVDAYFTLLWSSKDIRFNTKLI

SEQ ID NO: 82099 - protein, 24 aa, Zea mays
  Coding DNA Sequence Number=SeqID_38724
MVVVFCEFPAQGEALQCAFFQQVG

SEQ ID NO: 82100 - protein, 568 aa, Zea mays
  Coding DNA Sequence Number=SeqID_38725
  Gene Ontology: Mol. function=protein serine/threonine kinase activity; Cellular component=plasma membrane; Biological process =protein amino acid phosphorylation
  Homolog annotation: Hit_ID=A2YXL4; Match level="QueryCoverage=99%, HitCoverage=99%, E-value=0.0, Identity=73%"; Hit description =Putative uncharacterized protein
  Pfam annotation: Domain name=APH; Domain location=49-290; Score= -14.0; E_value=0.063; Accession=PF01636.14; Description =Phosphotransferase enzyme family
  Pfam annotation: Domain name=Pkinase; Domain location=73-364; Score =318.9; E_value=9.2e-93; Accession=PF00069.16; Description=Protein kinase domain
  Pfam annotation: Domain name=Pkinase_Tyr; Domain location=73-362; Score=-53.2; E_value=3.8e-09; Accession=PF07714.8; Description =Protein tyrosine kinase
  Pfam annotation: Domain name=efhand; Domain location=411-439; Score =22.9; E_value=0.0012; Accession=PF00036.23; Description=EF hand
  Pfam annotation: Domain name=efhand; Domain location=447-475; Score =25.5; E_value=0.0002; Accession=PF00036.23; Description=EF hand
  Pfam annotation: Domain name=efhand; Domain location=483-511; Score =21.1; E_value=0.004; Accession=PF00036.23; Description=EF hand
  Pfam annotation: Domain name=efhand; Domain location=514-542; Score =33.3; E_value=9e-07; Accession=PF00036.23; Description=EF hand
  Pfam module annotation: Pfam domain module=APH::Pkinase::Pkinase _Tyr::efhand::efhand::efhand::efhand; Domain location=49-290::73 -364::73-362::411-439::447-475::483-511::514-542
MGGCYSAFACSRKLRGRISFILPVTERDRDDRSSDGGASSVASHSPSPSPSPRKDDAGPLVVRTTAAEFARRYVLGRELGRGEFGVTRRCRDAATGEALACKTIRRNRRPRGPAARRLGAGPPHHGPGAPPAAAGQDPAAAAHAADVQREVAIMRRMSSRGGGAVVRLREACCEDSAGAVHLVMELCEGGELFDRIVARGHYSERAAAAVFGTIVDVVRLCHSNGVIHRDLKPENFLFANKSEDSQLKVIDFGLSVFFSPGDRFTEVVGSAYYMAPEVLKRNYGPEVDVWSAGVILYILLCGVPPFWGDNDEKIAQAVLRGNIDFNREPWPRVSANAKDLIRRMLDPNPSTRLTARQVLEHPWLKNADTAPNVSLGEAVRARLQQFSAMNKFKKKALGVVARNLPVEELDKYVQMFHLMDKDHNGNLTLEELMDGLHINGQPVPESEIRMLLEAADTDGNGTLDCDEFVTVSLHLKKMSNDEYLASAFRYFDKDGSGFIEPEELRDELGPNDQAILDIIRDVDTDRDGRISYQEFELMMKSGTDWRNGSRQYSRANFSSLSRRLCKDM

SEQ ID NO: 82101 - protein, 68 aa, Zea mays
  Coding DNA Sequence Number=SeqID_38726
  Subcellular localization annotation: CTP_CleavageSite=52; ConfidenceScore=5.41e-01
MALAPLPVPPAAAKRGAAVRPPHGRRSRRAQVCRIRGVLLRRRPKGSYKALYTAEVATAFLDGLVLTP

SEQ ID NO: 82102 - protein, 242 aa, Zea mays
  Coding DNA Sequence Number=SeqID_38727
MDPQGDPVPPRSEACLPPETLLDSPRVQTSDKFMQKWPQPKTRASSSNADGNPGSGPSPTASTKPRRAPQLSSSWEGPFKDLSAKAGGPDSLGAGSGERHPVPWGGPEPVWPLSLVPYPKACTLHHSVTGLGPSRCYLLGATAKLFLSLTNGSDHLRTNDSSHLRTGGLPATVAAPVAHKEVLAPALLWSEDKTIQERGRHLRGGTGSGAKAIQAKEPDTWQLTAPTAGQPRVAEVRLLRKA

SEQ ID NO: 82103 - protein, 84 aa, Zea mays
  Coding DNA Sequence Number=SeqID_38728
MGERWRESFGRVRGNSGEESWPWGEAIECDRAWSSSVEVGECYGPTQGHGTGLSWLDTVRGATSKRDQTPVRPNWLRVLKLNSN

SEQ ID NO: 82104 - protein, 110 aa, Zea mays
  Coding DNA Sequence Number=SeqID_38729
MSRAFDDYYIEDCGVILAPEVTQRRIDNSDQFVILATVRASTEHVLGYRDPHRRRDHLSTQTLQGTGRRDTALAAYRNWGAIVHQLCRETYLLEDPAEMTARRKIHQPES

SEQ ID NO: 82105 - protein, 144 aa, Zea mays
  Coding DNA Sequence Number=SeqID_38730
MCLLDNCTHLAGKTYKPINKCKLGRSYQQNKKLRRPDSGLQRERHGSGVHHVVAFPHRNARNGTASKTHHVVHITVVGDQMTGDTAAAVRVGPKAGRAEQPRRGAEGWRSRGAGSEGWRPCSGGADGGEADERGRRRGSRPRVP

SEQ ID NO: 82106 - protein, 674 aa, Zea mays
  Coding DNA Sequence Number=SeqID_38731
  Gene Ontology: Mol. function=binding; Cellular component=nucleus
  Homolog annotation: Hit_ID=A2XA94; Match level="QueryCoverage=87%, HitCoverage=71%, E-value=1e-173, Identity=69%"; Hit description =Putative uncharacterized protein
MGAVSREVSSACERLCFICPSLRTRSRHPVKRYKKLLAEIFPRTQDEGPNDRKIGKLCEYISRNPMRVPKITVYLEQKCYKEFRAERYGSVKVVMAIYRKVICSCQEQLPLFANSLLTIVETLLEQNRQDDLRKLACQTLFDFINSQVDSTYMFNLENQIPKLCHLAQEMGEKEKICILHAAGLQALSSMIWFMGEHSHMSAELDNVVSAVLENYESPYANADNDAAVEDIRTQWVDEVLKAEGHEPPAVTILTRVPSWKVIRAVHGQNAHILLSMLVKHLEHKNVLKQPDMNLDIIEVTSRLAEHSKAQSSIALMSSISDMVRHMGKSMQSLASDAGPGDNMVKWNSRYGKAVDECLVQLSRKVGDAGPILDTLAVVLENISSSMIVARSTISAAYRTAQIVASLPNLSHQSKAFPEALFHQLLLAMLYPDYTSQTRKIDLRRTLSRTTSVFSSSAALFGKLKRDMLSFRESALQDNTKLLPISENANEISANDAKLFKSQTIQRMVSTRDISLPSSTDTSTSSEPTSYQEKDAVTLMLSVRQANLLLSSLWTQALSPENVPRNYEAISHTYSLMLLFSRAKENCVSLYIKKEETKLYRRPRYKILMEICYRRGFLIEDHFVAVQPNTPRPQNDDTVEPPFPAIGHSKNQTSPPLHERGFINSRSKMAQAERR

SEQ ID NO: 82107 - protein, 329 aa, Zea mays
  Coding DNA Sequence Number=SeqID_38732
  Gene Ontology: Mol. function=metal ion binding
  Homolog annotation: Hit_ID=A2ZPP6; Match level="QueryCoverage=21%, HitCoverage=21%, E-value=2e-30, Identity=92%"; Hit description =Putative uncharacterized protein
MVYGGPSGPRARTVIHRAKRRWLVTLGGCRLLDGSGDCLRRALQEDCGEAAVLIVRGSRLPRRSGKGDISGIESKPSIHPPSSRCPRSYTGTGAGPGEVSIRIVAPGEAGTSSERAEEVIVEEEEEDGQATRTRPEDSSPAAGGGEGGRETSSSYQRYDIQQVARFLCDNLDCYGDVQVQRYPVYNGAPNCYGCQMFTLLMYYKNNIGRSYRRQGQMLTIVEYFLLLYCALLPTPVWYRFFLNKEYGSLFSSLTTGLYLTFKLTSVVEKTIENERILYHVFPLYLTMVVTYMFAFWGNGCNFPIGKGWCVAAKERTSCFCARKKDAKDL

SEQ ID NO: 82108 - protein, 123 aa, Zea mays
  Coding DNA Sequence Number=SeqID_38733
MKERSNPSARARKNTTNLSHLSLKLCVEFGEDLITWVCLELNARALWSGFPKLASSESLSPGAPDSVRGAPDSPVNYSGRSENSRSEKFSLKSPGAPDTVRGAPDTVRGSKAALEHTESGMTL

SEQ ID NO: 82109 - protein, 87 aa, Zea mays
  Coding DNA Sequence Number=SeqID_38734
MSEGGGLAWLHVRREDPRVSRAVDREREARGEGGEYDVAMVASTASWGEDGSISVEGGLGKGAGIWGEDGSTAPVVARRRHSWRRPR

SEQ ID NO: 82110 - protein, 57 aa, Zea mays
  Coding DNA Sequence Number=SeqID_38735
MESHDLRAEWESRLVGGYETDGFGYDYGAGCQHCNHCSGEDEAVEGDFQEFQDYDEF

SEQ ID NO: 82111 - protein, 413 aa, Zea mays
  Coding DNA Sequence Number=SeqID_38736
MTVGGGCLSYGAPDSPVHTGHVRCASHVTNAVGFRPLELLSSGPAWMSGDRWREVAVALLLFLGAPDTVRCTPDSPVNYSASASGNSRRWQVRVGVLWCTGHCPVYTGQSGAPRPEKPTPKGYDSWALAPVSETGPLFSAEMKRRTTVGGGLLLARRFAFFTLRDPPASSFARRIRVGASPLDDLAVGEFVLFVSYLSCGLALPILPFFLLLLGEFGLKLQHKDGVGWYFFRQRPDKRVLCSDLSEMKSELSCGSIFRMNFITSHSGLVVRLHELVKLWLHLSGQAAERHALSRLHLFGFNGLDVTSNDEGSFALTHASRRPSPLAICSPRLPLAPLFLVAATVFRLRYDGAEGGCPRAVVVIAGPVADTEDAAWEVVQDAMETAAARFQRDPADVKYFIPVEMRLGLRLKAD

SEQ ID NO: 82112 - protein, 128 aa, Zea mays
  Coding DNA Sequence Number=SeqID_38737
  Homolog annotation: Hit_ID=Q10KS5; Match level="QueryCoverage=35%, HitCoverage=21%, E-value=3e-07, Identity=54%"; Hit description =Putative uncharacterized protein
MASNNNVHIGKPPHFDGNNYDYWKIRMSMHLRAMGGKIWPIVRDGFVVLKEDEPSVGVLGPRKNDLTNYWALGPFVRPFTSLVDPGDIYPPQAPDLWVDLERSAFWIVRFWTSLGAPEVHPMGVAPDL

SEQ ID NO: 82113 - protein, 170 aa, Zea mays
  Coding DNA Sequence Number=SeqID_38738
MVEGKSGWVRIDVTLIPGCQAPRRPTSLDRGYAVRSRAPDLHPTDCGACLGCAIRSPPGVTTAPIIIDLTSGRGLVCMLKMPGEPIVPGMLSELSTQPLVLYCYVCMCWQAGSCMDVCHDDSIQRTRLLATSTISCIIFSAAACLSLTIAFCEAHGYWSVLVLVCWVPTF

SEQ ID NO: 82114 - protein, 119 aa, Zea mays
  Coding DNA Sequence Number=SeqID_38739
MAGSRDSSEVFPNNIIEPTWKTLSADEQLQFEEHKEQLIQEARVKFLTNFKVVTASHNPFMGCRWTHILSNRKSTANQSICTCPDHPHVSADRPSQLRSDPFLMSYPDMHPSHNIWHII

SEQ ID NO: 82115 - protein, 121 aa, Zea mays
  Coding DNA Sequence Number=SeqID_38740
  Homolog annotation: Hit_ID=O48967; Match level="QueryCoverage=100%, HitCoverage=26%, E-value=2e-45, Identity=75%"; Hit description =Putative uncharacterized protein
MLEKLATHDVETVTTLFALADKCARAAVGRAWHLAPQTRVAQTGGSGTVARDGKKKKKNCGLERPPSAASVVATVTRGQSERNKRPRPQRGNSGSCPVHPNSRHNDVECREIIELAKRVSE

SEQ ID NO: 82116 - protein, 252 aa, Zea mays
  Coding DNA Sequence Number=SeqID_38741
  Subcellular localization annotation: CTP_CleavageSite=52; ConfidenceScore=5.08e-01
MAMAGGRKQRSSCQQAHVPSWDSEETLSHGGKTTRPCPVPRTARARTTVAPRATRPVALTPRQDRQHLWQAKQATLHLRHNDRVKKKAGPSEGFNSRLRALGLRAHYWSEVRRPAPRKGSTAASGHSGSAPTTDQGFVGWPPKGSTAASDVERGMTQAKSGLGCHRKLRLARPQGSDSASAPEDDELRLARPQGSDSASAPEDNELRLARPEARTRPRPRKTDSTSTSKEPPPRPTQGSDRPRHRGASLSYP

SEQ ID NO: 82117 - protein, 51 aa, Zea mays
  Coding DNA Sequence Number=SeqID_38742
GGPKPEEEGHQSNALGGRLGPRNPKLGDAPFHRMRRELDQGNEDATPQKKT

SEQ ID NO: 82118 - protein, 57 aa, Zea mays
  Coding DNA Sequence Number=SeqID_38743
MEPPRARIILIVSRQRAQGRNLQTWDEVVHDMKSVVQEKDEPMPKLLVEKLRLNSGK

SEQ ID NO: 82119 - protein, 724 aa, Zea mays
  Coding DNA Sequence Number=SeqID_38744
  Gene Ontology: Mol. function=ATP-dependent helicase activity; Cellular component=intracellular; Biological process=cellular metabolic process
  Homolog annotation: Hit_ID=A2XTM9; Match level="QueryCoverage=41%, HitCoverage=23%, E-value=5e-65, Identity=63%"; Hit description =Putative uncharacterized protein
  Pfam annotation: Domain name=DEAD; Domain location=102-230; Score =24.3; E_value=6.6e-07; Accession=PF00270.20; Description=DEADDEAH box helicase
  Pfam annotation: Domain name=RQC; Domain location=259-370; Score =65.9; E_value=1.4e-16; Accession=PF09382.1; Description=RQC domain
  Pfam annotation: Domain name=ResIII; Domain location=98-232; Score= -30.8; E_value=0.018; Accession=PF04851.6; Description=Type III restriction enzyme, res subunit
  Pfam module annotation: Pfam domain module=DEAD::RQC::ResIII; Domain location=102-230::259-370::98-232
MAWMRLIYHENYLNYVTINAREAMTHLQEMKDELLAVANELLDDDDNLSTPLNSVWKSYTPKVIDINYTEGSGDRKWSSTNFPWTKELEAKNRNKFGNHSFRPNQREIINATMSGHDVFVLMPTGGGKSLTYQANIPATYLSGNLDWSEQQEIMKDLMSCRYKLLYVTPEKIAKSGALSRLLDNLNSQGHLSRIVIDEAHCVSQWGHDFRPDYKVSYCENDVDCRRLLQLIHFGEKFDPSLCARTCDNCLKESGWVEKDVTNIARQLVELVTRTGHSHSSTYILEVYRGSMSQNVKKQRHDALALHGAGRHLAKGEAARIMRHLVTEEILNEDVKKSDMYGSISSVLKVNHLKASGLLSGKHNIVLNLFHGIELGSHLLSPTLPPSAAGWLSHSRRLVDIAPTPTSPRPASRQAPCSPCPVRATATMADSSWATVAASVHPATSVATSPVSTTEAHGHQCRDHSLRVRRLLSWHDLFSRVRRLGLARLRPPGAGRRRYPIHLQPRHNRRSPLHGPCALQASYAPHGVPPTPPTQLLGVPSTVVVFPQHDSTFSSLDSMSSLGVVVDAGLVHGEPPTAPLSPASTALYTAFAGMGVDTHVPAAPMPSLPCRRSSLPRLRHGRCSPGTPSCSWAHPWGLLPHVPLSRLFRRHILQCPTALNACGFAPPIDSGDPYLCRSPYESLCHACQLVFPFLPPRLGLLKPLILFIVISGHLFSVSVVTNTIW

SEQ ID NO: 82120 - protein, 93 aa, Zea mays
  Coding DNA Sequence Number=SeqID_38745
MGSWGGLSPPDEALCAEAFGSAHLEQDDELLQRLRLSSFAECKELSREANSRGRRRYFYRGIRNHARSRLILVGAPTQREAHARAKHHGRVTP

SEQ ID NO: 82121 - protein, 579 aa, Zea mays
  Coding DNA Sequence Number=SeqID_38746
  Gene Ontology: Mol. function=methyltransferase activity; Cellular component=cytoplasm
  Homolog annotation: Hit_ID=A3A2Y5; Match level="QueryCoverage=56%, HitCoverage=96%, E-value=3e-52, Identity=62%"; Hit description =Putative uncharacterized protein
  Pfam annotation: Domain name=Methyltransf_5; Domain location=86-355; Score=-10.7; E_value=4.8e-11; Accession=PF01795.10; Description=MraW methylase family
MAAARRLFSFHLQARPLAAGVAVATPHCHGKHDAVSCKATGKTKPKAKAGKGGERQHRRALEEHLKRRTRSAAAFDADLYGRRAHEHHIPVLLGEVLAAFRRPRPLRSFVDCTLGAAGHSLAVRIHSLPLMMEAHPELELYIGMDVDPSALGIGHGHIEAFLAGREREANGGEDDALLGTLRAYTHVKNFKYIKQVLSSVDESLVVGSSGVDGILIDLGMSSMQALRIAVNDELRVLEDSLHSCFDCLATGGRLAVISFHSLEDRIVKKTFLELIHGGEANEEDDKDDQALTDIEDGDEPWSGQRVQGRNGTVLTKRPITPSQEEEKLNQSQLQSGSPEILHQPDVVVLFILDKKSRGLGTSQPLTHSPTHPRAVGVAITVAPRAAPSLPFPSLAAWLATRTQIHPPTHRSFRSVRPLAVADHNPLPEDGRDEGASPRSGGPPAAGGRPRGRTTTARRRRKRRVTTRAATRGQGPPQQRRHQAQRPYSGPQQQQQPRPPPPLARNVGYVGKHRLSAAIARLDQELQSLQEELDELETMESASAACQDTSGPENSSWDRWFQRVRSRSNKWWASKGPDFS

SEQ ID NO: 82122 - protein, 288 aa, Zea mays
  Coding DNA Sequence Number=SeqID_38747
  Gene Ontology: Mol. function=ATP-dependent helicase activity; Cellular component=intracellular; Biological process=cellular metabolic process
  Homolog annotation: Hit_ID=A2XTM9; Match level="QueryCoverage=54%, HitCoverage=6%, E-value=5e-36, Identity=53%"; Hit description =Putative uncharacterized protein
MNEVQDHWLDEIVKRKEITVVARFSPAFPHRRSADDDWVRSAAPPFYAGRPSPRRDLLWRRAPHQALSSYEHGASMQANKPPKVNWPHHENAVQGYSSRDDFLSSSFLFSLPTQRPNPEARERMLSLRSSACKIQGPERLQAPLIEKAWRSLCNTQAACKSYLRPGLSAKARDCDRGHARTYGEGSYNTNKMSTVPGNRILSMESTGQPSERVSLQNNSSHQTVGICSSMRSHQNNHVVQEDMRATNQYNFARTNAALHQSMAADNMCSYDKFDAMDDDILAVGAFIP

SEQ ID NO: 82123 - protein, 79 aa, Zea mays
  Coding DNA Sequence Number=SeqID_38748
  Subcellular localization annotation: CTP_CleavageSite=38; ConfidenceScore=5.16e-01
MSGTHAKKEMVTGEKPATSYGKAPSGKSGNNKGRNHLPASSRTGVATKRRYEERGLLRDRFFVALIFRFRHVFHHFLGA

SEQ ID NO: 82124 - protein, 976 aa, Zea mays
  Coding DNA Sequence Number=SeqID_38749
  Gene Ontology: Mol. function=histone acetyltransferase activity; Cellular component=nucleus; Biological process=regulation of transcription, DNA-dependent
  Homolog annotation: Hit_ID=Q6YXY2; Match level="QueryCoverage=98%, HitCoverage=57%, E-value=0.0, Identity=78%"; Hit description =Probable histone acetyltransferase HAC-like 1
  Pfam annotation: Domain name=DUF906; Domain location=654-916; Score =459.4; E_value=4.8e-135; Accession=PF06010.3; Description=Domain of Unknown Function (DUF906)
  Pfam annotation: Domain name=PHD; Domain location=596-647; Score =25.5; E_value=1.4e-05; Accession=PF00628.20; Description=PHD-finger
  Pfam annotation: Domain name=zf-TAZ; Domain location=214-293; Score =49.5; E_value=1.1e-11; Accession=PF02135.7; Description=TAZ zinc finger
  Pfam module annotation: Pfam domain module=DUF906::PHD::zf-TAZ; Domain location=654-916::596-647::214-293
  Subcellular localization annotation: CTP_CleavageSite=40; ConfidenceScore=5.43e-01
MPQHQVQPNSQFVQNQYHINQQQPNSQHQQAMLRNNSFKQSQMASTHSMQLAEQGSLLHTELVSSQTSDPADLPSFQGQYQQRNALDNVKGGQMLGHLSSSQNFHPSVSHGSQQLLPSNQQLDDGSNAVSYVLKGSQAEQMLRPQWQPQTMEKAPVTTNSTLEKQIQEDFCQRAMSQDGAQQPFSSDWRLSNCTAASIDPALPKPAAGGFEQVNGNIHYLRQIKWLLLLFHAKTCTYPVGSCKFHGCVQVQELLKHFQNCQSKDCSYRSCSKSKMMSHHYKTCVDEQCPVCSVVRKFLRQSTEQASKQKALESRKLAQQNVPQRIMNGIEGDRMDVDPMSVEAFDDQPFVPKRLKTHPPSPSGLENDISVVSNYHVNSGFALQETQPEQLDHNNRTSYLKREVDAKADMRAPQKPIKISYGIDGNVTASRHNVIPGVPSEINSHIKQENLLVDKETSETALEVKNETNDPTDATVSKSGKPKIKGVSMTELFTPEQIMEHIDSLRLWVGQSKAKAEKNQAIGHSENENSCQLCRVEKLTFEPPPIYCSPCGARIKRNAPYYTVGTGDTRHYFCIPCYNESRGETIEVEGQTFPKARLEKKRNDEETEEWWVQCDKCECWQHQICALFNGRRNDGGQAEYTCPNCYVEEVKCGLRKPLPQSAVLGAKDLPRTVLSDHIEDRLFKRLKQEKQDRAAAAGKNIDEIPGAEGLVVRVVSSVDKKLEVKPRFLEIFQEDNYPTEFPYKSKAVLLFQKIEGVEVCLFGMYVQEFGAECSFPNQRRVYLSYLDSVKYFRPEIKTVSGEALRTFVYHEILIGYLEYCKLRGFTSCYIWACPPLKGEDYILYCHPEIQKTPKSDKLREWYLSMLRKASKEEIVVELTNLYDHFFLTMGECKAKVTASRLPYFDGDYWPGAAEDMINQLRQEEDDRKLQKKSKTKKIITKRALKAAGHTDLSGNASKDAMLMQKFFPLCSDQFLGA

SEQ ID NO: 82125 - protein, 65 aa, Zea mays
  Coding DNA Sequence Number=SeqID_38750
MDEGLKPKFLKLPELRLERQNFVISEEKMSQDKKVAAETKLTEEEKLFEEKKAVNPYCRITGMLH

SEQ ID NO: 82126 - protein, 204 aa, Zea mays
  Coding DNA Sequence Number=SeqID_38751
MDLVFGLLHLSEGLSKYNIICTAYINQNIMDQKSFDHTRDNHSIIVWVILELKILLRKRSSATKHTPNKRKREPTPPSEDFGNSEYSEEEFSSESEGSPAPVSPLASSDDSDDSQGVAAEVWTYIRAVERSGLEGSDESEYSSDEEDSSDSSEEGSGGDGGDDDNDGGDGDGGGDSGRGGDGDSKGGNGGGSKGSSKGSNKASG

SEQ ID NO: 82127 - protein, 158 aa, Zea mays
  Coding DNA Sequence Number=SeqID_38752
  Gene Ontology: Mol. function=nucleic acid binding; Cellular component= nucleus; Biological process=regulation of transcription
  Homolog annotation: Hit_ID=Q8H3R4; Match level="QueryCoverage=44%, HitCoverage=25%, E-value=1e-26, Identity=66%"; Hit description=Zinc finger transcription factor-like protein
MASSLPLVTTGLRHPPQQQSPRVVLQSEDPTEWCAWAHQGHRLWVAMPDSFWVYTYKVDRCPFRGNHVWTTCPYAHWGERARRRDPSRYAYAAATCPDYADYKRRNRLAGSTAPPTCARGLRCARARRLRDVAAPTVGTACASGRAARLLRFSRIRSY

SEQ ID NO: 82128 - protein, 134 aa, Zea mays
  Coding DNA Sequence Number=SeqID_38753
  Subcellular localization annotation: CTP_CleavageSite=62; ConfidenceScore=5.16e-01
MDFIVPLRNFSLELPFAGATAGLIRQKLRSLRGGARRIVERTTPVVVTPQPTTPNNAFILVLSKELRKGGVHPVEDHAREECTLFNIRQNFVYRSSQQQRSEGGQLGEQERDGGHKWSSVAMEMLSSTETWRRR

SEQ ID NO: 82129 - protein, 339 aa, Zea mays
  Coding DNA Sequence Number=SeqID_38754
  Gene Ontology: Mol. function=triacylglycerol lipase activity; Cellular component=extracellular region; Biological process=lipid metabolic process
  Homolog annotation: Hit_ID=Q8H3R3; Match level="QueryCoverage=98%, HitCoverage=99%, E-value=1e-150, Identity=75%"; Hit description =Putative triacylglycerol lipase
  Pfam annotation: Domain name=Lipase_3; Domain location=96-230; Score =95.4; E_value=1.7e-25; Accession=PF01764.16; Description=Lipase (class 3)
MERWSLGAKVVALALLLSAASHGRELPVKSSDRSFIYNHTLAKTLVEYASAVYMTDLTALFTWTCSRCNDLTQGFEMRSLIVDVENCLQGNSREQIWLTSVQNWIKDLIWKQLDLSYPNMPNAKVHSGFFSSYNNTILRLAITSAVHKARKSYGDINVIVTGHSMGGAMASFCALDLAMKLGGGSVQLMTFGQPRVGNAAFASYFAKYVPNTIRVTHGHDIVPHLPPYFSFLPQLTYHHFPREVWVQDSDGNTTERICDDSGEDPDCCRCISMFGLRIQDHFTYLGVDMEADDWSTCRIITAQRVQQFRLELAGNIMMTKHDIDVSIVEPSVQNRLEQF

SEQ ID NO: 82130 - protein, 170 aa, Zea mays
  Coding DNA Sequence Number=SeqID_38755
MFGALRGQHGAFPPSSLRKGDAGTHFAAPLIGLTEGQRRLRRSDCCATRQTLEDGELRSARPRARTWAQSRKTANSAPPDPGLGLGLSPGRRRTPLRPTQGSDLGSAPEDSELRSARPQGSDSGSAPEDDELRFARPQGSDSALASADGLRLARPRGSDSTSEEPPHRPT

SEQ ID NO: 82131 - protein, 137 aa, Zea mays
  Coding DNA Sequence Number=SeqID_38756
  Gene Ontology: Mol. function=zinc ion binding
  Homolog annotation: Hit_ID=Q10AC5; Match level="QueryCoverage=60%, HitCoverage=5%, E-value=3e-09, Identity=44%"; Hit description =Transposon protein, putative, Mutator sub-class
MANVHRMAQFHLLDPHYDEHHRGCLTAEGEVLPVLRVRTHDRFLEEMRYDERYTPLLQRAGLDVLSYQVRRGLPTFNPAALTALVDRFDRQRQKKVTDFETHHRDYIDEWDQQGDLNYENDQAHTNYNFRRCIEMII

SEQ ID NO: 82132 - protein, 199 aa, Zea mays
  Coding DNA Sequence Number=SeqID_38757
MADSKDLNSASPNSDTRLTNLSAAEHENLEDDMKKMDEEIQRQQDQMLKVAKKWYLSHFKVDRHQKVIKEREIDADYMSSVLQQLPTIGDARSDRPEHQKSPVIRLVRKAGINITSHPSPKNQKRKTPLLRPGRGPSGLRSWTVRAAAEGTIRQPGDLSQAATAVHLAEPNPSQDSAQSGCTGLSGGAPDSVRYARLAS

SEQ ID NO: 82133 - protein, 79 aa, Zea mays
  Coding DNA Sequence Number=SeqID_38758
MKRIPAPAPYNFSEPSKYIRHTSAVSGARPKLDVVSPQLAGPLGYSSNGFFVVENIPYWKSSDYYDFVVIKVVTELARS

SEQ ID NO: 82134 - protein, 160 aa, Zea mays
  Coding DNA Sequence Number=SeqID_38759
MAARPPVVGLAPALRAAWRGGAARLSPARPWRLELGHGAPPRPARAAPRLSAARRGLAPALSDVAAWLAQSDLVEEPEELAGEAPEQQSLWSSRGLEWFLECLSVVSIATTAQAKMKLWKETSRSSKTTTSSRCGLAATPSRLPMKAAVIYVSFSHFDLL

SEQ ID NO: 82135 - protein, 97 aa, Zea mays
  Coding DNA Sequence Number=SeqID_38760
MEQSGLGYLHKSSNWYLKLGRICALKPYLDPERKAYPKCEEEIIDQAKDGDKKSFEVPSAREKVKETRNPKPGVKKKTCKVKDDRVKKSYGASMITT

SEQ ID NO: 82136 - protein, 103 aa, Zea mays
  Coding DNA Sequence Number=SeqID_38761
MAKTAAENIFLSKQFIPSERKRKILQRREIDGEKRSIGHKRVKMSKMAKGSSKCVHTNVTMQVISVSCSSVGKILVCVGPIWSCYGHESSCGGGQTTDGHLEN

SEQ ID NO: 82137 - protein, 178 aa, Zea mays
  Coding DNA Sequence Number=SeqID_38762
MDPTQISIPPGYPSGTTQSNPTNATACGEERKKKKRVPEFRVPVSDPGFLGTDRVLVIPYPTRIRGSISGLQQEPSALQSCRHVPVAASRAPDPGDSLPFVSMGAANFTANGDRARRWGRVAGYCPRRTDGDRAHATVAAESLCSLHVLVLLAGARALVLLPDGYGRSSSDRGSTGNL

SEQ ID NO: 82138 - protein, 107 aa, Zea mays
  Coding DNA Sequence Number=SeqID_38763
  Gene Ontology: Cellular component=nucleus
  Homolog annotation: Hit_ID=Q8L4B1; Match level="QueryCoverage=85%, HitCoverage=21%, E-value=3e-34, Identity=75%"; Hit description =Putative apoptosis antagonizing transcription factor
MMNQHREEDALRGQAVKNQKAIWDKTLEMRFLLQKAFSTSNKLPQEPIRARFCNHDKQIEQAYDDLLNSSKQTLSSMMELQEAMLESNQATKGANGIATLHIVLVLL

SEQ ID NO: 82139 - protein, 548 aa, Zea mays
  Coding DNA Sequence Number=SeqID_38764
  Gene Ontology: Mol. function=oxidoreductase activity; Cellular component=endoplasmic reticulum; Biological process=electron transport
  Homolog annotation: Hit_ID=Q8LL72; Match level="QueryCoverage=79%, HitCoverage=100%, E-value=1e-173, Identity=70%"; Hit description =Cytochrome P450 monooxygenase CYP72A28
  Pfam annotation: Domain name=p450; Domain location=86-544; Score =228.1; E_value=2.1e-65; Accession=PF00067.13; Description=Cytochrome P450
MSTSVAVGSLGESPSPRKALLLLPPLCAVLAVVAWCAARAVEWAWLRPRRLQRELRAQGVRGTAYRPPAGDAPLADRLGREARSRPPLPPGFHGIVPRALPLVHHGMKEHGKNSVTWFGPMPTVTLTEPELVRQVLSNKFGHFEKVNFGQLTRLLHNGLSSHEGDKWAKHRRIIKPAFHLEKLKLMLPAFAACCADMVSRWEGLVAAAAGEPCEVDVWPEMQRLTGDVISRAAFGSSYLEGRRIFELQGEQVRLGTLIANKIHIPGYMMLPTRINRRMKRIAAEIEGILRGMIANRESALRAGKAASDDLLGLLLESNMEQLRASNGGGRGTSSGGGGMTSDDVIGECKLFYFAGMETSAVLLTWTTVLLSMHQDWQDRAREDVRRVFGGGAGVPDYDGLSRLKIVTMVLHEVLRLYTPLPAIPRRTYKPTELGGVRYPAGVMLMLPTLYIHHDKDVWGPDADEFRPERFAEGVARASAGDAPAFFPFGGGPRTCIGQTFALLEAKMWLAVMLANFAFELSPSYSHTPFPVGLLRPEHGAQVKLRKLP

SEQ ID NO: 82140 - protein, 138 aa, Zea mays
  Coding DNA Sequence Number=SeqID_38765
  Gene Ontology: Mol. function=amino acid transmembrane transporter activity; Cellular component=integral to membrane; Biological process=amino acid transport
  Homolog annotation: Hit_ID=A2ZBL7; Match level="QueryCoverage=63%, HitCoverage=9%, E-value=2e-30, Identity=76%"; Hit description =Putative uncharacterized protein
MTMNENEPVVGWLAGWLAWHAGEFAAFLTGVNLIMEYVFSNVVVARSFTAYLGTAVGVDAPSKWRIPVLGLPQVFNQVDLVAVGVILLLSVCICYRFVATVDCCFLYRQRYLSARTLGLNGAFSKVAKLGTHDVGASC

SEQ ID NO: 82141 - protein, 118 aa, Zea mays
  Coding DNA Sequence Number=SeqID_38766
  Homolog annotation: Hit_ID=O48967; Match level="QueryCoverage=79%, HitCoverage=20%, E-value=6e-23, Identity=60%"; Hit description =Putative uncharacterized protein
MALGRRGKYQLIPDDLCCDHHLRISDQQQHEASTSVHSPSVRNARTEDLRAELDRRRVGEDACVSMERAHERRQNIKGWNLDADFGASAPPSPGNARVGVPMAGVGYTALVDHLRSVA

SEQ ID NO: 82142 - protein, 160 aa, Zea mays
  Coding DNA Sequence Number=SeqID_38767
MGKSKKGGSSSHHSGDKRKREPTPPSEDFGNSEYSEEEFSSESEGSPVHASPPASSDDSDNSQGLAAEVWTYIRVVERTGLKGSDESEYSSDEENSSDSSEEGGGGDGDDDGGDGDGGDDGGEGEGNGGDGGGKGGSDNGGNGSRGSNKGSSKGSNRASG

SEQ ID NO: 82143 - protein, 174 aa, Zea mays
  Coding DNA Sequence Number=SeqID_38768
MERKRDAHGTRENEDATSFFLFGLLVWKARVEKHKYRHLETVRLSRRRGGGEGRREFGMKARPRCGATTVVRLPGCRGGDKRRRRGSPGWRSGRGAGLRRATRPQPSSEEEARGEGDGGQDGGGAAASSEATRRGKHTWKRGGAHARETEHNESVGGESRRQGVKFLESSGRRM

SEQ ID NO: 82144 - protein, 234 aa, Zea mays
  Coding DNA Sequence Number=SeqID_38769
MGWGLCRVFIGLGGSPNKHPSITILFAVAVILASQLRGFDCPRGALPRWRFLGRRVEPRQVGCHGIHRGTSGVLLGLSVSEEGSPIESSMRHSCARLWLVPLDGKLSPHFDPDRRRSWNESHIGSSIPTISTKVGYSTHHCLSSPRGGTETEAVEAFGNAERVARRGNRAFGALSIVPLSRMTKSRLPNRLVISGVQTTPPPLLAIRSLESSSRTRKPLPSMPTVSVLDLRSDK

SEQ ID NO: 82145 - protein, 86 aa, Zea mays
  Coding DNA Sequence Number=SeqID_38770
  Gene Ontology: Mol. function=nucleic acid binding
  Homolog annotation: Hit_ID=A2YQN2; Match level="QueryCoverage=43%, HitCoverage=13%, E-value=3e-12, Identity=86%"; Hit description =Putative uncharacterized protein
MKRPTLPCIVTEENLAALFINCGQSDDEQEICARTIYCTNIDKKVTQADLKLFFESICGEKMTIQPAQYHWLTAMTATGLSAEVAW

SEQ ID NO: 82146 - protein, 429 aa, Zea mays
  Coding DNA Sequence Number=SeqID_38771
MSSWELRTRSYRGPAFLGDLDPSMHLGKVPTVAPRPALGEDVSLQVGPESDWRLDRCSCAPVATITVGPPMAMPTAMPIPTANWPVTIVLNVTVGPCAGVPRVAALVLKYLPFQTPVTVSKRRGIGASSDGVRRCSLEGSASRSSLSGDFTAGERALVPGCGPPTVVIQKDDYQHCGGEKQAGLRPPSSPQLQYSGEKGVGYSCGGGELRVRGAGRLRVSPATACPMPWHGWLRRRLQRCLLLLGWGVAARSPYGRRSHRVQVGHTYGFSRTADRTGGSYMVSYVAGAATVFLDVLTPLAKTGARTFKRAEAAIAHRCREAAVTVDADVVASAGKPLEACYPVALTGPRYGTRLSGYMVSGPPRRQVPVLQSQTSRLDVLRLDTSVSEKVVNNPQEANSPRSGTGGGACRPTVRDQAERLHGLWTTPGD

SEQ ID NO: 82147 - protein, 88 aa, Zea mays
  Coding DNA Sequence Number=SeqID_38772
  Homolog annotation: Hit_ID=A2YVD6; Match level="QueryCoverage=73%, HitCoverage=35%, E-value=7e-07, Identity=48%"; Hit description =Putative uncharacterized protein
MNDTEIFYEKMIHESPRLKGLAYEITEAYVVSSLVSSWKQTTMRILEIVDEANTKLMRDYVVERSGSNRYLGGPLPAAIGKLLKLEYL

SEQ ID NO: 82148 - protein, 86 aa, Zea mays
  Coding DNA Sequence Number=SeqID_38773
MSRPRSSPRQLRERLGEIWVEAEAQTPSPASSSRQAWDLGAGTWSNLEVGLAHGAEELVVAGGQEGRERGEQVQGDGEHQCLRGGG

SEQ ID NO: 82149 - protein, 304 aa, Zea mays
  Coding DNA Sequence Number=SeqID_38774
  Gene Ontology: Mol. function=metalloendopeptidase activity; Cellular component=membrane; Biological process=proteolysis
  Homolog annotation: Hit_ID=Q94DI2; Match level="QueryCoverage=38%, HitCoverage=36%, E-value=9e-56, Identity=90%"; Hit description =Peptidase M48-like
  Pfam annotation: Domain name=Peptidase_M48; Domain location=123-277; Score=-1.4; E_value=9.5e-06; Accession=PF01435.9; Description =Peptidase family M48
  Pfam annotation: Domain name=Peptidase_M56; Domain location=156-253; Score=-28.0; E_value=0.01; Accession=PF05569.2; Description=BlaR1 peptidase M56
  Pfam module annotation: Pfam domain module=Peptidase_M48::Peptidase _M56; Domain location=123-277::156-253
MESSRLTYPDRFYTVAAYAPHKDEAIVGSPSPSLLWDEPFPSSATATAAAAGGMGQLLLMCSFGGRIIPMFNRRTRGGSPRTHGRRRAHGRSLEAQGEYGEVHKVCEVVPSTRLLHPLRRAPLPKKSGELLNTEAPDLYIRQNPVPNAYTLAINGKKPFIVVHTSLVELLTPRELQAVLAHELGHLKCDHGVWLTFANILTMGAYTVPGFDMVAGFLEEQLYRWLRAAELTCDRAALVVQDPKCPKWFNVSMFCFVLGAEMENQRALKGIIPAKRMLFRAMAATSVATDEIATAGKGRSNQANR

SEQ ID NO: 82150 - protein, 293 aa, Zea mays
  Coding DNA Sequence Number=SeqID_38775
  Gene Ontology: Mol. function=structural molecule activity; Cellular component=protein complex; Biological process=microtubule-based movement
  Homolog annotation: Hit_ID=P33628; Match level="QueryCoverage=25%, HitCoverage=65%, E-value=5e-31, Identity=86%"; Hit description =Tubulin alpha chain
  Pfam annotation: Domain name=Tubulin; Domain location=14-161; Score= -46.7; E_value=0.00082; Accession=PF00091.16; Description=TubulinFtsZ family, GTPase domain
MPNDTSVGIARDAFNTFFSETGAGKHVPRALFVDLEPTVIDEVKTGAYRRLFHPEQLISHKEDDANNFARGHYTGVTCSPHPELFPGEQKMFLQLKMQYWFKLYSYQLVTVMQAQNVLGNKGTEIAKVAHRRTDAEAGVEALDAVQQSVVVAASATSFPHQRGRVNGSAYPDCFCEAHCFLRSHLQCKDETWSECLPYGLAVKPKKKACYCSSVFMSMQQQLCLVSGDKWRWHYQFLNVPGMFGLLYSDIVWFNIFKIDLETNKIMDFFKFDVDNVVMVTGGRNTGRVGVIKN

SEQ ID NO: 82151 - protein, 127 aa, Zea mays
  Coding DNA Sequence Number=SeqID_38776
  Gene Ontology: Mol. function=ubiquitin thiolesterase activity; Cellular component=intracellular; Biological process=ubiquitin -dependent protein catabolic process
  Homolog annotation: Hit_ID=A7R2N8; Match level="QueryCoverage=68%, HitCoverage=35%, E-value=3e-17, Identity=54%"; Hit description =Chromosome undetermined scaffold_437, whole genome shotgun sequence
  Pfam annotation: Domain name=Peptidase_C12; Domain location=4-127; Score=-33.8; E_value=0.00051; Accession=PF01088.12; Description =Ubiquitin carboxyl-terminal hydrolase, family 1
MEDASYPSEQLLISGEKETQDQIYFIKQIESLGNACGTIALLHAVGNASSKVNLVENSCLDLFFKSTATMDDPHERAVCLEKDDTMARAHLLAANDGATEGMSPDVATAPKSKGCLMIGEYNKVAKK

SEQ ID NO: 82152 - protein, 57 aa, Zea mays
  Coding DNA Sequence Number=SeqID_38777
MGKPVPSLLMLLLSQDNQSPWIVVHRSTSLCYERGYNQILTSRKCYKNHLTSTENPN

SEQ ID NO: 82153 - protein, 137 aa, Zea mays
  Coding DNA Sequence Number=SeqID_38778
  Subcellular localization annotation: CTP_CleavageSite=40; ConfidenceScore=5.38e-01
MGFFPPLSLSSCVANLGLLMAGFNRRRQGRLFMVPGEGVREARRWWRKSRTPWGFVAPTEGSPRRSLVWQHRAREEETDGDGPLEVIASYPMRILDQGWNAGMGDRQVGHTCRCRVMQPSIRSDEVRLWQVEVVARV

SEQ ID NO: 82154 - protein, 71 aa, Zea mays
  Coding DNA Sequence Number=SeqID_38779
MGVVWPLIIDQRSHSWISSADYFLVKNLLVLAFGIIENGRSWLFSTKMGGCVAIYHQTEAHTPHPTYVSLP

SEQ ID NO: 82155 - protein, 123 aa, Zea mays
  Coding DNA Sequence Number=SeqID_38780
MGKNRKGGSSSHHSGDKRKHEPNDSQGIAAEVWTYIRAVERSGLEGSDESEVSLDEGNSSDSSEEESGGDGDDEGDDGDGGGDDDVKGDGGNNDKGDGNNDKGNDSGKGGGDSSKASGKAPLV

SEQ ID NO: 82156 - protein, 102 aa, Zea mays
  Coding DNA Sequence Number=SeqID_38781
MRCMSKRSPELVITSALIKAKSLGGKEKMCKKWSNQDLGTSHHGLILDTMHSKIAKVRSSETTDQAKDGGKKSFEVPSAREKVKVAEEPKAKGEEEGLQSQG

SEQ ID NO: 82157 - protein, 167 aa, Zea mays
  Coding DNA Sequence Number=SeqID_38782
  Gene Ontology: Mol. function=oxidoreductase activity, acting on the CH-NH2 group of donors, NAD or NADP as acceptor; Cellular component =chloroplast; Biological process=nitrogen compound metabolic process
  Homolog annotation: Hit_ID=A7VKB1; Match level="QueryCoverage=89%, HitCoverage=6%, E-value=3e-59, Identity=71%"; Hit description=NADH -glutamate synthase 2
  Pfam annotation: Domain name=GATase_2; Domain location=15-167; Score =86.4; E_value=9.3e-23; Accession=PF00310.12; Description=Glutamine amidotransferases class-II
MQLKLENLIVEKKKVAYVNDAIEMLERMAHRGACSCEKNTGDGAGIMVALPHDFFKEVAKDAGFELPPPCEYDVGMFFMPTDEKCHEKGKAEFKKVAESLGHVILGWRLVPIDNSDLGESALETEPVIEQVFVTKSSRSEAEFEQQLYILRRLSIISVRASLNIKRG

SEQ ID NO: 82158 - protein, 803 aa, Zea mays
  Coding DNA Sequence Number=SeqID_38783
  Gene Ontology: Mol. function=nucleic acid binding; Cellular component= chromatin; Biological process=chromatin assembly or disassembly
  Homolog annotation: Hit_ID=A7PQX9; Match level="QueryCoverage=95%, HitCoverage=45%, E-value=0.0, Identity=49%"; Hit description =Chromosome chr6 scaffold_25, whole genome shotgun sequence
  Pfam annotation: Domain name=Helicase_C; Domain location=56-128; Score=49.7; E_value=1.1e-11; Accession=PF00271.22; Description =Helicase conserved C-terminal domain
MLHLNSPSCSGHQVSFPIRELICNSFNKGLELLPRKHSDGNLPLQMVKMLDILAEYLSLRGFQFQRLDGSTRADLRHQAMEHFNAPGSDDFCFLLSTRAGGLGINLATADTVIIFDSDWNPQNDLQVLPLILFLLQVLDHLVIQKLNAEGRLEKKESKKGGSIFDKNELSAILRFGAEELFKEDKTDEEAKRNLESLDIDEILERAEKVETKGGEGEEGNELLSAFKACDVANFSSGEDDATFWSRLIQPDPADIIQETLAPRAARNKKSYVEDPQFDKNNNRKRRAVEAQEKPRRRSGRTVETVNSVPLVDGAVAQVREWSFGNIPKKDASRFVRAVKKFGNATQIDLIVDDVGAVKENTDIKGTVLDFFGVAVKAYELLARVEELQLLSKRIARYKDPIKQYRIQLPYKKPQWSASCGWTETDDARLMVGIHWYGYGNWEKIRLDPKLGLTTKIAPATLGERETFLPRAPNLDNRASALLQKEYAKFSGNSSKVKGNARQTVNNDSNSGARSMRGRQKDAPDKEDNKPNKDDIQKRKVMMEAEAREEGEISESEAETKYRLDKEEKWLEWCSEVLNEEQETLKRLDRLQNTSVNLPKEKVSALCGTIIRKYLLIIGDKIGEVVRQHSESYRQSRKCSRTSRMTMRLWNYVATFSNMSGEQLHDLYLKLSQDQLEGGVGPSHGANFTSIPSSKGGNSNQLHPTRNHRPTRSLQYNSESLHNNESSGSSEAWKRRRRADPDNQFDTQPLYQPPIMTNGNRLQESSSSAGILGWGPVEMRRYGNERPKRGVHPSHFPTGHGPLL

SEQ ID NO: 82159 - protein, 233 aa, Zea mays
  Coding DNA Sequence Number=SeqID_38784
MPSVATIVQPEGVVMARPSANQPRPPHKGGVGHQRQGHAQGSAPRPTAAPYVMGLTVQGSWGSRTGPATSLPGAWHEAYSLPGACSATGEPRATPSACAAAPRHGRGRLRPSGSWLSPRSAWTRPGRLLGCGVAARSGAAREPDQGAAGPNAGAVGAKTWRLGKPPWWRQRLGMGNPKAVSSNKLYTLFRQTSLGGEAAAFVAGGRVKVALAMDRDLRSGGGHDWNRGATAWS

SEQ ID NO: 82160 - protein, 923 aa, Zea mays
  Coding DNA Sequence Number=SeqID_38785
  Gene Ontology: Mol. function=nucleic acid binding; Cellular component= chromatin; Biological process=chromatin assembly or disassembly
  Homolog annotation: Hit_ID=A7PQX9; Match level="QueryCoverage=99%, HitCoverage=54%, E-value=0.0, Identity=60%"; Hit description =Chromosome chr6 scaffold_25, whole genome shotgun sequence
  Pfam annotation: Domain name=Chromo; Domain location=411-464; Score =15.0; E_value=0.0079; Accession=PF00385.15; Description='chromo' (CHRromatin Organisation MOd
  Pfam annotation: Domain name=Chromo; Domain location=498-553; Score =57.1; E_value=6e-14; Accession=PF00385.15; Description='chromo' (CHRromatin Organisation MOd
  Pfam annotation: Domain name=DEAD; Domain location=591-764; Score= -6.8; E_value=0.00014; Accession=PF00270.20; Description=DEADDEAH box helicase
  Pfam annotation: Domain name=ResIII; Domain location=587-758; Score= -4.3; E_value=0.00011; Accession=PF04851.6; Description=Type III restriction enzyme, res subunit
  Pfam annotation: Domain name=SNF2_N; Domain location=593-879; Score =415.9; E_value=6.1e-122; Accession=PF00176.14; Description=SNF2 family N-terminal domain
  Pfam module annotation: Pfam domain module=Chromo::Chromo::DEAD::ResII I::SNF2_N; Domain location=411-464::498-553::591-764::587-758::593-879
MAFFSNSGSKADSGGYNLNEKAEDEGIYESVQDGNVDLSSRQWNLNEKADDAYHCEAEQYEAGQSGLYSSEKASGQHIQKGGRSSGGPWGTNFLKDSRSKQMAEDVPSNSGRGMNAASLHDGLDDSGEDDELNRANGEVPAEEMLSDDYYEQDGEEQIESLHRGGTKQSSCSTSGGAAKSGSRQMKASKYNAYDDDDDDDYNDENDDDNDADEDDPADVDFEPDSETDKATDKDKFMDSENSDGDDDDGLELSDDDDDFVENRRQPKRLKIVATKTSKGRKLPMPAQRKRGVSHSDEEYSSGKDSDLPSDADFKHRSKRPDRLHQKSVGRSDVAPINSHNELRTSGRRTVKKISYVESEESDDSEEKSTKQQKLMKEELEEEDGETIEKVLWHQPKGVAEEAIKNHQSAQPTVVSLTSDFDQQWDELEFYIKWKGQSYLHCQWKTLSELQSVSGFKKVINYTKRVAEEQRYKRALSREEVEVHDVGKEMELDLIKQYSQVERIFADRVSKADGDDLVPEYLVKWQGLPYAESTWEKDTDIDFAQDAIDEYKAREAATSILGKTVDFQRKKSKASLRRLDDQPEWLKAGKLRDYQLEGLNFLVNGWRNDTNVILADEMGLGKTIQSVSMLGFLHNAQEINGPFLVVVPLSTLSNWAKEFRKWLPNMNVVIYVGNRASREMCQKHEFFSDKKGGRHVKFHTLITTYEVILKDKAVLSKIKWNYLMVDEAHRLKNCEASLYTTLLEFSTKNKLLITGTPLQNSVEELWALLHFLDPVKFNSKDSFVERYKNLSSFNETELANLHKELRPHILRRVIKDVEKSLPPKIERILRVEMSPLQKQYYKWILERNFQNLNKGVRGNQVSLLNIVVELKKCCNHPFLFESADHGYGGDSIGDRNKVERIVMSSGKLVLLDKLLVCIYQNLAT

SEQ ID NO: 82161 - protein, 241 aa, Zea mays
  Coding DNA Sequence Number=SeqID_38786
  Gene Ontology: Mol. function=binding
  Homolog annotation: Hit_ID=A3BJP3; Match level="QueryCoverage=49%, HitCoverage=11%, E-value=3e-56, Identity=90%"; Hit description =Putative uncharacterized protein
  Pfam annotation: Domain name=TPR_1; Domain location=190-223; Score =16.9; E_value=0.05; Accession=PF00515.19; Description=Tetratricopepti de repeat
  Pfam annotation: Domain name=TPR_2; Domain location=190-223; Score =16.7; E_value=0.085; Accession=PF07719.8; Description=Tetratricopepti de repeat
  Pfam module annotation: Pfam domain module=TPR_1::TPR_2; Domain location=190-223::190-223
RQRRGEATLQKSLPDSTATSGLTPNGDMVEETVVGDGEASTSAASAHASIAARAGDGGTRRAWGSEERRPGAGDGEQSRYAPLDSCLFTTAITTSDERYNWPVPWPERLDREYFKQGKIEQFRQILEEGSGPEIDEYYADVKYERIAILTALGAFHTFLGKVDRAPQKESHFKDATQYYNRASRIDETEPSTWIGRGQLCIAKGELQMASDSFKIVLDEDENNFPALLGQDLIDGMLWASS

SEQ ID NO: 82162 - protein, 174 aa, Zea mays
  Coding DNA Sequence Number=SeqID_38787
MSERQKMISCPSEQPPIALSVWSPGESIGYPSQHSTDLARCVHGSGEVRAQVSSEERVLSALSRLLLGLLLSLPTITSAGIPPFPEASFIRSFSHLRDLISRYRLRRVSFSGFIVSPNIPALVPPSASFSLRRFFPRHGWLVVGDGGRFHSSPDEEDVGVKWSCRDDKLLSVLL

SEQ ID NO: 82163 - protein, 982 aa, Zea mays
  Coding DNA Sequence Number=SeqID_38788
  Gene Ontology: Mol. function=binding; Cellular component=nucleus; Biological process=chromosome condensation
  Homolog annotation: Hit_ID=Q7XAM6; Match level="QueryCoverage=94%, HitCoverage=75%, E-value=0.0, Identity=77%"; Hit description =Putative condensin subunit 1
  Pfam annotation: Domain name=HEAT; Domain location=422-458; Score =7.2; E_value=2.2; Accession=PF02985.13; Description=HEAT repeat
  Pfam annotation: Domain name=HEAT; Domain location=462-498; Score =9.2; E_value=1.1; Accession=PF02985.13; Description=HEAT repeat
  Pfam annotation: Domain name=HEAT; Domain location=941-974; Score =2.5; E_value=11; Accession=PF02985.13; Description=HEAT repeat
  Pfam module annotation: Pfam domain module=HEAT::HEAT::HEAT; Domain location=422-458::462-498::941-974
  Subcellular localization annotation: CTP_CleavageSite=28; ConfidenceScore=5.60e-01
MRRGPFSPYRETPSRKLTVSRSRFRNTRHSSPPVPQPRPEALRLPLRRSPGEMSPPFVFPSTLRDLELDTDGDRDEEPSLRPQNPVAVATLRAADLEEFVKGASFDLSDKELFCIEEQEVFDAIYSIVRDFNCLPPALKFNIVETLRSNLSVLLPSIDSLSRASMSSPSDATEITDRIASHRNALKIYSFFLISIVLTAEAGAESCTAAKATAHGRKKNHIYSWNWEAQRGRIMSLVANSLEANLSLLFGPGGTDERYLSFVSKCTFVLCENQNVLKDEDTRNGLCRIIGAIATKHQRISQISASVSHLIHKFDFTVPHLAEAVASAEKKFGDGSLAISLIREIGRADPKEYTRDSVGADNVGRFLVELADRLPKLMSTNIGVLIPHFGGESYKIRNALVGVLGKLAAKAFKDVEGDSNARLRSKQAMLEILIERCRDVSAYTRSRVLQVWSELCEENSISIGLWNEVASVASGRLEDKSAIVRKSALQLLITMLQHNPFGPQLRTATFEATLEKYKEKLQGMEPSNSDKDEAANDSSPGEVIMGQDESVSDSCLASSQDQNDRDATIVDITNLEQIRALVASLEAGLRFSKCITSLMPILVQLLASSSATDVENTILLLMRCRQFQIEGSEAALRKMLPLIPLTWELLAPVFLRRLGEQVDQTIALAPRRVSALWDYFCFNINGVRPVQSRGALSILCMAAKSSPSILGNHLQDIIDIGFGRWAKEEPLLARTACLALQRLSEEDKDKLISNNSRVFAALQGLVTSFSIPEKIWYGAADKAISTIYTLHPAPELFATETAKKSLSSVFSVLGTNDVSNGDEAQNGASLSSVSPSKLGRFLFVISHIALNHLVYIENSVRKIQKQKRKNEKSQPTTEDLQPDVSKSLEAQGINAELGLSATIDIAIESLAERAEKEIFPDLQASAMLALCRLMIIDAEFCEANLQILFTVAESAPSETVRSNCTIALGDLAVRFPNLLDPWT

SEQ ID NO: 82164 - protein, 401 aa, Zea mays
  Coding DNA Sequence Number=SeqID_38789
  Homolog annotation: Hit_ID=Q6J9V9; Match level="QueryCoverage=22%, HitCoverage=36%, E-value=4e-10, Identity=43%"; Hit description =Putative uncharacterized protein
MQVACNRTTETRPFDFDASSMEAQGHTSCNRRAGYYVRKTTPPLAPMPRLLNYGTGVATRGNPVHSPTVPTEHIGHGSVSRGRRRDVRYGQKSADSNGGSRRAEAAVKSSAGSRPLLEQQGIPLPRREDDAPVFRPSNGSHNDRPASHPSRRINFAAGQATPLAGTGKGGISKGILLREGSGPRALLLIRAASEHSGSAPTTDQGFEGWPLEGFNNRPRARRARDDSGYVRYMAEARATLPRRIHASPEGLLSNGSTLDSREAQLGQAPQEAPPRPTLGLDLRRSLRLTRPQGSAPASASEGGLRLARPQGSASTSTSEGGLCLARPQGPASTLTPGGIASSPDLGLGLRRSLRLAQPWARTDHAAGEARRRQQGLDSPDSCASTWLKHFSDGHDTMYTGL

SEQ ID NO: 82165 - protein, 169 aa, Zea mays
  Coding DNA Sequence Number=SeqID_38790
  Gene Ontology: Biological process=ubiquitin cycle
  Homolog annotation: Hit_ID=A7Q5N8; Match level="QueryCoverage=78%, HitCoverage=52%, E-value=1e-53, Identity=71%"; Hit description =Chromosome undetermined scaffold_53, whole genome shotgun sequence
  Pfam annotation: Domain name=F-box; Domain location=18-66; Score =30.3; E_value=7.1e-06; Accession=PF00646.24; Description=F-box domain
MAKRRRHELAPVVEELISPMNSLDDGCLMHIFSFLSPIPDRYNTALVCHRWRFLACHPRLWLRVERPIRDAMEPGVYPDLEAAVSAARPGDTILIAAGGSHVACNIQIKKPICIIGGGDLPDDTVLTCSRGFDKATRAFILLASEELYPVGNSWSKRYSYLFAVQPVDN

SEQ ID NO: 82166 - protein, 141 aa, Zea mays
  Coding DNA Sequence Number=SeqID_38791
  Gene Ontology: Mol. function=catalytic activity
  Homolog annotation: Hit_ID=Q2HW33; Match level="QueryCoverage=69%, HitCoverage=31%, E-value=1e-13, Identity=44%"; Hit description =Protein phosphatase 2C-like
  Subcellular localization annotation: CTP_CleavageSite=61; ConfidenceScore=5.28e-01
MAVVAANTFRTPTGRKTKGADWAPASWSSGPRSLMVVANVDDSRVVLDTASDNDAITSSSSSSTGSPTCHGYYLVDEPVVHFVWQSNQESSVLVMSRAFDDYYIEDCGVILALEVTQRRIDNSDQFVILTTVRVAFMPACL

SEQ ID NO: 82167 - protein, 395 aa, Zea mays
  Coding DNA Sequence Number=SeqID_38792
  Gene Ontology: Mol. function=metal ion binding; Cellular component =nucleus; Biological process=ubiquitin-dependent protein catabolic process
  Homolog annotation: Hit_ID=A3BN22; Match level="QueryCoverage=71%, HitCoverage=46%, E-value=1e-159, Identity=88%"; Hit description =Putative uncharacterized protein
  Pfam annotation: Domain name=Sina; Domain location=76-275; Score =414.3; E_value=1.8e-121; Accession=PF03145.7; Description=Seven in absentia protein family
MASVTYIDDSHAEVIDPPKNEEMLDATELVGDHIQNSPKPNVASYGNCSNGHTLCSGCKPRVHNRCPTCRHELGNIRCLALEKVAASLELPCKYQNFGCLGIYPYYCKLKHESQCQYRPYTCPYAGSECTVAGDIPYLVNHLKDDHKVDMHNGSTFNHRYVKSNPHEVENATWMLTVFSCFGQYFCLHFEAFQLGMAPVYIAFLRFMGDDAEAKNYSYSLEVGGSGRKMTWQGVPRSIRDSHRKVRDSYDGLIIQRNMALFFSGGDRKELKLRVTGRIWKEHCNTIFGDSAGTSREDLSNQPPMAGSKGNSYVSPSNVIEPTMETLSADDQQEFEEHKEQLITEAHVKFLANFKADRNHKIVRRRITDLASLRPAAPTPKNTILILITHLYTRLS

SEQ ID NO: 82168 - protein, 252 aa, Zea mays
  Coding DNA Sequence Number=SeqID_38793
  Gene Ontology: Mol. function=protein disulfide oxidoreductase activity; Biological process=cell redox homeostasis
  Homolog annotation: Hit_ID=A2YPK2; Match level="QueryCoverage=75%, HitCoverage=84%, E-value=4e-65, Identity=67%"; Hit description =Putative uncharacterized protein
  Pfam annotation: Domain name=Glutaredoxin; Domain location=96-164; Score=51.8; E_value=2.3e-12; Accession=PF00462.15; Description =Glutaredoxin
RFLFVFLLPLLSPPVNRHSLDSPSPAAARPAAAAASAREMDDCGGGGGKRPFQLARSLTYHHHPGHRPAAASRWRRQHQQHQLADEPRAPRPQAVVLYTTSLRGVRRTFADCAAVRAILRGFRVAVDERDVSMDAALRREVQALLAARGRAFALPQLLIGGRLVGGADEVRQLNETGQLRRLLDGAAGQDPAFVCDACGGVRFVPCAGCGGGRKVFVEEEGRVVRCVECNENGLFMDLLHAFLGKIARDLKL

SEQ ID NO: 82169 - protein, 139 aa, Zea mays
  Coding DNA Sequence Number=SeqID_38794
MAPMRSRRPTGDRRPQYIASPDGAMPSFYGGRGESTPQISFLRGSVAMPREIRDEPEAVTAASVRDRAERGRLLTSGSQVAAEQPRVWARFGALSRRPHQPATQKKDVGTQHVDLSIGAHQASAERERSAGVMWATHAK

SEQ ID NO: 82170 - protein, 37 aa, Zea mays
  Coding DNA Sequence Number=SeqID_38795
MTMQVIRKAWVYMGIATLLCRIKDRKVRARIAWGLSA

SEQ ID NO: 82171 - protein, 115 aa, Zea mays
  Coding DNA Sequence Number=SeqID_38796
MGSVRVVFVSLWEERNLVEVGSPAASPHQWSPETVTTSSMVGRSKPGCDLCPALSFKDLHHPCWGGGRAEPELYVPYEPADHLFLQHPEERALTGLAEGADFDNAGSVGRKRRQL

SEQ ID NO: 82172 - protein, 38 aa, Zea mays
  Coding DNA Sequence Number=SeqID_38797
MPKLPCAQLRLCSILRSLCVSSYNNFDLSGGFVSEGRK

SEQ ID NO: 82173 - protein, 154 aa, Zea mays
  Coding DNA Sequence Number=SeqID_38798
MKSLLKVLVDCVEDATKSLGGLVDHALDHMHDEEILARTLFAMKEKLDLLHQDALEAKVQAFPEIAKYEGDDISVEPTSPSTPPTITEPSVDEEEFYCPDVSDEWYFSDSDSSETTDQAKDGGKKSFEVPSAREKVKEAEEPKAKGEEEGLQSQ

SEQ ID NO: 82174 - protein, 98 aa, Zea mays
  Coding DNA Sequence Number=SeqID_38799
  Subcellular localization annotation: CTP_CleavageSite=69; ConfidenceScore=5.51e-01
MQAACNRAKWAHLSDFQRAQHGGPGPRVMQTARRMLRASNCTATRATATPPRLQNQYRDSRQPYARPSSASLARRDPERGIPRKGSFSVKEPGSEPPY

SEQ ID NO: 82175 - protein, 444 aa, Zea mays
  Coding DNA Sequence Number=SeqID_38800
  Subcellular localization annotation: CTP_CleavageSite=54; ConfidenceScore=5.42e-01
MSSCSLMHRVFPPSEPPDGGCPRSFRLAVGGTQLRRSCRSWYLSAIVRLQGFSSCSPTAPLRRWSPKTVTTSPWMGRGKPGCDLGPALSFKDVHHPCWGGERGEPGLYLPRGPAGHLFFQLLVVATVLQLCGGGVLQPCRGRRTVAAQLGCNIPPSSSLSWRGRERGPAGALWSGPLFGFDGWFASLEREREREPSGGRVRPGTMAAAAEVAGESPETRRPAGSPHGQRRSWLEKEDLIGWSLAGSSVSGTDAGIDLPRPRVGLMSLEDSWPGPRGDQPSRLLEPDSWRRPGRRWPGRDDEVVLQSGDPRTASSSEARSDLAEGVVDAEDLAFTVGQLVRSGIQNFGDDERPLPGGPKHQVAHLEVSGPDPSGVVTSQGLLRHSRYNSPDCPVYTGQCLVLHGRVASGTRQPRENEAGAFNARQKRAEGRHAHTGAPDIEQYMS

SEQ ID NO: 82176 - protein, 178 aa, Zea mays
  Coding DNA Sequence Number=SeqID_38801
MVMVEFPGLRAPHAIAHLHRVMPIEVPRAPNALMQLAASLARTWGLGAPPRLLELDVEQDHEQLPPLPPCTQPSKHRAVRARATRAQGQRPNDFPKAPRASKVGPEGSTRTHDVCGFRYSGGGFTQRTVFMPRLPLFPVPCNEQDWSCLIWWDAEGSRWAYIYTGIGVSSDDHCEIRG

SEQ ID NO: 82177 - protein, 221 aa, Zea mays
  Coding DNA Sequence Number=SeqID_38802
  Gene Ontology: Mol. function=binding
  Homolog annotation: Hit_ID=A3AKF2; Match level="QueryCoverage=58%, HitCoverage=12%, E-value=2e-34, Identity=57%"; Hit description =Putative uncharacterized protein
MAPNVFHFADSVLPLWVTTVAKNELVDSKEPGQDEQSNLTAEGEDSLLSRKLAEMMAILLKKGSPRILDCASGVLLSTFQLTLRRSDYDIVLGMTRFICDKLLGNNSLALEKLQLTHDFLHENFLEIDRNQFDGSSNGHPEEAKENADEPLEMGERHGVGKISQELDQDELEDNGATEDAHENGVLWQTLQNIDLLHVSRAYLIENLHGMQRFSTGEPFQK

SEQ ID NO: 82178 - protein, 124 aa, Zea mays
  Coding DNA Sequence Number=SeqID_38803
MAAALCVHAARGKEGLLERKWGRGEGEWGSGLKWPGADTSSIATHGTHCALRTSSLVLPNHFDILFGFKQDVGAKHLSLSRLVPMQRSPTTPSIECLKRRHLQAGPGMKWATFVKRSTTTQMES

SEQ ID NO: 82179 - protein, 297 aa, Zea mays
  Coding DNA Sequence Number=SeqID_38804
MARLRHTARKSVIPFLSSRLAERPLHRTVSGQSSHLERLHHRLREEQERRRQHREQQGSSSPPQREVESVRPRSSVAQLEAPPAPPRDAPAVGGATGGGPGGDPDDDDSDHSMESSEPQEAEGWHSRGRYPDRWEATCLVRRPEDDLRGAEAVSEHYSISERDTAEAAMQDAARRALSQYCSLFGGVADGLNLRYYPRRPTGSTESVVVSPVGEGNPRLSSTVNLVAVLNTELDHSLDELSRARTEIAELRAELAERHHQEGGSPAPVETQHPYRSPPRGHHTYGSPVCKTRIDLDP

SEQ ID NO: 82180 - protein, 331 aa, Zea mays
  Coding DNA Sequence Number=SeqID_38805
MERHVRRARGNGNTHSGSLTTKIVVSLPLTPCQLIKTPQSHGPSEHPFLGHDLDHDHVAWEIRGQERDARQRQCERKMDDEEAGEVAQQRRQGLQTLWEPASYEQLGWRNQHSRVRSRVFDRFFEVSLGDHIDHLHDKGCMKTPLERRPGSTDDLFPDHVKHMNAGETIGSKEEKEDPTLPKYVHLIPALRENGHPGQRIKPNVMHSHVAALNISIREAQNMGKTTITDFVPVTLDEEIHDRVIIPIGFLIYFLDPEGGIKLSYHLIVPWALKGVYSLQREVDRRFMWTAGNRKKCCDEVEWRQPFGASREPAVRAWKNPLHPSYQSRVLS

SEQ ID NO: 82181 - protein, 59 aa, Zea mays
  Coding DNA Sequence Number=SeqID_38806
MVAEFHERTVKALDIYNATCNELIRCIARTWERLVNIGASALWASVANLHNCATVFPNN

SEQ ID NO: 82182 - protein, 188 aa, Zea mays
  Coding DNA Sequence Number=SeqID_38807
  Subcellular localization annotation: CTP_CleavageSite=26; ConfidenceScore=5.35e-01
MGVGKGRLVTVVGGERLPSSSINSAFASSVFSHLLLLFAACFLLLPSFPPWARVTNTSASRLLHRRTSATQNNRRRSSPPSPRGLRLPSLPQRRLMIQTTPRGLLWRSGLISGPSSAPGSYESEYSSDEEDSSDSSEEGGSDGGDDDDDGGDGDDGDDSDGDDGDDSGGGGDGGSKGGSSRGSNEASG

SEQ ID NO: 82183 - protein, 244 aa, Zea mays
  Coding DNA Sequence Number=SeqID_38808
MTANKKKDLALMTNHEKKGKIKIKEYFDSSSEDQSDDVKIAPMVIWELYHEAELDVSTFSELCRLDEDLLVSSYLLLFGKNQQWLVSDFPTDVALHKFDRHKQKKITDFRRHHQAYIEDWQDMDENVDDNDDPHDNKDYIRKDIERISSTMSDGNMCTFLEDRWATGRTCHVLGVPRKGTSIHTIATPVNYQIGYDVPDKIDPSHLQDAPLSHPSQPQERKRHRSLDRYTGGTATLGKGNTRRR

SEQ ID NO: 82184 - protein, 83 aa, Zea mays
  Coding DNA Sequence Number=SeqID_38809
  Subcellular localization annotation: CTP_CleavageSite=26; ConfidenceScore=5.23e-01
MTSELLKIFRVNGKRGVAGMSRRVKSAKQRKGPLTRTAFDLLSLLRGVPVPICFLWRLASLTSPRIMTPIDEGIRCVVTVNLS

SEQ ID NO: 82185 - protein, 33 aa, Zea mays
  Coding DNA Sequence Number=SeqID_38810
MVGKEFGLVDDEEEEPEAGREEEEDEDEIEEYG

SEQ ID NO: 82186 - protein, 131 aa, Zea mays
  Coding DNA Sequence Number=SeqID_38811
MRKTLHDLRAEQRTGAQRIAAWAGEASTALVPLGVSPIPALVRPASISDALPVQDSAADRLRRLDQILGARLEAEGSRLYQSAIEYVLTCFRSHDLAVSLGRVIADPVADAEDAARDPTDDGGRALPAGSY

SEQ ID NO: 82187 - protein, 84 aa, Zea mays
  Coding DNA Sequence Number=SeqID_38812
MVEKDLQVAQMATQIQELEELVGSRENTIEEIQDMEADEDVDIVGSMLRRRRSSREKRLKMCEQVSSDSYQKGKATKVDTAPKL

SEQ ID NO: 82188 - protein, 60 aa, Zea mays
  Coding DNA Sequence Number=SeqID_38813
MPRNMVNRYGGYKYGHCTTAVGVSEALYAKAVYLARFKNSIRIVFFSQLMRLLDPCCYIE

SEQ ID NO: 82189 - protein, 120 aa, Zea mays
  Coding DNA Sequence Number=SeqID_38814
MGRLEPRAEWESQLMGKVCNLCRVLETGILAVLAMARLKCTARKYVIPFLPSRLAERPLRRTVSGQSSQMERLQRRLYEEQERRRQEQEQQDSSPSPQREVESERPPSPTPQPEMPPTSP

SEQ ID NO: 82190 - protein, 231 aa, Zea mays
  Coding DNA Sequence Number=SeqID_38815
MSSSDPFQGRVQVFPAPESRDPAVISPDSTRKGPGPISEVRPSRTGSGAFHAVGPDPLRVSGARPFPWPRGDPRAADVARRRIVLHATRDFSAGPAPLPFELALGDGTAQVSAGKQYGRLQMHVGTQDLYRFRPRECITPYVVCSVEYWIALSLQITCRCGHEWRSSYQPNGPIRRPKEHIHVTMTHGISVSHKPPRLKPIFESNWLKTPRMNYAIRISLSAVLLLFFFML

SEQ ID NO: 82191 - protein, 122 aa, Zea mays
  Coding DNA Sequence Number=SeqID_38816
MNGHAKASYCDVVEHLGTWHSIGRRPTPARLSGPAVRQGGTATRAKQCPEHIPNAIFLSLSSYLHFTEHELQRQRRSRRGITSGDTLNLAIFVRSLYHGNLIQAPDIASSRALFSDFHVTTS

SEQ ID NO: 82192 - protein, 51 aa, Zea mays
  Coding DNA Sequence Number=SeqID_38817
MDILMKDLKVFASFYRCSWEEGPLLVDQERECILDCILTLPLILYLQIFVS

SEQ ID NO: 82193 - protein, 96 aa, Zea mays
  Coding DNA Sequence Number=SeqID_38818
  Subcellular localization annotation: CTP_CleavageSite=73; ConfidenceScore=5.74e-01
MASPRLRLTSQQSPRPGSPLPAPRPQSPPPQLSSPPDLARSHNPCRHGPPRPQIAASTIPQTSAATSSVASASASAPEAVAEEPEYLAWYIIVKHS

SEQ ID NO: 82194 - protein, 70 aa, Zea mays
  Coding DNA Sequence Number=SeqID_38819
MALGRLPPHSNLDLDPCRRDLRVLLVDRSCPLLLVEVRFWGRLRAGRPLKTDLDNVKLNRGVGGYVVNYN

SEQ ID NO: 82195 - protein, 150 aa, Zea mays
  Coding DNA Sequence Number=SeqID_38820
MSGSTPTPAMLSGQSDGLKEMVVPLHRWCGAVLGTPGTAERTSRLRDLTLLREMSSQLPPHGLFVSFLLAWPAVGRRDVLGGLLAPLADAPREFDNLTAVGGTVVDVWVHWACATASALGDDIRATHLGNLGLWYQVPSMALGGFGTFVN

SEQ ID NO: 82196 - protein, 61 aa, Zea mays
  Coding DNA Sequence Number=SeqID_38821
MDPKGKGIVINDKEKVLGAFGFRRKGEAQKIRRLTQCRSCEAGKLRHVRRKGNRLKDEKAI

SEQ ID NO: 82197 - protein, 68 aa, Zea mays
  Coding DNA Sequence Number=SeqID_38822
MVARGAKGSERGDFAGSAIDVAVFTEDMAATCLADNQAVSFVELEITSTRASNADILHYYPLAKTQLA

SEQ ID NO: 82198 - protein, 130 aa, Zea mays
  Coding DNA Sequence Number=SeqID_38823
MRNRIPEVAEAAVIEDFYRGSNDSAFVPTILQKAPTTSEQLFWEADLYITADERAQNLIGGAKCNTRILGVQNPGANINTRTAITAKSSRGPPQESLAGPPSQQNPPEGLPRNPLQDRHHSKILPRASLH

SEQ ID NO: 82199 - protein, 198 aa, Zea mays
  Coding DNA Sequence Number=SeqID_38824
MDCMEGEGVVHGWERKTGALVMGKSSEGASSERGAAQGCCFWIEELGAGNSDTMDREGRKKTGRALGYSPWTTERGRKGWARWELGARLPACCRVGGLLREGEEDREERRAPWKGAEVPVPMAKPLRAREQQGKRKLGHGCWRCSARNGAWRGSRLPWGRREADHGREMTLVVLPACFVGKKRVAWGRWLMAARGREW

SEQ ID NO: 82200 - protein, 316 aa, Zea mays
  Coding DNA Sequence Number=SeqID_38825
  Subcellular localization annotation: CTP_CleavageSite=34; ConfidenceScore=5.13e-01
MEETHLHVFDASCPRQSTLTRAPACPAPRPSQASAMARARAYKALPGFDCTLPRTLKPHRSLARRRLPVRSVSAAAQSLCHRRPANRAIPNSVQPSEKTVHTSVKLLERGIGVCFAGEASPRSPELSTPPEYVDRVIHSTILRFLVHTVTTLPHEAHRALRLNQFAVVWPVHSPPMRTPACARGPGDFGHPRSQAVPRRDRQSLPEPTPPFAGPPSPPTYPLTRPETRSPIPVMVGTSAVTARRPVGVSEALYAKAVSPDLLPGNRWGQLMCVGTECPYMSCSLEEMVVGLTWPSTLPPGWTVEWDPASAEEEHEE

SEQ ID NO: 82201 - protein, 128 aa, Zea mays
  Coding DNA Sequence Number=SeqID_38826
  Subcellular localization annotation: CTP_CleavageSite=72; ConfidenceScore=5.12e-01
MAHSGGDGMSRAGSGDGMARSQGAGTQGTKPCWWPQPPKMVVGSVLSHGAPDSPTTVAREVVVVPLAHRTVRCAPDSPVNYSGAPSKIPEGSEFSFKCPGAPDTVRWHTGQSGVPDQGAFGLYIAHFV

SEQ ID NO: 82202 - protein, 178 aa, Zea mays
  Coding DNA Sequence Number=SeqID_38827
  Homolog annotation: Hit_ID=Q6K6F2; Match level="QueryCoverage=91%, HitCoverage=93%, E-value=2e-25, Identity=43%"; Hit description =Hydroxyproline-rich glycoprotein-like
  Subcellular localization annotation: CTP_CleavageSite=91; ConfidenceScore=5.60e-01
MGSSSSPPPPPPLPLPMIGRAGNLTIFITPPSPASTPRGAGRTPPLESPRSDISTPIPQRAAPSPSLSPSPRNHESRAVAPAVVFTPPPPPASVNVALPPVQVPPPQDLEFSCLDSLVVLVAAHASLDEYVSTWFGLDQSKYQWALNDYYETIGKVSKEVDCIKGGMPKEPTTKVQKL

SEQ ID NO: 82203 - protein, 98 aa, Zea mays
  Coding DNA Sequence Number=SeqID_38828
MAQCFQISGVTGAVAVNAAPHAELDCNVVNSECSNVSRLGAPGMSGLKAQYLSRAAARSEAKDTPAPVSWTFGPWGYTKAVARMKETTLFGHAGGLHT

SEQ ID NO: 82204 - protein, 86 aa, Zea mays
  Coding DNA Sequence Number=SeqID_38829
MAVAAPDGIPTSPNKMLRREAAVADSLCCNGSWRFWLLVSGLSWGLESLKVSLWQLKDELVLKGGGDVMGIIGSERQQPGWDKARE

SEQ ID NO: 82205 - protein, 615 aa, Zea mays
  Coding DNA Sequence Number=SeqID_38830
  Gene Ontology: Mol. function=protein serine/threonine kinase activity; Biological process=protein amino acid phosphorylation
  Homolog annotation: Hit_ID=A3B4Y9; Match level="QueryCoverage=63%, HitCoverage=29%, E-value=1e-15, Identity=23%"; Hit description =Putative uncharacterized protein
  Subcellular localization annotation: CTP_CleavageSite=37; ConfidenceScore=5.71e-01
MPISQTLSPASHHRKTPTIPVPASRLPVHAVPFNYPAAKASSSTPPTPPSSPATQTYLDAYAPKNMLASSSSCPPDFMLPSAGASKASCMEGPLGLGRAALPKAHCSSPPRRMVDICIDSRNGKAPVEPVFAPSRSPSLGRRSPPSGPGSPVPRSGSPPSWTGSGTGNDSGSFPKPDLAIPVQSPSLDLGGTRNSDGSSLDWDGRTPHIEAWVPQGCRETNDKLIYAYLDQHLPLSAAEEFIQNILRTAAPGIQFQMLPSSRGIKLLHFYSRADRDEVRLMSPLLADGLQLKLECPEETDNRFFRQPQWLAFAMIVDFPTEHWSEASIRRCFGACCEVAEVDPRCLTGDNFGPIRVLLELNHYLDLPSEIWVTTMDGVSRGGCIAQVLPLRVWPRADQLGPDGRLRRFFQHMSPPPAPPMLSEVPAALPHVPQQQNASPVRNAQQQANTTTSQTSSAFSTAQLLCLSAMLAQLTGPRTTETQSQLPPQQNTTPQSHCSSKRQPTSPTTFNATRHKRAGRPPRNNVPKPIQRKSSRLAAKANGNFVDMTNKAVKLKELRDTLQGCSTAVKGGVQKKGLLSRSMASISIPALRKLVRAAGLGCSAANAVGVVPLAKE

SEQ ID NO: 82206 - protein, 146 aa, Zea mays
  Coding DNA Sequence Number=SeqID_38831
MDPFVHVTLLGVDPNHSAKKEWIASAPRGHRSKTDDCPSRFAHMGDCRSARHNPKLFLPGCPFYPGMSRGCPISNDEPTVLGRNPYSVKHTNVRIGVVTFDVTSRPWNEISSSPYPAMRPLKQERLLMIGCSANTAIPDTASVATP

SEQ ID NO: 82207 - protein, 232 aa, Zea mays
  Coding DNA Sequence Number=SeqID_38832
MTRLKRRTANVKRAEGTRAGVARRGRATAAPRLRHSSDEAARRDRAKQGHARSRGCALVGGHTGQGAGELTRGVPGEGGRVTEVGAPGRGGVPSGGVEAEAARGTTRRTRWCQAAAGKGCRARTAASKGGRAGARLLLGRGTAQGITNLSPLKESHPRDLGLVSKELGILGHQIIFTLPRCFFLRVVTPSDFAHYDSVPPSDSICSLQNLRWLLYAGQVFLDFQVFHWQLLF

SEQ ID NO: 82208 - protein, 55 aa, Zea mays
  Coding DNA Sequence Number=SeqID_38833
MEAQATLAQPQAQFHGGHIGAAANPIPIQDQLSRCKLITEAHRQGETDEQVPPWL

SEQ ID NO: 82209 - protein, 73 aa, Zea mays
  Coding DNA Sequence Number=SeqID_38834
METMKVAFPHTSAWGQAAFKGLRIVSVQPSKDKQMDHEEEHAAAQEGDDMGRQSIDVQMGHSAQTRSEPVSAH

SEQ ID NO: 82210 - protein, 254 aa, Zea mays
  Coding DNA Sequence Number=SeqID_38835
MGDSDFCARCARIKCSAGSRWRRREPLLRWRPSFLGAPDMSGGGTVPGLCRGEAAPGRVGALSGGSRPGLRGGTAGRARRGQAATGKGRHAGATVARGGHAGGRAATGEGRHARSPAERGRAAAPGAGPRRQGASCAGSHHVQGHRAHGEEEEGEREEREVAYHRLNKRQQPLSGIQARAGRAWERGGRGRDRHHAFGTLKHALLSAPVLALPNFTLPFCIYTDACQTGVDVWRSYLQLAEFHVYTDHQKLGST

SEQ ID NO: 82211 - protein, 701 aa, Zea mays
  Coding DNA Sequence Number=SeqID_38836
  Gene Ontology: Mol. function=binding; Cellular component=kinesin complex; Biological process=proteolysis
  Homolog annotation: Hit_ID=Q1EP15; Match level="QueryCoverage=99%, HitCoverage=94%, E-value=0.0, Identity=63%"; Hit description =Glycoside hydrolase family 17 protein
  Pfam annotation: Domain name=TPR_1; Domain location=214-247; Score =2.5; E_value=2.7; Accession=PF00515.19; Description=Tetratricopeptide repeat
  Pfam annotation: Domain name=TPR_1; Domain location=257-290; Score =4.1; E_value=1.7; Accession=PF00515.19; Description=Tetratricopeptide repeat
  Pfam annotation: Domain name=TPR_1; Domain location=299-332; Score =8.3; E_value=0.54; Accession=PF00515.19; Description=Tetratricopeptid e repeat
  Pfam annotation: Domain name=TPR_1; Domain location=381-414; Score =26.0; E_value=0.00013; Accession=PF00515.19; Description =Tetratricopeptide repeat
  Pfam annotation: Domain name=TPR_1; Domain location=423-456; Score =18.8; E_value=0.021; Accession=PF00515.19; Description =Tetratricopeptide repeat
  Pfam annotation: Domain name=TPR_1; Domain location=466-499; Score =12.7; E_value=0.16; Accession=PF00515.19; Description=Tetratricopepti de repeat
  Pfam annotation: Domain name=TPR_1; Domain location=507-540; Score =10.2; E_value=0.32; Accession=PF00515.19; Description=Tetratricopepti de repeat
  Pfam annotation: Domain name=TPR_1; Domain location=549-582; Score =3.4; E_value=2.1; Accession=PF00515.19; Description=Tetratricopeptide repeat
  Pfam annotation: Domain name=TPR_2; Domain location=214-247; Score =2.4; E_value=15; Accession=PF07719.8; Description=Tetratricopeptide repeat
  Pfam annotation: Domain name=TPR_2; Domain location=257-290; Score =6.9; E_value=4.1; Accession=PF07719.8; Description=Tetratricopeptide repeat
  Pfam annotation: Domain name=TPR_2; Domain location=299-332; Score =15.2; E_value=0.25; Accession=PF07719.8; Description=Tetratricopeptid e repeat
  Pfam annotation: Domain name=TPR_2; Domain location=381-414; Score =19.7; E_value=0.011; Accession=PF07719.8; Description=Tetratricopepti de repeat
  Pfam annotation: Domain name=TPR_2; Domain location=423-456; Score =12.9; E_value=0.74; Accession=PF07719.8; Description=Tetratricopeptid e repeat
  Pfam annotation: Domain name=TPR_2; Domain location=466-499; Score =17.9; E_value=0.039; Accession=PF07719.8; Description=Tetratricopepti de repeat
  Pfam annotation: Domain name=TPR_2; Domain location=507-540; Score =9.4; E_value=2; Accession=PF07719.8; Description=Tetratricopeptide repeat
  Pfam annotation: Domain name=TPR_2; Domain location=549-582; Score =7.1; E_value=4; Accession=PF07719.8; Description=Tetratricopeptide repeat
  Pfam module annotation: Pfam domain module=TPR_1::TPR_1::TPR_1::TPR _1::TPR_1::TPR_1::TPR_1::TPR_1::TPR_2::TPR_2::TPR_2::TPR_2::TPR _2::TPR_2::TPR_2::TPR_2; Domain location=214-247::257-290::299 -332::381-414::423-456::...
  Pfam module annotation: Domain location=466-499::507-540::549 -582::214-247::257-290::299-332::381-414::423-456::466-499::507 -540::549-582
MAPSMQSEALEMHVESSGTGEPSIEQLYNNVCEMKSSSEGGSLSHESFGSDGEESRIDSELRHLVAGEMEAMKVIEEEEENGSVANVVPPVPAENGTPVKEQPSKSSNKSKKDSKSQLESDASVGPNRKASTEEGEREVSKQATRVGRRRKSNANPQNGTEDAGLDNPDLGPFLLKHARDLLASENSRRALKYALRATKTFEKCAGGKPSLNLVMSLHVVAAIYCNLGKYEEALPVLHRSLEIPVIEEGQEHALAKFSGCMQLGDTYGMLGQTALSLQWYASGLEIQKQTLGEQDPRVGETCRYLAEAHVQALQLDEAQRLCQIALDIHREHGGTASLEETADRRLMGLIYDTKGDHEAALEHLVMAGTAMIANGQETEVASVDCSIGDIYLSLGRYDEAVFAYQKALTVFKTSKGENHATVASVFVRIADLYNKSGKLRESKSYCENALKIYQKPIPGTSLEEIATGLTDVSAIYETMNEHEQALKLLQKALKMYNNSAGQQSTIAGIEAQMGVLHYILGNYGESYDSFKSAIAKLRTCGEKKSAFFGIALNQMGLACVQRYSINEAAELFEEARTVLEQEYGPYHPDTLGVYSNLAGTYDAMGRDPNAPLVICWKKPQLSVDICILFPRLDEAIEILEYVVGMREEKLGTANPDVDDEKRRLGELLKEAGRVRSRKAKSLENLLETNPYIATKRNAVAA

SEQ ID NO: 82212 - protein, 117 aa, Zea mays
  Coding DNA Sequence Number=SeqID_38837
MALLDPRERFQPEVALNLARNPHGWGVLAFAGRTSAGVSPLGDLTAEEFVFFVSKLPSGLALPIPYFFVQLLEGLGLQPLPVAFCFILQAAIIAYLHGMSMEATLLPASSSSIRGKG

SEQ ID NO: 82213 - protein, 254 aa, Zea mays
  Coding DNA Sequence Number=SeqID_38838
  Gene Ontology: Mol. function=kinase activity
  Homolog annotation: Hit_ID=Q6QP54; Match level="QueryCoverage=29%, HitCoverage=26%, E-value=1e-08, Identity=47%"; Hit description =Putative kinase
  Subcellular localization annotation: CTP_CleavageSite=40; ConfidenceScore=5.05e-01
MAPPVDVVGLCPKLGEVEAPPRSRSSLSSKVKVESEPPVRTRRSSSSFGAEPESEPWGRARRSSSSFGAEPESEPWGRARRSSSSSGAEPKSEPWGRSERSSSSSRAEPKSEPWGRAERSSSSSGAEPKSEPWGRAERSSPSSGAEPESEPWGRAERSSSSSRAEPKSEPWGRAERSSSSSGAEPESEPWGRAKRSFPWRLGPDLAAVSLTLSSGSAVGAAQAALSSCQTGQWSGEVTAVTSALSTGGRAQGRS

SEQ ID NO: 82214 - protein, 31 aa, Zea mays
  Coding DNA Sequence Number=SeqID_38839
MAHARTRDDQLTNNATIRKDTSMNRPKFTFS

SEQ ID NO: 82215 - protein, 94 aa, Zea mays
  Coding DNA Sequence Number=SeqID_38840
  Subcellular localization annotation: CTP_CleavageSite=76; ConfidenceScore=5.10e-01
MDWTGTPPAGWPGRRLPAEWTETARPRGLTSGSARWLTSRATSHVAASGLRLSGERKLKGKSRRLLRSGAPDCPVRQAASAEEAALGNLLTAYG

SEQ ID NO: 82216 - protein, 51 aa, Zea mays
  Coding DNA Sequence Number=SeqID_38841
MEKITHGIHHHPESPKYFGSKKSKNQIKNPNMIEETGRMKITNEKVSARGD

SEQ ID NO: 82217 - protein, 125 aa, Zea mays
  Coding DNA Sequence Number=SeqID_38842
  Subcellular localization annotation: CTP_CleavageSite=42; ConfidenceScore=5.41e-01
MEALSQPHSAIPHGPTTHTTVTRQSLRNFNSMSNPQATTELVAAAAVHIILLWASPQCPSETDLIDGLQILLSDGSCYHLFKQRLLAKPTTSLFSLVVGSVDRVVVAVLASRLNRMYHDLFHVPM

SEQ ID NO: 82218 - protein, 180 aa, Zea mays
  Coding DNA Sequence Number=SeqID_38843
  Homolog annotation: Hit_ID=UPI00015558E9; Match level="QueryCoverage =79%, HitCoverage=5%, E-value=3e-07, Identity=36%"; Hit description =PREDICTED: similar to splicing coactivator subunit SRm300, partial
MTASKRDRDRGYPERDPSPRRKRAPSPPIVQRVRLTAAKSGLGRHRKTPHRPTQGSDSGSAPEDDELPLRPTQGSDSGSGPEDDELRLARPQGSDSGSAPEDDELRLARPQGSDSGSAPEEDEICLARPQGSDSALASADGLRLARPRGSDSTSASEDRLDLDLGGASASPNPGLGPTTS

SEQ ID NO: 82219 - protein, 110 aa, Zea mays
  Coding DNA Sequence Number=SeqID_38844
  Subcellular localization annotation: CTP_CleavageSite=37; ConfidenceScore=5.34e-01
IDWPAAATDMPWGKAAALVTKKAFSSSALSPSPDPAACNERAGKRTRFVDEKDCTRRKRTRFVDGESREWAQKRTRFLVAGIAETPYTCFVGEGKSGAVVKPVDALGINI

SEQ ID NO: 82220 - protein, 233 aa, Zea mays
  Coding DNA Sequence Number=SeqID_38845
  Subcellular localization annotation: CTP_CleavageSite=56; ConfidenceScore=5.51e-01
MPRRPQTVPRSAFSAARTQALRTRRTPSAPQPLPQTAPALRLLRRPPAHCLTRRTHCDKKARAPRLLLFLWLHDAMRRRLLLLVAVHHRNLRRRVCSCILRLFLSVLVALAPFHYLAPPWAASSHFPPSHLTHRAGLEEEDEEDTAPAFPGVEAEAEANALHRLDFFVLMVFCHVTISQMMQYACKRYFVLEDTTLRWFKFAPSSKREQWYITHYRVDIGRKMHVANKDAAKG

SEQ ID NO: 82221 - protein, 449 aa, Zea mays
  Coding DNA Sequence Number=SeqID_38846
  Gene Ontology: Mol. function=cyclin-dependent protein kinase regulator activity; Cellular component=nucleus; Biological process =cell division
  Homolog annotation: Hit_ID=P93646; Match level="QueryCoverage=76%, HitCoverage=74%, E-value=0.0, Identity=92%"; Hit description=Cyclin type B-like
  Pfam annotation: Domain name=Cyclin_N; Domain location=271-395; Score= 212.1; E_value=1.3e-60; Accession=PF00134.14; Description=Cyclin, N -terminal domain
MREAPTVTEVLYKWTNIGKGWQSRCAATSRMAAASRPRYPAAAHLAGAGLLAPSSDNGEAKGGGGRTPGGGAARAPRAAYGNDAGEELTQCAPMSFSFRLVRKPMDTFPQPAAARGRRALVDVGNLMNGRPSLVNHQKQAVAAAATSHKPLNVGNKKPLVPQAAARGMRPLADVTNLMINDRAAPANRQKPLDAVFNRNGKAVKLKECKVKPEVIVTIPDSEKEKKGKLPGGQRVCRRASDGITTPKKKDPYDIDAPDSCNELAVVEYVEDIYRFYKSTEGTCRPLSSYMSSQAEISERMRAILIDWIIEVQYRLTLMPETLYLTVYIIDQYLSMESVPRKELQLVGISAMLIASKYEEIWAPLDLMCLCDNAFTRDQVLTKEKAILDRLHWNLTVPTMYMFIVRYLKAAMCDTELENMAFFYSELALVHYAMLVYPPSVTAAAAVYAA

SEQ ID NO: 82222 - protein, 145 aa, Zea mays
  Coding DNA Sequence Number=SeqID_38847
MAEELFNQPFDYENCLRDNRYCSLSPFGFLPSLRHAHEGIYSHFRHFTIMHRFCGVLNSFVKRTSNGKHSKPSVTPKEQFVTARRQDLPVSSKQGADTKSEKDNSTILDKAGNGPVVKEQSVDAYASKSKAQNGKAMPSNGGIAG

SEQ ID NO: 82223 - protein, 294 aa, Zea mays
  Coding DNA Sequence Number=SeqID_38848
  Homolog annotation: Hit_ID=Q38DX4; Match level="QueryCoverage=77%, HitCoverage=52%, E-value=3e-08, Identity=26%"; Hit description =Putative uncharacterized protein
MPRGYPTVISKRADVPSHHSVIFLKITYKAGYHSALPLKRQPRVQSLGITSKMPMPTFNHSALPLKRRPRVQSLGITSKMPMPTFNHSALLLKRRPRVQSLGITSKMPMPTFNHSALPLKRQPRVQSLGITSKMPMPTFNHSALPLKRRPRVQSLGITSKMPMPTFNHSALLLKRRPRVQSLGITSKMPMPTFNHSALPLKRRPRVQSLGITSKMPMPTFNHSALLLKRRPRVQSFGITSKMSMPTFNHSACPLTRRPRVQSLGITSKNTDADLQSLGVVSKTPTLYSFARHYF

SEQ ID NO: 82224 - protein, 69 aa, Zea mays
  Coding DNA Sequence Number=SeqID_38849
SSHNGLAALKVTTQSKVGSRNVGGWKGERRMRERLGGPNRDALDGERRTQVGTGVQATWGHAGGSEACA

SEQ ID NO: 82225 - protein, 70 aa, Zea mays
  Coding DNA Sequence Number=SeqID_38850
MARAVVLCSDDILGTARDGVVEAREDNAVHACPTRDDVGSVGVKGMALKSTFHEQEASDGTTGSSCLSPC

SEQ ID NO: 82226 - protein, 283 aa, Zea mays
  Coding DNA Sequence Number=SeqID_38851
MVIGEVVTDHMLIANVIRNLNERVVDISMQFQRTCSFRCVNGEFPTGMLFKDISWSIPDPAFEDYMARKCSSSWADLFPENVGLVSVPKVWAAFFMGLLIKPDSFDWARKFLLSGAISAFVEPSMDTIPIKIPSKCLLPSSQDTHVEPQSPSPTKAALRKRQPIMVDTAVRRSAKLRAKAKGFKTCSGIGKKDCSCCAHCAPHSIQHDIIKKLGAEFCKVDPSKLKPDDLSRYRATGTAIQRPDAPPSSMDDAPKTSEDQAVDSLFDDDDDAGSSASISTRPS

SEQ ID NO: 82227 - protein, 85 aa, Zea mays
  Coding DNA Sequence Number=SeqID_38852
MASWTALIWGPAGSSAGGHVTSGDVTHGDGVSKPGGEFPIDTSKRTCALKLHADVDNTFIEVADNIGDEHVVGDNLANDHVLPCS

SEQ ID NO: 82228 - protein, 336 aa, Zea mays
  Coding DNA Sequence Number=SeqID_38853
MQAACNRTKGAHPFDFDASSMEAQAHTSCNQRAGYYVQETAPPLAPVPRLLDCGTGAATRGDPAHDPTVPTEHIGHGSDSCGRRRDGRYGQKWAGSNGGGRRAEAAVKSSASSRPLLGQRENPLPRDRERGYFERDPSPRRKRAPSPLLIRGSKAGPSEGFNSRLRALGLRAHYWSEVRSLAPRKGSTTASGHSGSAPTTDQGFVGWPPKGSDSRLRARRARDDPGYVRYITKARATLLRVRLTAAKSGLGRHRKLRLARPQGSAPISASDDGLRPARPQGSGSASAPEDDELRLARPQGSDSASTPEDDELRLARPEGSDSASAPEDDELRLARP

SEQ ID NO: 82229 - protein, 175 aa, Zea mays
  Coding DNA Sequence Number=SeqID_38854
  Subcellular localization annotation: CTP_CleavageSite=60; ConfidenceScore=5.15e-01
MVPIRGGRAALLVEAAISVDSVVAAGSTVGVSTPVWAAAACALARSTVGASMPIWVAATRALMGMRSCPLCRLLSRCFPRQPELFVGVVVDRSRIAGSTAVQSLELSCRRTCSICRLRCFYFYSRCCSSVAASRDALAVVAAAAVAARSRSCATATSASCWRRALEVTKRRDMVG

SEQ ID NO: 82230 - protein, 154 aa, Zea mays
  Coding DNA Sequence Number=SeqID_38855
  Subcellular localization annotation: CTP_CleavageSite=89; ConfidenceScore=5.06e-01
MALFARAATGLATSGATNAVALAASLHRRPRAPPHAPRSELAVGGPPYIVGLGPLPDAPPTAVATQHRRRGSPLGFPALAAPAWTDIVRSSTTPATDSSLVAAIATIQARHGCLTGASACRLPRPGARACHGRCSDRPDDHSATPHPRPSSGRP

SEQ ID NO: 82231 - protein, 142 aa, Zea mays
  Coding DNA Sequence Number=SeqID_38856
  Gene Ontology: Mol. function=nucleic acid binding; Cellular component= intracellular
  Homolog annotation: Hit_ID=Q2L9Y1; Match level="QueryCoverage=22%, HitCoverage=5%, E-value=2e-10, Identity=96%"; Hit description=EMF -like
MEKIRHVHSHIMESGSPEDEAGSEDNFVQGENDVETESKVGEDTGRQPLGEDVCELQHGWDAENPNVSGDDTLTDKVQVNLHVLHALMLHMIGGEVDRADVVAADNGGLLEGVVKLLEKLTQPGGLYHNVGHAVLGFCQEAA

SEQ ID NO: 82232 - protein, 66 aa, Zea mays
  Coding DNA Sequence Number=SeqID_38857
MPGTGSATVTTSAQFDTDDEGQGGGVTLYKQRAMVHGGARRRVRRHGGARPCLRPHHHGIVASSRK

SEQ ID NO: 82233 - protein, 138 aa, Zea mays
  Coding DNA Sequence Number=SeqID_38858
MTEPPKSLGPPTVVLVQQTSDNPVGVPESLDKFGIWFSYISQERFPRHADIISIGVTRMQKQLHKLTFILKDEKSITGKFAVRSHHAPNENIFLQSKVHDEEQPLPRSGEPIPVGRRHGWSSRETGTQLNPYRTLPLT

SEQ ID NO: 82234 - protein, 195 aa, Zea mays
  Coding DNA Sequence Number=SeqID_38859
MGKPVPSLLMLLLSQGGVPLDSPTRWQDGRTSHSSNHALQRTCKNYATSKAEYTNTQLDLPGYNGSSSLISCEKQTIQIEFLSLQVTALVPTITGMGDHVSGRVRGYVHCQVHSGTRLTDLPYFSVMHKTGACLPKQWQADPLVLDPGLPPEHLLAPSRGRTLRQRGYSLSKCKEYVCPDYAEFNNIMLKEEKLS

SEQ ID NO: 82235 - protein, 35 aa, Zea mays
  Coding DNA Sequence Number=SeqID_38860
MAVTILRQDIILTHWVYKLDFLKNLIREMFTKATK

SEQ ID NO: 82236 - protein, 151 aa, Zea mays
  Coding DNA Sequence Number=SeqID_38861
MGEKRKRPLMPPLEDFGNSELFSEGLFHLPLAPHRPSVQTTQWGYPEESEEEDEEESEDVEEEESKEEDDGYEGGTVGKNGCDDGKASIGGGKGSSGDGKCGSSGNNSRGNNRGGGNDDNGGKAKGSDGDDDDGKGSGGKGGNAGGTVPLA

SEQ ID NO: 82237 - protein, 279 aa, Zea mays
  Coding DNA Sequence Number=SeqID_38862
  Subcellular localization annotation: CTP_CleavageSite=45; ConfidenceScore=5.05e-01
MHSPTLTGLHERVFPVSYGRYFRELVTRRLLSTRCSCSRSTECPRCRMRMTLEPHPLQPGWRSLDSESFGYRAEDTIEAIALHGLTTFCGFHPLVLSTHPIGLFPAKKKDDPMWKDQVEHTKDIWAIYPGQTAHLTVRCMNALYRLQVMRGEAMSHLMALLEATKITLDNREELVVDLSTEMVEKDLQVEQLSNEIQELEELVGTRENTIEVLEDQLINTQQQLAEANKHLDMHHQEIQDMEANEDVDIEGGEEPASSLDTASSGRPPSPESSVASFAH

SEQ ID NO: 82238 - protein, 211 aa, Zea mays
  Coding DNA Sequence Number=SeqID_38863
  Subcellular localization annotation: CTP_CleavageSite=89; ConfidenceScore=5.19e-01
MELTVPPNRTISPWLGRSPRRRRTHPPARVDRPIPATTAVEPYLAVTARTSQSQPRPSPDLSRRRKIEIISNYKCTFGLKEGESTSVTQKQMPSQREKYGGTVHLFIGTGHNPDKITSMPFTFGSNSIVIHRGLNSLFIFKSVSFSATTPKLSCSHLRRCINLRIIWASPTVISTRVRRYLFTHYTPETLLNHVCEDLRKPKAPNSSPSQY

SEQ ID NO: 82239 - protein, 121 aa, Zea mays
  Coding DNA Sequence Number=SeqID_38864
MAECDLMAVPVSNYSPPRLSILSTEPTVDTTIHPRHSPDNRPRGARRDTIASIRKVGAEPARWGPQGSDQTNFGLYSGAAYRRRERSSEGRGWLQEVLAITARYDSMAVVAGIGRSTRAGG

SEQ ID NO: 82240 - protein, 70 aa, Zea mays
  Coding DNA Sequence Number=SeqID_38865
MDSRLCGQLGTGDSYGASPANRDHTQALWGDAGLSGGTNSSPGRESRHWATVQRRQQRFVRYQLHTTVLI

SEQ ID NO: 82241 - protein, 160 aa, Zea mays
  Coding DNA Sequence Number=SeqID_38866
MTLGTSITWPRLGLRSRGTLGHFRDQQERFCNGIPPEGGIEPSDPIEWVRVRQITYRPHEGTTRPAEASRKALRPERSQTTPPRPWGLHPAGKQRRSPRSDCCANHLGKADSSRVQPRTQQEAPPHPTLGLSLGRRSPPRLTSRLGLSLGLRRNRVLARP

SEQ ID NO: 82242 - protein, 99 aa, Zea mays
  Coding DNA Sequence Number=SeqID_38867
MAIGEVLEPCVRDNVTVGEAPEPCRSTGGGATGILLTSPCFRRGLRTTDVMDARGEPSLPVTGASQMGRRSRSGASGAVFLSDRSVKGRSDFGHFDLAD

SEQ ID NO: 82243 - protein, 323 aa, Zea mays
  Coding DNA Sequence Number=SeqID_38868
MGSTRVAFVLLLSEERDPAWVGALQTSLGFKDFHHVARLQSPAGAGSGAASDAASCRLVQAWLSVHRTGDCHAVRTGGSYKTSYAARAAFVFLDCLVLTPARHRRAEAGADPSGRTWWQLEEVVSADETVGATCGRTSGSLALMACPRLSCGDVGEGLFTAASALRPSGVEVVHTCGSGTGVPFVMDLPVRKVTTEDLQPLCDELEPEAAVSVWTEAESARKEASSAQEHRRRLELGQAIREWDQPRSHVAEAMSRAEVLGGQLAEATERPAEASAWAGALAESLAVRAQARCWHPPSRWRSFRPCHRLRLGQVLSRVETEST

SEQ ID NO: 82244 - protein, 86 aa, Zea mays
  Coding DNA Sequence Number=SeqID_38869
MMHLKGFGDKWEDWVMRTVRAEKCLSPVYMPTWLSEKCLSPVYAITWPSEKRLSPVEAQLARLLPRPRLGSGEDAIPPEAEAEAES

SEQ ID NO: 82245 - protein, 568 aa, Zea mays
  Coding DNA Sequence Number=SeqID_38870
  Pfam annotation: Domain name=Transposase_28; Domain location=95-243; Score=-29.6; E_value=0.00016; Accession=PF04195.3; Description =Putative gypsy type transposon
MARAAVRLLRTKELVPKEYDSWARAPVLEAGPLFLAEMKRRTTAGSGSLLVAVCLLSTRRPAHQLYDLWARAPVLEVGLLWCALGEICGASGPLRAPFHWRSSASTAVVTMASLVHPEHFKSEVALNLVRNLLGWGAPSFAGRIRAGASPLGDLTAGLALPISTFFLLLLEELGLQLQHLMPHSILQAAIFAHLCEMFMGVTLLPPAPGRKAALSAPLELHQHLMVRLHELVQLRLRLSGQATERRALPRLHLFGFNGLDVASNNEGSFALTHASRRPPSRRSPPLASCSIGLPLAPLFPVAATVLRVSGRPAPGSCGGSGATTVLREDAQGRWLDVSRLDTSIPKEELVSRPPRGGLDWDLDLLRVRDQAKRLHGSGPPQGTLRVRNQAKRLHNSGPPQGTSTHSLELAPRLPDPPIEGSQTASPATQFGCHDTSKDQQAGLIMADLTGLAYTADTPGSAYFRHLEGSFPAGGEFVEPFSVQYFAAGLAPERLVVSCISDRCLPSALVDEVHVLTPQMFLHRLTNRLDLWGAHKGFWGKASFGPTDQGERGLPGSSASCRHQSRILR

SEQ ID NO: 82246 - protein, 260 aa, Zea mays
  Coding DNA Sequence Number=SeqID_38871
  Subcellular localization annotation: CTP_CleavageSite=60; ConfidenceScore=5.26e-01
MGATGQSAARTDVAVGVTEGGLAAITSASARKRRANQALAPSAGSYPPLRRCAASTFNVPCPLRWQAVTRPSYRRCIKFTINMQQIDLENSTKFGAYVPPDCLVSQRNNDQLCSTVDCADDGTVNRVEVRSQNCKVRTHGTVRCRKRTEDFNGAKGSTQTNKKIKVRVQKTGANETEENPGLAHRTVRCTRGDRLQLLTFGFLRPRSAIIHRTVRKSQDGIKDGFVQPKSAQSGCTGQCPVCQAGSGEKAALGTSSAAYG

SEQ ID NO: 82247 - protein, 143 aa, Zea mays
  Coding DNA Sequence Number=SeqID_38872
MGKTEGIHIEVSNVYVAQKISERHNVRSPYSINISRLPPRGRAAQRPYIRLRPLANVTGSRPHGSIGSPPERGAESYMVWFGRVSAPDPRLVLIKAWVFFVPESRDPTESGPDPTQRGPDPILGVRLALADVPDLIRRSGPHI

SEQ ID NO: 82248 - protein, 121 aa, Zea mays
  Coding DNA Sequence Number=SeqID_38873
  Subcellular localization annotation: CTP_CleavageSite=35; ConfidenceScore=5.54e-01
MASANVGASLSGVGDHSSTRFMEGGGLKRSSSPTRASPAAPDGLAPIPTGSTEMGFAPIPAVTEPPKSLGPPTVVLVQRTSDNPAGFLRPDQVHANREHRYTTVQPLAMEGTVTPRDPQTP

SEQ ID NO: 82249 - protein, 68 aa, Zea mays
  Coding DNA Sequence Number=SeqID_38874
MVVAPWVKYLSQEYDPMLTWAASTYRSPSCPSFRYKQNMQRENPLALLKSVLRVVLEQVRIAYRTIGF

SEQ ID NO: 82250 - protein, 296 aa, Zea mays
  Coding DNA Sequence Number=SeqID_38875
  Homolog annotation: Hit_ID=A2XFR6; Match level="QueryCoverage=44%, HitCoverage=36%, E-value=4e-22, Identity=45%"; Hit description =Putative uncharacterized protein
MDPGTHMMVRTLQTTHVNTSYAPQPRQIPVYPVVVEEATVNLPLVRVENVINLEDSSEEQLPTPTSLAESLAFAAGSSTSASSAPAFQAPAPGGDDPDDSGDGDDEDDDDEDDGEDGHINEEADYAQQDNFMGFGPVVEHYTSMFRDGALPQPAAGGVACARHLRPPPVRDEAGDRGFRTLSAHESLIPLSTYAASVSDAARRTLWSLSHTYWQQLQNTRFRHLPQRLRGESQTNIVPGEPGEDRLNTLAGVVAGLNTDLDSATLDLYRVHLELENAHARIAALEAQLQGLDPPEA

SEQ ID NO: 82251 - protein, 476 aa, Zea mays
  Coding DNA Sequence Number=SeqID_38876
  Homolog annotation: Hit_ID=Q9DUM3; Match level="QueryCoverage=28%, HitCoverage=13%, E-value=2e-07, Identity=25%"; Hit description =Latent nuclear antigen
MHVVGDFLKRRIVPLQQRAHLCCWFIGSNDIDRIQRWPGTDLSWEELEVLVLTHPLLVRASSPSAPKVVPPPPSAAAAETAPPGPQAPAGGPTAVAPTPSGAAAAEGVPTAPTAATASTTVMSSSTPSAAAEEAPAAPTPAIEVDVGGASSSVPPPTPEETELEERTKAVSRQFAFERSKLERDRKDYKKDLQKVYARELEVTRKEKKLAKKEEHLDQREEVIPELQAKLNAFNKMLEEQRQGLDDRARSLALAEENLKEKDASLYKWATNLAWWEKDLVFREEMFERREKLLADHELEADEKGRALEEKERTLGERVRQFKAAQAAQIAPGPQVVEVMRKTLEDLQAEQRAGVQCITAWAGEASTALVLLGVSPIPVSQPPTSISDALPVLDSTADRLRCLDHILGARLEAEGGRLYQAVVEYILTCFRSHDPAISLEPVIAGPVVDTEDADQEGIKDAVELVAERFQRDPADDE

SEQ ID NO: 82252 - protein, 269 aa, Zea mays
  Coding DNA Sequence Number=SeqID_38877
  Gene Ontology: Mol. function=transferase activity, transferring nitrogenous groups; Cellular component=ribonucleoprotein complex; Biological process=biosynthetic process
  Homolog annotation: Hit_ID=Q10P02; Match level="QueryCoverage=22%, HitCoverage=12%, E-value=9e-25, Identity=90%"; Hit description =Aminotransferase, classes I and II family protein, expressed
  Pfam annotation: Domain name=Ribosomal_S4e; Domain location=161-242; Score=60.8; E_value=4.7e-15; Accession=PF00900.11; Description =Ribosomal family S4e
MVIPSQCHSPLAVPAPAVRDFRSLLDEEKRSEICAAPVRYCVYRVRESCQLPLGLGLGAPSLYDGSAVLVSHTQWPRDFSSHLVVEGLLIAVIVFQLSRKSYKPPKKPLTEKEIDELCDEWEPELLCPPIKEGATIDAPTLERNKVVMEGFMTAIIQFLEALESFYVVERDGLRDMAFHSAQLDLSPEHRRKFKLCKVRSVQFGQKVIPYLNTYDDRTIRYPDPLIKANDTIKIDLETNKIMDFIKLYLPFHRLHQVIYLVRLNVSTNS

SEQ ID NO: 82253 - protein, 214 aa, Zea mays
  Coding DNA Sequence Number=SeqID_38878
MVGGNWLRRRRGRRSRTADEAEQAAQQDDLVQQQAAQQDDDDQQQDNDEAQQTASVWDSGKFKSSLAGFSWAPNYSPIYIASHHDPLVGPKTEVPKSQLGSQAHAPLPEFGSCRVLVALPSAFCRALYKVLLSIMTSFTESSTLDTEIHSAKKPVPSAKHSANNGPRQRAVNGRLKLTTVNFAERRTLTLDKEASLPSVRRLTLGRACYVECHS

SEQ ID NO: 82254 - protein, 71 aa, Zea mays
  Coding DNA Sequence Number=SeqID_38879
MAGGIELAGAKGKWLVGEDNGPWVESEGVAGEDPEQQPVGDEEDDGFDYGYDNVSGILFVWKGYFWIKNLG

SEQ ID NO: 82255 - protein, 226 aa, Zea mays
  Coding DNA Sequence Number=SeqID_38880
  Gene Ontology: Mol. function=translation initiation factor activity; Cellular component=transcription factor complex; Biological process =regulation of transcription, DNA-dependent
  Homolog annotation: Hit_ID=A2XDJ3; Match level="QueryCoverage=87%, HitCoverage=37%, E-value=5e-69, Identity=72%"; Hit description =Putative uncharacterized protein
MSSQCPYCRASGPARCATTQPPLSRAVSECSACARIVLERHLHTHPFFPLLPSLHPLPLVTPDLATAIDPAPSPSPGDEDDEDPFLPAGFVSAFSAFSLERHPVLARSASTFSGHLAELERALAVDSATAASNPDPAGPKVSVDSLRAYLQIVDVASILRLDRDIADHAFELFKDCSSATCLRNRSVEALATAALVQAIRARRANAVEPPRWRTAEQEIRTPVAGA

SEQ ID NO: 82256 - protein, 435 aa, Zea mays
  Coding DNA Sequence Number=SeqID_38881
  Gene Ontology: Mol. function=oxidoreductase activity; Biological process=electron transport
  Homolog annotation: Hit_ID=A2YPS8; Match level="QueryCoverage=33%, HitCoverage=46%, E-value=2e-57, Identity=74%"; Hit description =Putative uncharacterized protein
  Pfam annotation: Domain name=C2; Domain location=6-93; Score=49.5; E _value=1.2e-11; Accession=PF00168.21; Description=C2 domain
MAYRALEVTLLSAKDLKRVNLISRMEVYAVVSISGDPLTRQCTQPDPYGGRHPSWNTSFRFNVPPTAATATGCLHVLLRTERALGDRDVGEVIVPLADILATAGGASDPGPRPPQLASYQVRKVHRCEPRGVLNVSYRLGPIVGQQAAPLARADEAAAAFVGYPVVPRQYYPAPYAYLPSPLSLAPGPSPPAQAAGGRDTLALHPPSPYSLPAATYPPAASAYPQQAAAGPGRNALPAPASEESNGKLDFGVGLGAGLVSGAIGGMLVASDVMMSDAAAYNSGYRAGLADGGAAAVYRSSYRVPDKVEAKRAAVPAYRNYHWVTEIGSAPRRQDLARHDGRVDVYGPDGVGGLHVLQRVDMRQHAASASRDAPLVLPCAGADDGEVRVERWAAGGFAPLSMAFSPDSKWLVVPSSVKGTIHVFSVNVDAPSPSPA

SEQ ID NO: 82257 - protein, 216 aa, Zea mays
  Coding DNA Sequence Number=SeqID_38882
MAATTTTSTKVVVIGRSCTAHAKELGDLIPKAVAETWTRLRPSDREVQQSRPFDHQQAVRSRHRDKQLDVNDESSVPPSCKGIRCIRRCRLETAGSTHHTRPKKLEPTLTVTGPAVMRRTRVRALASRRHRHAPKRKAGDQPPFGRGQQVAAAGGTGHVTAPTRASTAPRDGHRATAPSRAHVCAVPQAPQPLRPGYSAVGPRPVWMIIVAATVWI

SEQ ID NO: 82258 - protein, 340 aa, Zea mays
  Coding DNA Sequence Number=SeqID_38883
MATPDGDTSFVVGRSKPGCGLCSALSFKDLHHPCRGGGRAEPELHISHGLVGHLLLQPSGEGVLTVLAEGADFDNAGPSGRKRRQLQHAWLAGSAGSGTASGATSHRWAEYGYHSSSVCLEVITAAVWPPEAEVVVAAAGAIVGEPFGVRRPAGFLVWRNPRLLYDELKPEAAVLAWTEAELARKEEASSAGAWPGRPLVGPTLSRIVEAMSRADVPGGQLAEASERPAEPSARARFLPEAGLGRGADVLPRGGDPPIMSSFETGSDSAEGGVDAEGAAAPLTDCLNLIIYPSESYFSRKVMSEKVMSEVSVSRRRRSPSARSALPAYVYSIVFMIPPSK

SEQ ID NO: 82259 - protein, 59 aa, Zea mays
  Coding DNA Sequence Number=SeqID_38884
MAYEGGDKKNNRQRMKLEQRTTYYNLIDTGGSALNMSDDRKRAMYDGFDSVTHGHSEYE

SEQ ID NO: 82260 - protein, 119 aa, Zea mays
  Coding DNA Sequence Number=SeqID_38885
  Homolog annotation: Hit_ID=Q8H475; Match level="QueryCoverage=80%, HitCoverage=89%, E-value=1e-34, Identity=75%"; Hit description =Putative uncharacterized protein P0470D12.115
  Subcellular localization annotation: CTP_CleavageSite=36; ConfidenceScore=5.01e-01
MWSGVVAKRIRRMSGSSGSGVWVFKNGVMQLEQPAAAASRKALVYVPTNEVVRSVEALERRLGTLGWERYYENRSIVQLHKRDGGADLITIPRDFASLRSTHMYDVVVKNRDHFKVVDA

SEQ ID NO: 82261 - protein, 245 aa, Zea mays
  Coding DNA Sequence Number=SeqID_38886
MWSQTPLKGKCALGPFLSILVIECQHKCLNVNLYPWMDKVQIKSKGEIESEKSWLCTAKRLFGLEHRTVRWCTGQCPVRQTDSGELAALGNLPATYGYNSSDCPVCIGLSGEPTVGRANGRPGQRSAARSARDTWPSQRLEGGIGLSGVHRTCPVRQRLSGGQRSAAPFKERNRAPDSVRCAPDCPVHQSTEGKISLPDLLSTAPSCLGAIKGTPRRMEEYTKHSYNIPKHQDIDSAHLVHCDSI

SEQ ID NO: 82262 - protein, 213 aa, Zea mays
  Coding DNA Sequence Number=SeqID_38887
FCNFCPRPIDAIGCDRRANDAVGTSPARHLATDANTDATADAVGISSSWAVTITRIALTLTRIMNSQSTKLSMSLAAFLASPRLRQASSTSCRAADHHPFPRGDSGNCHRRKSSAAVAAAAAELSASSSSWAWQTDASRRSIHRSHGANFLVLAQSAQVPSVGRELTGGALQSESLAYASKSSKPRLRTSIMANFSSWVGWREDDGTRLHDGD

SEQ ID NO: 82263 - protein, 172 aa, Zea mays
  Coding DNA Sequence Number=SeqID_38888
MASLEIKGVIRQRVNGTERDCESEMGTERLRPMKYEKSCVECLSQKITRLYGFRPTPAILSIPLRIRIIHALSHYFALQQPLHPSPQNRRRVPALPFSTVSLSSPHKTACATSCSRAPAVIDCMRSANTESAGNGDGYGEERETVGRAKYGYGEGVCWSWSYGTGPLSRNHG

SEQ ID NO: 82264 - protein, 118 aa, Zea mays
  Coding DNA Sequence Number=SeqID_38889
MAWNCGIALLNFGKFEPLSNWGSNDLDNLRDSGYAFNQCAAKSQRESWNLADRSSSGSSEGVAAASRPADAPTAQSALPMTRSVDAVPGAPIVISGYWTGPGVDDGCGSVEAVLQRIA

SEQ ID NO: 82265 - protein, 180 aa, Zea mays
  Coding DNA Sequence Number=SeqID_38890
  Subcellular localization annotation: CTP_CleavageSite=51; ConfidenceScore=5.59e-01
MAPGGPHLCSSAPPFSRPGLKLPRHPLSSSLPHPQPPAVELPRRSLAPSIRSQPRSSCAREFLWWTRAGRDPPHPIAALQLAARPAPLCRSAYLPELTPVLGFSVSSMVLSSAATCRVPPFSALPARLGWMGIHLVAFVAAGASCRRFMCRRCWLEPLLVDPNPNVVDIQLAKCSMERLI

SEQ ID NO: 82266 - protein, 214 aa, Zea mays
  Coding DNA Sequence Number=SeqID_38891
  Homolog annotation: Hit_ID=A2Z174; Match level="QueryCoverage=25%, HitCoverage=13%, E-value=3e-07, Identity=56%"; Hit description =Putative uncharacterized protein
MEGNNCLSAKEGSVLKQQQEETDEAAISYKGKVIIIIDLGGCKRILHKDGATEMDELVGYEMFIHDFAWSNKRGGTIDGEVFNTNMPWLGDPRMDRSHWNDDGRSKKPYPTQVGNSTSIPWDPGGANALHDMMLLEDKQYFDGTARLMSHREGISQRRYAAAAIPHLAVAGVPSSPNPLWITNRTSAGHGSHRRGLGAVVAASGWTGSSGPSDP

SEQ ID NO: 82267 - protein, 117 aa, Zea mays
  Coding DNA Sequence Number=SeqID_38892
MEHGQRASTKGTRAHRSSAAGNRQRELGCGGEAPRLEVEDEGPKRSPMEEQGLATGHGEQARAGKMSRGAASHGSRGNADELAAGTEQRDCLGVVSSRARVLWTPGGRARLGVRARR

SEQ ID NO: 82268 - protein, 46 aa, Zea mays
  Coding DNA Sequence Number=SeqID_38893
MAMMGSTLEKMYLCQVCAAVMGLSADGLDLLISLSTSSILLIEDGH

SEQ ID NO: 82269 - protein, 146 aa, Zea mays
  Coding DNA Sequence Number=SeqID_38894
MAIMGSTSDKMYLYQDSQRIAELSADVSRLKYEISERDSAIDWAINSCSIAWDREAKARARVAELSAVLESLQVYCNTLHEEVHVLYARLHPDVPSDAAAMGAGPSGTTNEGPDGELDLFRPPRSMNLADERSLATGNEATKDDED

SEQ ID NO: 82270 - protein, 181 aa, Zea mays
  Coding DNA Sequence Number=SeqID_38895
MKDIPSSSYYTIVKGESYGLAEDTIEAIALHGLTTFCGFHTLELSTHPIGLFPAEKEDDPMWKDRVEHAKDVWALYPGQTAHLMVRCMNALYRLQAVRGEAMSQLMGLLEATKITLDNREELVVDLSTEMVDKDLQEIQDMEADEDVDIEGGVEPEPASSLDTADSGRPPSTESSVASFAH

SEQ ID NO: 82271 - protein, 110 aa, Zea mays
  Coding DNA Sequence Number=SeqID_38896
  Subcellular localization annotation: CTP_CleavageSite=16; ConfidenceScore=5.02e-01
MCGSPSGMVEVDWSTCAGGGARRRRAVRPNQGTIGQSNGSSTRGGGRPKSGEDDLRSPVKFYRVQALGKLHGPLVKLTEGQAQLGRDWSGLATVAEARAVVAGGGKARRS

SEQ ID NO: 82272 - protein, 82 aa, Zea mays
  Coding DNA Sequence Number=SeqID_38897
MDSLIGAGRSFYGFRMLSNWRIVVVGSGAPITNVVRCLRARCRRAKSGWGKNDDLAPSEYDCATGIKSPQERLWRLDLFYAA

SEQ ID NO: 82273 - protein, 178 aa, Zea mays
  Coding DNA Sequence Number=SeqID_38898
MMPEKKLGELKKLLNAKGVVVVVVMGAGPRKLENDLPKQLKSQVVDYLCILHRAAHPRRPGRHPHARLQRAAPQPLAPHCARLQTTASSTRTAHRVPPPRQPAAASSPSRPPPPRQPAAASSPSRPHRASGTSRQQHTAPAAHHASSPSRCRRAAGTLSLSTRKFLGNHRATGNHLPL

SEQ ID NO: 82274 - protein, 71 aa, Zea mays
  Coding DNA Sequence Number=SeqID_38899
MDESEYGMAINVLFSKKGAFEDKWVLKEKGDRPPGTSNCITFESQRIGTLQVVSELLGWPQDVTLSLINSF

SEQ ID NO: 82275 - protein, 301 aa, Zea mays
  Coding DNA Sequence Number=SeqID_38900
MKMVFSKLLRACTVRLGIRSQPEYDGREFVEHGTEKCVMTVYIGSSPHHVEWSVTDAGHRFRDTCQVIARKALRALCQIYEEEVADTSLRFFPPFQRNRPVWMARMRALEEQQLLEDDPTVAYLTAYLLTLDAQYDFLDRHHRQMIARAEDAEKLNQPCGSKSPLSSNHVQPIRAEDPPILEGHPVSIRGEKKAWELPEGAIVLEGIPVFPQAMNKQEHPESAQDPPPELFEPLTMKKIPALSREIKEEAASTPPAPPPSEELQEPVQLEEEFDPVLPSQSPPEEVINISSLLTHPGDVSD

SEQ ID NO: 82276 - protein, 389 aa, Zea mays
  Coding DNA Sequence Number=SeqID_38901
  Subcellular localization annotation: CTP_CleavageSite=70; ConfidenceScore=5.70e-01
MGQSHAARASSTATCLPPLLCLRVRRRLSYPVSLPGGTPSDSPSCASGSLAEPSAGRPRRGRRPHLAGRRADIAEPGGLAELQAPGAAQCLTEPSGLAKPDVGRLSAQTEPPTQQPSSTCANATGSETSVSSSSRVAVRVPLLEYSSSFSSCRVTAKLVITSAINSASSSNEKELSASSSNDDFKSFESTTSYTTAASRSSTIILVAMHGTAPWVIMLAACQMREDVVSRKAAQKMKRMQRSTPATTSSSTMAASGPIVARAHFPRAPFREVITIGHYINDDTFYARKPNQKKGKYQKARSFSNMSSKTGYTTDHGDNVSAGSDRRANDAIGSDRRANDVVDTLPARHLAIDANTDATADAVGISSSWAVTLTRIALTLTRISFGLTSC

SEQ ID NO: 82277 - protein, 191 aa, Zea mays
  Coding DNA Sequence Number=SeqID_38902
  Gene Ontology: Mol. function=zinc ion binding; Cellular component =intracellular
  Homolog annotation: Hit_ID=Q2RBR7; Match level="QueryCoverage=70%, HitCoverage=21%, E-value=2e-24, Identity=52%"; Hit description=RNase P subunit p30 family protein, expressed
  Pfam annotation: Domain name=CCT; Domain location=63-107; Score=82.5; E_value=1.3e-21; Accession=PF06203.5; Description=CCT motif
  Subcellular localization annotation: CTP_CleavageSite=52; ConfidenceScore=5.36e-01
MASQLHAITHLSPSSSSGMASATSPSFRRALSTGDLIVQEDRDRDEEQRAVVAAATRYSAEERRERIDKYRSKRNQRNFQKKITYACRKTLADSRPRVKGRFARNGGDYTEADAVADHHVLGAAHQSESESESPATAATPEWWPAVQEELPAVAAAGINLAEFCADDDEMLAAYLGVSSISIADHHYSCQP

SEQ ID NO: 82278 - protein, 159 aa, Zea mays
  Coding DNA Sequence Number=SeqID_38903
  Homolog annotation: Hit_ID=Q6QP51; Match level="QueryCoverage=40%, HitCoverage=35%, E-value=1e-21, Identity=67%"; Hit description =Putative growth-regulating factor 1
MGSKAGPSEGFDSRPRARRVRDDPGRQGRSDRNHFTLSLTDLTGKHRRSPCSDCCANHPGKADNNQVQPRAQQEAPPRPSLGLDLGGRSPPRLTPGLGLSLGLGRNRVLARPQDSASASALGGIASSPDPGLGLGRSLRLARPWARTDRATGDTSLPYP

SEQ ID NO: 82279 - protein, 171 aa, Zea mays
  Coding DNA Sequence Number=SeqID_38904
MLGALPQDEDPVPPYPVDGQQLLVDYLGMSKPVVHTHFDLNMPPSEGAPVQAHDENAAENNKEQFSYQLSSLEDLLSSDDSIGFLTGLINSPQPQMQPDEMQEHMGAVLALPTAPLENMVEGNQEQDAVNMQIDDNIQVRLRDRSIYTMSIQPMKDTWLESVTTYRPKQCP

SEQ ID NO: 82280 - protein, 221 aa, Zea mays
  Coding DNA Sequence Number=SeqID_38905
MTCGTGTQPPRRRVRTLEHVGGDFACDAWGCEWGEPPLKRERSPGQQTCLRTPLMHCALPPSEPLDGVRLRCLFLLLFEECDPVGASWWGEASRAAASAPPLASRMFIILAVAEGERALTGLTEGANFDNAGQVGRKRRQLQRVWLAGSACSGAASDAASCRLVWAWSSVHRTGDCCAVRTRGSSKTSYAVRAAFVSLDCLVLTPTRRLRAEAGAGPSART

SEQ ID NO: 82281 - protein, 203 aa, Zea mays
  Coding DNA Sequence Number=SeqID_38906
  Gene Ontology: Mol. function=oxidoreductase activity, acting on the CH-OH group of donors, NAD or NADP as acceptor; Cellular component =cytoplasm; Biological process=branched chain family amino acid biosynthetic process
  Homolog annotation: Hit_ID=Q7Y096; Match level="QueryCoverage=61%, HitCoverage=30%, E-value=3e-45, Identity=75%"; Hit description=3 -isopropylmalate dehydrogenase
  Pfam annotation: Domain name=Iso_dh; Domain location=86-203; Score= -176.7; E_value=0.00026; Accession=PF00180.11; Description =Isocitrateisopropylmalate dehydrogen
  Subcellular localization annotation: CTP_CleavageSite=73; ConfidenceScore=5.59e-01
MTLVVLSPLRKQGDVSRIPAAPPAVLLQGSGTSPTATLSRTQGSSTSPTTMLACTQGSDTSLPDTLAPSYTPHCASGPSPCIYKREVQGLPAEGVELRFQEKLVGGSALDTTGVPLLDETLDEAKGSDAVLLGTIGGYKWDTNEKHLKPETGLLQLRAGLGVFANLRPAVVLPQLVDASTLKREVAEGVDIMVVRELTGGDSN

SEQ ID NO: 82282 - protein, 284 aa, Zea mays
  Coding DNA Sequence Number=SeqID_38907
MSFVLFDCFDDRVLKTTRVHVQTSAGGGAAPSTSFPPSAESGPASDGDMGGRISTSKEDADTALGPSRPEQPKVLKLSKRSLERQGRPSRGTPTPPGYEYLTRHLPRKATHARLSGSANRQASPSARNEEETRHHAQMPECSGLSSRKEQTPILRVPLQTGLRFHSRGYEQPPHQRACGITNSRWLAGDRSTGSDNDLRLGRLNSSSDDLRANAAVKRPSPTSPHEGRGQAIKAKEPEVRPQVAATVSSADTTSSGCHHLSTDDSGHLRASATPTHGGRPSLHR

SEQ ID NO: 82283 - protein, 66 aa, Zea mays
  Coding DNA Sequence Number=SeqID_38908
MALRFSSSKRRRCCFTGQASARISSECSTTSLGVIAGVEGDGLNRLSRFEVAGVALRIKHLLEEAF

SEQ ID NO: 82284 - protein, 142 aa, Zea mays
  Coding DNA Sequence Number=SeqID_38909
MAGVGRSTRAGGDARRRRGDRPGRGEIVQLDGSGRSTGCQRRHERKELGGDSLDSSVHTRRQKTEVRTCSREFGTTLIFGSPGFEFRKAENADDLWEEVWHLRETLGDTGASQPSPLKGISSRDSGQSPPRVKRRVRLIGNG

SEQ ID NO: 82285 - protein, 100 aa, Zea mays
  Coding DNA Sequence Number=SeqID_38910
MGEGAAEAGARPRHGWPRCDGTGVEGGGAAPRRGAEGGRAASERGAEPRAMAGRGSCATPGPPRLGHAMAAPGKGRRGERGEEEGAYRGQGQGGDGGSAT

SEQ ID NO: 82286 - protein, 132 aa, Zea mays
  Coding DNA Sequence Number=SeqID_38911
MALERLSDGENTAGPQVDGGGDMAAWRRVRSSLIEPLNQDQIPQSHSKVMELPLDAQSSGRRLDVDERVEQCRAVAGVLHVLARFVQVLQMQHLRGIHTYREEAPRTELLGSRRRLGEGERRAAAAGLQGAN

SEQ ID NO: 82287 - protein, 77 aa, Zea mays
  Coding DNA Sequence Number=SeqID_38912
MAGGIELTGAKGKWLAGEGECGAKWGAPGRLYRRGAVHGRSWTGETCSREFGTTLIFGSPGFEFRKAENADDLWEEV

SEQ ID NO: 82288 - protein, 75 aa, Zea mays
  Coding DNA Sequence Number=SeqID_38913
  Subcellular localization annotation: CTP_CleavageSite=59; ConfidenceScore=5.35e-01
MQLKAATVDPRLRRVPTTVQAKQSPRSSELMCAIVRTLRHRSCPCAGVVPTAEFAVSPRADMYRVIFGTGVARSS

SEQ ID NO: 82289 - protein, 104 aa, Zea mays
  Coding DNA Sequence Number=SeqID_38914
MAQWLTWSMFAGGRRDFRRPWTGLSDEADFDSTLGELHRGVLSRLRGSDGVGKGLAGRSMAAGARVAADTPCTGKRRSPKSQTCESWQKSGASLFLAPRAVSHP

SEQ ID NO: 82290 - protein, 104 aa, Zea mays
  Coding DNA Sequence Number=SeqID_38915
MSPIPVSELPTSISDVLPVLDSVADRLQRLDQILGARLEAEGSKLCRAMVEYVLTCFQSHDPAISLALVIAGPVAATEDAARESGQDVVELVAERFQRDPADDL

SEQ ID NO: 82291 - protein, 185 aa, Zea mays
  Coding DNA Sequence Number=SeqID_38916
  Subcellular localization annotation: CTP_CleavageSite=33; ConfidenceScore=5.14e-01
MQPASPLLLRPPGATWGGGTGGGTACSPFALIQGAGGHGSSGAMSHTGRLGTSSRRIGDPDPAVGVPVAGLANLHAALVEGRQRGQDRHPQPWVVTECRDALGEDQGLSDEGFPSNPSHEDCQLVPGQVGVRPALDPADVVRAGEPTAQTQSPLQRRDPVLQEVADHVHRCQAACCQALDLVQYG

SEQ ID NO: 82292 - protein, 55 aa, Zea mays
  Coding DNA Sequence Number=SeqID_38917
MAQWLTRSTLAGGRRESDDRGLASPVKQTSIPRSGSITENLGGFGAIFKVKTVDL

SEQ ID NO: 82293 - protein, 215 aa, Zea mays
  Coding DNA Sequence Number=SeqID_38918
MTSHGSSEGGNAQSHTDGLAREGFPRILWEVLQGASYTTPPQYAVQLFEKHRVPRCRVRMTLEPHPLQLGWRSLDFESFGYRAKDTIEAIALHGLTTFCGFHPLELYTHPIGLFPAEKEDDPMWKDRVEHAKDIWALYPGQTAHLTVRRGEAMSHLMALLEAMSPSIPWQQIRAHRLGVQCLTDPDCGHAVTALVPTITGMGDHVSGRVRGKVCG

SEQ ID NO: 82294 - protein, 87 aa, Zea mays
  Coding DNA Sequence Number=SeqID_38919
  Subcellular localization annotation: CTP_CleavageSite=46; ConfidenceScore=5.06e-01
MARGRLFRRAGGCLSPPSAGGRRGSPAHAKVACNRNAGPHPFGFIASSMEAQAHTSCNRRAGYYVQETAPPLAPMPRLLDCGTSAAT

SEQ ID NO: 82295 - protein, 308 aa, Zea mays
  Coding DNA Sequence Number=SeqID_38920
  Subcellular localization annotation: CTP_CleavageSite=26; ConfidenceScore=5.30e-01
MQAACNRAKWTRFSDSQRRQPGATVNAAESGPAVMTVAGGREQRSRRQPGSRPIQGQQESLLSRREDGAPVIRPSNGSRTRSGRPANHSPRRINSAAGQGPGKGDTPKRILPCEGTGLRAPLTDQRFEGWPSEGFNSRLRSRGPYTHYWSEVRRPAPRRAPRPPQATWAPRPLLIRGSKAGPRRVHSRLRRRARDDQGYVRYITKARAALPSSPETPCSVPTEGNMAHSPLLLAKRRRRGVCKKAESVPDRPLTLCGGSGAALANPAPAKPLTASTYQPESLGPDRAPGLRPVRMREQPDQPKHYARH

SEQ ID NO: 82296 - protein, 245 aa, Zea mays
  Coding DNA Sequence Number=SeqID_38921
  Subcellular localization annotation: CTP_CleavageSite=39; ConfidenceScore=5.29e-01
MSSSSLMRRVFPPSKPPDGGPAAPLHRRSPKMVTFGLMVGESEPGCGLCPSLSLKDFHHQGWGGEEGRLSSVALAAAPCLALGREWLRSRSRRWRPPRQLEEVLLPARLPRPATDRPSTLRPSARPCLTSFGLGGGLLAAASALRSVLPLFVPPEQKSSSPPLLEQHEQRRSWLENGNLVGRSLAGLSASGTDAGVDQPRPRVGLAPLEDGRPRLLRQPAEPPARAGFPEKSLDRVAVRGWVGSR

SEQ ID NO: 82297 - protein, 122 aa, Zea mays
  Coding DNA Sequence Number=SeqID_38922
  Gene Ontology: Cellular component=exocyst; Biological process =exocytosis
  Homolog annotation: Hit_ID=A2YVV6; Match level="QueryCoverage=47%, HitCoverage=9%, E-value=5e-17, Identity=74%"; Hit description =Putative uncharacterized protein
  Subcellular localization annotation: CTP_CleavageSite=28; ConfidenceScore=5.63e-01
MPPCAGSVSSASTSASSPASTASASIFVASAPTTHDTPFAKAINGTTLQLFGFTEAVSIIAATLEKLFKIIDLHDMLSDLLPDVSDFTSLNIRITSQGLQVKVSPALSRQEQADPSPSSASR

SEQ ID NO: 82298 - protein, 38 aa, Zea mays
  Coding DNA Sequence Number=SeqID_38923
MARAGISRVDDVEAAKSAESTRCTSAVGMKGTGRAAQL

SEQ ID NO: 82299 - protein, 268 aa, Zea mays
  Coding DNA Sequence Number=SeqID_38924
  Homolog annotation: Hit_ID=A2Z3B1; Match level="QueryCoverage=100%, HitCoverage=100%, E-value=1e-121, Identity=70%"; Hit description =Putative uncharacterized protein
  Pfam annotation: Domain name=NC; Domain location=99-180; Score=25.9; E_value=6.5e-05; Accession=PF04970.4; Description=NC domain
MGLLSNRVERSEIRPGDHIYTWRAVYAYSHHGIYVGGSKVVHFTRKKETESSDSSDFTSSLISGVPSECPTFPDCGFQLPSSGVVLTCLDCFVRSGSLYCFEYGVPSAVFLAKLRGGTCTTAESDPPEVVVHRAMCLLQKGFGNYDIFEKNCEDFALYCKTGLLPVEDPGIGTSGQASSAIGVPLAALLSTPFKLLAAGPLGMATVTAGMYCAGRYITDIGVRKDVAKVEVEKLSSHPGFHLVEDEGSVNKRSEKPKSLLPMKRKRGR

SEQ ID NO: 82300 - protein, 116 aa, Zea mays
  Coding DNA Sequence Number=SeqID_38925
MGKSKKGGSSSHHSGGVLLRVRGVTSPRLSPASSDDSDDSQGIAAEVWTYIRSVERSGLEGSDESEVSSDEENSSDLSEEGSGGDDDDEGDGDDGGDDDGDGGGGKADSGSTKASG

SEQ ID NO: 82301 - protein, 204 aa, Zea mays
  Coding DNA Sequence Number=SeqID_38926
  Homolog annotation: Hit_ID=Q6QP51; Match level="QueryCoverage=80%, HitCoverage=57%, E-value=2e-15, Identity=38%"; Hit description =Putative growth-regulating factor 1
MSLSRQGQSDRSHFALPLTNLTGKLRCPPRSDCCATHKGEADNSQVQPHAQQEAPPRPTLGLGLGRRSPPRPTPGLGLNLGLGRWSLPRPTLGLSLNLGLERWSPPRPTPWLGLNLGLGKVVSTSPDPRAQPQPRPREESRPRPTPATASGEVSASPDLGLRPTAPRGYIITLPLASSGYGGTRLASRLARPGKQVMMAPRVRP

SEQ ID NO: 82302 - protein, 266 aa, Zea mays
  Coding DNA Sequence Number=SeqID_38927
  Gene Ontology: Mol. function=serine-type endopeptidase activity; Cellular component=integral to membrane
  Homolog annotation: Hit_ID=A6MD08; Match level="QueryCoverage=99%, HitCoverage=64%, E-value=7e-75, Identity=57%"; Hit description =Membrane protein
  Pfam annotation: Domain name=Rhomboid; Domain location=162-266; Score= 81.0; E_value=3.8e-21; Accession=PF01694.13; Description=Rhomboid family
MASDGDGKGRVATAPGAGGYGYGYGYAGFEGEEDRKWWPWLVPTVIVACIAVFVVEMYENNCPKNRSQLGGDCVAGFLRRFSFQPLRENPLLGPSSSTYVVAAQALVLLMESWDYFDLYKRLCLIFGLCRTCAKIRHCQMGGPARPDTTRLEKMGALDWNKIVHQNQGWRLISCIWLHAGLIHLVVNMLSLLFIGIRLEQQFGFVRIGAIYLLSGFGGSVLSALFLRNNYISVGASGALFGLLGSMLSELLMNWTIYSNKASTINR

SEQ ID NO: 82303 - protein, 241 aa, Zea mays
  Coding DNA Sequence Number=SeqID_38928
  Pfam annotation: Domain name=IQ; Domain location=34-54; Score=23.3; E_ value=0.0009; Accession=PF00612.18; Description=IQ calmodulin-binding motif
MQATLQKVEQGLLQIKAAVQHEQHQLALSARLRTSVAVGIQAAARGFLARQRVQEMRRQMLEAALVTVDLDKRGRDLTLSDGHQQWHQAAISKCEHDTCPTGDELQLYDSGGREGTHLVINKGALFSATTFRYRPPRGCLRWLLLRPIPATDVPISMGCAVCHLRHAILATGVPISMDSIACQFCHHILDVGVPISRDNAKFCHIIFVDGISIPMGDATRGSHGSAITSSIDGELVDQRKG

SEQ ID NO: 82304 - protein, 91 aa, Zea mays
  Coding DNA Sequence Number=SeqID_38929
MGATSSRGVALGNIKNTDGREEGRESSSLPGSDSGKAPEDGELRSARPRARTRAKPRKTANSAPPDPGLGLGLSPGRRRTPLRPTQDSDSG

SEQ ID NO: 82305 - protein, 415 aa, Zea mays
  Coding DNA Sequence Number=SeqID_38930
  Homolog annotation: Hit_ID=Q6J9V9; Match level="QueryCoverage=12%, HitCoverage=17%, E-value=9e-07, Identity=60%"; Hit description =Putative uncharacterized protein
  Subcellular localization annotation: CTP_CleavageSite=38; ConfidenceScore=5.45e-01
MQTGSEQKKPNRRVWGTQPPSGYKRSSTFAQTNGRERRAAMQAACNRAKWTRFSDSQRAQPGGPGPRVTQPARRMLHASNCTATCATTAPLWLRNQYRDSRRPGTRPSSASLTRRSNGRRFALAETTAPKKGPGKGDPPKGILPREGTRLRASLLIRGSKAGPRRVQQPPQIAWALHPLLVRGSKVGPPKGSTAASGYSGSVPITDQGFEGWPPKAHRRHHVRCPSRRLGGCSRKPGSGRTVDSVNIPARELGPRPYTRATASSHEGTTRPAEALRKALRPRRSEITPPRPRGLHPAGALARTHRNQMQPRKAGPLAKKCDESLQASANTPFEARGLLSGTIIRGTLKTPNSQLGSDSGKAPEDGELRSARPRARTRAKPRKTANSAPPDPGLGLGLSPGRRRTPLRPTQGSDSG

SEQ ID NO: 82306 - protein, 545 aa, Zea mays
  Coding DNA Sequence Number=SeqID_38931
  Homolog annotation: Hit_ID=A6MD06; Match level="QueryCoverage=100%, HitCoverage=100%, E-value=1e-169, Identity=56%"; Hit description=UBX domain-containing protein
  Pfam annotation: Domain name=UBX; Domain location=460-542; Score =78.7; E_value=2e-20; Accession=PF00789.11; Description=UBX domain
MARPLQEAIDTFISITGADEAVAVRKLEVCSGWGWGFGVMRRDVIGMRNGISQNTMPTSHDDMMDLDGPLDNTFQRSLFPENFRDPFALMDPNFQHQFFDRVGSTDGVTRGPLVSHPREVREIPIEVKDSDPQTSPSGQAPVIEDVTGHESSNGLEVHETIIIDDEDSGLLSAPSAPHASVPSNTSSEPTAPPLVHVNDYDDDIEEEMIRAAIEASKKDSEGLANIAEQGDQHQEGVNLGEHSSDKAVMRTTDGIVERQVLASGKAGTSRQPIDEESFQEETEDVEEQPLVRRRSRRAPSENTELAQMPHPGASPVLNNHQSSGGDFPSEEHDEAVMLEAAMFGGVFGRPMHPFSMPSHRSSTYYPQITHSSSPALAEQRLLREQQDDEYLASLQADQEKELKALQDAELHRLEETTTREVALKKQKQEQEERRKKQLEEEELESSLASKQASLPSEPPPDAEGAVTVVVRMPDGSRQGRCFLKTDKLKFLFDFLDIGRICKPGTYRLVRTYPRRTFTSSEGDVSFSDLGLTSKQEALFLEQITE

SEQ ID NO: 82307 - protein, 631 aa, Zea mays
  Coding DNA Sequence Number=SeqID_38932
  Gene Ontology: Cellular component=endoplasmic reticulum
  Homolog annotation: Hit_ID=Q5W6B9; Match level="QueryCoverage=74%, HitCoverage=78%, E-value=2e-34, Identity=54%"; Hit description =Putative uncharacterized protein OSJNBa0037H03.12
MAPSFGSKLGIKSSKGLNAGVEILAKSLLESCVADSGAGGRLSCDRKVVVDMAVPSGSNGGEAWLVAQVAHVNDTKQSKTIRNPPVITVNKGAVFALYALNYIRDKWNGSYIMVMAFEQSIPMDVAYKPEEQYVETRKCEPDAGSDVVRACERLRYENGSIIEHSEVTGAPELADGLLAAAVWLTRLLFRRVVASPAIALEAGSRRRSRVRCVRGNTRGEEWAMWALVGGGSGIVGGSRPHRPRYGPPSTDLRLGDGCHCGVHVGAQRRRCARRQLVSMSRVPGPVAVAQAGFSSGEWAVWRTRQGVPWFHVPNRKGWQPAQLCGCCGSRHGAPLEGFHVFGIGTRSLGFNIRVQVKKENRTVVSKDNFLRVNLIGDFGGYTSIPAFEDFYLVTPRKIIGSNGYKLGFFDTIKGYLVSFWDFLIDLISGKSCRLNKCRSFFDFSCHAQYRCITWLVMLVLLLFMLPAGAIVLYLLHQKGFFDPVYDWWDDLLGADYRAHRRHKKGRRHHHHHHDHHHHRHHHHHGHSHGHDHHPHSHHHAHQRRKIEPSHHHVLHRQQPGTAAEGHRHKHDPALGVQHREAGHLGHKRRHGKAVVAEDALDLEFRERRPYEVRHAGHLHRDHHHHHHSWEV

SEQ ID NO: 82308 - protein, 325 aa, Zea mays
  Coding DNA Sequence Number=SeqID_38933
MNALSREGCRHFEVFDQVEEDFERDIFKVEDPVVKESAGAIFDRLWGEHGREVVRERAETARVQAARGERVDDFGALNNMLSDPEPAPAEAVPGPVLGPTPETAGDAPGASVAAAAGEGLPPEVAEAAPDASAAAAPSAVDPAAVAAEITAEATAEPTAEAPAASGPSQVQDFGPAHTTATTKILAASTAEDGNECGGSASEFLDCADSGSSVEWTEESSEEDLDYFAALDVAAAEASPHVADAEDVPGPSTGRRRRRAVAKRRVSGTEGARLRVSGTGRQELLSLPAAVNTGEGELRSLFAGEELRIMLFNYREMGIIPKVEPM

SEQ ID NO: 82309 - protein, 207 aa, Zea mays
  Coding DNA Sequence Number=SeqID_38934
  Gene Ontology: Mol. function=kinase activity; Cellular component =ornithine carbamoyltransferase complex; Biological process=amino acid metabolic process
  Homolog annotation: Hit_ID=Q6QP54; Match level="QueryCoverage=35%, HitCoverage=26%, E-value=3e-16, Identity=64%"; Hit description =Putative kinase
MAPPVDVVGPCPRLGDVEAPPRSRSSLSSEAKVESEPLGRARRRPSAEARAESKPWGRAKRSSPSSGEREMCPWAISKYFGDCVPTQVLKCESMPMNGQSANQEQRNRKKKKRGELAVYSQEAVSVWGTGLSGGAPDSVWCARLPRAKWPLSGIHRRCTAKIHRTVRCAPDCPSCVRCSFPLCSVFFVNFNCKGERLQVVEIPRKRD

SEQ ID NO: 82310 - protein, 244 aa, Zea mays
  Coding DNA Sequence Number=SeqID_38935
MSTSWRLARSSTTRSSEGRHKQHKIGNQIIRVDEHVVGTTWVDDEVHDEHRKARQMGRRRRTNFKAWSSRRLEGDGRGRDFGELERDTAWARRRELRVQSGRESAERNRELRAESQGAKARESRARRAKNFARGYGKEGTAGRRPRLVESSANSMASREIRRQREQGLWARAEDELDWKQERRAEGALRAGIRRWGEGEMEGEGSKGRAQERATAWRGALGVKITIQEQSDGQALVHYPIAVQQ

SEQ ID NO: 82311 - protein, 196 aa, Zea mays
  Coding DNA Sequence Number=SeqID_38936
MVVVMGAGPRKLVNDLPKQQKLQVDYPRILMTHFLSSLIDLLLKIGKMKHLLLLPLDLLMDGFETRLSYRVHLHPKAEGPCEYIILGKHVSRVFEDLRKMKAPNNDNVGKQCNHEGAPIFSFTDFGTGIVPRLSLRAESHDLWVERESRLMGDDEDNAGFDYDYGEDEVVEEDFQEFQEYDEFKAWVSGKPLVDCL

SEQ ID NO: 82312 - protein, 93 aa, Zea mays
  Coding DNA Sequence Number=SeqID_38937
MGKPIPSLLMLLLSRGRYNGSSSLISCEKKTIRIEFLNLARSGLTALAYNASLTPTGRRAVTALVPTITGMGDLVSGRVRGKVCGQVHSGFLV

SEQ ID NO: 82313 - protein, 79 aa, Zea mays
  Coding DNA Sequence Number=SeqID_38938
  Subcellular localization annotation: CTP_CleavageSite=18; ConfidenceScore=5.29e-01
MKLWKETSRSSKITTSSRCGLAATPSRLPVKAALSTFLFRTLIYCSLEDMVAGVTWPSILPPGWTVEWDPASAEEEHEE

SEQ ID NO: 82314 - protein, 241 aa, Zea mays
  Coding DNA Sequence Number=SeqID_38939
MAAITPAAGPVAPSVGGGGDYSLGERRKQLAVIPEVEPPALPPPVRGREDGRNILRGPRLPQQEGAAAGPHRRADLPLPRRRGKKLREKEMGPQIPMGGDPQIPLAHRYEDSGLRDGVGGEVVQLHPIVVQDRPHKAARRHTESLLVEGDEAHDVPRRRRWSGSAHGRNPFRSLLIGERAKQTLADQILQIARHHRGKGPWIARRDDGHPVSHHQTEGMAAQGARRAVFSSLAKVSRVART

SEQ ID NO: 82315 - protein, 443 aa, Zea mays
  Coding DNA Sequence Number=SeqID_38940
  Subcellular localization annotation: CTP_CleavageSite=13; ConfidenceScore=5.46e-01
MALPVDVAGLRPRLGDVEAPPKPRSRRSPSPGVGQSGVRRLLGLSPSPSPGVGRSGVRRLPGLSPSPSPGFGRSGVRRLPGLSPSPSPGVGRSGVRRLPGLSPSPSPGSGGAEFAVFRDLARVRALGRAERSFLWCLWQGLTACQSHSVKWHCSRSGAGGAVLLSGQSLERRSDGGLLLSEGKASGEPEMCPPLEAGLGPLQLYADGGYQLRIRSLEASQGSYLWAWIEQRRTGNGSATVVVLGRLWRVAERSPELWASSREFCASQRMQRGRQSGPGTGFIAVARVWSRVTAGARGFAHGRALSAPPSVSPRRTRGSLLLPWFNGGFEHLSAGELGGSEESGLSRAKLTNQTGQRASPGIKEGGRPKSGEGDLRLPVKFCQVRGLGKLHGPMAELTEALARLRGDWSWLATVVEALAAMAGGKELAGAKEGCLAGGGECGVK

SEQ ID NO: 82316 - protein, 108 aa, Zea mays
  Coding DNA Sequence Number=SeqID_38941
DEISKGVALSYQDDECGDFEIQRENFSLDDERPAVENSYTVAATVVEELRRQREDEEEENYFEDEVDETAMQYFFIKLFGMPDTDMAEAHNAAAKEKAVEMRAVLGND

SEQ ID NO: 82317 - protein, 93 aa, Zea mays
  Coding DNA Sequence Number=SeqID_38942
  Homolog annotation: Hit_ID=Q8SA97; Match level="QueryCoverage=45%, HitCoverage=7%, E-value=1e-07, Identity=66%"; Hit description =Ornithine carbamoyltransferase
AEDGSGETRFIPKSRLMPSLGSGERRTTSKPEVEAEPWGRARRRPPSEAEVEAEPWGRARRRPPSEAKVGAVPLGSGEAETSCNTPGVTITKT

SEQ ID NO: 82318 - protein, 116 aa, Zea mays
  Coding DNA Sequence Number=SeqID_38943
  Gene Ontology: Mol. function=extracellular-glutamate-gated ion channel activity; Cellular component=integral to membrane; Biological process=G-protein coupled receptor protein signaling pathway
  Homolog annotation: Hit_ID=A7PKV6; Match level="QueryCoverage=74%, HitCoverage=9%, E-value=3e-28, Identity=63%"; Hit description =Chromosome chr7 scaffold_20, whole genome shotgun sequence
MADGDRSASCPTLVVGPQSSGIAHVVSHVANQLRVPLLSFAATDQALASSQYPYFVRATHDDRFQMAAVADVVAHHGWREVTAVYVDNDYGRGGVVALGCRGAREMTAAREHGDCE

SEQ ID NO: 82319 - protein, 66 aa, Zea mays
  Coding DNA Sequence Number=SeqID_38944
MGLATLSRRAHLSQALKLGQATKYGDIVSNGPGRALDQATKHILSGPIIMAGALESIAIRCEVGAG

SEQ ID NO: 82320 - protein, 127 aa, Zea mays
  Coding DNA Sequence Number=SeqID_38945
MAACAHPSTWATPPRATLHGLRCQPRPGRAPRPGADGEACGGRALQHRGPSMTILLRHKEEVLCHMLVCCDGVVTKSPLSQKILMTNNVFVTTSMTLVNVTNRVVNVRKCATTSCHVDDDVAQSYDE

SEQ ID NO: 82321 - protein, 83 aa, Zea mays
  Coding DNA Sequence Number=SeqID_38946
MDGWVAGARSFWTSPRGHGALVLPLVLGQRTRINRPTKLGELVRKRPGDMLYLVWKWKHGEKIEIVLSASIVVKRRVQVVLHF

SEQ ID NO: 82322 - protein, 69 aa, Zea mays
  Coding DNA Sequence Number=SeqID_38947
MSWSSEERLSPIEAQLSGLSGLSAEVTIAGCIEDQDWPPPSSGGSTATLYFVIGRTTQYSNHWYVYAPV

SEQ ID NO: 82323 - protein, 148 aa, Zea mays
  Coding DNA Sequence Number=SeqID_38948
  Subcellular localization annotation: CTP_CleavageSite=56; ConfidenceScore=5.01e-01
MQAACNCTTEMHPFDFDASSVKAQAHTSCNWRASSYMRKTAPPLTPMPRLLDYGTGAATRGNLAHGPTVPTKHVGHRSVSRGKRRDGRYGQKWAGRNGGGTGKGDTPKRILPHEGSGPRALLLIRGSKTGPSEGFDSHPRVLGLRAHY

SEQ ID NO: 82324 - protein, 52 aa, Zea mays
  Coding DNA Sequence Number=SeqID_38949
MAPKRKTANSSAAVIPAIDPNSQLPFAEHSAAKRQGLSGISLPRAGRLNPSY

SEQ ID NO: 82325 - protein, 151 aa, Zea mays
  Coding DNA Sequence Number=SeqID_38950
MGKNNKRKREPTPPSEEFGDSEYSEEEFSSESEGSPAPVSPPASSDDSNDSQGITAEVWTYIRAVERAGLEGSDESEYSSDEEDSDGGDEGEDDDDDDDDDDGDGGGSGSGRGGGDGSRDSTKGDSSRGSTKGSSRGSTKGGGGGRGRASG

SEQ ID NO: 82326 - protein, 212 aa, Zea mays
  Coding DNA Sequence Number=SeqID_38951
  Gene Ontology: Mol. function=nucleic acid binding
  Homolog annotation: Hit_ID=A2X2U6; Match level="QueryCoverage=92%, HitCoverage=37%, E-value=1e-49, Identity=48%"; Hit description =Putative uncharacterized protein
MGRQLESLSRGLGIKIPIQIREGKRRPEAPIQAAKFASEGGIALRQHMPIFSHWKEYKKKENAGKIENYIGKIAGQFTMDADNTAMRYNLKKKYFNEVPANLVRTTSPVSCMTDDQWKLLVEMWSTSKHKDTCMKNKISREQVKFPQGTGSQSYIAKAYSLKQEKFKDTEPSAIDLFKEMHCSKKKGFSETVQKAIVRTFCPFTSTSQYAMH

SEQ ID NO: 82327 - protein, 185 aa, Zea mays
  Coding DNA Sequence Number=SeqID_38952
MPPGKKGPRVPRHHAEDTEPTPTDYEKQRAITIMKNNQMMQRLGIRQLQSMMASIPSGRMNDNAPQESGSLYDGDDIEDSEDEMESLVDKSVASHIPNNGAEISSKNTRASKRVVAPGVQEQPIRVTRRRSATINQESNQNIMAGILSDSCDATNQDCIQRISTVVQPSSPIETESEDPTGDQGE

SEQ ID NO: 82328 - protein, 344 aa, Zea mays
  Coding DNA Sequence Number=SeqID_38953
MAWLSSGRDLVEEFINCGVWSLAHGWGLGEIRPCRMPTLGDKMVRSPAFVVDLRGRDAAAFVQEVESEAIKIVGNLPYGPYPEGDSTDAGDDRGKQVKTRPKEGTSKGKVVVAATQKRKIDLQGMGDDKMGPRASGIFVEELMGMCVGPGEVLSLPELRETSLRMLKTVILGTGGTRQELSVDDYLVGGVTMGGGWVAGGGTVYGARRPGDGLRRPGCFGALTSQLISKRKRLEGRVECLQTQHTEAIRDKSVAENKSRNLLNKVTVLEKEKEDLGRRLNDEKKDAEYAHAKAQAARKYVADLELELKNMHDHHKKTESTTRAGVDRVHTLFVDAYHDLGAQTA

SEQ ID NO: 82329 - protein, 156 aa, Zea mays
  Coding DNA Sequence Number=SeqID_38954
  Subcellular localization annotation: CTP_CleavageSite=53; ConfidenceScore=5.49e-01
MAHQSYSGTPEAFSPSFSPLYPRTRGLFSAIEFAMVFSPPLPSSGDLGATLARASLNSGDLTAAERKNATRSRPFPWSEPLHPIQIEQLRSRIPLRACAPEALARLSAPKSLALGPLDNEQSEVPECIVGDLLEQQPGDDAGNMDDFEEFQEYDEF

SEQ ID NO: 82330 - protein, 121 aa, Zea mays
  Coding DNA Sequence Number=SeqID_38955
  Subcellular localization annotation: CTP_CleavageSite=64; ConfidenceScore=5.34e-01
MGLAIHPSGSSSFESSVPWFELPLALSSSLSLSGLLQQPGCPKVVQGASLSEVQGKAASQTPPPAEARGKSPAAPGPVPAPGVGAPAPRAGDDAVSSGDWTDLAPCDAVDAPPGEKAERRS

SEQ ID NO: 82331 - protein, 175 aa, Zea mays
  Coding DNA Sequence Number=SeqID_38956
MDDTTKVAEMKTLTTFCGCHPLEMVMHPLGLFPAEKKNDPMWCNRVSHVKDVWAMYPDLVGRVTVQCMNALYCLQTLQSDAMAHLANIAQTTKLTLDGREDFVVDLSSELVEKDLQELEEANDHLDMHHLEMEANEAGSEGEEAPEELGPAPGANGTTSAMPPSLASSVASTTQG

SEQ ID NO: 82332 - protein, 163 aa, Zea mays
  Coding DNA Sequence Number=SeqID_38957
MVCLGLGCRRRHTLQDNPILQARISIVEGSSSTLGVDYTFGERLLQESGSSRRLGWSPRGLGQRSPEDISPARGLGRSTPASVPLTDDPARLRPTKSSFRANSASVHANTATPGFGSSKSGRGVPLTKQEKPRTARPTEPRDSYASGIRIPHSSPLYGATHAW

SEQ ID NO: 82333 - protein, 295 aa, Zea mays
  Coding DNA Sequence Number=SeqID_38958
MAERYQLPRSCVPPTTRRKGYGCPPSGGSEGGKTRCIREREDMVAFQGGHPPFTGDSPYLRPQPPWAESSPTRSKVLPLRRGGWVPRVVQAGPEQKKPNRRARCMQPHSGYEHSSTFAQTSGRKAAGSHAGGMQPRQVGAPLRLPAHPAWGPTPTRHATDAPIATCKQPHRHSHHCHASSTAEPVPRLEATLRTTQQCQPGAMGPEKGDTPKRILLREGNRLRASLLIRGSKAGPSEGFNSRLRVRGFCAHYWSEVRRLAPRKGSTAASGYLGSTPTTDQGFVGWPSKGSQPPQT

SEQ ID NO: 82334 - protein, 90 aa, Zea mays
  Coding DNA Sequence Number=SeqID_38959
MMVEVVHSGGGARYSSRLGIVGAAGSGFDEGDHGCVSWLIVTTSLCSHKEEEKGVEADLQEFQVFDEFEDWASDLPQSAVCALCYDESFM

SEQ ID NO: 82335 - protein, 48 aa, Zea mays
  Coding DNA Sequence Number=SeqID_38960
MANEWGMEFCNTDTRGPFASARGSSANCVGRAQAMQGEMSWKISFVKE

SEQ ID NO: 82336 - protein, 74 aa, Zea mays
  Coding DNA Sequence Number=SeqID_38961
MLASSFEVEILPLVSPFEAGPDSAEGGNDTEGAAAPSVDNHLSSESCFSRKVMSEDSVIDLVEKAQKSFWQKSF

SEQ ID NO: 82337 - protein, 147 aa, Zea mays
  Coding DNA Sequence Number=SeqID_38962
MAGARSAGVAGGGMVPAQWWGRDTWAGGGGGWQARRTIGVEGGIVGSEGGGKRAHKVGHGVNTSTPDIGDVSSRSQGQVQNPVPRRDSSDDDLVFPPHLFRCSGRNKAPKCQSTRQICEDQPPRKHQAVGKKIKAATGKHHVFPVHT

SEQ ID NO: 82338 - protein, 299 aa, Zea mays
  Coding DNA Sequence Number=SeqID_38963
METQAHAPLGGAIHHHQSSEARNVQAGQQPRRGLRQRLEHPTATSLLPLRCFQVVHIPRTHAKFSQQGRVGLASAKPDPPSGAKRGETPLRRNFPRKKISFTRISSMLFDYFEKWVLETTECAGSADRTSLYVRKPFCRSDPSSLLDRVGDRASWTGENTRKRQGRPSQGTPTPPGYGYLTHRLPREATFARTNIPVTDKKSGHSKQEEKRRSFTTQRGLGSSRWKGAVAPSASTTPSARSDPASDGDAVQGLLRESGPSRRLGRLPLGPRPTIFQGRQPDPRPRLVNSGVGPTDGQPG

SEQ ID NO: 82339 - protein, 219 aa, Zea mays
  Coding DNA Sequence Number=SeqID_38964
MQPRQVDALLRLPARPAWRPRPTRHATGAPDAACKQVHRHLRHHRASLVAEPIPRLEAIRHKTQQRQPDATVNAAESGPAVMTVADAREQRARRQPSSRPIRGQRKSSLSRCEDNAPVIRSSNGSHTRNGCPANHSPRCINSAAGQVAFLAAATGDASPSPKQPHQKRGSGAALANPASAEPLTASTYQPENLGLDRTPGLRPARMREQPDQPKHYARH

SEQ ID NO: 82340 - protein, 114 aa, Zea mays
  Coding DNA Sequence Number=SeqID_38965
MCCYVQQAPAQPPLGRGAERLLRAVHRQAGDLMVVGDSRVVLGIAFDDDANNVGDSRRPAHRPPEVQPATSSASGGATARGTTLLMSPECTSFYSPTKSHQYSEVTQSRTDNND

SEQ ID NO: 82341 - protein, 29 aa, Zea mays
  Coding DNA Sequence Number=SeqID_38966
MAVASLLPPPGTSNCITFKSQRIWGASAI

SEQ ID NO: 82342 - protein, 77 aa, Zea mays
  Coding DNA Sequence Number=SeqID_38967
MGFAGSFEGCPWCPRTGSGTGEPAISRRCQCSAAEPHPVVDRSLVAIHAHDKLATVDPGDQQIEVAEQELIECKLCP

SEQ ID NO: 82343 - protein, 65 aa, Zea mays
  Coding DNA Sequence Number=SeqID_38968
MARANRPESSPSMSFFARARGQDASSTTDDKSTNDVSVGVDHCTGAVAPLAHRTVRWPTGQSGEL

SEQ ID NO: 82344 - protein, 304 aa, Zea mays
  Coding DNA Sequence Number=SeqID_38969
  Pfam annotation: Domain name=IQ; Domain location=162-182; Score=19.7; E_value=0.011; Accession=PF00612.18; Description=IQ calmodulin -binding motif
  Subcellular localization annotation: CTP_CleavageSite=60; ConfidenceScore=5.75e-01
MASAANFAASSWQPTSPSPWTAPHVTFVTPSWQPTSPSPWVAPHATFVAPSWQPASLSPWAASPANFVTTSWTPACPSPGTTPNFITSSSLKASPSPWATPLGAATAQQSPAPSMGDLWTNIRADLAKMQATLQKVEQGLLQIKAAVQHEQHQLALSAWLRTSAAVGIQAAARGFLARWRVREMRRQMLEAALVTVDLGTQGRDLALSDGHQQWHRATISKCEHGTCPAGDELQLYDSGSREVTHLVINKGALFSATTFRYRPPRGRLRWLLLRPIPGACPYAPLSCRWRPWDPGGCTRASPMR

SEQ ID NO: 82345 - protein, 388 aa, Zea mays
  Coding DNA Sequence Number=SeqID_38970
  Gene Ontology: Mol. function=carboxyl- or carbamoyltransferase activity; Cellular component=ornithine carbamoyltransferase complex; Biological process=amino acid metabolic process
  Homolog annotation: Hit_ID=Q8SA97; Match level="QueryCoverage=30%, HitCoverage=25%, E-value=4e-21, Identity=44%"; Hit description =Ornithine carbamoyltransferase
MAPPVDVAGLRPRLGDAEAPPQPRSSLSSVAEAESEPLGRPESEPWVGRSGVRRLPGLSPSPSPGSGEAELPMAALSFCQAGQWSGDVTALYADGGYQLRIRSLEGTPNYGPRQVSFGLLLCGNHAYRGQGRHRAATVVDAPGRAATAAVDATDRVATAPSMAVTAPRRAGQPPRRAGSPHATVCVELFACRKALVPSNQASESNPTRPFLHIPTLPPSPPPPAPPSNPRRRVATLPDCYLLVVGAAPIRPIRAGASPPYPIATSSWWAPAPGVPARGGGGVVMESEDDMHDANDSAEDDFYSGGEAGLAASDDGDADYDFADHDSDDSAELISHRQQVISGSRPWVVRGVCESGSASVRARYAGTTAPKAPCFEDLPWLWSEEELDA

SEQ ID NO: 82346 - protein, 127 aa, Zea mays
  Coding DNA Sequence Number=SeqID_38971
  Subcellular localization annotation: CTP_CleavageSite=60; ConfidenceScore=5.51e-01
MAAQGAGRAVSSSLAKSLGLRKPKKEAGSGAKNRHQTLSRGPGKGDTPKRVLPREGTRLRASQLIRGSKAGPPKGSTAASDRVGPTPTTGQRFSQVNEVLFEVGIVSEDDVVLYSQRCLLLIKGSGK

SEQ ID NO: 82347 - protein, 458 aa, Zea mays
  Coding DNA Sequence Number=SeqID_38972
MTCRHSEPPLVKRDKAQHIPRRRGRGGSARRGHPLRLRVTGERTKQTIDNKGLQIVRRDGGERPWVAWRNNGHPVGHHQAEEVAAERTRTGGTFGRRSRRRFTFAIMTASKKAGPSEGFDSRLRALGLRSHHWSEVRRLAPRMGSTAASGHSGSAPTTDEGFVGCPPKGSTAASEHAERGMTLGTFDTWPRLGLHSRGTLGHFRDQQERFCNGIPSDGGTEPSDPIKRDRATQGRMKKAESVLDRPLALCGGSGAALANPAPAKPLTASTYQPENLEPNYAPGLRPVRMREQPDRPKHHETRLDLEGVKPLLRGLRGYTRRENSAACPAPTAAPLDRVRLTAAKSSLGRHGKLRLARPRARTQPRRRKTDSASPDPRARTQPQPRKTDSASPDPRARTQPQPRKMDSASPDPGLGPSLDPGRQTLPRPTPGLGLSLDPRRRTPPRPTPGLGLSLDLGR

SEQ ID NO: 82348 - protein, 374 aa, Zea mays
  Coding DNA Sequence Number=SeqID_38973
MASGRTLLQPCLAYTDARGARTSTKSRRLEARMVAILPDEWGTDLRMETSYRCKGRTAPEHERRPGSARHLGRSSRALGATTAFAAGGGTGSQAGESNAPRLTTPAVDQPRVVEVRPSCRASERPLPRTMKERLTHETAREVELRLSLASTLARMMNILEAEGGTKIAARLASPHPGAGGHRLGYPPSGGLEGEKARCIREREDMVAFQGGHPPFKGDSPYLRPQPSGAESSPTRSKVLPLRRGGWVPHVMQAGPEQKKPNRRTRCVQPPSGLQAALHFCPDQRAKGRASMQAACNRAKWAHFSDFQHAQHGGPGPRVMQPARRMLRASNCTATCATTAPPRLRNRYRDSRRPSARPSSASLARRSMRPKMGWQ

SEQ ID NO: 82349 - protein, 502 aa, Zea mays
  Coding DNA Sequence Number=SeqID_38974
  Subcellular localization annotation: CTP_CleavageSite=46; ConfidenceScore=5.15e-01
MAPSPLDKGKGAASSASAPGSSRGLEEERRRRLRRADGSLVSEPPRSARGLQVGPRRPTPRPTTRRGASALRCRRHHHHPGMITPGSTSNSNSSSRSGDRLASRVTGRSRAPFSTSLIIMPTSLNPSSVCQGFFLRCSQGHASSARYQAHRQDSASGFPCPSQGSSGSGSSVRWRRSGRGGPSWRIHAHSRHWGVTQEARLAPTPRLLQRRWRWCLGSDSGRVPSKKRRQSPSLACCPVPTRFLVKLRQQSCESGRRMKLSTSASVTSAPNWRSIPRRHPDSSPPSGPNSSETARSTRETSRGRETDLARRETDLAFREEMLTRRGELLAEHELEAEEKERKLEEQIRQFNAEQAALGPQAMEATKKALEDLQAEHRAGVQRIVEWAGEASTALVPLGMSPIPVSELRVLISDALPVLDSAADRLRRLDQILGARLEAEGCKLYRAVVEYVLTCFRNHDPIISLAPVIDGPVAATEDVARESVQDAVEMVAARFQRDPADAE

SEQ ID NO: 82350 - protein, 863 aa, Zea mays
  Coding DNA Sequence Number=SeqID_38975
DDADEGALRCAAGQSSGRDLVEEFVAYGVWPLAHGWALGEVCPRQMPFHGGRVVRSPAFALNLRNRDPAAFVRDAEDLAVRLVGRYVPRTEGQRSFDIRGSNERLNRVFELNQLPYDGYPGQDEADRRGKKPAVETGGDPALVAAASSKKRKLGTAMGRLGVSDSFARDLMRTCAAPGERMSSPELRESSARMLRVTGGCWPKNIPIPCAAEEDCFTSRMVHRWKVFPYGRNIGHVVWAVMDKDRQGAARKRQATVRVHEARPKRQRGTAKAEASGGGKPPLPTKVGASAPGKAPETTVGAGGPKLSKVVPSVSGVAEAAKAARSLPPPGKRVADFGTEINVEDYLGGSDEGPLALVMPGAAIATAAPAPKAGERPLAPEARDEAGVPTRRLKGATEALSRAAEALSQVANFTSRTMSGALTAAWTAEVERLRTQHADAVREKSASDSKCRKLAEKVAALEKEKADFRRQLAGERREANEAIAKEQAAQAEARLARAEGNIAKELAGELQRRLTALESRAEGVEAAMRAEVKRTRTQLMTTYRELGVRTGDFEVPEREAGLRCLEWVQEELQELPTVLAGLMSFTSLVTCEAAMNALSREGCRHFEALDQADEDFGRDIFEVEDPVVKESGGALYDRMWGSYGREVVRARAEAARAQAERGERVDDFGALNSAPPDPETTPAEAATGVAPGPTPETVEDAPGAPAPAATGEDLPPKVAEGAPDAPAAAVPSAEDPAEVGAEAAAEASAETPAAAGPSQVQDFGPAHATATTEFLAASTAEDGNQYGGSVSEFFDFTDSGSSVEWTEESSEGDLDYFAALDVAAAEAASHAADAPDVPGPSTGHQRRRAVAKRRISAEEGARLR

SEQ ID NO: 82351 - protein, 64 aa, Zea mays
  Coding DNA Sequence Number=SeqID_38976
MAADMPDLRAARQSPVWWTDGHARIRRHDAPSEAVTESPKPGPGKGIFRKGSFSVKEAGPETSY

SEQ ID NO: 82352 - protein, 196 aa, Zea mays
  Coding DNA Sequence Number=SeqID_38977
MVIQDDDLQFGGGEKKEKGCGLSPALSFKDLHHPCCGGGRAEPGFYLPHGPAGHLFLQHSGEWALTGLAEGVNFDNAEPVGRKHRQLQRAWLTGLGDSVTASDAASCRLIRAWPSVHHTGDCRAARSRPRRRSLSLLVQWSSNLRSFCDEPKPEAAMSAWTEAESARKEASSAWEHVASLAEEVQRRRLELGQVVR

SEQ ID NO: 82353 - protein, 205 aa, Zea mays
  Coding DNA Sequence Number=SeqID_38978
KMNGHDSGQGFVYPRERNLASPEPSLGWGTVVPDEVYVSPRGASSGSGRTLGTPRGPTRGGFVEKQPWPNRLSNRSYHRRIQCEDRLTPYPDTRASVGKVEPRAQQEAPPRPTLGLGLGRRSPPRPTLGLGRNLGLGRNRVLTRPRPWPQEKLRGNKTGVPSGSPGLKHFSGDHVITYAGLKHFSDSHVGMYTGLRHFPARHVST

SEQ ID NO: 82354 - protein, 228 aa, Zea mays
  Coding DNA Sequence Number=SeqID_38979
MVTVTREPTCQPVPHLPLILTDGWGLAVGYFLDLHSRMVDATATVILAISLDPIFFPGRYTEAPVAVFSSLFALCTAVDTAVLATTVRREGREPPQRCMGVAIPWQMGNITCGYRVQPLQSVKLPYTSHGLPPSMVNTRKGGGIDLPPNRHTWRIFRQLQQQQQPEMDPPQPPPTGVDPTVATQMRIMQQMADTMADMQAQMRQERQEMRQEREDIRQKMRQEREEIC

SEQ ID NO: 82355 - protein, 114 aa, Zea mays
  Coding DNA Sequence Number=SeqID_38980
MARLIGGVSPSVGSRASQVGIIARFRLEALAPASYSQHFDYRFRLERPSRAAPTGEHPWFTTVARHRVYTRLPLNPSCPGPSYLSRLTRVGKLGSSHSLLHNLVLELEQLAMKR

SEQ ID NO: 82356 - protein, 122 aa, Zea mays
  Coding DNA Sequence Number=SeqID_38981
MVTALCRSSSCEVRLTDGPKWSGLSTAPPQYNGQRCVSTGMGKIESMAVGAKAKTPPFARGLRCSRWFDGDKAGRDTLRRTRHFDEGLRRRPATARPRSVPRPTCDLAHCNGPRVAASVLRA

SEQ ID NO: 82357 - protein, 114 aa, Zea mays
  Coding DNA Sequence Number=SeqID_38982
MAVGEVLEPCVRDNVAVGEVPEPCVRDNVAVGEVSEPCRSTAGGAAGILLMSPCFRRGLRTIDIMDARGEPSLPVTGSYPGGWHSSRSGVSGVVFLSGRSVKGQSDCGHFDLAD

SEQ ID NO: 82358 - protein, 39 aa, Zea mays
  Coding DNA Sequence Number=SeqID_38983
MAGLVDGVKLESDSASPDYYLELWIWRAGSGELDNVGGL

SEQ ID NO: 82359 - protein, 178 aa, Zea mays
  Coding DNA Sequence Number=SeqID_38984
MRGKVNCCCLARVQLSVLHLGDGRAVRRRLLSPVLKRRPSLERLPTAAVVASAEETDLRPLCDERKPEAAVSAAVSARTEAVVRERDQSRSHAAVAVSRAKVLGGQLAEAMERLAGVSARAGTLAESLAVRAQARCWRPPSRWRSFRPCRRLRLGQVPPRVGTSPRVLLLPLPMSEPA

SEQ ID NO: 82360 - protein, 743 aa, Zea mays
  Coding DNA Sequence Number=SeqID_38985
  Homolog annotation: Hit_ID=Q6QP51; Match level="QueryCoverage=24%, HitCoverage=84%, E-value=9e-28, Identity=44%"; Hit description =Putative growth-regulating factor 1
FGHRQGEEQHPRRHFHPRRNLDRPQTATRAEGSPPRRRTPAPCLGPHGQALRKGSDPSGRLGWQLRSLSQVSPEDLSPAHGLGSVTPGLVPLADDLAKLQPPLLHLLGLGNHMLPGRRSLFSSRLRLCPRRHHCLRLQLIAERPKVLKLSKRSLEWQGRPSRGTPTPPGYKYLTRHLPHKATHARLSGSASRQASLSARNKEETQHYAKMPECSGLSGHNEQTPILRVPLQTGLRFHFRGYEQPLHQRACGITNSRWLAGNRCTNSAAMTSISGGKTAATMALGKTLLLKGPRSRGTDGLVGEGNRFGRGSLTYGDHHLNTDDSGHLPTNTAPASGGRHKAHRQVLTPALATRTRTGPSQNTSTALAAYDVLCDPPVQPATAARVEDGQLHPVLAVAFRLPPHGWRTPPPQSWRMPFSLECQRMKRVTSPRRPQLSSPSTTTRMMNILEAEGGAEAIAWLASPHHKAGIGKGDISERIILGEGNGPPSPPTDQGFEGWPLERVLQQPQSTRAPRPLLIRGSKAGPSEGFDSRPRARRVRDDSWYVRYMAEARATLPRSRPRLQRDAISLRPSPASGRNSSPGRIHASPEGLLRQWAHPRLARGPARAGFVEKQPWPNRLTNRPYRRRIQCEDRLTPYPDTRASVGKVERRSPRSDCCASHPSKADSSKFSIGRNRKLRLARPQASASGGGLRLARPQDSASASASGGIASSPDPSHGLRRSLRLARPWARTDHATEDTSLPYP

SEQ ID NO: 82361 - protein, 210 aa, Zea mays
  Coding DNA Sequence Number=SeqID_38986
MASKELDGFDGHGRAQIGATETKTGHRNAPYPGHGRGLGQSCPRSGDLHGQQGKRDSAVEKTKQGLGELEAELEDAAARHGTSKGPSEQSAGRSSARSRERSRGMRRWENALSSRGLGRAWRAEGAPAGLATPVSRTLGRGEDEAPWPMKIRAPCVSRGSWEPWRAGISRRAGRKTLWLGGAEAEGRTEAVLGELHGRDLHGWEKLGTRG

SEQ ID NO: 82362 - protein, 139 aa, Zea mays
  Coding DNA Sequence Number=SeqID_38987
MGRLCQWKCSGCSPPGTIPGFGAIQSRATQESGPQRIVEARSWFASARGGVVYLELLVEAGRHRLRPPSTVDRDLCGISSGMTYPIAFTILWGSCRCTPFSYRGPGAANLLFAGWCATAELAAVARLDSWEEGRVSAVG

SEQ ID NO: 82363 - protein, 75 aa, Zea mays
  Coding DNA Sequence Number=SeqID_38988
MGKLGQGLCRGAWEGGLDEQELGTRVHGRGNEGEETPWIPRRRVESLDRGGRGSWPMLESSRPTATSSQGRRDEG

SEQ ID NO: 82364 - protein, 167 aa, Zea mays
  Coding DNA Sequence Number=SeqID_38989
MKTVRWAKPPPEYLEPQTPCALVDPLGTNLGCSRSLGEIVGSVPTQNGSWVRQYLYAGGAPSFQCRHATSSGFIGDESGVSGLLCGLSRSRDSAWEILGRNRPPSSPEFLVVAINPCPAVAGRSCDPIAGFGIVGLCRVGHGAAARLWDAAALCPVGEEMRERLWGE

SEQ ID NO: 82365 - protein, 355 aa, Zea mays
  Coding DNA Sequence Number=SeqID_38990
  Gene Ontology: Mol. function=3'-5'-exoribonuclease activity; Cellular component=CCR4-NOT core complex; Biological process=embryonic development ending in birth or egg hatching
  Homolog annotation: Hit_ID=Q108Z7; Match level="QueryCoverage=64%, HitCoverage=10%, E-value=1e-102, Identity=76%"; Hit description =Transcriptional regulator, putative, expressed
MAGVPVLAPLIPMPELLSIVFSSPWYNATVKSGLQLTSNFPFLALAHLWCSPSLVLDEIVMWSSLLCAAPSATPSTPVRELTGKEARSVRRLPSVRWKVRTGNLAVLADLRVGLPSQPSHTTGFGTALNIETLVAAAEQRETPIEDKILFMINNISISNMEAKAKEFNEVIQEQHYPWFAQYMVMKRASIEPNFHDLYLKFFDKVNSKSLNKEILKATYENCKFRGALLAKNLGSWLGKFTIGRNQALRAKEIDPKSLIVEAYEKGLMIAVIPFTSKVLFKNLTVDIKDVKPTSLLKDRLREVEGNPDFSNKDVTASQTPVVAEVPSGTIPSLTHMEQQPEINITFPSYEPSKYT

SEQ ID NO: 82366 - protein, 333 aa, Zea mays
  Coding DNA Sequence Number=SeqID_38991
  Gene Ontology: Mol. function=ATP-dependent helicase activity; Cellular component=nucleus
  Homolog annotation: Hit_ID=Q650T9; Match level="QueryCoverage=42%, HitCoverage=30%, E-value=2e-26, Identity=75%"; Hit description=DEAD -box ATP-dependent RNA helicase 7
  Pfam annotation: Domain name=KOW; Domain location=284-319; Score =22.3; E_value=0.0019; Accession=PF00467.20; Description=KOW motif
MWMVISYQENTIYLQGIRLLTKYYYSIVLPLTHKIFDILLCPVDAAYKAVDKIIQLSMRFLKVDRKTVDLVGNEKLKASASVKHLALPCNKAATAQVIPDIIRCYSHGGRTIIFTETKDSASELSGNTGVAVMLYEPRYKHSVSRLERESGVKFEHISAPQPTDVAQSAGSEAADAIASVSDSVIPIFRQQAEQLLSSSSLSAADLLAKALAKAVLELTEICVLGLHGHKEKIIVIFLGGLQYTTSSNWQTDVVTWVCYNIPVIVFLLRRGHICSHWCYLQFDVGNVVMVTGGRNTGRVGVIKNWEKHKGIFEENIEWNSNLVVAKVWRLEFI

SEQ ID NO: 82367 - protein, 724 aa, Zea mays
  Coding DNA Sequence Number=SeqID_38992
MNRHRHTGCHYKRNSGSAPAGGADGLDGGEAFSSCHHVSTNGGVRLSANAAPTSAGRSKAHRQDASSVELEDGFHHQKLEEEVASRPVREVTTGEGMQPGSLMKILEAERWLKGTNFREVVFLQRRQGGRTAGAPHPEARKPLRDESSPTRSKVPPLRHGGWVPRIVQAGPGQKEPKPPRAMRATAQRLRAFLHFRPDQRVKWRTAMQAACNCTEGVHPFDFNASSMGAQAHTSCNRRADYYVQETALPLAPVSRLLDCGTSAATRGDLAHGPTVPTEHIGHGDQERGHPERDPSPRRKRAPSPLLIRGSKAGPSEGFNSRLRALGLRAHYWSEVRRPAPRKGSTTASGHSGSAPTTDQGFIGWPPKGLTAASDAERGMTLGSGAALENPTPAKPLTTSTYQPKNLGLDCAPGLRPRCLCCSDCCVARQSEADSSHRKLRLARPQGSAPVSASDDELRLARPRARTQPRLRKTTNSASPDPGLGLSLGSGRRRTPPRPTPGLGLSLGSGRRRTPPRPTPGLGLSLGSGRRRTLPRPTQGSDSTSTSEDRLDLDLGGATASPDPGLGPTTSQGGIITLPLASSGYGEQDRRPIWLAPGTRTGGLATRRGRDDACRPLAPSHADACNPLLQAHPTWAEDKHEGRGDPTGRNADSRDPLPDRHRSKINEGSPHTDHSPTALAPFGVPILSPSTHLSHLFPHKTQGGDAPKPSGAAMADTTQPRNPKA

SEQ ID NO: 82368 - protein, 56 aa, Zea mays
  Coding DNA Sequence Number=SeqID_38993
MGSGGGEKHREKEVSRCIIAASTDWGITIEPLIFTVYNTIVPVLKVPKSLYTLPPI

SEQ ID NO: 82369 - protein, 242 aa, Zea mays
  Coding DNA Sequence Number=SeqID_38994
MGVFNSFAMELMGTCAALGGRMSSPELRESSARMLEVTGGRWPKNVSIPHAAGEDFFTSRMARDLRVFPYGRNICCCCVGSDEQDRSRCCAKRRAVVRMVDPMREAKRAWGSTKAVASGSSKPVPAAKLAAPGSSKASTGEKATAAGGTKPPSGGPSPAKLPSLGKRVADFGTNINVEDYLVGKYLFFLPEACYRVGRGTIGCCPAFGGNHLAIGGGKGEGGHAGPVGRLLCEWRDSDSRCR

SEQ ID NO: 82370 - protein, 151 aa, Zea mays
  Coding DNA Sequence Number=SeqID_38995
MGKNNKRKREPTPPSEDFGDSEYSEEEFSSESEGSPAPVSPPASSDDSDDSQGLAAEVWTYIRAVERSGLEGSDESEYSSDEEDSDGGDEDEDDDDDDDDDGDGDGSGSGRGSGDGSRGSTKGDSSKGSTRGGSSKGSTKGGGGGRGRASG

SEQ ID NO: 82371 - protein, 349 aa, Zea mays
  Coding DNA Sequence Number=SeqID_38996
MRNTLRPGEYFDVPDQEANLCFLEWLQEELLVLTTIVQGFMSYASLVTCEGAMNALSCEGCKHYEVFDQSDENFEREIFKAEDPVVKQSAGALFDRMWGPHGREAVRERSDRAREQMARAEDVEDLGDLNGAWPEAEVNPVLPEAEVNPALPSEAGEGSSTALMSTVSGEGSLPAPAPTAEDPPKAVVEPAAEDPMAAAGPSQVQDFGPAHATATDTANFVAASTVVAENELDDSVSKFFESDDSRSLVASLRVMDAEVLPGPSAGRRRRRVVAKRRVSEVSRSDGRHCGEVEDGRLRVDGAGKRELLSSPAGASVGEGELQNLFEGEELRIMLFNYRDMGIIPKVEPM

SEQ ID NO: 82372 - protein, 143 aa, Zea mays
  Coding DNA Sequence Number=SeqID_38997
  Homolog annotation: Hit_ID=Q6YVT3; Match level="QueryCoverage=65%, HitCoverage=44%, E-value=1e-21, Identity=53%"; Hit description =Putative uncharacterized protein B1168A08.20
MASSSRTADVAASRVLSEKGAAAMAECVGLLFGKWTALQLAVQNQWGGHDSQAKADRLASSVLSWFTRAAAARGAGALDPDELEDLLYVTMDESFNADIDDGGVEETAPAPGNHAPASARPHAGNRGGCTANAANRQRNARTP

SEQ ID NO: 82373 - protein, 323 aa, Zea mays
  Coding DNA Sequence Number=SeqID_38998
  Gene Ontology: Mol. function=nucleic acid binding; Cellular component= nucleus; Biological process=mRNA modification
  Homolog annotation: Hit_ID=A5BSQ2; Match level="QueryCoverage=56%, HitCoverage=40%, E-value=3e-38, Identity=46%"; Hit description =Putative uncharacterized protein
  Pfam annotation: Domain name=PPR; Domain location=217-251; Score=0.5; E_value=6.7; Accession=PF01535.11; Description=PPR repeat
  Pfam annotation: Domain name=PPR; Domain location=75-108; Score=30.7; E_value=5.5e-06; Accession=PF01535.11; Description=PPR repeat
  Pfam module annotation: Pfam domain module=PPR::PPR; Domain location =217-251::75-108
MDDDDVSPDTRDVYVANATVSSYFAASDVASVDRLFAEVSTDVVAWTTMVAGHASSGGLGRARHFFDAMPERNIVSWNAMLRAYARAGMLTEARDLFDAMPTRNAATWSCMISGLVLSGRCWEALRDQGLFGDMVRSSGIVPNEPALVSVVSACAQLRSLEHGAWVHAYDEQELQGAMSVVLASAIVDMYMKCGGYPQCHQGALYFVKSMPVEPHPGLWGALASACKMHGKVELGEEVAKKLIELEPRYGSRYILLSNLYGSVNRWDDMASVRKILKRSKVPKGTGNAVVGMTSTSWALRFLQRLELRPMRIMRSMKPRGEWG

SEQ ID NO: 82374 - protein, 69 aa, Zea mays
  Coding DNA Sequence Number=SeqID_38999
MAVRQGIPALELPVNCSGQDDLTVGEYYNSMMDNIDQVTNKRVIALGEIEKDKIMVAKAYNKKVKAKSF

SEQ ID NO: 82375 - protein, 58 aa, Zea mays
  Coding DNA Sequence Number=SeqID_39000
MGKSDDEGGSSSDGDGGEGDDDGGKGSEGDDGGDDGGKGDSGGVGSGSGKASGKAPLV

SEQ ID NO: 82376 - protein, 161 aa, Zea mays
  Coding DNA Sequence Number=SeqID_39001
MGKSNKRKREPTPPSEDFSDSEYSEEEFSSESEGSPAPVSPPVSSDDSDDSQGIVAEVWTYIRAVERSGLEGSDESEFSSDEEDSDGGEDEDDDDDGDDDDGGDGYGDGSGQRRGQRRQGQHPEAAAARAAPEAGAARAAPGGGGDKGSSSKGQWLNATGL

SEQ ID NO: 82377 - protein, 28 aa, Zea mays
  Coding DNA Sequence Number=SeqID_39002
MGLNLSDIVKTIPETYVLMPFIISHSIA

SEQ ID NO: 82378 - protein, 192 aa, Zea mays
  Coding DNA Sequence Number=SeqID_39003
  Subcellular localization annotation: CTP_CleavageSite=94; ConfidenceScore=5.59e-01
MAAARPRRPPPAAWLPLLGHGAPAPAPPMRVRGLAWRRSAMARLPRRVPPAPTPASSPMRPWRPPLSSRPGVVARCPTCARPRPLPLPGAVRPRRAAPAHALPSRPAWSCRPRSAWPQPARPCTTLSSASAFGPGVAPLPLVARSATCAQLGPDVCAARSRHVSAALCVRVLAWCARCFGTARRALGALVYP

SEQ ID NO: 82379 - protein, 97 aa, Zea mays
  Coding DNA Sequence Number=SeqID_39004
MVYYPWAFCHTQHYTNHYDMGSFPIRNRTTPPGTRSQQQVQAPYHKSYHLQGLDFASSPYTTNLDTPGSLFEATHRGVHDFKEACKHFTFSPPPRYW

SEQ ID NO: 82380 - protein, 726 aa, Zea mays
  Coding DNA Sequence Number=SeqID_39005
  Homolog annotation: Hit_ID=A2XQC6; Match level="QueryCoverage=18%, HitCoverage=21%, E-value=1e-09, Identity=34%"; Hit description =Putative uncharacterized protein
MKLSIHDDWTPTAPSSSSTTTTTVFNARTEGIADEVAAAEVELAMLPPAPVFLSCLPWGFMVLSLADRVFRFTVSSRDVGFHIYNSRCIVRPEFKAFFNLWNSGGPNWNYELKLFLQEENANWWFVSGRKKISFADVVRRPPLSGANAVPVRRHLRPSCSAGKLIAPRTSVFNRLGSPSGARGPRFPANSSTSGASSRDLHRGIAPPVGFPRLNGCRTGHGYRGCDDCSFSNSKSISNSAVGRPWSRKLQWRPILRNGPLRPGPGFGRLELSGSVSSAFLCLFCKARGHLELFCKRKKSEFGFPLSSFPSFKSNRPLEGSPRLLDFGFWFRPSSRSLTGGTPPSFASFGEFARAVLLKKSEQAPETSLELALGVTSTKPQPASSPLALRRSSENLSMAYRRVDPEPFLPPGFSAAVVQHRGIMVRDVVREYLVEHHRVGVRAIQRSHLGQVMDEDPIPPAPEDGHQLPPAFFGLGQPLPPAGPFSKTHNPFCQRSSTFSRKNCNSATNTLACRLIAPLVLVSLHPPPNGHFAVNGHALIGNGMDINAAPFNGPQEVDGPAPQVDQVQDLEVVVPQAHVDVPNNNHPQNLEMNFMLHQDWQPDPVFQMIEERNRAVQFSRLWAKYFAPAGSTDHSVDVPKKWAPFFLSNLLQPESFNWSKTFLLSDIPPKLQEQGMNSIPFVVPKDCPVVPSLGDVTSGISKDSNGYGGPSPIIVESGLRRSKLIVA

SEQ ID NO: 82381 - protein, 487 aa, Zea mays
  Coding DNA Sequence Number=SeqID_39006
  Gene Ontology: Mol. function=serine carboxypeptidase activity; Cellular component=extracellular region; Biological process =proteolysis
  Homolog annotation: Hit_ID=A2YY50; Match level="QueryCoverage=88%, HitCoverage=88%, E-value=1e-136, Identity=57%"; Hit description =Putative uncharacterized protein
  Pfam annotation: Domain name=Peptidase_S10; Domain location=21-476; Score=95.7; E_value=1.4e-25; Accession=PF00450.13; Description =Serine carboxypeptidase
MASSRGPLAALLLLAACAAFFPAAGAAGTPDGSEEWGYVEVRPKAHMFWWLYHSPQRVDNGKTPWPTVLWLQGGPGASGVGYGNFMEIGPLDEKLKPRATTWLAKADLLFVPQGKATQPYRIDERQWQDNPVGTGFSYVDGGDKSLMAHTDAEAARDLVTLLCALYRDSPRLRASPLYIVAESYGGKFAVTTALAALRAVDQGRLGVHLAGVALGDSWISPLDFVLSWGPLLYQVSRVDEKGLQQCNSVAAKIKEQLEKGQFADAEASWSELEGVVLASSNSVNFYNFLKDEASGDATATATAAVSTLASFRRRGGYSGYLSSMAASSSSSAGGFDGLMNTVIKKKLGIIPKDLKWGEQSDDVFDALAGDFMKPRIQEVDQLLKLASMSPSTADSWTSFCATKGTMDWVQKLKWDDLNSFLSSPRTPIYCDKEGQSGTQAFVKSYKNLNFYWILEAGHMIGTMLKADPMRHKFFYLRPTKYDISVLF

SEQ ID NO: 82382 - protein, 359 aa, Zea mays
  Coding DNA Sequence Number=SeqID_39007
  Homolog annotation: Hit_ID=A2YGC2; Match level="QueryCoverage=38%, HitCoverage=62%, E-value=2e-07, Identity=28%"; Hit description =Putative uncharacterized protein
MESHDLRAERESRLVGGNEIDGSGYDYGAGKWYSFRLERVVSIATTAQEKMKPWKETSRSSKTTTSSRRGWLVLDTLHESPSSPSYPPVLLSVRFAVPWQAPPAPPLGAPASGVAAGGDPDDGGGDDSSSHDTDFSADQEPEGWVARPITRDAARGCHFHDALDTLLRRALNRRTWSIEYRYVVYQHSRGVYPDRWEATCLVRCPENSLQGAEACSEHYSISERDSAEAAMQDAAWRALSHYCSILGGVADGLNLKYYPLRPSGSTGGVIVSPVGEDNPRLSSTVNLAAVLNTELDHALDELSRARAEIALLRAEHAERRHLDDGSPAPVGTQHPYRSPRRGRQSYGNPDCKTKINLEP

SEQ ID NO: 82383 - protein, 223 aa, Zea mays
  Coding DNA Sequence Number=SeqID_39008
MSLSLQAAIGSLEYLQAAIGSFGRLILWEEDRHNVTRTLLRVRVTSLEEVPQFIVFLEADGFVGDSWTVHSIGPIQDAPLQNGHILEDGPVMPGDGLAFNVAPFNGPQEVDGPVIQMDPLPVNARQPPQEWQPDPVFQMHMERKRSAQLYRIWAKYFAPAGTPDISVKIPKNGHPSSSQICFNLKPSIGQSPSCHQKFLQYCWSRNLSPYLLPFLRDARKINS

SEQ ID NO: 82384 - protein, 302 aa, Zea mays
  Coding DNA Sequence Number=SeqID_39009
  Pfam annotation: Domain name=zf-CCHC; Domain location=107-124; Score =22.0; E_value=0.00071; Accession=PF00098.14; Description=Zinc knuckle
MEDVSQMTPTIVIGKIVAFEMSRKMGQEEEPTSSKPYALACDEHKKMKGKKKAPRSSEEEEEDEEEEEEEEEDDDDEDDQASTSSSEDEEMVKDLLFNIDRKKHRKRGCFACGEKGHFRGNCPNWAEPKKRRSKGKALISVKTWDDSSCEDDPPRTHSHHSSSRSSWSSRKCLMAKLARSQNVIDNLLEKMEILSIHNNELTTKLGNIGRTPGASLVKVPEIIKKDTSTSFLDLIDDSNRCNQVVVKNVVIITCFDEVALENELLKQEVARLGKALYDKKGKANQIQHSQDKISSRNHEMER

SEQ ID NO: 82385 - protein, 231 aa, Zea mays
  Coding DNA Sequence Number=SeqID_39010
  Subcellular localization annotation: CTP_CleavageSite=41; ConfidenceScore=5.44e-01
MASSLLGVTFPPSHFLFFIQGFTKSLAMTVLSEIGDKTFFPAAAAATLRSQRSPQHPRSWKVRRALPFFQRVSCSVDRDWKTIEACVGSKTVIQFLKLFYYKDNLPSDSKVQQITVQVAQRVRLVLGQLLKQLSKKLWFHHSVCCDGADARAEKSAHSAYKWVGYIRPGSNELGIVAQLVFGLVGSVPRRLTFRRKKSYVYNSSSLHMTASFFSLLDSFHFCPSDTSLITI

SEQ ID NO: 82386 - protein, 167 aa, Zea mays
  Coding DNA Sequence Number=SeqID_39011
MSSIDSALEEAILEDLLLELPEIRVIDVRVECPDVVASTGPLARQECALAPEDALASEGPGTGSLSTASMDVHMESPLLWPKYAAMTSSDLLVGLASSATLEVSGHSTEHPMGAPEVEIPMGAALSLDYPISLMSGTDHDAASVDVPSSGSASRPLAFGFPSFWSHL

SEQ ID NO: 82387 - protein, 160 aa, Zea mays
  Coding DNA Sequence Number=SeqID_39012
MGRGGVLQLGDRLCSLRGGEVTRSEVDAVTEGLGSPASGCKNGIGNGRTTKGGALGGSGNFGEESQPRRGGLWRAKAWTSYDRDDAQGGLARLLAAWPQNSGECERREQSAREGELARNEAGERVRVRAVLKRDLGCMGRWSGILACVRAGPRRFTGKAE

SEQ ID NO: 82388 - protein, 330 aa, Zea mays
  Coding DNA Sequence Number=SeqID_39013
MRVGSVYVARSTEGGLPHREECDEDEDNAGFYCDYDYGYGFWYSFRLERMARLRHTARKSVIPFLPSRLAERPLCRPVAPPPAQGPGASVTGVGAARLFFLASVGGRVCEALLSCAPAGGTPCTTTGIPAAEVAVGGDPDDGGGDDSSLSHNTDLSEEQEPEGWVARPITRDAAHGCHFHNALDTLLRQALDRHTWSIEYRCVVFQHSHGAYPDRWEATCLVRRPEDSLRGVEKQCQEKKKGDGEELALYSQNQLEPGTPDCPVVHQTVSGARGCSTVNWLLSDIGRATWLKFTGLSGESSTPAPEVFDDELVALGNSPRTPTIIYRTVR

SEQ ID NO: 82389 - protein, 164 aa, Zea mays
  Coding DNA Sequence Number=SeqID_39014
MPMHHHRASQLLEETMTEMKTTMPVEVRAMARSSPRSRSPRDGPLDPSRATPLAADGLDLKYYPRRSAYSAGGVIVSPIGEGNPKLNNMVNLVAELNTELDHALDELGKIRAEVVELRTERAACHYLDGGSLAPIGIQQPYRSSPRGRFDYGTPDYRTQIDLEP

SEQ ID NO: 82390 - protein, 78 aa, Zea mays
  Coding DNA Sequence Number=SeqID_39015
MGSKPDVKIHHRDKSPAAGILNLYLNRILKEEAIEETSLRCKTPSSSQPWITTTKRSRRASLGLATLGSWAVPVTSVN

SEQ ID NO: 82391 - protein, 281 aa, Zea mays
  Coding DNA Sequence Number=SeqID_39016
MSSIPPPEGGLKATIVVVARRRKEYHVVAAVEGHELETPETEHRPGLDRLLETTHLELDGKLFVNTQQAPTWRANCRRFDPGGVMMYPLRRGRSEPKVGRGGDSSEVGAESEPWGRARRRPSSEVEVEFEPWGRARQRPSSEVEVESEPWGRARRRPSSEVEVESEPWGRARRSFLWRLGPDLAAVSLTLAGGTAVGAAQAALFSCQAILALNAPAIQSAGEAILAKVASPRSLSELGLGRVEGVLGVPLIMVPNIWAIIQKAPITSEQLFREADIYITTD

SEQ ID NO: 82392 - protein, 227 aa, Zea mays
  Coding DNA Sequence Number=SeqID_39017
MIRDSLVLWEGPKVMAQSGLGVSRSHSRTVWAVTQSGLERFNPRVMMAGEPPEDKEGECFVQFGHGGGLTPSGITVKPPGTSNCITFESQRIGVLQGTVNNVHCARRSQSRRQKAHRTVNNDCPVHHRSVRWTSCHKLQWSKPNGRVTWLAHRTVSGGAPDCPVRHATAASTNGSFGGWGYKYPQPPTIHGIQVFSLQTPYKSYSIQYKTQTKRSNPLPSPESLQPN

SEQ ID NO: 82393 - protein, 49 aa, Zea mays
  Coding DNA Sequence Number=SeqID_39018
  Subcellular localization annotation: CTP_CleavageSite=34; ConfidenceScore=5.08e-01
MTQSPRAGRAGGSTARTLMRRVRRPTERAQRRTRRQRRGDPDEAGPFLT

SEQ ID NO: 82394 - protein, 538 aa, Zea mays
  Coding DNA Sequence Number=SeqID_39019
  Gene Ontology: Mol. function=sugar:hydrogen symporter activity; Cellular component=integral to membrane; Biological process =carbohydrate transport
  Homolog annotation: Hit_ID=A3AYN8; Match level="QueryCoverage=95%, HitCoverage=95%, E-value=1e-138, Identity=56%"; Hit description =Putative uncharacterized protein
  Pfam annotation: Domain name=MFS_1; Domain location=59-453; Score =116.5; E_value=7.7e-32; Accession=PF07690.7; Description=Major Facilitator Superfamily
  Pfam annotation: Domain name=Sugar_tr; Domain location=55-502; Score =362.1; E_value=9.4e-106; Accession=PF00083.15; Description=Sugar (and other) transporter
  Pfam module annotation: Pfam domain module=MFS_1::Sugar_tr; Domain location=59-453::55-502
MGAEVAAAGRSLPGFLGRKNRYARVDDVLPQEPEDGGGVRVRGVGGSCRRYVFACSVFASLNHVLLGYDVGVMSGCIIFIQKDLHITEVQQEVLVGCLGFISLLGSLAAGRTSDAIGRRWTIGLAAAVFQGGAVIMALAPSFGLLMAGRLLAGIGIGIGIMVAPVYISEISPETLRGSLASLPEIFISFGILIGYVSNLAFAGLPDNINWRVMLAAGILPSISIAFVLLVIPESPRWLVMQGQAGDARAVLVKVSDSVEEAEERLAEIEEAARATAASSNGKEAWRELLRPSPVIRRMLVTGLGVQFFQQATGIDALVYYSPTIFRDSGITTESQLLGATVAVGVVKTVFIVIAIVLVDRVGRKPLLYVSTAGITVCLAVLAASLSALARGALPGGVAVGLAILTVCGFVAFFSVGIGPINMVLSSEIYPLRLRAQAVAAGFALNRMASGAVAMSFLSICRAVTVAGAFAAFAAVSALSVAFVHLCVPETSGKTLEEIESLFGGGGVSVTHGGSGEVELGDAERLEHKRLVSHGHASS

SEQ ID NO: 82395 - protein, 548 aa, Zea mays
  Coding DNA Sequence Number=SeqID_39020
  Gene Ontology: Mol. function=sugar:hydrogen symporter activity; Cellular component=integral to membrane; Biological process =carbohydrate transport
  Homolog annotation: Hit_ID=A7QYP6; Match level="QueryCoverage=91%, HitCoverage=92%, E-value=1e-166, Identity=63%"; Hit description =Chromosome undetermined scaffold_252, whole genome shotgun sequence
  Pfam annotation: Domain name=DUF81; Domain location=155-409; Score= -75.8; E_value=0.099; Accession=PF01925.10; Description=Domain of unknown function DUF81
  Pfam annotation: Domain name=MFS_1; Domain location=76-476; Score =105.3; E_value=1.9e-28; Accession=PF07690.7; Description=Major Facilitator Superfamily
  Pfam annotation: Domain name=Sugar_tr; Domain location=72-525; Score =381.3; E_value=1.6e-111; Accession=PF00083.15; Description=Sugar (and other) transporter
  Pfam module annotation: Pfam domain module=DUF81::MFS_1::Sugar_tr; Domain location=155-409::76-476::72-525
MLPSAELSSSNGGGASGLAALPVFLGRKNKYVRMDDVLPSEHEGDDGGGGGGGGGAVHVRGRQSSRRYVFACSVFASLNSVLLGYDVGVMSGCILFIQRDLHINEVQQEVLVGCLSFISLLGSLTGGRTSDAVGRKWTIGLAAVVFQAGAAVMTLAPSFQVLMVGRLLAGVGIGFGVMIAPVYIAEISPAASRGSFTSFPEIFINLGILLGYISNYAFSGLPDHINWRVMLAVGILPSVSIAFALLVIPESPRWLVMQGRADEARAVLLRVTDTEDEAKERLAEIEAAAAAATTGAAGKHGDRNRTVWQELSRPSPVIARMLVTGVGIQCFQQITGIDALVYYSPTIFRDAGIATERQLLAATVAVGFFKTAFIALAIVLIDRVGRKPLLYVSTVGMTGCLAALSAALFLQARGSVSRGAGVGVAILTVCGDVAFFSVGIGPICWVVSSEIFPLRLRSQAAALGAVANRVTSGAVAMSFLSVCRAISVSGAFAAFAAISALSVLFVHRFVPETSGKTLEQIESLFGGGGDGDELRELELGDVEQLVHK

SEQ ID NO: 82396 - protein, 76 aa, Zea mays
  Coding DNA Sequence Number=SeqID_39021
MPLPANGGGENGAGPGSALGRGPWAIRACMDWGNACYALATSRLLAILLAMDIQSGTRIKKTVKTGPANHFPDGVF

SEQ ID NO: 82397 - protein, 287 aa, Zea mays
  Coding DNA Sequence Number=SeqID_39022
  Subcellular localization annotation: CTP_CleavageSite=51; ConfidenceScore=5.17e-01
SEPPVRARRSRRRVRRSRSWVASGVVVSGPSRVEPGSAERSSPSSGLSRVRALGSGGAEFAVFRVLARVRALGSGGAEFAVFRVLARVRALGSGGAEFAVFRVLARVRALGSGGAEFAVFRVLARVRALGSGGAEFAVFRVLARVRALGSGGAEFAVFRVLARVRALGSGGAEFAVFRVLARVRALGSGGAEFPMAPLARPDCLSDSLYRAALQSEWRRRRCPSVRPWSGAAVEPTDQKVSGLSPSLSIVCSCLCQTLVVFELSPTAKLQHMQFILYATTLTKHFLP

SEQ ID NO: 82398 - protein, 264 aa, Zea mays
  Coding DNA Sequence Number=SeqID_39023
  Subcellular localization annotation: CTP_CleavageSite=20; ConfidenceScore=5.05e-01
MQTGSEQKKPNRRAWCAQPPSGYKRPPTFAQTNGREGQADGSSSHVVSQAHIPSRDSKRASSHGVKTEKRTTLRLRRNNRAKKGTGKGDTPKRILPCEGTGLRAPLLIRGSKAGPPKGSTVASDRVGPTPTTEVRRLAPEGFTVASDAERGMTRALVSADGLHLARPRGSDSTSASEDRLDLDLGGVSTSPNPGPGPTTLQEAPSLPYPKVTPGAGNKTGVPSGSPRPDSCPYGQFQRWSDQHNSTGTQGHNLSKEHATTPRGR

SEQ ID NO: 82399 - protein, 211 aa, Zea mays
  Coding DNA Sequence Number=SeqID_39024
  Gene Ontology: Mol. function=kinase activity; Cellular component =ornithine carbamoyltransferase complex; Biological process=amino acid metabolic process
  Homolog annotation: Hit_ID=Q6QP54; Match level="QueryCoverage=54%, HitCoverage=36%, E-value=1e-33, Identity=69%"; Hit description =Putative kinase
MAPPVDVAGPRPRLGDVEAPPRSRSSLSSVAKVESEPLGQARRRPSAETRAEFEPWGRAKRSSSSFGAEPKSEPWVGRSGPESEPWVGRSGVRRLPGLSPSPSPGSGGAEFAVFRGLARIRALGRAKRSFLWCLRPGLAACQPRSVEWHNSRNGAGGTVLLSGRSVERQSDCGHFGSVDWRTCVRIKLCADGGYQLKIRSLEGTPNYGPRQ

SEQ ID NO: 82400 - protein, 104 aa, Zea mays
  Coding DNA Sequence Number=SeqID_39025
MVRERRTQTNTMSKNTRDTRFIPRFGHTTKVPYFLVEAPTKSRVSFNPNPPFADHKGQAHTIIFAQTSGSDCDRGEQCRNPVEPILGPVEPVFETEEQVLIKLS

SEQ ID NO: 82401 - protein, 367 aa, Zea mays
  Coding DNA Sequence Number=SeqID_39026
  Subcellular localization annotation: CTP_CleavageSite=68; ConfidenceScore=5.21e-01
MSSHSLMHRVFPPSEPPDGGHPQSFRLVVGGTQLRGSWYLSAIVRLQGFSSCSPAASPRWWSPKTVTSSSMARESKSGCGLCPSLSLKDFHHQCWGGDCRVPGSRTRVALEPLPAPPSATAAGRGSSVDEIAGAAHRPTSNSTAFCPSLPHEFGHGRGPHGSSIRPEVIAAAVRLPGAEVVVAAAVGAGDGGPFVGLPLLRMPPHSSGVDSLGSVGLAVRGFSCLVKGTPRPLFDEPKPGVAVSARTEAELARKEDMVGRSLAGSSVSGTDAGVDLPRPRAGLMSSGDNWPRPRGDQPSRLLEPDSWGRPWGRWPGRDDDVVLQSGDPRTPRPSEARSDLAEGVVDAEGAAAPFSRQDMSLQDRIIL

SEQ ID NO: 82402 - protein, 283 aa, Zea mays
  Coding DNA Sequence Number=SeqID_39027
MAERYQLPRSCVPPTTRRKDCGCPPSGGSEGGKTRCIRECEDMVAFQGGHPPFKGDSPYLRPQPSWAESSPTRSKVLPLRRGGWVPHVMQTGPEQKKPNRHARCMQPPSGYEHSSAFHPDQRVKGRAAMHAACNRSKWAHPSDFQRTQHGGPRPRVTQPARRLQRASNCTAAHTTATPPRLRNQYHDSRQPCVRPSSASQARRKQAPSLPTDQGFEGWPLGGVHSRLRARGLHTHYWSEVQRPAPRKGSTAASGHSGSAPTTDQGFVGWPSKGSQPPQTQSEG

SEQ ID NO: 82403 - protein, 150 aa, Zea mays
  Coding DNA Sequence Number=SeqID_39028
MEAITILSREEAEAGDTAPGTVSPTVSDLLHAIPDTLEDALSSGARIAEEAGPLKPPRGSFEEIIIQPPDSGGSGDLVRAALDPSIRGGPTLTWMSTWGDSYFVLDDTEEREMWEELRAVTQEVITRSMEKSIFVCRERDISATLLCSKE

SEQ ID NO: 82404 - protein, 88 aa, Zea mays
  Coding DNA Sequence Number=SeqID_39029
  Subcellular localization annotation: CTP_CleavageSite=50; ConfidenceScore=5.56e-01
MTATITYIDDSSLSPTASRAISNSLATAQESLNRSVPPNLFSTTVNKLTAASAIQVLAKLEPRSLSVVAGTGLPELDSSPLAIEDLKL

SEQ ID NO: 82405 - protein, 264 aa, Zea mays
  Coding DNA Sequence Number=SeqID_39030
RSSPNRRRQSSPPNPDGERGGAELWHGGAIAARSDHMQSSPKLRFNGYTRGGGHGKLGVGIVTSISATQKSTHGARRSPELRREIVVHPVVISLYGGSRQHHGGTAKFPAQARQSRRGVYVDSIAAAETLVCNLTAYSTAETRGAGEKRRARRGSRGLGPHLKPARGGFVRQRSRSTRAEFVARVISAGREGPDSAVPRVIDGAKEAAAVRNPEAIDDVREECYRLLGFDVGEGSDLDPLGEFVDGDHQHEGFCLAGEMSGLGL

SEQ ID NO: 82406 - protein, 141 aa, Zea mays
  Coding DNA Sequence Number=SeqID_39031
MKKIDEEVQRQKDQMLKVADKWFLSHFRVDCHQKTVQEREINAEYMSAVLQQLLTIGDASGGSQFARQWRLARRVSMARLLTLVAALDGPACHQMQRLKHGDHPWLPEEAAHIEVSAVALLFCPHAKLEADGARCALTGRN

SEQ ID NO: 82407 - protein, 58 aa, Zea mays
  Coding DNA Sequence Number=SeqID_39032
MGDRRALVSASDGMRARRAPLRGKSQIHLKFLTGVYDLVNASEACRVGQFGKARDLPA

SEQ ID NO: 82408 - protein, 62 aa, Zea mays
  Coding DNA Sequence Number=SeqID_39033
MGSVYAARSAKVGLPLGEECGGNEIYGFGYDYGTGCPHCNHYSGEDEAMEGDHQEFQDYDEF

SEQ ID NO: 82409 - protein, 85 aa, Zea mays
  Coding DNA Sequence Number=SeqID_39034
MTSGRTLLRRAPRPRPHSRGEDKQKAVESEVSPRVAPTIPSAEKPLLAASVGGGTRSSAGAAQAGEPGTRQLPAPRAANALPPDH

SEQ ID NO: 82410 - protein, 244 aa, Zea mays
  Coding DNA Sequence Number=SeqID_39035
MKLRSPNDDKAEEPRAPPIWGLGRWKDAMHEGSAKTWLPFKGVTLLLKATLPTCVLSRRGLSLLQHAPRSSRYDTGAGSHVSYKLAQGRQGQTAAHGARNCLAGQRVKGQTVMQAACKRTQGTHPFDFDASSMEAQAHTSWIGKRDTPKGILLREGSGPRAPLLIRGSKAGPSEGFNSRHRALGLRAHYWSEVRRPAPRKGSMAASGHSGSAPTTDQGFVGWPPKGSTAASDAERGMTLGTFDT

SEQ ID NO: 82411 - protein, 202 aa, Zea mays
  Coding DNA Sequence Number=SeqID_39036
MTVTPCPEQASSGKSERRKERAGGGVRKTGSSALADLYAALLQPFLPRFLKYEDLLPAKDLTENLSSLFLFLLSVPVTVWIESFDSWCSGVNPAGGRRRHNQGKIAIAGKLPSLFLLVDIDGTSACVSEESRGCKEATSTTNSTNRRTMLHRFLAVSPPPPWAAPRCGPGASRVVITRRRFVGSPAMALLCPLWASPRPGIG

SEQ ID NO: 82412 - protein, 219 aa, Zea mays
  Coding DNA Sequence Number=SeqID_39037
  Gene Ontology: Mol. function=catalytic activity; Cellular component =cytoplasm; Biological process=cellular carbohydrate metabolic process
  Homolog annotation: Hit_ID=Q2QZ87; Match level="QueryCoverage=77%, HitCoverage=54%, E-value=1e-64, Identity=65%"; Hit description=ATP -citrate synthase, putative, expressed
MRRLLGLALCASAATRSRPDMLFGKPGKSGLMALNLDFDQVKEFIKERLGIERGWATLSASQSVGGIEIEENWDKVKTIFLPTEKPTTSDSCAPLIATHPLEAHRKFGDFIKGVFVVFHGFGKYFSFLEMNPFAMVNGEPYPLDIRGELDDTTTFKNFKKWGGIEFPLPFGRVLSPTESFIHELDEKIEIILGKSDKFDELMVAATDERGEVEDGEEQA

SEQ ID NO: 82413 - protein, 312 aa, Zea mays
  Coding DNA Sequence Number=SeqID_39038
MARLRYTARKSVIPFLPSRLAECPLRCPVTGQSSHLERLHHRMHEEQEHQRLELEQQGSSFSLQQEIESVRSCSLCFRWRRPPAPPLSALAAGVAAGGDPDDGGGDSSSSFSIDLSADQELEGWVARPITRDAARGCHFHDALDTLLRQALDRHTWSIEYHCVICSEHYSISERDSAEAAMQDAARRVLSHYCSVLDGIADGLNLKYYPRRPSGSTRGVIVSPVGEDNPWLSSTINLSIVLNIELDHALDELSRARAEIAQLWAERAENRHLEDGSPAPVGTQHPMFLIQTQAVQAIGQTLATIQQQQQPPP

SEQ ID NO: 82414 - protein, 123 aa, Zea mays
  Coding DNA Sequence Number=SeqID_39039
MESHDLRAERESRLVGGDENVGFGIGYGNASPLQPNRTLAEYVDVYSPLLYTPNPPPQVVPAATTAQEKVKPWKETFRSSKITSSSRRGLAATPSRLPVKAACIYVSFPHFDYCKDYVDVSDI

SEQ ID NO: 82415 - protein, 57 aa, Zea mays
  Coding DNA Sequence Number=SeqID_39040
MESHDLRAERESRLMGGDENVGFGIDYGNGCPRCNHCSGEDEAVEGDFQEFQDYDEF

SEQ ID NO: 82416 - protein, 119 aa, Zea mays
  Coding DNA Sequence Number=SeqID_39041
  Homolog annotation: Hit_ID=A2YGW4; Match level="QueryCoverage=69%, HitCoverage=26%, E-value=6e-10, Identity=45%"; Hit description =Putative uncharacterized protein
  Subcellular localization annotation: CTP_CleavageSite=50; ConfidenceScore=5.29e-01
MDRATSPFEGDSPMLQPQAPPSSPPSGAHDSVDRATSPRSGSATGRSDAAAMALSAKGKEVCHRSCDVLDINADEWGNENRSMTTELREQQYRLRKALEDRVQVSRETAKMWRWDKLHQ

SEQ ID NO: 82417 - protein, 100 aa, Zea mays
  Coding DNA Sequence Number=SeqID_39042
MSEAGALGKGHSHTTPPTEKPGLLLHPSSSAIGNRSHRDTSKIEATGWASVAMTTSEAGALGKGHSHATSPTEKQGLLLHPSSSATENRSHHGSERDRGY

SEQ ID NO: 82418 - protein, 201 aa, Zea mays
  Coding DNA Sequence Number=SeqID_39043
  Subcellular localization annotation: CTP_CleavageSite=36; ConfidenceScore=5.28e-01
MASAARLQGWSRQWTTWPGSSRRCYTSSAWEVTGSSADEVSSRANSASVHADTAVFGSGSSQSPDSHNEQTPTLRMPLQTQPRFHSRGYEQPPHRRACGTTNSGWLAADHYSSDNDLRSGRPNSSSDDLRADAAATRPSPVSPLEGRGQEIKAKETKARSADGADDLVGGEAFSGVHHLSTGDGSHLPTGRSPLASSGVAD

SEQ ID NO: 82419 - protein, 54 aa, Zea mays
  Coding DNA Sequence Number=SeqID_39044
MSKRVNPTHRVMMNGREDYKATANRNESSRSSTGWNRLSGCRPNAGNTTNGRSG

SEQ ID NO: 82420 - protein, 16 aa, Zea mays
  Coding DNA Sequence Number=SeqID_39045
MEEADVEGCDDGDDEY

SEQ ID NO: 82421 - protein, 135 aa, Zea mays
  Coding DNA Sequence Number=SeqID_39046
  Homolog annotation: Hit_ID=Q75GU4; Match level="QueryCoverage=69%, HitCoverage=19%, E-value=6e-26, Identity=65%"; Hit description =Expressed protein
MTPYEVVFLCVSEMFYMSFHQVRMMLVRSWLPVLNVCRDIIQPMHFQKSTNCQDLEEAFLQNISTLLVLEAQELLQQCLGFSTRNVDDCPHLVAAFKTWFRRACRAPSASGGENLDMSGCTLSPNQCVVAVYSRM

SEQ ID NO: 82422 - protein, 160 aa, Zea mays
  Coding DNA Sequence Number=SeqID_39047
SQRCYEREKVDLDHERLPLHSDERPKPAQSGCTGLSGGAPDSVRGCTGQCPVRQAGSSELAALGNSSATYDYNSPDCPVCTGLSGEPTVGCAICARHVAEPTVGRGHRTVRCANGSQAPTVDYATEGKKSAPDSVRCARRLKARFAFLECSQRLLAALGL

SEQ ID NO: 82423 - protein, 299 aa, Zea mays
  Coding DNA Sequence Number=SeqID_39048
MGLLVLVMFMVLMARLRHTARKSVIPFLPSRLAERPLRRPVAEQSSHLERLHHRLHEEQERRRQEQQGSSFSLQQEIESEPEGWVARPITRDAARGCHFHDALDTLLRRALNRRTWSIEYRCVVYQHSRGIYPDRWEATCLVRRPENSLQGAEACSEHYSISERDSAEAAMQDAARRALSHYCSVLGGVADDLNLKYHPHRPSGSTGGVIVSPVDEDNPRLSSTVNLAVVLNTELDHALDELSRARAEIAMLRAERAERRHLDDGSPAPVGTQHPYRSPRRGRQSYGNPDCKTKINLEP

SEQ ID NO: 82424 - protein, 121 aa, Zea mays
  Coding DNA Sequence Number=SeqID_39049
MEVCADCTHVPQKNHGKRRAISAFWQERWRPGGASCVCNVETRIVNGPEARPFPAPSPPSPGLAPASPPRPAVAAPATHAAPCPAAPGEPRSAPCRARARPRSGELRPPPCPASPGRVLAQ

SEQ ID NO: 82425 - protein, 298 aa, Zea mays
  Coding DNA Sequence Number=SeqID_39050
  Gene Ontology: Mol. function=nucleotide binding; Cellular component =plasma membrane; Biological process=small GTPase mediated signal transduction
  Homolog annotation: Hit_ID=Q94IR3; Match level="QueryCoverage=38%, HitCoverage=56%, E-value=2e-29, Identity=60%"; Hit description=Small GTP-binding protein
  Pfam annotation: Domain name=LEA_4; Domain location=37-78; Score =11.5; E_value=0.064; Accession=PF02987.7; Description=Late embryogenesis abundant protein
  Pfam annotation: Domain name=Ras; Domain location=100-208; Score=3.1; E_value=1.3e-09; Accession=PF00071.13; Description=Ras family
  Pfam module annotation: Pfam domain module=LEA_4::Ras; Domain location=37-78::100-208
MASRQQHPTSYHAGETKAHVEEKTGQVMGAAQEKGREAKHKASDAADRAMGMGHDAGEAAKDRAYRAKDAASGAAGRARDTASDAAGAAEDRARDGAQQTGSYVAQTVEAARQKAAGAALYAKDTVVASKDKTGALLQQVRCTVGRGNSNTIVALAGNKADLLDTRQVSADEAKAFAQENGLFFMETSAKTATNVNDVFYEIAKKLLQGQQVQNPQGGMVLNQRPPKRMSVKLQEESNGKQCISTKRGGTEDNPRMVFSAFGYVHKIATFEKLQALIQYTDAATASAARESLDGRSIP

SEQ ID NO: 82426 - protein, 210 aa, Zea mays
  Coding DNA Sequence Number=SeqID_39051
MREWRSWVEGESADRGVVGLGTVVPRMSPLTGWVKAADGEELEDGSALEAAIGEEESDGAVGEEVESDDGVEERKGRPPELSAVKEARGTTVAGAAGGRGPWLDAPGTDRARSVQCRVDHVLCGIEEVLCIVAAYNKMVTYLSRSGPLGFEAPPLGIAIDVVEFLHEGVGVKLLLLLTKGGLARKDACLVLTLVLFFLIGDLLVPSAVVI

SEQ ID NO: 82427 - protein, 190 aa, Zea mays
  Coding DNA Sequence Number=SeqID_39052
  Homolog annotation: Hit_ID=A3AV06; Match level="QueryCoverage=54%, HitCoverage=10%, E-value=4e-24, Identity=54%"; Hit description =Glucose-6-phosphate 1-dehydrogenase
MLSLVHIEIEGSVLTRSHTKSESSPGLGDLLVHRIICTRRIKGYVTVIIGVAVQRKDTVPPKKRILDTSQDFYTAGFVPGANVHFSYDLPEDSLLNADDLKAGPFLREEILSLDGLSLLLKPASQPDDSRMNSSSLQSDASQSVPVPTTTNKKPGRPKWLKSTHIQYEGTCCSHAYLRKIFPYHLLVIPL

SEQ ID NO: 82428 - protein, 174 aa, Zea mays
  Coding DNA Sequence Number=SeqID_39053
MGAKGSRAKAADLVGDANRLSGRLCSALWSLSAFGLASPADSFLPESSGARERERRAPKREAGDVRCVDEEDRRRGSRGDTVMRRGWRREHRGGWRLGREPPREGGMSLPGRRLDLSSWLAAVGWEGDAGGCGRWEKNPKPSLGPAPDLARGVDGTGDGRSSKGEALLGINADS

SEQ ID NO: 82429 - protein, 274 aa, Zea mays
  Coding DNA Sequence Number=SeqID_39054
  Gene Ontology: Mol. function=phosphopantetheinyltransferase activity; Biological process=macromolecule biosynthetic process
  Homolog annotation: Hit_ID=Q6Z0U9; Match level="QueryCoverage=89%, HitCoverage=67%, E-value=4e-90, Identity=69%"; Hit description =Putative MtaA
  Pfam annotation: Domain name=ACPS; Domain location=85-152; Score =62.3; E_value=1.6e-15; Accession=PF01648.11; Description=4' -phosphopantetheinyl transferase superfamily
MTAQTRALLSASLAGLVEARMIEEAERLDTDCKVDPRSFEFKKNKFGKPEVLWRSDDSRMEWPLHFNISHTSSLIVCGITMDTPIGIDVEEKTRKTAKNILSLARRYFTPSEIDYLAKIPDPDAQQKEFVKLWTLKEAYVKALGRGFSGAPFNKFSIILAANGRIQISVVYYFPLCAHACQYNSYTTCMNLWNRFQAPKVSNGSDSIHDCLSENWQFALAELNSSHYMAICIEDDSTSSDSGNGRLPLGLKVWKTTPFVEDILVSGTEAVKLVS

SEQ ID NO: 82430 - protein, 426 aa, Zea mays
  Coding DNA Sequence Number=SeqID_39055
  Gene Ontology: Mol. function=hydrogen ion transmembrane transporter activity; Cellular component=integral to membrane; Biological process=proton transport
  Homolog annotation: Hit_ID=Q7F1V0; Match level="QueryCoverage=83%, HitCoverage=78%, E-value=1e-167, Identity=78%"; Hit description =Putative heme binding protein cemA
  Pfam annotation: Domain name=CemA; Domain location=200-425; Score =40.1; E_value=4.8e-15; Accession=PF03040.5; Description=CemA family
  Subcellular localization annotation: CTP_CleavageSite=48; ConfidenceScore=5.06e-01
MSCSAAISDGIPLRFPIEGSRTLCGGLGGVCARGVLALGSHRSNRSRRARHRHATVFARRRRRRRPSKWQRPWWKTFFSDWNEDDESLDGWREEDELLQEIGSDKGLSEDEKFKTWTRKAEAIVDLREAQQDAVNAEERSWENWIGGGGGTSGTGGGGEASLLDQITDDPAEIVRDKSVFEVFRGSIDEDYEDMLFEDRVFMYASTNSAKFLALLIVVPWVIDFIVHDYVMMPFLERYVQKVPLAAELLDVRRTQKLQMVKALKIEKARYRLEVEIGKSPPLSDEEVWIELRDDWRLENRNAFANIWSDTVYGIVLFLLMCFNQSKVAMLKFTGYKLLNNISDSGKAFLIILVSDILLGYHSESGWHTLVEVILEHYGFEADEAAVTFFVCLVPVALDVYIKFWVYKYLPRLSPSVGNVLDEIKRH

SEQ ID NO: 82431 - protein, 611 aa, Zea mays
  Coding DNA Sequence Number=SeqID_39056
  Gene Ontology: Mol. function=hydrogen ion transmembrane transporter activity; Cellular component=integral to membrane; Biological process=proton transport
  Homolog annotation: Hit_ID=Q7F1V0; Match level="QueryCoverage=58%, HitCoverage=75%, E-value=1e-156, Identity=74%"; Hit description =Putative heme binding protein cemA
  Pfam annotation: Domain name=CemA; Domain location=333-557; Score =59.3; E_value=2.1e-16; Accession=PF03040.5; Description=CemA family
MGWGCSYCKTKQTLVLQIVRFAMVRKPLVRIRESKIEHLFQIQENRRASRSNSRRSAVTETANIPVSLLLLGSWQEPEPGSIASHRRALVAARTCTDDRVSAGRWPFYRSSPSAGAKQASLRGSIYGPPRFMTFMRCSAAVSDGIALRFPAEGRALRGGVCARGRGLLALGSHRSSSRRARRRHVAVFARRRLGKWQRPWWRTFFADWNDDEESLAGFREDDELLEEIGADQELSEKAKFEEWRRKAEAIVELREAQQDAFNAEERSWEDWTGGGGGGGAPENGGGGDWGGEASLSEQITDDPAEIVWDKGVVEVFRGTIDEDYEDMLFEDRVFMYASTNSAKFLALLIVVPWVIDFLVHDYAMMPFLERYVQKVPLAAELLDVRRSQKLQMVKDLNIEKARYRLEVEIGKSPPLSDEEVWFELREKALELRDDWRLENRQAFANVWSDMVYGVVLFLLICFNQSKVAMLKFTGYKLLNNISDTGKAFLIILVSDILLGYHSESGWHTMVEVILEHYGLESDEAAVTFFVCLVPVALDVYIKFWVYKYLPRLSPMLEQYSMGIFAWHIKFSSNLKGVLRLERPCLECLPGHAINQSVRLFGRTGNWRSNLS

SEQ ID NO: 82432 - protein, 434 aa, Zea mays
  Coding DNA Sequence Number=SeqID_39057
  Gene Ontology: Mol. function=protein binding; Cellular component=NuA4 histone acetyltransferase complex; Biological process=regulation of transcription, DNA-dependent
  Homolog annotation: Hit_ID=A2YR10; Match level="QueryCoverage=81%, HitCoverage=79%, E-value=1e-180, Identity=88%"; Hit description =Actin-related protein 4
  Pfam annotation: Domain name=Actin; Domain location=6-428; Score =546.6; E_value=2.6e-161; Accession=PF00022.10; Description=Actin
MASQTDDEVSAIVIDVGSYSCKAGYAGDDTPKAVFPSVVGSIEQTEDTDDPKPEKEADSASDSKNGAKPMDVDKAKTKRRLYVGQELEFRRDHMEVISSMKDGTVTDWDIVDNIWNHAFRRRLLINPEEHPMLIAEPSTNTAQQREKAAELMFENYKVPALFLAKNAVLTSFASGRATSLVVDSGGGSTVVSAVHDGFVLQKSVSTSPVGGEFLTDCMMKSLESKGIVIRPRYSFKKKEISPGEYKIVDLDLPNTTESYRLYCMRAIASDVKESVCRVPDTAFDEVAYANVPTTSYELPDGQTIEVGADRFKVPDILFNPSLSQTIPGIDGFADSIPVRGLQRMVIDSVNKCDVDIRKELFSNILLSGGSSSILQLKERLEKEVLEVCIELKLALFVSASGSFWPPKAAADCQTLSFSASFYKIRWAKNHSKST

SEQ ID NO: 82433 - protein, 220 aa, Zea mays
  Coding DNA Sequence Number=SeqID_39058
  Subcellular localization annotation: CTP_CleavageSite=63; ConfidenceScore=5.15e-01
MEEGVEIDSNPSRPLSVPLTPPLSPTPPAAPSPRAIPARLLQGRNGVVPRAWKVAIPVRHPCSAAPRKEGRRVEDPPSLSAPPTPRHHILRAVCYKKRSACGDGRSDPAIPALALLSRLSSLCWIYGRQLRAHQPQIARHLLDLHYPITSDPNKSAFVLAKTVFRASVRSAAHSFPPPTPGGSQELAFGGANSYRIGCSLGPAVFYTVNFLFRFNSDCFS

SEQ ID NO: 82434 - protein, 134 aa, Zea mays
  Coding DNA Sequence Number=SeqID_39059
  Subcellular localization annotation: CTP_CleavageSite=37; ConfidenceScore=5.38e-01
MTRLSGLRLLGSSTQPPYPRHQRMTRSSSLRLLESSSSSLVADRGHALLGKSSGGPSSGPWSISALPLEVSLRQVTTTSPAQSWLRRVVTASPAQSWVRTSQNSVSRPRLASGKTEERIPPRDGLGRYRTASPA

SEQ ID NO: 82435 - protein, 156 aa, Zea mays
  Coding DNA Sequence Number=SeqID_39060
MELQPGHTVEFGTSRISSVHVQEMQLLGYFGDGVGQVSGAEEISELEGELVVFEAFFIVGLHLSACRFVAEVLWRFEVQVHQLTPNVMVALTKGSRAIIHRTVRCTPDSVRCAKEERPQELASFGKLQRLVRYNSPDMSARAKVRRAHTSTPDKEQ

SEQ ID NO: 82436 - protein, 208 aa, Zea mays
  Coding DNA Sequence Number=SeqID_39061
  Homolog annotation: Hit_ID=Q10SV0; Match level="QueryCoverage=67%, HitCoverage=81%, E-value=1e-27, Identity=51%"; Hit description =Expressed protein
  Subcellular localization annotation: CTP_CleavageSite=84; ConfidenceScore=5.43e-01
MAAAGKLLLLAAAILAASFVADARPCGHAQTLLVSFSSVLRPNPDPTNPTPLTTTVVTVLRVRRLGPHQIRRPVALPSVESEVAASSAQDRAKDILVVVSGLLFGFGCGALTAASMYLVWSLLASTCASGYDDDVYSDDEDRLSDSESPKNAGYVIIHDADEYGAVYSMHLFNHVCRVCRDFPGYFTCATVHECDCYFVCNISEIGTV

SEQ ID NO: 82437 - protein, 155 aa, Zea mays
  Coding DNA Sequence Number=SeqID_39062
MGKSKKGDGSSHHSGDKRKREPTPLSEDFGDSEYSEEEFSSESEGSPAPASLPVSSDDSDDSQGITAEVWTYIRAVERAGLEGLDESEYSSDEENSSNSSEEGSGGNGGDGDDDGGDGDDSGNSGKGGDGSGKGGSSDGGGGSKGSSKGSNKASG

SEQ ID NO: 82438 - protein, 168 aa, Zea mays
  Coding DNA Sequence Number=SeqID_39063
MEQDLECAGKWCTGHCPFSRLILAQFRCTGPLRGKVGSLLRLLPEFVGPSGLAPTRPCVNPFHWSFLPGPRGDDLTNYGALGPFMMSFILLVDPGDIYPPQAPDLWADFEINGPKIIVFFCYYSSKFGVLSQVHASKRSAFCFFGDDDSLGAPKVHPMGVAPKLRVDF

SEQ ID NO: 82439 - protein, 69 aa, Zea mays
  Coding DNA Sequence Number=SeqID_39064
MAEASLHVFDASWHPGARSEHAHCNLADGEYILVPEQGAAQEVAPDPAPEPAPEDLPATALEGKPRFYA

SEQ ID NO: 82440 - protein, 279 aa, Zea mays
  Coding DNA Sequence Number=SeqID_39065
METRLSGLHDRLDKMEASTCVEGCGHFEVFDQSNEGFEREMFQVEDPILKRSAGALFDRMWGPHGREIVREWSDRALDQMAHDEEVEDLSDLDSTLPEASGWSQRPHPMLARAPWQPPRRLELAKAPMSATAPTGEDASKVVGEPAAEDPAASAGPSQVPTFGPAQATAAGNTYFVAAATVVPADNNLFGFGSECFESDGESGSLFSWTEESSDEGLDYFAALDVAAAESLPRAEVGEAADPPSASAEHKWRRVVSKHSVDEFSRNGRRHRMGMERGRL

SEQ ID NO: 82441 - protein, 166 aa, Zea mays
  Coding DNA Sequence Number=SeqID_39066
MEVALAATLGVLPALLTHVGYSLVLQLVSYRCPIYVSATVVVFVDTRACCWLALTLARLLVVTASHSLFVHRTSRVFAFVIELLNPSSLSRDFVVARALTRFVSSPARSRHNLVVVLCVIKKSQESGEDEASSVVFTKCTIKSSNILHDSSSIRQNYLVEEKIFSN

SEQ ID NO: 82442 - protein, 270 aa, Zea mays
  Coding DNA Sequence Number=SeqID_39067
MTTVGQRSWEPRLPWSSREPARRDGLREWQSAHGMKGSSRGTQGSSCARGHREASARDEGAEVRANTAGHREERQRAGAGGRASRDEHHGKQAEGAPRVERNWGRAAALGARLGETKRHDRDGQRPSATGKNARAPEREQGARQGRSSERRAAAGTRGTVSRQPWGRAELWPDKGRRRGKRRNWGGEIRTRRELKTKSSWGRRRGWARPAMELGARRCRGGAGRPRPGRRCQGRRRTRGRAEKKQHEQRERRRRALIKEPGAVAGFFFRD

SEQ ID NO: 82443 - protein, 22 aa, Zea mays
  Coding DNA Sequence Number=SeqID_39068
MTLTGNRHRASDYRVEVVRVNW

SEQ ID NO: 82444 - protein, 54 aa, Zea mays
  Coding DNA Sequence Number=SeqID_39069
MAVMGSTSEKMYLYQNKITRNGSGEMVRVACTLRGKRLDGGVSVLSVGVNLIWS

SEQ ID NO: 82445 - protein, 323 aa, Zea mays
  Coding DNA Sequence Number=SeqID_39070
  Subcellular localization annotation: CTP_CleavageSite=62; ConfidenceScore=5.73e-01
MSVSKSAPPAAASSVRTGDGGLRSFVGSAEGSLPRAGGNSPRTRRRLAGPGKGRLRSRRWFAAARGGGLHASPSPLHLVTRVPDHSERPALPRRILTVLVHHCRYNSNNILSIRKNLHLTGQTRRKYVLAGRPGYRNIPWPSNLGNIQHSRRRLPELGRRHPSPEGRATSRKVPSSATATGFFPRRSTAAAVSSPGSILHFADERGWVSAAQIQGEGHTSHQLLAQSRHLARAYFAKHPAMRQGLHSITNEFLNQITPAAHAGGAPKGPFVLIILSHLKWWECHIAVGAHYSRGEPWEFFDFVSRNIKPIIPPIAPLVVSTGN

SEQ ID NO: 82446 - protein, 126 aa, Zea mays
  Coding DNA Sequence Number=SeqID_39071
MQSLVLLLVLLLLLASALLLLVQRLHTFPTSRDPFMPRVDQTLKHYQAFKNKFPTLAPTSGVLTSTIFSKAPTFVMPLKKTTVPGAALQPLDTNQETLSLSERPEAKRERPPVQHFGRSWTRRSGT

SEQ ID NO: 82447 - protein, 138 aa, Zea mays
  Coding DNA Sequence Number=SeqID_39072
MVVGVGRSTCAGGGARRRRGIRPNQGAIDQLNGSGSFTRDQGRCVREEFENVSPDCSVYARPRATKVRRRQSSVSGEVLSGPRAWKALRATGEANRGTGAAWTRLAAVAEAWAVMEGGGKLTAAKEGCLASEGEHGVR

SEQ ID NO: 82448 - protein, 108 aa, Zea mays
  Coding DNA Sequence Number=SeqID_39073
MKLLEPSDLAQPHRRTRITSLDFFHSPANVDQRMNIFFLVYLSEKEHRKNTDHPNPQLIQDCNLADGEYVLIPEQVAVHEEDQEPALEPATEDLPTAPAIEGKPRFYA

SEQ ID NO: 82449 - protein, 188 aa, Zea mays
  Coding DNA Sequence Number=SeqID_39074
  Gene Ontology: Mol. function=nucleoside-triphosphatase activity
  Homolog annotation: Hit_ID=Q2R029; Match level="QueryCoverage=16%, HitCoverage=4%, E-value=4e-09, Identity=90%"; Hit description=AAA -type ATPase family protein, putative, expressed
  Subcellular localization annotation: CTP_CleavageSite=48; ConfidenceScore=5.05e-01
MQKKILVASVFQGKDSLPFARLISSLAAAGTWLQSAACRTNFFATLIYAAIFVVQNSNCHYHVLMIVAGGHVTHVWELGDFITSSEAHPGGFLFTKFASSNQTLFDLFPDSFGSRMKPYLQIGSSSWIPGTTSLRQPILPIWIISHDIVVDSAHVYQSELLIQIIIYACCVLMSLTCPMKKSQFMRET

SEQ ID NO: 82450 - protein, 187 aa, Zea mays
  Coding DNA Sequence Number=SeqID_39075
  Gene Ontology: Mol. function=oxidoreductase activity, acting on single donors with incorporation of molecular oxygen, incorporation of two atoms of oxygen; Cellular component=chloroplast; Biological process=abscisic ...
  Gene Ontology: Biological process=acid biosynthetic process
  Homolog annotation: Hit_ID=O24592; Match level="QueryCoverage=65%, HitCoverage=20%, E-value=5e-51, Identity=81%"; Hit description=9-cis- epoxycarotenoid dioxygenase 1, chloroplast precursor
  Subcellular localization annotation: CTP_CleavageSite=61; ConfidenceScore=5.24e-01
MAASVLLAAPATSPPLTWQRWAPLLAPSKKPTAIAVPRHAAAPRKSDGGGKKQLNLFQRAPAAALDAFEEGFVANVLERAHGQPSTANPAVQIAGNVVPIGERLPVRRLPVSGRIPPFISGIYARNDVNPCFDPVAGHHLFDGSASKLQPATLELCSVAPLGPQPRQQNHPHRSPPPSPPAVQQAAA

SEQ ID NO: 82451 - protein, 68 aa, Zea mays
  Coding DNA Sequence Number=SeqID_39076
MVGTSAVTAGWQPGSVEHCKPRRFKNSIRIVCFSQLMRLLDPLYCIGVGDLFSNAMSQEQGNIENVNR

SEQ ID NO: 82452 - protein, 76 aa, Zea mays
  Coding DNA Sequence Number=SeqID_39077
MDVLEAHPPPPTPAPAHSPVDDDDDDDVYAPLRQRLAHNRQGSLEDMVAGVTWPSILPPGWTIEWDPASAEEEHEE

SEQ ID NO: 82453 - protein, 113 aa, Zea mays
  Coding DNA Sequence Number=SeqID_39078
MGPDTGCVSVKWYPTISAVRRDQTGEIKVGRAGRVVQLIYQHNRRIFSQPHQQQVEMDPPIPPPAGADPVLAAQMRIMQQMADTMVDMHAPMRQERQEMRQEREERHQERRAQ

SEQ ID NO: 82454 - protein, 32 aa, Zea mays
  Coding DNA Sequence Number=SeqID_39079
MAPPREELNSGDWQITRYPFGTDILLKRPQTF

SEQ ID NO: 82455 - protein, 315 aa, Zea mays
  Coding DNA Sequence Number=SeqID_39080
MPRVLPPSEPPDGERPRFFHLVVVGGTQLRGRWYLSAIVRLQGFSSDSPAASPRRWSPKTVTTSSMVGRSEPGCGLCPVLSFKDLHHPCWGGEPASGGGNHPPAMRRRRPPAMPGKANCCCPARMQHSVLCPRFRGEDGSEDLPVRFGAACARWCGIGGQADDAVGADVVAAGESFSAIEAVSAAYEPTSGSLALMSGSRPLSGDTNKSLPVAASILGSWLLLQRSLASRPELVAPQALRNPRSLFDEPEPEAAVSVWTEAELAQKEDFVGRSLAGPSNSGTSAGLAEASGWLAEPSARAGFLEETLSAMAKARS

SEQ ID NO: 82456 - protein, 394 aa, Zea mays
  Coding DNA Sequence Number=SeqID_39081
  Homolog annotation: Hit_ID=Q6QP51; Match level="QueryCoverage=57%, HitCoverage=83%, E-value=3e-22, Identity=35%"; Hit description =Putative growth-regulating factor 1
MQAACNRTKGAHPFDFDASSMEAQAHSSCDRRAGYYVRETAPPLAPVSRLLDCGTGGRKQRSSRQQAHVPSWDSERALSHGVKTTRSDRERGYSERDPSPRRKRAPSPLLIRGSKAGPSEGFNSRLRALGLRAHYWLAPKGFNSRLRRRARDDPGYVRYITKARATLPSRQSQSDRSHFAAPLTDLTTRQRRLRRSDCCATRQSEADSSQGSESASAPEDDELHLARPQGSGSASAPEDDELHLARPQGSDSASAPEDDELRLARAQGSDLALASDNGLRLARPEARTRPRPRKTDSTSTSEEPLPRPTQGSDRPRHRRGHHYPTPSSLRLRGTRPASHLARPGKQIMMAPRVLHDDGGSQPLTEARRRQQGLDSLDSCPSARLQRSSDGHDIT

SEQ ID NO: 82457 - protein, 84 aa, Zea mays
  Coding DNA Sequence Number=SeqID_39082
MNHVQQSSTQESPSIVILGAREWKMELLAIWLRVLRDSRCDKGKGGVVGDYGGGGCAAKGAWGGGASFKEKTFLKKKENTQAQQ

SEQ ID NO: 82458 - protein, 322 aa, Zea mays
  Coding DNA Sequence Number=SeqID_39083
  Gene Ontology: Mol. function=DNA binding; Cellular component=nucleus
  Homolog annotation: Hit_ID=A2ZZM5; Match level="QueryCoverage=60%, HitCoverage=61%, E-value=4e-20, Identity=34%"; Hit description =Putative uncharacterized protein
  Subcellular localization annotation: CTP_CleavageSite=75; ConfidenceScore=5.27e-01
QKESGTSTRRQKVLSETTPHRRILANTSPAEVTLQMVRSNVSPGGSGAPPGSPRLRRAPEVSAQVDVEGAVAWARGAAAGELWAVRRRNRGIDVDEEQLRAVMLAVRQLRYELDPDDPDTPYPKKQKRHHKQGTRSSERIAGRVSRVSSFLESTSKHIGIDPDKCAAAVPEWINDPSEECKANYRSHNDTLQRMGTVVMLPPIVDPPKTRKSEDGKCKCSDPGSETCAKVHVKEAWKRVKYQLGEQAFRNCGFDAMGERVLKLWTAEDKKKLADIEKLIPQSKCSDKCFMKVALKQFSSERTTDLAKYYYTFFFPRRLGQPE

SEQ ID NO: 82459 - protein, 38 aa, Zea mays
  Coding DNA Sequence Number=SeqID_39084
MGHVQKGTASCANITSMAHPRYPPRSFGLWDGTWACLF

SEQ ID NO: 82460 - protein, 346 aa, Zea mays
  Coding DNA Sequence Number=SeqID_39085
  Gene Ontology: Mol. function=sugar:hydrogen symporter activity; Cellular component=integral to membrane; Biological process =carbohydrate transport
  Homolog annotation: Hit_ID=Q10BC6; Match level="QueryCoverage=88%, HitCoverage=55%, E-value=1e-148, Identity=87%"; Hit description =Sugar transporter family protein, putative, expressed
  Pfam annotation: Domain name=Sugar_tr; Domain location=1-344; Score =94.8; E_value=2.6e-25; Accession=PF00083.15; Description=Sugar (and other) transporter
MHGAPLYIAETSPSQIRGTLISLKELFIVLGILLGYLVGSLEIDNVGGWRYMFGFSAPLAAIMAIGMWTLPSSPRWLLLRAVQGKASLEDNKKKAIQALRTLRGRTASEKVLADDVDDTIVSIKAAYAGQEAEGNVWDVFEGASLKAFTIGGGLVLFQQITGQPSVLYYAASILQTAGFSAASDAAKVAILIGLFKLLMTGVAVFKVDDVGRRPLLIGGVGGIALSLFLLAAYYKILNNFPFVAVGALLLYVGAYQVSFGPISWLMVSEIFPLRTRGRGISLAVLTNFGSNALVTFAFSPLKELLGPANIFFLFGVIAVLSLVFVILVVPETKGLSLEEIESKILK

SEQ ID NO: 82461 - protein, 211 aa, Zea mays
  Coding DNA Sequence Number=SeqID_39086
  Subcellular localization annotation: CTP_CleavageSite=51; ConfidenceScore=5.43e-01
MSSRSLMHRVFPPSKPPDGGYPLSFRLIVRGTQLRGNWYLSAIVRLQGFSSCSPAVPPRRRSPETVTTSSWVGRSKPDCDLGPTLSFKDVHHPCWGGGRAEPALYLPRGFVGRPLPRCSRERALTGPAGGPDFDNAGLVDGGRRHLQRVGLVGLAPGDPFCRRAAAAPCAREDRPRCRALLGRRSCSGVVLPLHRDGAFARRSVPHSSGRI

SEQ ID NO: 82462 - protein, 198 aa, Zea mays
  Coding DNA Sequence Number=SeqID_39087
  Subcellular localization annotation: CTP_CleavageSite=22; ConfidenceScore=5.01e-01
MQAACNRAKWTRFSDSRHAGMEAQAHASRNRRAGCCMQATTPPLAPPSRLLDCGTNTATRGDPAHDPAAPAWRGGQCGQMTGGASGRSSGRRFAFAVITAPKKGPGKGDTPKGILPCEGTRLRASLLIRGSKAGPPKGSTTASDCVGPTPTTGQRFEGRPPKGSTAASGYSGSEPITDQGFEGWPPKGSQPPQTPSEG

SEQ ID NO: 82463 - protein, 112 aa, Zea mays
  Coding DNA Sequence Number=SeqID_39088
  Subcellular localization annotation: CTP_CleavageSite=27; ConfidenceScore=5.48e-01
MATIGLVPSTVVASTAIRAPAPAALTRASNRQPPHARRLLDLGRRAPAMDALRVSGAAEPLLRPAAAGGHPRLRVRRPTDPPVPPRLNIALAHPCYSGGGTRRLSLVVKESE

SEQ ID NO: 82464 - protein, 107 aa, Zea mays
  Coding DNA Sequence Number=SeqID_39089
  Gene Ontology: Mol. function=fatty-acid synthase activity; Cellular component=fatty acid synthase complex; Biological process=fatty acid biosynthetic process
  Homolog annotation: Hit_ID=Q9FJI2; Match level="QueryCoverage=63%, HitCoverage=39%, E-value=7e-11, Identity=50%"; Hit description =Arabidopsis thaliana genomic DNA, chromosome 5, TAC clone:K9B18
  Pfam annotation: Domain name=MaoC_dehydratas; Domain location=26-107; Score=-14.3; E_value=0.022; Accession=PF01575.10; Description=MaoC like domain
MRLRSRAIFPLVRTTATTTSAASSSPAVLSIGHALRERRLFTGDDVAAYAAISGDRNPVHLDDAVARELSGFQRGRVVHGMLVASLFPSIIAGSFVLFLSGISSNSA

SEQ ID NO: 82465 - protein, 81 aa, Zea mays
  Coding DNA Sequence Number=SeqID_39090
MRKETVRGGGFEKDRTEGSGSSSSSGRNDCLDVPRLLSVPNGNVCSEGLVLQTRIASCSTEPRADRAVSVHVNGLFTTCQA

SEQ ID NO: 82466 - protein, 136 aa, Zea mays
  Coding DNA Sequence Number=SeqID_39091
MSAPNLGPGSDDERTMQFPRTVPVVGKLREVVDAAKVVAATGATRHARWAWGWSMEQEVEGGGCGNGDDGVGRVAMDRGTCGDEDGSHRIQARRLHHRPHGGIGGDILLRRVTGGRCEEVFFLCEAEAVSVASVKE

SEQ ID NO: 82467 - protein, 563 aa, Zea mays
  Coding DNA Sequence Number=SeqID_39092
  Gene Ontology: Mol. function=dolichyl-diphosphooligosaccharide -protein glycotransferase activity; Cellular component=endoplasmic reticulum; Biological process=protein amino acid glycosylation
  Homolog annotation: Hit_ID=A2Y2X5; Match level="QueryCoverage=47%, HitCoverage=46%, E-value=1e-131, Identity=75%"; Hit description =Putative uncharacterized protein
  Pfam annotation: Domain name=DUF707; Domain location=348-555; Score= -22.2; E_value=2e-07; Accession=PF05212.3; Description=Protein of unknown function (DUF707)
  Pfam annotation: Domain name=Ribophorin_I; Domain location=136-512; Score=409.9; E_value=3.7e-120; Accession=PF04597.5; Description =Ribophorin I
  Pfam module annotation: Pfam domain module=DUF707::Ribophorin_I; Domain location=348-555::136-512
MDIVVEEGNVDVGNTAEPSYEVVARSGCSAQLSTKDTDEHELESEDSKVSVGNAAKQSHDVVGVGIDCIFNHAKVSTEADLGPQPDVIHLTSLNVPNESSQISSDADMVEQNKQDALDTLIRISQHKKPKKLNVARVVSEDYKCTPEDVQLIEYIKTLPGKQVVVDIDSAWLNRNDMECLFHGDIQLSGEALSAYIHCIRDEEHLLHREGGKSEQLHGSALLPKPLEKGKTLYLDVLTVFTHSLQPFPEEITQAEAQLVVYQDSAHFLSPYPVKAQTLAIRLPGGRVESYTRHPNAKLVDSELKYGPFHDLPPFSYLPVIVHFENNNPFAVAKKVIREIEISHWGNVQITEHYNIAHGGARLKGEFSRIDYQSRPYTQLEIEPRFPLFGGWQTTFTVGYGLPLEDFVFYSERKRFLNITFGSPLEEILIEKLIVKVVLPEGSKDIEVSAPFPTQQQQEVKYSHLDIVGRPVVVLEKPDVIPEHNLYFQPAHEKIGVVDSQWIVHQVIPSLGNQGQSENGRAPWEGLRERCRKEWGLFQTRMAEAEKAYYEMMGITPPNVIFVS

SEQ ID NO: 82468 - protein, 566 aa, Zea mays
  Coding DNA Sequence Number=SeqID_39093
  Gene Ontology: Mol. function=transporter activity; Cellular component= membrane; Biological process=oligopeptide transport
  Homolog annotation: Hit_ID=A2XNI0; Match level="QueryCoverage=93%, HitCoverage=85%, E-value=0.0, Identity=68%"; Hit description =Putative uncharacterized protein
  Pfam annotation: Domain name=MFS_1; Domain location=37-494; Score =4.3; E_value=0.013; Accession=PF07690.7; Description=Major Facilitator Superfamily
  Pfam annotation: Domain name=PTR2; Domain location=99-486; Score =276.7; E_value=4.6e-80; Accession=PF00854.12; Description=POT family
  Pfam module annotation: Pfam domain module=MFS_1::PTR2; Domain location=37-494::99-486
MDDDDHEEAWVHDSSVDHRGRSPARATTGSWKAAMFIILIEFSERLSYFGIATSLMIYLTKVLQEEMKAAAKNANYWMSVTTLMPLLGGFLADGYLGRFSTVVVSTAVYLLGLTVLATAQLAPGLGPDRSPRLHEALFFAGIYLVSAGTGGHKPALESFGADQFDEAHAAERVRKMSFFNWWNCALCSGVLLGVTAVVYAQDRAGWGAATVALAAVMAASLAVFLAGRRYYRYRVPEGSPLTPLLQVLVAAFRNRRLPLPDDDAELYEVRRPQSGKRRLLCHTYQLRFLDKAAIVVEPGAGEDACGPWRLATVTQVEETKLVLAMVPIWVCTLPFGMAVAQVSTFFIKQSSVMDRRLGPHFEPPPASVFALSAVAMIGTVAAYDKALVPYLRRATGGERGISILGRVGIGMAFAIAGLGVAAAVERRRLLSAGAARPSTSVLWLVPQFALMGVADGFALVGLQEYFYEQVPDGMRSLGIGLYLSVIGAGSFLSSLVITAADRASSRGGRAGWFAKDLNRSRLDLFYWLLACISAVNLAFYALVATKCSYKQTVRAGRVGDEVECAA

SEQ ID NO: 82469 - protein, 37 aa, Zea mays
  Coding DNA Sequence Number=SeqID_39094
MGINPALPGDYLAGTGAAIATGYSKTSWDPAPPPLPL

SEQ ID NO: 82470 - protein, 165 aa, Zea mays
  Coding DNA Sequence Number=SeqID_39095
  Gene Ontology: Mol. function=transporter activity; Cellular component= membrane; Biological process=transport
  Homolog annotation: Hit_ID=Q10BC0; Match level="QueryCoverage=71%, HitCoverage=30%, E-value=7e-58, Identity=94%"; Hit description =Permease I, putative, expressed
MLPPKPNSTAVLIDLGLLGALHESNIMQRAYLALATRLIDYWSTICRISVPYPFQWGAPTFDAGEAFAMMAASFVALVESTGAFIAVSRYASATPCPPSVMSRGIGWQGVGILLGGIFGTANGTSVSVENAGLLGLTRVGSRRVVQISAGFMIFFSILGEAHAFM

SEQ ID NO: 82471 - protein, 250 aa, Zea mays
  Coding DNA Sequence Number=SeqID_39096
MGIDSHLSTCVGTQSPKYLEMAHGHISLSPFHRWMVPFLRTSASVPAILAPSIGDYIHVSRPFCPFHRWKVPFQGTSASAPAIVAPLPTVIGTPSINTPHHFGSSEAKLFIEMALVVFGKNGGLEQIGSRKGYVDATTLTKISEDRDDAIDLDEWRARRSRVRSGGEEDWSVVTDGNTDCRADRATSTRDQGVLCHRRGGQYKRFASKGLLVDTYGFGRIIQNELEITLDHVKAVGFLGDGFGTTPEMSK

SEQ ID NO: 82472 - protein, 396 aa, Zea mays
  Coding DNA Sequence Number=SeqID_39097
  Gene Ontology: Mol. function=endonuclease activity; Cellular component=intracellular; Biological process=DNA repair
  Homolog annotation: Hit_ID=Q69JZ1; Match level="QueryCoverage=75%, HitCoverage=58%, E-value=1e-126, Identity=87%"; Hit description=AP endonuclease 2-like
  Pfam annotation: Domain name=Exo_endo_phos; Domain location=2-268; Score=111.3; E_value=3e-30; Accession=PF03372.14; Description =EndonucleaseExonucleasephosphatase family
MVKIVTYNVNGLRPRVAQHGSLRCLLDALDADIICFQETKLSRQDLSADVIMADGYEAFVSCNRSSKGRGAYSGVATFCRVTSSFSSQEVALPVAAEEGFTGLQDYAKNSQTVGDFSIAMPVEEEGLGELTREDLLRVDNEGRCIITDHGHFVLFNIYGPAVDGDDKERVRFKLLFYKILQKRWERLLALGKRVFVVGDLNIAPASIDRCDAAPGFEKQMFREWLRSMLREHGGPFFDAFRSKHPERWKGGRSSKLEGSDHIPVYILLKEIPELPVHNIPPSAARYLPEIRGRQQSIGWGIYRLVWGRHTPHTTPARYADRWTPGDVFWWTGDAQVRSVAFALSALASGLLHCAWPNEGIPSVDILVKALADADLLRPATGSETPSPVDPSSGAAP

SEQ ID NO: 82473 - protein, 327 aa, Zea mays
  Coding DNA Sequence Number=SeqID_39098
  Gene Ontology: Mol. function=phospholipase C activity; Biological process=intracellular signaling cascade
  Homolog annotation: Hit_ID=A2Z3H3; Match level="QueryCoverage=96%, HitCoverage=95%, E-value=1e-143, Identity=76%"; Hit description =Putative uncharacterized protein
  Pfam annotation: Domain name=PI-PLC-X; Domain location=78-208; Score=- 24.6; E_value=0.001; Accession=PF00388.10; Description=Phosphatidylino sitol-specific phospholipase C, X domain
  Subcellular localization annotation: CTP_CleavageSite=40; ConfidenceScore=5.29e-01
MASSNSNSSSNPLEAMGAFFSKQVDRRKLVTTEKRALATRLSSSGDTFPGSEHRPADRKRWMAELGADKLRVHQVVWPGTHDSATNKIGVPLVTRPFAQCQSMSVYEQLAMGTRVVDVRVQEERRVCHGILATYPVDVVLDDVSRFLSETESELVILEIRTEFGHEDPPGFDRFLADKLGEHLIPQDEAVFHRTVAELLPRRVICVWKPRKSPPPRPGDPLWSAGYLKDNWIDTDLPETKFESNLKFLGQQPPVAGPENTVTPKADNPVLCVWPVTKRIHGYARLFIAEAFAKGLGDKLQVFSTDFIDGDFVDACAGVTKARVDGTA

SEQ ID NO: 82474 - protein, 185 aa, Zea mays
  Coding DNA Sequence Number=SeqID_39099
MQLSLSIRAENCAMLLGSLGNQCGVDVEEHGEGTTDAEVANDVEEAVVEAAQDVEDQRAVKYSKVGRDGARDPGLDNAIHGVLANANEDLIAPTIVVVGEVEDDMKKTTDVLDSDNLGVEVDDSNSLVEKDGVMEVFVIITRLVEEDGVVVIFMNRMGIILRNDGASTSRAVEGEREQSATTSRP

SEQ ID NO: 82475 - protein, 189 aa, Zea mays
  Coding DNA Sequence Number=SeqID_39100
  Subcellular localization annotation: CTP_CleavageSite=35; ConfidenceScore=5.23e-01
MWGMGNRWDVVWGGGGGIGSRFGTSSRSKEAVQTRVSLPVERERGRRGRERDVATSSRGGVGPRAEAREHRLGRQTLEAVAAMAGTEVPARAWGRDTWAGAGTRWRLGEICGRGRQGHDACAGVEERYVGGGRGTTGAGRMLPCMGVGGGGGTQGAASGGRHGERSGRREAAGADMGEGEVWTLSLSSS

SEQ ID NO: 82476 - protein, 86 aa, Zea mays
  Coding DNA Sequence Number=SeqID_39101
MTTGRWWRAFNDSAWITAAAGGSLVVGGKREELSGVALHREIVAAPAAMAVGGYTGDARTTWTKELRKATPQKKTLRRSRKSKKGG

SEQ ID NO: 82477 - protein, 278 aa, Zea mays
  Coding DNA Sequence Number=SeqID_39102
  Gene Ontology: Mol. function=transferase activity, transferring glycosyl groups; Cellular component=integral to Golgi membrane; Biological process=protein amino acid glycosylation
  Homolog annotation: Hit_ID=Q2WBH4; Match level="QueryCoverage=39%, HitCoverage=25%, E-value=5e-53, Identity=83%"; Hit description =Sialyltransferase like protein
MTHDEAIATQKTRNTASPSKVFNYKRLLAWCFLFGDTCTSKFGDLLLKSRLCKVVILTDHNDEVLEASVVVMTKTDPSIERDDLILFQEIAILWIAGPSILLTYLWCKVISDWLASYPFFITYRIGYLKAGQKVREESERLRVCDSRNASRGLGLTTHIIDHCKLYNAQFKIFEPLEYKYDVCETILLWEQYRNMTTVLTREYLDVRPDGWLDYAAKRTAQLGVDKCYNRTLCDELLSIVLPAKPPFHPRQFATCAVVDQQLHGFLPADSNSDFLEEL

SEQ ID NO: 82478 - protein, 93 aa, Zea mays
  Coding DNA Sequence Number=SeqID_39103
MGRPRTLRSAGSLGGWACSVLSSTPDSSDLHAACSAERAETDEGARSEIPMNGGGRRMKPNRVRHCAVLFPCRAGTNTAHSDVPGLVARQTDI

SEQ ID NO: 82479 - protein, 158 aa, Zea mays
  Coding DNA Sequence Number=SeqID_39104
MRLHIVVIVLLVTTYVAPTASLQQYHKPSRISGIGPSDATKIWRRVWKFSLVFSIFEDFGISVDCVATSEDNISQDSNSYYILAMISLVGIVLIVCLNFPLPPFLLCHDAWAQEDVRGRIMARDRIVRGHVMVFSGLSSRIALPLSSRVSPMACNNWM

SEQ ID NO: 82480 - protein, 95 aa, Zea mays
  Coding DNA Sequence Number=SeqID_39105
  Subcellular localization annotation: CTP_CleavageSite=64; ConfidenceScore=5.72e-01
MAGSAAPARPAPCPPGSAAPAPPGFGRPGPGPTARPPLAGSAALARRLGRPCPYAPPRIWGVVRFAVVPSMGLGVCGSLCQGGYEIDGFGYDYGA

SEQ ID NO: 82481 - protein, 125 aa, Zea mays
  Coding DNA Sequence Number=SeqID_39106
  Pfam annotation: Domain name=zf-C2H2; Domain location=44-71; Score =16.5; E_value=0.1; Accession=PF00096.17; Description=Zinc finger, C2H2 type
  Subcellular localization annotation: CTP_CleavageSite=32; ConfidenceScore=5.14e-01
MEYPTAATGSGGHKYYYLQQHSHSQSSPAAPRRSVGQAMARILFLCSYENCDKTFADVNALRKHAHILLQHGMVAAFARAAWLKEYHEKVLVEIYRSPPPSLPICPLSVGDYTHSSRPIRPFEST

SEQ ID NO: 82482 - protein, 81 aa, Zea mays
  Coding DNA Sequence Number=SeqID_39107
MNLVFGLLHLSEGLSKYDISCTACINQNIMDQKSFDHTRDNHSIIVWVILELKILLRKALSMNRLLSGEPASEPKQFQLDS

SEQ ID NO: 82483 - protein, 245 aa, Zea mays
  Coding DNA Sequence Number=SeqID_39108
MAPPVTWSVRALCWARWRLLQGRGRVFSKAEVESEPWVGRGRDRRLRLGLSPSPRVGRSGVCRLPGLNPSPSPGVGRSGVRRLPGLSPSPSPGVGRSGVRRLPGLSPSPSPGVGRYGVRRLSGLSPSPSPRSGEAELPMALEAGLGCCQPHSAEWRSSRSGAGGAVLLSGRVRVRIKVSGHLCIKCSCDSVGRRGDRAKVASWRRLGLGRAEGPSDHTIAGINDVVCDGLRSVNNTIENEVVALL

SEQ ID NO: 82484 - protein, 159 aa, Zea mays
  Coding DNA Sequence Number=SeqID_39109
MENNKGVPQLPLTILCSHCYVAFPRFKVEKENDDEVTLRRASKLSSECDLVEEFIGYRVLPLVHGWGWASGLPYEPYPEEGSTDVRAATKDKKKRGLKHGVVDEGCPKGKGVAPPVRRRKKVETRARGPTRGSKVSDSFIEELAETCAEPGEVMTLPAL

SEQ ID NO: 82485 - protein, 288 aa, Zea mays
  Coding DNA Sequence Number=SeqID_39110
  Gene Ontology: Mol. function=microtubule motor activity; Cellular component=microtubule associated complex; Biological process =microtubule-based movement
  Homolog annotation: Hit_ID=A3BMM3; Match level="QueryCoverage=84%, HitCoverage=13%, E-value=1e-120, Identity=88%"; Hit description =Putative uncharacterized protein
  Pfam annotation: Domain name=Kinesin; Domain location=49-288; Score =184.9; E_value=2.1e-52; Accession=PF00225.14; Description=Kinesin motor domain
MSRPRRCPWRCRTSSSTRTPRSGRIAMCSLATVLLENIDGLDDDQVLIRIRPISDAENATHGQKRCLLQDSSKTLSWTGHPETMFTFDHVACETISQEKLFRVVGLPMVENCMSGYNGCLFAYGQTGSGKTYTMMGELSKLGNELSKDAGLTPRIFEYLFRRINEEEERRREEKLKYICKCSFLEIYNEQITDLLEPSSTNLQIREDIKKGVYVENLMECYVSSVNDVMLLLLQGVANRKMAATNMNSESSRSHSVFTCVIESRWESDSMTHLRFGRLNLVDLAGSER

SEQ ID NO: 82486 - protein, 455 aa, Zea mays
  Coding DNA Sequence Number=SeqID_39111
ERLKRNPEAGEFLRSRFPGAPDTVRCTPDSPVNYSAPAWKIPEGGEFALKSSGAPDTVRWCTGHCPTNGRKEWTAMQAACNRAKWTRFSDSQRASTEAQAHASRNRRAGCCMQATAPPLAPPSRLFGCGTNAATRGDPAAPAWRDGQYGRKRSGRRFAFAVITAPKKGPGKGDTPKRILPCEGTGLRAPPTDQRFEDWPSEGFNSRLRSRGPYTHYWSEVRRPNPRRAPRPPQATRAPRPLLIRGSKAGPEGFTVASDAERGMTRGDRVRQITRRYFWACLWAPSRPPTNGARTSTRITRLQLTGDTMFGAHRGLGGCSRKPGSGQTVDSVNIPARELGPRPCTRATASSHEGTTRPAEALRKALRPRRSETTPPRPRGLHPAGALARTHRNKMQPRKAGPLAKKCDESLQASANTPFEARGLLSGNIIRGTLKTPNSQLVTPISIKLQRPDGSD

SEQ ID NO: 82487 - protein, 1215 aa, Zea mays
  Coding DNA Sequence Number=SeqID_39112
  Gene Ontology: Mol. function=microtubule motor activity; Cellular component=microtubule associated complex; Biological process =microtubule-based movement
  Homolog annotation: Hit_ID=A3BMM3; Match level="QueryCoverage=95%, HitCoverage=64%, E-value=0.0, Identity=55%"; Hit description =Putative uncharacterized protein
  Pfam annotation: Domain name=Filament; Domain location=713-945; Score= -197.0; E_value=0.1; Accession=PF00038.12; Description=Intermediate filament protein
  Pfam annotation: Domain name=Myosin_tail_1; Domain location=244-1030; Score=-528.2; E_value=0.093; Accession=PF01576.10; Description=Myosin tail
  Pfam module annotation: Pfam domain module=Filament::Myosin_tail_1; Domain location=713-945::244-1030
MYIGEVNKLRCELIQYQKACTNQVAPEEKENVVATSTNAMQHVGFLLFHCDQAGKNFSYLSTDDVNRQFMQAEITTNISESFQLELPYEIDSEDPDSPHLHDPETHDFRDPRTASEYDGVLSQCLNLAMASSHDVLNKSTILTDLNFLEKDDTYHVHEKPPFRGIHLHDETLSCQEIETVNSSKHLSQDELENLKRTNEELKEKLFIMAEESNKLSEIIVAKDVEIASLSEEWEAAIFDLTSFLTDGCRSLDDAYQNIDNMISSFPHSNSSVSEHVEKAMKISIEKEKMIFKLQTELQTAQKIGREVKEKLHILKGATLAITEAQQLDNEENSQEELQLVGLLHQKDCIIQELRNNLKPEKFVFAERAKGHSRDDLLLPGSSVDMIEDHDENQPAASQASPDYQSKLDSVMHLVEDKSNKVLALFSNFEAAHETMEEAELMLSALLKANEGLKLERDNCRQAVELLLSEKSSLIGELKELEASSSCTSQKYDKLHQQINECVTEMTKLAATIRKSFQQIQSVSTVELFALCSEIITFGQDLKRYIIDSRSYIANMVSLIEEKSRSIEQFHHLSTHACGSARQQVESNSCQWGSRKLSQSDYSTDYASLRREFNRKSNVVEGLSFDLKLLQESASNAKDMKDKADEISIALSNTQRELDMKTSTMETMLKKQKVLEEELAENGARLINLRLELEQSQSLSSALLKENKGLRVMLEDETMKNSETKVLLEEKVKVIEGLESQILFLNRCEVGQLMSDIEELNNSIKIMSSDRDNLQAEIFKLRDKLEMALALAEENEAAAIEVRQTAEISKIYAEEKEEEVKILERSVEELEGTVTVLEEEVCNLKEEVRNYQIHKQSEAQFQAINDMLAEEKASKCDAAEESCQAKCHLEKRLQAEILAHQGVRKKIEGLKLEAKRKDDEIGQYKEHIAELVLHSEAQSLLFQEKYNEMEHMVSRQRFGPHESYSETVPKTEKPSGRARGSSSPFRCISSIIQQMNSERDQEILVARQRIEELEGLVSCKQKEICLLTSRLAAVDTMTHDIIRELLGVKLDMTNYANLVDQEEQQKLLIASQQQIEQSKAKDTELEALKEQLGHLILERDSLLDDMDQRKTDLLEAQLLVEQLEQREQMLEAQIEMLQLEKDSLQQKTLEMDETIELLARSNQPDINPRMGDNHHRGSSEFSRRLAQSDMLLSHARHEHSRRHAAGSSRTHHGRHR

SEQ ID NO: 82488 - protein, 293 aa, Zea mays
  Coding DNA Sequence Number=SeqID_39113
  Gene Ontology: Cellular component=integral to membrane; Biological process=intracellular protein transport
  Homolog annotation: Hit_ID=Q5XQQ5; Match level="QueryCoverage=95%, HitCoverage=99%, E-value=3e-89, Identity=62%"; Hit description=SNARE 13
HRVAEEGIQRAMSTDVPMSPELEQAFGGGQRPDFGSSCSSRSFTYSYYPPPASCPAAHQVLTPSHAACSRNGFQKMDKIKDSSRQSKQLEDLTAKMRECKRYVGLSSALCLIKEFDRILKDEEKKNTPDVNKQLNDKKQFMIKELNSYVTLRKTYQSSLGNKRIELFDTGNDQVAEGTPVQMASEMSNQELISTGRKQMDQTDQAIERSKMVVAQTVEVGAQTAATLTQQTEQMKRIGNELDSVHFSLKKASQMVKEIGRQIVNPHNKNIRDIPGLAPPAMNRKLLSIDAAGL

SEQ ID NO: 82489 - protein, 351 aa, Zea mays
  Coding DNA Sequence Number=SeqID_39114
  Gene Ontology: Mol. function=oxidoreductase activity; Cellular component=membrane; Biological process=response to oxidative stress
  Homolog annotation: Hit_ID=A3BMM8; Match level="QueryCoverage=84%, HitCoverage=89%, E-value=1e-109, Identity=69%"; Hit description =Putative uncharacterized protein
  Pfam annotation: Domain name=peroxidase; Domain location=68-311; Score=364.1; E_value=2.2e-106; Accession=PF00141.14; Description =Peroxidase
MATKLAVLGTLVLALLGPVSCQQQQAGYGYGAGSPTPTTSPPPPPPAAGAGLSVGYYKDKCAEAETIVQEAVRAADAGTKAGLLRLFFHDCFVQGCDASVLLKPDNDTNPQPEMLGVPNLSLRGFEVIDAAKAAVEARCPGVVSCADIVAFAGRDASAFLSGGAINFTMPAGRYDGTVSLANETLPNLPPPFADVRRLKAMFAAKGLDTVDMVALSGAHSIGRSHCSSFSSDRLPPSNTSDMDPAFAATLQASCASSANGAADNTVVQDYRTPDQLDNQYYRNVISHKVLFASDAALLKSSDTLGLVYVAAFSQKLWQDKFGEAMVKMGGVQVKTAANGEIRRMCGYVNKP

SEQ ID NO: 82490 - protein, 64 aa, Zea mays
  Coding DNA Sequence Number=SeqID_39115
METSRRSQSQYAGVVVVVLLLLLVIVVTGHGINTTSTDDSKLPPCLGVDIEPARLGSTELELAR

SEQ ID NO: 82491 - protein, 624 aa, Zea mays
  Coding DNA Sequence Number=SeqID_39116
  Gene Ontology: Mol. function=oxidoreductase activity; Cellular component=membrane; Biological process=response to oxidative stress
  Homolog annotation: Hit_ID=A3BMM8; Match level="QueryCoverage=46%, HitCoverage=87%, E-value=1e-106, Identity=69%"; Hit description =Putative uncharacterized protein
  Pfam annotation: Domain name=peroxidase; Domain location=97-340; Score=362.6; E_value=6.6e-106; Accession=PF00141.14; Description =Peroxidase
  Subcellular localization annotation: CTP_CleavageSite=102; ConfidenceScore=5.12e-01
MATKLAVLATLVLALLGPVSCQQQQAGYGYGAGSPTPTSSPPPPAAYPPMTTSPTPSSPTAYPPPPPPTPSPPPPAAGAGLSVGYYKDKCAEAETIVQEAVRAADAGTKAGLVRLFFHDCFVQGCDASVLLKPDNDTNPQPEMLGVPNLSLRGFEVIDAAKAAVEARCPGVVSCADIVAFAGRDASAFLSGGAINFTMPAGRYDGTVSLANETLPNLPPPFADVRRLKAMFAAKGLDTVDMVALSGAHSIGRSHCSSFSSDRLPPSNTSDMDPAFAATLQASCASSANGAADNTVVQDYRTPDQLDNQYYRNVISHKVLFASDAALLKSSDTLGLVYVAAFSQKLWQDKFGQAMVKMGGVQVKTAANGEIRRMTLGTGQHSAKTCLPSVKHSTKKPLGKGPSAAVLKLTAVGLCREPRTGTRQRGFFARVPNTGHSAKKALPSVFYRNSANHIFVFYILATKLFVAITLGKESRPGHRHRFFAEWNVSGTRQRSTLCRVPDLALGKEPDMGTLPDGFFAKCPRWHSAKVDPLPSVSRQTLGKDNSFAECHQGHSAKPPSPSPGAVAAGFLCRVPEKKHSAKKALPMHYVSSLLCRVRHSAKPLPSASALGKACDSGSVCSIASL

SEQ ID NO: 82492 - protein, 110 aa, Zea mays
  Coding DNA Sequence Number=SeqID_39117
MTEIYTLIDHSSIVTQLSRSPSSKAVVEDSDIGTDRNPPPLLTLRSNMVNHNRIGLIKVGFDLRSNTLALEVSVQLGEPVPKSAMEMVECCPLSQVEVALGVFCNMTIGM

SEQ ID NO: 82493 - protein, 322 aa, Zea mays
  Coding DNA Sequence Number=SeqID_39118
  Gene Ontology: Mol. function=oxidoreductase activity; Cellular component=membrane; Biological process=response to oxidative stress
  Homolog annotation: Hit_ID=A3BMM8; Match level="QueryCoverage=83%, HitCoverage=79%, E-value=6e-95, Identity=65%"; Hit description =Putative uncharacterized protein
  Pfam annotation: Domain name=peroxidase; Domain location=47-282; Score=348.0; E_value=1.6e-101; Accession=PF00141.14; Description =Peroxidase
  Subcellular localization annotation: CTP_CleavageSite=70; ConfidenceScore=5.12e-01
MMSPSKLAVLTVFAFALLGSVSCQAGTYYYTPPAPATPQPPACPPPVTPAGLVRLFFHDCFVRGCDGSVLLDTFSNDTSLTPEKFGVPNFPSLRGFEVIDAAKAEMEAACPGTVSCADIVAFAARDASYFLSGGGISFAMPAGRYDGTVSLASETLPNLPPPFAGFDQLVKMFDDKGLDALDMITLSGAHSIGRSHCSSFTRDRLPPSNTTDMDPAFAATLQASCASANGTDNTVMQDFATPDVLDNQYYKNVLAHKVLFTSDAALTTNFTSNNLVRAYADFVPYLWQQKFAKAMVKMGGVEIKTAANGEIRKTCRKINSRP

SEQ ID NO: 82494 - protein, 159 aa, Zea mays
  Coding DNA Sequence Number=SeqID_39119
MAPRTLYDDGGSQPPYGSKRTILGGGVLSEPEGSPAPVSPPASSDDSDDSQGIAAEVWTYIRAVERAGLEGSDESECSSDEEDSDGGDEGEDDDDDDDDDDDDDDDGWGGGDGSRDSTKGSSRGSTKGGGGSSRDSTKGSSRGSTKGGGGGRGRGRASG

SEQ ID NO: 82495 - protein, 790 aa, Zea mays
  Coding DNA Sequence Number=SeqID_39120
  Gene Ontology: Mol. function=nucleoside-triphosphatase activity; Cellular component=mitochondrial matrix; Biological process=ATP -dependent proteolysis
  Homolog annotation: Hit_ID=A2Z3F5; Match level="QueryCoverage=100%, HitCoverage=100%, E-value=0.0, Identity=81%"; Hit description=Lon protease homolog
  Pfam annotation: Domain name=AAA; Domain location=404-597; Score =51.9; E_value=2.2e-12; Accession=PF00004.20; Description=ATPase family associated with various cellular activities (AAA)
  Pfam annotation: Domain name=AAA_3; Domain location=404-538; Score= -16.8; E_value=0.023; Accession=PF07726.2; Description=ATPase family associated with various
  Pfam annotation: Domain name=AAA_5; Domain location=404-537; Score= -1.1; E_value=0.0035; Accession=PF07728.5; Description=ATPase family associated with various
  Pfam annotation: Domain name=LON; Domain location=11-254; Score= -64.9; E_value=0.032; Accession=PF02190.7; Description=ATP-dependent protease La (LON) domain
  Pfam annotation: Domain name=Lon_C; Domain location=571-780; Score =373.1; E_value=4.6e-109; Accession=PF05362.4; Description=Lon protease (S16) C-terminal proteolytic domain
  Pfam annotation: Domain name=MMR_HSR1; Domain location=403-520; Score= -19.5; E_value=0.065; Accession=PF01926.14; Description=GTPase of unknown function
  Pfam annotation: Domain name=MobB; Domain location=403-530; Score= -39.6; E_value=0.1; Accession=PF03205.5; Description=Molybdopterin guanine dinucleotide synthesis protein B
  Pfam annotation: Domain name=OCD_Mu_crystall; Domain location=403 -656; Score=-143.6; E_value=0.092; Accession=PF02423.6; Description =Ornithine cyclodeaminasemu-crystalli
  Pfam annotation: Domain name=cobW; Domain location=403-533; Score= -79.5; E_value=0.096; Accession=PF02492.10; Description=Cobalamin synthesis proteinP47K
  Pfam module annotation: Pfam domain module=AAA::AAA_3::AAA _5::LON::Lon_C::MMR_HSR1::MobB::OCD_Mu_crystall::cobW; Domain location=404-597::404-538::404-537::11-254::571-780::403-520::403 -530::403-656::403-533
MSDSPVELPSRLAVLPFRNKVLLPGAIVRIRCTNPSSVKLVEQELWQKEEKGLIGVLPVRDSEATAVGSLLSPGVGSDSGEGGSKVGGSAVESSKQDTKNGKEPIHWHSKGVAARALHLSRGVEKPSGRVTYIVVLEGLCRFSVQELSARGPYHVARVSRLDMTKTELEQAEQDPDLIALSRQFKATAMELISVLEQKQKTVGRTKVLLDTVPVYRLADIFVASFEISFEEQLSMLDSVHLKVRLSKATELVDRHLQSILVAEKITQKVEGQLSKSQKEFLLRQQMRAIKEELGDNDDDEDDVAALERKMQNAGMPANIWKHAQREMRRLRKMQPQQPGYSSSRAYLELLADLPWQKVSEERELDLRVAKESLDQDHYGLTKVKQRIIEYLAVRKLKPDARGPVLCFVGPPGVGKTSLASSIAKALNRKFIRISLGGVKDEADIRGHRRTYIGSMPGRLIDGLKRVSVSNPVMLLDEIDKTGSDAMVKLVIERYTREAGVRNLERNLAALARAAAVKVAEQVKTLRLGKEIQPITTTLLDSRLADGGEVEMEVIPMEHDISNTYENPSPMIVDEAMLEKVLGPPRFDDREAADRVASPGVSVGLVWTSVGGEVQFVEATAMVGKGDLHLTGQLGDVIKESAQLALTWVRARAADLNLSPTSDINLLESRDIHIHFPAGAVPKDGPSAGVTLVTALVSLFSNRKVRADTAMTGEMTLRGLVLPVGGVKDKVLAAHRYGIKRVILPERNLKDLSEVPLPILSDMEILLVKRIEEVLDHAFEGRCPLRSRSKL

SEQ ID NO: 82496 - protein, 315 aa, Zea mays
  Coding DNA Sequence Number=SeqID_39121
MPIRPLQLYADGGYQLRIRRLEAPEPLYRARGRSGTDSAFYIRPYVAFPQGGGGECAMLPSMGTEHGVSGELQAATGAPVARRVGLGSRLACQKSEKRVHLARLHAACMAARPFCPLVWAKMGGRLNATPWELVPLSHRSASRIFITQPGRTPSPAVTRDGDLQLDGGGKRAGLRPLPLPQPQGFSSPRPGRGECRVGVGPCVGGGPLLHSVMGGEAGIARGVRQLQRAWSSAASGFGATCGVGVYHGSRKRFFRRRGGRDRPRADLQLLRPSARPCLTSFGTGGGLLAAASTLRSALPLFGPPEQKSPSSPLLE

SEQ ID NO: 82497 - protein, 25 aa, Zea mays
  Coding DNA Sequence Number=SeqID_39122
MARRRSQKNKKTQENPTRKECDKCL

SEQ ID NO: 82498 - protein, 300 aa, Zea mays
  Coding DNA Sequence Number=SeqID_39123
  Gene Ontology: Mol. function=pantothenate kinase activity; Cellular component=cytoplasm; Biological process=coenzyme A biosynthetic process
  Homolog annotation: Hit_ID=A2Z3F2; Match level="QueryCoverage=79%, HitCoverage=28%, E-value=1e-115, Identity=88%"; Hit description =Putative uncharacterized protein
MEKFVQKGTQIIAPVPMGVPATTGMGGFERPTAKGDILRSDASAALNVGVLHLVPTLDVFPLLEDPKTYEPNTIDLDQDEFKYWFKILSDHSPDLVDKAVASEGGTDDAKRRGDAFAHAFSAHLARLMEEPAAYGKFGLANLLELREECLREFQFVDAYISIKQRENEASLAVLPDLLMELDSMNEIDDFDMFKKRMLTDRKDQSYKRALLFVDNSGADVVLGMLPLARELLRHGTESSCVFREKTDSFEGEADLSSLASQRPATPVRHKSHEEFTFSRSPAFPNLPHDLKVVEPMKKPS

SEQ ID NO: 82499 - protein, 204 aa, Zea mays
  Coding DNA Sequence Number=SeqID_39124
  Pfam annotation: Domain name=IQ; Domain location=115-135; Score=27.0; E_value=7.2e-05; Accession=PF00612.18; Description=IQ calmodulin -binding motif
  Pfam annotation: Domain name=IQ; Domain location=73-93; Score=23.9; E_ value=0.00059; Accession=PF00612.18; Description=IQ calmodulin -binding motif
  Pfam module annotation: Pfam domain module=IQ::IQ; Domain location =115-135::73-93
  Subcellular localization annotation: CTP_CleavageSite=50; ConfidenceScore=5.17e-01
MDRRSMTPGIRARLSSPPPAAHPSPPPAAAPSAAATPSHPPSTTLDAFTRLEEKWDQFVVMFHRYKEKTEKELQAAVRLQAAARGFLARCQVQSLRGEKHLAVASRATPWPSSHEQAVVRLQAAVRGFLVRRAVRKLHLLISSSLHQLAACAPNHQVSSILFEPPAEVEIWLEDELVLKGGGDVMGIIGSERQQPGWDKAREQD

SEQ ID NO: 82500 - protein, 109 aa, Zea mays
  Coding DNA Sequence Number=SeqID_39125
MAGIAALVAAQLRSSFRYMVINTKSLEHILPAPQVVRPRVANSCAIPPRCSRRIARIGVENLAAFSDGQTRFKKVMRVLHVIDENEGIDQEALDRYNKLFDQPLSPSHI

SEQ ID NO: 82501 - protein, 477 aa, Zea mays
  Coding DNA Sequence Number=SeqID_39126
  Gene Ontology: Mol. function=pantothenate kinase activity; Cellular component=cytoplasm; Biological process=coenzyme A biosynthetic process
  Homolog annotation: Hit_ID=A2Z3F2; Match level="QueryCoverage=90%, HitCoverage=51%, E-value=0.0, Identity=91%"; Hit description =Putative uncharacterized protein
  Pfam annotation: Domain name=Fumble; Domain location=83-430; Score =684.8; E_value=6.6e-203; Accession=PF03630.5; Description=Fumble
MAANNSDPIQDQLGEGGAGVRHEAEEEEVGEETSSAAAQATATTMLPRSSSRPQLDLSGAAIHGTLEDRNPTILLPNQSDDISHLALDIGGSLIKLVYFSRHAELSTEDKHKISTKRRLGMFNGGRRSYPILGGRLHFVKFETGKLNECLDFISSKQLHRGGIDSPSWRSGAQSDDIVIKATGGGAFKYADVFKERLGVSLEKEDEMDCLVAGANFLLKAIRHEAFTHMDGQKQYVQIDQNDLFPFLLVNVGSGVSIIKVDGHGKFQRVSGTNVGGGTYWGLGRLMTKCKSFDELLELSQRGDNSTMDMLVGDIYGGLDYSKIGLSASTIASSFGKIISENKELSDYRPEDISLSLLRMISYNIGQISYLNALRYGLKRIFFGGFFIRGHAYTMDTISFAVHFWSKGEAQAMFLRHEGFLGALGAFMSYEKHGLDDLRVHHLVERFPMGAPYVGGKIHGPPLGDLNEKARASSPDHA

SEQ ID NO: 82502 - protein, 473 aa, Zea mays
  Coding DNA Sequence Number=SeqID_39127
  Gene Ontology: Mol. function=DNA photolyase activity; Biological process=DNA repair
  Homolog annotation: Hit_ID=Q652J5; Match level="QueryCoverage=90%, HitCoverage=68%, E-value=1e-170, Identity=65%"; Hit description =Deoxyribodipyrimidine photolyase family protein-like
  Pfam annotation: Domain name=Abhydrolase_1; Domain location=251-456; Score=47.0; E_value=6.8e-11; Accession=PF00561.11; Description =alphabeta hydrolase fold
MSFSKKPAFGKAPPAETQTDMQVILQMSGTRGSLPTLEELKCFLKEITPEDNWAPLKRMPARSILKRTISQRKIKSNATLSTINEENIDDAATMDSVASGKRIINSKFASENSLEVSGGTEITLDALAAYLKYLEGTGNASWQELHDKVRLAETRYGASFYILFGPAIQLGVISRRKAYTETIQYEKDRNAGFLSPFGYSTPTVTSAVDAICSMEYTFLGNEGPPVLLVHGFGAFLEHFRDNIDKIAATGHRVWAITLVGFGKSEKPNVNYSELFWSELLRDFIVEIVREPVHLLGNSIGGYLCAIAAGLWPSLAKSLVLLNSAGSVVPNYSFIPLSEERRTSWISRLQAQLLLLFLRSRAEGILKEYYPTSYDPGAAKVLESVFNFNLSIPLNFLFDSFGGKILVIQGMKDPLTKSEAFVTMLREHCSKVQIRELNAGHAPHDEVPDEVNTILCKWVEQIEVKPALEKTKAI

SEQ ID NO: 82503 - protein, 198 aa, Zea mays
  Coding DNA Sequence Number=SeqID_39128
  Homolog annotation: Hit_ID=A3AQ03; Match level="QueryCoverage=34%, HitCoverage=42%, E-value=6e-07, Identity=45%"; Hit description =Putative uncharacterized protein
MCCVANENDSGSTNEDEEEERSFVHLYARLSQEDKAVMLRLLERAREQSEARQRLEDVLSIKMQHFDELTKEHEELKCSHVDLVQSKSSFELEFAGTNDDSYQKLKEENERLKRSLTQLKGKCIAQPSQDNCDHMVKKLETGTTVACTTSLEENVKNLRIAKRKKQKMKFNTSSKSLNHASTKGNIQGNPKLQLVLER

SEQ ID NO: 82504 - protein, 140 aa, Zea mays
  Coding DNA Sequence Number=SeqID_39129
  Homolog annotation: Hit_ID=Q651A1; Match level="QueryCoverage=89%, HitCoverage=17%, E-value=1e-34, Identity=62%"; Hit description =Putative uncharacterized protein B1331F11.20
MASAKLLYIVVVDENASSFRYTRSLLHSTLQLMGCKPRHAFEISRRVFDVIRGDHQGHGDTATSARVQRYEVAEATPTASPRQFQFELYKRRTTVLLPRDLFLDLVLDALALYKYVAPNQRADLMLACRTDNSEHAKVAW

SEQ ID NO: 82505 - protein, 19 aa, Zea mays
  Coding DNA Sequence Number=SeqID_39130
MPVWELSKKLMDETHGYDL

SEQ ID NO: 82506 - protein, 123 aa, Zea mays
  Coding DNA Sequence Number=SeqID_39131
MVTPTPTSAFHGRARSTLLDAAIQADLNPALHGRYAHRPLLVDPNPTTTWIHSAQCCNPSRPRPGSPWKGLGTGFHISASSRMDIIVNGGHRNPKLSSVDTKSNPFLHIARLGSEDYIQVIPS

SEQ ID NO: 82507 - protein, 142 aa, Zea mays
  Coding DNA Sequence Number=SeqID_39132
  Subcellular localization annotation: CTP_CleavageSite=26; ConfidenceScore=5.06e-01
MTKNGNGEGTSSSVVERWQQSLVENSASARQRGVGNQMTSRWWSSRKQGWLWRAPTSAHDGRWRAQPQSSVNGNEWRLWHIAASTTERRHDEQSECELEELSAAARGDAQRHGTSTWYDGGGKQRSDDSGEMQRQQGDTATE

SEQ ID NO: 82508 - protein, 628 aa, Zea mays
  Coding DNA Sequence Number=SeqID_39133
  Gene Ontology: Mol. function=nucleotide binding; Cellular component =plasma membrane; Biological process=defense response to fungus
  Homolog annotation: Hit_ID=Q650Z3; Match level="QueryCoverage=95%, HitCoverage=98%, E-value=0.0, Identity=79%"; Hit description =Putative phragmoplastin 12
  Pfam annotation: Domain name=Dynamin_M; Domain location=222-491; Score=189.3; E_value=9.8e-54; Accession=PF01031.11; Description =Dynamin central region
  Pfam annotation: Domain name=Dynamin_N; Domain location=37-213; Score= 297.8; E_value=2.1e-86; Accession=PF00350.14; Description=Dynamin family
  Pfam annotation: Domain name=GED; Domain location=508-600; Score =77.7; E_value=3.9e-20; Accession=PF02212.9; Description=Dynamin GTPase effector domain
  Pfam annotation: Domain name=MMR_HSR1; Domain location=35-214; Score =4.8; E_value=0.00039; Accession=PF01926.14; Description=GTPase of unknown function
  Pfam module annotation: Pfam domain module=Dynamin_M::Dynamin _N::GED::MMR_HSR1; Domain location=222-491::37-213::508-600::35-214
MESLIGMMNRIQRACTALGDHGGGSDLPTLWESLPTIAVVGGQSSGKSSVLESIVGTDFLPRGSGIVTRRPLVLQLQQTEDGSQEYAEFLHMPKRRFSDFALVRQEIADETDRLTGKTKQISPVPIHLSIYSPKVVNLTMIDLPGLTKVAVEGQSESIVQDIENMVRSYVDKPNCIILAISPANQDIATSDAIKLSKEVDPTGERTFGVLTKLDLMDKGTNALDVLEGRAYRLQNPWVGIVNRSQADINRKVDMISAREKEREYFETSPDYAHLSSRMGSGYLAKLLSQHLESVIKAHIPSITATINKTIDELESELDIIGRAVAADPGAQLYTILDLCRAFDRVFKEHLDGGRSGGDRIYGVFDHKLPAAFKKLSFDRYLSVQNVKKVVSEADGYQPHLMAPEQGYRRLIEKGINYFRGPAEATVDAQLRRFPTLQAAIATAANEALERFREDGRSTALRLVDMEAAYVTVEFFRKLPQDPPADAPASKAGGKPSAEPAAAPPPDRYGDGHFRSIASNVSQYIRMVGDELLQKIPKAAVHCQVREAKRSLLNHFYVQMGKKEAGEFGHMLDEDPAMMERRQQCFKRLELYKSARDEERINPRAKTKGQDKCNVTFSFYDFEKPRFVD

SEQ ID NO: 82509 - protein, 272 aa, Zea mays
  Coding DNA Sequence Number=SeqID_39134
  Gene Ontology: Mol. function=transferase activity, transferring glycosyl groups; Cellular component=integral to membrane; Biological process=cell wall organization and biogenesis
  Homolog annotation: Hit_ID=A2Z4A7; Match level="QueryCoverage=74%, HitCoverage=42%, E-value=7e-64, Identity=62%"; Hit description =Putative uncharacterized protein
MSGGTPDSPIIVLIGTWRTTRENSATTRVEWDTLGQVIRKATERLPYPKAASGKHVATERLPYPKANLFRKVLLEILRSDRVSLGKKFHLLYAFFFVRKVVAHLVTFLFYCVVIPACVLVQGDVRLPKYVAMYVPALITLLNAACTPRSCHLLIFWILFENVMSMHRSKAAVIGLLEASRANEWVVTDKLGSSKAAAAVVAKKKKQQLVRSRCCSTRREMHVLELAMGACLLYCAVYDIVFFGRDHYYMYLLLQLAAAFIVGFGYVGTSAPS

SEQ ID NO: 82510 - protein, 129 aa, Zea mays
  Coding DNA Sequence Number=SeqID_39135
MTGDKQRQKLKQKPSSKISNTYIKKVDKKAATPYLIKKKKNGKVIAIKANKQANKGKGAKRIWVPKEIISTMKSTKKICVFIYLVSSLPFMPSITFDIYFYLNVCILGVGDLFSNAINQEQGNIKTVKC

SEQ ID NO: 82511 - protein, 319 aa, Zea mays
  Coding DNA Sequence Number=SeqID_39136
  Pfam annotation: Domain name=zf-CCHC; Domain location=42-59; Score =27.9; E_value=3.8e-05; Accession=PF00098.14; Description=Zinc knuckle
MALVSGEERVESLGDEELVLVASRFTRFQNNRMSRRRRGSKDGCYNCGDPDHFIASCPKKGKLESGPRDHHSGRRKGKYSSSKYKSKGGFNKEALKKKYLQKEKIKECAFLASLSDLNHDSNNVISSSSDEETERRVEDKLNGLCFIADTVGGFCTLALGEDAVGTSNDKDIGDDTTSEVLPSADDFAAEIEALNTALASQDKLLRQATRERREFRSKYESTLRELESARASVEVSDETECDECACRRFETGGSLSRRVSVPRAPAQMGRARGRTRRGERSEEGGVRRERERWESRGLRVRPAPRSGALAVGGYKRPRG

SEQ ID NO: 82512 - protein, 265 aa, Zea mays
  Coding DNA Sequence Number=SeqID_39137
MARTEKEEGDVLLFGAGKGSCRASAAMEELLLATPHTQRRQRPRGRGACTRGLGHGEEQGAGVLPRSSAMAASAGRPGKKQGAWAPWLLVAPCCCRPREHSEMGKKESSGVAPWAGKLLAMGAHNHGVEELPAWRGFARGSGAVARCARPARRGDVARPPVAWRGLAPALLAVAAWLACPRLGAALRPPCPPWRRGSPARDLGAARPWRPELGRDARRVPGVLRRPALAAGARPWPRRGFGAVCSPARHDLLAWLARDVAAWRAP

SEQ ID NO: 82513 - protein, 639 aa, Zea mays
  Coding DNA Sequence Number=SeqID_39138
  Gene Ontology: Mol. function=protein binding; Cellular component =integral to membrane; Biological process=phagocytosis, engulfment
  Homolog annotation: Hit_ID=A7PFR7; Match level="QueryCoverage=97%, HitCoverage=96%, E-value=0.0, Identity=75%"; Hit description =Chromosome chr11 scaffold_14, whole genome shotgun sequence
  Pfam annotation: Domain name=Cytochrom_B_C; Domain location=474-555; Score=-14.8; E_value=0.033; Accession=PF00032.8; Description =Cytochrome b(C-terminal)b6petD
  Pfam annotation: Domain name=EMP70; Domain location=55-597; Score =1116.2; E_value=0; Accession=PF02990.7; Description=Endomembrane protein 70
  Pfam module annotation: Pfam domain module=Cytochrom_B_C::EMP70; Domain location=474-555::55-597
MEPSAWAVAFAALCIVALAPPASGFYLPGVAPNDFEKKDPLPVKVNKLTSIKTQLPYSYYSLPFCKPDTIVDSAENLGEVLRGDRIENSPYTFEMREPQMCQVVCKISVGEKEAKLLKEKIEDEYRVNMILDNLPLVVPIQRVDQEGAYFYQHGFHVGAKGKYSGSKDEKYFIHNHLSFTVKYHRDEQRDVSRIVAFEVKPYSVKHEYEGQWNDKKTRLTTCDPHAQRIITSSESPQEVEVGKDIIFTYDVDFKESDIKWASRWDSYLLMTDDQIHWFSIVNSLMIVLFLSGMVAMIMLRTLYRDISKYNQLETQEEAQEETGWKLVHGDVFRPPSNSDWLCVYVGTGVQFFGMLLVTMVFAVLGFLSPSNRGGLMTAMLLLWVFMGLLAGYSSSRLYKLFKGSEWKNIALRTAFTFPGSVFAIFFFLNALIWGQKSSGAVPFTTMFALVLLWFGISVPLVFVGSFLGFKKPTIEDPVKTNKIPRQIPEQAWYMNPIFSILIGGILPFGAVFIELFFILTSIWLHQFYYIFGFLFLVFLILIVTCAEISIVLCYFQLCSEDYLWWWRSYLTSGSSALYLFLYATFYFFTKLEITKFVSAVMYFGYMLIASYAFFALTGTIGFYACFLFTRLIYSSVKIE

SEQ ID NO: 82514 - protein, 244 aa, Zea mays
  Coding DNA Sequence Number=SeqID_39139
  Gene Ontology: Mol. function=protein binding; Biological process =protein amino acid phosphorylation
  Homolog annotation: Hit_ID=A2Y5T8; Match level="QueryCoverage=31%, HitCoverage=8%, E-value=4e-17, Identity=58%"; Hit description =Putative uncharacterized protein
MRVLVEVEGHVHQNSLQTLNGNQSSGSLPDEIGYLMNFNRLQIKDNNISGPYLNSFANLIRIKHLLVDNNNLFGPLPPELVDTRSLLAILTQCFFNELSSVQCDLFIVFTLEQVLGDKDRTPKKHASLLLQLLFEMVVASCLEESGPPLLKVVWYSKLVLFWIASAINIIIVLELNEHIVSGNMTVDTILGPRTIQHETVVSEAAAATPAAPAINVDACSIHSKAFQYCNVDMLDECRGGGVSA

SEQ ID NO: 82515 - protein, 74 aa, Zea mays
  Coding DNA Sequence Number=SeqID_39140
MAHGGSGSTEVLRRAIRPPPEDILARKDHGDVRHGKIVNRPNFSLSPADLIDIPSLARSIGNRMMKLKNDELKP

SEQ ID NO: 82516 - protein, 46 aa, Zea mays
  Coding DNA Sequence Number=SeqID_39141
MAPLASPDSTSPNGTATYRCRTRVCDARQVLDEIPHACDDMALFAS

SEQ ID NO: 82517 - protein, 154 aa, Zea mays
  Coding DNA Sequence Number=SeqID_39142
MGCNTPVAGLQQQTETEDPNIEQVRTRPRNRAASTATQTLQNQRPISGTEREGDQTDARQASKRSCTAPAPAVPSDPPIPILQLKVQAGTASLFAMIRMEHGWFGEEFQDFLDHNDGTSCYAVSIEDIDNATAVEYNMDEGDTSARVFPISFDV

SEQ ID NO: 82518 - protein, 157 aa, Zea mays
  Coding DNA Sequence Number=SeqID_39143
MHRGPYPIPDKLLNKVAPATHADSAPKGSFDFIILRYLKLRLVDLDLESTQDLRHESMRRQMKASGEKGLKDDQLAFWLGDLLRPRDTPHSTAKISKLLHVLHTDRGHPRHAEFHCVTRMQLLRRHIAQCCNTPGVYILLDNEYRFKHVISVDKTDF

SEQ ID NO: 82519 - protein, 277 aa, Zea mays
  Coding DNA Sequence Number=SeqID_39144
MSTSRIARGLRIFPYGQNIAAVVSVVMNKDRQDAAQKRRAVIRLPDPRREAKRARGSAKDSAPCGSQPAPTAKPAAPGSSKVLESAKAVVAGGTKPALGKAAKARELPSPGKRVADFGTNISVDDYFVDVAAEVERLRAQHADVVREKSAAESKNRRLAEKVAALEAEKTDLRRELVEERREANQAIAEAQAAQAEAKVARAEGSLANQRAEEWEVRFNALRGRVDKAEASTRSEVERTLALLVILMKQYVPKGETGAGLVFLLHIYLVVAGKAIKE

SEQ ID NO: 82520 - protein, 39 aa, Zea mays
  Coding DNA Sequence Number=SeqID_39145
MQGHPGSSGPTCCPHCIQCSGGDAGNIEDFEEFQDYDEF

SEQ ID NO: 82521 - protein, 210 aa, Zea mays
  Coding DNA Sequence Number=SeqID_39146
MAQRLTRSTCAGGAPNSGEHDCAFPVARVLSSSLGKLYSLPGKLPRGLDQAEEGGEWFGHGGCPRAALAGRGEVVGARDELQGVGRGTGHATGKRLGTGAGFIAVARAWSQAAADARGFAHGRALSAPPSVSLRRTRVCLLLPWFNGRLEHLSVKILAKPLCTPSPLKGISSRDFFGRVLWRSAMKVALKWVSGHISVAEIHGTHCELLT

SEQ ID NO: 82522 - protein, 151 aa, Zea mays
  Coding DNA Sequence Number=SeqID_39147
MVPRRPAPARLLPTLLDTRVPPLQQSCLPLLLLSFIDESSSDPWCKSLRAPIGPSRGLGTQQQPRDLYNMCADPIHAAPVRCRLLRRTLSPPLSLCARDQIALPPLTVDHRPFYDRRRARAPYVASPEPATVDPRLHRTSAVLQVSRSSHS

SEQ ID NO: 82523 - protein, 160 aa, Zea mays
  Coding DNA Sequence Number=SeqID_39148
MCQKLVSLAGTLAGMQKPGRCGGEVHRVGDHRPSRECKGSIFLIVTKGDFLAAQHLSEELEKERLLLSEMVNAIQGRFGVLPSPKSELVVSCLEGLTDQFWELEKESFCHGICQDFIVIMSHYEGDRAKGAKQRLLRRLELLALAYAFRRLESAFPLKQA

SEQ ID NO: 82524 - protein, 164 aa, Zea mays
  Coding DNA Sequence Number=SeqID_39149
MAQRLTRSTCVGGVLNSGEHDCAFPVAGVLGQLWRVAERSPELWASSGVLDAGQGMQRGRRLGTGASFIAVARAWSRAAADGRGFAHGLALSTPPSPSDLDGTGERLWMSFSLGGMPTLSLQTSLDLQERLVATNTVLKDAHELELELADLREGVYEVVDFVRA

SEQ ID NO: 82525 - protein, 284 aa, Zea mays
  Coding DNA Sequence Number=SeqID_39150
MNTNHVTILQLGQGQLLTSISPYPDHILSWDSHQKGRIQCKEETVHSGFAKIFTLRCSNRPLNHDRSKHTRVRRGLTLGGVLRASPCANPLPSAAARDHARATAIKLAPVPSLLPRCIPCPASNTPELAHSSGDLSATRQSCPRTPATGKAQSCSPEFRTPPTHVDRRTYSYSLHSIDCNLADGEYVLVPEQGVAQEVAPDPAPEPALEDLPAPALEGKPRHIPSRDLRRGLPFRLWWVQVRSLHDGSRGSLEDMVAGVTWPSILPPGWTVEWDPASAEEEHEE

SEQ ID NO: 82526 - protein, 50 aa, Zea mays
  Coding DNA Sequence Number=SeqID_39151
MSMEGGALGSAAVIDSAMAEAGAVHPDLALALQMSKVFEERTFVSCILNS

SEQ ID NO: 82527 - protein, 132 aa, Zea mays
  Coding DNA Sequence Number=SeqID_39152
  Gene Ontology: Mol. function=oxidoreductase activity; Cellular component=chloroplast; Biological process=metabolic process
  Homolog annotation: Hit_ID=Q8W3L2; Match level="QueryCoverage=66%, HitCoverage=13%, E-value=3e-16, Identity=55%"; Hit description =Zeaxanthin epoxidase
MSGASAKREIGTGEKPATSHGKAPSGESANCWLLKVRDQHIGGLAFALAARRKGFEVLVLERDVSAVCGEGRYRGPIQLQSNALAALEARVRLPARCPRASGFCTAVGQGDTTDLPLRQRRGEEGHGEGGGG

SEQ ID NO: 82528 - protein, 385 aa, Zea mays
  Coding DNA Sequence Number=SeqID_39153
  Gene Ontology: Mol. function=gamma-glutamyl hydrolase activity; Cellular component=extracellular region; Biological process =glutamine metabolic process
  Homolog annotation: Hit_ID=A2Y6J8; Match level="QueryCoverage=74%, HitCoverage=81%, E-value=1e-136, Identity=83%"; Hit description =Putative uncharacterized protein
  Pfam annotation: Domain name=Peptidase_C26; Domain location=56-271; Score=119.2; E_value=1.2e-32; Accession=PF07722.4; Description =Peptidase C26
MDSRCPHLLLLLPLLLLAALLPPPSSGVPEVIWLPTSGGAGPLSCAPPDPAVYDRPVIGIVSHPGDGAGGRISNTTATSYIGASYVKFVEAAGSRVIPLVYNEPEDRLLEKLSLLNGVLFTGGSEKEGVYFDTIKRVFQYVLDKNDAGEPFPLFAQCLGFELVSMIVSKDNNILEAFDAQDQASTLQFPSYALEGSVFQRFDTDLIKKVSTNCLVMQNHRYGISPRRYRENDALSSFFKILTTSPDENGKVYVSTVQANNYPITCTQWHPEKAIFEWRKPMIPHSEDAVQVTQHFANHFISQARKSPNRPPADKVLDNLIYNYSPTFTGKKSFSEFKSFSKSGEGRMFLDLIHEIHRIQFVWSDVFAMALWLGSSILRRERHRVT

SEQ ID NO: 82529 - protein, 163 aa, Zea mays
  Coding DNA Sequence Number=SeqID_39154
MKKVAVVATILSGIWNQVEQLQSELRYRNDLWVADAVIRYLQDQLAKRDLVLDWTGNSRLLTWAKEAKARDCVKELSLVTDNLQVCGNTLHEEVHVLYSQLHPNVPANPVGMEARPSHVAGEALHGELDLFRPPPSMKLVDEWSSTPDSKATKSEKKWLTKCP

SEQ ID NO: 82530 - protein, 130 aa, Zea mays
  Coding DNA Sequence Number=SeqID_39155
MDRAQVLWKGTPGREGSGWGLATRTGRMRNGSCWSADRLGAWTVVARAGGQSPGARGAPGSRRRRGRYPRASGAPLGALRHNGLRAPHPTRLETRTKESDMRASRRVQKPGMRKEADEREALTGRTAGRP

SEQ ID NO: 82531 - protein, 203 aa, Zea mays
  Coding DNA Sequence Number=SeqID_39156
  Homolog annotation: Hit_ID=Q0WWS3; Match level="QueryCoverage=20%, HitCoverage=51%, E-value=5e-17, Identity=95%"; Hit description =Putative uncharacterized protein
MKNVAKCDTWCELQNPANHRVFERKLRPKPSGGGHVCLGVTPKDTPNTPPRGARNVASGPPRRRARWAEAGAAGEPRRAQHVVGDIKLFSVQRPGARPAIRPYGPIERPSLSSDRDPRGVLSDGPGPSSLERDAWEGFELEHACRDPKDGELCLSGAKPEETLVEARSDTDDSWSPHEFYRVKPMIRGIGGATPSTYSQTLNR

SEQ ID NO: 82532 - protein, 31 aa, Zea mays
  Coding DNA Sequence Number=SeqID_39157
MTTGPHTSLKMGAGSRKSSMANSLSALVAYP

SEQ ID NO: 82533 - protein, 233 aa, Zea mays
  Coding DNA Sequence Number=SeqID_39158
  Homolog annotation: Hit_ID=A5B938; Match level="QueryCoverage=14%, HitCoverage=29%, E-value=4e-07, Identity=82%"; Hit description =Putative uncharacterized protein
  Subcellular localization annotation: CTP_CleavageSite=9; ConfidenceScore=5.18e-01
MGAAKKNPRRLGRQGTPVLPPAPRSGRPAFRSPGSGYTLIDTTLGNGYLGSRIDEERSKMRYLRPGARPAIRPYGPIERPSLSSEREPRRETDSEQVPRGKDENDFEKRVKECLKLPGGKRMGAGDAHRPYAERLLLVRRSARAWTVVAHAGGQSPWALGAPGSRRRRGRYPRASGAPLGALRRNGLRAPHPTRLETRTKESDMRASRRVQKPGMRKEADEREALTGRTAGRP

SEQ ID NO: 82534 - protein, 104 aa, Zea mays
  Coding DNA Sequence Number=SeqID_39159
  Subcellular localization annotation: CTP_CleavageSite=58; ConfidenceScore=5.46e-01
MVAVHASWRWTVLVPATVAPREMALPCRSSFFAQQGFVLSAALQVRVLGGLAPPCRVRSSMLVDPDDLYFNCTILALSSEAPCRALPPGSRLRAQPLPSVRWEV

SEQ ID NO: 82535 - protein, 191 aa, Zea mays
  Coding DNA Sequence Number=SeqID_39160
  Homolog annotation: Hit_ID=A5BKB8; Match level="QueryCoverage=41%, HitCoverage=24%, E-value=9e-15, Identity=57%"; Hit description =Putative uncharacterized protein
NPANHRVFERKLRPKPSGGGHVCLGVTLKDTPNTPPRGEGRGVWPPRRRASVPARGRPFSPKDPSSDRACPRTATPEASSATDRAQVLWKGTPGRVRAPSGPDPVAPRGAVNESGCLGMQPKSGGLELEHACRDPKDGELCLSGAKPEETLVEARSDTDDSWSPHEFYRVKPMIRGIGGATPSTYSQTLNR

SEQ ID NO: 82536 - protein, 190 aa, Zea mays
  Coding DNA Sequence Number=SeqID_39161
  Homolog annotation: Hit_ID=A5BKB8; Match level="QueryCoverage=51%, HitCoverage=34%, E-value=2e-23, Identity=55%"; Hit description =Putative uncharacterized protein
  Subcellular localization annotation: CTP_CleavageSite=27; ConfidenceScore=5.60e-01
MPPGSGPARCPPPNLPRGRGAAKKNPRRLGRQGTPVLPPAPRSGRPGFRSPGSGYTLIDTTLGNGYLGSRIDEERSKMRYLVVPAHGRPFGPKDPSSDRACPRTATPEASSATDRAQVLWKGTPGRVRAPSGPDPVAPRGAVNESGCLGMQPKSGGFELEHACRDPKDGELCLSGAKPEETLVEARSDTD

SEQ ID NO: 82537 - protein, 61 aa, Zea mays
  Coding DNA Sequence Number=SeqID_39162
VSAFGNQTPQPNSCMSRGRRSRLLTPGSLEDMVAGVTWPSILPPGWTIEWDPTSAEEEHEE

SEQ ID NO: 82538 - protein, 295 aa, Zea mays
  Coding DNA Sequence Number=SeqID_39163
MGQASQVDPPIGATIMPGEAADAAAAPSPPDLLPAPVSTPAGAIVDSPAEPPVAVDVGMAEAPSPVVIPDLPVLDHEERAAIVAEVGDRRPATLAEERPSTSTVETTTLLLADPLVAIENRKKISAKLARSVQLNAIRHGTVTERIWLPAWLARRRRPLCAKIHAAAVIRVHWRLDNYDREKISRRGRDRIAPWIFSGCHGLAVPRPRASTTWPCGRHRSLHPPPRLCHASATAPTYIPNPSLASANFGFPPNSLKNTVTAASPWPALLRLEHTQSLSVLASVKSLIARESVQLR

SEQ ID NO: 82539 - protein, 95 aa, Zea mays
  Coding DNA Sequence Number=SeqID_39164
MAATVYRRERGPRRFGRKLDSGDGGERPRGARSGAPLARGEGPRLYTELLDRGMKAKSHQQPKQGGTCKNCATSKAEYTNTQLDLPGVRSLLLYL

SEQ ID NO: 82540 - protein, 178 aa, Zea mays
  Coding DNA Sequence Number=SeqID_39165
  Subcellular localization annotation: CTP_CleavageSite=62; ConfidenceScore=5.17e-01
MARCPLLLPPAARQQAAIPMAELTSLPRARQQSPPLRPPFPLLLLVASSLWLLPQVRLELASSMAGAQPQLQAPCTLLLQRRPPIHHLQPRVLLLPAPSQGAQKIPQPSPLLAVLRGARRLFDKMRSKLRRRSVQPLFGCRSASVNLLRARATAAAAPSRRVCRHGSTQSRRDVVKLR

SEQ ID NO: 82541 - protein, 151 aa, Zea mays
  Coding DNA Sequence Number=SeqID_39166
MDRDAIGLLEKSGRHPWEEGGARAHGVGELGDPEVSARWRRQQRGRSSLLGCSPAMEKSREGRGQWGIRGVGVLPGSSCSCGKNQREEELPPCLKGRGACCLRKKKGRSRAPSCSRGRGEEDAMGRERGAAGGKKRQGRRKWRLGKMQGWE

SEQ ID NO: 82542 - protein, 163 aa, Zea mays
  Coding DNA Sequence Number=SeqID_39167
MRWRSGDFASPVRNSPDVGDQLPVSRPQGSVLQPRGVAKPHIGRAIDRKPEHPRSSPSLTPRRWKISRLRQVATHRPVPGVSRMENRSASRVDEGTQRVGEGTQRFTSQSGSAAAGARGGGREGSCIEYRGNGPGRWRRYGFAPGGASSRLSNNGGSSVVRIE

SEQ ID NO: 82543 - protein, 57 aa, Zea mays
  Coding DNA Sequence Number=SeqID_39168
MSKNTRDTRFIPRFGHTTKVPYFLVEAPTKSRLELKSSLAEVRSAAAQELTQLKSLS

SEQ ID NO: 82544 - protein, 178 aa, Zea mays
  Coding DNA Sequence Number=SeqID_39169
  Subcellular localization annotation: CTP_CleavageSite=62; ConfidenceScore=5.07e-01
MLRCPLLLPLAARQQAAIPMAELTSLPRARQQSPPLRPPFPLLLLVASSLWLLPQVRLELASSMAGAQPQLQAPCTLLLQRRPPIHHLQPRVLLLPAPSQGAQKIPQPSPLLAVLRGARRLFDKMRSKLRRRSAQPLFGCRSASVNLLRARATAAAAPSRRVCQHGSTQSRRDVVKLR

SEQ ID NO: 82545 - protein, 151 aa, Zea mays
  Coding DNA Sequence Number=SeqID_39170
MDRDAIGLLEKLGRHPWEEGGARAHGVGELGDPEVSARWRRQQRGRSSLLGCSPAMEKSREGRGQWGIRGVGVLPGSSCSCGKNQREEELPPCLKGRGACCLRKKKGRSRAPSCSRGRGEEDAMGRERGAAGGKKRQGRRKWRLGKMQGWE

SEQ ID NO: 82546 - protein, 210 aa, Zea mays
  Coding DNA Sequence Number=SeqID_39171
  Homolog annotation: Hit_ID=Q6J9V9; Match level="QueryCoverage=63%, HitCoverage=46%, E-value=3e-62, Identity=89%"; Hit description =Putative uncharacterized protein
  Subcellular localization annotation: CTP_CleavageSite=32; ConfidenceScore=5.03e-01
MTASKKESGKGIFQKRILLSEGSRPRALLLIRGSKVAPCGVRQPPQSTRALSPLLIRGSKAGPSEGFDSRPRARRVRDDPGYVRYMAEAWATLPRYPRTFPRLAGTICNGIPPEGGTEPSDPIEWVRVQQITCRGSKAGPSEGFDSRPRARRVRDDPRYIRYMAEARATLPRYPRTFPRPAGTICNGIPPEGGTEPSDPIKWVRVHQITC

SEQ ID NO: 82547 - protein, 247 aa, Zea mays
  Coding DNA Sequence Number=SeqID_39172
MPPSGSVSHGYNVAESGCLLQVETHSALLGHWGLTHAELPSSDIASPNGLALHSGNMLCFHPELEDEVPANSASETDLLLTDCSSDSDSGAEDTAFGIAAAEAGSTDLALAILHLFVLPLCHDCSVNQVLECREGDGVGVGMSGKIRLPPRLSCSSQQTGTIHDFLPVIALSESDQWLELPESASGTSARWTSGAGAAAAVAGVPHPAKLAAPAEHAFLLCACFLTSAECNHTSELILQILQHKKRV

SEQ ID NO: 82548 - protein, 188 aa, Zea mays
  Coding DNA Sequence Number=SeqID_39173
MGMLDPNQGSFRDLPLSRSEDGLSSPMGMGIHNLAQECPMANSSKGHSSPTEGTRETPTSTTMNHRLSQAFPRMVEATQPRDNNYCDGGHGGYIGALGGRTTKLPTPIVVRPMTGADHRGSLVWEMDIPQVPMNIKTCHGSPGRFSPRSSYGMGQLNVATLGRPGLSRQKPTPELSAIGARTYRPPQF

SEQ ID NO: 82549 - protein, 73 aa, Zea mays
  Coding DNA Sequence Number=SeqID_39174
MARGPRKRIGIPCADAGDPRVSLTNYLAGFFRAECHTATSPSSSSSLLGHPQALAVNARSVVADSRSNWGARH

SEQ ID NO: 82550 - protein, 109 aa, Zea mays
  Coding DNA Sequence Number=SeqID_39175
MAVQRQGRQTRRPLATKAVRKSTPAFRDGPHEADVDESAAPVRSRRCAEADDAQISWRPYEAGGAQISAAWPGEDLGGRQSREMVLGEAGDESAAVRVSGSEVAGANLL

SEQ ID NO: 82551 - protein, 53 aa, Zea mays
  Coding DNA Sequence Number=SeqID_39176
MAPIFSLRDLGMGIVPQLFPEGGGCLWYSLCSSKEEGVEVDLQEFHHFDEFED

SEQ ID NO: 82552 - protein, 101 aa, Zea mays
  Coding DNA Sequence Number=SeqID_39177
MELLSKSYPTKEKTLKGMLVIWESRVSRRVIKIKEGKITSLGKIGFTIFPFFYRFLKLAKNRKRKTMNRLGPKSIQVGPTTAEMRPRALDHGDFAQTTLAS

SEQ ID NO: 82553 - protein, 68 aa, Zea mays
  Coding DNA Sequence Number=SeqID_39178
MARRLGGGANRLRREIKHNREQEREKERAGETLVKLYDPPNGARPPWVAVNARVLPRCPRSPWPKQTE

SEQ ID NO: 82554 - protein, 70 aa, Zea mays
  Coding DNA Sequence Number=SeqID_39179
MAGGRATHEDVDVVLKVSPAAGEGAARNVACGCGSGGEDEHELWIGRGASKPSPCGHKGEKGGGGVSGRG

SEQ ID NO: 82555 - protein, 148 aa, Zea mays
  Coding DNA Sequence Number=SeqID_39180
  Homolog annotation: Hit_ID=Q69LL7; Match level="QueryCoverage=83%, HitCoverage=54%, E-value=2e-31, Identity=56%"; Hit description =Putative CBS domain containing protein
  Pfam annotation: Domain name=CBS; Domain location=24-130; Score=-0.9; E_value=0.05; Accession=PF00571.19; Description=CBS domain
  Subcellular localization annotation: CTP_CleavageSite=96; ConfidenceScore=5.64e-01
MDATLLLLPANCTAAASGRMRPRLPAGPHVASPGPSARPRTSIRASAVSAALAVRGLPQHASVAGQSTGSYRVGDVMTKREELHVVKPTTSVDDALEMLVKHRISGFPVIDDDWNLVAIFHIFDRPGCLDAGNHHNPSGVSITTTLRW

SEQ ID NO: 82556 - protein, 131 aa, Zea mays
  Coding DNA Sequence Number=SeqID_39181
  Homolog annotation: Hit_ID=Q69LL7; Match level="QueryCoverage=48%, HitCoverage=27%, E-value=2e-22, Identity=87%"; Hit description =Putative CBS domain containing protein
  Pfam annotation: Domain name=CBS; Domain location=19-130; Score=-2.9; E_value=0.078; Accession=PF00571.19; Description=CBS domain
TFHEIQKLLSKTNGKVIADVMTPAPLVVRETTNLEDAARLLLVTKYRRLPVVDSSGKLVRALLRFLCASFSFCSVALRQLLPVRLGSLQEGTSSKPPSKSRKRLKGHSEMTTSRLPIVLVSWASLDTKFLT

SEQ ID NO: 82557 - protein, 131 aa, Zea mays
  Coding DNA Sequence Number=SeqID_39182
MAWWIGYRGKGVCERGKDGMVVVTSSVVTARSWGAHGIFRKKETSSTRDLHAAHTMTSGPHWLVVEHAPARGKPGRSGPSKRAKVGRMVVSERKSPAGWRSAPALNPKMRRGLSVLLVSWKMGRTQEHTRI

SEQ ID NO: 82558 - protein, 301 aa, Zea mays
  Coding DNA Sequence Number=SeqID_39183
  Subcellular localization annotation: CTP_CleavageSite=28; ConfidenceScore=5.08e-01
MNARGARHGYFPGDRPLFKGRFPHSRPEVSQAKSPPTCTRVPTPMTRGKAPHVIQADLEYEEGEPPHKERATAPRLCAPSFSEQPAVRKTHCRTRSVQPPHGYAPFHLRRIQRSRSQTAAQEVYNRPAVVRRTQFRYNRRSNMGAQAHMSCSRRAEPVRRLEAPRAWPNSDIKYEGHGPVNRGNRLASSPEAGPGATVGMLNQGAGALRHPAGDFLSDTTIRPTLARFDGPLLPGFPRAGACSTTNQWGPLVIVCAACKSRVELVSFFLKMPWAPQDRAVTTEEVTTTIPSFPLSQTPFPR

SEQ ID NO: 82559 - protein, 217 aa, Zea mays
  Coding DNA Sequence Number=SeqID_39184
MFIILAGVEGESSWGPAFRMGWQPVSSSSIRGRRALTSLEEEANFGYAGPAGCRRRQLPRVWLLGLDGFGAASGAAFCRLVGAWLSIHRTGDSRAVHRKTGARTFSQWRTCRGDRHCWRVVGAEVAAAIGAEVVASAGEPLGASYHAALLVWSTRPPAWNAGLMCRGWIPAYLKRLSTTLRRQPAGIWICTQLQLGSVSVWVAKLRVRTPLGRGSRY

SEQ ID NO: 82560 - protein, 311 aa, Zea mays
  Coding DNA Sequence Number=SeqID_39185
  Homolog annotation: Hit_ID=O48967; Match level="QueryCoverage=47%, HitCoverage=29%, E-value=8e-23, Identity=46%"; Hit description =Putative uncharacterized protein
MFIILAGVEGESSWGPAFRMGWRPASSSSIWGRRALTSLAEEANFGYAGPADCRRRQLPRVWLLGLDGFGAAFGTAFCRLVGAWLSVHRTGDGHVVRRSATSTASPLPPAALFRRRPGVIQDVIRLGGWRPRSWMVLSSLPWGDGSEDLFARAEAAAIAAFISRFTMVRGTIPRTSDASIITPFLQGVRDEKMLEKLMMHDHSIITPWYDASIITTLFALTNKCARAAVRAWHSAPQVGATQMGASGAAAQGNDKENKKKNHGGEKSLLGAPVAATTTRSQNPRGKRPRQQGGKGGSCPIHPTNSQHTSFM

SEQ ID NO: 82561 - protein, 104 aa, Zea mays
  Coding DNA Sequence Number=SeqID_39186
MWQQKGYLEVVISECPFNLFLDFEGGLDDVPSCNDPNLTGRSCLSATEQKEKEAQRNRNSALTSLPELSTTGSLRYLVTRSNLQNRPLLEDNNIEDVQEKAKEK

SEQ ID NO: 82562 - protein, 101 aa, Zea mays
  Coding DNA Sequence Number=SeqID_39187
MRVVWDALGQEIREVLCQVMVLVIGEQRHLLWCNTLNLGSPRSATVDSGCRRAFAATEGSPEFALSRELPEEARLLTAHGAVCALPDRAFDVWQDQRIDFR

SEQ ID NO: 82563 - protein, 218 aa, Zea mays
  Coding DNA Sequence Number=SeqID_39188
MMEDNDAVGRDIKTLVSLMVKRVSEEDTPSETRCKFVGSNRGKVGIASATKNTKVFIGGGVPNRATWGHEALMVFVGRQFSKKSARKHYPDCSLSSCHILGGSGLPPGPRGVCQSREQIMSSGASLLLEGGGLLLFEEMSGYLDTNVCIGSFLVRILSRSEHVVDLLAKGHNLILSVVRSSSVNEVLSWVREKEGEDVCTLLRPHDTTVTTALEGPLP

SEQ ID NO: 82564 - protein, 220 aa, Zea mays
  Coding DNA Sequence Number=SeqID_39189
  Subcellular localization annotation: CTP_CleavageSite=45; ConfidenceScore=5.19e-01
MNNRARSWQGRSRWSGWGRCAGRGTSAQRRVARRAPAAQSRAELSAAAQGELTSDAGHLGHVGRRTQHRYQGGSGRSTGSQGRGGSAAAQGGLVAWCFGGLIVALVGWRLGSMDNGGLVTGKDSRRIFAKIRTFATWVSCGTRAEEKLHVFDALCVRQSTPARAPRRANGQPAPWPAPAPIKPAQASATLFRARPNLTGAQFTAVCPCATCPRPPEPLPP

SEQ ID NO: 82565 - protein, 172 aa, Zea mays
  Coding DNA Sequence Number=SeqID_39190
  Homolog annotation: Hit_ID=A2ZQS5; Match level="QueryCoverage=83%, HitCoverage=43%, E-value=2e-62, Identity=75%"; Hit description =Putative uncharacterized protein
MTRASSTMISVLKKIMLAGLPGINLREELLDVLCKDHSFDIYRDDIVFRDPLNTFKGLGNYKRLFWALRLTGRVFFKASWVEVVSIWQPAENSILLRWTAHGVPRVPWGWWDGHARFDGASVYKLDRNGKIYEHKVHNVATNPPAKSKVLPVHELVRSLGCPSTAEPTCSDF

SEQ ID NO: 82566 - protein, 243 aa, Zea mays
  Coding DNA Sequence Number=SeqID_39191
  Gene Ontology: Mol. function=DNA binding; Cellular component=nucleus; Biological process=response to salicylic acid stimulus
  Homolog annotation: Hit_ID=Q5VS69; Match level="QueryCoverage=87%, HitCoverage=70%, E-value=2e-64, Identity=60%"; Hit description =Putative MYB29 protein
MVITQGIAQTLDGFDRDWKKIEAYVGSKTVIQIRSHAQKYFLKVQKNGTGEHLPPPRPKRKAAHPYPQKSSKNVSQTILLQEQPTQREQGSVMPMDTATVINTNANVAVAVAVPSWDNTLAQSLSAGLVPGATNNCSSSIESPSGTWPTSEAVEQEIVVPSLHAMPDFARVYSFLGSIFDPDTSGHLQRLKVMDPIDIQTVLLLMRNLSTNLRSPDFEQHISLETFAASGHVRHDFAQQVYAD

SEQ ID NO: 82567 - protein, 146 aa, Zea mays
  Coding DNA Sequence Number=SeqID_39192
MAGSRDSSDISPSNIIEPTWETLPADEQLQFEEHKERMIQEVKAKFLANFKVDRNNKVVRHRATDPASLQPTPDIPNVPEHSTPCAKDACALSYLGYPQNIPIKRGYRLPAAAAKASSEGWRLCLRPNICPPRDQFDKVIWCRRRR

SEQ ID NO: 82568 - protein, 321 aa, Zea mays
  Coding DNA Sequence Number=SeqID_39193
MDRGCLGVSKFVDDPKKDAAAFVREVELEVVKIVACVAVLPKGDSTDARDDRGFDRDMCLAWGGYDFAQTPGNIFVNVEGYRGRWHRKDPIPRVVGNDYFTSRMARELKIFPYGRNIGVVVLAVMDKDRQEAQRKKQKVPLQLVDLCRDAKMSRPSVKGVNPAAAMPPSAVPVVPTKESSPPCDVETTVSETGGTGQELSVDDYLVGALPCLMPRRGYRLLAVVFAGHVASGALVDVSTSQLCYERKRLEGKNERLRMQHTEAIRDKSAAENKSQNCLDKVTALAGSMTRKKSPMRRRRRQRAHARRPKLPACVPSSLSSK

SEQ ID NO: 82569 - protein, 45 aa, Zea mays
  Coding DNA Sequence Number=SeqID_39194
MKDAKPIKTPMGTNGHLDLDTGGGESLKRALKAPFLAINAKGGEY

SEQ ID NO: 82570 - protein, 71 aa, Zea mays
  Coding DNA Sequence Number=SeqID_39195
MAPPRDGDYHRHRRPHGWELRGPLISRGIAEIRNCITVWLGSLRNFADESLENSENNPSSTGKHIVIADVP

SEQ ID NO: 82571 - protein, 94 aa, Zea mays
  Coding DNA Sequence Number=SeqID_39196
  Homolog annotation: Hit_ID=A2Y8A8; Match level="QueryCoverage=40%, HitCoverage=6%, E-value=3e-11, Identity=86%"; Hit description =Putative uncharacterized protein
MNVSTDVARLNPQGSFHYGSINVSQVYKLRSEPPVIINGKKRTTKSGGGGRRRGIDGGVGVAGGIKLPDLAADVVVLLAKARVATFSVIRKRHG

SEQ ID NO: 82572 - protein, 191 aa, Zea mays
  Coding DNA Sequence Number=SeqID_39197
MATGLQLRKDCSSERGPDETESERTHQRVSRAADNKAELTVALDGAWTRRWPQNRQWSTAGGGGAPCTRGQSEREGEGVWQRAQMSEGRWASRARGSKGTRAQGCGWRTRGRGRERGGEIVGERLETADRWGQRDRERERAQGKEWCRQLGPIEQRESKGVSALGLAPTGGALLSGTKGLPETRRLATAGL

SEQ ID NO: 82573 - protein, 74 aa, Zea mays
  Coding DNA Sequence Number=SeqID_39198
  Subcellular localization annotation: CTP_CleavageSite=54; ConfidenceScore=5.05e-01
MVVAPWVKYLSQEYDPMLTWAASTYRSPSCPSFRCLMNNTIRELISLLVFVFVVHRMRRELDQGNEDAIPQKKT

SEQ ID NO: 82574 - protein, 83 aa, Zea mays
  Coding DNA Sequence Number=SeqID_39199
MDERAGAGAIDRRGRLSATRGKGGLTSRAQGQGAQALTGGLVDRARRSDGGDQRREGYTDEGDAARLRGEVSPETRGMATAGL

SEQ ID NO: 82575 - protein, 341 aa, Zea mays
  Coding DNA Sequence Number=SeqID_39200
MSSSSLMRRVFPSSKPPDGGPAAPLHWRSPEMVTSGLMVGESEPGCGLCPFLSLKDFHHQGWGGECAELSCSVSGLQTRVASEPLATPASATAAGRGSSAGAIAGAGHGMTSNSTAFCPSLPHEFFRGRGPSGSSIRPRVSAAAVRPPGAEVVVVAAAGESLGPIGLVVWGSSSLVKETLRPPFDEPRPGPTPKSISRGLGSGWRPWKPVGRGPRGNRPSRLLGPDSRRNSWTASPSEAGSDFAEDVVDAEGATAPFSVKIRAYRIRSSCSVCLLRPPRPEKHTLAVFAKPRLFSSCFEHLDSLSKVMSEVSVSRRRRSPSARSALAAYVYSVVSRIRFPK

SEQ ID NO: 82576 - protein, 165 aa, Zea mays
  Coding DNA Sequence Number=SeqID_39201
MSTVPIDSPFVARPHRLGIQCSTDPGCRRAVTALAGELVGSEESGLSRAQLTNQTGQRALPGIKEGGRPKSCKDKLGSPVKFCRVRELRKLHKLLVMLSERLAQLGSDWSGLATVSEARVAMAGRIELAGAKEGRLAGEGEHGVSVEHEAAQREVAFKRGLAPNL

SEQ ID NO: 82577 - protein, 85 aa, Zea mays
  Coding DNA Sequence Number=SeqID_39202
MAQLSWRSSFCSPLRAEVQKEQLASYLLPYSLRFVSILSSESGPGGYLSPTTPTILEDDPHIGVTVTTSPTPSATSPGAISPPRT

SEQ ID NO: 82578 - protein, 73 aa, Zea mays
  Coding DNA Sequence Number=SeqID_39203
  Subcellular localization annotation: CTP_CleavageSite=61; ConfidenceScore=5.24e-01
MAEVKGYASHKLLGLPNKAKKPAQLTVFGNATNFQQATNPERQRGEASEEGESLSSLLGSVAATATTGAYLDP

SEQ ID NO: 82579 - protein, 69 aa, Zea mays
  Coding DNA Sequence Number=SeqID_39204
MAAHSTHTKHRMREEGWRAGGMERKGFNHGFIGQDKARGCRGRAEKRRPAIMPLMAFINGGETNDLMLH

SEQ ID NO: 82580 - protein, 66 aa, Zea mays
  Coding DNA Sequence Number=SeqID_39205
MAATPRWATGGKSAVGGCDAGKLSPPAENKGRRSNPLNRNLALEIQEEASKNDKTGFFDLQMITTN

SEQ ID NO: 82581 - protein, 137 aa, Zea mays
  Coding DNA Sequence Number=SeqID_39206
MAKNMGFPKLEVGLSAMSKDDLANSLAYNSLKLRSYISLRLNHAFHIVYGFSPTPKMSKEKKVVAETKQIEETKLFEEKKVVDPYIAGFVESMAKTMSHPVLKGKPNANHVLTERYSGNSLSPIEYHKIINIIRITS

SEQ ID NO: 82582 - protein, 30 aa, Zea mays
  Coding DNA Sequence Number=SeqID_39207
MAGARVAQAGGAVLAGAKGGVWPVKAYGFC

SEQ ID NO: 82583 - protein, 47 aa, Zea mays
  Coding DNA Sequence Number=SeqID_39208
MDGYIRADNDFRQRREEAYMFSEMTRLKTLRYNKSTMSILVSLTLTI

SEQ ID NO: 82584 - protein, 83 aa, Zea mays
  Coding DNA Sequence Number=SeqID_39209
MAARTGRWELAVPRWASRFRCRALATTPRRGPDGLAENGCHAALGYRGQERRRGLRRREALAAGREQGKKKKRRKAGKEEGNT

SEQ ID NO: 82585 - protein, 248 aa, Zea mays
  Coding DNA Sequence Number=SeqID_39210
  Subcellular localization annotation: CTP_CleavageSite=31; ConfidenceScore=5.08e-01
MKLWKETFRSSKTTTSSRRGLAATPSRLPVKAAVIYVSFSHFDLLSRKDGLLDPSLATLLASVTSMMRSTPCYVGHLTGVLGPSSIAVWSTSIVAGSTRTAGRRPAWCAVRRTVSRVRRPAQSTILSLSGAQLRRPCKMLHGMRFRTTARFSVGTGGVIVSPVGEGNPRLSSTVNLAAVLNTELDHALDELSRARAEIALLRAERTERRHLDDGSPAPIGTQHPYRSPRRGHQPYGNPDCKTKINLEP

SEQ ID NO: 82586 - protein, 82 aa, Zea mays
  Coding DNA Sequence Number=SeqID_39211
MAARGGPRGGDARRAVWAASAPVVGAGWCKERRGDAAVPTRAATSALAATATSEFGAIVYGVELCYLDAIGYVTEQKVQKYY

SEQ ID NO: 82587 - protein, 74 aa, Zea mays
  Coding DNA Sequence Number=SeqID_39212
MWAQGQNEGNNIEVTNASVAQKISERHHVHSADGIDILRCFLGNGTLNAEVAHRLPVEWQGSLNTEAAHHLPME

SEQ ID NO: 82588 - protein, 101 aa, Zea mays
  Coding DNA Sequence Number=SeqID_39213
MDGNLGCENRGQSDTRKKKERTLTRDMHPRSRRIEGWVRAPASSLLTVPVTRLWRSSAGMGTEDICEPSKSTPGVISESSSYRSVKGSTPGDGWRQPPPRR

SEQ ID NO: 82589 - protein, 136 aa, Zea mays
  Coding DNA Sequence Number=SeqID_39214
  Homolog annotation: Hit_ID=Q2R3I4; Match level="QueryCoverage=71%, HitCoverage=13%, E-value=3e-08, Identity=32%"; Hit description =Transposable element protein, putative, MuDR
MATAAVKSRRARVQRSAEGSETKGRNGWFDKQRQKKVTDFETHHRDYIDEWDQQGDLNYINDQPHTNYHFQRCKLKGQWIAADYVEQESSNDEDTSFDIAARLGSQIEAAPILDKVGITLSSSCNGSLWIPVSSER

SEQ ID NO: 82590 - protein, 34 aa, Zea mays
  Coding DNA Sequence Number=SeqID_39215
MAHTLRWSPPLASRWCRGQQAGFMRTDLSGLAYT

SEQ ID NO: 82591 - protein, 409 aa, Zea mays
  Coding DNA Sequence Number=SeqID_39216
  Homolog annotation: Hit_ID=A2Z0I5; Match level="QueryCoverage=81%, HitCoverage=93%, E-value=2e-72, Identity=49%"; Hit description =Putative uncharacterized protein
  Subcellular localization annotation: CTP_CleavageSite=58; ConfidenceScore=5.26e-01
MAVGGGGKGGTAATDLLVCFPARQHLALMPKPICSPSRTTMDKAAAARRRQLQLPGASAAAGGGRARGSSSAMFWGSKARQRPEEEEEPQSPKVTCAGQIKAGRPRKVKPGSEAATKHGKGGAKSWLAVVEEIERLRGRRKKVGWLETLGIRRDALPFLGGALRSLRSKACCFGSLHAGAAAVDSSVDSDHDAGERGSEHGAGGSAAASVFSKWLMVLEGGQEPMEQDETSLDHGQEEDVELERQQCEETAPPPNALLLMRCRSAPARGRLSVSRTRRECEQLAGEVDQEKEAADGMPGDGETEDELVFLSTAPGFMKLSLDIAKETWVVGGGADPIARSRSWKSMALASMPASRRPVPFKARPADRATEHRLCRSGTKNRLFVAGLQVAASRMPSAINKAKNHHKITL

SEQ ID NO: 82592 - protein, 43 aa, Zea mays
  Coding DNA Sequence Number=SeqID_39217
MRFNYGRSTQPRVRLGPFLKYVKWRRDAVQADPQWLGRQVSSL

SEQ ID NO: 82593 - protein, 351 aa, Zea mays
  Coding DNA Sequence Number=SeqID_39218
MPRSSCIHRALPPSGPPDGERNPVGVGALPPLLGFKDFHLAARLQSPASASRMFIIRAGEEGEPSWGSAFRMGWRPASSSSIRGRRAFASLAKEANFGYAGPADCRHRQPSRALCLGLGGFGAASDAASCCLVRAWLSVHRTGDGCAVRRSATSTASPVPPAAPGGGSYKTSCAAGAAAAFLDGLVLTPSVRMGARTSSPVLRQPPPTGAEVAAAAGEVARCRGGCLRWRDHQCHLPPSLQLFGFNGLVVAPVGRRGRGPFRNGARAKVIAFAGESSVQRRPPPSVLRWSPPLASCSELAIPRPYWPTVRDQAERLHGLQTTLATVRDQAERLHGLRTTLWNGVPFSRASS

SEQ ID NO: 82594 - protein, 97 aa, Zea mays
  Coding DNA Sequence Number=SeqID_39219
MEVMRKTLDDLWAEQRAGAQRIAAWAGKILGARLETEGSRLCHSAIEYVLTCFRSHDPAVSLGPVIAGLVADAEDATREAVQDIVVGRFQRDPTDDE

SEQ ID NO: 82595 - protein, 215 aa, Zea mays
  Coding DNA Sequence Number=SeqID_39220
  Pfam annotation: Domain name=Hin1; Domain location=27-172; Score= -16.6; E_value=0.041; Accession=PF07320.4; Description=Harpin-induced protein 1 (Hin1)
MRQGTNFGPVYVFIAVLGSITVLIFAYLVLVGAPEPSIFDVWVENGTLHAMEMDSSSNSTLTYSLSAVYGLRNKNYERDTVSVAKLAVAPMYGGQQLGPGSSLPAFQLRYLETATVPLDARGQLPAAAGAVVTRTYADDAARGYYAIQVKLSLALGGGLHWCHSSCTLYFFAPLPSSSPRRGAPNIFDGDDCWTTCKKSVLHDEKPDKAMQIKEQ

SEQ ID NO: 82596 - protein, 129 aa, Zea mays
  Coding DNA Sequence Number=SeqID_39221
MELCFPASSAGNSIEKSVIGIQYSLILTASVLSHPDLRGKPEGDWSHRPSPTMNLPCMGRNLPSVMPRDRETDAGMCGDIMKPENGTQCNPYLETKPQKWETLLMNEHTEKDATHVVVIADKLKKESGN

SEQ ID NO: 82597 - protein, 153 aa, Zea mays
  Coding DNA Sequence Number=SeqID_39222
  Gene Ontology: Cellular component=respiratory chain complex I; Biological process=photorespiration
  Homolog annotation: Hit_ID=A2X661; Match level="QueryCoverage=33%, HitCoverage=77%, E-value=2e-19, Identity=84%"; Hit description =Putative uncharacterized protein
MPALHHSRPRVHSWPLRHSRPASTLSPWKAHPRDPLAPASLTFDGRRIPGILHDRALPSSPPRFLPTRWHPPFRCSCHLSVVRPFASSTTVAQPPLCIHPPPRRDKWRRHPMVGNPLHHTTPRLGIAIVGFGIYLIGEAAYNRLNRPSGDHHH

SEQ ID NO: 82598 - protein, 103 aa, Zea mays
  Coding DNA Sequence Number=SeqID_39223
MAVPSIEGRRGEGENGGVEAWCTVSTAICGAVARLWDSGGGDLGARRAGERELRPWARSGGKESRGGGDCGLGAGTGEPGQGDCYDVEWRHGEAMVDALLASL

SEQ ID NO: 82599 - protein, 133 aa, Zea mays
  Coding DNA Sequence Number=SeqID_39224
MACATDTLLIKARNRGYKQTREGGEAHKSLIVVEVELSITRIRKGLASGGFPGRSHLATLVGHEWEVDQHLYHGSVPGVVNAISHLWWVGLGPGKGSTRVVSLRLTRPPLSSFATPDPRLGVVGLVRGQTIPG

SEQ ID NO: 82600 - protein, 118 aa, Zea mays
  Coding DNA Sequence Number=SeqID_39225
MAPKRATSKATTSIDNAAKVALLAEKKGKAPLANDIPQEAFNDETVNSKRQRQDNPPTLEGTVRTCSSEGVPQAPMPGFTPPEAEDIIEDGEILGILAEDQLKLPALCIKNNHLQKQK

SEQ ID NO: 82601 - protein, 261 aa, Zea mays
  Coding DNA Sequence Number=SeqID_39226
  Subcellular localization annotation: CTP_CleavageSite=56; ConfidenceScore=5.42e-01
MAPPVTWSVRALGWARSRLLRGRGRVCLPRPRSSPSPWVGRGGDRRLRPGLSPSPRVGRGGVRHLPGLSPSRSPRVGRGGVRRLPGLSPSPSPRVGRGRVRRLPGPSPSPSPGSGEAEFVVFRGRARVRALGRAKRSSSSFGAEPESEPWVGQCGVSYGARGRTWLLSASLCRVAQQSEWRRRRYPLVRPATFALNASVKRSVGMATWPRLLLGEDWASGEPKLCADGGYQLRLGVLRGAEHGVSNELLTGNPSGCLCPIC

SEQ ID NO: 82602 - protein, 205 aa, Zea mays
  Coding DNA Sequence Number=SeqID_39227
MGAQAHTSCNRRASCYVQETAPPLAPLPRLLNCGTSTATRGNPAYDPTVPARHIGHGSVSRGKRRDGRYGQKWASSNGGGRRTEAAQDKRHLWQEKQATLRLRHNNRVKKGPGKGIPERDPSPRRKRAPSPLLIRGSKADHSEGFNSRLRALGLRARYWSEVRRPAPRKGSTAASGHSGSAPTTDQGFVGSPSKGSQPPQTQSEG

SEQ ID NO: 82603 - protein, 244 aa, Zea mays
  Coding DNA Sequence Number=SeqID_39228
MAVMGSTSEKMYLCQVPNFGFEMIKLRPGGGLARERSLGVVSPSESIKDRLDVGLMTEDPLTGHMPRHGKNFYKTESLIIEKPYLDSLITSIPLRVFSLVGNDLWVADGERINKLRATIRYLQDQLAERDLALDWAINSRPLAWAKEAKARARVEELSSAMDNLQVYYNTLHEEVHVLYSQLHPNVPADPVGMEVGPSRVAGEALGGELDLLRPPPSMKLVDKWYPTPDSKATKSEKKWPIKCP

SEQ ID NO: 82604 - protein, 46 aa, Zea mays
  Coding DNA Sequence Number=SeqID_39229
MAVMGSTSEKMYLCQVWKRQTFVASVLGWYQRRNAMNEVREERILH

SEQ ID NO: 82605 - protein, 148 aa, Zea mays
  Coding DNA Sequence Number=SeqID_39230
  Gene Ontology: Mol. function=ARF GTPase activator activity; Cellular component=Golgi apparatus; Biological process=regulation of ARF GTPase activity
  Homolog annotation: Hit_ID=A2XP75; Match level="QueryCoverage=54%, HitCoverage=19%, E-value=3e-25, Identity=74%"; Hit description =Putative uncharacterized protein
MAATAVIADWWVLPLSALRYLCGATKHRTVGVKVDLDLAHLLESRSPSSIGPNCYTVNLLGTPSSQRSSPEDSRKIEETDEARKKFSNAKAILSSQFFGTQNREEKEAQLSLQKFTGSSSISSSDLFVRTNVDDSNLDLSAKDLINSL

SEQ ID NO: 82606 - protein, 45 aa, Zea mays
  Coding DNA Sequence Number=SeqID_39231
  Homolog annotation: Hit_ID=Q6ZDM1; Match level="QueryCoverage=100%, HitCoverage=12%, E-value=4e-12, Identity=73%"; Hit description =Putative uncharacterized protein P0025F03.21
MGERLANEVPLLFESIAMEKVACHIVHWIFRRTGRHLFLTDDDEG

SEQ ID NO: 82607 - protein, 145 aa, Zea mays
  Coding DNA Sequence Number=SeqID_39232
MAGNTSASLERVESGGGREGSDIPDLVHAHLHGNLDLIEKGVGHGPHLRLEGVPSRCPPSTRNGVRTMAGHSVWVIPSMEGDCGLEGEDGGARPMKLNEAGTPSIIRARTWGRGLRCAAGEEDGGRRWGSRSGGEGRGSQRQGRA

SEQ ID NO: 82608 - protein, 205 aa, Zea mays
  Coding DNA Sequence Number=SeqID_39233
  Subcellular localization annotation: CTP_CleavageSite=76; ConfidenceScore=5.70e-01
MGAIKVKAQSTQGTRSRVTQAQPRAKAADPGGFTSRPRAPSSNGHTFGSPEAQSSQRSNLGQIATPTDRIGSAPVSASEDGLRPARPQGSDSASALEDDELRLARPQGSDSASAPEDDELRLARPQGSDSASAPEDDELRLARPQGSGSTSTLDDGLRLARPQGSDIASASEDGLRLARPRGQTQPRPRKTDSTSTSEEPPPRPT

SEQ ID NO: 82609 - protein, 66 aa, Zea mays
  Coding DNA Sequence Number=SeqID_39234
MVVVMEAGARKLVNDLPKQQKLQVDYPRILVYRESSTKQYVENWSKVRMSESEFQSAISETEDFIL

SEQ ID NO: 82610 - protein, 89 aa, Zea mays
  Coding DNA Sequence Number=SeqID_39235
MGKWLINLDQTLSRQSRPSVSIKDHTVDWPVVVETLQLATYPGMGQGKLEPGYSIREETIAHWEWRDGESSIPVHVVEDSVGTVDICKG

SEQ ID NO: 82611 - protein, 286 aa, Zea mays
  Coding DNA Sequence Number=SeqID_39236
MGPQVPVGGDPQISFANRREDGCLRDGVGTEIVQLHPVDVQNRPHKTACRHSEPPLVKGDEAQHIPRRRGRGGSARRGHPLRLRVIGERAKQTISNKGLQIIHRDDGERPRVTRRNNGHPVGHHQAEEVAAERTRDRERGYSERDPSSRRKWAPSPLLIRGSKAGPSEGFNSRLRALGLRAHYWSEVRRLAPRKGSTAASGHSGSVPTTDQGFVGWPSKGSDSRLRARRARDDPGGSGAALANPAPAKPLIASTYQPENLGLDYALGLRPVRMREQQDQPKHHETR

SEQ ID NO: 82612 - protein, 33 aa, Zea mays
  Coding DNA Sequence Number=SeqID_39237
GEILGEDVGEDLGHKAMEGGCKGEKKGVAAKRG

SEQ ID NO: 82613 - protein, 36 aa, Zea mays
  Coding DNA Sequence Number=SeqID_39238
MALPRALCAAVWARVKNKVPQDEAHGGCCDEFVREI

SEQ ID NO: 82614 - protein, 508 aa, Zea mays
  Coding DNA Sequence Number=SeqID_39239
  Gene Ontology: Mol. function=nucleic acid binding; Cellular component= nucleus; Biological process=response to DNA damage stimulus
  Homolog annotation: Hit_ID=Q6Z6G7; Match level="QueryCoverage=55%, HitCoverage=88%, E-value=8e-83, Identity=58%"; Hit description=CCHC -type zinc finger protein-like
  Pfam annotation: Domain name=Abhydrolase_3; Domain location=301-507; Score=62.2; E_value=1.7e-15; Accession=PF07859.4; Description =alphabeta hydrolase fold
  Pfam annotation: Domain name=Swi3; Domain location=79-164; Score =141.8; E_value=2e-39; Accession=PF07962.3; Description=Replication Fork Protection Component S
  Pfam annotation: Domain name=zf-CCHC; Domain location=7-24; Score =38.1; E_value=3.3e-08; Accession=PF00098.14; Description=Zinc knuckle
  Pfam module annotation: Pfam domain module=Abhydrolase_3::Swi3::zf -CCHC; Domain location=301-507::79-164::7-24
  Subcellular localization annotation: CTP_CleavageSite=57; ConfidenceScore=5.32e-01
MAAPPPTGCFKCGRPGHWSRDCPSSASTNPPAAADAPTNPSHLSGAASRFNAKPRPPAAAVDGEDGKGKKKKERATRPKLTPDLLLSDGGIGFVLRYFPKAFKPRARPGHEVDDLANLIKLYADWHSRLIPYYSFEQFVRKLEKLGAGNRVRRCVSELRDRVARGGDPTLLHEPPVHEDMPLPGGGEHGTEDPVLGTDAPLSDNHGTGPVVQEDADPPMESNDVVDPMEEDLLNEIYENTADIPAGEGASKESPEQSAPKEANSLAQEPQDGDVPKPAKDATRASTTAPPPSATPLRPVRVRNPTASSLYHIYVASLAATVPAAVVSVDYCLAPEHHIPAAYDDAFAALKAVIVACRADGAEAEAEPWLAAHGDAFRIVLVGDSADGNMAHNVAIRPRKEGSIEGYDDMVSDVILLYPYFWGKEPLGVEPTDLGYRTMFDPTWEFICGGKFGLDHPYVNPMASSEELRQLGSRRVLVTTTDQCWFVERARAYIEGIKKCDWEGELEFY

SEQ ID NO: 82615 - protein, 82 aa, Zea mays
  Coding DNA Sequence Number=SeqID_39240
MGLLMGSNGNPTVGMGNPLGTRNPHGYGFGQNFIPVTDMGFLAGMFFLRGYGFGQVIPSGFLPIAISILDVQLHWVCSRVII

SEQ ID NO: 82616 - protein, 189 aa, Zea mays
  Coding DNA Sequence Number=SeqID_39241
  Subcellular localization annotation: CTP_CleavageSite=36; ConfidenceScore=5.39e-01
MTHARNNVYCSPTSFANSGWDACTVKLGLALGRKLRLARSRPQPRSKLFLARALPQPPTPREYRRRPLLQLFPARLQSPRGKLGHGLGKTSASPKRGFDLDSIDKKTPNVTKTVELTPDTLCIAKSFLPYLSMLQPLRLGQLLLGQVWVRVRAPDLGLGSLLGERCKYTNQTSPSELKSTVGTWTIEST

SEQ ID NO: 82617 - protein, 87 aa, Zea mays
  Coding DNA Sequence Number=SeqID_39242
MAHRTVRCTPDMSGAPATSPVPLESDRWSSDFWARLDVRWRTGHELFSVRCPGTRCKPNSLSVRRLPGLSPSSSPGSGGAEFAVFRG

SEQ ID NO: 82618 - protein, 392 aa, Zea mays
  Coding DNA Sequence Number=SeqID_39243
  Subcellular localization annotation: CTP_CleavageSite=60; ConfidenceScore=5.75e-01
MTCTGLGHSSPPSRAPPHQLRRPSSALKFTRLNSFATSPRTRNTAPLPPITTQTSPATTPAAELRHLTAVSSLPVSPGKIGPTLKLASPSSCFGTCPIPRNRVTGGKSPLNPPATGFSPWIGRFAPVPSTTDAVSPPTLPGAWAPVMKAGEHREDKEGECFVRFGHGGGLTPSGITVKMEDSLVIRTSYCSEVEGFPHLLRSCALRMGIHKKPEYVWKEYLENGMEKCSMAVYLGESRNYPNHPSFQVTFTGHRFPDTCQNVARKALRQLCLNYNRVVFETPLRYFPPSNKNTPAWRKRLQTLSGRDPTEDDPTIVYMAGYLHTLDNQYDDLASHCTHLNSRVESLDQQVKELQREKASLQESLEIEEGEETNTREAYRTLKMDYDKKLKKL

SEQ ID NO: 82619 - protein, 173 aa, Zea mays
  Coding DNA Sequence Number=SeqID_39244
  Gene Ontology: Mol. function=RNA-directed DNA polymerase activity; Cellular component=mitochondrion; Biological process=RNA-dependent DNA replication
  Homolog annotation: Hit_ID=A1XJ24; Match level="QueryCoverage=29%, HitCoverage=8%, E-value=3e-15, Identity=80%"; Hit description =Maturase
MTCDAKHHPSRRCPNLRIASSEIPEEIQKHITHFLQFGLNLWVGSAGSTTIVARSTVEFPGTVIREVPLEDDSHTILARAGEASTGVMILSPGSEGVGCLGDFDDDGGGARQLERPRVKRDLDSVEDVEIVQPHSRDTGGAEQLGDLCLDEIVLRPGVSLDDHVMDADAHGVR

SEQ ID NO: 82620 - protein, 236 aa, Zea mays
  Coding DNA Sequence Number=SeqID_39245
MEDISFEAWWSRSAEVVPKDLRDGFNSLVVLGGGPQPPPLSFSLTLSFPSLVLMAPPRAAAGVSIPADPAADSPEAESESKLRQGAADARWLETLSEPELDVLVSLREVAVTRASDAGHPGLADTVFHLRALRALGVVLLEELKERLRQSSADANVLDRSALLDDPEASQDHQMPAPNGGMETVPKVQRDEKRPENSEDDFTRPVVDIAADPSLEKPASSSLPSSRLIMYCSVSPP

SEQ ID NO: 82621 - protein, 328 aa, Zea mays
  Coding DNA Sequence Number=SeqID_39246
  Homolog annotation: Hit_ID=Q5Z401; Match level="QueryCoverage=98%, HitCoverage=99%, E-value=1e-125, Identity=63%"; Hit description =Putative lysine ketoglutarate reductase trans-splicing related 1
  Pfam annotation: Domain name=DUF707; Domain location=55-326; Score =278.7; E_value=1.2e-80; Accession=PF05212.3; Description=Protein of unknown function (DUF707)
MKHQPPRRWGVVAAVVALVLLACLQIQYHHLKVDLGKAGFASATQENNAIRSRNRIRWGPDRNGAHSLPRGIVHRHSDMSLRPLWEDDTASTHKNKNSDYSALLAMAVGISQIKNIDTMARKFLKENYAVMLFHYDGNVDGWRHLEWSDKAIHILAHNQTKWWFAKRFLHPDVMAIYDFIFLWDEDLGVENFNPRRYLDIMVSEGLEITQPALDPDLSTDIHHRITIRNKMAKSSQNDLIHGWGLDMKLGYCAQGDRTEKVGVIDSEYVVHQGIPSLGGPSLSSKTPRRSLDLRTHIRRQSSAELEKFKERWNRAVREDEGWRDPFDS

SEQ ID NO: 82622 - protein, 657 aa, Zea mays
  Coding DNA Sequence Number=SeqID_39247
  Gene Ontology: Biological process=slug development during sorocarp development
  Homolog annotation: Hit_ID=A3A244; Match level="QueryCoverage=92%, HitCoverage=87%, E-value=0.0, Identity=73%"; Hit description =Putative uncharacterized protein
  Pfam annotation: Domain name=FG-GAP; Domain location=424-447; Score =4.0; E_value=2.5; Accession=PF01839.14; Description=FG-GAP repeat
  Pfam annotation: Domain name=FG-GAP; Domain location=48-77; Score =20.9; E_value=0.0047; Accession=PF01839.14; Description=FG-GAP repeat
  Pfam annotation: Domain name=FG-GAP; Domain location=581-610; Score =17.7; E_value=0.037; Accession=PF01839.14; Description=FG-GAP repeat
  Pfam module annotation: Pfam domain module=FG-GAP::FG-GAP::FG-GAP; Domain location=424-447::48-77::581-610
MRKRDLGILLLAAFAIFFSLHHEGDFSFRESWYHLTDEDFPIKYEADRLPPPLVADLNGDGKPEVLLPTHDAKIQVLQPPHARHLNDDSAFQEARVMADISLLPDNVRLASGRRPIAMAVGNVDRSYRPGEVRKQVLVVVTSGWSVMCFDHNLKKLWEHNLQDDFPHAAHHREVAISITNYTLKHGDAGLVIVGGRMEMQHHSADLFDEFMIPEHNMDDRRRSASEKQGSEAGNADLRHFALYAFAGRSGDRRWSRKNENIQSQPSDASVMLPQHNYKLDVHALNSHQPGQFECREFRESILGIMPHHWDRREDTTLQLAHFRKHKRKQVKRTPGKAVINSVNKPIEHNPPGKDASNRIARALGKAADMANSNKARKAQRMQYVPTITNHTQVWWVPNVVVVHEKEGIEVVHLASGRTICKLHLNEGGLHADINGDGVLDHVQVVGGNGIKEQTVKFWEDIDTAGLEVATPILVQTDDGHKHRRGSHGDIIFLTSRGEVTSYSPGLLGHDAVWRWQVSSGATWSNLPSPSGMMENIVVPTLKAFSLRAYDPKEVIIAGGDQEAVVLSPSGGILAMIELPAPPTHAHLLEDFSGDGLTDMIVVTSGGIYGFVQTRQPGALFFSTLVGCLIVVIGVVFVSLHLSSSNAAKPRASSSEYR

SEQ ID NO: 82623 - protein, 99 aa, Zea mays
  Coding DNA Sequence Number=SeqID_39248
MTRNGRPGAGGVGFGLRLRLHLTAGQAQAALASASASTCTRSQIRRKGTNKEKSGRQEVEDAGGVGARGTEEHGGGGLCELSLTQLVDQETILTIMYSN

SEQ ID NO: 82624 - protein, 515 aa, Zea mays
  Coding DNA Sequence Number=SeqID_39249
  Homolog annotation: Hit_ID=A7PAW3; Match level="QueryCoverage=74%, HitCoverage=59%, E-value=7e-79, Identity=42%"; Hit description =Chromosome chr16 scaffold_10, whole genome shotgun sequence
  Pfam annotation: Domain name=PH; Domain location=74-198; Score=15.9; E_value=0.052; Accession=PF00169.20; Description=PH domain
MAVAFLLLGLGFLLGLLSLAIAEGLTLLWAIRSLTRRTSASRSTPPPSLPIHPTPARIPHVHDLYLDTFPILSTSKQGFLWMLEQPKDSSINGASPGIRDRKLLVEVFPVKMSATLQGHSLTLSGPDDASQLTIDLLGCTVAAVSASNLPSRKWAKRYPIKLESKESGICRGSKVCYVYADTSWEKESWCKALRLASTTDKDKLKSHEMLTQEFRSYMSSLKAGYPSFLGPSTLSSQEHVLVDNTVKNDGPSKLRGFLKRLVGKKASAKASQESKTGPAPSKQDTSQPSTPSSTMSFNSQLPASPSAKVDEKLADDGTLCWNLLISRLFFDAKMNDEMNKAIRARIQRTLSNTRTPAYIGEITLTDLNLGKLPPSLHRMRVLPLDLDESWAFEVDFECSSGILLHIETRLEVQAPELEKDIMKTDIRGNPNGDASSDFLDSIEQYGNQFGPSEVSDFAAEVNDEADTLRKSKSAGWASTYMSRWRSILNSIADQVSQFGMLACSSDLDCAFSLSL

SEQ ID NO: 82625 - protein, 201 aa, Zea mays
  Coding DNA Sequence Number=SeqID_39250
  Homolog annotation: Hit_ID=Q5Z414; Match level="QueryCoverage=69%, HitCoverage=78%, E-value=5e-48, Identity=70%"; Hit description =Putative uncharacterized protein B1206D04.12
  Pfam annotation: Domain name=cwf18; Domain location=4-172; Score =70.3; E_value=6.2e-18; Accession=PF08315.3; Description=cwf18 pre -mRNA splicing factor
MGAEEDAAARRERLRALRAAKDLLSTPDGAPTPSTDGEHQNGNHEMAEEPELPGHQDAPGEAAKEDGSPTEEAEEVEDDGELPAMKFRNYLPHDEQLRGGKLAPVSLPKFEDPISAETAEPKEVENLFGNIAPKNPNWDLKRDVQKRIDKLERRTQKALAEIAYASSVLVRLGFQRIYSGLQWNSRGRRKPWRNLKIDRPV

SEQ ID NO: 82626 - protein, 117 aa, Zea mays
  Coding DNA Sequence Number=SeqID_39251
  Subcellular localization annotation: CTP_CleavageSite=56; ConfidenceScore=5.27e-01
MTPAAELRRLTAVSSLPVSPGKIEPTLKLASPSSCFGTCPIPRNRVTSGESPLNLPAAGFSPWVGREIARINKHLLNTKWGMGKRQCGSLSEVFKKCAMKGIHPHHLVSGMIRDSLV

SEQ ID NO: 82627 - protein, 162 aa, Zea mays
  Coding DNA Sequence Number=SeqID_39252
  Subcellular localization annotation: CTP_CleavageSite=46; ConfidenceScore=5.73e-01
MKLWKETSRSSKTTTSSRCGLAATPSRLPVKAALSTFLFRTLIYCGASGRRSRQRFAFAVITAPKKGPGKGDTPKRILPCEGTRLRATLLIRGSKAGPPEGFDSRLRSRGPYTHYWSEVRRSAPRKGSTTASGYSGSAPITDQGFEGWPPKGSQPPQTPSEG

SEQ ID NO: 82628 - protein, 164 aa, Zea mays
  Coding DNA Sequence Number=SeqID_39253
MSRQQLNGAPARRRVNTAVSQEKQVLGRRDNGDLLEETRHAASAADIGERGGDVGMSWPSGAAAEARLGGFCARALGARCSRSIDIILEGPLDLWVRTHTRFRCTTLILLADVDRIVFIGVQDKHHGKDQGMKRVKVITDKHNQGCILDKTCEASKKGKQSMVK

SEQ ID NO: 82629 - protein, 149 aa, Zea mays
  Coding DNA Sequence Number=SeqID_39254
MAHARATAAPRTTRPVALTLRRDRRHLWQEKQATLRLRHNDRVKKGTGKGDTPKGILLREGNGPRAPLLIRGSKAGPSEGFNSRLRALGLRALYWSEVRRPAPRKGSTAASGHLGSAPTTDQGFVGWPSKGSQPPQTQSEGMTLGTFDT

SEQ ID NO: 82630 - protein, 123 aa, Zea mays
  Coding DNA Sequence Number=SeqID_39255
MAVSRRASTQRLPSLTVAAPQVATHARDSVPSHRHRLAPWPPLPQRDRIHPTPVQCSCVQPMGRRDDARACVSPAGSAAGCLSRTCPRLAPAAPAESHGRSSLSLFYAAVQRRRNPLAVSVRL

SEQ ID NO: 82631 - protein, 717 aa, Zea mays
  Coding DNA Sequence Number=SeqID_39256
  Gene Ontology: Mol. function=metal ion binding; Cellular component =integral to membrane; Biological process=positive regulation of I -kappaB kinase/NF-kappaB cascade
  Homolog annotation: Hit_ID=A2YFJ6; Match level="QueryCoverage=88%, HitCoverage=89%, E-value=0.0, Identity=69%"; Hit description =Putative uncharacterized protein
  Pfam annotation: Domain name=Ank; Domain location=177-209; Score =34.7; E_value=3.3e-07; Accession=PF00023.21; Description=Ankyrin repeat
  Pfam annotation: Domain name=Ank; Domain location=230-263; Score=3.7; E_value=9.6; Accession=PF00023.21; Description=Ankyrin repeat
  Pfam annotation: Domain name=Ank; Domain location=264-296; Score =24.9; E_value=0.00031; Accession=PF00023.21; Description=Ankyrin repeat
  Pfam annotation: Domain name=Ank; Domain location=299-333; Score =25.8; E_value=0.00016; Accession=PF00023.21; Description=Ankyrin repeat
  Pfam annotation: Domain name=Ank; Domain location=74-106; Score=4.4; E_value=7.7; Accession=PF00023.21; Description=Ankyrin repeat
  Pfam annotation: Domain name=zf-DHHC; Domain location=464-528; Score =78.5; E_value=2.2e-20; Accession=PF01529.11; Description=DHHC zinc finger domain
  Pfam module annotation: Pfam domain module=Ank::Ank::Ank::Ank::Ank::zf -DHHC; Domain location=177-209::230-263::264-296::299-333::74 -106::464-528
MASEIEVLEDTTTSSTSLVAAASTAPSAAEGAGAPAENESLKNDVYTAAAYGDLEKLQRLVEGEGRPVTEPDGGGYYALQWAALNNRVAAAQYILEVALSPRSRAPSNASQFGLLFVDVRFALLLGDLGCNRTVQEECTWLCCVKCQLVTCIYAFNLFSLDQNVYVHGADTNAVDHTGQTALHWSAVRGHIQVAELLLKEGAKMDAADLYGYQPTKAFLDVYLPADQLYPLYQATHVAAQYGQTAFIYRIVAKWNADPDIPDNDGRSPLHWAAYKGFADSIRLLLFLDAYRGRQDKEGMCCTPLHWAAIRGNLEACTVLVQVGKKDDLMVKDKTGLTPAQLAADKNHRQIAFFLDNARRVHDRGCGANTRFGKLSKLGLAPFLWCTIIGMLITYVHSVILGQYVMTMTAPFGMFAWSGVFLATAGLVMFYKCSRKDPGYISINTRGSQNQRDDEPLLKMELENPALLFGNWSQLCITCKIVRPVRSKHCSTCDRCVEQFDHHCPWVSNCIGKKNKWEFFMFLTLEVFAMIITGSAAIIRLVRDPDSPSSFGAWIHYSAFQHPGVVSFLALDCFLFFGVAVLTVSQASQIARNITTNEMANSMRYAYLRGPGGRFRNPYDHGIRKNCSDFLLNGYNEDTERLDQTLHTDEEMGMIQMTRAVSQNGDNHLHHADLHSGNIRELVQKSMLLSITGASLLEKLRHRSMKARRSKLCYVVTH

SEQ ID NO: 82632 - protein, 77 aa, Zea mays
  Coding DNA Sequence Number=SeqID_39257
MEPSGGTAVGAVESLLTSSCFRKGCQRFIYNYTKSTVRNTVDYSGQEKLFGKSGQARTVRALAADRPRHRFDFDQEL

SEQ ID NO: 82633 - protein, 52 aa, Zea mays
  Coding DNA Sequence Number=SeqID_39258
MGSGGVGSPRYHGDVFLAKRVMMEALMEILTMMNSKSNDTSVIFLWEIVPVI

SEQ ID NO: 82634 - protein, 669 aa, Zea mays
  Coding DNA Sequence Number=SeqID_39259
MPSSSSSADATPPAAASSEETLSNVMVEELRAGDSVEFGVSRMTSARIEDMQRLGYFGGGVAHAPGTEEVPEPEGELVVFEAFFVAGLRLPAHRVFELNQLPYDGYPGQDEADRRGKKPAVETGGDPALVAAASSKKRKLVMDKDRQGAARKRQATVRVHEARPKRQRGTAKAEASGGGKPPLPVKVGASAPGKAPEATVGAGGPKLTKVVPSVSGVAEAAKAARTLPPPGKRVADFGTEINVEDYLGGSDEGPLALVMPGAAIATAAPAPKAGGEALGVGGEVSALALVRDEAGVATRRLKGATEALSRATEALSQVADFTSRTASGALTAALSAEVERLRTQHADAVREKSASDNKCRKLAEKVAALEKEKADLRRQLAGERREANEAIAKEQAAQAEARLARAEGNIAKELAGELQRRLTALESRAEGAEAAMRAEAERTRTQLMTAYRELGVRTGDFEVPEREAGLRCLEWVQEELQELPTVLAGLMSFTSLVTCEAAMNALSREGCRHFEALDQADEDFGRDIFEVEDPVVKESAGALYDRMWGSYGCEVVRARAEAARAQAERGERVDDFGALNSALPDPETTPAEAATGVAPGPTPETAEDAPGAPAPAAAGEDLPPKVAEGAPDAPAAAVPSAEDPAEVGAEAAAEASAEAPAAAGPPQVA

SEQ ID NO: 82635 - protein, 137 aa, Zea mays
  Coding DNA Sequence Number=SeqID_39260
MHETPLELPLAQRNQATKAHRLGPLNRWSGYHLQEALIACLRGRPPLVLDQNLILKAPKDYQGPTEPEREYHYPLTASIVPAVLADQWDFFFLFILVKHAASSLCTITTLGINLRIGLYRDIIGNRYRRVDIPIQAR

SEQ ID NO: 82636 - protein, 166 aa, Zea mays
  Coding DNA Sequence Number=SeqID_39261
MGKGKRGRGSPRRAGDKRKHDPSPPLEDFGDSEYSKEEVSSESEGSLALASPPTSSDDSDDSQGLATEVWTYIRSVERAGLEGSDESEVSSDEENSFGSSEERSSDDNNDEGGDGGDGSGDGDGGDDDDDGGRGSEGDDDGDGDGDDGGSKGGSGSGKASGKVPLV

SEQ ID NO: 82637 - protein, 159 aa, Zea mays
  Coding DNA Sequence Number=SeqID_39262
MDAVGKHAAGSRGEGHRQRWESGCALPDGEGHGLRQGSGEGLGRRAAMPSVVENGVDGGRKWHGRGAARATRGGKTRGAGGRRAGREEDARGGEGHAMNAVGKLAVGSRGEGHRQRWGSGCCRMGKGAVSDREVGNGVEGGAREEGDREEGGDGGRPSR

SEQ ID NO: 82638 - protein, 105 aa, Zea mays
  Coding DNA Sequence Number=SeqID_39263
  Homolog annotation: Hit_ID=A2YQ93; Match level="QueryCoverage=37%, HitCoverage=5%, E-value=1e-09, Identity=74%"; Hit description=Two -component response regulator-like PRR37
MVSDSDYTEFENFSKWLGVTQVVSLKCKPIQPKLLLWWNKIHSDFVQQQVCWECFLLKETVNVLLVESDDSTRQVVSALIRCCMYQVTYHLFNFLELYNLSQSTT

SEQ ID NO: 82639 - protein, 616 aa, Zea mays
  Coding DNA Sequence Number=SeqID_39264
  Gene Ontology: Mol. function=cysteine-type peptidase activity; Biological process=proteolysis
  Homolog annotation: Hit_ID=Q109R5; Match level="QueryCoverage=84%, HitCoverage=47%, E-value=2e-32, Identity=24%"; Hit description=Ulp1 protease family, C-terminal catalytic domain containing protein
  Pfam annotation: Domain name=Peptidase_C48; Domain location=71-249; Score=-15.8; E_value=0.0028; Accession=PF02902.10; Description=Ulp1 protease family, C-terminal catalytic domain
MESLSVGLCHSKPKKSVATAIVPEDYICTQGDLALIDFIKEIPCEPRVEVVLIDDAFVERKSMECLFQPNAYLGDEVIDCYINLIKAQKHLKCQFGGLVHIENAFQFNFLKRDGDVEIKTEELYPIEDMTQICSAERRVLLYLDHDMVFIPINIRETHWIKGLQRQIDMISQRKELKDHRWPDLQVASWPLREIDMGYAKQTDSSSCGLFLLNYIEYWTGDELSDSFTQEKMAAILLSSDLNKRRGCLLYKNDKEVDFVSPSDVEILENPTDSKKRKLLNVLHDSEVVYEDEEGPITQADLQKWFVDDWDKRAPVKVSNDGCTNDFLMVGLSTKDMPLTKADSIDVLCDYIMAIEDDTTLEMTWVRSFNPFKIEISVKDLQNILTINLDMTLRCFDMAVRLLANKESRRPKGEIINNRKHYMDMRFWRMVGFGKLPKYHQDPTAEELAKTLDCWPSMNYYITGCRYVLMPWKFNGCHTLFVIDYVKKHVTFIDFTPTQDWCKHMPYKRFAEAIIMASKKYKIAYSKKRSGWAEEIFKWEHTIQTSVPIDLRGFNTSYLVLQAMAMWGNDTRMKFVGDAKIVRKNFVIDLLIYEDNLCRYAIPANIQQRLIDIAKKN

SEQ ID NO: 82640 - protein, 75 aa, Zea mays
  Coding DNA Sequence Number=SeqID_39265
MAERTGGASGGRSKRRFAFAIMTASKKGPRKGDTPKWTLLREGNMLRASLLIRGSKAGPSEGFNGRLRSIGFCAH

SEQ ID NO: 82641 - protein, 117 aa, Zea mays
  Coding DNA Sequence Number=SeqID_39266
MVRSRSDAMHHPGEQDRPHRYRAAALPCRAVAHTTAKPARRSRHPKEATVEGVGASCAASGGGARRTTAARPAVQRSSECGSILKPRSWPRAKEAPGLLYDGARGRINGGRARSRNE

SEQ ID NO: 82642 - protein, 78 aa, Zea mays
  Coding DNA Sequence Number=SeqID_39267
MVRALWLRVDDYGEKELSPVGPHVRECKCAKEYGPHGDEGLIQKNLKVKRAQLGAIMGWMTNREVLTGRIISHRSLYN

SEQ ID NO: 82643 - protein, 45 aa, Zea mays
  Coding DNA Sequence Number=SeqID_39268
MAGKSLGLGINSQKVQGSRCKCYRDTGNPPDGLQVQLLTTTGALW

SEQ ID NO: 82644 - protein, 282 aa, Zea mays
  Coding DNA Sequence Number=SeqID_39269
  Subcellular localization annotation: CTP_CleavageSite=17; ConfidenceScore=5.50e-01
MITSNGCGVFPQFPSVYGGAARGSRRTTAGDDRSPATRPGTSPTIVQNVTRIKASIVKVNSPVERAPTRPVDGAAPPAAFGEGFGVASTVEPTRRAHGENSFSFYTFLQFEYYTLKQAKDEHIQKLMEAYLVTHNQRRALRIQEPASSNPVQSVRDEDPQILEGHPVSIKGEKKAWELPEGAIVLEGIPVSPKAMDKQEHPESSQDPPPELFEPLTMKKIPAPSLEVKEEAASTPPAPPPSEELQEPVPLEEEFDPVPPSQSLPEEEINISSLLTHPGDVSD

SEQ ID NO: 82645 - protein, 448 aa, Zea mays
  Coding DNA Sequence Number=SeqID_39270
  Subcellular localization annotation: CTP_CleavageSite=34; ConfidenceScore=5.30e-01
MHHVFPSSEPPGWGTPAVLPPCRRRNATSWKLVPFSHRSASRIFIVQPGCIPSPVVTQDGDLQLDGGEKRAGLRPLPLPQLHGCSSSVLGRGVCRVGVGPCAGGGPLLPSVIGGKGIHRSWHGQLPRARLSEPSGFEAAPGAAFRHGSWKGFRRRRASRRHPRTDLQLFGLLPVLASRVGGMGEGLMAAASALRSSLLLFGPPGQKSSSLPLPGRATTSRSSVFCCSVGPPIAWGCSYLRSTETRLVDYLNRFTERELPHAKVTSESWLRKGGVVGQSLAGSSTGRTDAGVELPRPQAELMSLGSGGPPTASPSEARSDPAEGVVDAEGAVAPFGCRRPSLQDQGSVSDAVEKARKIISAEELSSMKTCSVRGVTYPNASYLSQKVMSEEVQEVQELSADELGAVVGDDGVRDPKAMDDVVGDDGVRDPKAMDDVGEERHRLFGPDAV

SEQ ID NO: 82646 - protein, 77 aa, Zea mays
  Coding DNA Sequence Number=SeqID_39271
MSPPCKGRNLPSVMPGDEETDAGTCGDIMKPGNGIRCSPCPETKPRKWGKLPTNEYTEKGVTPVVAIADELKIESES

SEQ ID NO: 82647 - protein, 914 aa, Zea mays
  Coding DNA Sequence Number=SeqID_39272
MNDLAAVELHPGHTVEFGVSRISSVRVQDMQQLGYFGNGVGRVPGAEEIPEPEGEIVKRKVGSAEDCQDFGRGCGVPCARNKWGNWYDYWFYVAGGEVEDLLGLLVAVMCSHCYVAFPPFQVAEDDSDEGALHCAARMSSGPDLVEEFIGYGVWPLAHGWALGKVCPRQMPSLGEKLVRSPAFALDLRGRDPAAFVREVEDGAVQIAGCYVPRMEALRSWDIHGSNVRLNRVFELNRLPYGGYLGEDAAVAVDRRGKRPVAVTEEGPSQEAAPAAKKRKIAFGGGMSSPELQESSARMLKVTRGRWPKNVLIPRAAGEDFFTSRMARGLKIFPYGQNIAAVVLAVMEKDRQDAAQKRWAVVRIGDPFREAKKARGAAKSAALGSSKPLPAAKPVGHGPSKASASAKAAASGAGKPPSRGPAKGRTDEAAARVAYFDTDICVGDYFVWSDVGQLAVVPPPVAATSPTAMVGAKGATRDLWATFCASGEIMSAATAKDVAGSMSQQLRQASQQLSQQLKHAADFADHVASEERREANKAIADAQAAQAEAKLAWAEGSLARQLAEELEARLDAFTQLHGQSRGLDACGGRADACVEELGVLPTIVTVLMSFASLVTCEGAVNALSREGSRHFEVFDQSDENFEREIFKDEDLVLKQSTGALFNRMWGPHGRETVWERSDRAIEQMAHAKGVEDLGGLDGALPKAAGVDPEPPSDAGEGPSSTPTPTGASEDPAPAPAPTCEDASKAVVEPATKDPRGGRAFAGGEIGVPTFGPAQATTTDNTDFAAETSIVVHVDDSVPGFMSECFESDGESGSSFPWTEESSDEGLDYFVALDVVVAETSPRVEGTMDLPGASTGCRRRRVVGKQSVGEFSRSGRRRRMGMERGRLRVDGVGKRELLSSPIGAGIGEGDLRELLR

SEQ ID NO: 82648 - protein, 193 aa, Zea mays
  Coding DNA Sequence Number=SeqID_39273
  Subcellular localization annotation: CTP_CleavageSite=46; ConfidenceScore=5.06e-01
MSPTACACGEPYPGHHRRRSAPRRVRQDLLNLTQPFTRPPSLSVSRATLFPHRGYCCKGEGARVERKTSQGVLQDCNLADGEYILIPEQGVAQEVVQEPAPEPATEDLPAPALEGKPGYGGYKCGHCMTAVGVSEALYAKALVLLANQTPQPNNFMSRGRGVDSSHRRNRIPNVTEAPFIEDFYRGSNDSGFV

SEQ ID NO: 82649 - protein, 196 aa, Zea mays
  Coding DNA Sequence Number=SeqID_39274
QAPTGHCAAARKQGGSRVASHGGDAPGHLLQRAMGEVCASEERRVELLLLWRRGSPCCWNFWAPWEEEVDELLLAVEQGRGAAAGRPWSRKVEVGRRWKKDAEHRGFGRPGCWPSREEHGKAPWEKLELAAMGESFSAPRKKEQGGAMAGRGELLAIWSSGRGVRDCCAVEADGHGRQRAEGMHAKEEEGWRGGDG

SEQ ID NO: 82650 - protein, 186 aa, Zea mays
  Coding DNA Sequence Number=SeqID_39275
  Subcellular localization annotation: CTP_CleavageSite=32; ConfidenceScore=5.50e-01
MPSHSPHALRPSAFRAPRWGAPALPSSRCCWRSATSWRLAPFSHCLASRIFIRQPGCNPSPMVTQDGDHQFDGGEKQAGLRPLPRPQLQGSSSSLLGRGGELSQGLPSRGLASRLFLRHLGVETILQLCGGGVLHVGVLGPTAHPGLPLKVFFRSRTVSTTVAKWFMSDARETVDNVYRFGPLRDA

SEQ ID NO: 82651 - protein, 346 aa, Zea mays
  Coding DNA Sequence Number=SeqID_39276
MMLPGPELAKRLGLDIGVKNSLGSMRGTNLVKVITTLTVGTTGIARELCYLYRESPQWELGGEQHAEPAHGAHTARQDVQQRQSHTDGRNVLTIFSFHLAPPIVVVPGCQPKYHPRRASPMHTAAATVPRPRCSSASMGSPSAKAAPPRCVAQIEGEVGVVLGAGASCLVIPRGDDFGNVDLPYRDYLLRREDSGVLVDGPAPSLRQWDIGLDVVGSPLRGGCDGGGGAVQQPAKGGEDREVWLMMTREVSRGRVERRKVGGEGKKVGYGAEKRPYTVTLPRSRRRPPPPVLVARVAPTTSDADPHTDVTVVTSRTSLTTPPELYCRRGFCAMSVTHANSRPRTVL

SEQ ID NO: 82652 - protein, 92 aa, Zea mays
  Coding DNA Sequence Number=SeqID_39277
MGIGCLRDKNLNKDYGVVPGHIPSRDLRRGLPFRLWWVQVRSLHDGSRGQWGIVRQGGSLEEMVAGVTWPSILPPGWTVEWDPASAEEEHEE

SEQ ID NO: 82653 - protein, 233 aa, Zea mays
  Coding DNA Sequence Number=SeqID_39278
MTPQLPDETRSSVATFAASELPRTVAYEFAVDRPLDEQCMPFFSSLDHDRDADHLSGCGYVDQEGFSGSGGTKMGALVRSAFKFPRASSASGVQVKHSVFLKRWYRGRPLSPRRKMKRLRAARHPMTLCTPFQVLDRPHVGDGRDFLRVGLDAPLGDDEPQEHASGDSKDTLLGVEFYAIRLETLECRFKVREEVGGFPRLDYDVIDLSLDHSANVLSEHMVHAPLVCRACIP

SEQ ID NO: 82654 - protein, 342 aa, Zea mays
  Coding DNA Sequence Number=SeqID_39279
MPGKANCCCPARVQHSVLCLGDGGQPHRGVSQHVVHHEGGTRVLGRSHSRFRGEDGSEDLSVRFGAASARWCGSGGQVDTAVGAEVVAAGESFSTDKTVSATRGPTSGSLALMSGSRPRRGDANESLPAVASALGPSLLLQRSPASYPEFVVPYALRCGGCSYPREWNRSFVCNGTLSAGVCSLWLSGPEHLAAEAQTYRCHVIKLRLFSSCFEYQDLFVGSRIVYPSESYLTRKVMSEVSVSQRRRSPLARLASPLTCTLTRPQDSVTDIVEKARKIISAEKFSSIKTCSVSEIAYPSVSYLSQKVMSEDHAIEVVEKRERCSGRKTFSEENFDAEGVPPF

SEQ ID NO: 82655 - protein, 136 aa, Zea mays
  Coding DNA Sequence Number=SeqID_39280
MCLSYKTNPPSLVFGLKQNAIAQLRERTEGRREGLAGDLRSGLDVGAQFLAGQCRAYTEKVALSPVKSGGRAAQNASSALREVMGSYTNAIRRRLRLDQRVNVISVSDSCVIALAVVALFAHVATHHSHVSHAVRA

SEQ ID NO: 82656 - protein, 340 aa, Zea mays
  Coding DNA Sequence Number=SeqID_39281
MVLAWLGRGARRAGARVSVLWRGQEASNTWSARLVELLGGFWPPEAEAATKRPASAAASPRRAWMRSRPPTRSQKRGSDRFRGKPNLISLGFRNRARDASPSQLAAAGLLPFASPATAIIRDARGGVRVPHRISRRRARRLRRDFRINSGYSSEDRKSTSGKCVSTLITTHVPIKLWYLSPPLLAAKAEDMCPRQIFVHTPHVWYTNDLINPHQMDSADSIADKAIGRMQEISDKIFSVARETIRPGRGLTSFDATKLRVALEEIACMLEQDSLVLQDQLDIVNNVNIPVDSSYEPSTLSSPPPSDDDLTPHWDFAEHFQNFWGVEYDSDQMPSFSDNDV

SEQ ID NO: 82657 - protein, 582 aa, Zea mays
  Coding DNA Sequence Number=SeqID_39282
MERDRQDAPWKCRAFARIGDPLREVKMVRASAKPAAPGTNMPSPGMLGPNASLPTLPKQERRLASPTHATEAAEFAAERRRLEGRIEFLRTQHTEVVRDKSVAKNKSRNLLEKLSAAEAEKEDLGRQLAAEKENAERARAEAKAARDRAHVETQAARAVANLALQHAADAESGHRSLHGYLDRAETSTRTSVDRAHKLLVDAYRELGARTAPFDSSGEEVGLCFVTWLQEELEILPAIMMGLMSFASLITCEGAANALSREGCRHFEVFDRSNEDFDRGIFQVEDEVLKRSAGALYDMMWGQHGRDTVWERSDWALEQMANDEEVDDFRGLESSETQAEDVKTEAREQPAPPTGPREDPAAETILPSEDAPATAAMTTEDPSVPTAPSQVPTSRPALATPTDNTNFVVAANAVPTNDSLSGSESGSWSSDGGEFGSPFSWTESSDEDLDYFAALDVAAAESSPRLEQGNPTGVSSDINRVLAQDGNSSVNLASQGHCAGARNTQRPLRACYNGPDHTWASMLDEAARWDDLVTGLRPMSYGAKGVPARCLVSIGPTTTVKASSEGWRLRLRPNICPTRDQFD

SEQ ID NO: 82658 - protein, 83 aa, Zea mays
  Coding DNA Sequence Number=SeqID_39283
MARKRTKYLRTRIGTTVGEAQRIRRLTQRRSCEQESFGVIAEKETDLKMKRLFRPRWITIELLPNVKGMDVILYELCPVPINR

SEQ ID NO: 82659 - protein, 430 aa, Zea mays
  Coding DNA Sequence Number=SeqID_39284
  Homolog annotation: Hit_ID=Q7XBD4; Match level="QueryCoverage=42%, HitCoverage=18%, E-value=7e-07, Identity=26%"; Hit description =Cinful1 polyprotein
MGRIPHGPPVVVTTWETCRLRQSLLLRPVHEGNHAGLRLVDAFGMFGRIVDVTICTMGRRSHRAKGSMFAFAPTFALRGTSSTKSVGAEDAARCPHQADCTLPSTVCSDAFFFVCCECIIGRAIVRGYFEQFGGDGVAAWPYHRVRHLEDFLGSRAGDVAAWVHQLTLNVMVALAKYVWAVTSYGGRPSVEVFAKNYCLHWQKRKIGNKIAQFGSCTFTLRTGKTSTEVVEIVPCARNKWGNWWDYWFYVSPSHVEDLPGLPLAILCSHCYVAFPRFKVVEDDEDEGALRYASRLSSERDLVEEFIGYVEAEAVKIVGKYVLRMETLRSWDICGSNVRLNCVFELKNLPYAGYPGDDHTDAVIRRGKKVMAMVDEGPSWGIAPSVPASKRKLGTTAEGLWASEHFDVEFLETYAAPGETMSLPELQQSSA

SEQ ID NO: 82660 - protein, 172 aa, Zea mays
  Coding DNA Sequence Number=SeqID_39285
MAPKRATSKAAASIDDTAKAAILTEKKGKALADTTPQEAFEDDAVNSKRQRQDHPTPDGTVCTCSSEGAPQAPPPGFALPEGKDTIEDRQVIDISVEDQLNLRALCIKNNHLQKQKEILEAKHQHVTMQAKVRHMIQDEEQRARELEQEITLIQGEGQYNLQCRPLALPTPL

SEQ ID NO: 82661 - protein, 199 aa, Zea mays
  Coding DNA Sequence Number=SeqID_39286
MQIIERKCEAQKGAGIRSNLNFYVVLWTVGKKTLDKLTDQPGNLIPIDVAEVPDLSASRDNSDLAEVDPCDPTTTSKPEAPMQSLNQLPVARVTGPGGRGGAWTGEDGAWAGEGAAGVDVPVLVLMSSSSGACLPRLGQADPMGQALVLDPGLPPEQLLAPARTLRQRGCNLSNAKNKNMYVMMMQDLVIIMLSEEKLS

SEQ ID NO: 82662 - protein, 120 aa, Zea mays
  Coding DNA Sequence Number=SeqID_39287
MGKPIPSLLMLLLSRGRYNGSSSLISCEKQTIRIDFLSLQVTALVPTITGMGDHVSGRVRGKVHCQVQSAEVPDLSASRDNSDLAEVDPCYPTTTSKPEAPMQSLNQLPVVTDLADARSA

SEQ ID NO: 82663 - protein, 200 aa, Zea mays
  Coding DNA Sequence Number=SeqID_39288
QCVEETRGLRYWARGGLGFLGPGGSGARWSFSGGVTVLVVVPVVAPPALGFGGSRPHRPRSGPPSSDLRLGDVGPSGEDWILLCTGFYGRKPDPSRTCDSGVLNVTTFLKASLLKLVSAMSSPFGCCFRFSASEAGRLSGRGEAEDHDWKSRVVGFFLWPYVVRLGESELLLLCVELDNNEPRWSLFVELSLSELLVYPV

SEQ ID NO: 82664 - protein, 145 aa, Zea mays
  Coding DNA Sequence Number=SeqID_39289
MGKNNKRKREPTPPSEEFGDSEYSEEEFSSEPEGSPAPVSPPASSDDSDDSQGIAAEVWTYIRAIERAGLEGSDESEYSSDEEDSDGGDEGEDDDDDDDDDDDDSGRGGGDGGRDSTKGDSRGSTKGSSKGSTKGGGGGRGRASG

SEQ ID NO: 82665 - protein, 99 aa, Zea mays
  Coding DNA Sequence Number=SeqID_39290
  Pfam annotation: Domain name=GRP; Domain location=1-95; Score=-28.7; E_value=0.068; Accession=PF07172.2; Description=Glycine rich protein family
MARVRKVAVVLLALVTSANVWTYIRAVERSGLEGSDESEYSSDEEDSSDSSEESSGGDGGDDGDDGGDSGRGGDGGKGGDGSSKGCNGSGSKGSNKASG

SEQ ID NO: 82666 - protein, 100 aa, Zea mays
  Coding DNA Sequence Number=SeqID_39291
MGVREVEIPRPSCSSRAQVGVMMAPPVDTAGLRPRLGDVEAPPKSRSSPSSVAEVESEPLGRARRRPLAEARAESEPWGRAKRSSSSSGAEPKSEPWCRI

SEQ ID NO: 82667 - protein, 255 aa, Zea mays
  Coding DNA Sequence Number=SeqID_39292
  Gene Ontology: Mol. function=DNA binding; Biological process =regulation of transcription
  Homolog annotation: Hit_ID=Q6Z869; Match level="QueryCoverage=59%, HitCoverage=33%, E-value=9e-18, Identity=43%"; Hit description=Myb family transcription factor-like
  Subcellular localization annotation: CTP_CleavageSite=15; ConfidenceScore=5.14e-01
MPPVKFNIPAPLAPTANATAAHPRVLPVLSASPCPRHRRHNPLGLPGLGVDADKDDEAVGDLETAAASSSRRLPHPETKKAMPDWLQSVQLWSNQQQPSASPPQHQDELLLPCRPVALNACRKPGGAFQPFEKEKKKKDKEEKQCAELELELPVAASSAVVGDSCDRAGATDTDTDTAENNKASSTKGGKDKEAQLSSQAPSRKARRCWAPELHHQFLQALQQLGGSHGLLLTLILPPPHHRKLENRNFFVGYAW

SEQ ID NO: 82668 - protein, 63 aa, Zea mays
  Coding DNA Sequence Number=SeqID_39293
MGKPVPSLLMLLLCRDCNLTDGEYVLIPEQGTVQEEDQKQAFKAAIEDLSAAPAIEGKPRFYA

SEQ ID NO: 82669 - protein, 51 aa, Zea mays
  Coding DNA Sequence Number=SeqID_39294
MESALHFSSVYPEPKVVMKEIHADIQSQMDLSKEQMLYESKIPQKNVKCNI

SEQ ID NO: 82670 - protein, 91 aa, Zea mays
  Coding DNA Sequence Number=SeqID_39295
MAMNAVCCRCEGESSSRPYPLNSHPHSLNGGPRCAQDESIDRAYPLHGGTTPRSDYFTFLGNELREGVFRTFGIPKPRTNFHVSSLLRKMI

SEQ ID NO: 82671 - protein, 260 aa, Zea mays
  Coding DNA Sequence Number=SeqID_39296
  Gene Ontology: Mol. function=cysteine-type peptidase activity; Biological process=proteolysis
  Homolog annotation: Hit_ID=Q5NKP7; Match level="QueryCoverage=99%, HitCoverage=46%, E-value=9e-35, Identity=37%"; Hit description =Putative uncharacterized protein 9C20.3c
MADKRKPRQGGEPFGFCPSTMRTETVEEDPNEHGQLPNINIQLPLMQDLMATKIQMLPVHQRSNFQAKLIDYDSEEAVQASCKLAATFGELIDEVLRADESVTPNTQGQAVPGGIVDHDSGPVFDKTPIGSVCASAIFLSELECARALRAYLCSKVIELDRNIIDFGEHRANCRDIQQSFAGGACLDNVFMQCFIECVRDDCSKHIPPLNAHQLILDVNVGIMVPMLRSRHWTLYVVNLKIGRIHVLDSNPYGPEMGGTI

SEQ ID NO: 82672 - protein, 554 aa, Zea mays
  Coding DNA Sequence Number=SeqID_39297
MPSRSGQLVRNPAFALDLRGRDPAAFVREAEDGAARIVGRYEPRTEVDGDMCGPRGKDVFARAPGVFGANVGVMNKDRQDVAQKRRAVIRIADPRREAKRARGSAKAAAPGSSQPMPAAKPAVPGSCKSSASAKTAAAGGTKPPLVEAAKGRELPSPGKRVADFGTNISVEDYFVGSGEGQMVVVPPSVATTSPSAVVRAKGTAQDPWAAFCASGEILTASAAKDVAGTMSQRLREASQRLSQQLSQAIDFADRVASGVLIVDVAAEVERLRAQHVDAVREKSAAKRKNRRLAEKVAALEAEKTDLRRQLVEERREANQTIAEAQATQAQAKVARAEGSLASQRAEEWEVRFNALRGRVDKAEASTRSEVERTLAHLVDSYRELGARTADFEVPDREAGLRFLEWLQDELLVLPTIVEGFMSFASLVTCEGAMNVLSREGCRHYEVFDQSDESFEREIFKAEDPVVRQSAGAFFDRMWGAHGREAVRERSDRAREQVKMERAEDVEDLGGLVGAPPEAAEVNPVLPSDAGEGPSAVPVPAMAGKDLVLAHADGR

SEQ ID NO: 82673 - protein, 403 aa, Zea mays
  Coding DNA Sequence Number=SeqID_39298
  Gene Ontology: Mol. function=protein binding; Cellular component =nucleus; Biological process=ubiquitin-dependent protein catabolic process
  Homolog annotation: Hit_ID=Q53NW5; Match level="QueryCoverage=18%, HitCoverage=60%, E-value=2e-22, Identity=74%"; Hit description =Putative uncharacterized protein
  Pfam annotation: Domain name=Skp1_POZ; Domain location=20-79; Score =18.2; E_value=0.0013; Accession=PF03931.6; Description=Skp1 family, tetramerisation domain
MPPPREHHQPQDEEDDDTAGVVKLISAEGFEFVVDRKAAMVSNTLRNMLTSPGGFSETRQGEVRFPEIPTNILEKICQLSPPPAPLQPPTSFPTVTALSSPGDSSFPPGGGTPIQAASLPSLPWPAPPSCSEADTVEDREDDELGYSYHHRRTASSGRLVIVRPNKTTVPTPRPVELPAETSLPSSTSSDKPPGRRAASELLEPEPRCPGYMLMQPAVAAPLQAPPCCAGPPDSILVAVAPTWGLTGVASYDAASFAPMAASALSPMAAATMFPAPASRMLAPRASLSPAMAGTALSHASPEHNASHFFKLLPSSVLSPCLVRSGAVPAWLDPLPPPSSLSPTLDLSLPRPSRLDPPLLRRSRLDLPSLWSDRHLHGWIRRYRGLPGRIRCCPFCSAVVARPP

SEQ ID NO: 82674 - protein, 132 aa, Zea mays
  Coding DNA Sequence Number=SeqID_39299
MGKDKEGRGSSRLSGNKRKREPSPPSEDFDDSEYSEEEFSSGSEGSPRAGLEGSDESEVSSDEENFSDSSEEGSGDDDEGDDSGDDNGGGGGDDDGNDGDKGDGGGSGDGRGDDGGKDGGSGSRASGKASLA

SEQ ID NO: 82675 - protein, 344 aa, Zea mays
  Coding DNA Sequence Number=SeqID_39300
MPSSSSSAADTPPTGASSEDTLSNVAAEELHPSDTVEFGVSRISSVRVQDMQQLGYFGSGVGRVPGAEEVLEPEGELVVFRLFSPLAFVCLCIDSWRRSCGDSRSQMEVRCQTSFCQNEDDFPKLLRACTVCLEIRSEPEYDGHEFVEHGTEKCVVTVYIGSKKLNRKLHVDLTSAQARVAALESREVIAVEALKQAKDEHVKNLMEAYLVTHNQRRALRIQEPASYNPVQPRRAEDPQILEGHPVSTRGEKKAWELPEGAIVLEGIPVFPQAMDKQDLPESSQDPPPELFEPLTMKKIPAPSLEVKEEAASTPPAPPPSEELQEPVQLEEEFNPVFPFSRCQK

SEQ ID NO: 82676 - protein, 18 aa, Zea mays
  Coding DNA Sequence Number=SeqID_39301
MENHPGKQCYHKGVLHFT

SEQ ID NO: 82677 - protein, 39 aa, Zea mays
  Coding DNA Sequence Number=SeqID_39302
MASVLQVSTKLEHRPLRVLASTGSPKLGLAPFAVGDRGL

SEQ ID NO: 82678 - protein, 70 aa, Zea mays
  Coding DNA Sequence Number=SeqID_39303
MDLRFRDGNGAGSGRVSVGFRPGGGEGGSGSEFPAPHRSVSATDRAFHYVDVSYNDAVAAYNLLDSTPAE

SEQ ID NO: 82679 - protein, 32 aa, Zea mays
  Coding DNA Sequence Number=SeqID_39304
MEYIVFLGHMAALEPSTLWGQFLMSMFTGAKG

SEQ ID NO: 82680 - protein, 282 aa, Zea mays
  Coding DNA Sequence Number=SeqID_39305
  Gene Ontology: Mol. function=hydrolase activity; Cellular component =extracellular region; Biological process=DNA integration
  Homolog annotation: Hit_ID=Q9ZT66; Match level="QueryCoverage=56%, HitCoverage=52%, E-value=1e-74, Identity=87%"; Hit description=Endo -1,3;1,4-beta-D-glucanase precursor
  Pfam annotation: Domain name=DLH; Domain location=57-281; Score=33.5; E_value=1.5e-09; Accession=PF01738.9; Description=Dienelactone hydrolase family
MPSSAQVLLCLAAVLAAAAATTAEAHSQCLDNPPDRSIHGRQLAEAGEVVHDLPGGLRAYVSGAASSSRAVVLASDVFGYEAPLLRQIADKVAKAGYFVVVPDFLKGDYLDDKKNFTEWLEAHSPVKAAEDAKPLFAALKKEGKSVAVGGYCWGGKLSVEVGKTSDVKAVCLSHPYSVTADDMKGAVQCSVLLLFFYAASLASPHVLVRNRNRGEMADRDPGGPERHDHAAERSVSVPYYAKIFQGVEHGFACRYNTTDPFAVKTAETALAYMVSWFNKHLN

SEQ ID NO: 82681 - protein, 161 aa, Zea mays
  Coding DNA Sequence Number=SeqID_39306
MSPGHWVPTVGASDNWATGQSDGALDRRPLALCSRYSAGTPDSPVNYSGVAPRIPEVGKFGVGFPGASDTVRWHTGQSVEHLPDANVAAGKDMQGISFEKMLFGRDKYQEMRMKAYEKLRFVINSETLNDKDAMKPQAVRLQVLKKKVDVLAIVSLPSLTL

SEQ ID NO: 82682 - protein, 144 aa, Zea mays
  Coding DNA Sequence Number=SeqID_39307
MGKNNKRKREPTPPSEEFGDSEYSEEEFSSESEGSPAPIPLRESSDDSDDSQGLAAEVWTYIRAVERSGLEGSDESEYSSDEEDSDGGDEGEDDDDDDDDDDDDGDGDGSGSGRGGGDGSRDSTKGDSRGSTKGGGGGSGRASG

SEQ ID NO: 82683 - protein, 86 aa, Zea mays
  Coding DNA Sequence Number=SeqID_39308
  Subcellular localization annotation: CTP_CleavageSite=55; ConfidenceScore=5.69e-01
MPAAPPPDSADPLRHLPARRFGRPAPRLGRPLRRLPARRFGRPAPRLGRPLRLLPARRFGRPAPRLGRPLRRPMPRRINRPRPRPA

SEQ ID NO: 82684 - protein, 90 aa, Zea mays
  Coding DNA Sequence Number=SeqID_39309
GDAEEFADDVDDRTIQTTRTNTNYIPPPRQVPVYPVVVEKIPVDLPRIRVENGVILEDSSEEFLPTPTPLAESLAFAAGSSDSAPPAPAV

SEQ ID NO: 82685 - protein, 72 aa, Zea mays
  Coding DNA Sequence Number=SeqID_39310
MMLNVSVPLLMLTCLTLWGLLPQHGGPVIGDRSIPYSSLGKEDIWDERDPKRKTSLALKEIVVLKAIAMESS

SEQ ID NO: 82686 - protein, 145 aa, Zea mays
  Coding DNA Sequence Number=SeqID_39311
MIKIFPKSEVGENPEKGLAQMYENGNLQNGIGVQMRQVQLIEIKETAEKGGDGKSKPANEKGNVNNRFMGILCRNGDTTENPPRAELLRKQNPNLNKMKKIGFRNDRHVITSEGKLVVGVDGRDECSSGALPLLLGGLTIFSPVG

SEQ ID NO: 82687 - protein, 142 aa, Zea mays
  Coding DNA Sequence Number=SeqID_39312
  Subcellular localization annotation: CTP_CleavageSite=13; ConfidenceScore=5.37e-01
MAGGKNSKGKRRRAASGGVLRLHSWRTLETLSSRRNNFPSRIRSLRRQFLDHPRSRIWMTPWASLTSRGRTSGEDFEESIEEEEDRDDDKDDEDCGGGDGGGKGDGGEGGGGSSKGSKSGSGGSKGSEGGGGSSSSGGGGDS

SEQ ID NO: 82688 - protein, 95 aa, Zea mays
  Coding DNA Sequence Number=SeqID_39313
MMMHPLGLFPVEKKDDLMWCDQALQSNAMTQLIGIAQTDKTTLDDMEVFIVDLSSELVEKDLQIEQMGNHTHELERQVEIKDNTIEILENQLHDL

SEQ ID NO: 82689 - protein, 242 aa, Zea mays
  Coding DNA Sequence Number=SeqID_39314
MQPGCTPPPAVTQDGDLQLDEPLAAPTSATAAGRGSSAGEIAKAGHGPTSNSMAFCPSLPHEFGHGRGPPGSSIRPEVSAAAVRPPGAEVVVVAAAGAGDGAPFVGLLLLHRPTPIEWGYSPVDYLNRFTKHESPRVKVTSESGDPWTASLSEARSDLAEGVVDAEGSTTPFQRQDLSLDVCASESCFSRKVMSEKVMSEKARKIFWQKRSFFEENFNAEGVPPLLAPEGGSGFAEARPTLP

SEQ ID NO: 82690 - protein, 408 aa, Zea mays
  Coding DNA Sequence Number=SeqID_39315
MRRKDGGYPPSGGLEGGKTRCIREREDMVAFRKGPTGERGGQPCRRHATAPSGRASPTPDTPAWRPRPTRHATGAPDAACKQLHRHLRHHRASSIAEPILRLEATQRTTQQRQPDAAVNAAKSGPAVMTVAGGREQRSRRQPSSRPIRGQQENPLSRREDNAPVIRSSNGSRTRNGRPANRSPRRINSAAGHAALPAGAGPGKGDTPKRILPREGTRLRASLLIRGSKAGPPKGFDSRLRSRGPYTHYWSEVRRLAPRRVPRPPQATRAPRPLLIRGSKAGPRRVHSRLRRRARDDQGYVRYITKARAALPSSPETPCSAPIEGNMALPPLLLAERRRRGVCKKAQSVPNRPLALCRGSGAALANPAPAEPLTASTYQLENLGPDRTPGLRPVCMREQPDQPKHYARH

SEQ ID NO: 82691 - protein, 57 aa, Zea mays
  Coding DNA Sequence Number=SeqID_39316
MESHDLRAEWESRLVGGYETVESGYDYGAGCQHCNPCSGEDEAVEGDFQEFQDYDEF

SEQ ID NO: 82692 - protein, 21 aa, Zea mays
  Coding DNA Sequence Number=SeqID_39317
MKLQKVVPKGAQPRKGMKVQV

SEQ ID NO: 82693 - protein, 139 aa, Zea mays
  Coding DNA Sequence Number=SeqID_39318
MAWATAAGETAMVARVARRGVGDNGGGEPRTAAPHGHQGSLVAELIAQTEVDGSQRRLEDPSSPSAATQTPCTPTIRPTPRSPAPCTDPAMPRAQGRPPLSRPRQATTPTSHARNDSVIDGHEDPPMPIEAPRPTFPLP

SEQ ID NO: 82694 - protein, 145 aa, Zea mays
  Coding DNA Sequence Number=SeqID_39319
MALRDNRPKASSEAFLPSGGLGGYLSPKIVVAHRGLPEEDKQTNVLIQRPSSDSEIEVVLGMLARESSESVRLELGCGPLSNQALARGGRQPYCSRDTSVAVVAPLMSMFHDSILAGLFLPSISPNSSSANVSSVKTPAIEIKQR

SEQ ID NO: 82695 - protein, 132 aa, Zea mays
  Coding DNA Sequence Number=SeqID_39320
MAGGRELAGAKEGRLAGEGLQVLLTGSRDREGRNRVCLTAAHREKIAALRETLGDTGVSHPSPLKGISSRDSGQSPSGVKRRIRRVGGGVGYDYVPISLESWKGYSWYDRSGSISISGSAKISVGNRTHFFS

SEQ ID NO: 82696 - protein, 494 aa, Zea mays
  Coding DNA Sequence Number=SeqID_39321
  Subcellular localization annotation: CTP_CleavageSite=64; ConfidenceScore=5.12e-01
MHRVFPPSEPPDGGRPRFFRLVVVGGTQLRGSWYLSAIVRLQGFSSDSPAASPRRWSPKTVATSSMVGRSEPGCDLGPALSFKDLHHPGWGGGRAEPELYLPRGFVGHLLPQHSRERALTGLAGGSDFDNAGPVGGEHRQLQRVGLAGSAGSGSVPGAPSCRGSGRRAVRTGEPPKTSRAARAAFVFWGCPAFAPVRRLRARPGGSEWGSAGGRMASVVSAEVVAAEEVLVADGITATIRAPGLRLFGFDSLSSPLKRGRGRGPCCSSVRPEAIAAAVWPPGAEVVVADAGAGVSEPSVGLLLLRRPSNENPWPLFDEPKPEAAVLAWTEAELARKEDFVGRSLAGPSTGGIDAGVELPKPGAGLVSSGDSWLRLRGGRPSRLLGLDSWRRPWRRWPGRGTDVVLQSGDPPTVLSSETSSKVELTPRVLLLPLRRHLFVGKRIVCPSKSYFSRKVMSEKVMSEVSVSRRRRSPSARSALAAYVYSVVFRIPLSK

SEQ ID NO: 82697 - protein, 298 aa, Zea mays
  Coding DNA Sequence Number=SeqID_39322
MQAACNRTKGARPFDFDASSMEAQAHTSCGRKQRSSRQEAHVPSWDSERTLSHGVKTTRPCSVPRTARARTTAAPRATRPVALTPRQDRRHLWQAKQATLHLRHNDRVKKGAPRRSISYPFPFPLSLSYNRDQERDIPKGILLREGSGPIRGSKAGPSEGFNSRLRALGLRAHYWSEVRRPAPRKGSTAASGHSGSMPTTDQGFVGWPPKDSTAASDAERGMTLAPSEGNMALPPSLRKGDAGAYVKKSSLSLTVLSLCAEARGLLSQTWLWPNRGQRQHTSPRTWDSTVHPGYGQFA

SEQ ID NO: 82698 - protein, 38 aa, Zea mays
  Coding DNA Sequence Number=SeqID_39323
RYFGTGGYEIDGFDHGYGAGEEEAVEGDFQEFQDYDEF

SEQ ID NO: 82699 - protein, 310 aa, Zea mays
  Coding DNA Sequence Number=SeqID_39324
  Gene Ontology: Cellular component=anchored to membrane
  Homolog annotation: Hit_ID=A2X8U3; Match level="QueryCoverage=76%, HitCoverage=67%, E-value=6e-34, Identity=38%"; Hit description =Putative uncharacterized protein
MPGIHRYTAELLVLLTIITRLLLLATAWPALPAPASLEPSLLFPSAGATSPTQTQSAGVASTIPAFPEQSEAAAAAATSVCQLTPSPPLLPAVLASCNANAGGSGVTLPPRLRCCPALAAWLYTAYAPTALSGSGVGEASVAASAEAAAVVDLPVLPDDAEECAGAADRALRAAGVALPRPHWGESTGTGNGTAACDVAFCYCGVRLRRPACAAPQGRMARRLERDCALPGLAGCSRCLRALSKLGGRSNATSSAKAKQEHREDCHLMGLTWLLNREPHAINGATSASMSSAHGSLLLVVLAAAVIVLSC

SEQ ID NO: 82700 - protein, 100 aa, Zea mays
  Coding DNA Sequence Number=SeqID_39325
MDEEMDEYVIVKAVDCSNQSEVHMLMHATKVHYQCPKRVRVQSDVSERIANGTSVHVKYPIYDQTVYLNDYHKKMLKDQYGSRGGNGSSSECFFTIRLSP

SEQ ID NO: 82701 - protein, 564 aa, Zea mays
  Coding DNA Sequence Number=SeqID_39326
  Gene Ontology: Mol. function=DNA photolyase activity; Cellular component=mitochondrion; Biological process=DNA repair
  Homolog annotation: Hit_ID=Q712D5; Match level="QueryCoverage=74%, HitCoverage=64%, E-value=0.0, Identity=82%"; Hit description =Cryptochrome 2
  Pfam annotation: Domain name=DNA_photolyase; Domain location=5-176; Score=235.6; E_value=1.1e-67; Accession=PF00875.9; Description=DNA photolyase
  Pfam annotation: Domain name=FAD_binding_7; Domain location=212-456; Score=266.1; E_value=7.1e-77; Accession=PF03441.5; Description=FAD binding domain of DNA photolyase
  Pfam module annotation: Pfam domain module=DNA_photolyase::FAD _binding_7; Domain location=5-176::212-456
MAGPEKTVVWFRRDLRIQDNPALAAAAKGGSVLPIFIWCPSDYGQYYPGRCSRWWLKQSLVHLGKSLELLGCPLVLIRAEDSTLAALLECVRSISATRVVYNRLYDPISLVLDNKIKNELPAHGISIQSFNGDLLYEPWDVYDENGQAFTTFNKYWEKCMSLPIEISQYLAPTRLVAAPGLANVRCCSIDDLGLESSKDVESSNALLSRAWSPGWRNAENMLEEFVSYGLLEYSEHGMKVGGSTTSLLSPYLHFGELSVRMIYQLVKMRQVKWQNEGKSEAEESVRLFLRSIGFREYSRYLCFNYPFTHERSFLGNLKHYPWLLDEGRFKSWRQGMTGYPLVDAGMRELWATGWTHNRIRVIVSSFAVKFLQIPWIWGMKYFWDVLLDADLESDILGWQYISGSLPDGHELSRLDNPEVWNWPMVVATAAPPWASLGPDTTPLLDKQLVLELQHDGGVTHGDGDAVNEDDVTKFGVVPGDGHAGVQDVVTKLAGDAAHGDGDTGCQDGVTKVAYGTAHGDGDVGCQDGVTKVTYDAVHGDGDAGCQDDAAKLAAEAMGSDRNPS

SEQ ID NO: 82702 - protein, 125 aa, Zea mays
  Coding DNA Sequence Number=SeqID_39327
MARAHAPPEEPARKLQQKYESRTKDGFDGCARDLLQEDRKESRHDARSISDNIRGSGRRRSGRSKIEGHQPNRNLWVGEQDHELGGHSSMGAGQSVIVSEFIRLIVAMDIGGSSRCYALNSALAS

SEQ ID NO: 82703 - protein, 171 aa, Zea mays
  Coding DNA Sequence Number=SeqID_39328
MPQMPRDKCAEFIRGSAGRWKTRSARLVDLRLGAAVVLVSQATHPSGSSRATLRDTSTKISVRINNNFRGSSLSSSSSSAARTTNRDETSTRDRTTRHLSFPLQQPIRIVRQPQHKEEAKDVSTMENKATRRCNAQRKVAQLQSAAMPQQDRMHLSKEQTTVDSSAPSMER

SEQ ID NO: 82704 - protein, 53 aa, Zea mays
  Coding DNA Sequence Number=SeqID_39329
MGLGVCGSLCQGGDEDGSFGIDYGTGCQRCNHCSGEDEVVEEDFQEFQDYYEF

SEQ ID NO: 82705 - protein, 46 aa, Zea mays
  Coding DNA Sequence Number=SeqID_39330
MGADSEDAVKQLSLLMEQVEAPLKRSFQRYDDAAITARKCMLGDVV

SEQ ID NO: 82706 - protein, 114 aa, Zea mays
  Coding DNA Sequence Number=SeqID_39331
MTEVLKRSPTTRNRGTTGELGHHITPEVAEKTMPSHRRGGRCKNMRGRGRCSGSRQVKCVEGPEAVTPSEKGHGGKILHRQTKRVKLHRTRVVSSELTDGKKILNDVGGNKDIG

SEQ ID NO: 82707 - protein, 141 aa, Zea mays
  Coding DNA Sequence Number=SeqID_39332
MDVLMVRNTGEDHQGLGKGQYINDEKIGHSQQDKAKSDSTSSPPQTPGPIISVIEQDKPSWRGHSCVTSDNQRSSATQSETEVGKANIIMEKELARDYASHPLVQGPHMGWVGGPGSGRSPMLRLGRSQERRWRCRAKKTC

SEQ ID NO: 82708 - protein, 256 aa, Zea mays
  Coding DNA Sequence Number=SeqID_39333
MAGGKELAGAKEGRLAGEGSTQQGIESIVEVTHESGVTSDGSSDPSLRLWLLRELRAMARTATGVVVVSVSVRVSSSSRNALWWCRGHLQLGCRGRRPLRLHLLLRRGGRVLLLLLLVQATMQSLQAIYKRHRKHKSKSRTMRPEREIRPGEGERLRVAPLLLTMVKSPELGHARARVILGSPELGTEGKNDTANSVVAKRPRIQGQRGGMAGKRPRADWRNSGEGFQPPGGQSATIGLGLGPVEVGEHSGQKPGH

SEQ ID NO: 82709 - protein, 86 aa, Zea mays
  Coding DNA Sequence Number=SeqID_39334
MGATGILCDSTHDAVTKECVAPVSNKTFAEWYSTENEDGLPGCSDAGIDFLPAGYSNGTAAAAAEETASCTAAAGSDADAGAGDPA

SEQ ID NO: 82710 - protein, 57 aa, Zea mays
  Coding DNA Sequence Number=SeqID_39335
MVGTSAVTARRQPGSVEHCMPGGTMQDVVDGVTWPTTLPPGWTVEWDVAPAGEEHEE

SEQ ID NO: 82711 - protein, 19 aa, Zea mays
  Coding DNA Sequence Number=SeqID_39336
MAPHEVRGSSGVIEGASGE

SEQ ID NO: 82712 - protein, 478 aa, Zea mays
  Coding DNA Sequence Number=SeqID_39337
  Gene Ontology: Mol. function=hydrolase activity, hydrolyzing O -glycosyl compounds; Cellular component=anchored to membrane; Biological process=carbohydrate metabolic process
  Homolog annotation: Hit_ID=Q69Q39; Match level="QueryCoverage=68%, HitCoverage=77%, E-value=1e-114, Identity=62%"; Hit description =Putative elicitor inducible beta-1,3-glucanase
  Pfam annotation: Domain name=Glyco_hydro_17; Domain location=54-364; Score=254.2; E_value=2.9e-73; Accession=PF00332.9; Description =Glycosyl hydrolases family 17
MAPPRWKSGDGRRRLLLLLCCCLLAFPCHAQVLTNNNISHRSDQGGIHSFVGTYGINYGRIADNLPPPEVVVRLLKLARIRNVKIYDAEHKVLDAFRGTGLNLVVAIPNEFLKDMAANPAKAMDWLTENVQPYYPSTRIVGITWATRCWAGRTRGFAQALVGAVLNVHDALKMLRLDAKIELSTPHSEAVFRQLLPSPPACVFPQRPHGTGAPFLRERPTRSSPYMSDPSHIDINYALFKPNAGIVDPKTGLHYNNMFDAQVDAAYFALEAAGYSGMEVRVAETGWASAGDATEAGANMENAITYDRNLRKRLFLRKGTPYRPDRVAKAYIFALFNEDLKPGPTSERHYGLFKPDGSVSINIGLKGLLPSSAPPRPLVAFKGSEMVKNSSSIPNFRINQSKAKPHVSLFSLIRSLYKLKHQVYLSIAPNLHARSEPTAPPRPSSSLPHVFVPPARSRQILFSSLPPPLFLHERLNLFT

SEQ ID NO: 82713 - protein, 403 aa, Zea mays
  Coding DNA Sequence Number=SeqID_39338
  Gene Ontology: Mol. function=transporter activity; Cellular component= intracellular; Biological process=transport
  Homolog annotation: Hit_ID=A2X241; Match level="QueryCoverage=87%, HitCoverage=92%, E-value=1e-131, Identity=67%"; Hit description =Putative uncharacterized protein
  Pfam annotation: Domain name=CRAL_TRIO; Domain location=171-352; Score=14.8; E_value=1.9e-05; Accession=PF00650.11; Description =CRALTRIO domain
MAIVLRASQQEPNASTSSLIMQVLLDIIHDYLFNLNCNFLSDSGTICACLRLFQNMHQGYPKETLIVDSLDWRIENEIDSVLERPIVPVDLYRSIRDSQLIGLSGYTKESCRCVTTPDEHDADVECLPWVAPPSVGLIIFFCLAGLPVFGIGVGHSTYDKASATTTAKIMKLDAFSLLLYAMDTFIFERGILSQVHYYVQSHIQINEYRDRIILPRLTQQFERPVVRCIKVLDMTGLKLSALSQIKMLTSISTVDDLNYPEKTETYYVVNVPYIFSACWKVVKPLLQERTKKKVKVLSGCGRDELLKIMDYSSLPHFCRREGSGSSKHSSADVDDCYSLDHPFHKELYDHIKEQASRRELIKMGSLHVSIPEPDPEDAKIVEVIQAEFQKIGEQDESTTGHKD

SEQ ID NO: 82714 - protein, 131 aa, Zea mays
  Coding DNA Sequence Number=SeqID_39339
MEQGDAAARPQGRRGGAPRLLAEQRRRAWASYCLPWGREGRRLGGSFLGAMAERKLLRAAARKTGTGSTAGVQLGGRSRGKTERAPACCSPWRGARLPAAARGGKSQGEKKAWGKKKADGGWKNNRGGNAK

SEQ ID NO: 82715 - protein, 68 aa, Zea mays
  Coding DNA Sequence Number=SeqID_39340
QIALLTRPETRSPIPVMVGTSAVTARRPIGVSEALYAKAVYLARFKNSIRIVCFSQLMRLLDPCCYIE

SEQ ID NO: 82716 - protein, 81 aa, Zea mays
  Coding DNA Sequence Number=SeqID_39341
MDYMVFEVAELDGAAMICHTNNKMKETTDQAKDGGKKSFEVPSAREKVKETRNPKPGVKKETCKVKVDRVKKSYGASRITT

SEQ ID NO: 82717 - protein, 81 aa, Zea mays
  Coding DNA Sequence Number=SeqID_39342
MAKPITGDEFTAPRLLNLYGTSPRERGLSGRWGGPTSRCSTARTRIGGAAVAWGPHVSAKPEAGLCESRDGTRAQGGFNPV

SEQ ID NO: 82718 - protein, 68 aa, Zea mays
  Coding DNA Sequence Number=SeqID_39343
QIALLTRPETRSPIPVMVGTSAVTARRPIGVSEALYAKAVYLARFKNSIRIVYSSQLMRLLDPCCYIE

SEQ ID NO: 82719 - protein, 172 aa, Zea mays
  Coding DNA Sequence Number=SeqID_39344
MGRGRKKIEVVSFLAGSLEDMVAGVTWPSILPPGWTVEWDPASAEEMTSHGTSDEGNAQSHTDGLAREGFPRILWEVLQGAGYTTPPQYAVQLFEKHRVPRCRVRMTLEPHPLQPGWRSLDSESFGYRAEDTMEAIALHGLTTFCGFHPLELSTHPICLFPAEKEDDPMWKD

SEQ ID NO: 82720 - protein, 183 aa, Zea mays
  Coding DNA Sequence Number=SeqID_39345
  Subcellular localization annotation: CTP_CleavageSite=46; ConfidenceScore=5.41e-01
MVQRLTRSTFTGGRVRSGDRGLASPARQSPIPCSGSFTEACTVYSRGSGVAGKGSAGRSMVVGDRVDAGTPFAGQTPVISGSGEVERARRSTVDVYGGFIGAGTGNGGRLGFGATWGTRGARVGRALASSERVEHVALWLLFVFYPQLSGPKRANLALRPMRDLFPHLGLPSSCEFQGEMWSG

SEQ ID NO: 82721 - protein, 157 aa, Zea mays
  Coding DNA Sequence Number=SeqID_39346
TGKPLRALSGIEARAEVTQMSPTLAAEPLGGLSLWQGEPPRARQLRRESRRGRARTQARGHRALEEDATAVEAIKRTPPPASTAKIVTTAGAEADAAAEAEKLATTMSRIDKLMSDMVAKETGVAAEESMAAVLDKGKKVVDTSSGEKDFDLWHLGG

SEQ ID NO: 82722 - protein, 191 aa, Zea mays
  Coding DNA Sequence Number=SeqID_39347
MTDVSRPQLRRVEIATAPELTAAHREDQGERAWEPGLSVRHEQENDEEEAPAATNATRWIPIQPGRAGREEKGGTRQVAAEESTMVERENPSAGASSGSWEAELGMGRGSWGEAATLGHQGEHKREESNRAPWESGEMGATTRGLKARELGRLGGAGKPRHVETKLEEDEQRWERLVRQPLRAWETATRTA

SEQ ID NO: 82723 - protein, 145 aa, Zea mays
  Coding DNA Sequence Number=SeqID_39348
  Subcellular localization annotation: CTP_CleavageSite=81; ConfidenceScore=5.04e-01
MSEEIGSVGPRKTKKDSALTDSAKRGTSRLPRGAPKPQQKQLQVGPARLWGQHDSGSLVFTRRARGYVERGKQSSGGMEVRLTRPWPVEHDAAGKMLFGGHGSDGGGRKPSAKCGRSRGAWGEEKQLDGGEVKSAVEQDAIEKTL

SEQ ID NO: 82724 - protein, 249 aa, Zea mays
  Coding DNA Sequence Number=SeqID_39349
MGLGVCGSLCQGGDEDDGFGCAYGNVTGQSSHLERLHHRLHEEQEHRRQELEQQGSSFSLQQEIESVRSCSSVFPLEASPAPPLSAPAAGVAAGGDPDDGGGDNSSSHNTDLSEEQEMEGWVARPITRDAARECHFHDALDTLLRQSLDRRTWSNDTGGVVVSPVGEDNPRLSSTINLAAVLNTELDHALDELSRARSEIAQLWAERAEHRHLEDGSPAPATQHLYRSPQCGHHAYGNFDYRTKINLEP

SEQ ID NO: 82725 - protein, 172 aa, Zea mays
  Coding DNA Sequence Number=SeqID_39350
MGRGRRGRGWPRRADGKRKRAPSHPSEDFGDSEYLEEASSESDRSPALASPPASSEDSDDSMGLSTRAGLGGSDELGVSSDEADSTDSFEEWSGSDGDDEGDDSGEGDDGDGGNDDSEGDSGNDSGDGGDDGSKGDGGDGSNDSGKGDSGGSSDGGKGNDRGGKASGIVPLI

SEQ ID NO: 82726 - protein, 52 aa, Zea mays
  Coding DNA Sequence Number=SeqID_39351
MGRREGELGDVGGRREQGRRAKRRRNQHFVFLGLKNLLGAPKVHPMGVAPEF

SEQ ID NO: 82727 - protein, 325 aa, Zea mays
  Coding DNA Sequence Number=SeqID_39352
MDEGVGYRGEKVCERLLEDVMWEVAPESKSHRWLLLGDEGLLLWMSQRRTCAGPHVDGHCCLPAATLATTTGVLRVVSVASPPGVEIRGLQGLLRGLGGVGESDGRRRLLVRQGEVLADVEEGGEGSSAAEQAPTWVKCSLRPQITLRMRMLRLDRNSEDAMDGSPLVKMSLKRSGWDAKNADIADGHMLTDEANVNLHALRAGAARDWYRVHCMKPKSFAWKLEVEAIAENPTNRQQKNYSSIWSSLTEADVAPGSSCLEGALRDGLGDQQGPRGWESSMVWSLGLEGSGCWESPRVQEGLGTSTLELVLSLRDNSDRVMPPCR

SEQ ID NO: 82728 - protein, 321 aa, Zea mays
  Coding DNA Sequence Number=SeqID_39353
  Subcellular localization annotation: CTP_CleavageSite=67; ConfidenceScore=5.20e-01
MTTYHITSDLDKLTVQNKYKGTNWILTSSGACCFSLSFLSSLSTVGHLGLVAATSPPPPPLALCVGRAATGSDPRARPSAPTPQARASPDLCPPPLASPRLLTPGRAAATDLHVYARRTFAPPLSAPLCRHTPSLSCAPPPDRVASPSTVRPDLLLCRAANAPLHLVAMDPLAITTVIHLPDTATGMAATGLGLPGYLVATDAAAGVLLGEPTELPCPIVGASPRLHRAFSLRRSLAADWGINGCGPRHHLMAKAQCLLFSHVDSPTPATLVVHPILGLDVATNVALHSQATEVHNIRSLLYAFANHVLSDVAASLAPSWL

SEQ ID NO: 82729 - protein, 63 aa, Zea mays
  Coding DNA Sequence Number=SeqID_39354
MKLRRSGIWDQHGRDFSLSVAIYLGPHTSGAGSVHATFAGPMRAKFAHCVNAGEFSGDGPPRE

SEQ ID NO: 82730 - protein, 167 aa, Zea mays
  Coding DNA Sequence Number=SeqID_39355
MGKLVPSLLMLLLSRGRVPLDCPSRWQDGRPSHSSNHVLQRTCKIMPQARLSILILSSMDQAVSLAARSRRFESSFYPCKIRAHRLGIQCLTDPDCHHAVTALVPTITGMGDHVLGRVRGYVCGQVHSGTRLTDLPYFSALKGFAGLVEWVTICHCSLPYKFEVQKN

SEQ ID NO: 82731 - protein, 157 aa, Zea mays
  Coding DNA Sequence Number=SeqID_39356
  Subcellular localization annotation: CTP_CleavageSite=94; ConfidenceScore=5.20e-01
MVPIRGGRTAPPVEAAISVDSVAAAGSTAGASTPVWAAAACAPAWSAVSASAPIRAAATRTPMGMRGCPLCRLLSRCFPRQPELFVGVVVDRSRAASSTAAQNLELCCRRTRDAVRTADCPPHMTYSISGEGRMRKTVREWEWQNTEWQPTPYRLNK

SEQ ID NO: 82732 - protein, 493 aa, Zea mays
  Coding DNA Sequence Number=SeqID_39357
  Homolog annotation: Hit_ID=Q2QTN6; Match level="QueryCoverage=42%, HitCoverage=41%, E-value=3e-54, Identity=51%"; Hit description =Expressed protein
  Subcellular localization annotation: CTP_CleavageSite=28; ConfidenceScore=5.19e-01
MARMCAYRGLSPHRRLRTSVSSVTGVLRSQRASAKVFICRQYAVMERSPLDKLAESGVQLEDPYLAVAEELSLDSNPGLTSGAPCSRTSSCILTRWSHEDLVALARVLGRVGGEDDGDKSPYAREPYRLGTKTGNDRRVECGKGVGSVGIGNRVRGGAWDTRDESAFEGVNGHAFLLSGMSSDLRTLTGGGNIVSGATLSGGECGHVDPRRGTTASRSREHAEFAHEDESPTHQIHEGEVVAGGSTGAVKAREELAVGTFQWSGTLSKKKGQKWGINSSNKKNADVGYHAGIAGSNTEVNNLVMDIKVTENGFCAVSNRRIDEGSNVEMSSVKAVANEEKSRGVPFDFESLYPLTQLPKVGKVVLYDPISLRIILLPVQEYPITTEENEDKDEPDMLVDLSPYKEDGSLEIEYSSLLDVRLLKGIEPVPGAFSTPLAETCNEVGSALAKGRPRAALGMWVFRSKQSSPVSSVRPRGACRAYIFALEVLFFLIT

SEQ ID NO: 82733 - protein, 180 aa, Zea mays
  Coding DNA Sequence Number=SeqID_39358
MSRADVLRGQLAEATERPVEPSARVGFPEETLAAMAQAWCQQVPSRWRSSDRVAVRGRVGFRRRIVCPSESYFSRKVMSEDSVIDIVEKARKIVSAEKFPSIKTCSVSGIAYPSVSYLSQKVMSEDPTFEVVEKHERRSGRKTFSEENFDAEGCPPSSPRGRVGLCRGKADPSLTVRLCM

SEQ ID NO: 82734 - protein, 178 aa, Zea mays
  Coding DNA Sequence Number=SeqID_39359
  Subcellular localization annotation: CTP_CleavageSite=74; ConfidenceScore=5.68e-01
MGAIQVKALSPQGTRSRLARAQPRAKAADQGGFTSRPRRLSPASGAIGSSALPDTRSRAQTQRRTTDSASPDPRARTEPRPRKTDSASPDPRARTQLDLERRTPPRPTPGLGLSLDLGRRSPPRPTPGLGLSLDHGRRSPPRPTLGPRLDLDLGGASALARPRARTDHVTGGPSLPYP

SEQ ID NO: 82735 - protein, 201 aa, Zea mays
  Coding DNA Sequence Number=SeqID_39360
MAHDGEQSLSHNCTNHYDSRCTVFTKVTEGLARVLTLVWRPQARRLRRCADCMAMMAHRRGILQAQAVYCPTIPLGDARQPKPSFPECTVCLGSMAIAGAQQRRLSFGFLSPFLSFSRGDLEIYGRGGKKAASRLFYGLGTTRSAGMQSPTSAFDGTSATCAEIVAEGTVLPLGSQRSAAECLGMTVRLTQWPHQQWITVG

SEQ ID NO: 82736 - protein, 156 aa, Zea mays
  Coding DNA Sequence Number=SeqID_39361
  Subcellular localization annotation: CTP_CleavageSite=32; ConfidenceScore=5.34e-01
MMVLASVASTSFVVLLLFSLPSCLPLRATPFLAEGVGAGASSLYSSNTSPDTDPCSGYCTSTRTFHSMHTPSFSPSSDVTFVFLAFTLFFLPNLLPPPTIATVSRLMLFDASMGRVSLAPGLSSCVLPRRTRWRLPHLGYLGNEESRSEILDNQGP

SEQ ID NO: 82737 - protein, 1050 aa, Zea mays
  Coding DNA Sequence Number=SeqID_39362
  Gene Ontology: Mol. function=GTPase activity; Cellular component =plasma membrane; Biological process=immune response
  Homolog annotation: Hit_ID=A3B6T9; Match level="QueryCoverage=100%, HitCoverage=100%, E-value=0.0, Identity=80%"; Hit description =Putative uncharacterized protein
  Pfam annotation: Domain name=GBP; Domain location=43-307; Score =252.3; E_value=1e-72; Accession=PF02263.10; Description=Guanylate -binding protein, N-terminal domain
  Pfam annotation: Domain name=GBP_C; Domain location=308-607; Score =77.8; E_value=3.5e-20; Accession=PF02841.5; Description=Guanylate -binding protein, C-terminal domain
  Pfam module annotation: Pfam domain module=GBP::GBP_C; Domain location=43-307::308-607
MFQMLGLRGGSPSAGEATPVMSGDGGAVAGPARPLRLAYCDEKGRFVMDPEAAAALQLVKGPVGVVSVCGRARQGKSFILNQMLLGRSSGFQVASTHRPCTKGLWMWSTPLKRTGLDGTEYSLVLLDTEGIDAYDQTGTYSIQIFSLAVLLSSMFIYNQMGGIDEAALDRLSLVTEMTKHIRVRASGGRSTASELGQFSPVFVWLLRDFYLDLTEDNRKITPRDYLELALRPVQGGGRDISAKNAIRESIRALFPDRECFTLVRPVNNEKDLQRLDQLSLSNFRPEFRSGLDTFTKFVLDRTRPKQLGASTMTGPILAGLTQSFLDAINSGAVPTISSSWQSVEEAECRRAFDSAVGTYNSSFDHKTYIEEDSLREAHEDAMRKAISVFNASAVGAGSARLKFEKLLHSSLKKAFEDYKRNAFLEADLQCSNRVQNMESKVRAACNRPDAKLDDIIRLLDGLLTEYESKAYGPGKWKMLVTFLQQCIAGPVLDFFKRQLEHIDAERNALRLKCNSSDDKLALLRKQLEASEGHRAEYVRRYEEVLNDKQKISKDYSTRITELQIKSSKLEERSLSLSSSLETAKRESNDWKSKYDHGILQQKADESKLKSQIASLESRVNISEGRLSATREQADSAQEEASEWKRKYEVAVSEAKTALQRAAVAQERTNKKVQEREDALRSELANQLSEKEEEIARLHAKLSQTEIHATSLISRLEATEAKLKSHESDSLALKEEIRLLTDNLESVRSEAMSREKEVRILEQEKNHLEEKYLSQCKKFDEIDIRCKEAEREARRATELADVARTEASSAQKDKGEAQRLAMERLALIERIERQVEALERDKAKMVEEIERLHQSEKDAVSKVALLERSVDEREKEIDEMLKRNNQQRSSTVQVLESLLATEREACAEANKRAEDLSLMLQATQGKLDMLQQETTLDSKLKTSARRLRGEGTESVHDMDIDEDNGRRRKRSKSTTSPLKSNHTEDGGSVFIGEDTCNGSQQGTETEDYTKFTVLKLKQELTKRGFGAQLLQLKNPNKKDIVALYEKHVVGK

SEQ ID NO: 82738 - protein, 37 aa, Zea mays
  Coding DNA Sequence Number=SeqID_39363
MAGSAASLPPGSDASLPAGSAALPPGEGSPCAAPLPR

SEQ ID NO: 82739 - protein, 229 aa, Zea mays
  Coding DNA Sequence Number=SeqID_39364
MAPEAGLGCCQPHPGGWHSSRSRAGDAVFLSGQSVEGRSDCGHFGPCRLRNACQDKVSGDPCIECSCDTVGWRGDLAKVASPRSLPELGLGRVEGSEFSGWYVDAVNGLAVAKFARAAPEPLHRARGRSRTDSAFIIRLFVAFPQGGGGKAPCCPRRASNMVSPGPRARCLPLMGFRYRIAPAGLGNVLGYLRSVARASAMYRTYPESSLALRVLGRLSNPSGGQPSNP

SEQ ID NO: 82740 - protein, 189 aa, Zea mays
  Coding DNA Sequence Number=SeqID_39365
  Subcellular localization annotation: CTP_CleavageSite=35; ConfidenceScore=5.33e-01
MSSSSLMRRVFPSSKPPDGGPAAPLYRRSPKTVTSGLMVGESEPGCGLCPSLSLKDFHHQGWGGDCSVPDFRTRVASEPLAAPASATAAGRGSSAGVIARAGHRLTSNSTAFCPSLPYEFRHGWGPPGSSTRPEVSAAAVRPPGAEVVVVAAAGAGDGAPFVGLPLLRRPSPSEWGCSYLRRGEPEFHL

SEQ ID NO: 82741 - protein, 177 aa, Zea mays
  Coding DNA Sequence Number=SeqID_39366
  Homolog annotation: Hit_ID=A2WSN2; Match level="QueryCoverage=98%, HitCoverage=100%, E-value=6e-49, Identity=58%"; Hit description =Putative uncharacterized protein
MGEPSKELLDLPSDPRPPASFIESLLAGREQQQQDKEGKLIGKVKDFLGEIARANQKLQLDAQNKPPVEYDIEALTGNEEQYIEMDLLLGVADLHSEQAVEAAEATINGRQTSEMSFACSSSDSEDDSDDSDEDADDKPVMSDKDNKCKSPDDAEMGPAKGKKPNKRQKIVVLNYVP

SEQ ID NO: 82742 - protein, 168 aa, Zea mays
  Coding DNA Sequence Number=SeqID_39367
  Homolog annotation: Hit_ID=Q9XHE1; Match level="QueryCoverage=76%, HitCoverage=18%, E-value=1e-45, Identity=75%"; Hit description =CENPCA protein
MDPSICGEKKHGKIDEDKSSQLLEMPQEDINPLNQAQMHGGSTKKSAPDLSPTKQKKQQAVQERKRKQQSKRGKKVAGESLEIPQTNFESENQPHNDDVNIEKQTITSSTLSPNGAKGQKGAQRRNQTKKRNQRKILGGLYFFTLYTFKVVFRRILMAYVSILMDFYP

SEQ ID NO: 82743 - protein, 65 aa, Zea mays
  Coding DNA Sequence Number=SeqID_39368
MKARYQAGLGVGAKDETEVDTASGSVTDSVREPDDAGTTTDTGQSTRDMSGNGQQSQAQQQYSTQ

SEQ ID NO: 82744 - protein, 188 aa, Zea mays
  Coding DNA Sequence Number=SeqID_39369
MYHRIKPTALPGLQRWPKLEFQWRRLRDTSERGEVSTTAADKRPHRRDPWRIASRHRSRAPVLHLQTAPAPRGPALQCDCMTFVPSGGGVPWRDSEIDDRRNALDFYSPGAANRIVPVKTPLACQPLCLRRLDLPSTDQIHTANGLTADDPDSPLSSGQEFVISLPSKPKVKAEEEPEFSLKVISNVG

SEQ ID NO: 82745 - protein, 30 aa, Zea mays
  Coding DNA Sequence Number=SeqID_39370
MAWRLCSPSHGAPISSMENQQEAPSPQLQC

SEQ ID NO: 82746 - protein, 69 aa, Zea mays
  Coding DNA Sequence Number=SeqID_39371
MALSWCLGHRRRRGRGKEMIRANHCTEALVFTVYTLNSLLRVDEQVTEGPGVQQVETAEQELIEGKLCP

SEQ ID NO: 82747 - protein, 151 aa, Zea mays
  Coding DNA Sequence Number=SeqID_39372
MAWEREWGRDAVDLGCGEADGDGGLGELGHGEEKHLCPGSRVEGCRLVSRAPWANWRGCWFLATGEQGDTGRRPWLASSDSGDLQGGSAMGKLGLEPWSRECRVAARQEEEGSVGCEEERERVLWRLGKIEGWEWKIAKCKGRGLVFIGMC

SEQ ID NO: 82748 - protein, 79 aa, Zea mays
  Coding DNA Sequence Number=SeqID_39373
MATCLDLTYSRADSTALAVEAKNTGQGKSKCFGGEASYRRGDGYRAPFGTGALFANRPVRRAVYWVTLTPPASGLDRTH

SEQ ID NO: 82749 - protein, 58 aa, Zea mays
  Coding DNA Sequence Number=SeqID_39374
MAKALAEVQRRQQNSEEIAGGSGTAAGGKLRECAWSLPSARATCVGHADVGAGLTAQV

SEQ ID NO: 82750 - protein, 91 aa, Zea mays
  Coding DNA Sequence Number=SeqID_39375
  Subcellular localization annotation: CTP_CleavageSite=39; ConfidenceScore=5.64e-01
MVSHFLNSSSRSALSLFPTQVGAHYRRDSSTFGQLEPPRAVPSRPKHRLRTTSSPWFLSVLPKMFLSNNLCSEGDAGNMENFEEFQDYDEF

SEQ ID NO: 82751 - protein, 191 aa, Zea mays
  Coding DNA Sequence Number=SeqID_39376
MARMRKTACKSTGPIGVPRHQLASRHEGRSSGSNDPIGDLEAKVEQLQMELRHRNRVWAQDGQCITELAADVRRLQDELAERDLVVDWAVNSRSIAWDREAKARARVVELSTALDNLQVYCNTLHEEVHVLYARLHLDVPTDPVAMGARPSGIAGEGPDGELDLFRPPPSMNLADDRSPAAGNEETKDDED

SEQ ID NO: 82752 - protein, 73 aa, Zea mays
  Coding DNA Sequence Number=SeqID_39377
MMPSRTRAHNGARTSRGREDTPNPPPVPPTHAEAITALVNATADNTQILCEMAGNQFQQHGGRAPPQGPHETS

SEQ ID NO: 82753 - protein, 313 aa, Zea mays
  Coding DNA Sequence Number=SeqID_39378
MEVLNGGRERRGNGWERKGRRFPAPGGGASDAAASVLAWSWLGRGAWWLGRPGVVLRRCVRRSVRRGGGPGVGQRTPAGPWPAGPARQGKGRRSLAARGWEEAGRRRGKEEGREKREGVRGARLTVMDGREGRSDGPNGPGVTREYPALAEAKGESTEVPKPMVITEQEKTDMAEVLKRPAETKEKKAEKPEPRRSVEQPKILSPTQETELPKVSKIPVVTPKRRIMANILDVVMESTKVLTPASAEVPNIGEKNAKETAEVVMTQAGTEASQKQCLRRLLKRISKQDLLMLQKLAKSLNPLLLELLLRDWNL

SEQ ID NO: 82754 - protein, 84 aa, Zea mays
  Coding DNA Sequence Number=SeqID_39379
MPIHSWMPPKSKKSVKGLFKGLDLFQGRSSSSSRRRELLSAIHGDEEQHNEEEQHNEEVKHNEVEHATWDQAAQHHQPWDQWDN

SEQ ID NO: 82755 - protein, 281 aa, Zea mays
  Coding DNA Sequence Number=SeqID_39380
  Homolog annotation: Hit_ID=Q9FVG4; Match level="QueryCoverage=55%, HitCoverage=29%, E-value=6e-14, Identity=33%"; Hit description =Transposase DOPA
MDDGSGGSSATLTRRSRKSHSVKPHHAIEREADRILIMPHGDRRVNKEDLSFDGKGHHTQVNLTLGSLCRLHYPGIVKVSNGDTKDELRYRLPDREDYMGHAERVFQNNAKKLVKDAIYYARIQATNLYFQKHPEEAGPLKKEGSSKIYLTEDQYREEATSCQKPSNIEVYQEGHKGPDPNNPDQLCSQTTTDRLQQGMTPNIPPPPQWSQFASTPAPPPQFNTPLTHIPAPRDMVTPEAGGSGSDPTAGTRFVDSLFAFPPPGGGGDSGQNSNHPSGGYL

SEQ ID NO: 82756 - protein, 114 aa, Zea mays
  Coding DNA Sequence Number=SeqID_39381
MATSPHAPPATANSPSVLPSMEFVDDVSVLDLGRAKLLFALISVRNSVDGSPYTMVGSAAIFSHWLDILVLVRFGPRVVLHLLNGAMGVELENSGLCRKQYADGIDERGAATGL

SEQ ID NO: 82757 - protein, 57 aa, Zea mays
  Coding DNA Sequence Number=SeqID_39382
MPFEIRASTTSSFNVFDTFGNVGTLRFFEEMIHVIDVFPLRYGERLIGIFRWGSSPH

SEQ ID NO: 82758 - protein, 289 aa, Zea mays
  Coding DNA Sequence Number=SeqID_39383
  Gene Ontology: Mol. function=transcription factor activity; Cellular component=nucleus; Biological process=regulation of transcription, DNA-dependent
  Homolog annotation: Hit_ID=Q8GZQ5; Match level="QueryCoverage=68%, HitCoverage=73%, E-value=4e-34, Identity=45%"; Hit description=DREB -like protein
  Subcellular localization annotation: CTP_CleavageSite=25; ConfidenceScore=5.53e-01
MAHELQETSSSSATTTPRRVPPSCCSSTVTDSSSSPPSPAAANAAPAPRKAEAETGGDEDGCAGKAAPAKKRERSSEGKHPDVPRRADAGVGASGCQRSASRARSRAYGSGTFPTAEMAARAHDAAALAIKGRATQLNFPVLAGVLPRATCAAPKDVQPPPCWPPRSRRRRQHHRSSSGPAHAKCPPQRTAPRPRTRHAEGVPPAAASQPGTPSSGVDEERQLFDLPDLLLDVRDGFGRFPPMWAPFHDVLEHLAFHLQSAALEGSFCFTQMPMPMPMPTPILQERGLF

SEQ ID NO: 82759 - protein, 183 aa, Zea mays
  Coding DNA Sequence Number=SeqID_39384
MTVVRSDTKCAALLLRDGRYPIDPPYGSGTGRGAEGEEGVDGGCSIGSRQRITVHLLRRALTSAGVASGVFACIFTTASGDYLSGNRVWRLRRCLSLPPWVGEGASRRVGEGAPRFQMRYVSPAWAPPTGAGDGDGGAVELCSGGVVERWSGGGAGHWRPRPRLEVSKRAGAQPCRAGCRGRG

SEQ ID NO: 82760 - protein, 141 aa, Zea mays
  Coding DNA Sequence Number=SeqID_39385
MNPYTTRKHMSVQHFVERLAYLREHGAVEHGRPTGRWLCFRRSILPSIRASLLARPPQGAPCCLLASDPLNRGASTSMGDPRAVAEDEGARRGMEGECRGDRGCGMSGCAEDGRRRMKVRAAGWKVSVGGCGMRGRVRPRA

SEQ ID NO: 82761 - protein, 377 aa, Zea mays
  Coding DNA Sequence Number=SeqID_39386
MEVVELVPCARNKWGNWWDYWFYVSEGKVEDQPGLPAAIMCSHYYVAYPPFDVAEDDENDGALRIAARSGEGQLVVVPPSVATTLPSAVVRAKGAAQDPWAAFCASGEILTAAAAKDVAGTMSQRMREAADFADRVASGVLTADVTTKVESLRAQHADAVQEKSAAESKNRRLAQKVSALEAEKTDLRRRLAEERREANQAIAEEQPARVEAKVAWAENSLASQRAEEWEARFNALRSRVDKAEASARSEVKRTHAQLVDAYRDLGARTADFEVPDQEVGLRFLEWLQEELLVLPTIMQGFMSFTSLVTCEGTMNALSHEGCKHYEVFHQSDENFEREIFKVKDPVVKQSAGALFDRMWGPHDREAVKERSDRAREQ

SEQ ID NO: 82762 - protein, 322 aa, Zea mays
  Coding DNA Sequence Number=SeqID_39387
MTTSLVVGRSKSGCRLSPTLSFKDVHHPYCGGRQVEPGPYPPFWVGDPLLPPAFEGRRCSPTPAGGAILGYTGPADCRLSTAVCLALWGWMALVPPLTLPPAVWLGGEDPFVRAEVAAAHRCRGGRRRCGLIVTPYRRTGARTYPQRRTWWDDCHCCRVVGAEAAVTVGAGAVASAGESLGACYPAALAGVEDFSLGSPVMCPNPLDGGFKLDVLRLDASVPEKVVNNPREADSPGSGSGGGACGPMVWDQAERLHGLRTTPGDYMQAHGYRTWLSGYMSSGPPYGTGSRSPEPAPRLSDLPTFGSGVLNCKPGCSIRTPPC

SEQ ID NO: 82763 - protein, 238 aa, Zea mays
  Coding DNA Sequence Number=SeqID_39388
MAAKGRQPPWGCTPPTAARRRQDQRHHPKRTLSDGEVAGRDGLDADPSREHRRTPSGGPEGGRARTNAATRGSPAYGQTVPLSTTVTGQSAVGIGTAVGVVIGGPAVIAAAGARKQRSNHQSDSGPTCKLASSPEAGPGATVGTLNQGYPLMEHEGIAPMRRGVKVIQQTARLLGLLVNSMPVLSGTLYSSSLPPEASPVHQGCADLGRQGARGLSRQQILDVPSTIFFMSMGPHVGA

SEQ ID NO: 82764 - protein, 50 aa, Zea mays
  Coding DNA Sequence Number=SeqID_39389
MAVEVDGAIGVTGAGEREIGCQRFIYNYSKSTVRNTVDYSGQEKLFGKTD

SEQ ID NO: 82765 - protein, 400 aa, Zea mays
  Coding DNA Sequence Number=SeqID_39390
  Homolog annotation: Hit_ID=Q6JAD6; Match level="QueryCoverage=60%, HitCoverage=32%, E-value=1e-114, Identity=86%"; Hit description =Putative uncharacterized protein
MRFRFEREDVTITASQIRQLFGFPDSTTRLHSLCYGTSDPPRRPHGGVAPGTAHVAALFRPPFTDGSRRSPADFTTAAKYLYELVRRTLLPRMGYREATTHIQLWLLGALVSHSEFDVVDFLICEIEDTVLDGIRARRQLPYAHYLCHIFAQLIQPPRFQSTLEASRLVFGSYRPAPKIPVPASASVFDSQAEDAALRQFDTQGTAADDDDDDDDDDFGVPLPPPPPPPMPPRSHDHEAGSSRAAPAPTPALDPALASILQTLTQQQQTLTQQQALLAAEQARLSERMLLMFRACRTGRMHFSSSLFRIGQRVGHSWLSCFSILPPVPPASAVPTTAVAVSVTASVPVAPAALPASESVPAPASTADPGSETDSDPPSAFALLPRPRPDAPPPPPPASDV

SEQ ID NO: 82766 - protein, 348 aa, Zea mays
  Coding DNA Sequence Number=SeqID_39391
  Subcellular localization annotation: CTP_CleavageSite=62; ConfidenceScore=5.17e-01
MPEGGTSSCLPGKGHSSSPRISFVLFDYFDSGIMKTTKYTLRRRWRGSSSTLGVNSTFGEVRPSLGRQYGRRISAPKDDVSTTPGPSPPGSLPGTRPEQMARLAAPKPQPAVPRGHQPGSRPRQLDSGVGPASGRPGQAPADEASFFEPTLPLSTLTPLPLAPSHRRAADGMNNPHIGGPAGRQNPWWLADARSGSSDNDLHFEWPNSSSDDLRADAAATSSSPMSPLKGRGQAIKAKEPEAQSADGGGNLVANEDFFSRHHLNVDDGSHLPTGRSPLGSSRTGEHRPPRKRRRTGAKAGQPKNTNTALAARDVLGGPLVRAARRPLVRWEGAPGAELEPAEPASPTR

SEQ ID NO: 82767 - protein, 123 aa, Zea mays
  Coding DNA Sequence Number=SeqID_39392
MQAACNCTKGAHPFDFNASSMEAQAHTSCNRRAGYYVRETAPPLVPVPRLLDCGTGAATRGDPAHDPTVPTEHIGHRTGGTFGRQSRRCFTSAMMTASKKGPRKGILRKGSFSTKEAGPEPPY

SEQ ID NO: 82768 - protein, 307 aa, Zea mays
  Coding DNA Sequence Number=SeqID_39393
MRRKDGGHPPSGGLEDGRTQQPHRHLRHHRASSIVEPTPRLEATQRTTQQRQPGATVNVAKGGPAVMAVAGGREQRSRRQPSSRPIREQHGNPLSRREDDAPVIRPSNGSRTRNGRPANHSPRRINSATRQAAQERQATLRLRRNNRTKKGWPSEGFNSRLRSRGPYTHYWSEVRRPAPRRVPRPPQATRAPRPLLIRGSKAGPRRVHSRLRHRARDDQGIPPEGGIEPSDPVARGASLADHPQLTGDTMFGAHRGGSGAALANPAPATPLTASTYQPENLGPDRTPGLRPVRMREQPGQPKHYARH

SEQ ID NO: 82769 - protein, 42 aa, Zea mays
  Coding DNA Sequence Number=SeqID_39394
MAGGNALAGAKEGWLAGDEIWSQEIKSVSLLKPEANLGFRRV

SEQ ID NO: 82770 - protein, 78 aa, Zea mays
  Coding DNA Sequence Number=SeqID_39395
  Subcellular localization annotation: CTP_CleavageSite=25; ConfidenceScore=5.26e-01
MAGIAPAASHCSSLPNLGTPRSSSLCSTRPALPLHQAVLQDVAPPAAYGLAQIWCILMLNMCDCDGSFTCREGGSQKY

SEQ ID NO: 82771 - protein, 128 aa, Zea mays
  Coding DNA Sequence Number=SeqID_39396
  Subcellular localization annotation: CTP_CleavageSite=32; ConfidenceScore=5.03e-01
MGKKGSWLGGKRVGRCREGTAAPHPSKVSNSRGAMGGEEPSSMVQPLARGGKRASLASARNSGCHGGNARRALGPRRPWLLASCVPAMERKEWRWAEVRLEVEEGLGRHPWERLLPALACVKERGLLP

SEQ ID NO: 82772 - protein, 146 aa, Zea mays
  Coding DNA Sequence Number=SeqID_39397
  Pfam annotation: Domain name=zf-CCHC; Domain location=31-48; Score =16.5; E_value=0.0049; Accession=PF00098.14; Description=Zinc knuckle
MGMIRKINLMGVPLQVEDLLFNIYRKKQRKRGCFACGEKGHFRDNWPNMVEPIKMRSKGKALTSVKTWDDSSSEDEPYGKSLIKKNEKLKVKLASSQEAIENLLEKMEILSVHNNELTTKLENISSTPGASLIEIPEIIKKDASIS

SEQ ID NO: 82773 - protein, 128 aa, Zea mays
  Coding DNA Sequence Number=SeqID_39398
MSQLMGLLETTKITLDNREELVVDLSTEMVEKDLQVEQMANQIQELEELVGARENTIEVLEDQLINTQQQLEEANQHLDMHHQEIQDMEANEDVDIEGGVEPEPASILDIAGSGRPPSPESSVASFVH

SEQ ID NO: 82774 - protein, 178 aa, Zea mays
  Coding DNA Sequence Number=SeqID_39399
MRSQQLKHVARLHRPCRVRCSDFGACCRSRASSGAAHGWRGWLLRRPRRGISSGSWWRRGGTRTRPLPTPRLLKPRLNLRGRRPSLACQRAEELEARLGGLRNRVDKAEASTRVEIERTHAQLVDAYWELGARTTAFEATGQEVGLRFLEWLQAELAMLPTIVTGLMSFASLVTCEGP

SEQ ID NO: 82775 - protein, 46 aa, Zea mays
  Coding DNA Sequence Number=SeqID_39400
MRLHTLRGMKAEDICIAFICIIEVIFADDVVLYPQRCLLLIKGSGK

SEQ ID NO: 82776 - protein, 95 aa, Zea mays
  Coding DNA Sequence Number=SeqID_39401
MASLTNIACADGLFRRQSSPSNPGDEDNLGVTEPPKNVSPVLQTLQNIRDKEMRKLLHNLHLIRKLQGSDQVFITAKVEAILSRVRLRTTSIHKI

SEQ ID NO: 82777 - protein, 98 aa, Zea mays
  Coding DNA Sequence Number=SeqID_39402
MTHWIARSTPVGGRPKSSEDDLGFPMKFCRVRELGKLHKLLAKLSERLARLGSDCSGLATVAEARVAMAGGRELAGAKEGRLANEGIKVNTLGLWLKG

SEQ ID NO: 82778 - protein, 92 aa, Zea mays
  Coding DNA Sequence Number=SeqID_39403
MDTDCFDTGMGLTPQWHHRQACLVGPCGNTLDPSAMLHSEIFKGLFHRLHRLGARSRLHRLGYLRCMRRLKTGEPAPLVSSSFFSFSSASSS

SEQ ID NO: 82779 - protein, 239 aa, Zea mays
  Coding DNA Sequence Number=SeqID_39404
  Subcellular localization annotation: CTP_CleavageSite=63; ConfidenceScore=5.43e-01
MAGRAEARQSSSTTIIRPASTTTTIRFATASPGAAAPSSAAIAAAAGAANVPLPGSLEGPGAQASAGSGAGDLPPPATAEAAPLGPQVPSATAEAAPLGPQVPAGGLEAVVPLTATVDPTTSMSSNTPSITAGDAGGASSSIPPPTPEEPEVILGRRLRSGVEPEAAPTPLPRVLSRAHQALRETELAILREWEALATEHQRLSDWHAQLEERTKAASHQFTSDRSELEQEREEYKEDL

SEQ ID NO: 82780 - protein, 290 aa, Zea mays
  Coding DNA Sequence Number=SeqID_39405
  Homolog annotation: Hit_ID=A2WUZ4; Match level="QueryCoverage=21%, HitCoverage=9%, E-value=2e-12, Identity=63%"; Hit description =Putative uncharacterized protein
MRRRRRGSRGHEAGESERGEGLGQVPVEVSDGDEPGWGREEGGRSLRARREQGGGREGREEDVGHGKVHERVDECRYGSQEVAAGGDGAAAIFLYLCSGRDSPSRDMVDARASTGAEDPTTVDVVVTQLMPEEALQLCTGCVHLYTFLHRLSLCRKLLSGTVFLYKQYPLSMARRGFVLISKIVKTVNIIDAKIRDRMLRSSCSPQGASWVRRAHGPISFEEHVELEKRYRELTDLLVEAERSKATRRSASSWEEDTNIKKLTKKLSVWQSATAFCGQKLQKAETNRGFS

SEQ ID NO: 82781 - protein, 227 aa, Zea mays
  Coding DNA Sequence Number=SeqID_39406
  Gene Ontology: Cellular component=endoplasmic reticulum; Biological process=intracellular protein transport
  Homolog annotation: Hit_ID=A2X0E4; Match level="QueryCoverage=74%, HitCoverage=45%, E-value=2e-25, Identity=44%"; Hit description =Putative uncharacterized protein
MKRKHTRAPRKKNQCSEDHQNIEIPSAARCPPPTSAPAISTGAVELQQSEWVELWREACKLEGDLDVQLSSYVRLAALSSSAAASCATSSTVVRSSYKSVEFEIQSLLDKLQHVNDAMRCCVACSPTTTSVSQKLAQHHNILHEFTQVRSSHSRFIETPVSNRLKWWLAHSLMEAGVQEDEGNLSSMREHTDLLSSARDDSPGFVSFVITLAFPISSDNISLPTSEI

SEQ ID NO: 82782 - protein, 142 aa, Zea mays
  Coding DNA Sequence Number=SeqID_39407
MNHASNPAIGTTGRGPARGKAQDPPEGRRGYWSRCPSLTTNPPCWGKSLPSATHDDGEIGTETCNDTTRPKNEIWLSPSLRTKLQKWGRPLTKKHIENGATPTAAIVAKHRSVSGNKQKKMLGSGGRTHSSPGTYTLTSLGR

SEQ ID NO: 82783 - protein, 118 aa, Zea mays
  Coding DNA Sequence Number=SeqID_39408
MGKTNKRKREPTPPSEDFGDSEYSEEEFSSESEGSPTPVSPPASSDDSDDSQGIAAEDESEYSSDEEDSSDSSEEGSGGDGGDDDDDGGDGDDSSRGGDGGSKGGNGGSSRGNNKTSG

SEQ ID NO: 82784 - protein, 46 aa, Zea mays
  Coding DNA Sequence Number=SeqID_39409
MGRLEPHAKWESRLVGKVCNLCRVLETGGEAGNMDDFEEFQEYDEF

SEQ ID NO: 82785 - protein, 83 aa, Zea mays
  Coding DNA Sequence Number=SeqID_39410
MATKWSGSSSSIRLKTLSICLRNWGVVRFAVVPLMGLGVCGSLCQDDDEDNAGFYCVYDYDYGKEEGVEADLQEFQDFDEFED

SEQ ID NO: 82786 - protein, 480 aa, Zea mays
  Coding DNA Sequence Number=SeqID_39411
  Subcellular localization annotation: CTP_CleavageSite=64; ConfidenceScore=5.00e-01
MHRVFPPSEPLDGGCPWFFRLVVVGGTQLRGSWYLSAIVRLQGFSLDSPAASPRRWSPKTVTTSSMVGRSEPGCDLGPALSFKDLHHPGWGGGRAEPELYLLRGERALTGLAGGSDFDNAELVGGERRQLQRVGLAGSAGSGSALGAPSRRKSGCRATRTGGPPKTSRAARAAFVFWGCPAFAPVRRLCAEVGAPLVREDPSGDLPVGRWLLSSVLRWWRLKKSSSPTGSPPPSSLRASGSLALIACPHPSSGDVGEGIVAAASALRPSQPQFGHLERRSLSLLLERAAVSHLEPVAPQALRCGGNPRPLFNEPKPEAAMLAWTEVELARKEDFVGRSLAGPSAGVIDAGVELPRPRAGLVSSGDSWLRLRGGRPSRLLGPDSWRRSWRRWPGHSADIVLRSGDPSTALPSEARSDFAEGGVDAEGAAAPLPSTSEPSGLVHLVKVMSEVSVSRRRRSPSARSVLAAYMYSIVFRIPLSK

SEQ ID NO: 82787 - protein, 130 aa, Zea mays
  Coding DNA Sequence Number=SeqID_39412
  Subcellular localization annotation: CTP_CleavageSite=46; ConfidenceScore=5.37e-01
MAGVSQLLAQMLSSRFLGVTRRGGKGNPMVGFLPWFMRRRLCPRKKADARRCPSFDERFTEPQLTNRHGKTTKKRGGMQANPPRQQDGFPASSRRESPVAAGFTTLSFRSLSLAKKSGWVAGEFSGDTKH

SEQ ID NO: 82788 - protein, 136 aa, Zea mays
  Coding DNA Sequence Number=SeqID_39413
  Subcellular localization annotation: CTP_CleavageSite=53; ConfidenceScore=5.10e-01
TLYLNVAADPIDINSPSSRQVPGLAELSYATGFNSSAHPSTRFGLHASQSRVKAAPRGPEDASRTPGDIYCASRGHVQAEEGGWPRRSRICGLEESATIHKWRGHLLDRLSASFLCSLIAWDKNEAPHLLKTRQGC

SEQ ID NO: 82789 - protein, 533 aa, Zea mays
  Coding DNA Sequence Number=SeqID_39414
MDKDRQGAAQKRQAAIRIVEARPKRQKRESAKAAAPGGGKPPLAAKSGVPASSKAPEAAAGAGGSKPAKAVPPLSEVAEAAKAARALPSAGKRVADFATNICVEDYLGGSDEGQLAMVAPAAAIATAGIVPKARGEALGSGGEVSALAVVRDEAGAATRRLKGVTEALSQATEALSQVADFASRAASGALMAAVSAEVERLRTQHADAVREKSASDSKCRKLTDKVAVLEKEKADLRRQLAAERREANEAIAKEQAAQAKAKLARAEGNLAKELAEHLQERLTALESRAKGAEAAVRAEAERTCTQLMDTYRELGARTGDFEVPDREPGLRCLQWVQEELQELPAVVGGFMSYASLVTCEGAMNALSREGCRHFEVFDQADEDFDRDVYKVEDLVVKDSAGALYDRMWGPHGREVVRERAETAMAQASRGERVDDLGALNSALPDPEPTPAEAVSGVALEPTPETAAIAVAAPTSATAGEDLPPKVAEGAPDAPAAVVPCAEDPAAETAETTAEAAAEPAAEAPAASGPSQVA

SEQ ID NO: 82790 - protein, 174 aa, Zea mays
  Coding DNA Sequence Number=SeqID_39415
MVCATPLRGARGHNRALGLGRGSQQETIKHKSITKYKGHAVYRTRRHPPQHASMPRLQGCAPLGHINRLVYDLSRVGTDSIHHGMPISFPRENSLKGMPSLSGQHNQHPSVLLRCEAEVVAALSEVPCDPSDPSRHWLPSSGHHVYLDAKHRLSGEANAVLLDVYRVHTDLHSA

SEQ ID NO: 82791 - protein, 871 aa, Zea mays
  Coding DNA Sequence Number=SeqID_39416
MDGRHTLQDALTLQARVLTLEGGSNTFGIDDTFGEARPSLGRRRGPRVSAPKDDVITTPGPSLPGTSSGIRHERAARSVTPGASASHLPRAPARSEASADQLRHWSRRRTTRRARQLHRHLRHHRASSVAEPMPRLEATQRRQPDATVNAAESGPAVMTVAGGREQRSRRQPGSRPIQGQQESLLSRREDGVPVIRPSNGSRTRSGCPANYSPRRINSAAGQAALLAGAVGDASPSPKQPHQKRLALRGVQQSPQIAWALHPLLVRGSKVGPPKGSTAASGYSGSAPITDQGFEGWPPKGDWVRQITRRYFWACLWAPSRPPTNGARTPTRITRLQLTGDTMFDAHRGLGGCSRKPGSGQTVDSVNIPARELGPRPCTRATTCSHEGTTRPAEALRKALRPRRSETTPPRPRGLHPAGALARTPRNKMQPRKAGPLAKKCDESLQASANTPFEARGLLSGTIIRGTLKTPNSQLVTPISIKLQRPDGARTWAKPQKTTNSASPDPRARTPPWPLPNDLRLARPRSSGSASATEDRLDLGFGGATTSPDLGHRPATSTGSAIITLPRADSGRREQDRLRCSSDSHDITPAGCQDLSGCHIGMAFLEKVGRAGTRTGQALSWGRSLPSPAWTLVTPYCKRTRPGRGTNTKAAGFPPLSCPSPAASLPPFALAHALDPSGLGHAAHSLVGSGTPRSRNADKNTNGKVVGPPKAYHLSMEERKSALLYMFTNMPEVEKYFVMPPKSKKSVKGLFKGLGLFQANSSSSSRRRELLSTDEQHTEEQHIEEEQHNEEVEHNEEVEHNEEVEHVTWDQAAQHHQPWDQWDHQREQQQAWDQWGQQGEPADNPMDDGSGGSSATRTRRSRKSHLVKPRHA

SEQ ID NO: 82792 - protein, 63 aa, Zea mays
  Coding DNA Sequence Number=SeqID_39417
MVLASSFEVEILPPASPSEAGPDFAEGGDDAEGPAAPFVDDLFAGNRIVYPSESYFSRKVTSE

SEQ ID NO: 82793 - protein, 103 aa, Zea mays
  Coding DNA Sequence Number=SeqID_39418
MGIGCLRDGNWNKDYSVIPCVKRLNVLSTYREICFIRKATKSRSRGAFRFALRESRLLEKAASWIQPFGSLEDMVAGVTWLSILPPGWTVEWDPTSGEEEHEE

SEQ ID NO: 82794 - protein, 278 aa, Zea mays
  Coding DNA Sequence Number=SeqID_39419
  Subcellular localization annotation: CTP_CleavageSite=60; ConfidenceScore=5.05e-01
MNVDEQGSTGRGTGAIVVLRGWNSGGETRTVNTSSGESPQTAGRTAMAWSNSGDEQRRARAAVGSVCTVAARGRAAWPLGVQGPVARCRWRARRGIGGRRGRARLAAWRTALLASRRASRRGPGRSAWSRVLALQGREQGVGALAARPSGGCVAQEREKQGEREERKGERKRRWSERERWKGGARAQKGEKGDFPLAAAAAGDWGARGLGLSGEILSSRSWPKTLDHGLNDNFIGHYRRLFPQSQEPSYICLKVFFVVLHALEQGLSCDWLRLKALET

SEQ ID NO: 82795 - protein, 201 aa, Zea mays
  Coding DNA Sequence Number=SeqID_39420
MSTVPIDSLFASRPHRLGIQCSTDPGCRRAVTTLEGELVGGEESGLSRAQLTNQTGQRASPGIKEGGRPKSGEVDLRLPVKFCQVRGLGKLHGPMAELTEALAQLGGDWSGLATVAEALAAMAGGKELAGAKEGCLACDASSTRQRRERLSSSADWPQIFEIMAMIPLRDLFLSGSFVGEDLWFDVSKARVPMPSSGTRQR

SEQ ID NO: 82796 - protein, 231 aa, Zea mays
  Coding DNA Sequence Number=SeqID_39421
  Homolog annotation: Hit_ID=Q8S474; Match level="QueryCoverage=29%, HitCoverage=9%, E-value=2e-08, Identity=43%"; Hit description =Putative pol protein
  Subcellular localization annotation: CTP_CleavageSite=77; ConfidenceScore=5.17e-01
VKGSHLANRKTKCWVQQKCKRSNPKAPLVWRTGLSGVPPDMSGVPEDSGFKLVTFGNFQRPLRYNSPDCPVCTGHVRCSKEGRPQELASLGFSFQPLRYNSPDCPVCTGLSGASAEQRLLQAPTATCSAFIAHQRAQRSGTPMLAHRTLYSTCPVRHRTSRLAQKSELQRSISNGTGDVAGAPDMSGVHRTVRLRRNKTGVPSKVTLGSRHFPDGHVSSCTGLKALLRWPR

SEQ ID NO: 82797 - protein, 149 aa, Zea mays
  Coding DNA Sequence Number=SeqID_39422
  Subcellular localization annotation: CTP_CleavageSite=44; ConfidenceScore=5.18e-01
MGSSASPDLGLGLSLDPGRRTPPRPTPGLGLSLGLGRWSPPCPTQGSDSALTPEDGLRLARPQGSDSASASEDGLCLTRPRARTQPRPRKTDSASPDPRARTQPRHRKTNSASTDPRAQTRPRPRRSLASPDLGLGPATSQGRPSLPYP

SEQ ID NO: 82798 - protein, 38 aa, Zea mays
  Coding DNA Sequence Number=SeqID_39423
MARIGQVLDLRIERNLDAGDETAEFCCFYSKVVPKQEE

SEQ ID NO: 82799 - protein, 109 aa, Zea mays
  Coding DNA Sequence Number=SeqID_39424
  Homolog annotation: Hit_ID=Q2TTX0; Match level="QueryCoverage=82%, HitCoverage=93%, E-value=3e-32, Identity=80%"; Hit description =Putative uncharacterized protein
MGTAYALYTVTGDRQYETCSTDFENDSDFRPSRARCCLRFRLCRSIRCVYRLLITCSFPFRRDSYSGQPSVIHITTSKGDSRLIRRPSVAIVRSPNTCATTVFRRLSYA

SEQ ID NO: 82800 - protein, 86 aa, Zea mays
  Coding DNA Sequence Number=SeqID_39425
MAGVTDGSGDESEGLDIEEDGEEIRPMKPNHIAFGKSTIGTCHIEVLKNWHCISDIDLVLLGGANNVHLSARELIKSSQNVLKKVG

SEQ ID NO: 82801 - protein, 279 aa, Zea mays
  Coding DNA Sequence Number=SeqID_39426
  Gene Ontology: Mol. function=phosphoprotein phosphatase activity; Cellular component=nucleus
  Homolog annotation: Hit_ID=A3AKU8; Match level="QueryCoverage=18%, HitCoverage=5%, E-value=1e-18, Identity=88%"; Hit description =Serine/threonine protein phosphatase
MECRFYFPVKHKGLAGATADVHCYDVSLNKWSRLTPLGEPPSPRAAHVATAVGTMVVIQGHETSNLSTAPAKPSRRFLSSPWAPSWVKEAPDPLFNAALQELRLDATPPNLSPLSDTDVRGSVAANCRLWDDLYVTTLLLGGGSRAGWRAPRRSPRMCAAPRAATSCTAPPPAAEAHAARPRADAAGAAVATWTRPPAGAPGGGEIFRFEARFSEVWKLLLILTNFSKEVWFNSALFVQARATGCLILIQFAGESILWPYYLFSRDDGSSRMVSKGPDS

SEQ ID NO: 82802 - protein, 164 aa, Zea mays
  Coding DNA Sequence Number=SeqID_39427
MYMKPKQMPTLGSLADIPKSERIVPLINALLFDNIEDNEGKANLGASEKEVMVASATLEAVDLHEEVVTVIVEEESASTSMTIGKLKELSPSELNWRLESASCGKMQNVHFRLGFGHIKKLWQRVIWKLPRITEKDWRTWAQKSLSCVGLDLIGPVWWCTGQSP

SEQ ID NO: 82803 - protein, 60 aa, Zea mays
  Coding DNA Sequence Number=SeqID_39428
MVELAGGGGRDAGAMDREMQAKAEGMRRVLEMADARAMDWEIWGAPCSKLSRRVVRIVWE

SEQ ID NO: 82804 - protein, 126 aa, Zea mays
  Coding DNA Sequence Number=SeqID_39429
  Homolog annotation: Hit_ID=A2Z711; Match level="QueryCoverage=74%, HitCoverage=79%, E-value=1e-36, Identity=73%"; Hit description =Putative uncharacterized protein
MKQSAVAAAQALLIALAIAALAMVVVTADPAPPPGYTKQEDVGSDFIKQVGKFAVTVYKMAHMIPMSYLRTLQCWSSPAGGGANNYWMVLTATNWTGTAGSYVSTVWGIPGSESRTWKLLTFNGTM

SEQ ID NO: 82805 - protein, 117 aa, Zea mays
  Coding DNA Sequence Number=SeqID_39430
MDGGSSIHRTFFERGRERAQQLLVQVFGGVGVARNNEAGRHESAPERHAVEHSRAHKSLTAQWAPQVRMIRYSSEGKDASLFLMTKAHEMKTDLKRIRVNAEAITRWTTLAHNGDEV

SEQ ID NO: 82806 - protein, 318 aa, Zea mays
  Coding DNA Sequence Number=SeqID_39431
  Gene Ontology: Mol. function=binding; Cellular component =mitochondrial inner membrane; Biological process=transport
  Homolog annotation: Hit_ID=Q8RU49; Match level="QueryCoverage=99%, HitCoverage=96%, E-value=5e-89, Identity=59%"; Hit description =Putative Tricarboxylate transport protein, mitochondrial
  Pfam annotation: Domain name=Mito_carr; Domain location=130-214; Score=17.1; E_value=8e-05; Accession=PF00153.18; Description =Mitochondrial carrier protein
  Pfam annotation: Domain name=Mito_carr; Domain location=226-316; Score=78.5; E_value=2.2e-20; Accession=PF00153.18; Description =Mitochondrial carrier protein
  Pfam annotation: Domain name=Mito_carr; Domain location=34-119; Score= 36.5; E_value=9.8e-08; Accession=PF00153.18; Description =Mitochondrial carrier protein
  Pfam module annotation: Pfam domain module=Mito_carr::Mito_carr::Mito_ carr; Domain location=130-214::226-316::34-119
MSFSAARVSEHGGEFEEARGMPAEVSWEMLDKSRFFVLGAALFSGVSAALYPAVVLKTHLQVAAPAQAAASAAAAAILRRDGPRGFYRGFGASLAGTVPARALYMAALEATKSVVGSAALRLGVAEPAASAAASAAGGVSAAVAAQVVWTPVDVVSQRLMLQTAPLAAARYRGGTDAFRKILLADGVRGLYPRLRHLGADLRALQCRVRLLWRAVGPAAHDSRGAAIALQGASAAAAGSAAALVTMPLDTVKTRLQVMDAGAQAPTLAAAARALVREGGWSACYRGLGPRWASMSLSSATMVTVYEFLKRLSAKEGSL

SEQ ID NO: 82807 - protein, 93 aa, Zea mays
  Coding DNA Sequence Number=SeqID_39432
MATQGQHAAPRRPTRGDVFSVEGSTKVPHRLRQSIELGGLLIDVLGEHPGRIDGNIEVPLVAELPELFQLKCLSPALEARPHLNGNNASIPRI

SEQ ID NO: 82808 - protein, 230 aa, Zea mays
  Coding DNA Sequence Number=SeqID_39433
MVRDNGVWDVETMDDVREESHRMLGLDVSEGPDLDPLGKFVDGNQQVCEAPEHLLQRTNEDRTISVASKTTVDQYNPCLKAFPTRVRGTLWLSGWRRASVWTRFERLFDCNRRRCLVPLFASLNTQRVEARAESSVSYPSPLDGEGVQIIVVGEVAKAMLGRGRSLPEAMAEPSLGLDAVQDTVKGVAFCGIHGEQPLIEAWLGVVFFSQDRLERGKNSGSMERGPRSRQ

SEQ ID NO: 82809 - protein, 118 aa, Zea mays
  Coding DNA Sequence Number=SeqID_39434
MTVEWKFSSHLVPKEHRVRRPLIRETCLCKNTTKSFIKMKILLELTLHVSMMVMKRFLVQHRSRQSPASLYKNENEKKCEKENQSQERKNVATTQAQTLCKALRFSSSILLNVALGRL

SEQ ID NO: 82810 - protein, 183 aa, Zea mays
  Coding DNA Sequence Number=SeqID_39435
  Gene Ontology: Mol. function=subtilase activity; Cellular component =cytoplasm; Biological process=proteolysis
  Homolog annotation: Hit_ID=Q6ESI7; Match level="QueryCoverage=65%, HitCoverage=8%, E-value=3e-54, Identity=89%"; Hit description =Putative tripeptidyl peptidase II
  Subcellular localization annotation: CTP_CleavageSite=75; ConfidenceScore=5.02e-01
MAAGAHCVVQPSAKGMEYTWSNRRTTADGDLGVSISAPGGAVAPVPTWTLQSRMLMNGTSMSSPSACGGVALLVSGMKAEGIPLSPYSVRKAIENTAASISNAPEEKLTTRNGLLQVDRRPRTPVHVLPHASAPQPPTTNPPPHTAGSPISRSPQIPLRLLASANHAAPSTHGASMCPHNLNY

SEQ ID NO: 82811 - protein, 80 aa, Zea mays
  Coding DNA Sequence Number=SeqID_39436
MVKIAQGGEKGALLDLRLLEVLLLECLLVRPTPRLVLARDVLLLVVAPTRVVVVQTSILDEDILHYYPLAKTQLAQLAQL

SEQ ID NO: 82812 - protein, 158 aa, Zea mays
  Coding DNA Sequence Number=SeqID_39437
MGIGDDAVSGDDKHIHDDSTLEVSHSTDDLVAEVEELMAALASHDKFLRLAHAKGSSTNYTKSTVRNTVDYSGQEKPFTKIGQARTVRAFAADRPRHLNNPQTEPMQKLMSLLRTVRWKSKHRPRPRADHPASGADRPGRTVRTRGADRPRSAERSNS

SEQ ID NO: 82813 - protein, 351 aa, Zea mays
  Coding DNA Sequence Number=SeqID_39438
  Homolog annotation: Hit_ID=Q338K8; Match level="QueryCoverage=84%, HitCoverage=89%, E-value=5e-39, Identity=40%"; Hit description =Expressed protein
MELNGIKDVKIFFYLKLNKKGGRQRHRRRRGRGRGGDLAKPSFSSTLLDAICDSLDEQAGGHGATAERATAPTPRSAKEQHQAALHYYYYKPFLAASHRAARAAPSPADDCSSGRGYFSSSEVEYSLRRLRPIRTSAGGVGPASVAPVEKQKPAPPGTAKRARKPSAAPASGGCRRPASPGARLASLLNAIFSGKRNSARQHPAPADEEPACSTAPSTARPCLAKTPPSARARARATRNRSRTVRFLDIEGEVAVAAAAAGCRRFPVVEVEDSDGGEESSDASSDLFELENLAALAPANGGPGCRRTCENELPVYGTTGAGLGNDSRLVRRRRPFGYVSHGRSCRGLFDFK

SEQ ID NO: 82814 - protein, 230 aa, Zea mays
  Coding DNA Sequence Number=SeqID_39439
  Subcellular localization annotation: CTP_CleavageSite=41; ConfidenceScore=5.29e-01
MVPPVDVAVCALSRATWGAESEPWGRARRSFVVFRVLARVRALGSGGAEFAVFRVLARVRALGSGGAEFAVFRVLARVRALGSGGAEFVVFRVLARVRALGSGGAEFAVFRVLARVRALGSGGAEFAVAPLARPDCLSDFTLSSGTAVGVAQAALPFCQTGQWSGGVTAVTSALPGARVRIELYADGGYQLRIRRLEGSETTVGDHNNGYPQDDYFSPQGIPQQHDAEEA

SEQ ID NO: 82815 - protein, 450 aa, Zea mays
  Coding DNA Sequence Number=SeqID_39440
  Gene Ontology: Mol. function=DNA binding; Cellular component=nucleus; Biological process=regulation of transcription, DNA-dependent
  Homolog annotation: Hit_ID=Q9SM15; Match level="QueryCoverage=80%, HitCoverage=97%, E-value=1e-111, Identity=63%"; Hit description=SBP -domain protein 5
  Pfam annotation: Domain name=SBP; Domain location=87-174; Score =152.7; E_value=9.9e-43; Accession=PF03110.5; Description=SBP domain
  Subcellular localization annotation: CTP_CleavageSite=61; ConfidenceScore=5.02e-01
MEAGGASGGDDGDGQLHGLKFGKKIYFEDAGGSSSSGGSGSASATAPPATQQPSPPAASPRAAPGGGRRGRAAAGGAGPSLPPAPPRCLVDGCNADLTDAKTYYCRHKVCEMHSKEPRVVVNGLELRFCQQCSRCNMSGIRQRFHNLAEFDQQKKSCRKRLAGHNERRRRPPPGPLASRYGRLAAPLGGTKKLLHFFLLGDLGDQSFSFFVSVANVPTLDPEEPGGRFRSFMLDFSYPRVPSAMRDGFPAVRPGGERVPGSNIQWQAASLDPPPPHHQSAAAGYGAHSYGSPGSSSSSRPPVFPAGPELPPGGGCLAGVPTDSSCALSLLSTQPWDAAGHSAGHGHGHAASLPATAGFDGNPVAMASSYIAPPSPWTDSRAHEGGRRNVPQLPPDVPLGDVHSGPGTHHGQFSGELELALQGNRPAPAPRNGQGSAGAFDQAGSTTEWSL

SEQ ID NO: 82816 - protein, 119 aa, Zea mays
  Coding DNA Sequence Number=SeqID_39441
MKSLADPASMRSPTPPKRGASLCIRQLDHHLHGQAACQPGFCHCTAARCAKDGMRLSGLRLARLAATSASTWRLQKALGRTPVVGTGDGAIPTSQNQAGNHTIHQAADGSERWRRGVAS

SEQ ID NO: 82817 - protein, 110 aa, Zea mays
  Coding DNA Sequence Number=SeqID_39442
MVADTWDTHSSEDVAERVMLLVRSRTSGTRVQDVRDEHVSIVNKMRANKAHLPYDDHERALKLLHALDRRVWEVKVSATIESPNYKTLTLDELFNKLKSIEIDHWTRTKI

SEQ ID NO: 82818 - protein, 227 aa, Zea mays
  Coding DNA Sequence Number=SeqID_39443
  Homolog annotation: Hit_ID=A2Y7Q7; Match level="QueryCoverage=13%, HitCoverage=5%, E-value=7e-08, Identity=90%"; Hit description =Putative uncharacterized protein
MKREEKRKKLEEEQRLNEEEKMNKVRNPYPMHTISRTLLATDEFLYASVHLSPSSPPRVLHHMPSVQATARDGNGYPLPETRWVFALLGYGFGSISLPMGLLMVSNRNPTGFTKESGTLGDIWETVPSSDPVLLLISDSTQTGLRKGSKSFDEAQAAGFTKESETLGDIWETVPSSDLVLLLISDSAQVLLTQGSVIEPIVVVRGNEMVLVAHQGKWEVAAHPPSLL

SEQ ID NO: 82819 - protein, 346 aa, Zea mays
  Coding DNA Sequence Number=SeqID_39444
LRRTSDSHDITPARCQDLSGYHIVMAFLEKVGRAGPRTGQALSWGRSLPSPAWTLVTPLLQAHPTWARDEHEGRRTSTSLTPDSGHLASPPFALAHALDPSGLGHAAHSLVGLGTPLSRNADSLGHGRQTRPRLRRSPHVARPRAQAHHVNRKRQHHPTPSRLGSRRTRPASHLASSARWAMMAPHKLCDDGGSQLSYGSRATSARTRPLRQLSLRQAPLLLRQPRHHASRVPRSLRLPHWHGLLREGWPRGDKDGTGALLGPLASLTRVDACNPIQQAHPTWARDEQEGRGISTSLAPGLRPPRSPPFALAHALDPSGLGHAAHSLVGSGTPRSRNADIINDKSD

SEQ ID NO: 82820 - protein, 299 aa, Zea mays
  Coding DNA Sequence Number=SeqID_39445
MAGSAAPLRRPLRRPLPRRRARGYERPRELQRLVVLDQRHCGTGGYEIDGSGYDYGIASPLQPNRMLAEYVDVYSPLLYTPNPPQVVSIATTAQAKMKLWKETSRSSKITTSSRCGLAATPSRLPVKAALSTFLFRTLIYCKNYMDVSDMARLRHTARKSVIPFLPSRLAERPLRRPVAGQSSHLERLHHRLREEQERRRQEQQSSSFSLHQEIESVRSCSPVLPLEPPPASPLGAPASGVAAGGDPDDGDGDDSSSHDTDFSANPEPGGWVARPITREDVLCHSTMRSTPATSGMTNL

SEQ ID NO: 82821 - protein, 537 aa, Zea mays
  Coding DNA Sequence Number=SeqID_39446
  Gene Ontology: Mol. function=binding
  Homolog annotation: Hit_ID=A7NZV5; Match level="QueryCoverage=10%, HitCoverage=13%, E-value=2e-13, Identity=64%"; Hit description =Chromosome chr6 scaffold_3, whole genome shotgun sequence
MGLAHSPLGVLGRKYVRLYPASTSVGLYPNTESMLSNTSEVDLDNTDGKEYPETAALEFVDCVLEEARTRQRVYQRGPLSASLSSAIGGNRQSLNTASLRGEVHNDGFDKFDPRTRQRVYQRGPLSASLSSAIGGNRQSLNTASLRGEVHNDGFDKFDPRTRQRVYQRGPLSASLSSAIGGNRQSLNTASLRGEVHNDGFDIFDPRTRQRVYQRGPLSASLSSAIGGNRQSLNTASLRGEVHNDGFDKFDPRTRQRVYQRGPLSASLSSAIGGNRQSLNTASLRGEVHNDGFDIFDPRTRQRVYQRGPLSASLSSAIGGNRQSLNTASLRGEVHNDGFDKFDPRTRQRVYQRGPLSASLSSAIGGNRQSLNTASLRGEVHNDGFDKFDPRTRQRVYQRGPLSASLSSAIGGNRQSLNTASLRGEVHNDGFDKFDPRTRQRVYQRGPLSASLSSAIGGNRQSLNTASLRGEVHNDGFDKFDPRTRQRVYQRGPLSASLPSAIGGNRQSLNTASLRGEVHNDGFDKFDRTSTMFQSSHW

SEQ ID NO: 82822 - protein, 71 aa, Zea mays
  Coding DNA Sequence Number=SeqID_39447
  Gene Ontology: Mol. function=transferase activity; Biological process= metabolic process
  Homolog annotation: Hit_ID=A2YWV6; Match level="QueryCoverage=98%, HitCoverage=40%, E-value=2e-27, Identity=80%"; Hit description =Putative uncharacterized protein
MWSSDSANLAYIAQHQLFDQIKELHEDIAVPEYCSAGGGKLQSLNAWFGPHGTITPLHHDPHHNLFAQNPV

SEQ ID NO: 82823 - protein, 116 aa, Zea mays
  Coding DNA Sequence Number=SeqID_39448
MVARVPMLVGYPGRPSLEGRTPATRAGCRGCGRSALCERESGAGRCISDDRGDARDDGGCGYGCLQGIHRREASDEGEGPTVVQAMQGGDDGPSGARPSGVARPVGGMAGVEGGMS

SEQ ID NO: 82824 - protein, 343 aa, Zea mays
  Coding DNA Sequence Number=SeqID_39449
MDSLVLSWLHDTLTVELQNIIRDQADTSRQAGSLRGEYCRQMKGMADSLCDLGEPVARSYLGAEPSAWPQLPLWPPEGSHQEDRALSHLSCCAERASPRGAHHGDRGTHSDLGTLQRSSGWLGAFRGADPSSSVDQGPARPPTAAPAALVRLPPSTEDVAPARADAGVVAPPVEVPPVGVAARRGRHSTITGPGPSPCGWGLTISMWPDAYGVPPYVMPLTPPTLPQLPPLGTPSSIVVGNGSTLPVTSVGVPVFHGPFYLNDVLDLATRTPLVRCDSAGPLYTLRPSTTDASTSCPAEQAFDLVHFDLWTSPSDTFTTITRVFAWVSTLFRRAVRRLADSGR

SEQ ID NO: 82825 - protein, 268 aa, Zea mays
  Coding DNA Sequence Number=SeqID_39450
MALPVDVAGLCPRQGDVGAPPKPRLSLSSVAEAESEPLGRARRRSFGRGQGGVRALGSGEAEFRRLPGLSPSPSPGVGRSGVLARVRALGSGGAEFAVAPLARPDCLSDSLCRVAPQSEWRRRRCPSVRLPESEPLGSGGAEFAVFRVLARVRALGSGGAEFAVFRVLARVRALGSDGAEFAVFRVLARVRALGSGGAEFAVFRFLARVRALGSGGAEFPMALLARPYCLSDSLCRVALQSEWRRRRCPSVRPLYADGGYQLRIRRLE

SEQ ID NO: 82826 - protein, 241 aa, Zea mays
  Coding DNA Sequence Number=SeqID_39451
MAQRLTRSTCADGVPNFGERDCAFPVAGVPGSSSSKLLGLLGKLPRGLDQAEEGGKRFGHGGCPRAALAGRGGVARAMGELWGVRRGTEDATGKIAGHWDRLYSHGTGVVTGDRGRAGGIKCTTSFIIGPRHDQVVFIAFGSYLLIVLQLSTGGALGFWAISPPSMCMIQRAGGGGVLDYVPTPLGKKSGKRERRKSSISHVILQWVSGHTFVAEIHGTHCELLTCGVATPIDRLWVHNLL

SEQ ID NO: 82827 - protein, 136 aa, Zea mays
  Coding DNA Sequence Number=SeqID_39452
  Homolog annotation: Hit_ID=A0EVJ2; Match level="QueryCoverage=77%, HitCoverage=9%, E-value=2e-07, Identity=29%"; Hit description=CACTA TnpD transposase
MAWNGNQLCCALCRWLWTCQEVEAHGAVDRTMGDSRRWMYEGWRKMILRLSGYRKPKILSIVFFLRQEMVECGAHAVFAKIINVKPRKRCLVIFAKMATCQIYEDWVHHGEELPRGYAPEGQDDFDPDLDRMEEMV

SEQ ID NO: 82828 - protein, 53 aa, Zea mays
  Coding DNA Sequence Number=SeqID_39453
MKVDPVYGVAGSGELVLDSFLLKVLLHLQILELGPVVTPYLFHLELKFVLSSP

SEQ ID NO: 82829 - protein, 123 aa, Zea mays
  Coding DNA Sequence Number=SeqID_39454
MARVVCTLRGKRLDGGVSVLSHTLESLFLSRPRLYRPDLHYQCEWPGIHYVAFTKTTVVYSCSLGFASRTNAVHRPKVLTERYSGKRPKSPKDIIGQRTLAFTRLLLRDVSNNTLRNLGLLVV

SEQ ID NO: 82830 - protein, 245 aa, Zea mays
  Coding DNA Sequence Number=SeqID_39455
MAHAPKTEARARPRKKAKSKRVEWKDNKAKNSPKVLGGGYAPQVSSAEPRTPSRPSRGRSAPYRAQLRLALLAAWPAVRLRWRMSCLGPVTAWRTPAAVRPTPGARVPSLVRASCACCVEKCLRAATRPTGSRARYTLPSSSSPPGVRLVGSRAPAAFASCRRRPMAGGTEDTSLALLVSDVAHAEGRRRVGVTRPRIGPPERTTSSPARRLRAEAGAGPSARTCYLVDPASSHMLVSKIKPCMC

SEQ ID NO: 82831 - protein, 117 aa, Zea mays
  Coding DNA Sequence Number=SeqID_39456
MANSTVAITPAREHQRARDTARQANGGCLPQAQTQDRLEVSGEAMKPRVDGGGLRLRKNAPGERGGEGAQLWAQVSRGKWASEVRCLKGQGRAEVTGERADVGTSTSRDVGGRLGTG

SEQ ID NO: 82832 - protein, 116 aa, Zea mays
  Coding DNA Sequence Number=SeqID_39457
  Subcellular localization annotation: CTP_CleavageSite=63; ConfidenceScore=5.57e-01
MQGHSVPTHINRPQRFPVSRSGLTALAYNASLTPTGRRAVTALVPTITGMGDLVSGRVRGKVYCQVQSGTRLTDLPYFSVLWCRLGCWIWGYLLSSSLLRHEDVLSVGDLFSSAKS

SEQ ID NO: 82833 - protein, 132 aa, Zea mays
  Coding DNA Sequence Number=SeqID_39458
MSHRGSTTSRMELRKNRKHPASVDGAATTHLPRRHYVEHPAHSGKEQGKGLFGEGDRGAVLGRGARPPWGRRFPALVVWGEREEAGWFSMGVSGRAGEGLEQRRCAGLLLAVEQGEDEPEEGCVRPGSQGEK

SEQ ID NO: 82834 - protein, 26 aa, Zea mays
  Coding DNA Sequence Number=SeqID_39459
MENADEPSPGVLERESQIVPTLHDAE

SEQ ID NO: 82835 - protein, 289 aa, Zea mays
  Coding DNA Sequence Number=SeqID_39460
MISHGSSDEGNAQSHTDGLAREGFPHILWEVLQGAGYTMPPQYAVQLFEKHRVPRCRVRMTLEPHPLLPGWRSLDSETFGYRAEDTIEAIALHKLTTFCGLHPLELTTHPIGLFPVEKEDDPMWKDRVEHAKDIWAIYLGQTAHLTVRCMNAMYRLQVMRGEAMSHLMALLEATKITLDNREELVVDLSTEMVEKDLQVEQLLNEIQELEELVGTRENTIEVLEDQLINTQQQLAEANQHLDMHHQEIQDMEANEDVDIEGGEEPASSLDTAGLGRPPSPESSVASFAH

SEQ ID NO: 82836 - protein, 143 aa, Zea mays
  Coding DNA Sequence Number=SeqID_39461
MAIVATHWVCLRRIGRPMFQFNTWLMTRRLKMSLVCSLESFELVDLELGGGSPEQSDASRKKAGSLASPKCKQPSQSYVQADTSKAKWKRRKLRCIVDMQPVSVRAEPVIDDEVVDTALVDEVKSGGGTRLARYIIEEAEDEE

SEQ ID NO: 82837 - protein, 189 aa, Zea mays
  Coding DNA Sequence Number=SeqID_39462
MVEVLSCIKDWELADQHKQYTVEKETKYLKEIFEDMYLDDEQQYHANFDICHDLHGLIIEEHVSHLPVEVPSYIVSHQHNPRVTGVGDDHEVPLFEDGQCGAATLDRVQAAVAPELAEHSDVCSHVVLLPDVELAVAKLLFVVDERRQRERLLSVVFVRGFQVKNMDSSLSLVYENDSQVRAMEKYYGE

SEQ ID NO: 82838 - protein, 250 aa, Zea mays
  Coding DNA Sequence Number=SeqID_39463
  Gene Ontology: Mol. function=kinase activity; Cellular component =cytoplasm; Biological process=coenzyme A biosynthetic process
  Homolog annotation: Hit_ID=Q69T90; Match level="QueryCoverage=87%, HitCoverage=58%, E-value=7e-92, Identity=73%"; Hit description =Pantothenate kinase-like
MESSSPSVPFPLLQAPVESTYRACTIPYRFPSDNPRKATPVEIQWIDLFLNSVPSFKYAPGLGLIRSPFPFRFRRLFPLTPCFDGFCRQRAENDPTVPDAPAKAEKFAQRLRELVLRELGFRDIFKKVKDEENAKAMSLFEGVIKRNDEIEDDGKRIENLVRGILAGNIFDLGSAQLAEVFAKDGMSFLASCQNLVSRPWVIDDLDAFKSKWTKKSWEKCQERRTLDSPGLGYVTRSLRPSSPCCALGDI

SEQ ID NO: 82839 - protein, 123 aa, Zea mays
  Coding DNA Sequence Number=SeqID_39464
  Homolog annotation: Hit_ID=Q69T90; Match level="QueryCoverage=23%, HitCoverage=7%, E-value=2e-07, Identity=96%"; Hit description =Pantothenate kinase-like
MANRWWAWSGMVVWLVDRWAGLGEARISGLGIPSCQERRTLDSPGLGYVTRSLRPSSPAVIFVDNSGADIILGILPFARELLRRGTKEQQGMQLFHQGIFPNIPGENLSLKFGGKRWDEQSFA

SEQ ID NO: 82840 - protein, 141 aa, Zea mays
  Coding DNA Sequence Number=SeqID_39465
  Gene Ontology: Mol. function=transcription factor activity; Cellular component=nucleus; Biological process=regulation of transcription, DNA-dependent
  Homolog annotation: Hit_ID=A7QVU3; Match level="QueryCoverage=48%, HitCoverage=29%, E-value=4e-11, Identity=52%"; Hit description =Chromosome chr7 scaffold_192, whole genome shotgun sequence
MDNACGSAPSTLPRPHLRHSRGHRADYDQDQAAYSMRSSAAVFNFPVEHIQESLRALGLSVDAGGSPVLALKRRHCIHRRLPKNKMEANKEEQTKAQPARAGHNKTEPYVETFSTEYALLDQSKTPAFEKSFKSYTIQVQS

SEQ ID NO: 82841 - protein, 189 aa, Zea mays
  Coding DNA Sequence Number=SeqID_39466
  Subcellular localization annotation: CTP_CleavageSite=35; ConfidenceScore=5.27e-01
MMLATPPSITHRHLHSGIIPPPGPGHRRRLVSTARAAVKRDGATTEVAGDEGASSSSSSPPPPESSRVTKAAATATPAAFSLPKDYSHTLFHSEFLEVLGLIDLESLRKRPRLTVGVTVKASLPLPVLVVLAALYLADVTSGLVDWTHHHLEGDADDPRCDTSSSLRLCFDPFERSPSSLWPFPGLASA

SEQ ID NO: 82842 - protein, 54 aa, Zea mays
  Coding DNA Sequence Number=SeqID_39467
MSRAFDDYYIKDYGVISAPEVWHVPSNDETMQNRDIYQSLHDTDGCNVVVKQLN

SEQ ID NO: 82843 - protein, 307 aa, Zea mays
  Coding DNA Sequence Number=SeqID_39468
  Gene Ontology: Mol. function=two-component response regulator activity; Cellular component=nucleus; Biological process=two -component signal transduction system (phosphorelay)
  Homolog annotation: Hit_ID=Q689G9; Match level="QueryCoverage=89%, HitCoverage=53%, E-value=1e-121, Identity=78%"; Hit description=Two -component response regulator-like PRR1
MSNRDEVSVVVKCLRLGAAEYLVKPLRTNELLNLWTHVWRRRRMLGLPEKNFFNDNFELVLSEPSDANTNSTTLLSDETDDRPKGNTNQETGTSKQLEYESNPSVAEPDQREKMEGVPGSALDASKKSSPRRAFSRPIKTNLRVAESSAFLAYVKSSTPATSSFDSELQRGGSRLDSLDNQGNCSSATDRSDTGTDVNIRNKEAFEMPAQYPMVWFSSSNMHMERSSEGHNDTSGTPPAYHFPFYYPGMVEHNMALSSAQDFQANINNAQAHTPQEGTFKICHYAGELFYMQHDSGPDWLIFIPGDI

SEQ ID NO: 82844 - protein, 67 aa, Zea mays
  Coding DNA Sequence Number=SeqID_39469
  Gene Ontology: Mol. function=metal ion binding
MDHVLAGLMGDHLALIVDRLLTESTLEAAIGGGKQMVDLCQETMDVEYCHRGLGGGSVTKVVECRIC

SEQ ID NO: 82845 - protein, 634 aa, Zea mays
  Coding DNA Sequence Number=SeqID_39470
MPSSSSSATATPPAAASSEETLSNVMVEELRAGDSVEFGVSRMTSARIEDMQRLGYFGGGVARAPGTEEVPEPEGELVVFEAFFAAGLRLPAHRVFELNQLPYDGYPGQDEADRRGKKPAVETGGDPALAAATSSKKRKLVMDKDRQGATRKRQATVRVHEARPKRQRGSAKAEASGGGKPPLPAKVGASAPVKAPEATVGAGGPKLSKVVPSVSGVAEAAKAARSLPPSGKRVADFGTEINVEDYLGGSDEGPLALVVPGAAIATAAPAPKAGVETLGVGGEVTALALVRDEAGEATHRLKGAMEALGQVADFTSRTASGALTAALSAEVERLRTQHADAVREKSASDSKCRKLAEKAAALEKEKADLRRQLTEERREANEAIAKEQAAQAEARLARAEGNIAKELAGELQRRLAAFESRAEGAEAAARAEAERTRTQLMTSYRELGVRTSDFEVPEREAGLRCLEWVQEELQELPTVLAGLMSFTSLVTCEAAMNALSREGCRHYEALDQVDEDFGRDIFEVEDPVVKESAGALYDRMWGSYGREVVRARAEAARAQAERGERVDDFGALNSALPEPETTPAEAATGVAPGLTPETAEDAPGAPAPAAAGEGLPPKVAEGAPDAPRSCCAER

SEQ ID NO: 82846 - protein, 227 aa, Zea mays
  Coding DNA Sequence Number=SeqID_39471
  Homolog annotation: Hit_ID=Q8SA97; Match level="QueryCoverage=25%, HitCoverage=7%, E-value=6e-07, Identity=56%"; Hit description =Ornithine carbamoyltransferase
  Subcellular localization annotation: CTP_CleavageSite=54; ConfidenceScore=5.04e-01
MALPVDVAGLCPRSGDVGVPPKPRSSLSSVAEAEPEPPSRARRRSFGRGQGGVRALGSGEAEFRRLIGLSPSPSPGSGGAEFAVFRVLARVRALGSGGAEFAVFRVLARVRALGSGRAEFAVFRVLARVRALGLGGAEFAVFRVLARVRALGSGGAEFAVFRVLARVRALGSGGAEFAVFRAALSFCQTGLLLSEAKASGEPELYADGGYQLRIRRLEGTPNYGPRQ

SEQ ID NO: 82847 - protein, 88 aa, Zea mays
  Coding DNA Sequence Number=SeqID_39472
MAKIRAARGLPHRGAHAQDPLVAPGAFVFFPLAVTTSWRTHLSPRLGHYAYRLMDYSFVRLELWLGGWPHVGDGLLWPVLARRLACRG

SEQ ID NO: 82848 - protein, 85 aa, Zea mays
  Coding DNA Sequence Number=SeqID_39473
MTGKKTTASSDGGTPKKAKVVVEDEEEAGLEDEEEATVTLSVEKDALECDICCLPFQSEVFMASQINALQERAFWMCKVLHPHRR

SEQ ID NO: 82849 - protein, 40 aa, Zea mays
  Coding DNA Sequence Number=SeqID_39474
MAPRRAFALCRRSGAVKSPDPGEQQIEVAEQELIEGKLCP

SEQ ID NO: 82850 - protein, 309 aa, Zea mays
  Coding DNA Sequence Number=SeqID_39475
MAYIRLRPLAYVTSHRPHGSTETPPEQGARTKSYWTCGSSGLSLIGGPDGTFRGLGPTYGRSTLTVIHRVLLLLGHVAPSDPLAEEPESLCRGMDLWLQSSDNFSSRILRDTALVHRGKDSGITTRKPATLLLSYLPARRPVHSRPPPSLQSSQRRAASPSQRGTGGRATSGGRARQTAPGGRPRQAAHLQAASGGRASGGRAVEPPAPGGRATSAGRPSQAASGDLTQRPDKQRQAEAAAGGRQAPPSSAKPRQAAAGGLTEAADSPSRTPGGLAELQAPGAAQCLAEPSILQIRVQFLLRYLVHTDF

SEQ ID NO: 82851 - protein, 95 aa, Zea mays
  Coding DNA Sequence Number=SeqID_39476
MASPGLRTPRAIGGCSLGQLIIFYLSPIHQVIYNMPSTVSGTHGAPSTLHVNDDTKTRFGAEKNMIGITASLREVRPPELSWQRLRPATRPGDGR

SEQ ID NO: 82852 - protein, 232 aa, Zea mays
  Coding DNA Sequence Number=SeqID_39477
MTGTGLILGEPSSYLLFTVFFSLLTFHFSLPLSFSLLFPLEDSIDEYYHHTEEETKDYEPCTTVFNPRITKHCDLRGEGVGKWSCLQFGRGDFIGAVFALCEMGVDGAGGGVLRGSGCDKGRGHGVAGDDGGDGCAAKRGVGGGSALQRGRGAVVMRMETGTRARGTEKTFLRKTKRKHTSSAMISTNKSNILNKGRIEFFQSTDYSDSGAKHNYYCSAPELRTMLTRTYEH

SEQ ID NO: 82853 - protein, 88 aa, Zea mays
  Coding DNA Sequence Number=SeqID_39478
MDYSAPAGSRWKLAPGSLTSGGDHLYSERPPLHQRLASDGGHLRPSGLPATAAIIVHTKRSSLPSSYGGEDKTIQERGCHLHDVRHLV

SEQ ID NO: 82854 - protein, 52 aa, Zea mays
  Coding DNA Sequence Number=SeqID_39479
  Gene Ontology: Mol. function=nucleotide binding; Cellular component =mitochondrion; Biological process=small GTPase mediated signal transduction
  Homolog annotation: Hit_ID=Q40525; Match level="QueryCoverage=90%, HitCoverage=22%, E-value=5e-15, Identity=87%"; Hit description=Nt -rab6 protein
MAPVSALAKYKLVFLGDQSVGKTSIITRFMYDKFDNTYQWSLVIEDLDNCII

SEQ ID NO: 82855 - protein, 214 aa, Zea mays
  Coding DNA Sequence Number=SeqID_39480
MQLVDDPEKDGLDQWMLAKRVPPSKHCLSVKLKWTLPLTRPETRSPIPVMVGTSAVTARRPVGVSEALYAKAARILTVEGSSSTLGVDYTFGEGLLQESGSSRRLGRSPRSLGQLSPEDISPARGLDRSTPASVPLTDDPARLRLTKSSFRANSASIRADTATPGFGSSKSGRGVPLTKQEKPRTIRSTEPWDSYASGIRIPHSSPLHGATHAW

SEQ ID NO: 82856 - protein, 143 aa, Zea mays
  Coding DNA Sequence Number=SeqID_39481
  Homolog annotation: Hit_ID=O48967; Match level="QueryCoverage=78%, HitCoverage=24%, E-value=1e-43, Identity=77%"; Hit description =Putative uncharacterized protein
MVQIIEHRAETSVDFAVEGEAASSTPSKTRSSQRQHEASTSVRSPSIRGAQTNDLWAELNRRHAGEDARVSLERARERRQNIDGRDLNQDFAAVAPHTPMGTRSQTGVPLAGVGYAALADHLRAASWPPKFRPVGDLFSSARS

SEQ ID NO: 82857 - protein, 52 aa, Zea mays
  Coding DNA Sequence Number=SeqID_39482
MAVTYTCRNSDGFVVASYFSGRYPQTKVGIAAERNNTKLDTEPKVLNRKASA

SEQ ID NO: 82858 - protein, 195 aa, Zea mays
  Coding DNA Sequence Number=SeqID_39483
  Gene Ontology: Mol. function=ribonuclease H activity; Biological process=DNA integration
  Homolog annotation: Hit_ID=O48967; Match level="QueryCoverage=72%, HitCoverage=40%, E-value=9e-42, Identity=50%"; Hit description =Putative uncharacterized protein
MANFASAYQQHGVEAHLHALRQEPGETILKFISRFTKVRVHQSCRGSCVALGPTNWSCPVGWLGGHPPGQKEEKKKDRDYQKPRSTALVVAAVTGGQGDRNKRPRPQKGSSGSCPMHPNGRHSAAECREIIDLAKHVNERREQSSKDGSSPRRWPDKEKVNDGEVAAAEWDLGYQSPEGDLKDIFIGGSYSGEDN

SEQ ID NO: 82859 - protein, 379 aa, Zea mays
  Coding DNA Sequence Number=SeqID_39484
MPGSSSSRDLAKTRTLLGSLELIRGTRHVLLGAPDPFVQGFGVPWRWGAPVFSGGIRVKVVPAGDFTVGERALVVPGRNLWPVVIHKDDYQPCGGENIRGRRAFASLAEEANSGYAGPAVCGAVSYRVSGSPAWVALVPPAALPPAAGAERGCPSTARATVALCAGRPHSRLLPRHRPHREVVQDVRWSLPLVGLMWSPPLVRLPTTEVVATAGETVSATCRWTSGSLAVMASLSSPVGGRGRGPIRSSAHPKVIAAAGEPLGAEVVVAAGAEVVAVVGNPSMQRWSPPLVGLSGASFQRDSCWRSVVHSCRNGARVPFGGGVCKLTVRDQAERLHGFRTLQETSARSSEPDLQGGGACRPTVRDQAERLHGLRTTPGD

SEQ ID NO: 82860 - protein, 27 aa, Zea mays
  Coding DNA Sequence Number=SeqID_39485
MSWRSKLRTAADETRSIEQTINSYSGK

SEQ ID NO: 82861 - protein, 92 aa, Zea mays
  Coding DNA Sequence Number=SeqID_39486
MSMLVRGPWLWRSPTLGSADMVAPLCPREARYRNLVLARIDAIAGSWVCLSVVGPRLRSGKAETSPKAKAEAEAWGRARRRPSPEAKAEAEA

SEQ ID NO: 82862 - protein, 156 aa, Zea mays
  Coding DNA Sequence Number=SeqID_39487
  Homolog annotation: Hit_ID=Q6J9V9; Match level="QueryCoverage=68%, HitCoverage=37%, E-value=5e-47, Identity=88%"; Hit description =Putative uncharacterized protein
MSRLLGCGTSAATQGSPACDPTVSIECNDHGASDTSGRRSGRRFASVMMTAPKKGPGKGIFRKRILPSEGNGPRALLLIRGSKVAPSGVRQPPQSTRALSPLLIRGSKAGPSKGFDSCPRACRVRDDPGYVRYMAEARATLPMYPRTFPRPAGTIL

SEQ ID NO: 82863 - protein, 384 aa, Zea mays
  Coding DNA Sequence Number=SeqID_39488
  Homolog annotation: Hit_ID=Q6QP51; Match level="QueryCoverage=14%, HitCoverage=25%, E-value=4e-19, Identity=82%"; Hit description =Putative growth-regulating factor 1
MQVACNRTTETHPFSFDASSMEAQAHTSCNRRAGYYVRETAPPLAPIPRLLDCGTSAATRGNPAHGPTVPAEHIDHGSVSRGRRRNGRYGQKDRERGYSERDPSPRRKRAPSPPTDQGFEGWPLGRVSTAAPEHSGFRLITDQRFEGWPLGRVRQPPQSTRAPRPLLIRGSKAGPSKGSTAAPEHAERGMTLGTSDTWPRLGLRSRGTLGHFRDQQERFCNGIPPEGGIEPSNPIERDQVRQITCSLRRRSPPHPTLGLGLNLGLGGWSPPRLTLGLGLNLDLGGCSPPRPTPGLSLNLDLRRNRILTPPRPRPQEESPPHPTLGSDRPRHRGYIITLPLASSGYGEQDRRPIWLAPGSSAPPTPMTPHAQGSSTSPIATLACT

SEQ ID NO: 82864 - protein, 77 aa, Zea mays
  Coding DNA Sequence Number=SeqID_39489
  Gene Ontology: Mol. function=structural constituent of ribosome; Cellular component=intracellular; Biological process=translation
  Homolog annotation: Hit_ID=Q5I7K8; Match level="QueryCoverage=70%, HitCoverage=45%, E-value=2e-24, Identity=100%"; Hit description =Ribosomal protein l34
  Pfam annotation: Domain name=Ribosomal_L34e; Domain location=5-66; Score=56.8; E_value=7.6e-14; Accession=PF01199.9; Description =Ribosomal protein L34e
MVQRLTYRKRHSYATKSNQTRVVKTPGGKLVYQYTKKRASGPKCPVTGKKIQGISGFSVCLEIRTNQDATNQADSSK

SEQ ID NO: 82865 - protein, 80 aa, Zea mays
  Coding DNA Sequence Number=SeqID_39490
MGTLPGGLFAECPKWHSAKKAALPSAARRTLGKDIFVAECFAECFRHSAKRLIPVVILVFTQNLNSISAPPSLCLWSSVS

SEQ ID NO: 82866 - protein, 114 aa, Zea mays
  Coding DNA Sequence Number=SeqID_39491
  Gene Ontology: Mol. function=protein serine/threonine kinase activity; Cellular component=cytoplasm; Biological process=protein amino acid phosphorylation
  Homolog annotation: Hit_ID=Q5J4W4; Match level="QueryCoverage=97%, HitCoverage=19%, E-value=2e-31, Identity=63%"; Hit description =Mitogen-activated protein kinase 2
MCSGGAMDLLERMLVFDPSKRITVNPAALHELAALISYKMCDMLAWMQYILLGYIVQIDEALCHPYLASLHEINDEPVCPAPFSFDFEQPSLTEEDIKELIWRESLKFNPDPVR

SEQ ID NO: 82867 - protein, 138 aa, Zea mays
  Coding DNA Sequence Number=SeqID_39492
MGTHIQETTLGARRRPALDFCQDSHACDLGELLNKGRRTLPRVRRALSAPKHAQRPTPRALRRAEPRPCLLLAPAPIKPTEASTVLLRARSTSPEPEITDVCPANGVPAITRSPATIDRPTEPFPATLDPRKRPCMPR

SEQ ID NO: 82868 - protein, 299 aa, Zea mays
  Coding DNA Sequence Number=SeqID_39493
  Gene Ontology: Biological process=embryonic development ending in birth or egg hatching
  Homolog annotation: Hit_ID=A2YRE0; Match level="QueryCoverage=100%, HitCoverage=46%, E-value=1e-147, Identity=84%"; Hit description =Putative uncharacterized protein
  Pfam annotation: Domain name=Paf1; Domain location=1-299; Score= -155.4; E_value=0.0027; Accession=PF03985.4; Description=Paf1
MAPEDEELLRDDQVLTPIKQEGTRKRERPTDKGVSWLVKTQYISPLSADAAKTSLTEKQAKERRESRGGRNAFLDNLNDREKQIKAIEESFRAAKSRPVHQTKRGMQAEWVMPLLPDFDRYEEPFVMVNFDGDPTADSEQYNKLERPVRDECESRAVMKSFSVSGSDPSKQEKFLAYMAPAPHELTRDLDDENDDIQYSWLREYHWEVRGDDKDDPTTYLVTFDKKDGAKYLPLPTKLVLQKKKAKEGRSGDEIEHFPVPSRITANSKPRRSHVDDDLDEHPKRTRVEDIDQYSEEYSE

SEQ ID NO: 82869 - protein, 155 aa, Zea mays
  Coding DNA Sequence Number=SeqID_39494
  Gene Ontology: Mol. function=nucleotide binding; Cellular component =membrane; Biological process=intracellular protein transport across a membrane
  Homolog annotation: Hit_ID=Q657P0; Match level="QueryCoverage=45%, HitCoverage=10%, E-value=2e-12, Identity=44%"; Hit description =Preprotein translocase secA subunit
MYAEEERELLVEVRAPLGSHPHSLTVRCTYRNPASQETMASREGLSVYVSGAVAWAVQRAAEQRVRVFVSRKTIVDITTTMNESLFTCELSKQTLSSVKDTVEMAIKKWGEKSLTELEAEKAVVLLMSLQQVVGTERHESRRIDNHRRRHEAGLR

SEQ ID NO: 82870 - protein, 237 aa, Zea mays
  Coding DNA Sequence Number=SeqID_39495
MTSHGSSDEGNAESHTNGLVREGFPRILWEVLQGAGYTTPPQYAMQLFEKHRVPRCRVRMTLEPHPLQPGWRSLDSESFGYRAEDTIEGIALHGLTTFCGFHPLELSTHPIGLFPAEKEDDPMWKDRVEHAKDIWAIYPGQTAHLTVEQLSNEIQELEELVGTRENTIEVLEDQLINTQQQLAEANQHLDMHHQEIQDMEANEDVDIEGGEEPASSLDTAGSGRPPSPESSVASFAH

SEQ ID NO: 82871 - protein, 89 aa, Zea mays
  Coding DNA Sequence Number=SeqID_39496
MTLTKKKDKQQVSCQVERRFCYMRSEHGHLPKVNGKAQGGTYKDTEPRHVGPGTNGRKEGTTASNARVISKRHNGRSAYSIDISRQHPW

SEQ ID NO: 82872 - protein, 242 aa, Zea mays
  Coding DNA Sequence Number=SeqID_39497
SRDLAVGGPDPTQRGPGPVPGVQVTPVGVLDLTRWSGLHVQGSSTFPWGSRPTVDILEYIVFSGPRGDPGAVHVAGVPTVAPGPTSGEDTSLQVGPKLWRLARRFRALADEPAPKEDDSWARAPMSKTGPLVSAEMKRRDSSLLAWWFAFFALGDRRPRSMTHGLGPRVRGWATAFSGDEEAHHHKRRFAPRAAVRLLSTRRPAHQLYDSWAWAPVSEAGLLWCAPGEISCGVSGHEQGRFP

SEQ ID NO: 82873 - protein, 60 aa, Zea mays
  Coding DNA Sequence Number=SeqID_39498
MARMLRWSPPLGRLPGAEVVAAAYQQVGLMREDLTGLAYAYALPSYKREKNSTPQTCSYG

SEQ ID NO: 82874 - protein, 409 aa, Zea mays
  Coding DNA Sequence Number=SeqID_39499
  Homolog annotation: Hit_ID=Q6QP51; Match level="QueryCoverage=20%, HitCoverage=50%, E-value=1e-07, Identity=38%"; Hit description =Putative growth-regulating factor 1
MTASKKAGPSEGFDSCLRALGFRAHYWSEVRRLAPRKGSTAASGNSGSAPTTDQGFEGWPPEGFDSLLRTCRARDDSGYIRYMAEARATLLRSPVSNSLETPCSAPSEGNMALSPPPPCGKATKGRMIKAESVLDRPLALCGGSGAALANPAPAKPLTASTYEPENSEPDHAPGLRSDRMREQPDPPRRHERHQDLRGVKPLLLGLGGYTRRVRSRAPTRTKYNRERWIHASPEGLLKQRAHLRLARGPARAGFAVKQPWLDRLANRPYRRSIQCKDRLTPYPDARSSVGRAEVTAVTPPHLTPGLGPRLDLGRRSPPRPTPGLGLNLDLGRRSPPRPTPGLGLSLDLGRRLPPRPTPGLGLSLDLGRQSPPRPTPGLGLSLDLGGVTASPDLGPGPTTLQGGTSLPYP

SEQ ID NO: 82875 - protein, 755 aa, Zea mays
  Coding DNA Sequence Number=SeqID_39500
  Gene Ontology: Mol. function=protein binding; Cellular component =cytoplasm; Biological process=multicellular organismal development
  Homolog annotation: Hit_ID=Q6VGS4; Match level="QueryCoverage=50%, HitCoverage=91%, E-value=0.0, Identity=84%"; Hit description=WD40 repeat protein
  Pfam annotation: Domain name=WD40; Domain location=315-354; Score =11.4; E_value=1.3; Accession=PF00400.23; Description=WD domain, G -beta repeat
  Pfam annotation: Domain name=WD40; Domain location=358-395; Score =26.1; E_value=0.00013; Accession=PF00400.23; Description=WD domain, G-beta repeat
  Pfam annotation: Domain name=WD40; Domain location=465-504; Score =34.0; E_value=5.6e-07; Accession=PF00400.23; Description=WD domain, G-beta repeat
  Pfam module annotation: Pfam domain module=WD40::WD40::WD40; Domain location=315-354::358-395::465-504
MARQPGFSPTYRVVTSPEAGPGATVDPRERMPDPNIPNWDLSVPLRRNPDPSRHAYAPRPRGEPVLPRGLRTVTKAGEQGLTCRPDQTTCLSNQAAGSTPTPLYARSGHHNLDDTEEPLAARQVYLGSRCQGAWRYLKVTNISCSGGGAKAAEPWAESAKVTRGRIRSRATAGAARGVGGGGGEAKRSEIYTYEAAWHIYAMNWSVRRDKKYRLAIASLLEQVTNRVEVVQLDEASGDIAPVLTFDHQYPPTKTMFMPDPHALRPDLLATSADHLRIWRIPSSDDAEDGAASANNNNGSVRCNGTQQPGIELRSELNGNRNSDYCGPLTSFDWNDADPRRIGTSSIDTTCTIWDVEREAVDTQLIAHDKEVYDIAWGGAGVFASVSADGSVRVFDLRDKEHSTIIYESGSGGSSGGGSNSGAGDGGTASPTPLVRLGWNKQDPRYMATIIMDSPKVVVLDIRYPTLPVVELHRHHAPVNAIAWAPHSSCHICTAGDDMQALIWDLSSMGTGSNGSGNGNGNTAAGAAAEGGLDPILAYTAGAEIEQLQWSATQPDWVAIAFANKLQILRWRQRYDASCFFEQPSSRQVASSRSSWRARLGEQWVCLRTRRGRGAEEVKVEAPTMLDVVAEPVPDDAPFFYRVESLERGCVGPASTSFSLDGRSTTRTVDFLHDCDVFFSITVAASSFFLQSSRFFSSCSLYDAASSSPPQGARGRHRWDRQRAETLVWRRRQTGISGTRHHLAGLVRQVGPRLVG

SEQ ID NO: 82876 - protein, 448 aa, Zea mays
  Coding DNA Sequence Number=SeqID_39501
MDLAADRCAGGRWLTGQLGIPPLCDDPGLRTAILDSLPTLDESGVAVRQTGDRDPHRRIQIPDIRGRGSRPTDADSRPPRATLSPSGKGKGAASSSSALGGSERKRQKTAGRVREAGSPAQGLQRRVSPLPAPSSVPPPPPPPSSGLPPPQGQQHQQQQQQSQRTSRFQGRWKVQGPKASSSSVSKAAPTGESGLQQQVSAGLDAGNLPSTATVEAAPTGPPRFWLALPRQRRRSPRYPPGVQKQRRQAPRFRLALPRQYRRLPQAPAGRPAAAALPMITADPTTVAMSNMPSATVEPIGGVPDSIPPPVLEEPEVILGRWLQVGAGPETAPPPLPRVLSRAHQALQETEAAILREWEDQRDKQTTTEAALQKLQQELDDKACKISLAEENLRAKGVFLEERASDLIRKEKELAWREEMWERRDKFLAEHEREAEEKEKKLEEWVYWF

SEQ ID NO: 82877 - protein, 67 aa, Zea mays
  Coding DNA Sequence Number=SeqID_39502
MPDVVAVLISDSVTLPEPKQPAYSYAKEDSAATRLRLAFPDSPYERGSLAFPDSPYGARVWLDTRIP

SEQ ID NO: 82878 - protein, 172 aa, Zea mays
  Coding DNA Sequence Number=SeqID_39503
  Gene Ontology: Mol. function=sequence-specific DNA binding; Cellular component=nucleus; Biological process=regulation of transcription, DNA-dependent
  Homolog annotation: Hit_ID=Q6Z6W2; Match level="QueryCoverage=37%, HitCoverage=26%, E-value=2e-12, Identity=60%"; Hit description=MADS -box transcription factor 57
  Pfam annotation: Domain name=SRF-TF; Domain location=1-45; Score =66.0; E_value=1.3e-16; Accession=PF00319.9; Description=SRF-type transcription factor (DNA-binding and dimerisation domain)
MSRQVTFSKRWNGLLKKMKELSILCDAKIGLIIISSTSMLYEFSNTKSSRFGRLQGVKRAIAGRNLYKRCSCSCSTGDAMGMNMISKDVLFVRVGGSGEQGSKGEVACYIRLRHVWWRRAAGLGFVGNTLVEGDYLFVPSKCQGGIQRVHIIKGCVDGSLLLKILQEMEKEQ

SEQ ID NO: 82879 - protein, 219 aa, Zea mays
  Coding DNA Sequence Number=SeqID_39504
  Gene Ontology: Mol. function=cyclin-dependent protein kinase activity; Biological process=protein amino acid phosphorylation
  Homolog annotation: Hit_ID=Q38775; Match level="QueryCoverage=25%, HitCoverage=16%, E-value=6e-09, Identity=60%"; Hit description=Cell division control protein 2 homolog D
  Subcellular localization annotation: CTP_CleavageSite=44; ConfidenceScore=5.78e-01
MEPRARAASSTALNYGGLPSLSSTPPLDSTSSPTAPSDPTSLMAASSSSNSSPIGCLHPTLIFMRGTIVPNPMTPRSADSSCTHDLHPKRKDRLVERAPYARPVVPRGGAREEDGQAGLGLGLLARARQHGLHLLPHRTQSPLARSPFNLQALILMYQLCNSVAFVHDPKVLHRELKLHILLKDHKTMVLKIADLSLSHAIRHQESNLRYALQGFFMDL

SEQ ID NO: 82880 - protein, 276 aa, Zea mays
  Coding DNA Sequence Number=SeqID_39505
MGKHCPIPDELFVEVLGSPPNRLPPGLLVSTTTCSLTAAWVLPEVEDDLGIVTQLELWPVLENTTITASVFLVEHNAGGGCGHLQPAAVQRQAEVVAGNPCSELTCKNNYDATWSLPKKPSWTGDAGLWNRDMGATVFWWDGDPIAMGGRCGGTPSTPSEPALGALLVRFENERLRAGLEEARRRHILAVVSTMERAATWCLRAAEADLERALERNAELGDRVHQMGAEGQTWQGIANGHEAIAAGLRRDGSSDGAGGARAPPNALDSMEPHYILP

SEQ ID NO: 82881 - protein, 154 aa, Zea mays
  Coding DNA Sequence Number=SeqID_39506
MASVSVGCNGSSDDNRYCPFASFYARIYTEEPIPVPPSASTESVGEQTSEIAIRRATLARVCGRSSFWGAYSRLLASFTRPTLIKFLVDGAVRGTALTTSTTYDYIEHTHEISRENGATDALSIGPSADHKSFSEATVQPILIKFCLWKKNTLH

SEQ ID NO: 82882 - protein, 126 aa, Zea mays
  Coding DNA Sequence Number=SeqID_39507
  Homolog annotation: Hit_ID=Q6ATS9; Match level="QueryCoverage=38%, HitCoverage=5%, E-value=8e-08, Identity=51%"; Hit description =Putative uncharacterized protein OSJNBb0056O10.12
MPFSIGLVKKVDRGSDNLFLVDSHPSFLPDKWICFVIYPKVGKVLVFDSLDYNPSSYAKFLSILEFATSNHPDRSYVGSMCEFQQGKMKNMTKGALYNIIEDLCTFIMREVIHVEEKISRCYQYLS

SEQ ID NO: 82883 - protein, 95 aa, Zea mays
  Coding DNA Sequence Number=SeqID_39508
  Pfam annotation: Domain name=zf-CCHC; Domain location=29-46; Score =8.3; E_value=0.084; Accession=PF00098.14; Description=Zinc knuckle
MKNQGCASSKMTLSKENDKQQASCQVERRFCYKCGEQGHISKSQGGKEKMSKKWSNRDLGTSDVGAKKCQSRSSQADLMIYESNIKAQACEMLWM

SEQ ID NO: 82884 - protein, 165 aa, Zea mays
  Coding DNA Sequence Number=SeqID_39509
MSLWAHLDLDIFTSDVIMRITKADRVVDQVSHAFTYGKLMLKDVEGCWGGASLAGIFKAKDGIMKYIPNPRHGWKIVAMRGARPSSTHDATKAGPSSRPTPPPVSQQEVPQIEAYGLSCLEPLLVGEIATIVDIICKDEVLRALRDCNRDVSKMSGKYPSQLAED

SEQ ID NO: 82885 - protein, 382 aa, Zea mays
  Coding DNA Sequence Number=SeqID_39510
  Gene Ontology: Mol. function=DNA binding; Cellular component=nucleus; Biological process=regulation of transcription, DNA-dependent
  Homolog annotation: Hit_ID=Q53NE4; Match level="QueryCoverage=76%, HitCoverage=85%, E-value=7e-57, Identity=49%"; Hit description =Similar to probable RAV2-like DNA binding protein [imported]- Arabidopsis thaliana
  Pfam annotation: Domain name=B3; Domain location=42-153; Score=97.1; E_value=5.6e-26; Accession=PF02362.12; Description=B3 DNA binding domain
MATNHLSQGQHQHPQAWPWGVAMYTNLHYHHQQHHHYEKEHLFEKPLTPSDVGKLNRLVIPKQHAERYFPLSSSGAGDKGLILCFEDDDDDEAAAANKPWRFRYSYWTSSQSYVLTKGWSRYVKEKQLDAGDVVRFQRMRGFGMPDRLFISHSRRGETTATAATTVPPAAAAVRVVVAPAQSAGADHQQQQQPSPWSPMCYSTSGSYSYPTSSPANSQHAYHRHSADHDHSNNMQHAGESQSDRDNRSCSAASAPPPPSRRLRLFGVNLDCGPGPEPETPTAMYGYMHQSPYAYNNCTLAASRTDAQPSDNNRTDAKMEKRSNFHTTFYNSKICTAKNIQCYDNNRTDAQGGDPFRLQMSRAPRTCASICYAQFKTTVLTLR

SEQ ID NO: 82886 - protein, 58 aa, Zea mays
  Coding DNA Sequence Number=SeqID_39511
MRLRSRSFRSAPSNDLRLRAGGSGPEQVVFDQRLQILVSDGGYRPHVMGRKDGDLFHH

SEQ ID NO: 82887 - protein, 119 aa, Zea mays
  Coding DNA Sequence Number=SeqID_39512
MPRILCLARARPRPPTTPRIPQTATSPNCGTHQGTARLTPREDFCLDHAGALIWISTTGNLDVIRARTLTHPIVFLTDEIASGVTRHKSCTALFCGGRKGAVTIDVVGAIVYAWRAAKI

SEQ ID NO: 82888 - protein, 102 aa, Zea mays
  Coding DNA Sequence Number=SeqID_39513
NRGDAFICEPSLTPESHKVSSIAKGNIQIAPHQGDNLLQGTEIVTSPPSVQTPSGAAYSVLDGSTNKAHRSVTGKRKVAKKLFRDEDTGDDDVAGSGDVDAE

SEQ ID NO: 82889 - protein, 257 aa, Zea mays
  Coding DNA Sequence Number=SeqID_39514
  Gene Ontology: Mol. function=helicase activity
  Homolog annotation: Hit_ID=Q5JMT3; Match level="QueryCoverage=71%, HitCoverage=24%, E-value=4e-31, Identity=40%"; Hit description=DNA binding protein-like
GKAAAEGTVIAVPEHKKLKDIKYLHPFENKKKEWLVIVKILKIDRSWWYNACKKCLRTTKPHGDTYKCTNSSCDSIGSPTPRSALLRLSPFFVKDLLDTFYLDLKMLTHTRSKLSTLYKISLTAEDDTDTTEFIFFGRMAQRLIKKNVDTLISTNPPDFIPKEITNLLEKSFEWNVSFTESTIIYGNVSFQVNAINAKMDGGNILPTTPSSQPSSTILSQENYLKQPQYYSSGRYLEYVPPILKTQPHYTGRVHNSV

SEQ ID NO: 82890 - protein, 126 aa, Zea mays
  Coding DNA Sequence Number=SeqID_39515
MPNVLIAQLGKTKVDKAEEPKIEEITKMPEILSPPTKTTVPKLPKLPRRYPKVILSKQKSKVQQFRLKPKLGLQCPPRWNMLTLRKNQHSGLQLKKSQLLVPKHRTKVLTTLFAMLRERYYPKKRC

SEQ ID NO: 82891 - protein, 399 aa, Zea mays
  Coding DNA Sequence Number=SeqID_39516
  Gene Ontology: Mol. function=helicase activity; Cellular component =nuclear chromosome, telomeric region; Biological process=viral genome replication
  Homolog annotation: Hit_ID=Q53R78; Match level="QueryCoverage=99%, HitCoverage=26%, E-value=1e-124, Identity=49%"; Hit description =Putative uncharacterized protein
  Pfam annotation: Domain name=DUF889; Domain location=1-214; Score =188.5; E_value=1.7e-53; Accession=PF05970.5; Description=Eukaryotic protein of unknown function (DUF889)
MRLSNSSLHGKERADLEQFSKWVLDIGDGALPAMTRGDESEPTWVTIPEDLLIRTDGDAAATLISEVYPDLLERYMDPTYLATRAIVCPNNLTADKINNYIVSMLPGNGVQCLSCDTISKASERIPDFDMLYPTEFLNSINAANFPCHKLVLKTGVTVMLLRNLNQTAGLCNGTRMLVTEIGHRILKCVVLTPSGVGEEVFIPRIALNTTDVKWPFTLQRRQFPVRLCYAMTINKSQGQTLSTVGLYLDKPVFTHGQLYVAVSRMGDILIPSLMVGDCSHSLCVRVSRLWEFLDPQDDSRLLHTDLVLLDEEGNSIHAQVYPPLCQQFSALLDEGGIPPAFPVCTYNLTPIEQLQPRVDYKEYFMDVLGVVSVISHVSSLRTRGRQAEVMKRTVTISNA

SEQ ID NO: 82892 - protein, 259 aa, Zea mays
  Coding DNA Sequence Number=SeqID_39517
  Subcellular localization annotation: CTP_CleavageSite=53; ConfidenceScore=5.32e-01
MRTRTPSSNADGNSGSGPSPTACTKPRRAPQLSPSWEGTFKVTGIRRPEGDYLAMTEGVPLPGHWSISGRVVASSKRFASGGDHLSTDGSGHLCTDGSPTTTTTSPPSGSPAEATTSATGSLTRGSDHLYAGQPPSGGDHLSMRAMAKRSSPPPPMGVRTRPSKPWSWEHDGRRSLQSSRDHVAEVCLLHKAGEHPFPPNAGGRGGHQPMWEAKPRLISLPTTVRLMNILEAKHRWKSAAPTRPRTSNRGKTIPVAPAR

SEQ ID NO: 82893 - protein, 125 aa, Zea mays
  Coding DNA Sequence Number=SeqID_39518
  Subcellular localization annotation: CTP_CleavageSite=31; ConfidenceScore=5.27e-01
MKNAKVHNLQKITGAVNVPPVNSVSRSSPVLRFMRSGVWITVDGEEILREDEFGALFYPIAVPTCVARHSYVTATVVPPFITVMTRLRSIHLVVTSREDSVVTALDLKPVSATLATPVKLPPFSP

SEQ ID NO: 82894 - protein, 136 aa, Zea mays
  Coding DNA Sequence Number=SeqID_39519
MDARVTTLCDELCKLNLEVVSSGNLSYISVEPTLQEQIVRAQVEDKGVQIIKDMIKQKAEKYKCFLMCTRWVIARSFDERVWNNSIGGGDDVHGPTTAFQRRCALATDTPPPMAVTILWSVTPWPLGHSSCKQSKN

SEQ ID NO: 82895 - protein, 780 aa, Zea mays
  Coding DNA Sequence Number=SeqID_39520
  Gene Ontology: Mol. function=fructose-bisphosphate aldolase activity; Cellular component=chloroplast; Biological process=metabolic process
  Homolog annotation: Hit_ID=A2WJZ8; Match level="QueryCoverage=23%, HitCoverage=12%, E-value=2e-58, Identity=64%"; Hit description =Fructose-bisphosphate aldolase
  Pfam annotation: Domain name=Glycolytic; Domain location=155-429; Score=46.3; E_value=9.6e-16; Accession=PF00274.10; Description =Fructose-bisphosphate aldolase class-I
  Pfam annotation: Domain name=UDPGP; Domain location=205-503; Score= -228.2; E_value=0.00053; Accession=PF01704.9; Description=UTP- -glucose-1-phosphate uridylyltransferase
  Pfam module annotation: Pfam domain module=Glycolytic::UDPGP; Domain location=155-429::205-503
MDEEEEREIGPGRHGHHVFQAVVCGSSPTFLGFGVLSPGRGRVLHGPPTHRTWSPVDADLAELLLEGFVKRTSDRELVRPPAATPQKEVLVHVAMGGFVTHYGCMKHIKCLKGSCDLEYVVWHTDGKKGSPSPTKAKWQASQTEEKNRATSPKKKSVASPGRGILAIDESNATCGKRLSSIGLDNTEVNRQAYRQLLLTTAGLGEYISGAILFEETLYKSTTDGKKFVDCLKDQNIMPGIKVDKGLVPLPGSNNESWCQGLDGLASSWVDVVCEDGVSVLALEQPAFRPAVPPDRFMPLADRIRDLGVGVAFPKPTLLPSPSGRCDSTSCPVAKAPDGNGGVYAALKSKRLLDDMAAKGVNYVDCYGVDNVLVCVADPTFLGYFIDRGVYAAAKVVRKAYPQEKVGVFVQRGKGGPLSVVEYSEMDAAMTTGINQTTGRLRYCWSNVLREEEFAPVKNANGATYDTPDSARLMLLRLHSRWVVAAGGFLTHSVPLYMTATFLRSPCFCFLRHHRRHGCALPPTSPSRSPPRGIRSGESPAAALRRILATPGAHQAPCCYDALGARLVERAGFPIGFMGGLRNNCIQDFAYLSKRNHLEIFKLSRTLESSYDGTFSGFCVSAARLGLPDVGLISYGEMVDQGRLINEAVSIPVIGDGDNGYGNSMNIKRTIKGYINAGFAGIMLEDQDALHPVATSTALSARSLPSPLPSSFYPRRQMLERSLERMWTGGATVEVREAVRGRRATKSLRSDPTLNLIPSLQHPKASSSHRLLPLQGIGATP

SEQ ID NO: 82896 - protein, 963 aa, Zea mays
  Coding DNA Sequence Number=SeqID_39521
MPTSSSSAAATPPADASSEETLSTVAAEELRAGDTVDFGVSRMSSVCVQDMQQLGYFGGGVARVPGTEEVPEPEGELVVFEAFFAAVEDHPGLPVAEMCSHYYSAYPQFEVAEEDANEGTLRCAAGLSSGRDLVEEFVAYEVWPLAHGWALGEVCPCQMPSRGGMLVRSPAFALDLHSRDPAAFVREAEDGAMRIVGRYVPKTEGQRSWDIRGSNDRLNRVFELNCLPYGGYPGQEDVDRRGKKPAVETGDDPAPAAAPSSKKRKLGIATGGLGVSDGFARELMRTCAAPGGRMSSPELRESSARMLRVTGGWWPKNVPIPRAAGEYFFTSRMVRDWRVFPYGRNIAAVVSAVLDKDRQGAAQKRQAVVRLHEARPKRSRGTAKAAAPGGSQPTLAAKSAAPGSSRVPEAVKAAAAGGTKSVPAGAVKARELPPPGKRVADFATDISVDDYLVGSGEGQLVVVPLAVATAAAAVVPRAKGSALSAGGEIPALTAVRDETGAVSRRLKEALSQAADFADRAASGALTAVVSAEVERLRAQHADAVREKSAADSKCRKLADKAEANLARAEGSLARQRAEELEERLNALQTRVERAEASTRSEVERTRKQLMDSYHELGARTADFEVPDREPGLRCLEWLQEELLALPAIVEGFMSYASLVTCEGAMNALSREGCQHYEVFDQADEDFERDIYKVEDPVVKESAGALFDRMWGPHGREVVRERRRVMRKVEDFGALNNAQPDSESNPVAAVSEVAPAPPPETVEGVPDAPAATAAGGGSSPTAAPRAEDPVKMAAEPAAEDPATAGPSQVQDFGPAHATDTANFLAASTVDDGNKSDESASKFSDFGDSGSSVEWTEESSDEDLDYFPALDVAAAEASSRAADAEVVPGPSVGRRRRRAIAKRRVSEADGGRLRVSRAGRQELLSLPAAVSAGEGELRSLFAGEERRIMLFNYREMGIIPKVEPM

SEQ ID NO: 82897 - protein, 219 aa, Zea mays
  Coding DNA Sequence Number=SeqID_39522
  Gene Ontology: Mol. function=pyridoxal phosphate binding; Biological process=metabolic process
  Homolog annotation: Hit_ID=A6N1I5; Match level="QueryCoverage=63%, HitCoverage=88%, E-value=2e-63, Identity=83%"; Hit description=1 -aminocyclopropane-1-carboxylate deaminase
MKRSGGTAGRNAGCSCRNRRSPNVVGAQPHGGKEEERSSGPGFRDLIWEEDRSQPVEGGGGAAAAHAGWGRGTNVGVGVWTVHAFSVCDDPEYFYDYVQGLIDGLNSGLDSRDIVSIENAKGLGYAMNTAEELKFVKDIAASTGIVLDPVYSGKAVYGLLKDMAGNPAKWKGRKVLFIHTGGLLGLYDKADQLSSLAGSWRRMDLEDSVPRKDGTGKMF

SEQ ID NO: 82898 - protein, 16 aa, Zea mays
  Coding DNA Sequence Number=SeqID_39523
MVLAPPSPDWVIDSGA

SEQ ID NO: 82899 - protein, 80 aa, Zea mays
  Coding DNA Sequence Number=SeqID_39524
MAQPHQHPRPARSPGRLLCARELHGSAGHGAAKPGGPMRHRGQPRVSRGPDDIRLPLDDARLPLDDSHLPHVYLVYSSPR

SEQ ID NO: 82900 - protein, 74 aa, Zea mays
  Coding DNA Sequence Number=SeqID_39525
NGQLAESEGGAREDPEQQMVGEGGDEDDGYDYAYGTGKWYSFRLERVVRVATTAQVKMKVVEEDFQEFQEYDEF

SEQ ID NO: 82901 - protein, 42 aa, Zea mays
  Coding DNA Sequence Number=SeqID_39526
MAAAVARRHAGRPVGGGGAAAMGATGQFPVCHWKIYLFLVWH

SEQ ID NO: 82902 - protein, 469 aa, Zea mays
  Coding DNA Sequence Number=SeqID_39527
MWNELLLEELTLAIKAPALAPDSLQRSSRRSGVFRGVGPSYFIDRAPRLPSYCIPYDPSSGPVARTLQPPAPSAPRPPGGSPPCGPASAAPRAQPPCRVPTRPGGSPPCGPVPASRAPRASRPAAPRPLPWWLARALAAPCPGDCAPRRPRVPAAVHPGGPASCPSVASRAVFDCSCATFDFQLNPFFNFSLVDVLCRGDEDDGYDYAYGIGEWYSFRLERQEIESVRSCSPVLPLEVPPAPPLSAPATRVATGGDLDDGGGDSSSSHDTDLSEEQELEEWVAQPITRDAARGCHFHDALDTLLRQALDRRTWSIEYRCVVFQHSRGVYPDRWEATCLVRRPENSLWGAEVCSEYYSISERDSAEAAMQDVARRALSHYCAVLGGVADGLNLNTVNLAAVLNTELDHALYELSRAHAEITQLWVERAEHRHLEDGSPTPVRTQHPYRSPQRGHQAYGNPDCRTKINLEQ

SEQ ID NO: 82903 - protein, 46 aa, Zea mays
  Coding DNA Sequence Number=SeqID_39528
MEMHYSLEDNEPWTKVDENIITKLYLCLDKDWFLNDAIVITRMREQ

SEQ ID NO: 82904 - protein, 128 aa, Zea mays
  Coding DNA Sequence Number=SeqID_39529
  Gene Ontology: Mol. function=catalytic activity; Biological process =metabolic process
  Homolog annotation: Hit_ID=A2XVB0; Match level="QueryCoverage=89%, HitCoverage=26%, E-value=3e-51, Identity=88%"; Hit description =Putative uncharacterized protein
MHIKAAVDARKESGSDIVIVARTDSRQAISHDEALWRVKAFADAGADVLFIDALASVEEMKAFCAVAPEVPKMANMLEGGGKTPILSPAELEEIGFRLVVYPLSLVGVSMRAMQLTTFSVPLYPLLVE

SEQ ID NO: 82905 - protein, 172 aa, Zea mays
  Coding DNA Sequence Number=SeqID_39530
MHMDTNACGYGQPGGKVTQAHGAKAGSVSAKEIEWAERQQQRDGARGGVLVGRKLRLRSKRQRRHPRRAGPRPSGGGDARFGRVRGVGNLRETGCRNMWRYCRQVKLLKNNIQACQPNILCESIKTYLQFYTYTYQVGICSVKIMDWKVMVDRVSRNTTPVIIHGSLHMLSH

SEQ ID NO: 82906 - protein, 120 aa, Zea mays
  Coding DNA Sequence Number=SeqID_39531
MAWQAPARNRSSRSRKTKEAMQCNASKGGTEATVRMGPRAQYIELSENQGSIKLQNLAVNLVSLVHQIFGPFFLLQTCPCPCLAIFSSLSAPDPSASAPAAQAQAQQRTEPALPLPPRPQ

SEQ ID NO: 82907 - protein, 226 aa, Zea mays
  Coding DNA Sequence Number=SeqID_39532
  Gene Ontology: Mol. function=DNA binding; Cellular component =chromatin; Biological process=regulation of transcription, DNA -dependent
  Homolog annotation: Hit_ID=Q69U00; Match level="QueryCoverage=97%, HitCoverage=87%, E-value=3e-54, Identity=54%"; Hit description=DNA -binding protein-like
  Pfam annotation: Domain name=DUF296; Domain location=52-164; Score =133.4; E_value=6.4e-37; Accession=PF03479.6; Description=Domain of unknown function (DUF296)
PGPWGASPEGKQQGQQQAGAIVPLRRPRGRPLGSKNKPKPPVIITRDSPDALHSHVLEVSPGADVCACVAEYARRRGRGVCVLGASGAVGDVAVRGAAAPLRGRFELLSVTGTVLPPPAPPEASGLAVLVSAGQGQVLGGSVVGPLVAAGPVTIFAATFANAVYERLPLADAPELEVKPDLSTATSAGGQDVQPQLPMAPSHQQPPDMGAGYAGHRSPPYPWGGDV

SEQ ID NO: 82908 - protein, 183 aa, Zea mays
  Coding DNA Sequence Number=SeqID_39533
  Gene Ontology: Mol. function=oxidoreductase activity; Cellular component=cytoplasm; Biological process=metabolic process
  Homolog annotation: Hit_ID=Q2EFH6; Match level="QueryCoverage=85%, HitCoverage=72%, E-value=1e-42, Identity=57%"; Hit description=Short- chain dehydrogenase/reductase
  Pfam annotation: Domain name=adh_short; Domain location=2-131; Score=- 34.5; E_value=0.0023; Accession=PF00106.16; Description=short chain dehydrogenase
MEAGRSGTPHRRGAEPTDGPATTVHYTRCDVTDEAQVAAAVDLVVELHGRFDMMLRNARVSGCLAPGLVEALDLVDFDRVMAINARVTVAGVKHATRVMRGRRAGGIALPPYSVSKAVVLGLVQAVARQLTRSGVRVNAISPTYNHTPLVMGNMAEWFPGATIKERWRIVKDMNDVMNQYDTK

SEQ ID NO: 82909 - protein, 52 aa, Zea mays
  Coding DNA Sequence Number=SeqID_39534
MNLEQNFPSYSRKFLNLEDEILFKRAAACKLGHCLASYTAPLAAVPAVHITP

SEQ ID NO: 82910 - protein, 296 aa, Zea mays
  Coding DNA Sequence Number=SeqID_39535
  Gene Ontology: Mol. function=catalytic activity; Cellular component =cytoplasm; Biological process=cellular metabolic process
  Homolog annotation: Hit_ID=A2YF60; Match level="QueryCoverage=99%, HitCoverage=98%, E-value=1e-125, Identity=71%"; Hit description =Putative uncharacterized protein
  Pfam annotation: Domain name=3Beta_HSD; Domain location=9-250; Score=- 89.9; E_value=0.00015; Accession=PF01073.10; Description=3-beta hydroxysteroid dehydrogenaseisomerase family
  Pfam annotation: Domain name=Epimerase; Domain location=8-228; Score =27.5; E_value=3.4e-09; Accession=PF01370.12; Description=NAD dependent epimerasedehydratase family
  Pfam annotation: Domain name=NAD_binding_4; Domain location=10-212; Score=-79.5; E_value=0.0013; Accession=PF07993.3; Description=Male sterility protein
  Pfam annotation: Domain name=NmrA; Domain location=8-252; Score= -104.8; E_value=0.033; Accession=PF05368.4; Description=NmrA-like family
  Pfam module annotation: Pfam domain module=3Beta_HSD::Epimerase::NAD _binding_4::NmrA; Domain location=9-250::8-228::10-212::8-252
MEAVGKSVCVTGAGGFIASWLVKLLLCRGQYKVRGTVRDPGASKNAHLKVLEGAGERLQLVKADLLDYSSVASAIAGCEGVFHVASPVPSGRSSNPEVEVIGPAVTAVYANPNYPKGKVFDEDCWSDEAYCRKNEDWYFVSKTLAEREAFAYAAKTGLDVVTICPSLVFGPLMQPTVNSSSKIILKYFTGDRETVENILRNMVDVRDVADALLLAYEKPEASGRYICSSHAIKVADMINILKTLYPSYPYPKNFVEDDDNSVYSSEKLQKLGWSFKPIEESLRDTVESYKAFGILN

SEQ ID NO: 82911 - protein, 160 aa, Zea mays
  Coding DNA Sequence Number=SeqID_39536
  Gene Ontology: Mol. function=nucleic acid binding; Cellular component= ribonucleoprotein complex; Biological process=mRNA metabolic process
  Homolog annotation: Hit_ID=A3BPN8; Match level="QueryCoverage=28%, HitCoverage=40%, E-value=4e-15, Identity=88%"; Hit description =Putative uncharacterized protein
  Pfam annotation: Domain name=LSM; Domain location=71-119; Score=27.7; E_value=4.4e-05; Accession=PF01423.13; Description=LSM domain
MPTPMRLCLFSSIGVGMMIYGPGQVKGVQKHEEVSKVKDDSVLSSSWPRAPSRTLPPLSAWSSPLPTIATPHDCELVKGFDEYMNLVLDDAEEINVKKNTRKTLGRILLKGDNITLMMNRTYRLTFESTKELIATRSMAFDINILERQTCKSLTTYGPRR

SEQ ID NO: 82912 - protein, 170 aa, Zea mays
  Coding DNA Sequence Number=SeqID_39537
  Homolog annotation: Hit_ID=A6H5B2; Match level="QueryCoverage=52%, HitCoverage=62%, E-value=2e-07, Identity=41%"; Hit description =Putative zinc finger (DNL type) family protein
MALVVRYPHTLQAKATRMCHRGDFVKRDQGSVNTTRMCHCGDFVKRDQGSVNTSRLPVPPTLLAVGGPSIPDPVVQPLPKAAHTTRPIAAYCPCDTGLRSTNITSSISPRRAPFEECGERSSHRRGSSKHEKGWDGNGRQPGHNKSLPLMAQMCDPPDLGLRRHGSCLRN

SEQ ID NO: 82913 - protein, 176 aa, Zea mays
  Coding DNA Sequence Number=SeqID_39538
  Pfam annotation: Domain name=CCT_2; Domain location=27-49; Score =15.0; E_value=0.046; Accession=PF09425.1; Description=Divergent CCT motif
  Pfam annotation: Domain name=tify; Domain location=5-38; Score=43.6; E_value=7.1e-10; Accession=PF06200.5; Description=tify domain
  Pfam module annotation: Pfam domain module=CCT_2::tify; Domain location=27-49::5-38
MPGPAPVAAPPLTIFYGGMVVVFEDFPVEKAAERFLAKRKDRLIEPYARPSSPTEEPEKKTVGPIFERLSPAAARPQNRSRRPLPRFSPCSLPSLPRRLPPDRARPGSTQSPLARSSPTTSKPRCHKEGGGMRMGTIYVVAALALDVASDVVVDCKDNLITAKGSPLALRHRHRLE

SEQ ID NO: 82914 - protein, 407 aa, Zea mays
  Coding DNA Sequence Number=SeqID_39539
  Gene Ontology: Mol. function=3-beta-hydroxy-delta5-steroid dehydrogenase activity; Biological process=steroid biosynthetic process
  Homolog annotation: Hit_ID=A5AH68; Match level="QueryCoverage=45%, HitCoverage=85%, E-value=2e-46, Identity=44%"; Hit description =Putative uncharacterized protein
MDPVRKSVCVTGAGGFVASELVKLLLSRGQYAVRGTVRDPAFLDPLLGVIAYGAEVTQLGAIGYGAETIYKRTINSFTDFFPPSRETLSGRLRCQNLEPELPKHHEPTFSREDTSYKEKIDCLHFPITERTSFRVIKDTFFESVTFFGCPGFPNPVIRFKLYRSKEEALIGSFSRVFAISSQQKDMLIIFFWMMIDLCNNVPTVKEGLSPEGEEHYQRPTALQAPSASKNAHLKVLEGAEERLQLLKADLMDYDSIASAVAGCEGVFHVEVIAPAVIGTTNVLKACYEAKVRRVVVVSSCGAVYANPIYPKADLETVENVLSNMVDIRDVADALLLTYEKPEASGRYICSSHAIKISDMINILKTMYPSYPYPKNSEKLQKLGWSFKPIEESLRDTVESYKAFGILN

SEQ ID NO: 82915 - protein, 150 aa, Zea mays
  Coding DNA Sequence Number=SeqID_39540
MGKSKKGGSSSHHFGDKRKREPSPPSEDFGDSEYSEEEFSSESEGSPVYAPPPVSSDDSDDSQGIAAEVWTYIRAVERSGLEGSDESEISSDEEDSSDSSEEGSGGDGDDGNGGDDDGGGNGDDNGGKGDGGIGKGDGGSGRASGKAPLA

SEQ ID NO: 82916 - protein, 133 aa, Zea mays
  Coding DNA Sequence Number=SeqID_39541
MGRNNKRKREPTPPSEDFGDSEYSEEEFSSESEGSPAPIPLRACGGGLDLHPGRRALWARGLGESEYSSDEEDSSEEGGGGDGDDDDDEGGGGDDGDGGGRGGSSGSKDGNGGSSRGGSGGGGSSKGSNKASG

SEQ ID NO: 82917 - protein, 171 aa, Zea mays
  Coding DNA Sequence Number=SeqID_39542
MNENGNLQNRIGIQMGQVKMIEIKEAAEKGRNGKTETAKKKRNVNYGLMGILCRDSDPMTNPPRTQLPRGKDPDGHEVEKVGLEDNRHVTEQEPNCRKDLEAGKQELGHGKQRRLKAQYLWDIPESDTVSKSTQSAPGRYFQNTSAPRCHSAVTSTSSLGYYPQHGRRSPF

SEQ ID NO: 82918 - protein, 269 aa, Zea mays
  Coding DNA Sequence Number=SeqID_39543
  Homolog annotation: Hit_ID=A2XFR6; Match level="QueryCoverage=41%, HitCoverage=32%, E-value=1e-14, Identity=38%"; Hit description =Putative uncharacterized protein
MDLPRIRVENRVILEDSSEEFLPTPTPLAESLAFATGSSASAPPAPAVQAPAPGGDDPDDFGDDDEDDEEEEDEENLNDEANKEQQDHYVGLWPITEHYTLMFKTGHFPNLLQDVLHALGTYVRPVYETREVYEPPRACYYITRIHDRVMDKGDRGHTYRQQLHNTKYMHLPLCIRGENQTSIVPGGANEDRLNTLAGVVAGLNTDLDSATLDLSMVHLELEDAHARIAALEAYLDGRNPPKVQFPAMALSPPHKRIRYGEPVSITRLL

SEQ ID NO: 82919 - protein, 65 aa, Zea mays
  Coding DNA Sequence Number=SeqID_39544
MARLADLQKRLMKLLKRCVILLKMTRTEGLSIGSFVKRTHTLTMNGTITSWQKLKDMLVTSFQGF

SEQ ID NO: 82920 - protein, 116 aa, Zea mays
  Coding DNA Sequence Number=SeqID_39545
MTFFWRSLYPKGDNGSKDEDLNTKKSKLYRPTTTACKSTITTTTPPKQEDFADQPFQGVFHMITEGSSSEFDTKWQKKDHYRRVNHVALTGPVVQTKWSNVPLTFDASVGDSFSML

SEQ ID NO: 82921 - protein, 543 aa, Zea mays
  Coding DNA Sequence Number=SeqID_39546
MELVPCARNKWGNWWDYWFYVSEAEVKDHPGLPAAIMCSHYYVAYPPFEVAEDDENEKALRIAARRDPAAVVREAEDGVVRIVGRYVPKTEALRSWDIRGSNDCLNRVFKLNRLPYGGYPGEDVVDRRGKKPATVTEEDPAQEAAPATKKRKLGTAVGELGVSDSFAMELMGTCTALGGRMSSPELRESSARMLEVTGGRWPKNVPISRAAGEDFFTSRMARDLRVFPYGWNIAAVVSSVMNKDRQDAAQKRRAVVRMVDPVRKAKRARGSAKAAGSDSSKPVPAAKPATPEASKALMGEKAAAAGGTKPPAGGPSPAKLPPSGKRVADFGTNISVEDYLVATAAKDVAGTMSQRLREVSQQLSQQLTQQLKQAADFADRVVSGVLTADVAAEVENLQAQHADDVRDKSATESKNRRLAEKVATLEAEKTDLRRRLAEERREANQAVAKAQVAQAEPKVALAKGSLASQRVEEWEARFNALRSRVDKAETSVRSEVVRTHAQLAEAYRDLGARTADFDVPDQEASLRFLEWLQEELLVLPTIV

SEQ ID NO: 82922 - protein, 66 aa, Zea mays
  Coding DNA Sequence Number=SeqID_39547
MRGKPSRASPSVWDSAFPSSEDPWEAICVRLSLWRNRPNYSSLSAQVTPLRAATHLNRNNPSVPRI

SEQ ID NO: 82923 - protein, 125 aa, Zea mays
  Coding DNA Sequence Number=SeqID_39548
MGAATRVGVDWAHTLFVDAYRDLGAQTAPFHKLGGEVGTHFLGWLQEELESLPSIMMGLMSYASLVSCEGAVNALAREGCKHFKAFDQSNEDFDAGVFQAMRDEEVGDLTGLESFIARKDAVVEA

SEQ ID NO: 82924 - protein, 318 aa, Zea mays
  Coding DNA Sequence Number=SeqID_39549
MARPSASWCFIEELAGTCAGPGEVMTSSYLRETSSRMLKVTGVSGIGRIPFPGPPAMTTLRLVWLEALRKKWKAPLWLVDPRRDAKVSCPSAKGAAPAAVMPPPAAPVVPERVSSPPHAVEAAVSEIGWTDQELSVDDYMVGGVTMFDAQTVLGLPPARTETGQLMVALARPPTDTGASAKGMAVTSSDPWAHFCAVADVGGEVISASATEGMAAAVARQLHYAAVYADQVASGALVNVVTSQLRSERRWLEDKIERLWIQHIEIVRDKSAAENKSRNLLNKLTALEKENEDLVHRLNDENDVAVEAKTEAEGARVEA

SEQ ID NO: 82925 - protein, 116 aa, Zea mays
  Coding DNA Sequence Number=SeqID_39550
MKLNPETTYAWQRTSQTLRTDLQGKGVREWGLTTPWRVRGGSRTSGEQLLVRYQLSESDDFSKAPTSRGEALGRCTEDVSPPWAEISSGGPPPVNVLVMRHTNNLKVRSLIQINID

SEQ ID NO: 82926 - protein, 118 aa, Zea mays
  Coding DNA Sequence Number=SeqID_39551
MSVDEQEGFNGQGNGRDRRTARMELRRGSTDSGADGDGRRRTPATVWASGRERERELGKEEISGCYRESSGRKWNQGGNDWLLVFGAGDGEVAGLFPSQARRRARWSLQKREENKRVS

SEQ ID NO: 82927 - protein, 103 aa, Zea mays
  Coding DNA Sequence Number=SeqID_39552
  Subcellular localization annotation: CTP_CleavageSite=23; ConfidenceScore=5.13e-01
MTMARIVTVKGNNSTLGVIYTFGGESGSSRRLGRPPRGHSQLSPEDISPARGLGNSTPASVPLVDDPARLRPTRSSFRANSASVRADTATSGFGSSKSGRGSL

SEQ ID NO: 82928 - protein, 373 aa, Zea mays
  Coding DNA Sequence Number=SeqID_39553
  Gene Ontology: Cellular component=nucleus; Biological process =multicellular organismal development
  Homolog annotation: Hit_ID=A3BSX4; Match level="QueryCoverage=80%, HitCoverage=81%, E-value=5e-46, Identity=37%"; Hit description =Putative uncharacterized protein
  Pfam annotation: Domain name=DUF260; Domain location=77-177; Score =126.4; E_value=8.2e-35; Accession=PF03195.5; Description=Protein of unknown function DUF260
  Subcellular localization annotation: CTP_CleavageSite=60; ConfidenceScore=5.91e-01
MTSSVSPAAAASQPQLHITTTGTSTGSTAIISPSSNQSTSNARSSSPHSTSSPPRGPSTTGGTGSGGGSGSGCTNQACAACKYQRRKCNTDCPLAPYFPADQQERFLNSHRLFGVRKILKTLENTSPELSANAMATLIFQSDMRAQDPVGGCYHLILSLERQLQIEMAEHSAMVQRLALFRQAATTMPPDQGGGTVGLDYTASSKQPLFHNAQQEVVYALYKNNHGGGHGPNKDDHGGQQHQVFDYYINLDNMQQFHFNDSCAAVDKVDLTPAGADEMRHHQHFDENCQIDHKDYFEIKAAALVDDAFDMRQEVVDVCAEVDMDTKTVDVNAGIGGVDIKAMGMNANVDVNVSTPQMAAESSHCRLGLGFSSF

SEQ ID NO: 82929 - protein, 197 aa, Zea mays
  Coding DNA Sequence Number=SeqID_39554
  Subcellular localization annotation: CTP_CleavageSite=40; ConfidenceScore=5.38e-01
MGAFVRSAFRFPRASSASEVQVKHSAFLKRRYRGKTLSPRREMKWLRAARHPVTLCTPFNAPLGDDEPQEHASGNPEDTLLGIELHAFRLETSECRFKVGKEVGGFPRLDYDVIDVGLDRSANVFAEHVVHAPLVHCTHIPQTKRHGNIAVHAEGCDERSRELVGLFHPDLVIPRVGIEERHGFTPSSGIHDLIDAR

SEQ ID NO: 82930 - protein, 155 aa, Zea mays
  Coding DNA Sequence Number=SeqID_39555
MDALNFEYPDYERLEEGARVAKRKRIVSVLSRQAARSVKVDEEALKKVKAAPETKVPITKKRKLDEIPSAESKVYEAPKKTLSPPLPTTAEVSEILKVMTESPLIAMGVPDLPSGEGNYRFGGDAHRRSGFQSTRLEPRNRSTTSPLVINCALRD

SEQ ID NO: 82931 - protein, 67 aa, Zea mays
  Coding DNA Sequence Number=SeqID_39556
MDTNNTPLVDVQGMKERTSKDMVKDLEAWKASKDVRIKVEDQTDVRNLSRCCDTVIGLWAVYLCWAH

SEQ ID NO: 82932 - protein, 114 aa, Zea mays
  Coding DNA Sequence Number=SeqID_39557
MGKLHDTYHEDPLAAEGTCGGAAVSGFPSAAIASGWYGKIEDGRAHASGSETTRWSCLAGYWSFAIWDPMPVVLVSTSLVDHSFLLVVIAIPYGTGDDRGLEKTWLMDSVVRVT

SEQ ID NO: 82933 - protein, 124 aa, Zea mays
  Coding DNA Sequence Number=SeqID_39558
  Subcellular localization annotation: CTP_CleavageSite=48; ConfidenceScore=5.06e-01
MALAWLGRGAGHAGARVSVLWRGQEASNTWRVRLKAAKSSLGCHRKLRLARPQGSNSTSTPEDGLRLARPQGSDSASTPEDGLCLARPQGSDSTSTPEDGLRLARPQGSDSTSTSDDGLRLARP

SEQ ID NO: 82934 - protein, 67 aa, Zea mays
  Coding DNA Sequence Number=SeqID_39559
MTLVFPRRELRRRTSLGATISAHSGRPYMKVWNEVWFNNRVMRKTNQVDPKRGLIRRMMLMDESEDG

SEQ ID NO: 82935 - protein, 277 aa, Zea mays
  Coding DNA Sequence Number=SeqID_39560
  Gene Ontology: Mol. function=cysteine-type peptidase activity; Biological process=proteolysis
  Homolog annotation: Hit_ID=Q8S456; Match level="QueryCoverage=91%, HitCoverage=37%, E-value=1e-130, Identity=78%"; Hit description =Putative uncharacterized protein 163K15.6
MTIRPGAGKELKITKDTVRLILGLPCAGGGREFTDWYGKVDVAAKVRRDLNVGKEEFDVVKLQDKIVLGNDDELSIRCFFLILFNRLLFPSASWGITNNEIYYLDHLHHPASPDNKYGTPRIKFFDNETIRELARGDRRPPRKTGEPFGYAEFRSRSETCYVIAPERPVSAVFNIYVPRIKHLIGNKLQCLPSQHRPMFQSMFDAHDKEVDKYCDSLQLSHQMIVSKQIELSETFGEMIDEVLRAATQRDSQQEGFIIYVYFFKLIKFTNYCEENYI

SEQ ID NO: 82936 - protein, 80 aa, Zea mays
  Coding DNA Sequence Number=SeqID_39561
  Gene Ontology: Mol. function=cysteine-type peptidase activity; Biological process=proteolysis
  Homolog annotation: Hit_ID=Q8S456; Match level="QueryCoverage=100%, HitCoverage=12%, E-value=2e-27, Identity=63%"; Hit description =Putative uncharacterized protein 163K15.6
MPPTNAPVSSPPVPTPDKQQHDQEIHVPTDHIKVSDHAPTTDKPAAPELTPDINSEGQKSVTHDTPVSGAHQFDKTPLTD

SEQ ID NO: 82937 - protein, 105 aa, Zea mays
  Coding DNA Sequence Number=SeqID_39562
MATSMDLRRESTGCTTNHCGTRSSHDTAWVMISRWHKALPNPTIDLALRPLPYRANRDCNLADGEYVLILEQGPVQEEDQEQASEAAIEDLPAAPAIEGKPRFYA

SEQ ID NO: 82938 - protein, 82 aa, Zea mays
  Coding DNA Sequence Number=SeqID_39563
MAELRRKLRGIPLPAKPHGLRPYLIYRASGISSPNPSPRNLTSAAAVGSEGDGIAAARPQTPPPSTFSASVVVRSSRSGFGD

SEQ ID NO: 82939 - protein, 111 aa, Zea mays
  Coding DNA Sequence Number=SeqID_39564
MKLWKSNTLGLGAYNFCPSAVANASQNLFVDPVEEYGSGLNGPAGQLLRRPSAVSSPKSPPAIASVLPSATSPHREVRHRSVLPPLDQRPRRYRSAVASPRRRCAALMAAL

SEQ ID NO: 82940 - protein, 227 aa, Zea mays
  Coding DNA Sequence Number=SeqID_39565
  Gene Ontology: Mol. function=DNA binding; Cellular component =nucleosome; Biological process=regulation of transcription, DNA -dependent
  Homolog annotation: Hit_ID=Q9FYS5; Match level="QueryCoverage=76%, HitCoverage=94%, E-value=5e-33, Identity=48%"; Hit description=High mobility group I/Y-2
  Pfam annotation: Domain name=AT_hook; Domain location=109-121; Score =8.1; E_value=0.95; Accession=PF02178.10; Description=AT hook motif
  Pfam annotation: Domain name=AT_hook; Domain location=134-146; Score =11.7; E_value=0.23; Accession=PF02178.10; Description=AT hook motif
  Pfam annotation: Domain name=AT_hook; Domain location=163-175; Score =15.5; E_value=0.051; Accession=PF02178.10; Description=AT hook motif
  Pfam annotation: Domain name=AT_hook; Domain location=88-100; Score =14.4; E_value=0.078; Accession=PF02178.10; Description=AT hook motif
  Pfam annotation: Domain name=Linker_histone; Domain location=13-81; Score=56.1; E_value=1.2e-13; Accession=PF00538.10; Description =linker histone H1 and H5 family
  Pfam module annotation: Pfam domain module=AT_hook::AT_hook::AT _hook::AT_hook::Linker_histone; Domain location=109-121::134-146::163- 175::88-100::13-81
MATEEVAKPSPIPPYPEMILAAIEDLGDKSGSNKSAISRYIEGKYDGDLPPAHASLLAAHLARMKESGELVFVKNNYFRADAPDAPPKRGRGRPPKARDPGAPVSPPSGRGRGRPPKPKDPLDAAVKQATAGMPRARGRPPKKAKTEGGASPAPAGDGSTPVKRGRGRPPKAQRQQSLTIAWRGVLGGFALVCRVAGSPRLYSNEPQGEQQWTFSQKLVVNRIWSQR

SEQ ID NO: 82941 - protein, 273 aa, Zea mays
  Coding DNA Sequence Number=SeqID_39566
MAVLSATVWTVHDLGSDGLRPGVEVGLPCVEARQSAFGSRTVHSCTGMAAFANSTWILLPGGIRRGGEILGPSQGVGRGGSRPAEARAESEPWGRARRSFVVFRVLARVRALGSGGVEFAVFRVLARVRALGSGGAEFAVFRVLSRVRALGSGGAEFAVFRVLARVRALGSGGAEFAVFRVLARVRALGSGGAEFAVFRVLARVRALGSGGAEFAVFRVLARVRALGSGGAEFAVAPLARPNCLSDSLCRVALQSEWRRRRCPSVRLASGAVE

SEQ ID NO: 82942 - protein, 163 aa, Zea mays
  Coding DNA Sequence Number=SeqID_39567
  Gene Ontology: Mol. function=nucleic acid binding
  Homolog annotation: Hit_ID=Q5NKP8; Match level="QueryCoverage=64%, HitCoverage=24%, E-value=5e-29, Identity=45%"; Hit description =Putative uncharacterized protein 9C20.4c
MAGSGESPAMEGDGVHLDPETEGGVGGNSLVTPPPALLGPEIAEMSIGEEGEQMVRPPMSNISSREMDTPQILHSHAKTIDPTIVPTVGMTFKDVDDAYKFYKSRVPQHCIVDFISEMHDGPENVPVTAQDLKNMRAARRRENCANDVAKLLAFFRECKKQNP

SEQ ID NO: 82943 - protein, 75 aa, Zea mays
  Coding DNA Sequence Number=SeqID_39568
MATYVELRRESAGSTMNHRGTRSGHDTAWVVISRRHKALPNPTTDLALRPLPYRANRGVLPLLWVCAAVSCAGRW

SEQ ID NO: 82944 - protein, 157 aa, Zea mays
  Coding DNA Sequence Number=SeqID_39569
MAGFGNWAERNEISPSAELDPLVIGSTNFEAEGATAWLPCEAIAAIMEVSSPEVGANVGHSFSNVLMIDLAFVNVASTRGLRLEDLWQRKGRLLYHFVEGVCVLRTFGGEEDPQHLPLEGLLVPKQEQRESIIEVLRDPPMLSIQMEARTTTPGLVA

SEQ ID NO: 82945 - protein, 67 aa, Zea mays
  Coding DNA Sequence Number=SeqID_39570
MKLLKRYVILLKMTRAEDLHKESFVRTIPTMMMIELQATIWPPSYKPPQLSLMALRSEAVLIANESS

SEQ ID NO: 82946 - protein, 83 aa, Zea mays
  Coding DNA Sequence Number=SeqID_39571
MEISLGDCFVCSVAKTKATPQERAKSRFRGRKRLPKLKHGRISRSRDLWTWDKVVHDMKSTVQEKDEPMPKLPVEKLRLSSGK

SEQ ID NO: 82947 - protein, 47 aa, Zea mays
  Coding DNA Sequence Number=SeqID_39572
MEFVHHSSNVYQEPKVCVDLTLDLGPYWEKFSDKDSIGRRQLWMQQN

SEQ ID NO: 82948 - protein, 948 aa, Zea mays
  Coding DNA Sequence Number=SeqID_39573
  Pfam annotation: Domain name=HR1; Domain location=397-467; Score=2.1; E_value=0.13; Accession=PF02185.7; Description=Hr1 repeat
  Pfam annotation: Domain name=HR1; Domain location=565-635; Score=5.0; E_value=0.07; Accession=PF02185.7; Description=Hr1 repeat
  Pfam module annotation: Pfam domain module=HR1::HR1; Domain location =397-467::565-635
MPSHGGKLVRSPAFALDLHSRNPAAFVREAEDGAVRIVGRVFELNRLPYGGYPSQDDVDRRGKKPVVETGDDPAPAAAPSSKKRKLGIAMGGLGVSDGFTREFMKTCVAPGGRMSFLELRESSARMLRVTRGWWPKNVPIPRAASEDFFTSRMVRAWKVFPYGRNIAAVVSAVMDKDRQGAAQKRQAVVRLHEARPKRQRGAAKAAAPGGGQLPLATKSAVPASSRAPEAAKAAAAGGSKSVKAAPASSRAPEAAKAARELPPGKRVADFATDISVEDYLVGSDEGQLVVVPPAVATAAAAVVPPAKGSALSAGGEIPALTAVRDEAGAVSRRLKEMQEALSQAADFADRAASGALTAVVSAEVERLRTQHADAVREKSAADSKCRKLADKVAALEGEKTDLRRQLSEERKEANEALAKAQAAQAEANLARAEGSLARQRAKQLEERLSALQSRVERAEASTRSEAERTRKQLMDSYHELGARTADFDVPDREPGLRCLEWIQEELLALPAIVEGFMSYASLVTCEGAMNALSREGCLHYEVFDQADEGFERVLTPSGKSRPPTGEKTDLRRQLAEERKEANEALAKAQAAQAEANLARAEGSLARQRAEQLEEQLNALQSRVERVEASTRSEAERTRKQLMDSYHELGTRTADFEVPDREPGLRCLEWIQEELLALPAIVEGFMSYASLVTCEGAMNALSREGCRHYEVFDQADEDFERDIYKVEDPVVKKSAGALYDRMWGPHGREVVRERAETTRGQAARGERVDDFGALNSALPDPEPNPATAVSDAALEPPPETAEGVPDAPAATAASGGPSPTAAPRAEDPVKVAAEPTAEDPRDGWVFAGSRFWACARKPLLLIFWRLRPWMMFSDFGDSESSVEWTEESSDEDLDYFAALDVAAAEASPHAADVEVVPGPSTGRRRRRAVAKRRVFAGDFSLVYYMTPPR

SEQ ID NO: 82949 - protein, 187 aa, Zea mays
  Coding DNA Sequence Number=SeqID_39574
MDLVTLPVRGRSSALALPPVRDRSGAPALPPMRDRSGAPALGPIWCSGFGKFLIWCPVLCDMCLMADDDTVAGQTGGGEAVVPSTEPINIDLDTVVADAEETDTTTSSRPFTFSFVMDLRSSLNIDTFIDLLNEKFSKRPDIPASTRHVLFDGLSPANHRHEDVPVHLHFLSPQPLFPYLYPPLYPY

SEQ ID NO: 82950 - protein, 112 aa, Zea mays
  Coding DNA Sequence Number=SeqID_39575
MPGIPRDVAKHSLDIRARARSVRQPLRLGHQGRVGLALTEPDPPSGAKKGGTPLRQDRAYFSVSKIFNQKRGLLRSPGYVLPAMSEAGSREANAGTCKWQGRLSRGAPVPPG

SEQ ID NO: 82951 - protein, 121 aa, Zea mays
  Coding DNA Sequence Number=SeqID_39576
MGIDSHLSTCVGIQSPKLPPTCLGQKGFVVVVVVMKPYDVVDKAIEMMQCTAKNLKLVCNEKLDSGKPLNVFELKELKVMLENIADFLDQDSMYCQEALDVHKTEDDFDDDLETELNVMWP

SEQ ID NO: 82952 - protein, 184 aa, Zea mays
  Coding DNA Sequence Number=SeqID_39577
MEILSIHNDELTNKVENIGSTPEVSLVEMPEIIKKDASTSCFDLIDDSNPCNQVLVKNVVIETCSDEIAMDNEQLKQEVARLGKALLYDKEGHKSYQCNAKIGDKQRQKIKQKPTSKISNTYINKVDKKATTPYLIKKTENGNVIAIKANKQANKGKGTKCISVPKEIISTMKSTMKVWIQRGK

SEQ ID NO: 82953 - protein, 163 aa, Zea mays
  Coding DNA Sequence Number=SeqID_39578
MRAWALPGRRGPRGRRLGPTEETTGGLTNRAAGGSGPLISGGGHAQGVTPWARADRRGPPDSDPRMGKERRRLTGGSLLVRTAVYLGQRARARAPWPEPATPRRRKRHGATTVGRAVSVRRRGTGTDDHRRLIDGIEKMGDREEKVRRGNSPQVEQGRGRGWA

SEQ ID NO: 82954 - protein, 60 aa, Zea mays
  Coding DNA Sequence Number=SeqID_39579
MSRPWSHSQLYMEALNKRREKINQHFIELSTVIPDLKKELQEKLKVLEDGGNGNDQGIKS

SEQ ID NO: 82955 - protein, 330 aa, Zea mays
  Coding DNA Sequence Number=SeqID_39580
  Gene Ontology: Mol. function=electron carrier activity; Cellular component=endoplasmic reticulum membrane; Biological process =electron transport
  Homolog annotation: Hit_ID=Q9FVM7; Match level="QueryCoverage=44%, HitCoverage=30%, E-value=1e-58, Identity=59%"; Hit description=NADPH- cytochrome P450 reductase
  Pfam annotation: Domain name=NAD_binding_1; Domain location=205-303; Score=49.6; E_value=1.1e-11; Accession=PF00175.12; Description =Oxidoreductase NAD-binding domain
MNVCELTLAVSHPPTGQEQRTSEELYYYIKAARVNSPMVFKLGFTLVFGPSTVARPSKNPPSHQDPSQPPETLLLSSVLSSFCRRLCSSLQVLQPAERLHRQKLIFDEGKACSELVSFSDSSGSSQRKGTRCDWMEDIIMYVNSPGGSVTAGMAIFVNIKISNLERPLDNLCLSRMAPTRIHVTCALVYGPSPTGRIHQGVCSTWMKERLALKQSGAELGTSILFFGCRNRNMDYIYEDELQTFLEEGALSELIVAFSREGPTKEYVQHKMVEKATKIWNVISNGGYLYVCGDAKGMATDVHKMLRTIVQEQLTLVTQEHEMSALMYLVL

SEQ ID NO: 82956 - protein, 208 aa, Zea mays
  Coding DNA Sequence Number=SeqID_39581
  Homolog annotation: Hit_ID=Q6J9V9; Match level="QueryCoverage=61%, HitCoverage=44%, E-value=8e-47, Identity=75%"; Hit description =Putative uncharacterized protein
MMTASKKGLRKGGYFERILLSEGSGPRALLLIRGSKVAPCGVRQPLQSTRAPSPLLIRGSKAGPSEGFDRRPRARRVRDDPGYFRYMAKARATLPRYPRTFPRPAGMICNGIPPEGGAEPSNPIKWVRASASASATGEGLRLAQPQASASASASGEGLRLARPRASASASEGVTSSPDLSLGLRRSLRLARPRPRTDYATADTSLPYP

SEQ ID NO: 82957 - protein, 174 aa, Zea mays
  Coding DNA Sequence Number=SeqID_39582
MPRSAQSRTRGRAAAATRLAGVGEGADLGKWEEQRSCGPWRGGAGACGSHGEQQVAGLGIPAGVEPRALGPRLGGSQGEGNSRGVRDLLAHGYKRRGRASAIGGYGRHAAELWACEPAESYRPTQLGFVSGLEISGNLRKLEVDTKRFCGRMRIQIKYLDVDRLSRKQIRTPIG

SEQ ID NO: 82958 - protein, 264 aa, Zea mays
  Coding DNA Sequence Number=SeqID_39583
MVVAPWVKYLSQEYDPMLTWAASTYRSPSCPSFRGGRDGLGSSNGAGDDVEAATGVTTSCLPATKNRGGDEQRTGRGQPRSSSSGRARPRQQRRSPTRGKVDGAQGEDGERRRGRGIGRARTLAECGRGVAQSASARAACALGEAGRSALGGTLGQRLELLARHGALQTVTKSGERKGEADGRVLLVRTVVYLGNAHGTSAMAGAGDSTRAKKARGGRGWQGGLGSTARNQYRRSPSTIADSGRALPATESGAGGLAMGKLRRT

SEQ ID NO: 82959 - protein, 161 aa, Zea mays
  Coding DNA Sequence Number=SeqID_39584
MMLVDYTTVLDGPSVSVEGPTQQGVESVVEVTPASGVTSDGSSDPSLRLRLLRELRAVARTATGIVVVSVSVRGASLAEVQVKEASQTPPPAEARGKSHAAPGPAPASGPAPAPGVGAPAPRAGDDTVFPGDWTYLAPCDTVDAPPGEKAKRESQTYVQCT

SEQ ID NO: 82960 - protein, 192 aa, Zea mays
  Coding DNA Sequence Number=SeqID_39585
  Gene Ontology: Mol. function=3'-5' exonuclease activity; Cellular component=intracellular; Biological process=nucleobase, nucleoside, nucleotide and nucleic acid metabolic process
  Homolog annotation: Hit_ID=Q7XE52; Match level="QueryCoverage=75%, HitCoverage=15%, E-value=1e-23, Identity=44%"; Hit description =Nucleolar protein, putative, expressed
  Subcellular localization annotation: CTP_CleavageSite=64; ConfidenceScore=5.44e-01
MEGDEASAPPPPPWMQNKSVVAIKASSGPLSAAASRLSACSRALPSSRDFHFYNNFPAFKSPVGAAAAKADASLGVIGGASILPTRQQLFPMGRDLDDAHDWLVALNDDLLERFGAFTDEFKALRQKEETFWRRAAPQAGDGFQVDCERAAGGERVQVCVEGRRCMDGFGAQWLRGWWAGSESGNFVWDRTA

SEQ ID NO: 82961 - protein, 191 aa, Zea mays
  Coding DNA Sequence Number=SeqID_39586
  Gene Ontology: Mol. function=3'-5' exonuclease activity; Cellular component=intracellular; Biological process=nucleobase, nucleoside, nucleotide and nucleic acid metabolic process
  Homolog annotation: Hit_ID=Q7XE52; Match level="QueryCoverage=50%, HitCoverage=10%, E-value=6e-21, Identity=54%"; Hit description =Nucleolar protein, putative, expressed
  Subcellular localization annotation: CTP_CleavageSite=63; ConfidenceScore=5.39e-01
MRPRRRLLRRPPWMQNKSVVAIKASSGPLSAAASRLSACSRALPSSRDFHFYNNFPAFKSPVGAAAAKADASLGVIGGASILPTRQQLFPMGRDLDDAHDWLVALNDDLLERFGAFTDEFKALRQKEETFWRRAAPQAGDGFEVDCERAAGGERVQVCVEGRRCMDGFGAQWLRGWWAGSESGNFVWDRTA

SEQ ID NO: 82962 - protein, 98 aa, Zea mays
  Coding DNA Sequence Number=SeqID_39587
MEASVMAPISSLRDLCTGIIPWLFREGRGIGLVRQMVSMEMVASVMALISSLRDLGMGIVPRLFHEGRGDNEDDGFDYDYGLCILSVWKGYFWVNNLG

SEQ ID NO: 82963 - protein, 588 aa, Zea mays
  Coding DNA Sequence Number=SeqID_39588
  Gene Ontology: Mol. function=nucleoside-triphosphatase activity; Cellular component=mitochondrial matrix; Biological process=ATP -dependent proteolysis
  Homolog annotation: Hit_ID=P93648; Match level="QueryCoverage=89%, HitCoverage=55%, E-value=0.0, Identity=93%"; Hit description=Lon protease homolog 2, mitochondrial precursor
  Pfam annotation: Domain name=AAA; Domain location=395-587; Score =149.9; E_value=7.1e-42; Accession=PF00004.20; Description=ATPase family associated with various cellular activities (AAA)
  Pfam annotation: Domain name=AAA_2; Domain location=393-533; Score= -40.9; E_value=0.014; Accession=PF07724.5; Description=ATPase family associated with various
  Pfam annotation: Domain name=AAA_3; Domain location=396-532; Score= -9.1; E_value=0.0033; Accession=PF07726.2; Description=ATPase family associated with various
  Pfam annotation: Domain name=AAA_5; Domain location=395-538; Score =0.5; E_value=0.0026; Accession=PF07728.5; Description=ATPase family associated with various
  Pfam annotation: Domain name=LON; Domain location=43-243; Score=96.5; E_value=8.3e-26; Accession=PF02190.7; Description=ATP-dependent protease La (LON) domain
  Pfam module annotation: Pfam domain module=AAA::AAA_2::AAA_3::AAA _5::LON; Domain location=395-587::393-533::396-532::395-538::43-243
MPRLGSTTTTLAEAILVPSLYEKNGFSRVILKALKGLALFHQRVIALPLPHRPLFPGFYMPIYVKDQKLLQALIENRKRSAPYAGAFLVKDEEDSEKSIGDLKGKDLLKRLHEVGTLAQITSIQGDQVVLLGHRRLQITEMVEEDPLTVKVDHLKEKPYNKDDDVIKATSFEVISTLREVLRTSSLWKDHVQTYTQHIGDFNYQRLADFGAAISGANKLLCQEVLEELDVYKRLKFTLELVKKEMEISKLQQSIAKAIEEKISGDQRRYLLNEQLKAIKKELGLETDDKTALSAKFRERIESKKDRCPSHVLQVIEEELTKLQLLEASSSEFSVTRNYLDWLTVLPWGNYSDENFDVHRAQKILDEDHYGLSDVKERILEFIAVGKLRGTSQGKIICLSGPPGVGKTSIGRSIARALNRQFYRFSVGGLADVAEIKGHRRTYVGAMPGKMVQCLKSVGTANPLVLIDEIDKLGKGHSGDPASALLELLDPEQNVNFLDHYLDVPIDLSKVLFVCTANVIETIPNPLLDRMEIIAIAGYITDEKMHIARDYLEKNTRQACGIKPEQISLTNPSSCIRYSAIKARISLRV

SEQ ID NO: 82964 - protein, 139 aa, Zea mays
  Coding DNA Sequence Number=SeqID_39589
MELPLDAQSSGRRLDVDERVEQCRAVAGVLHVLARFVQVLQMQHLRVFLSEAHFGVADGPRLVCFSKKFLLSIIIYGIPDSRFRIVVDALTHLWNDQLDKLGVEPEVAETSGYIGQVTHQGRRGFRGPRRLSFFVDDEI

SEQ ID NO: 82965 - protein, 319 aa, Zea mays
  Coding DNA Sequence Number=SeqID_39590
  Gene Ontology: Mol. function=nucleoside-triphosphatase activity; Cellular component=mitochondrial matrix; Biological process=ATP -dependent proteolysis
  Homolog annotation: Hit_ID=P93648; Match level="QueryCoverage=94%, HitCoverage=36%, E-value=1e-140, Identity=77%"; Hit description=Lon protease homolog 2, mitochondrial precursor
  Pfam annotation: Domain name=Lon_C; Domain location=154-312; Score =210.7; E_value=3.4e-60; Accession=PF05362.4; Description=Lon protease (S16) C-terminal proteolytic domain
MDGSNGGGSIKSEWGEEEKKVEVTDAALLALIENYCREAGVRNLQKHIEKIYRKIALQLVRQGVSNEPDQESLGVTVNEESNSGDSITAKDEIVKDPAVEDASVANNVTNPASEEANEVNLTTEAPKEDSTSKGNKKTDGVAEDAADKATEKVVVDSSNLGDFVGKPVFQAERIYEQTPVGVVMGLAWTAMGGSTLYIETTKVEEREGKGSTPKDGPSAGCTMITSMLSLAMGKPVKKDLAMTGEVTLTGRILPIGGVKEKTIAARRSAIKTLIFPAANKRDFDELASNVKEGLEVHFVDTYSEIYDLAFQSDAGTEMI

SEQ ID NO: 82966 - protein, 377 aa, Zea mays
  Coding DNA Sequence Number=SeqID_39591
  Gene Ontology: Mol. function=metal ion binding
  Homolog annotation: Hit_ID=Q2QUC7; Match level="QueryCoverage=99%, HitCoverage=99%, E-value=4e-57, Identity=41%"; Hit description=Zinc finger, C3HC4 type family protein, expressed
MASRDAGASPRSAPHRPGAVAPKDGADLLSPRFRSAAALAGWDEESVLLAAMVVEDTPVRESRRKRRASTSSAGGSAGSSTRKMRPRRQSPAKIPPVVLALDDDDDDDAADGKSIVNAATKEEEKVVVVGDKEASGSGDKAASGSGDKAVATGNLPCMDRLREELSCAVLALLFFFYMLYEICLEICFEPTTTSCGHSNSRSCTINTVLWNTIQLLFPGEVEARKNSTSPCDKDASRSPLRANRLSQGGNGMRTRTRSRSSSTEARTRSSYRSFMEPGSTTSTNTGANFISAQVNTRSRRGFVQASQLLLPRRSAVRLDQSEDAALAYRLQQEEFMNAFEEPEQERQQPRNAVSTARDTLRAIASRAVRLRARGWHV

SEQ ID NO: 82967 - protein, 142 aa, Zea mays
  Coding DNA Sequence Number=SeqID_39592
  Homolog annotation: Hit_ID=A2YQ62; Match level="QueryCoverage=54%, HitCoverage=96%, E-value=1e-15, Identity=55%"; Hit description =Putative uncharacterized protein
MSQKWHLANVEACSSSYEKRKKGRRTQQQSKHRQPASRLVDHPNPLPSLVQGAQEVEEEGMAPSYRPYHVAGEDQQRKVKAGGKWLAAWSVLGVGGDPAEMKRRRRVASYKAYAVEGKVKASIRRGIRWVKAKCDRIAAIHN

SEQ ID NO: 82968 - protein, 476 aa, Zea mays
  Coding DNA Sequence Number=SeqID_39593
  Gene Ontology: Mol. function=heat shock protein binding
  Homolog annotation: Hit_ID=A2YQ60; Match level="QueryCoverage=65%, HitCoverage=55%, E-value=1e-108, Identity=62%"; Hit description =Putative uncharacterized protein
  Pfam annotation: Domain name=DnaJ; Domain location=316-369; Score =4.6; E_value=0.0015; Accession=PF00226.22; Description=DnaJ domain
  Pfam annotation: Domain name=TPR_1; Domain location=220-253; Score =29.2; E_value=1.5e-05; Accession=PF00515.19; Description =Tetratricopeptide repeat
  Pfam annotation: Domain name=TPR_2; Domain location=180-213; Score =1.5; E_value=19; Accession=PF07719.8; Description=Tetratricopeptide repeat
  Pfam annotation: Domain name=TPR_2; Domain location=220-253; Score =24.5; E_value=0.00038; Accession=PF07719.8; Description =Tetratricopeptide repeat
  Pfam annotation: Domain name=TPR_2; Domain location=254-287; Score =0.4; E_value=27; Accession=PF07719.8; Description=Tetratricopeptide repeat
  Pfam module annotation: Pfam domain module=DnaJ::TPR_1::TPR_2::TPR _2::TPR_2; Domain location=316-369::220-253::180-213::220-253::254-287
MAPPPPPPSSAPTKNRIRWLRGNKKVVDRYLGEARAALAAAAQDTEDADDAAAAALGLVTVALEMSPRAEAALELRARALLALRRYRDVADMLCDYIPSCCAKSCSADDATTASSSSSCSSGSGADLLSPDHDRPDAGRFLCCLDVSGLKRRLVATFSSIHAHQWRAESVSQLLAHVKLLLRRRAAAVAALDAGFPGEAVRHFNKVLDTRRSVLPHPFATACLVGRAAAFRSAGRPADAIADCNRALALDPAYIPALRARADVLESVGALPDCLRDLDHLKLLYDAALRDGKLPGPVLAPAGRHPQLRGRVAAGVDYYALLGVRRGCTRSELERAHLVLTLKLKPERSVSFAERMELVDEHRDLEAVRDQARMSALFLYRMLQKGYSFIMSAVLEERGKDAAATAGPEEEEKEVVATVQGSATANGGNMPMATAATPPLIPPFHGVFCRDMAVVGTLLSRGGFDRPIPVNCEAMSC

SEQ ID NO: 82969 - protein, 216 aa, Zea mays
  Coding DNA Sequence Number=SeqID_39594
  Subcellular localization annotation: CTP_CleavageSite=42; ConfidenceScore=5.77e-01
MASSSVLAVPSIPLPLPGAYKRTRPSPVFTTPASAISSAFPRANRASAAMLPPVDPMEGPWVIRTSYCSKEEGFPHLLRSCALRMGIRKRPEYVLKEYRENGVEKCSMAVYLGESQNYPNHPPFQVTFIGHRFPDTCQSVARKALKQLCQNYSREISETPFDIFHPATKIPPPGGKDSRLCQEETPQKMTPPSSTWPDTSTPSTTTTMISPPTAPT

SEQ ID NO: 82970 - protein, 82 aa, Zea mays
  Coding DNA Sequence Number=SeqID_39595
  Homolog annotation: Hit_ID=A2XM86; Match level="QueryCoverage=71%, HitCoverage=19%, E-value=6e-08, Identity=45%"; Hit description =Putative uncharacterized protein
MVIKVKLERNLHMLVDLFEPKMGLYDNSGTFLGANEDSTRTLAEIEKKIARATVLPRNHGGDIALFKLDIDELIADYAKTNQ

SEQ ID NO: 82971 - protein, 227 aa, Zea mays
  Coding DNA Sequence Number=SeqID_39596
  Gene Ontology: Mol. function=DNA-directed DNA polymerase activity; Cellular component=nucleus; Biological process=DNA repair
  Homolog annotation: Hit_ID=A2WV83; Match level="QueryCoverage=85%, HitCoverage=42%, E-value=2e-46, Identity=53%"; Hit description =Putative uncharacterized protein
MNVFLEGRVLGMPVARPEPQEPRVIAHVDMDCFYVQANRRGAVQRLERRWLDCHQLRGSWIWSMRGDEAKRVCSGINLVQVPVARGKADLNLYRSAGAEVVAILASKGKCERASIDEVYLDLTDAAKEMLLQAPPDSPEGIFMEAAKSNILGLPADDLGVETIGDLLSFTEEKLQEQYGVNTGHGMVAAFARAAWLKEYHEKVLVEIYGYIPYLRDATPLDFYSLDF

SEQ ID NO: 82972 - protein, 355 aa, Zea mays
  Coding DNA Sequence Number=SeqID_39597
MGSTRVAFVLLSLEERNFAEVGTFQPLFGFKDFSSGSPTASPRRWSPKTVTTSLMVGRSKPGYDLCPTLNFKDLHHLGWGGGRTEPELYLPRGFVGERALTGLAGGSDFDNAGLVGGERRQLQRVGLAGSAGSGSAPGAPSRRESGCRAARTGGPPKTSRAARAAFVFLGCPTFASVRRLCAEVGARPSGRIRVGICRGEMASVVGAEVVATEEVLVADGITATIRAPSFRLFGFDGLSSPLEWGHGRGPCCSSVRPEAIAAAVWPPGAEVVVAAAGAGGARTEADLARKRKLRRPELGRAIHWRDQRRSRVAEAMSRAGVLGGQLAEASGRPAESSARAGFLEETLAAMARARC

SEQ ID NO: 82973 - protein, 101 aa, Zea mays
  Coding DNA Sequence Number=SeqID_39598
MPTRPPPDLLNPEFMMPHAAPALGGSRCHDIGRHQASGEEAGGRSKATPMWPGRSQVAPTAAVGRGSMGKEATLAFTPTWVVAIMWRFCGSSSENPANVLI

SEQ ID NO: 82974 - protein, 594 aa, Zea mays
  Coding DNA Sequence Number=SeqID_39599
MAERYQLPRSCVPPMMRRKDGEYPPSGGLEGGKTRRIREEGDMRGGGVPHVMQTGSEQKKPNRRAWCTQPPSSYKRPPTFAQTNGQKGRAAMQAACNRARWTRFSDSQHASMEAQAHASRNRRARCCMQATAPPLAPPPCLFGCGTNTATRGGPAHDPAAPAWRDGSRPIQGQKESLLPRREDDAPEKRATLRLRRNNRAKKGWPSEGFKFNSRLRSRGPYTHYWSEVRRPAPRRAPRPPQATRAPRPLLIRGSKAGPRRVHSRLRRRARDDQGYVRYITKAWAALPRARTRAKPRKTANSAPPDPGLGLGLSPGRRRTPLRPTQGSDSGSASEDDELRFARPRARTPPWPLPNNLRLARPRGSGSTSAMKDRLDLGFGGASTSPDLGHRPATSTGSAIITLPRADSGRREQDRSLTKAGGRQQGLNRSDSYPSARLRCSSDNHDITPAGCQDLSGCHIGMAFLEKVGRAGTRTGQALSWGRSLPSPAWTLVTPYYKRTRPGRGTNTKAAGFPPLSRPSPATSLPPFALAHALDPSGLGHEAHSLVGLGTPRSRNADTSPHRFIYKSIINVKDFPGLRLALPPGLGQSPRNPRL

SEQ ID NO: 82975 - protein, 141 aa, Zea mays
  Coding DNA Sequence Number=SeqID_39600
MGKNNKRKREPTPPSEEFGDSEYSEEEFSSEPEGSPTPVSPPASSDDSDDSQGIAAEVWTYIRAVERAGLEGSDESEYSSDEEDSDGGDEGEDDDDDDDDDDDGDGSGRGGGDGSRDSTKGSSRGSTKGGGGGRGRGRASG

SEQ ID NO: 82976 - protein, 79 aa, Zea mays
  Coding DNA Sequence Number=SeqID_39601
  Subcellular localization annotation: CTP_CleavageSite=42; ConfidenceScore=5.53e-01
MGGRIFPQQPCSALAAEASARPSFFLVHAATTISMAARLSPSCSVRRPRAIISHVMRKMTQVDPKRGLLRMVMLVNEPA

SEQ ID NO: 82977 - protein, 73 aa, Zea mays
  Coding DNA Sequence Number=SeqID_39602
  Subcellular localization annotation: CTP_CleavageSite=34; ConfidenceScore=5.09e-01
MGIGCLRDKNLNKDYGVVPNSANAFGNQTPQPNSCMSRGSLEEMVAGVTWLSILPPGWTVEWDPASAEEEHEE

SEQ ID NO: 82978 - protein, 69 aa, Zea mays
  Coding DNA Sequence Number=SeqID_39603
  Subcellular localization annotation: CTP_CleavageSite=3; ConfidenceScore=5.07e-01
MARARATAALPTTCLVALTPRRDRRRFWQEKRAMLRLRRNNRAKKRDRERGIPRKGSFPVKEPGSEPPY

SEQ ID NO: 82979 - protein, 288 aa, Zea mays
  Coding DNA Sequence Number=SeqID_39604
  Subcellular localization annotation: CTP_CleavageSite=61; ConfidenceScore=5.34e-01
MQPGCTPPPAVTQDGDLQLDGGGKRAGLRPLPLPQPQGFSSPSCSVPGFRTRVASEPLAAPASATAAGRSSSADVIAKTGHGPTSNSTAFCPSLAYEFWHGRGPPSSSTRPEVSAAAARPPGAEVVVVAAAGAGDGAPFVGLPLLRRPSPMEWGCSYLRRGNRSSVCNGTLNANSPVDYLNRFTKHESPRVKVTSEHEQRRSWLENENLVGRSLAGLSVSGTDAGVDQPRPRTGLAPLEDGWPRPLGSPWTASPSEAGSDLAEAVVDAEGATAPFQREDPSLQDQIVL

SEQ ID NO: 82980 - protein, 405 aa, Zea mays
  Coding DNA Sequence Number=SeqID_39605
MGGSEPGSFAEKDPFRATSVPVARRVGLGSKLACQKSKKRVHLARLHAACMAARPFCPLVWAKMGGRLAGSSRLPSPRMGGIRRLSASSLEERNSMGVGTSQPSFGFKDFHHAAWPHSATGGHPRWPRWKMRRVGGPPPRGSAAPFFPLRPGVKGVLKPRGDFLQPCQDTRGARGPGSPSPCLNGWFSSSAGGSPSAVTPPPKAAAQAASLSGAGVVVVAVEAGGSEPSIVLQLLRRPSPSEWGCSHLRRGKRSSVGSGISYASVFVHCGCRGLNMGNRLSRLLGPDSWRSPWTSAPPEAGSGFAVDVVDAEGATAPFGVKTRACRIRSSCSVRFLRPPRPEERALAALVKLRLFSSCFEHLDSVGNRDKGTSEVSVSRRRRSPSARSALAAYVYLVVSRIRFPK

SEQ ID NO: 82981 - protein, 95 aa, Zea mays
  Coding DNA Sequence Number=SeqID_39606
MDLRLFTLQLQLWLGQPESRLQKGNSCAPRSCQGTEVAMPSYNFVKIINFTFNMLEGTRQAFILKICQGFFQFRTFLNFGFKLCIKFQLFLFEIF

SEQ ID NO: 82982 - protein, 390 aa, Zea mays
  Coding DNA Sequence Number=SeqID_39607
  Pfam annotation: Domain name=SlyX; Domain location=201-268; Score= -7.4; E_value=0.047; Accession=PF04102.3; Description=SlyX
MNSPTPASGGDSRFSSDFLSRDGFPSILWEVLNSVGYPTPPLYTVQLYEEHRVPRCRVWLTLEAHPLQPGWRSLDSETIGLRTDDTVEAAAMKTLTTFCGYHPLEMVMHPLVLFPAEKKDDPMWCNRVSHVKDVWAMYHDLVGRVTVQCMSALYRLQALQSDAMALLANTAQTAKLTLDSREDFVVDLSTELVEKDLQVERLSQRIATLEQQVEIRDNTIDVLENQLHDVQRELEEAKDHLDMHHLEMEANEAGSEGEEAPEELGPAPGANGTTSAMPPSPMAARQRHGHNEQVPPPPPPAPTVQELMAQQNEILRQLLPRQPYPQQHGGGQHQRPSAMATYQEFLSMQPPLFTKADVAELPELFQVKCLSPALEARPHLNGNNPSIPWI

SEQ ID NO: 82983 - protein, 55 aa, Zea mays
  Coding DNA Sequence Number=SeqID_39608
MNVCELTLAVSHPPTGQEQILVRQWGLRAKIDPVLVLDAKGGENKAKATNGSATI

SEQ ID NO: 82984 - protein, 51 aa, Zea mays
  Coding DNA Sequence Number=SeqID_39609
MWAPVDEMRGRVPTARDLYPSDVIVDITPQPITLNQRSKSDKYHKNKHSIA

SEQ ID NO: 82985 - protein, 412 aa, Zea mays
  Coding DNA Sequence Number=SeqID_39610
MEKQKSLKSWLSNCLPLSTVSSDGTPNRQTIFCQKNFWAVFDVIVDTALASIHLVKYSTATKDLNAFGLGDTFKHGLADPLLVKLAFDECEVPALVFEALGLVDIGWMIVPLQEQGYWCPPVFGHNEVDYVVALAVIGYLEALWAADSWRADDMVEYVGGQGLASGGCLGQCVGLLILGSVHVLQGEAFKLPLETADSREILHKCGVLRCVIFLDLAGDYLGVCFDDADSRAKLRRAAYLWLTPAGEVMTAAAPAPAWHHVSSQWMVHTFSADMSGYVIGPVQSTMKSARTCDLMAVLGSKGRHVDDGLDFGQVGFDPAVRHQAKSCVPHVHERFCEVSQMVFLASAGDDDVVHICEYVSADLALEHRFGESRECGPSVLKSLQHSDEAIRAEGCYETGAGLVFLLHIYIWW

SEQ ID NO: 82986 - protein, 250 aa, Zea mays
  Coding DNA Sequence Number=SeqID_39611
  Gene Ontology: Mol. function=protein kinase CK2 regulator activity; Cellular component=protein kinase CK2 complex; Biological process =Wnt receptor signaling pathway
  Homolog annotation: Hit_ID=Q9FQF8; Match level="QueryCoverage=98%, HitCoverage=85%, E-value=1e-113, Identity=84%"; Hit description =Protein kinase CK2 regulatory subunit CK2B1
  Pfam annotation: Domain name=CK_II_beta; Domain location=107-248; Score=286.7; E_value=4.6e-83; Accession=PF01214.9; Description =Casein kinase II regulatory subunit
MHRDRGVSAAAIPGDRKRIGEPMDRSSPSTSWGFSGGREKERIGVGKQPEMPRSGGGSTAMSKSKLSDAKVAVVHVLVVLGISLSVIICVLIALQQNQKLTAKNQILKGNEFFCEVDDDYIQDDFNLCGLSNQVPYYDYALDLILDVESSHGDMLTEEQNELIESAAEMLYGLIHVRYIITSKGLSAMLDKYRNVEFGRCPRVNCSGQPCLPVGQSDVPRSSTVKIYCPRCEDIYTPRSKYLSSILSFPL

SEQ ID NO: 82987 - protein, 214 aa, Zea mays
  Coding DNA Sequence Number=SeqID_39612
  Homolog annotation: Hit_ID=Q6J9V9; Match level="QueryCoverage=22%, HitCoverage=16%, E-value=2e-12, Identity=79%"; Hit description =Putative uncharacterized protein
MGSRPSNSSKKGNTCAPHLGARKVEGHDECEECEGMTTSRGINPFLKADLLTRTPKHHGQSLHRRAPRFSPSDAGAGSHSSWTGKGGISKKDPSQRRGSKAGPSEGFDSRLIARRVKDDPGYVRYMAEARATLPRPHEGTTKPTEASQKELRPRRSQTTPLRPRGLHPAGALARTHQNKARPRRAGPLAKNPAEPPSEYPYSLQGSGATIGYRN

SEQ ID NO: 82988 - protein, 115 aa, Zea mays
  Coding DNA Sequence Number=SeqID_39613
MNPVQQSSTQESPSIVISGAREWKMDLLAIWQGGFYQVCALHGMGTEGAGGGIYRRAVVFGCGVAVMEQVTRGNKHDKGRGAGVAGSGCAAKGKWGGGGAHGGGHTCRGHGENLS

SEQ ID NO: 82989 - protein, 127 aa, Zea mays
  Coding DNA Sequence Number=SeqID_39614
MTLDESLLVTVQVANYCRERFQRLDDEVSRQASRLVRGVHEPWPVAAKNVGSNAVVTTLDATRATAVTAEEARTIAKEMEKKAATTAKLATIAMDKVGFVVVAVASVVAEEANALDSVAHRYLAVNL

SEQ ID NO: 82990 - protein, 73 aa, Zea mays
  Coding DNA Sequence Number=SeqID_39615
MAPVTARSKKPARMLESMQPAPIQFKQTLYAATLAFGATIFYRFQHVLSALDDEVLGSMLESIKVERGDNATS

SEQ ID NO: 82991 - protein, 612 aa, Zea mays
  Coding DNA Sequence Number=SeqID_39616
MGTCAAPGGRMSSPELRESSARMLEVTGGRWPKNLPIPWAEGEDMSTSRIARGLRIFPYGRNIAAVVSAVMNKDRQDAAQKRRAVIRLADPRREAKKVRGSAKAAAPGSSQPAPAAKPVAPGSSKASESVKAVIAGGTKPTPGEAAKVRELPSPRKRVADFGTNISVEDYFVAAAVKDVAGSMSRRLREASQQLSQQLSQMADFADRVASGALTADVAAKVERLWAQHADAVREKSATESKNRRLAEKVTALEAEKMDLRRQLVEERREANQAIAEAQAAQAEAKVARAEGSLASQHAEEWEVRFNALRGRMDKAEASTRSEVERTLAQFVDSYRELGAWTADFEVPDWEASLRFLEWLQEELLVLLTIVEGFMSFASLVTCEGAMNALSREDCRHYEVFDQSDESFEREIFKAKDPVVKQSAGHFLIGCGGHMMERAEDVEDLGGLVDAPPEAAEVNSVLPSNAGEGPLVVPVPAMAGEDPVSAPAPMVEGAPKGFGPAHATATDNANFVAASTVVAENDSDDSVSKFFESDDSGSSVVWTEESSDEDLDYFAALDVAAAEASPRVMGAEVLPGPSAGRRRRRAVAKRRGEELRIMLFNYREMGIIPKVET

SEQ ID NO: 82992 - protein, 59 aa, Zea mays
  Coding DNA Sequence Number=SeqID_39617
MQAACNCTKGTHPFDFDMSSMGAQAHTSCNRRAGYNGPGKGILRKGSFSAKEAGPEPSY

SEQ ID NO: 82993 - protein, 282 aa, Zea mays
  Coding DNA Sequence Number=SeqID_39618
MGVPDLCARSARIKCVAGRSSLEHRTCPVYTGQSAFRGEGAHWPSGGGADFDNAGPIGRKCRQLQRARFAGSGVASGATSHRWAECGYLPAIRAVVAPRASGDRPRRRALLGRRLCSWAVLPLLRYDASARRSVLARLGGPEWGSTGGQMAAVVGAEVVAAEEVLVADEIAAAICAPGLRLFGFDSLSSPLEWGRGRGPCCSSVCPEVIAAAFWPPGAEVVVAAAGAGGGEPPGILSPRRPSNVGGCSYLRGWNQSSVCNGTLSASVCSLRLSGPEHLCIWA

SEQ ID NO: 82994 - protein, 167 aa, Zea mays
  Coding DNA Sequence Number=SeqID_39619
  Subcellular localization annotation: CTP_CleavageSite=51; ConfidenceScore=5.20e-01
MQLYNTTTDQTSVGGAAAPSAPTPPSAESDPTSDGDTVGGSPPRRKMSAPRLGHRRQGLLQKPGPSRRPDRPLRSLSQPSPGDTGPAHGLSSPTPGLVPPVDDPARLRPPLLRLLGLGKRPRVSLTGQEKPRAARPTEPRDSYASRIRIPHSSPSAQGNSHLVNRFS

SEQ ID NO: 82995 - protein, 180 aa, Zea mays
  Coding DNA Sequence Number=SeqID_39620
  Homolog annotation: Hit_ID=A3AW14; Match level="QueryCoverage=24%, HitCoverage=11%, E-value=3e-07, Identity=65%"; Hit description =Putative uncharacterized protein
MEGLIKGLVHVAIDAVEDAVRERDHGRADDDEVPRRRAAQSSDPDDDGEEERDERSRSTWAEVVSEQKGSDPDERRDHRSSGRLRGFQFLQCEGEERWDGSGSRRRQQQQQAQGYGNQHQEEERINDGGWQTVGEKKRHGRPQQFYLEEAKGNVDYQGYIFPRRRGESGKTTASILARIV

SEQ ID NO: 82996 - protein, 65 aa, Zea mays
  Coding DNA Sequence Number=SeqID_39621
MTKNLAAKQCDSNECRGGKVNRQDPQHQASSHPHSLNGRSQSPRRLHPVPINRWTVSRYCSRDPI

SEQ ID NO: 82997 - protein, 106 aa, Zea mays
  Coding DNA Sequence Number=SeqID_39622
  Subcellular localization annotation: CTP_CleavageSite=40; ConfidenceScore=5.17e-01
MRTSSRGCTRTLVTIASRLNDARRGAYGGVVGARALRGLRAARRGRVVGRARELSGRVRGVVGPGAELCEGLGGAAASWGPGVVGALHGGEGRGNSAALACGGVAW

SEQ ID NO: 82998 - protein, 37 aa, Zea mays
  Coding DNA Sequence Number=SeqID_39623
MAGKFLLSSRLSVNFWKVQGLGVNVSKTQFAQRRTAG

SEQ ID NO: 82999 - protein, 134 aa, Zea mays
  Coding DNA Sequence Number=SeqID_39624
  Subcellular localization annotation: CTP_CleavageSite=32; ConfidenceScore=5.77e-01
MAAPAPLPPRRSGSPPPLLPPRRRGSPVPFPRGGAAPPAPAPSRGGATPLSPAPPSTAARPRPPPCSPPWRPYPRRGGSRPPRGNPPPACGPRHGVPCPGAWSRPPTRLAWPRHGIALPRLPQRVPACADPRAQ

SEQ ID NO: 83000 - protein, 75 aa, Zea mays
  Coding DNA Sequence Number=SeqID_39625
MCAHKNPKSLHKHKINHHLPYKHLRQLKMRNWLKKKKIKFKTMSHLKKRALVKGYMKLNKTRRMSKRFRLNDHLT

SEQ ID NO: 83001 - protein, 79 aa, Zea mays
  Coding DNA Sequence Number=SeqID_39626
MDARRPEVEKILAHVNSWHLPWQLLRRATKRHKGSRRCGGGAEPRGARPGGGCRRRAYPHPPWAKTLYFESYKAPKWSL

SEQ ID NO: 83002 - protein, 193 aa, Zea mays
  Coding DNA Sequence Number=SeqID_39627
  Homolog annotation: Hit_ID=Q6QP54; Match level="QueryCoverage=49%, HitCoverage=39%, E-value=4e-08, Identity=40%"; Hit description =Putative kinase
MNSRLPETEHRPGPERLLETAHLELDGKLFVSTQQAPTRRAKLSAFRDRGVPKPTSEYAACPSPDGSSAWASAKGGEARWPETGVREVEVPRPSCSSRAQVGSGDVGAPPKLGSNLSSVSEAEPEPLGRARRKSFGRGHGGVRALGSGEAEFIVFRGRARVRALGSGGAEFAVFRVLARVRALGSGGAEFAVF

SEQ ID NO: 83003 - protein, 80 aa, Zea mays
  Coding DNA Sequence Number=SeqID_39628
MAFDRAKPDLPWFCYNRRRSFVVGDSPDDWGPNGSDREDVHGWAARGPNPSPLAVGEGLDCVGLKGRWARLRVVGPDGSP

SEQ ID NO: 83004 - protein, 38 aa, Zea mays
  Coding DNA Sequence Number=SeqID_39629
MAGGFKLAGAKGKWLAGEETLGDTGVSQYQSRSLNERD

SEQ ID NO: 83005 - protein, 210 aa, Zea mays
  Coding DNA Sequence Number=SeqID_39630
  Subcellular localization annotation: CTP_CleavageSite=19; ConfidenceScore=5.08e-01
MNVWGRNTLGIDDVFSKVRPSLGRRRGQGLLRESGPSRRLGRLPLGPRPTVFQGRQPDPRPRLIDSGVGSADGQPGQAPAIQVRTTPLRRGRPAERRKADKRRAVTCSNSGDDDDFCSGGPNSGNADLRLDAAARRPPPMPKLVRQGRAEGREVGGQPVAGPGYRAGGRTSSSCCGGRRRRERLRSHSRLKTGHAVAASATGNTRSSPHH

SEQ ID NO: 83006 - protein, 531 aa, Zea mays
  Coding DNA Sequence Number=SeqID_39631
  Homolog annotation: Hit_ID=Q6QP51; Match level="QueryCoverage=9%, HitCoverage=22%, E-value=2e-14, Identity=83%"; Hit description =Putative growth-regulating factor 1
  Subcellular localization annotation: CTP_CleavageSite=25; ConfidenceScore=5.02e-01
MEYTVRHQWGSSSTLGVDSTFGGIRPGLGWQHGRRISTSKEPVGTTPGPSSQGQLSPEDISPARGLGNPTPASVPPVDGPARLRPTKLLFEPSLPLSMLAPLPPAPAHRRAAKGPDSHNEQTPALKVPLQMELRFRPRRYEQPPTLEGLRGDETPGGSPTPAPAAATTTSAPGGRTAAAMTSGQTLLRQGPRLRPYSRGEDKQKAVELEASPWAAPTISSAEKPLPAASVGGGIGNSAEAAQAGEPDMWQLPAARTANPLSPQSLREGAGHRPRRDGPQLGALPSPTLMMNILEAEGGAEAAAPACFSPPSNWWSPSWVTTGKGMQPGFLMKILEAERWLKDQRVKRRTAMQAACNRTKGAHPFDSDASSMQAQAHTSCNRRTGYYVREAAPPLTLVPRLLDCGTSAATQGDPAHDPTVPTEHIDHGDWERGYSERDPSLRRKRAPSPPTDQRFEGWPLGRVRQSPQSTQAPRLLLIRGSKAGPSEGFDSRLRALGLRAHYWQRFEGWPLGGVRQPPQATRAPRPLLIRDS

SEQ ID NO: 83007 - protein, 188 aa, Zea mays
  Coding DNA Sequence Number=SeqID_39632
  Gene Ontology: Mol. function=glutamate-cysteine ligase activity; Biological process=glutathione biosynthetic process
  Homolog annotation: Hit_ID=Q83M14; Match level="QueryCoverage=100%, HitCoverage=100%, E-value=4e-56, Identity=96%"; Hit description =Carboxylate-amine ligase ybdK
  Pfam annotation: Domain name=GCS2; Domain location=13-186; Score= -41.9; E_value=2e-05; Accession=PF04107.4; Description=Glutamate -cysteine ligase family 2(GCS2)
MPLPDFHVSEPFTLGIELEMQVVNPPGYDLSQDSSMLIDAVKNKITAGEVKHDITESMLELATDVCRDINQAAGQFSAMQKVVLQAATDHHLEICGGGTHPFQKWQRQEASSPDPHTGDRRPLTEDTLRLLEKSPLSAHKIVASSAIEALHRQVVSGLNEAQLMRDFVADGGSLIGLVKKHCEIWAGD

SEQ ID NO: 83008 - protein, 229 aa, Zea mays
  Coding DNA Sequence Number=SeqID_39633
LRSCEAKLFIKMALVVIYGSIYPILPWTPAATTDAKLESSTQLCGACLGRVNKVALFMALSTPAVARKHELDGSNKPGQREKAHDWRAFLLYFDQSQKQGLRWSRCDNGGSREVPTQLAMKVGYGSAEELKNNGCQETYESPRKVEAKIEKMKYEHLTREAALAKKELLEEEYKKKFDEAKKELSLENDLAGIGLESDLYAKAIPKTIPNSRNPGFFQNPKDRGGNENG

SEQ ID NO: 83009 - protein, 129 aa, Zea mays
  Coding DNA Sequence Number=SeqID_39634
  Gene Ontology: Mol. function=carboxyl- or carbamoyltransferase activity; Cellular component=ornithine carbamoyltransferase complex; Biological process=amino acid metabolic process
  Homolog annotation: Hit_ID=Q8SA97; Match level="QueryCoverage=99%, HitCoverage=26%, E-value=2e-23, Identity=47%"; Hit description =Ornithine carbamoyltransferase
  Subcellular localization annotation: CTP_CleavageSite=40; ConfidenceScore=5.00e-01
MAPPIDVAGLRPRLGDVEAPPKPRSSMSSMAEVKSEPLGRARRRSSSSGAEPESEPWVERSGLRRLPGLSPSPSPGSGGAEFAVFRDLARVRALGRLYADGGYQLRIRSLEGTPNYGPRQICIFNLDIT

SEQ ID NO: 83010 - protein, 172 aa, Zea mays
  Coding DNA Sequence Number=SeqID_39635
MIELGCCSCRVRRVEERRPTAMLWGSARPCVAAARKEVEASAELEQSALEEHGRRMEGSQRHGSVWGGGACTRRPRPWRLLPHVLGRRDWSLGMAPWLLPCGRQDRERESAGTLGLGQRRGSRMKEEGGRLVDLIKTPLATIAQEWAAFLTGRLQPLVQRAPGRAPGVGVRV

SEQ ID NO: 83011 - protein, 176 aa, Zea mays
  Coding DNA Sequence Number=SeqID_39636
MMRRGCADRRRVARPGEHDAAEGVAAAACCGITSSTPRARRGGNPRGYTNWRRSCCARSTALTTVKARVGARAGHGDLRHGIHREEPQFGQGGSWGVPSAHAQENRGEEKLLSPCLKGERWRGKSCCSCGKGHRKKAGVELLDMGAAGASASFPEQGIGHWGRTSSAQGIERRGWR

SEQ ID NO: 83012 - protein, 156 aa, Zea mays
  Coding DNA Sequence Number=SeqID_39637
MGGRAPTPCSDAQTEGRPRGEGLGEMQASRVLVTREKSTMIELGCCSCRVRRVEERRPAATLWGSARPCATAARREVEGPAELEQSALEEHDCRKEGSQRHGSVWGGGACTRGARPWRLLPHALGRRGWSLGMAPWLLSCGRQDRERESAGTLGPR

SEQ ID NO: 83013 - protein, 106 aa, Zea mays
  Coding DNA Sequence Number=SeqID_39638
  Gene Ontology: Mol. function=carboxyl- or carbamoyltransferase activity; Cellular component=ornithine carbamoyltransferase complex; Biological process=amino acid metabolic process
  Homolog annotation: Hit_ID=Q8SA97; Match level="QueryCoverage=85%, HitCoverage=20%, E-value=2e-20, Identity=53%"; Hit description =Ornithine carbamoyltransferase
MAPPVDVAGLRPRLGDVEAPPKPRSSLSSMAEIESEPLGRARRRLSSSGAEPESEPWVGRSGVRRLPGLSPSPSPGSGGAEFAVFRDLARVRTLGRAERSSPSSGT

SEQ ID NO: 83014 - protein, 166 aa, Zea mays
  Coding DNA Sequence Number=SeqID_39639
  Subcellular localization annotation: CTP_CleavageSite=40; ConfidenceScore=5.47e-01
MAFLFWFRASLRGCPSWFMSSGARAAPGAIAFFGGMTKVVARAVVEGGRLSSTELRHSSSLVLDNVFVSRTLDGEEDPHHNKAFLMMKCGGQISPGSTRRQEGLAKGFGPIISQGHPFVGQGRTAGGMGRCEKEVDSGPGGSLDLSAIHSADPTFPRIATLNNGAN

SEQ ID NO: 83015 - protein, 33 aa, Zea mays
  Coding DNA Sequence Number=SeqID_39640
MRMMVYDYDYGNGKEECVEVDLQEFQDFDEFEE

SEQ ID NO: 83016 - protein, 147 aa, Zea mays
  Coding DNA Sequence Number=SeqID_39641
MHVRLRRGRVQAIRGQAVGTPSTRGPRWYCIGSEQRWPRAVGARSRAGGTAGHAGGNTTIAAGLRTGLCAGSFGSRAPGWHSRGSRASRRRSLGAVSIRRAVQDMERGRGRDAVRRARTLQGRGRAPGRGSGRATGWAGSSRCAPGW

SEQ ID NO: 83017 - protein, 213 aa, Zea mays
  Coding DNA Sequence Number=SeqID_39642
MADNRTSSRREDVLRTRREATARLPLRRADYAGVTQDARNAALRARASDSRASRGHAVHARTEMVLRRQRATLATRRGRTQPRRVHSWSHRGQHGHSRGAAHRAGAQGSALAALGRGHLGGAVEGAGRRGVGHWARSASGARCRTWRGVVVGTRRVGLGCCRGAGGRLVVTWAGRPAGQGPRVVLLAGESRGRRGNEKKKQEKERVTPEFGGY

SEQ ID NO: 83018 - protein, 104 aa, Zea mays
  Coding DNA Sequence Number=SeqID_39643
MAIVACTLRGKRLDGGLSKVLRTRTTIGGPNTMGGSVTPGDRIEGHSIGLVLEVPTYRMQMFGVPPKRGGYGGEGVHAGTLGPYQPFQLVRWSNRSYLRSILST

SEQ ID NO: 83019 - protein, 45 aa, Zea mays
  Coding DNA Sequence Number=SeqID_39644
MWFLHQLGMFAKCVKDYGVSIGPLMSGTLSASYDRMKCCVVSLDN

SEQ ID NO: 83020 - protein, 609 aa, Zea mays
  Coding DNA Sequence Number=SeqID_39645
  Gene Ontology: Mol. function=binding; Cellular component=cytoplasm; Biological process=ubiquitin cycle
  Homolog annotation: Hit_ID=A2XZA0; Match level="QueryCoverage=81%, HitCoverage=26%, E-value=0.0, Identity=68%"; Hit description =Putative uncharacterized protein
  Pfam annotation: Domain name=SEP; Domain location=261-329; Score= -12.6; E_value=0.066; Accession=PF08059.4; Description=SEP domain
  Subcellular localization annotation: CTP_CleavageSite=55; ConfidenceScore=5.25e-01
MLNKAPLSLPPKRNFVDVKDISFASASKRLAITDQIYQSSAFQTPAPTRKGLSVSVDSPTSSHCGWTNFNNAFTENLDNSQGTPGALTTTALPGVNDQQSGNLERMTLDSLVVQYLKHQHRQCPAPVTTLPPLSLLHPHVCPEPSRSLSAPANIAARVGSREISRQFSGIQIPRRDRHFIYSRFKQCRVCRDEASLLTCLTFLGDAARVVAGNHTGELRIFDCNTANLLETQTCHQHLVTMMESTYTGGIEMILTSSLNEVKIWDAFSVSAGPLHTFDDCKSARFNHYGTSFAALSTDTAQREVQLYDVQTYTLATRLPDNTSSSGSGRGYVQPIIHFSPSDTMLLWNGVLWDTRQPNPVHQFDQFTDYCGGGFHPAGNEVILNSEVWDLRKFKLLRSVPSLDQTVIKFNGTGDVIYATLRRNLDDVTSCINARRVRHPLFPAFSTIDAVTYSDIATVQMDRCVLDLATESNDSLIGVVAMDDHQELFSSARLFEVGRKRITDDDSDPEDAGETDDDSDDDDDDSDDGVLAPVLEGGTDSEDISSSSSDDGDEDGGDDDIPSSDGIEDDRFIDERRREFMMDLFGDGWDDDEAYMMGSFSSGDEEGWIM

SEQ ID NO: 83021 - protein, 79 aa, Zea mays
  Coding DNA Sequence Number=SeqID_39646
  Gene Ontology: Mol. function=cysteine-type peptidase activity; Biological process=proteolysis
  Homolog annotation: Hit_ID=Q8S456; Match level="QueryCoverage=75%, HitCoverage=7%, E-value=1e-24, Identity=88%"; Hit description =Putative uncharacterized protein 163K15.6
MRFTILITYITPHLLITNMFRSRSETCYVIAPERPVSAVFNIYVPHIKHLIGNKFQCLPSHHRPMFQSMFDAHDKEVDK

SEQ ID NO: 83022 - protein, 86 aa, Zea mays
  Coding DNA Sequence Number=SeqID_39647
MGQVDAWVIQPFDLETVSHVVKLTSFVEMLQTSHSGNNHTRKIHGGRPPAGEERPVARWRPPTGDVADVPHSEEEWAVEAANGGGR

SEQ ID NO: 83023 - protein, 291 aa, Zea mays
  Coding DNA Sequence Number=SeqID_39648
  Homolog annotation: Hit_ID=Q7EZ54; Match level="QueryCoverage=29%, HitCoverage=12%, E-value=1e-13, Identity=48%"; Hit description =Putative uncharacterized protein OSJNBa0036M16.113
MTQQSGEMEMEHRLRMSLSKGAHTTLSFEFGEENSNVFADLKDDNGSDSGINFDYNDPDMPNNIDVDPDVSTYPDEIIAATPKSTHGTHDGIDTHESLDDDFCWLHLDYLVFPYLTRSIRYFRVTVIPADKLYYYYVSTVGVHFARCTFCRSAHARGRTLPRTFHPPRSHSRYSRRPAAHSILRAATAVIPSSPRQSAPPHLTPLFPALDASLPQRPASPAHPSRPPSPLPEAASSAAGLRKGFHPAARARVSIPRSHPALLVADSIAQSVGVLGPTTHPGMPLKRVDVGG

SEQ ID NO: 83024 - protein, 52 aa, Zea mays
  Coding DNA Sequence Number=SeqID_39649
METVTDEKSEYTIQLILQTEGGAGGAKFSQFGADLSRSIKCKTHFPLTVADT

SEQ ID NO: 83025 - protein, 151 aa, Zea mays
  Coding DNA Sequence Number=SeqID_39650
MGQLRHPKLVELIVYCCEDDHRKVAVFCCCWFLRSITAIHLACSALCAYPFIEALWVSAKELLGIKSDDDEEQPSAMTKGPTPIHQLSRTSCATNLYPSSEWEQMRKDNYKTVNVEESLHKKCFSEHFQDEEVVAAFCAVVNAKQLSVCTL

SEQ ID NO: 83026 - protein, 74 aa, Zea mays
  Coding DNA Sequence Number=SeqID_39651
MLLRPDVIVVLLATVLLLPRRGALLFYLPGISSGETDGVVVTSGEAEFCPRWETLREKPHFKWYLGYFPQGFRP

SEQ ID NO: 83027 - protein, 80 aa, Zea mays
  Coding DNA Sequence Number=SeqID_39652
MAVSVMPVASGTIELLSTNGYLSLPYEATADASLGYRGSPIAARPFALAPRALILRNSSVQVPYANGWDSPVWFRSISVA

SEQ ID NO: 83028 - protein, 916 aa, Zea mays
  Coding DNA Sequence Number=SeqID_39653
  Gene Ontology: Mol. function=binding; Cellular component=cellular _component; Biological process=biological_process
  Homolog annotation: Hit_ID=A2XZA0; Match level="QueryCoverage=98%, HitCoverage=48%, E-value=1e-176, Identity=61%"; Hit description =Putative uncharacterized protein
MAESEDATAAEPGSGPPHEDEDALLARAHTVISRIIDRELDPNPRLLHTLATMCELHEARYLELRSADTMFNSTNTRTAFTIGKLANLLRDNDEFYELVFCKFLSDTSYSVAVRAATARLLLSCHPAWTPPYPHVFEDSIIDNIKKWVTEDPEASNECKWKYLGNNKPTDAEMLRTYGIGLLAMALCSSGQLIEDVLTLGVSAKLMRYLRIRVLGDASSSQRDANHPQDTKHPWGGDDSRGKSRLSQDGSRLDGTRVGYGMLTNPTAEKNNEPCVGMMQAYGARSLDDSFASLDDSDVPEADWTNDRSYSTRVCDTKSKHGERNSVTRLLKDEEVSENGELLKRKLNRAPSRLRVKGKAGDSLPECEMTPLSPTSGLRIGGQATRDRNVARVDDPKEATDVNNRLFNTISKEEYEDRFRDCIIGLKDISDIVLKAVRAAEAEARSANAPDEAVKAAGDAAAELVKFAALEVWKSENNSDAVVVVAEKAASAVVEAALSISVSRSANQVGEERAMEEAVQTSEDQDLENFVISDKAQLLQLRENYSIQCLQILGEYVEALGPVLHEKGVDVCLTLLQRSMKNQEGCDHFAQLLDVLKLVCALAAHRKFAALFVDRGGIQKIVSMPRVTQTYMGLSACLFTFGSLQSTIERVCALSSDTLDSVVELALLLLECPQDLARKNVAIFFAAAFVFKAVLDLFDARNGMQKLLDILCGCASGRSGSNSGGAGSSNVNQGNDRSPAEVLTASEKQVAYHTCVALRQYFRAHLLQLVDSIRPSKSIRSIARNTSSARAGCKPFDISNEAMDAIFCQIQRDRKLGLALVRACWLALDKFVASNGHMTMLELCKAHGDRYLRDLTQYAIGVLHIITLMPQPHVRKSIVQGTLSNNRAGMAVLLDTVKSLDYIDHEVQLHFENMNMN

SEQ ID NO: 83029 - protein, 47 aa, Zea mays
  Coding DNA Sequence Number=SeqID_39654
MVTSGEAEFRSRWETLREKPRFKRSQGKKKTPAVYDMWAQGQCECAH

SEQ ID NO: 83030 - protein, 98 aa, Zea mays
  Coding DNA Sequence Number=SeqID_39655
  Gene Ontology: Mol. function=carboxyl- or carbamoyltransferase activity; Cellular component=ornithine carbamoyltransferase complex; Biological process=amino acid metabolic process
  Homolog annotation: Hit_ID=Q8SA97; Match level="QueryCoverage=88%, HitCoverage=21%, E-value=5e-22, Identity=58%"; Hit description =Ornithine carbamoyltransferase
MALPVDVAGLRPRLGDVEAPPKPRSSLSSMAEVESEPLGRARRRSFGRGQGGVRALGSGEADPSPSPGSGGTEFAVFRDLARVRALGRAERSSSSSET

SEQ ID NO: 83031 - protein, 40 aa, Zea mays
  Coding DNA Sequence Number=SeqID_39656
AISAAPIQRSSNPAPLQSSAVPIQLTSFNLPALEPDSRSS

SEQ ID NO: 83032 - protein, 328 aa, Zea mays
  Coding DNA Sequence Number=SeqID_39657
  Gene Ontology: Mol. function=DNA binding; Cellular component=nucleus; Biological process=regulation of transcription
  Homolog annotation: Hit_ID=Q69U51; Match level="QueryCoverage=98%, HitCoverage=92%, E-value=6e-79, Identity=53%"; Hit description =Putative OsNAC7 protein
  Pfam annotation: Domain name=NAM; Domain location=10-152; Score =274.4; E_value=2.3e-79; Accession=PF02365.6; Description=No apical meristem (NAM) protein
MDQAAEESCVPPGFRFHPTEEELVGYYLARKVASQRIDLDIIQEVDLYRIEPWDLQERCKPQHAGGGHDEQTQEWYFFSYKDRKYPSGTRTNRATAAGFWKATGRDKPVLSSSTRTTRCSRVIGMRKTLVFYKGRAPNGRKSDWIMHEYRLQSNEHAPAQASSFILPCEEGWVVCRAFQKPIPNQRPFFPTSYAGYYDHNLSTTARLHVDGDRHFLAGSSAAAAALLQQPPGLAGSSFPQLYSDDDLESKKQLLSIPPLESPTAMACCSDAGGYAQRSSYDEHEMMMMMIQQGGGGGEQAAAAIDWNFLDSLLSATSQLHGPSGSLLQ

SEQ ID NO: 83033 - protein, 573 aa, Zea mays
  Coding DNA Sequence Number=SeqID_39658
  Gene Ontology: Mol. function=DNA binding; Cellular component =extrachromosomal circular DNA; Biological process=DNA recombination
  Homolog annotation: Hit_ID=P0A0C5; Match level="QueryCoverage=68%, HitCoverage=93%, E-value=0.0, Identity=93%"; Hit description=Plasmid recombination enzyme type 2
  Pfam annotation: Domain name=Mob_Pre; Domain location=1-175; Score =301.6; E_value=1.5e-87; Accession=PF01076.10; Description=Plasmid recombination enzyme
MQFHNQRERKSRTNDDIDHERTRENYDLKNDKNIDYNERVKEIIESQKTGTRKTRKDAVLVNELLVTSDRDFFEQLDPGEQKRFFEESYKLFSERYGKQNIAYATVHNDEQTPHMHLGVVPMRDGKLQGKNVFNRQELLWLQDKFPEHMKKQGFELKRGERGSDRKHIETAKFKKQTLEKEIDFLEKNLAVKKDEWTAYSDKVKSDLEVPAKRHMKSVEVPTGEKSMFGLGKEIMKTEKKPTKNVVISERDYKNLVTAARDNDRLKQHVRNLMSTDMAREYKKLSKEHGQVKEKYSGLVERFNENVNDYNELLEENKSLKSKISDLKRDVSLIYESTKEFLKERTDGLKAFKNVFKGFVDKDTDFMTDDEEKNLKRLSDLEEGLHRKSVLNEMVLNVSLPDIANDFNKPPASTNWVNTAFMLTFSIGTAVYGKLSDQLGIKSVLSFLIFVKHIRKVTDPFVDPGLGKNIPFMIGVLCGGIIFGTVAGFVSMVPYMMKDVHQLSTAEIGSVIIFPGTMSVIIFGYIGGILVDRRGGLSFTKTVISTIVSSSLKQQEAGAGMSLLNFTSFLSEGT

SEQ ID NO: 83034 - protein, 427 aa, Zea mays
  Coding DNA Sequence Number=SeqID_39659
MAGEHREDKEGEYFVWFGHGGGLTPSGKLLSRPAAHLTTPAATPSRPSLPWRPGPQRPTRPRRHVALRQSQAPSRAPLPRLPSGGQAPGPSLAPSPSRQQPASPLPRTTTSRPVFRLQPAAPLRRCPERSSYACAAATSDRPQAATATTSLRPTTVPNLRRPRALGPTDVPELCLRACAVCRRTLRFIFYSTISTGYPIPNGHPVGTGPIFYPIDLVDPNTTRPAAIPIRKKLEYVWKEYRENGTEKCSMAVYLGESRNYPNHPPFQVTFTGHRFPDTCQNVARKALRQLCQNYSREVFETPLRYFPPSNKNTPTWRKRLQALSGRDPTEDDPTIVYMAGYLHTLDNHYDDLLSHCTHLNSWVESLEQQVKELKKEKASLQESLEIAEGEEANTCETYRTLKMDYDKKLKKLAPTKKIQKRTKSQGC

SEQ ID NO: 83035 - protein, 380 aa, Zea mays
  Coding DNA Sequence Number=SeqID_39660
MTPAPDGRAAAAQASGWALLQSCPRPHRRSRGEDKCEEPEARGADGGGDPVGDGDFSSRLRLGTDGRAHRLPGRSPLKSSRRGSRPPTGGAARSQANGPDTLEVTTPAVDQPRVVEVRAARRASERPLPRTPRERVTREPAWEVERRLSPAPTPARMMNILEAEGGTKIAARLASPHPGTGGHRLGQLHRHLRHRRASSVAEPMPRLEATQRTTQRRQPGAAVNAAESGLAVMTVAGEREQRSRRQPGSRPIQGQQESLLSRREDGAPVIRPSNGSRTRNGRPANHSPRRINSAAGQAAFLAGEAGDASPSPDRERGIPRKGSFPVKEPGSEPPLTDQRFEGWPSAGFNSRLRSRGPYTHYWLAPEGFTVASDADRGMTR

SEQ ID NO: 83036 - protein, 190 aa, Zea mays
  Coding DNA Sequence Number=SeqID_39661
  Subcellular localization annotation: CTP_CleavageSite=25; ConfidenceScore=5.06e-01
MSSSSLMRRVFPPSKPRMGGIRRLFASSLEERNSAGVGTFQPSFGFKDFHHAARSLPPAGGHPRRFKDVHHPRWGGGRAEPALYLPRGFASHPFPRRSGERALTGPAGGPDFDNAGLVDGGRRHLQRVGPVGLAPGGPSCRRAAAALCAREDHPSCRALLGRRSCSGVVLPLHRDGAFTRRSVPHSPGRI

SEQ ID NO: 83037 - protein, 417 aa, Zea mays
  Coding DNA Sequence Number=SeqID_39662
  Gene Ontology: Mol. function=phosphoprotein phosphatase activity; Cellular component=endoplasmic reticulum
  Homolog annotation: Hit_ID=Q6K5U2; Match level="QueryCoverage=92%, HitCoverage=90%, E-value=9e-98, Identity=52%"; Hit description =Reticulon-like
  Pfam annotation: Domain name=Reticulon; Domain location=209-369; Score=-26.1; E_value=5.2e-05; Accession=PF02453.8; Description =Reticulon
MDTEPSSPAPAAAVNLPPPPYHHCPAPADEVAATPQPKPKQSTAGPGLRTPSPPPSVQVSGYSLHDLLLLSPPPPSSRRHRSSTRGAAGTSVDESLEIVAVAGTPTPPRRRRRGGAEQCVTPVLASPRNARRARRRLEKDVEAVEDAGRRARRRKSTRAAPKAAAAADKAEAALNEEDITMAVVPACPAATCGTDFLEQSDLEGLWERIVELVMWRNMAKSALCPISALCHLGVMILGLAFFKDSVPQRPQVENERRFRLTEEDMLRASQAVLPFANSMISTAQVIFSGEPSMTLKVLPLLLFGAKYGGLVTVWRLLAAGFFISFTVPKLYSCYSSRIHKRVEILRDQALEAWKSCPRKKLVAAIIVTMFWNMFSVKTRVMAAFVSLVILRYNKKHHKAAEVGSYRDEQGQTMEMDS

SEQ ID NO: 83038 - protein, 271 aa, Zea mays
  Coding DNA Sequence Number=SeqID_39663
MGEGWLSLLKWLPPPKLSKVIVEDVLITDGDGDDDDAGGSSSHNMELSEEPEPEGWIARPITRDAARGCHFHNVLDTLLRRAFDRHTWSIEYRCVVYQHHHGLYPDQWEATCLVRRPDDDLQGAEAFLEHYSITERDTAEAAMQDAARQALSRYCPLFSGVADDLDMKYYPRCSTDSTGSVIVSPIGEGNPRLNSMVNLAAVLNTELDHALDELGKVRAEVAELRAECATHHYLDGGSPAPIGIQHPYRSPARGRFDYGTPDSRTRIDLDP

SEQ ID NO: 83039 - protein, 58 aa, Zea mays
  Coding DNA Sequence Number=SeqID_39664
MGKRGSGGVGSPRYHGDVFLAKKFADEDMMLNSMDASLVIPPVIFLWMDVLVSLYFDE

SEQ ID NO: 83040 - protein, 129 aa, Zea mays
  Coding DNA Sequence Number=SeqID_39665
  Pfam annotation: Domain name=zf-CCHC; Domain location=13-30; Score =9.3; E_value=0.06; Accession=PF00098.14; Description=Zinc knuckle
MKHGKSQEITARKACYLCGREDHYLRNYLEKSSVPNTPEIKLSQSPDVEYEQKCIETSTNIVKKNKRNRKMFGYMSSPPRPQAKAPNRRTNPDSAIWDTDTQSSLITCWSSKVDPQRSQSKRCLFLLQE

SEQ ID NO: 83041 - protein, 273 aa, Zea mays
  Coding DNA Sequence Number=SeqID_39666
  Gene Ontology: Mol. function=ATP binding
  Homolog annotation: Hit_ID=Q6K8H1; Match level="QueryCoverage=58%, HitCoverage=17%, E-value=7e-35, Identity=54%"; Hit description=ATP -binding region, ATPase-like domain-containing protein-like
MRHFVANVGEDDDFIDDDVGGVLIGRVGGALVGVPLPPDMLPFPSTFSTPRLELQAAAAHYTNGGGLAKKAPSLQFALMAPTAVDPGPSDHLLAPAPAAMAGGGDGGDGQMEVVFNVSSSDTDSDDLGAGGGKRSRPVAGQGGGRDREDKKARILAAAATVPAGFLEPLSPVRLLPPPAPGRSVTKQFWKAGDYVGKPDHLLAVVAAQHSVVGMQIFCHHTSGLKVGVSYDSGMDHVRVHPKFLHSNATSHKWALGAFAELLDNSLDEVCVLD

SEQ ID NO: 83042 - protein, 186 aa, Zea mays
  Coding DNA Sequence Number=SeqID_39667
  Subcellular localization annotation: CTP_CleavageSite=63; ConfidenceScore=5.57e-01
MAQGHISLSQPRPLHPINNSRLVGVVVAAPFSTGASGASAVADPPVATAVLPMLVPAMLPLPQAATTTTIPGRDPFTCGQGHDRQHLGHRPQGLLLQLNRLRPFLLVLPANGQAPGGPLRHMGRPLTTLALLHPLLVGISNNSPSISKPPLFNIPSYESGSSAQNTQYKGLLRFSSRCGGPLGEVP

SEQ ID NO: 83043 - protein, 110 aa, Zea mays
  Coding DNA Sequence Number=SeqID_39668
  Gene Ontology: Mol. function=ATP binding
  Homolog annotation: Hit_ID=A2XRT5; Match level="QueryCoverage=93%, HitCoverage=18%, E-value=6e-27, Identity=47%"; Hit description =Putative uncharacterized protein
MTLATMHFGSIGEQGTRIIIYNLWEDDEGELELDFDADANDIQIRGVNRDQNKIKKANQFPNSKHFFTYRHSLRVAAKVTIGFVKDARQHIDIQGFNVYHKNRLIKVYWK

SEQ ID NO: 83044 - protein, 150 aa, Zea mays
  Coding DNA Sequence Number=SeqID_39669
MYDCTLHICLTPARSRSGRVPDAKTRFELIEELYSKAFGHDVRELMRRWDMKHAHLSKSNLLTDEVNVDLDVLSAVVVNGIGYHVDNSHVVTVDDRCRSNRHVEFLKKLSQLATLSNSVGHDLVLSLHAGPGDGSEREIGLHLFPNDFGG

SEQ ID NO: 83045 - protein, 140 aa, Zea mays
  Coding DNA Sequence Number=SeqID_39670
MAPPVDVAGPRPRLGDVEAPPRSRSSPSSVAEVESEPLGWARRRPLAEVESEPLGRARRRPLAEARAEFESWGRAKRSSSSSGAEPKSEPWVGRSGIRRLLGLSPSSSPGSSGTKFAVFRGLARVRALGLAERSSLSSGA

SEQ ID NO: 83046 - protein, 125 aa, Zea mays
  Coding DNA Sequence Number=SeqID_39671
  Gene Ontology: Mol. function=carboxyl- or carbamoyltransferase activity; Cellular component=ornithine carbamoyltransferase complex; Biological process=amino acid metabolic process
  Homolog annotation: Hit_ID=Q8SA97; Match level="QueryCoverage=100%, HitCoverage=20%, E-value=4e-14, Identity=41%"; Hit description =Ornithine carbamoyltransferase
MAPPVDVVGPRPRLGDVEAPPRSRSSPSSVAEVESEPLGRARRRPLAEVESSPLGRARRRPLAEARVEFESWGRAKRSSSSSGAEPKSEPWVGRSGIRCLLGLSPSPSPGSGGTEFAVFRGLARV

SEQ ID NO: 83047 - protein, 484 aa, Zea mays
  Coding DNA Sequence Number=SeqID_39672
  Gene Ontology: Mol. function=Rab GDP-dissociation inhibitor activity; Cellular component=cell surface; Biological process=regulation of GTPase activity
  Homolog annotation: Hit_ID=Q69EY5; Match level="QueryCoverage=96%, HitCoverage=96%, E-value=0.0, Identity=84%"; Hit description=GDP dissociation inhibitor protein
  Pfam annotation: Domain name=GDI; Domain location=1-476; Score=953.8; E_value=7e-284; Accession=PF00996.9; Description=GDP dissociation inhibitor
MDVEYDVIVLGTGLKECILSGLLSVDRLKVLHMDRNDYYGGDSTSLNLNQLWKRFKGEETPPAHIGASRDYNVDMVPKFMMANGTLVRVLIHTGVTKYMSFKAVDGSYVFNKGKIHKVPSTDMEALKSPLMGLFEKRRAGKFFLYVQDYKENDPSTHKGYNLTKLTTKELISKYGLDDNTIDFIGHAVALHRDDSYLTEPAIDTVKRMKASLYSDILKISQHNSKLYAESVARFQGGSPYIYPLYGLGELPQGFARLSAVYGGTYMLSKPECKVEFDDEGKVCGVTSEGETAKCKKVVCDPSYLPDKVKKIGKVFRAIAIMSHPIPNTAESHSVQIILPQKQLGRRSDMQVFLISSPRFIHYLLVFHLHISCVSNVGSNLHVCIPGKFIAFVSAQAETDNPEKELKPGIDLLGKVDELFIDIYDRYEPTNDSSADNCFISTSYDATTHFESTVMDVLSLYTKITGKTVDLSVDLSAASAAEDDM

SEQ ID NO: 83048 - protein, 337 aa, Zea mays
  Coding DNA Sequence Number=SeqID_39673
  Homolog annotation: Hit_ID=Q6QP51; Match level="QueryCoverage=53%, HitCoverage=75%, E-value=4e-14, Identity=36%"; Hit description =Putative growth-regulating factor 1
MQAACNYTKGAQPFDFGASSMDAQAHTSWTGKGDTPKGILLREGSGPQAPLLIRGSKAGSSEGFDSHLRALGLHAYYWSEVRRLAPRKGSTAASGHSGSMPTTDQGFVGWPPDGFDSRPRARRVRDDSGYVRYITKARATLPRNGRPRQIHASPEGLLKQWAHLRLARGPARAGFTEKQPWPDRLASRPDRRSIQCKDRLTPYPDARFPVDKAEESPPRPTPGLGLDLASDDNLRLARPLGSDSTSPWTMISASPDPRGSDSASTPEDGLRLAQPQGSDSTSTLEEGLRLARPLGLGLSLDLGGVTTLLGPTTPQGEAIITLPLASPGYGEQDRRPI

SEQ ID NO: 83049 - protein, 243 aa, Zea mays
  Coding DNA Sequence Number=SeqID_39674
MILSRGSIKPQMLAYFTLWSPKGQGFTEKQPWPDRLASRPDRRSIQCKDHLTPYPDALFPVDKAEESPPCPTPGLGLDLASDDNLRLARPLGSDSTLPRTMIFASPDPRGLDSASTPEDGLRLARPQGSDSTSTPEEVLRLARPPGLRLSLDLGGVTTSLGPTTPQGEAIITLPLASPGYGEQDRRPIWLAPVKQVMMAPRVLHDNGGSQPLTEARIRQQGSDSPDNCASTGLKRSSDGHDAT

SEQ ID NO: 83050 - protein, 80 aa, Zea mays
  Coding DNA Sequence Number=SeqID_39675
  Gene Ontology: Mol. function=nucleotide binding; Cellular component =plasma membrane; Biological process=small GTPase mediated signal transduction
  Homolog annotation: Hit_ID=A7QC87; Match level="QueryCoverage=77%, HitCoverage=26%, E-value=7e-19, Identity=80%"; Hit description =Chromosome undetermined scaffold_77, whole genome shotgun sequence
  Pfam annotation: Domain name=Ras; Domain location=20-78; Score=-80.1; E_value=0.0025; Accession=PF00071.13; Description=Ras family
MARRPASWEQGGDEYDYLFKVVLIGDSGVGKSNLLSRFTKNTFALDSKSTIGVEFATRTLQVILVKCTYICSGSSIPDLD

SEQ ID NO: 83051 - protein, 73 aa, Zea mays
  Coding DNA Sequence Number=SeqID_39676
MAPRSLLAFPLGNNFEIKEISPDNTGKMEGPQTLLSLGEVLREERRARGSFWPVKGLHKAVLRLACVERDMRR

SEQ ID NO: 83052 - protein, 98 aa, Zea mays
  Coding DNA Sequence Number=SeqID_39677
MDGMPTTLTVGDSALLRDKSTRYTWEDHHGEPKRQNAVRAGKPRSGAAMVLPAMQISRREYAEGSQERVQHRRGGKVSTGHGTLYTAVRVLAVGINPG

SEQ ID NO: 83053 - protein, 173 aa, Zea mays
  Coding DNA Sequence Number=SeqID_39678
MAVMGSTFEKMYLCQDQTNVVLMIEDLLTGHMPHHGERARDSHRIAELSAEVNRLQQGIVERDTAIDWVVNSRSFALDCKANALARVAELSAALDNLQAYCNTLQEEVHVLYDRLHPNVPPEVAAIGAGTSRAASGGPDGELDLFGAPPSMNLTDERSPEAGSGAGATKDKDN

SEQ ID NO: 83054 - protein, 337 aa, Zea mays
  Coding DNA Sequence Number=SeqID_39679
MVGTSAVTARRQPGSVEHCTIQEMVDGVTWPTTLPPGWTVEWDVAPMNSPTPASGGDTRFSSDFLSRDGFPSILWEVLNSAGYPTPPLYTVQLYEEHRVPRCRVWLTLEAHPLQPGWRSLDSETVGLRTDDIVEAAAMKTLTTFCGYHPLEMVMHPLGLFPAEKKDDPMWCNRVSHVKDVWAMYPYLVGRVTVQCMSALYRLQALQSDAMALLANTAQTAKLTLDSREDFVVDLSTELVEKDLQVERLSQRITTLEQQVEIRDNTIDVLENQLHDVQRELEEENDHLDMHHLEMEANEAGSEGEEAPEELGLVPGAHGTTSVMPPSPVSSVASTAQG

SEQ ID NO: 83055 - protein, 186 aa, Zea mays
  Coding DNA Sequence Number=SeqID_39680
  Homolog annotation: Hit_ID=A2YGC2; Match level="QueryCoverage=66%, HitCoverage=53%, E-value=2e-09, Identity=34%"; Hit description =Putative uncharacterized protein
MNSTPVLFTLNWNCIRAFAFKQAKGDPDGDDDGGSSSHSTELSEEQESEGWHSREKYLDRWEPTYLVRLPEDDLRGAESCSEHYAIAERDTAEASMQDAARHALSQYCSLFGRVADGLNLKYYHRRSTGSTGSVIVSPIGECNPRLSSTINLVIMLNTELDHAFEELSRARAEIAELRAKRARRRH

SEQ ID NO: 83056 - protein, 68 aa, Zea mays
  Coding DNA Sequence Number=SeqID_39681
MGKPVPSLLMLLLSQDQGSPPWLVFQSWGRQILDGRLWCWILGYLLSKSVLRHEDVLSVSEVAIYQMQ

SEQ ID NO: 83057 - protein, 141 aa, Zea mays
  Coding DNA Sequence Number=SeqID_39682
MGKSNKRKREPTPPSEDFGDSEYSEEEFFSESERSPAPVSPPASSDDSDDSQGIAAEVWTYIRAVERSGLEGSDESEYSSDEEDSDGGGEDEDDDDDDDGGDSDGSGDGGGSGDGGRGSTKSGSSKGSTKGGGGSRGRASG

SEQ ID NO: 83058 - protein, 25 aa, Zea mays
  Coding DNA Sequence Number=SeqID_39683
MGVDTSLEVSLCSADGLDSRVGREL

SEQ ID NO: 83059 - protein, 847 aa, Zea mays
  Coding DNA Sequence Number=SeqID_39684
MPSSSSSSDTTPPAAASSEETLSSVMVEELRAGDSVDFGVSRMTSARVEDMQRLGYFGGGVARAPGTEEIPEPEVAEEDADEGALRCAAGQSSGRDLVEEFVAYGVWPLAHGWVLGEVCPRQMPFHGGRVVRSPAFALNLRNRDPAAFVRDAEDGVVRLVGRYVPRTEGQRSFDIRGSNDRLNRVFELNQLPYDGYPGQDEADRRGKKPAVETGDDPAPAAAPPSKKRKLGTAMGGIGVSDSFARDLMRTCAAPGERMSSPELRESSARMLRVTGGCWPRNVPIPCAAEEDCFTSRMVHQWRVFPYGRNIGAVVWAVMDKDRQGAAQKRQATVRIHEARPKRQRGNVKAAASGGGKPPLAAKAGASAPSKAPEATAGAGGSRPTKVVPAASGVAEASKAARTSLPPGKRVADFGTDINVDDYLGGSDEGQLAIVAPAAAIATAAQAPKARGEILGAGGEVPALALVRDEAGAATRRLKGVTEALSQATEALSQVADFTSRTASGALTAALSAEVERLRTQHADAVREKSASDSKCRNLTDKVAALEREKVDLRRQLAAERREANEAIAKEQAAQADAKLARTEGNLAKELAEQLQGRLTALESHAKEAEAAMRAEAERTRTQLMDTYRELGARTGDFEVPDREPGLRCLQWAQEELLELPTVVGGGGLMSYASLVTCEGAMNALSREGCRHFEAFDQVDEDFERDIYKVEDPVVKESVGALYDRMWGLYGREVVRERAEAARAQAERGEWVDDFGALDSALPDLGSTFAEAVTGVALEPTPETAAIATAAPPSAATGEGGADAPAAAAPSAEGSVAEAAETAAEAAAEPMAEPTAEASAAPGPSQVA

SEQ ID NO: 83060 - protein, 106 aa, Zea mays
  Coding DNA Sequence Number=SeqID_39685
MELSGNRRPSGLGSPDCPVYTGQCPVHHRTVSGAPEDSSSNSPPSGISRGDSTIIHRTVGLRNSPALGNSNGLSAKIHRTVRGAPDCPVRLRSNDYLRANGSLPRI

SEQ ID NO: 83061 - protein, 644 aa, Zea mays
  Coding DNA Sequence Number=SeqID_39686
  Gene Ontology: Mol. function=catalytic activity; Cellular component =peroxisome; Biological process=metabolic process
  Homolog annotation: Hit_ID=Q67W82; Match level="QueryCoverage=87%, HitCoverage=100%, E-value=0.0, Identity=75%"; Hit description =Putative 4-coumarate--CoA ligase 4CL2
  Pfam annotation: Domain name=AMP-binding; Domain location=143-561; Score=397.0; E_value=2.8e-116; Accession=PF00501.19; Description=AMP- binding enzyme
MPAVDTLELVTGSPTDIAAPSVICPPPTLPPRRGGIITRLPPQFRHSSAQASSGAEQSLEIPPTICPPADAEPIASPAARTMGSVAEDSTAAAAAAASVVFRSKLPDIEIPRNLSLQAYCFERLPEVSSRPCLIDGQTGAVHTYAEVDRLSRSAAAALRGLGVGRGDVVMALLRNCPEFALVFLGAARLGAATTTANPFYTPHEIHRQAAAAGARVVVTEACAVDKVRGFAAERGVPVVAVDGAFDGCLELRALVDAAEPLAADEEVGPDDVVALPYSSGTTGMPKGVMLTHRSLVTSVAQQVDGENPNLYFSKDDVVLCVLPLFHIYSLNSVLLAGLRAGCAIVIMRKFEIGALVELVRAHGVTVAPFVPPIVVEIAKSPRVGAADLASIRMVMSGAAPMGKDLQDAFMAKIPNAVLGQTLGGRVPPRMPGYGMTEAGPVLAMCLAFAKEPFEVKSGSCGTVVRNAELKIVDPDTSASLGRNQPGEICIRGEQIMKEATKNTIDKDGWLHTGDIGYVDDDDEIFIVDRLKEIIKYKGFQVPPAELEALLITHPEIKDAAVVSMKDEVAGEVPVAFIIRSEGSEISENEIKQFVAKEVVFYKRINRVFFTDSIPKNPSGKILRKDLRARLAAGIPSSDNTQSKS

SEQ ID NO: 83062 - protein, 146 aa, Zea mays
  Coding DNA Sequence Number=SeqID_39687
MGKNNKRKREPTPPSEDFGDSEYSEEEFSSESEGSPAPIPLRESSDDSDDSQGLAAEVWTYIRAVERSGLEGSDESEYSSDEEDSSEEDSGGDGEDDDDDDDEGGGGGGGDGGGRGGGSGSKDGDGGSSRGGNRGGGGRGSNRASG

SEQ ID NO: 83063 - protein, 151 aa, Zea mays
  Coding DNA Sequence Number=SeqID_39688
MADSKDLNSASPNSDTRLTNLSATEHENLEDDMKKMDEEIQRQQDQMLKVAKKWYLSHFKVDRHQKVVKEREIDADYMSSVLQQLPTIGDARSRTVSPTVAKWFMPVDPGDICPPQAPDLWVDFERSAPSWLEMVIHGVHRSVAPELRVDF

SEQ ID NO: 83064 - protein, 171 aa, Zea mays
  Coding DNA Sequence Number=SeqID_39689
  Homolog annotation: Hit_ID=Q6QP51; Match level="QueryCoverage=18%, HitCoverage=14%, E-value=2e-07, Identity=81%"; Hit description =Putative growth-regulating factor 1
MPIYFAGRPSPGPRKNDLTIYWALGPFVRSFTLLVDPGDIYPPHTWATARPHEGTTRPAEASRKALRPQRSQTTPPRPRGLHPAGNSASPDLRPRPRKEVSASPDPRARPQPRHRKVVSASPDPRARPQPRPRKVVSASPDPGLGLRRSLRLARPWARTDRVTGDTSLPYP

SEQ ID NO: 83065 - protein, 237 aa, Zea mays
  Coding DNA Sequence Number=SeqID_39690
  Gene Ontology: Mol. function=binding; Cellular component=oxygen evolving complex; Biological process=photosynthesis
  Homolog annotation: Hit_ID=Q337M8; Match level="QueryCoverage=100%, HitCoverage=53%, E-value=1e-79, Identity=69%"; Hit description =Tetratricopeptide repeat, putative, expressed
  Pfam annotation: Domain name=TPR_1; Domain location=114-147; Score =8.6; E_value=0.49; Accession=PF00515.19; Description=Tetratricopeptid e repeat
  Pfam annotation: Domain name=TPR_1; Domain location=152-185; Score =37.6; E_value=4.6e-08; Accession=PF00515.19; Description =Tetratricopeptide repeat
  Pfam annotation: Domain name=TPR_1; Domain location=186-219; Score =41.9; E_value=2.2e-09; Accession=PF00515.19; Description =Tetratricopeptide repeat
  Pfam annotation: Domain name=TPR_2; Domain location=114-147; Score =13.2; E_value=0.67; Accession=PF07719.8; Description=Tetratricopeptid e repeat
  Pfam annotation: Domain name=TPR_2; Domain location=152-185; Score =34.7; E_value=3.3e-07; Accession=PF07719.8; Description =Tetratricopeptide repeat
  Pfam annotation: Domain name=TPR_2; Domain location=186-219; Score =38.4; E_value=2.6e-08; Accession=PF07719.8; Description =Tetratricopeptide repeat
  Pfam module annotation: Pfam domain module=TPR_1::TPR_1::TPR_1::TPR _2::TPR_2::TPR_2; Domain location=114-147::152-185::186-219::114 -147::152-185::186-219
MAWLSTAQLAQSSVGEKLNMVYEVGELFELGIQLSYLLILIGLLGAGTFFVIRQVLVRRELDLSAKELQTPEHLEQEHPPVNGALDAGGWRPGAGRRQRGQRSREQVRSGDASATEYFELGAVMLRRKFYPAAIKYLQQAIDKWDRDEQDLAQVYNALGVSYKRENKLDKAIQQFQKAVELQPGYVTAWNNLGDAYEQQKDLKSALKAFEEVLLFDPNNKVARPRVDDLRPRVSMYK

SEQ ID NO: 83066 - protein, 359 aa, Zea mays
  Coding DNA Sequence Number=SeqID_39691
  Gene Ontology: Mol. function=glutamate-ammonia ligase activity; Biological process=nitrogen compound metabolic process
  Homolog annotation: Hit_ID=Q5MD07; Match level="QueryCoverage=23%, HitCoverage=22%, E-value=2e-30, Identity=56%"; Hit description =Glutamine synthetase
MELRNRLTELKRKTAVDKTEVEQASSDLKAKTVPLNLALVTLKKRRADAVAMHTNAMKVAQMNLPTPPPKPNHSGAVPRRADLPRSAPAAARRGDCAVVALALSRAGLRGSLRAAGPVHGGEARASRRAQAEGQNCSGDDTEARGHGFASEAVNGSGGALRAAAAYMEAGAPPLIWMILDLVLTYDRIQPDTWSGAYLCWGKENKEAPLRTACPPESNPSDHSSKLKRLPQNLQESVESLSADKVLHELIGDKLVTTAIVIRKIMFDLTRKYCCSNIYLERVLGERTYIDLRNCSGDDTEARGRSVASEAVNGSGGALQAAVAYMEAGAPPRGWRKGIRAEWSGKFGGAQHALSGFGIG

SEQ ID NO: 83067 - protein, 321 aa, Zea mays
  Coding DNA Sequence Number=SeqID_39692
MHRALPPSEPPDGEHSRRFRLALVGGTQLRGSWYLSAIVRLQGFSSGSPAASPRRWSPETVTTSLMVGRSKPGCDLSPALSFKDLHHPGWVGGRAEPELYLPRGFVGHLLPQHSRERALTGLAGGSDFDNAGLADGGRRQLQRVGLAGSAGSGPTPSAPSRRESGRRAARTGGPPKTSRAARAAFVFLGCPAFAPMASVVGAEVVATEEVLVADGITATIRAPGLRLFGFDSLSSPLEWGRGRGPCCSSVRPEAIAAAVWPPGAEVVVAAAGAGVGEPPGVLSSRRPSNVGGCSYLREWNQSSVCNGTLSAGVLFIVAVGA

SEQ ID NO: 83068 - protein, 60 aa, Zea mays
  Coding DNA Sequence Number=SeqID_39693
MEKCKPIKTPMPTNGHLDLDEGDFNLILRKLIFALLREFLGISGTPQALVCGIPKELLLI

SEQ ID NO: 83069 - protein, 187 aa, Zea mays
  Coding DNA Sequence Number=SeqID_39694
  Homolog annotation: Hit_ID=A2XI38; Match level="QueryCoverage=35%, HitCoverage=16%, E-value=2e-07, Identity=45%"; Hit description =Putative uncharacterized protein
  Subcellular localization annotation: CTP_CleavageSite=75; ConfidenceScore=5.51e-01
MALAYLDNQGHDTFGSMLLSGNQQCKTLNLAMSSTTTSLLMLSPGEYRRRMKGVANSLHNLGETVSGHTLVLNLLCALRRRYDHLKALIKRTVLFPSFHDIRNELFLEELTMDDESPRPLRRTLYRQEFIRALLPPPILEFLFRLPALTTIANPVRAATGAMALPVVALAIEARVGAAIVLQPLDKT

SEQ ID NO: 83070 - protein, 126 aa, Zea mays
  Coding DNA Sequence Number=SeqID_39695
  Gene Ontology: Mol. function=DNA primase activity; Biological process= DNA replication
  Homolog annotation: Hit_ID=A2YL41; Match level="QueryCoverage=92%, HitCoverage=24%, E-value=7e-41, Identity=56%"; Hit description =Putative uncharacterized protein
MSPFVFYGSPRGVQVKRPQSFLRLLHVIRIDLKKQTDFNPRYNDMDSKIRHHYEVIQEASPCHIYFDLEFDTRLNKKRDTDEMVDILIAVVFSALRDKYSIEGHEEWITELDSSTEGGSILSVWFK

SEQ ID NO: 83071 - protein, 168 aa, Zea mays
  Coding DNA Sequence Number=SeqID_39696
MANRPHAAIPRARPTHAARPPSATRGTLQPPPNQPKARPEGHEHHRLDLARSSSDRLAIVAAMPGFAPCSPRSDRDFDFPTDAGAVGLIGRDPSSHGRLLPIQCRPRCLLQIQFLAAHVVRARLSLDLGRGDYKDKDGVKGMCVVGAINNYNITQALMFLSHFIRDIH

SEQ ID NO: 83072 - protein, 77 aa, Zea mays
  Coding DNA Sequence Number=SeqID_39697
MERHHNLSLRASRKPERCVQLNRAGIPVSTNRNSWIKSKENRTKHMAWEAPIATEMTREGPNPSSSSLRKITLTGSG

SEQ ID NO: 83073 - protein, 91 aa, Zea mays
  Coding DNA Sequence Number=SeqID_39698
MGLGVCGSLCQGGNEIDGSGYDYGAGKWYSFRLETVVSIATTAQEKMKLWKETSRSSKTTTSSRRGLAATPSRLPVKAACIYVSFSHFDLL

SEQ ID NO: 83074 - protein, 179 aa, Zea mays
  Coding DNA Sequence Number=SeqID_39699
MARDEDPARAEFVRSSGSGVRVASTPEDTEVVIARRGTEECLVRSGGRTRSGRETVEEVGRGVEGLGPETCRKVCLEKKSADGVVGRADHALSLAVLGGGIRARHPQLHPVGEKEVAGGGVIELPTIVTLNGLNGEAELSGHPGEEVAEGGESLRLGTQRKSPHIMRKIIKHHKIVFVA

SEQ ID NO: 83075 - protein, 64 aa, Zea mays
  Coding DNA Sequence Number=SeqID_39700
MTKVDALPKIVELRRWFNLRSDPAFHIVYSFIPSSKGPVHILRLGNIVNHVFEDLRKMKAPNIH

SEQ ID NO: 83076 - protein, 775 aa, Zea mays
  Coding DNA Sequence Number=SeqID_39701
  Gene Ontology: Biological process=pollen maturation
  Homolog annotation: Hit_ID=A2XUM2; Match level="QueryCoverage=98%, HitCoverage=76%, E-value=0.0, Identity=63%"; Hit description =Putative uncharacterized protein
  Pfam annotation: Domain name=C2; Domain location=3-94; Score=27.4; E _value=5.2e-05; Accession=PF00168.21; Description=C2 domain
  Pfam annotation: Domain name=C2; Domain location=543-621; Score=48.4; E_value=2.6e-11; Accession=PF00168.21; Description=C2 domain
  Pfam annotation: Domain name=GRAM; Domain location=691-757; Score =80.4; E_value=5.7e-21; Accession=PF02893.11; Description=GRAM domain
  Pfam module annotation: Pfam domain module=C2::C2::GRAM; Domain location=3-94::543-621::691-757
MRLYVYVLEARGLPAPRQRRGGVVLFYAKVTVGKQRFRTRAVEASDLGGAAVAAAWNEEFVFAVGSDGAAGGEELEVAVARRGARGREVVGTVRLPVPAATAAAGAPGERRSVPPTWFTLQLQRRRKGVVGVDGGDEAAADCGKILLSFSLYGENNVNSVVHTDAEVERSLDMEHSSCNNGGVVDSPRSHDTDNSEHFTQEDCNSITEVDDLAETSTTATANGASDTERMVPDAAASFFEEAMEIMKSRRSTPELPQDLDGGIIFEHAYLVGSKELNHLLFRPDSQFFKDVRELQGTMDYEEQPWTWKSADPPSLTRTCRYTTGASNKFMKAVKTSEEQTYLRADGKSFVVTARVRTPEVPFGNCFAVVLLYKIVHRTGEEGAHLTVSYNVDFLQSTMMRSVIEGSVRDGLRENFQGFAQVLSRHVVEVAGSVGMSKEQLLAPLQVEHRQSDIRLAYRYFCNFTAVSTVLFALYVLVHIFLSGPAGLEFSGLDLPDSFGELITAGVLVLQLQRLLNMVTHFVEARLQRGSDHGVKANGDGWLLTVALLEATSLPPGSVDPYVVLSCNGITRTSSVQLQTLEPQWNEIMEFGAMEEAPAVLDVEVFNFVGPFGVAISIGHAEINFLKHTSVELADIWVPLQGKLAQTCKSRLHLRVFLENTKGPETTMREYMSKMEKEVGKKLHVRSPHRNSTFQKLFNLPQEEFLIADYACSLRRKLPLQGRLFVSARIVGFYANLFGHKTKFFFLWEDVEEIQVLQPSFTTDNNWSVEIEIVGR

SEQ ID NO: 83077 - protein, 102 aa, Zea mays
  Coding DNA Sequence Number=SeqID_39702
MFSKLKMTSRDTNRPLGTSICFGSLEFPFSGEGEAIKASEARPPPSKGRALVACGKGGGQAEVALAATVRRAGGGDVKPREGVGVVASIGCAPLPRCPDYAV

SEQ ID NO: 83078 - protein, 92 aa, Zea mays
  Coding DNA Sequence Number=SeqID_39703
  Homolog annotation: Hit_ID=A2XUM6; Match level="QueryCoverage=61%, HitCoverage=8%, E-value=8e-13, Identity=62%"; Hit description =Putative uncharacterized protein
MYTYTHGGVRRGSPRDADDEPGRVPRLLRETATPWEVTRPGVLERHVGYKFNRYVSIFRGEVVSTQLSSSRRRRVHDVVNVPFGDCFRNSFG

SEQ ID NO: 83079 - protein, 540 aa, Zea mays
  Coding DNA Sequence Number=SeqID_39704
  Gene Ontology: Mol. function=zinc ion binding; Cellular component =cytoplasm
  Homolog annotation: Hit_ID=Q9SB64; Match level="QueryCoverage=74%, HitCoverage=53%, E-value=9e-32, Identity=27%"; Hit description =Putative uncharacterized protein F22K18.110
  Pfam annotation: Domain name=ZZ; Domain location=102-147; Score=24.3; E_value=0.0002; Accession=PF00569.8; Description=Zinc finger, ZZ type
MTLNYKCTFNLKEMRVKARRKSECQIRVNKILLNPVFEDLWKPKAPNRTNGKNSGDMMSIFSPPHNIYGPSEYTPSSVEGKSFGSSYRGLDANFGSIAQCEHHRWVQCYGCGVTHIVGSRYKSDLEDEYDLCDDCFSHIDNGAEYTRLDSSASRCAPVAKTNSLLKDVTVPDGTTMAPSHPFTKIWRVRNNGSTRWPYGTKLVWDGGHLAPPSTVRSPISVNGMINPCEETDVAVDFLAPARPGRYISYWRLALPSGQRFGQRIWVYIKVVTLPLPAFGLCHIDAYIYLVEQPIQSSGGKQAAVNQAKLKRLTLDIDSNIFYSEHFYGCPGIPEANSKPFTPYIETNNVFSESFPRCPGSFQETMKLEESRPARGDMLSVPTTVAPVQIPATDVSAESSLDSIPGGVTASEAFALPNPLPMLPVSSSAPVVDDYVHMCAPAASIAPVPATPLPEQVVNHMEGKLMGELEGLGFMQADLNKHILRQNNYDLDQSVAHLRDYDAWDALEFFKLVRFGEGGQADPEDEQTHWQQTILYFSDPI

SEQ ID NO: 83080 - protein, 87 aa, Zea mays
  Coding DNA Sequence Number=SeqID_39705
MTSRDSASAGKWAQSVSGVGEVGRGMHTVRLAMCPLDVGEPSHSSARTTDDWWGPGVGTTVREQELGCARGRESQHFSRKIRALRGC

SEQ ID NO: 83081 - protein, 167 aa, Zea mays
  Coding DNA Sequence Number=SeqID_39706
MEGPWVIRTSYCSEEEGFPHLLRSCALRMGIHKKPEYVWKEYRENGVEKCSMQVKELKQEKASLQECLDIAEGEEANTREAYRTLKMDYDKKLKKLAPKKKIQKKTTNRGCQTEKKKKKTPPAPPPPRIDDWSDAEDISLASLDDLLKEFGDTLEKEFGSTSGNALV

SEQ ID NO: 83082 - protein, 54 aa, Zea mays
  Coding DNA Sequence Number=SeqID_39707
MGENEEADRWARAAREREQREREGGESLTGGAKLSAGHVVLTERYSGNSLSPLK

SEQ ID NO: 83083 - protein, 104 aa, Zea mays
  Coding DNA Sequence Number=SeqID_39708
MQDAARRALSQYCSLFSVVADGLDRKYYPRRLTGSAGGVIVSLVGEGNPRLSSMVNLAAMLNTELDHALDELGKVRAEHPYRSAPCGRFDYGAPDCRTLIDLDP

SEQ ID NO: 83084 - protein, 93 aa, Zea mays
  Coding DNA Sequence Number=SeqID_39709
MLVDYTTGLLQQPGCPKVVQGASLAEVQGKVASQTPPPTEARGKSLAALAPAPGVSAPAPRAGDDAVSLGDWNHLTPCDAGDAPPVEKAKRGS

SEQ ID NO: 83085 - protein, 136 aa, Zea mays
  Coding DNA Sequence Number=SeqID_39710
MNPTDPPLVGIDQVVAAQMMPIKRPSFGFNKGAKWEPKALWSGSTGLSGVHRTVSGAPEDSNANSPPSGFSRGDSAIIHRTVRCTPDSVRCAKGGQPQELASFGKLQRLVRYNSPDCPVRLRSNGYLRANGSLPRI

SEQ ID NO: 83086 - protein, 80 aa, Zea mays
  Coding DNA Sequence Number=SeqID_39711
MAAQYPERGGGYASELIPGDPERPLPILLALNEVYGHANMEGGYLPKVTAQKLPATARCGIGASRDRRQEIGAELAINHG

SEQ ID NO: 83087 - protein, 52 aa, Zea mays
  Coding DNA Sequence Number=SeqID_39712
MARVGCTLRGKRLDGGVSVLSVKKQQTFVASIQRWYQKKKTKTKAVGGKVLR

SEQ ID NO: 83088 - protein, 70 aa, Zea mays
  Coding DNA Sequence Number=SeqID_39713
MSLASVIDGLVAATEDTVRESVQDAMETDLQDLAWETKPYARTYRITAPNTRAPVAEWWRCRLRANRPGL

SEQ ID NO: 83089 - protein, 63 aa, Zea mays
  Coding DNA Sequence Number=SeqID_39714
MAGGIELAGAKERGLAGEGECGAKETLGDTGVSQPSPLKGISSRDSGQSPPRVKRRVRLIGNG

SEQ ID NO: 83090 - protein, 71 aa, Zea mays
  Coding DNA Sequence Number=SeqID_39715
  Subcellular localization annotation: CTP_CleavageSite=51; ConfidenceScore=5.07e-01
MAFLPSCGKCLTPLVTLRPLCTRCSCMRSISQQAVSVWGTGLSGGAPDSVRCAKLPRPEDAALGNLPTAYG

SEQ ID NO: 83091 - protein, 216 aa, Zea mays
  Coding DNA Sequence Number=SeqID_39716
  Subcellular localization annotation: CTP_CleavageSite=16; ConfidenceScore=5.52e-01
QDFPRSPGRGYAPQVSSAEPRTPSRPSRGRSAPYRAQLRLALLAAWPAVRLRWRMSCLGPVTAWRTPAAVRPTPGARVPSLVRASCACCVEKCLRAATRPTGSRARYTLPSSSSPPGVRLVGSRAPAAFASCRRRPMAGGTEDTSLALLVSDVAHAEGRRRVGVTRPRIGPPERTTSSPARRLRAEAGAGPSARTCYLVDPASSHMLVSKIKPCMC

SEQ ID NO: 83092 - protein, 161 aa, Zea mays
  Coding DNA Sequence Number=SeqID_39717
MPRAIDACSPKQLTIFYLLLTRRTICDTPSTVAEMRGAPSTLRVNDDMRTRSAAGKSTTGIMASQLGVKPPEPNQRWPRLAELPGDGRGTTTTTPLPGTDIIPDDRRTHVECPPLLHALGPFNGPLTSRYPMSISMNLSRTQEAGWPSTPPPLEPPEHPKT

SEQ ID NO: 83093 - protein, 321 aa, Zea mays
  Coding DNA Sequence Number=SeqID_39718
  Homolog annotation: Hit_ID=Q6J9V9; Match level="QueryCoverage=24%, HitCoverage=34%, E-value=1e-13, Identity=51%"; Hit description =Putative uncharacterized protein
  Subcellular localization annotation: CTP_CleavageSite=15; ConfidenceScore=5.24e-01
MGSRSSNSSKKKAMRQTSGSSGQITPRLASFPEAAGEPSPTSERHLWQAKRVTFHLRHDDRVKKGIGKGDILKRILLCEGNGPSSPPSDQGFEGWPLGRAGPSEGFDSCPRARGVRDDPRYVRYMAEARATLLRPHEGTTRPTKASQQELRPQRSQTTPPRPRGLHPAASGAIGSSASPDLRPRPRPREEISTSPDPRARPQPWPREESRPRPTLGLGLSLDLGGAAASPNLGLRGSRHFSDGHVTTATGLKALLRRPRYYLYRAQGAPPMATLLSVQGSGHFPASHVSSKLHPHYTAGHLLMSIKGGVQGPTRGVARKDE

SEQ ID NO: 83094 - protein, 231 aa, Zea mays
  Coding DNA Sequence Number=SeqID_39719
  Gene Ontology: Mol. function=protein serine/threonine kinase activity; Biological process=protein amino acid phosphorylation
  Homolog annotation: Hit_ID=A2WKE0; Match level="QueryCoverage=84%, HitCoverage=62%, E-value=1e-35, Identity=41%"; Hit description =Putative uncharacterized protein
MALVPFSLLLFLVSLSVWVALPLPLPVAAAHGGPGEHCSPFLCGNVSISFPFGIIQKDAEQTNCGAGIGFQVRCHNTIPHLGYYQNEITLRILSIFYHNRSLLIADRPRWPTYFNTTTSTEGCRIPTANTSSRLVPPLSVSSDNQNLIFYSCTKPPSPGEGLVATVCHNNTFVRAADGRRSDESGGYVLQGCTATRVPVLGVSGKVNASNYDQLVWDGFLATWQLPPTPSG

SEQ ID NO: 83095 - protein, 128 aa, Zea mays
  Coding DNA Sequence Number=SeqID_39720
MGKKRKREPTPPSEDFGDSEYLEEEFSSESEGSPAPVPPPASSDDSDDSQGITAEVWTYIRAVERSGLAGLDESEYSSDEEDSSEEDGGGGGKGDDDDDDDGGDGGDDDGDGGDGGSRGGSRGSKASG

SEQ ID NO: 83096 - protein, 290 aa, Zea mays
  Coding DNA Sequence Number=SeqID_39721
  Homolog annotation: Hit_ID=Q6JAD6; Match level="QueryCoverage=12%, HitCoverage=5%, E-value=5e-13, Identity=97%"; Hit description =Putative uncharacterized protein
MGYREAATHIQLWLLGALVSHSEFDVVDFLICEIEDTVLDAPEDPVPAPAPVIDTQAEDTTFHQFETQGAAVPDDDDDDDDDDDFGVPPPSPMPPRTHDHEARSSSGAAPIAPPAIDPALAVILQTLTQQQAHLAAIQQQMSERMLSMFQVIQDRQDTLQQQLLQDRAENRAFMTLMLQHTGVLIPLVQSAPPPPLQAPIVPAIQSGPPLPIVGPSSSPLWPVTLVFTLPVIGSVSTQSPVPPAPAVTTTAVAVSVTSMASAAPAAQPPSEPVPAPASTVDPRSETDSDP

SEQ ID NO: 83097 - protein, 265 aa, Zea mays
  Coding DNA Sequence Number=SeqID_39722
  Homolog annotation: Hit_ID=Q6JAD6; Match level="QueryCoverage=43%, HitCoverage=16%, E-value=8e-44, Identity=78%"; Hit description =Putative uncharacterized protein
MEKCKPIKTPMPTNGHLDLDEGVTLPAREPSPVLPGFSPLVHPVRMPRTKNVSAPGEEMTRILLAPSGRQSKELSCRFLPIRLPIEFVASPLILAPPLLPLPPLLPLLHPLRLLPSLLCHPPLQPYPTSTTPASTAPPPASAPPIPPACFREHDETELRPLVVDPRLFDLQRATATWVCRFRYVPVESWLPAHRDHAAADPFSTRIQESFYRAQLSAQIALRAHRLLDLPAFLLAAGADSEVHLSYLPGLLTLLTTSGRYVEEWV

SEQ ID NO: 83098 - protein, 274 aa, Zea mays
  Coding DNA Sequence Number=SeqID_39723
  Gene Ontology: Mol. function=protein serine/threonine kinase activity; Biological process=protein amino acid phosphorylation
  Homolog annotation: Hit_ID=A2ZP15; Match level="QueryCoverage=84%, HitCoverage=36%, E-value=1e-55, Identity=48%"; Hit description =Putative uncharacterized protein
MHGCRVPAAGLLLLCPAAMLLLALLLLASLPTTAAAVNTSTLPCEPAQCGNLSIYYPFWLTGTHQRHCGYKAFQVTCEERKVYLKNSYWAYQVLDISYENSSFVVTNVNLPEDGGSFCDLSLIGNASSDLSAAPFKISGRNRELFFLSDCQGQGQARQPSPPSSWAQMNCSDYGDGSAAAKSFAWLAGKYRPDDTLKPPLPLNCTVSSLMPVLGYQGAGPADYDRLMNLGFLLEHNFTAEDCAACASTGDRCSVDPDDDQLVCNCSDGQYWFFC

SEQ ID NO: 83099 - protein, 288 aa, Zea mays
  Coding DNA Sequence Number=SeqID_39724
  Gene Ontology: Mol. function=protein serine/threonine kinase activity; Biological process=protein amino acid phosphorylation
  Homolog annotation: Hit_ID=A2WKE2; Match level="QueryCoverage=75%, HitCoverage=37%, E-value=7e-90, Identity=75%"; Hit description =Putative uncharacterized protein
MPLARSCLHLLLLFSSIAAAASAATERIPNSTTWPSSCPSYRCGHAVDIRYPFWIDDASNASSSSSSSSSSDCGYPSLRLECRRETPVLPLPSGDYAVTRVMYGDRTVSLFDLGVFSLSNTCPLVGRNLSLPAGSPLSLTPRDANLTFFVHCSFAGVPARHLVACLEGDGRHHSYVFCDGDELAPYAYAGLCQSVIAMPVLRRSLLGTGSTTRSPLDAIVPALNMGFELSWRPEADGECGQCESAGGLCGRRRLAGQHGAWTFACFRAAAAANPALISPKTPDPLFGA

SEQ ID NO: 83100 - protein, 93 aa, Zea mays
  Coding DNA Sequence Number=SeqID_39725
MTLVALSPLQQQGDVSRILAASPAVLLQDSVAPTGESGSQQQVSIGLDASDLPLPATVEAAPSGPQVPSAAADAAPSGPQVLTAAAAAGSSGP

SEQ ID NO: 83101 - protein, 332 aa, Zea mays
  Coding DNA Sequence Number=SeqID_39726
MSSNMPSAMVEAAGGAPDSIPPPVPEEPEVILGRLQTGAGLETAPPPLPRLEECTKAASCQFALERSKLEQGREDLKEDLKKVLEREREKQRDEQAVTEAALQKLQQDLDDRASNISLTEENLKAKDASLEERATDLTRQEKDLAWREKMWKRQEKLLAEHELEAEEEKKLEEKEQTLEERVAQTAQAAPGSQAVEVMKKTLEDLRAEHRIGVQRIAAWAEEASLALVSLGVSPILVSKQPVSISDTLPVLDSAADRLRRLDQFLGARLEAEGSRLCRAIIEYIQTCFRSHDPTISLGPGDRRSGGRYRRHRPGERARRRRRGGQAIPARSR

SEQ ID NO: 83102 - protein, 66 aa, Zea mays
  Coding DNA Sequence Number=SeqID_39727
MTKATFSCMANNSLLRHVDGSGVAMWPGKETYSKKPTVDLDPYGESAGPLYMKNGPRGKVQDPPRV

SEQ ID NO: 83103 - protein, 128 aa, Zea mays
  Coding DNA Sequence Number=SeqID_39728
  Subcellular localization annotation: CTP_CleavageSite=41; ConfidenceScore=5.13e-01
MKDSPVIPFTRSSSSSQDRLVPGPRWTRLRSLEPVNQQLRRALAYSGAIWRFKKSPTTCIDVRPPVARDSILPNTGSNSGVNGGLALHCFLSSLGPSLGSTRRSLASVLAITHSAHQFSHLTPLTEEI

SEQ ID NO: 83104 - protein, 213 aa, Zea mays
  Coding DNA Sequence Number=SeqID_39729
MPFEHFSDCLACTYLKFEDYFLLTLHGLILSKALKNRKNIEGEAAHKEIMKLRYELSELCFDCAEKENMLNVLGEDLVESRSELQKLIEEKNVVMGLERAMNAKVLELEIMNLQQGERLAELEAKIRQQARTHEVEIEELRAKVVEAKFNFEIEKVKKEDAIDEKNHLDKVVGDFRSLKDECFSVAAKCSKKLESTFSLFGARSHERIFVDGT

SEQ ID NO: 83105 - protein, 153 aa, Zea mays
  Coding DNA Sequence Number=SeqID_39730
MGRARERVKPSEMRRGVCAGHLRGSKKGGGRVGGRRGRETRRRAQVRTRRFTARAGKVELTRQVHGAEREKGSCGGNDSALVNRARETESERAKETGADRLAPLGSEREREGACEGELPLTSGVRLSGGAGARARGLAGLSGPTALLSPFLFL

SEQ ID NO: 83106 - protein, 108 aa, Zea mays
  Coding DNA Sequence Number=SeqID_39731
MTVIPFRSNLMVTVQRAKGQRRRRFSIRGDGITGVQAIRGARLDTRYFFAEGGEEVQRVEANSEEVCLPVKNGWRLLTMVWVHPAVDEADLGEQSAMDPSIHAPKIHQ

SEQ ID NO: 83107 - protein, 101 aa, Zea mays
  Coding DNA Sequence Number=SeqID_39732
  Gene Ontology: Mol. function=RNA-directed DNA polymerase activity; Cellular component=chromatin; Biological process=chromatin assembly or disassembly
  Homolog annotation: Hit_ID=Q2QP24; Match level="QueryCoverage=73%, HitCoverage=5%, E-value=1e-08, Identity=37%"; Hit description =Retrotransposon protein, putative, Ty3-gypsy subclass
MPDTLKLVRTRRTVKCLRIPDRTIDVVDVALEPDLTYSEHPIQVLDQKDRITQKRTLKFYKVLEEVKPTQAADWGFATKKELELVIFLELLEVIDVASITS

SEQ ID NO: 83108 - protein, 318 aa, Zea mays
  Coding DNA Sequence Number=SeqID_39733
  Homolog annotation: Hit_ID=A2YGC2; Match level="QueryCoverage=49%, HitCoverage=70%, E-value=3e-09, Identity=28%"; Hit description =Putative uncharacterized protein
MVTFMMMVNNDDIKSDLWYFSSFEEMARIRCTARKSVIPFLPSRLAERPLRCTVSARDALAPPQGIPAARGDPDGDEDGDDDDAGDSSSHDMELSEEPESEGWIARPITRDAACGCHFHDALDTLLRRAFDQHTWSIEYHCVVYQHHRGLYPDQWESTCLVRRPDDDLRGVEAFSEHYSITERDTAEAAMQDVARRALSQYCSLFSGVADGLDLKYYPRRSTGSAGGVIVSPVGEANPRLSSMVNLVVVLNTELDHALDELVKVRVEVAELRVECATCHYLDGGSPAPVGIEHPYRSTPRGRFDYGTPECRTRIDLDP

SEQ ID NO: 83109 - protein, 191 aa, Zea mays
  Coding DNA Sequence Number=SeqID_39734
MARTKTTQHKSTGPHGVPRHQLASRHEGSSSGSNDPIADLEAQMEQLRLELRHRNRARERDSHHIVELSAEVSHLQYEISEHDTTIDWVVNSRSFAWDCEAKSLARVPELRASLENLQAYCNTLHEEVHVLFDQLHPDMPPDVAAMGVEPSGTADEGPDGELDVFRPPPSMNLADKRSPAADNGATKDEED

SEQ ID NO: 83110 - protein, 126 aa, Zea mays
  Coding DNA Sequence Number=SeqID_39735
MGKPVPSLLMLLLSRGRVPLDCPSRWQDGRPSHSSNHVLQRTYKIMPQARLSILILSWTYPQHGSSSLISCEKQMIRIEFLNLARFEILPKHNGLRLGLPLKCFSRLSRGLLVWLSLSYKFEVQNK

SEQ ID NO: 83111 - protein, 163 aa, Zea mays
  Coding DNA Sequence Number=SeqID_39736
MARKDNTSQSLSTAPRLRLTLRWREKLLPPHRRFPVAQHQSPLLCMPHGSANVPDSIKGVSGGVVSSQGVVATPSKLHGFTRSHEVMAGRHRPTAQYGTFYLDQVEEAVIPAPTQGISICALALSKGRTYQRPLGRAQPKACGRGRSSILGKGARAPPKHRWS

SEQ ID NO: 83112 - protein, 229 aa, Zea mays
  Coding DNA Sequence Number=SeqID_39737
  Subcellular localization annotation: CTP_CleavageSite=20; ConfidenceScore=5.62e-01
MRRTAVQEASNRPTVVRPLSSAATSGPTQGPRPTCHVADASVTRTSAATRGSPVHGPTVPLSTMVTGQSAVGMGAAVGMAIGGPAVIAATGTQEKRSNRQSDSGPTCRLASSPEAGPEATVSTLNQGYPLLQREDAAPIRRPLATRGTTPDLAAWAGQRAPRGKERQHILAVSRSSSRRRACWVCWRTVRPCQATHCTHHPFYKKLPLHAKDTQISGARAQEDYLDNRH

SEQ ID NO: 83113 - protein, 157 aa, Zea mays
  Coding DNA Sequence Number=SeqID_39738
MTKGNLEVKVTGFGQCPRLGDPPNLQPCLRGRDAEGALGRQSLSFGRRTMWQDNGLNTYVSFYKYLLPTGTLGRQGLGERNEQNSEEKLNIKDVIMENLQHQTKTPGHNSTGNQEPLEVLKQENLSEKHRFKKMNQTVYMKDCCRLEEEGSICSHLQ

SEQ ID NO: 83114 - protein, 277 aa, Zea mays
  Coding DNA Sequence Number=SeqID_39739
MTNIKSMTDQDTIGELSDSDNLTATDASGITKNTTTAKNQLGDDDRRQRKQGRASCPKRAGHRRAQERTEALELPNDDEVTTELQRAVCAARGNHGEQVERVRTEQTRLRATGKKQLRCCDRGSKHVRAGEVGTRGRGNSLSRREEQGAGSSEGTTSSTARERGELPQGSRAPEAPRLGMAAMGRELVEEGAAACRSSAHRGIRAEAEHAPWGTRRQGRESWRRGLLGDGEKEMSSAGWGWGSAGEPPWEQAKGEQDAPRESWKEQRRPRKMTRQDI

SEQ ID NO: 83115 - protein, 85 aa, Zea mays
  Coding DNA Sequence Number=SeqID_39740
  Subcellular localization annotation: CTP_CleavageSite=33; ConfidenceScore=5.58e-01
MPSRGASGARLPCGSSPLSLAVLLVVPSLLPAPCSSRRDREFPRPRVPTSPARTFIDCVMWKTTQVDPKRGLIRKMMLMDEPEDG

SEQ ID NO: 83116 - protein, 202 aa, Zea mays
  Coding DNA Sequence Number=SeqID_39741
  Subcellular localization annotation: CTP_CleavageSite=60; ConfidenceScore=5.29e-01
MSSRSLTHRVFPPSKPPDGGYPSSFCLVVGGTQLRRIWYLSAIIRLQGFSSASPAVPSCRRSPKTVTTSPWVGRSKPGCDLGPTLSFKDVHHPRWGGGQAEPELYLPRGFVGHPLLRRSRERALAGPAGGSDFDNAGLADGGRRQPQRVELAGLAPGAPSCRKAAAAPCAWEDRPRCRALLGRRSCSGAVLPLHWYGASARR

SEQ ID NO: 83117 - protein, 120 aa, Zea mays
  Coding DNA Sequence Number=SeqID_39742
MAAPPTTRPVALTPRRDRRRLWQEKRATLRLHHNDRISKGTRLRASLLIRGLKAGPSKGFDSRLRSRGPYTHYWSEVRRPAPRKGSTAASGYSGSAPTTDQGFEGWPPKGSQPPQTQSEG

SEQ ID NO: 83118 - protein, 96 aa, Zea mays
  Coding DNA Sequence Number=SeqID_39743
MDPKGKGMVVNDKEKESLFNEPRDVSGTIIRGTPKTPKLGWVRLTAAESSLRRHRKLRLARPRGSAPASTSEDGLCLARPQGSDSASTSEDGLRLA

SEQ ID NO: 83119 - protein, 25 aa, Zea mays
  Coding DNA Sequence Number=SeqID_39744
MAAEKWPKKSFKKAKKASTTLGRIY

SEQ ID NO: 83120 - protein, 353 aa, Zea mays
  Coding DNA Sequence Number=SeqID_39745
  Subcellular localization annotation: CTP_CleavageSite=51; ConfidenceScore=5.25e-01
MSSRSLMHRVIPPSEPSDGGCPQSFRLVVGGMQLRGSWYLSTIVRLQGFSSASPAASPRRWSPETVTTRPWVGMSKPGCDLGPTLSFKDVHHPRWGGGRAETELYFPHGFVGQPLLQRSRERALTGPARGADFDNAGLVDGGRRQPQCVGLASLAPGAPSCREGGCRAVRSGGPPKMSRAARATFVFWGGPAFAPESLGSVGLAVRGFSCLVKGTPRPLFDEPEPGVAVSAWTEAELARKEDLVGRSLAGSSVSGTDAGVDLPRPRAGLMSSGDSWPRPRGDQPSHLLESDSWRRPRRRWPGRDVEVVLQGGDPRTASPSEARSDLAEGVVDAEGAAAPFNCQDPGLQDRIIL

SEQ ID NO: 83121 - protein, 102 aa, Zea mays
  Coding DNA Sequence Number=SeqID_39746
MASGNKLAGAKERGLAGEEIWSQEIWSVSLPKPEANPRKTLGDTGVSQPSLLKGISSRDSGQSPPGVKRRVRVIGKRVMIVIIRAKLLFECHSLCNFRRKTF

SEQ ID NO: 83122 - protein, 321 aa, Zea mays
  Coding DNA Sequence Number=SeqID_39747
MNALSREGCRHFEVFDQADEDFERDIYKVEDPIVKESTGAMYDRMWGPHGREVVRERVETARAQAARGERVDDFGALNSALPDLEPIPVEAVSGAALEPPLETAEGAPDAPTAAAASGDPPPETAEGAPNAPAAAAPRAEDPATVAAEATAEATTEAPATAGSSQVQDFGPAHATATTNFLAASTVDGGNKYDGSASEFSDFADSGSSVEWTEESSEEDLDYFAALDVAAAEASPHAADTEDVPGPSTRRRRRRAVAKRRVSEAEGGRLRVSRAGRQELLSLPAAASTGEGELRSLFAGEELRIMLFNYREMGIIPKVEPM

SEQ ID NO: 83123 - protein, 51 aa, Zea mays
  Coding DNA Sequence Number=SeqID_39748
MAMMDSTSEKMYLCQVRKRQIFVASAPRWFLRKRSKSEAAGGLGPPYRTFV

SEQ ID NO: 83124 - protein, 519 aa, Zea mays
  Coding DNA Sequence Number=SeqID_39749
MSTSRIARGLRIFPYGRNIVAVVSAVMNKDRQDAAQKRRAVIRLADPRREAKKARGSAKAAAPGSSQPAPAVKPAVPGSSKASESAKAVVAGGTKPTPGDAAKVRELPSPGKRVADFGTNISVEDYFVGSGEGQIGRCPACGGNHGVNCGGWGEGCHFLHERRDSVSRCRQGTWRAPCPRRLKGGRRSSLSQQLVATAKVKRQTFTDRVASCALTADVAAEVERLRAQHADAIREKSATESKNRRLAEKVAALEAEKTDLRHQLVDERREAEAKVARAEGILASQRAEEWEVRFNALRGRVDKAEASTLSEVERMLPQFVDSYRELGARTADFEVPDREAGLRFLEWLQEELLVLPTIVEGFMSFASLVTCDGAMNALSREGCRHYEVFDQSDESFECEIFKAEDPIVKSAGALFDRMWGAHGREAVRERSDRAREQMEHAEDVEDLGGLVGAPPEAAEVNPVLPSDAGEGPSAVPVPAMADEDPVSAPAPTVEGAPEVVAEPIVEDPTATAVPSQVAK

SEQ ID NO: 83125 - protein, 206 aa, Zea mays
  Coding DNA Sequence Number=SeqID_39750
MRQGPYPIPDKFLNKIAPATHAGSAPKGSFVFIILRYLKLRGTNSTTSIEVLPVFGGHHDIRRQLVDLDLESPEDLRHESCAGRRRPTVKKASKTTNSPSGSGTSSTPGTRPTPPPKYPSCCMSCTRAEDIRDTRNSTVSPGCNSFAAMLLSVSLDDAPAGGVSAAEEEEDDMATHRRWRRAICFTRARSPMSRSKEGRRAIKQFQ

SEQ ID NO: 83126 - protein, 140 aa, Zea mays
  Coding DNA Sequence Number=SeqID_39751
MAGASTTEGDRAGAEQGMTGSCRRSALLSPASDAREGELDQGPGARSELGKMEQRRSAPWEMGRARGSAGHGGTSRDEHGAMELVAGPTASRGTREQRRPAEELAHAGAPRLGERFTMDGAGGSTAREMEQRELRAMGER

SEQ ID NO: 83127 - protein, 68 aa, Zea mays
  Coding DNA Sequence Number=SeqID_39752
  Gene Ontology: Mol. function=pyruvate dehydrogenase (acetyl -transferring) activity; Cellular component=mitochondrial matrix; Biological process=metabolic process
  Homolog annotation: Hit_ID=A7QUS8; Match level="QueryCoverage=77%, HitCoverage=17%, E-value=5e-13, Identity=70%"; Hit description =Chromosome chr1 scaffold_180, whole genome shotgun sequence
MVTEFLEPKLPYMTVRDAFNSALDEEMSADPSVFLWEKRLESIKISKGSLDKYGPDRVLDTPITELYY

SEQ ID NO: 83128 - protein, 88 aa, Zea mays
  Coding DNA Sequence Number=SeqID_39753
  Homolog annotation: Hit_ID=A2WNY2; Match level="QueryCoverage=56%, HitCoverage=83%, E-value=2e-10, Identity=66%"; Hit description =Putative uncharacterized protein
  Pfam annotation: Domain name=Ribosomal_L29e; Domain location=3-42; Score=40.5; E_value=6e-09; Accession=PF01779.8; Description =Ribosomal L29e protein family
  Subcellular localization annotation: CTP_CleavageSite=62; ConfidenceScore=5.28e-01
MAKSKDHMAHNQSYKAHMNDIKKPKRHRQTSTKGVLNKAHDDARSSAQNSLSESNNSKATVTADSKGNFTSISLISMLTAFPIHIGSG

SEQ ID NO: 83129 - protein, 384 aa, Zea mays
  Coding DNA Sequence Number=SeqID_39754
  Subcellular localization annotation: CTP_CleavageSite=74; ConfidenceScore=5.62e-01
MPPPHSHTWRLHHAIASLLHAISFSSPAPPSRLQCRSSPATLPTRCATMLPSNSSTPLRGVTSTPPESPPHSPRVAAFEPSLPFPSHVQPSRLQRRPSHPHPNCLHPTRKSSPEHEIRLPACPHPHGASWPLKRGIHPPGISLTYGSRGHDMDARATGGATGAHGVVTRWERVYARAASAAGDPCSVVLQCYGQQRRGRGGGDPRPRKRRRGDKFIPVELLGDVPASSIPYAAFGLRWSEAPEAPPEAAQPPPVTRPPVHLARRNELLHKKGANFNSNVALSEVDDDDEEEAMVERYRARRNFGASRKHLASRSTLTSVHDEPYSNHHRKEVKLMHYYEEDNEEEEEKEDIFHCTKELVYGDIVWAKLGKRQPMWPGVVVNPTQ

SEQ ID NO: 83130 - protein, 258 aa, Zea mays
  Coding DNA Sequence Number=SeqID_39755
MDSSSEAPGHLREFVSFLPSLEEVVVSPDIFIHLLEQLLQSLWRLPGEVLSRRSWLKTLDHGLNDNFIGHCGRLCPQSQEPSDISMKVFLMVLCALEQGMSCDWLRLKALEAASRRERVSWFVSNGYSAVAPGAVVFFGGITKAGLPKVVKMVRTLQTTRVNTNYAPPPRQVPVYPVVVEEIPVDLPRIRVERGVILEDSLEELLPTPTPLAESLAFAARSSTSVLPAPAVQASAPGGDDLDDSGDDDEDDDEEEDDD

SEQ ID NO: 83131 - protein, 69 aa, Zea mays
  Coding DNA Sequence Number=SeqID_39756
MHDFLLALAWLGYSGWLLGQEDGLPGCSDAGIDFLPSGYSDGTAAAAEETASGTATASSDANAGAGDLG

SEQ ID NO: 83132 - protein, 96 aa, Zea mays
  Coding DNA Sequence Number=SeqID_39757
MGVHVLPEPTMVHDGTVLAYDANAQPYDTVSSGTLCKPCACTRPIPEPTSGPKASDPVKRVRSHGANGLVPYHVVKANHTGLYFDTVEVGTLVTGC

SEQ ID NO: 83133 - protein, 562 aa, Zea mays
  Coding DNA Sequence Number=SeqID_39758
  Gene Ontology: Mol. function=histone deacetylase activity; Cellular component=nucleus; Biological process=regulation of transcription, DNA-dependent
  Homolog annotation: Hit_ID=A3ATL7; Match level="QueryCoverage=19%, HitCoverage=12%, E-value=9e-54, Identity=95%"; Hit description =Putative uncharacterized protein
  Pfam annotation: Domain name=Hist_deacetyl; Domain location=41-259; Score=-56.4; E_value=6.7e-07; Accession=PF00850.10; Description =Histone deacetylase family
  Subcellular localization annotation: CTP_CleavageSite=48; ConfidenceScore=5.53e-01
MAMPGAGSGGGGRSCCRGGARWRSSSATQGRRPGPSRRGRGPGPGRARAAVRDRQDWRGEKLEAALRPRRAAVPLRIRRAGEHARAVRRGWVATPAPCAMAPCRAPPGSGGWGRRCRVAPRRGTRARAGAARRGRRLEIEGGRGGGAAGWMEVEERWEEGGRPREGRLGLPGAAMGGGGWVIIAKVVETYLPGAIVLQCGADSLARDRLGCFNLSIEGHAECVKFVKKFNIPLLVTGGGGYTKENVARCWAVETGVLLDTELPNEIPKNEYIEYFAPDYTLKVPNLNMPMALIPRRRPLGFPHPHCCSPSPTPAKTGAGALSPHGAVASMEELKPPVPLPSLGQLSVVALGTSTAATSACLGTVVATMGRDLAVGVVGRAIAAAMAVDLTVVSLFAATFSVDQRPLLIGAGAAGRLTAAATFTSQHDHLSCRRSCRGSIGSRRAHRRNAPRRRRLPSGVPPGLLPCISLFAGTGVPDNVAAVVVGQRPLLRKSDYRLFGVHTGLYSSRNIRTLTTLRVRGDINPSVPSFSFYSSLIMYDRQFPPFESSDTTFVALFGVATAC

SEQ ID NO: 83134 - protein, 110 aa, Zea mays
  Coding DNA Sequence Number=SeqID_39759
  Gene Ontology: Mol. function=catalytic activity
  Homolog annotation: Hit_ID=A2Y3P0; Match level="QueryCoverage=90%, HitCoverage=40%, E-value=1e-17, Identity=44%"; Hit description =Putative uncharacterized protein
MYDKLRRSCRLDAVQSGCFALSIVKQGDLMVVANVGDSRGYYLADEPRVHFVLQLSQESSVLGMSRAFDDYYIEDCGVILALEVTQRRTDNNVQFVILATVGVAFVPACL

SEQ ID NO: 83135 - protein, 194 aa, Zea mays
  Coding DNA Sequence Number=SeqID_39760
  Subcellular localization annotation: CTP_CleavageSite=94; ConfidenceScore=5.05e-01
MVPIWGGRTALPVEAAISVYSVAAAGSTAGASMPVWAAAACAPAWSAVSALAPIRAAATRAPMGMRGCPLCRLLSRCFPRQPELFVGVVVDRSRAASSTATQNLELCCRRTCSIRRLRCFYFRSRRCQFCRCPTVLPSPLSLQPLLLLARVLVPRRPRPPADAAHSKWPSVGTWWASEGSLRVEEAVSDERLLV

SEQ ID NO: 83136 - protein, 359 aa, Zea mays
  Coding DNA Sequence Number=SeqID_39761
  Gene Ontology: Mol. function=hydrolase activity, hydrolyzing O -glycosyl compounds; Cellular component=chloroplast; Biological process=carbohydrate metabolic process
  Homolog annotation: Hit_ID=O24421; Match level="QueryCoverage=91%, HitCoverage=38%, E-value=1e-152, Identity=83%"; Hit description =Starch branching enzyme IIa
  Pfam annotation: Domain name=Isoamylase_N; Domain location=225-309; Score=106.6; E_value=7.6e-29; Accession=PF02922.9; Description =Isoamylase N-terminal domain
  Subcellular localization annotation: CTP_CleavageSite=17; ConfidenceScore=5.28e-01
MASFAVSGARLGVVRPGGSARSGGERRSAVDLPSVLFRRKDAFSPCKLVVSWFLSVELALEFAGTVLSCAGAPGKVLVPGGGSDDLLSSAEPVVDTQPEELQIPEAELTVEKTSSSPTQTTSAVAEASSGVEAEERPELSEVIGVGGTGGTKIDGAGIKAKAPLVEEKPRVIPPPGDGQRIYEIDPMLEGFRGHLDYRYSEYKRLRAAIDQHEGGLDAFSRGYEKLGFTRSAEGITYREWAPGAYSAALVGDFNNWNPNADAMARNEYGVWEIFLPNNADGSPAIPHGSRVKIRMDTPSGVKDSIPAWIKFSVQAPGEIPYNGIYYDPPEEEKYVFKHPQPKRPKSLRIYESHVGMSSP

SEQ ID NO: 83137 - protein, 118 aa, Zea mays
  Coding DNA Sequence Number=SeqID_39762
MEGSCNGRRGGGQPREKGGHLGITDDRLLTRAHLETSSKLVFGCLVACYIKLDDVVIVLRLVSWYLRTQVSITADQNNTKVDTAPKVNSTPVLFTLIWHSLLRHAFTLISFKLKVYPS

SEQ ID NO: 83138 - protein, 129 aa, Zea mays
  Coding DNA Sequence Number=SeqID_39763
MESLKGYSVNTVFERTREVARAASQPLPRAAHAQPSSLLPWSARQALPWAAHAQAAARRSLPWAAQAARRSLPWAAHAQAARRSLLRAAHTQAASLASPRSAHAQDFSQGRTVRTRRADRPRSAERPNG

SEQ ID NO: 83139 - protein, 513 aa, Zea mays
  Coding DNA Sequence Number=SeqID_39764
  Gene Ontology: Mol. function=structural constituent of ribosome; Cellular component=large ribosomal subunit; Biological process =protein amino acid phosphorylation
  Homolog annotation: Hit_ID=A3BCJ2; Match level="QueryCoverage=80%, HitCoverage=69%, E-value=2e-95, Identity=51%"; Hit description =Putative uncharacterized protein
  Pfam annotation: Domain name=LRR_1; Domain location=132-154; Score =6.7; E_value=18; Accession=PF00560.24; Description=Leucine Rich Repeat
  Pfam annotation: Domain name=LRR_1; Domain location=156-177; Score =0.9; E_value=2.1e+02; Accession=PF00560.24; Description=Leucine Rich Repeat
  Pfam annotation: Domain name=LRR_1; Domain location=178-198; Score =10.5; E_value=3.4; Accession=PF00560.24; Description=Leucine Rich Repeat
  Pfam annotation: Domain name=LRR_1; Domain location=200-221; Score =7.6; E_value=12; Accession=PF00560.24; Description=Leucine Rich Repeat
  Pfam annotation: Domain name=LRR_1; Domain location=223-245; Score =8.3; E_value=8.9; Accession=PF00560.24; Description=Leucine Rich Repeat
  Pfam annotation: Domain name=LRR_1; Domain location=247-270; Score =7.1; E_value=15; Accession=PF00560.24; Description=Leucine Rich Repeat
  Pfam module annotation: Pfam domain module=LRR_1::LRR_1::LRR_1::LRR _1::LRR_1::LRR_1; Domain location=132-154::156-177::178-198::200 -221::223-245::247-270
MEEQRCRHMARLVLTRPHGQQATTEWWASDPLLGVIVYGAELSTRPASPMPLQVHPLLLLLLVSSLPSCAISSGSSSCAGRDDAAIVAAAFRHVRNFRAPRTKACQPVRALRLPSRNLTGAVSWAALANLSALAAVDLSGNALQGAIPGGFWRAPSLRAVDVSRNQLGGALRVEPNPQLQSLNVSGNRFTGVDGVEGLSGLVALDVSTNRIRAVPRGLRRLTRLKRLDLSSNGMRGWFPGDLPPLGGVRSLNVSYNKFSGVVDTGAVTKFGHSAFVHAGNASLVFSGHSTEPRRPRPSPPHGKSKKNGGSAGTSTESKATRSSKKRKHLSIVAVAVICGVVSLAMLLCLVGCVACGVLKSRQKGGKDDDEKKPQWGEKGEEEKEEDVVVAAARGASAAPVVLFERPLMQLTLANLAAATSGFGRESQLAERGGRSGAAYRAVLPGDQHVVVRVVEGAMAGLGEDDNPAAAATAFRELARLRHPNILPLLGYCIAGKLSSILEYEYFFLLIDID

SEQ ID NO: 83140 - protein, 174 aa, Zea mays
  Coding DNA Sequence Number=SeqID_39765
MSFLYLNSARGGGKGGGAYRQRDFFGEVAKGVGEVVTVTPMCGSFPGMVGVGRSTCAGGGGCRRRGLRPIQGGRVQLNWSVSFTRCKGRSWCEKLNYSLLSSPELSAGSGELGEARREYDRGFPALYRHRRGARAGLDQRGTQARMAWRGCAGWRALGMSAAIEHVAPLLLPVF

SEQ ID NO: 83141 - protein, 128 aa, Zea mays
  Coding DNA Sequence Number=SeqID_39766
MARVACTLRGKRLDGGVFVLSVGLSEVRWTRTTIGGPNDLGGSVTPHFTSYSMQYKGSSSLISCEKQTTQIEFLNLARAHRLVIQCSTDPSCRHAVTALVPTIASMGDLVSGQVRRKVRARLHSVKVY

SEQ ID NO: 83142 - protein, 103 aa, Zea mays
  Coding DNA Sequence Number=SeqID_39767
MATISKKRKLDTTPSSEPKVDETEEEAPPTPSAAEVAKILKRKGQPSATKEKVEEQKKRRIVNVMEAIEQTPPSASRPKQRFMQMPKLKLKVLPKPKMLMKPK

SEQ ID NO: 83143 - protein, 112 aa, Zea mays
  Coding DNA Sequence Number=SeqID_39768
MRRSGLVVPEEAIVEGTSTVEAEQIVAKGGSENEGEEDNTILSPMKPSHIEFGKSTMTTDDMVMMKKLGYFGKPRASLSGLPGKRWFRSQGRMKSLFLRASSGQGFNSLYMR

SEQ ID NO: 83144 - protein, 131 aa, Zea mays
  Coding DNA Sequence Number=SeqID_39769
MGQGSESECGRGSKGSWSAWEGDVVGDLSVRARWSTVVRGEGGADRAVPLCSEGESEHAAKRFSALIGRAREAERVKGTRTRAIGADRMAPLGRGRGEGSARGEKTAADRWNTPVRRRTRDLAWPSWAGLG

SEQ ID NO: 83145 - protein, 119 aa, Zea mays
  Coding DNA Sequence Number=SeqID_39770
  Subcellular localization annotation: CTP_CleavageSite=47; ConfidenceScore=5.24e-01
MARVACSLHGKRLYGGVSVLSVRKQLSFVVSARRWYQRRSQIRDLVCGRMFASQFENNMARTKTTQCKSTGPQGVPQHQLASRHEGSSSGGNDPIGDMEAWVEQLRSELRHRNRAREQV

SEQ ID NO: 83146 - protein, 137 aa, Zea mays
  Coding DNA Sequence Number=SeqID_39771
MWLRVVKIVVWMNLSSCSLRPKYPAANDRVGTTGVRHYPARLGSSTLYHITCRGLQDVKKSKCGGVFVKRYMSIHDYIWLYLENEKEIKVEEVRTTPPPPPEEPQAGNCFYFDICGAEPIHLSHKASPSAFSTSLLF

SEQ ID NO: 83147 - protein, 82 aa, Zea mays
  Coding DNA Sequence Number=SeqID_39772
MGLGVCSSLCQGWFASWRGVRDTLIRDVWFTGGDEDDGYDYAYGNGARETVDNGVQVRAALRCVTPYIVARMLYVVDYKGAL

SEQ ID NO: 83148 - protein, 47 aa, Zea mays
  Coding DNA Sequence Number=SeqID_39773
MARETRETLRLKELQVSLSPKLEEYIPELKDTLTKLEVVHKIVDGIC

SEQ ID NO: 83149 - protein, 214 aa, Zea mays
  Coding DNA Sequence Number=SeqID_39774
MNDVDRLEGVPLGLIYSTVGRYIRLILAQFRCTGPLRGKVGSLLRSLLEFVGPSGLTPTWPCANPFYRPLLPGPRGDDLTNYGALGPFVRSFILLVDPGDICPRQAPDLWADFGINDPKILDDSQGIAAEVWTFIQAVERAGLEGLDESEYSSDEENSSDSSEEGGGDDDDDNGGNGDGGGDSGEGGDGSDKGGSGDGSGGSKGSSKGSNKASG

SEQ ID NO: 83150 - protein, 218 aa, Zea mays
  Coding DNA Sequence Number=SeqID_39775
  Gene Ontology: Mol. function=DNA binding; Cellular component=nucleus
  Homolog annotation: Hit_ID=Q6ZJ98; Match level="QueryCoverage=83%, HitCoverage=65%, E-value=2e-16, Identity=33%"; Hit description =Putative uncharacterized protein OJ1734_E04.2
  Subcellular localization annotation: CTP_CleavageSite=64; ConfidenceScore=5.38e-01
MPGGSQGRELVATSSLFWAAGGDSTADGGCSCSRTRSGLVRKKDTFALSRSSCSRTRSGLLRVKSSVDSSDVSSSRTRSGLLRIKSFLDSHDGSFSRSQSDHVGGSPPIVEAVTKDKSGMRTLLDGCLSEDMPSRTRSGLVRRSPTVKTLSKDKSVIKGLADGCLKEDKPLGTRSGLVPIKAEVLTKGQHDRWLKNDKAAAMRSDHGGRRLAAKASSF

SEQ ID NO: 83151 - protein, 668 aa, Zea mays
  Coding DNA Sequence Number=SeqID_39776
  Gene Ontology: Mol. function=DNA binding; Cellular component=nucleus
  Homolog annotation: Hit_ID=A3BQM8; Match level="QueryCoverage=98%, HitCoverage=66%, E-value=1e-99, Identity=34%"; Hit description =Putative uncharacterized protein
MEPAWSISFLARYYIDPVSGYEFRSLKDVHNYLETGDISQCAVTPKKSTICEDITESQTHTSTSPQHMRPGTANKGIQCEILTSDGIMAPWEDNGNDTEHTMLPEPESLKATQGYGNKLETSEPTRVQPVSPHNGSRQTKSVKRKESNAEVKSKKRKTSSAVTRVRASPRLAALNAHLDVSIEHEDDMVSTNHVDWVQTIEERAIDQAQKSQSGSFDQIHGNLESTFSQLQLSQADPANGMQVIQANTTIHSQPSQLDTLSPTQKKQENSSKQLQSVVTDSSIPKRTTQKCTIDQPSQPDINHIRTDQEFTGNQFPSSLPVDTVISLGDTEEFTAGHSQPRNSDTAGQIQANEENTADQVQLSLAETVILVPAIQEYAAGYSLLSKADTTDQTQANQEYIADQVQSCLTDALIPVKAIEEYTTDYSHISKADITNQIQVNQESTDDHLYLRQVDCLAEMQIIEQNLSKQPQLSQPDTGDQIRIDLESTTNHLQPNYDENSMLQSGFSWAPEQNRGAPTTDFWKNVESQASSVSMPINGAPLSSFPANVRFQNAAAAAAAAEPALPPQVAPTETGSDQSGLAFQSLFGNIWSDPCIEFAFKTLTGDIPVLDDTTAVTDYFPEQQDLNKDPAPNCAGSVFDSSRNHTQVDVNLPPPAPDGFYDGSWFPPQ

SEQ ID NO: 83152 - protein, 177 aa, Zea mays
  Coding DNA Sequence Number=SeqID_39777
MGFILVRVRTKLQCSADRSVAMSVLQQMCSCGKKEGALLFYISRVGPYRGDLFSAREREIGSPELSCCVGLRSLARRVARRWVGQPELIGGELVIGVGHRGVGQPTWSTELVIGELVSRPASQSWSTELVIGELVSRSASQGWSADLVIGELVSRSASQSWSAELVVGELVGGVGHF

SEQ ID NO: 83153 - protein, 73 aa, Zea mays
  Coding DNA Sequence Number=SeqID_39778
MCQITIQKQKEIAEAEARQNQPKQTYEAQKLSKLKKSFLRECRAKNRRNYKKSFLRERSLCGKFTAMLSEHGA

SEQ ID NO: 83154 - protein, 114 aa, Zea mays
  Coding DNA Sequence Number=SeqID_39779
  Homolog annotation: Hit_ID=Q339B5; Match level="QueryCoverage=43%, HitCoverage=10%, E-value=1e-08, Identity=56%"; Hit description =Retrotransposon protein, putative, Ty3-gypsy subclass
MHLVCMDTLLILLSLGPGHHHPRGQDITLMIFGGTEAYDDKRRLKEAHFEVRAAEPDVPQYLICSEFSIVFDRRDHLDRITLGATVEGVGGVMSSTSPSRCPEGTKGAEGCDTA

SEQ ID NO: 83155 - protein, 252 aa, Zea mays
  Coding DNA Sequence Number=SeqID_39780
MMTASKKRDRERGYSERDPSPRRKRAPSPLLIRGSKAGPSEGFDSRLRALGLRAHYWSEVRRLAPRKGSTAASGHSGSAPTTDQGFVGWPPKGSTAASEHAERGMTLGTSDTWPRLGLRSRGTLGHFRDQQERFCNRIPSEGGIEPSDPIKRDRVRQITCRVRLTAAKSSLGRHRKLRLARPQGSDSTSTPEDGLRFASPQGSDSTSTSEDGLRLARPQGSDSTSTSEDGLRLARPQGSDSTLTPEDGLRLA

SEQ ID NO: 83156 - protein, 493 aa, Zea mays
  Coding DNA Sequence Number=SeqID_39781
  Gene Ontology: Mol. function=nucleotidyltransferase activity; Cellular component=cytoplasm; Biological process=metabolic process
  Homolog annotation: Hit_ID=Q6ZJ97; Match level="QueryCoverage=95%, HitCoverage=95%, E-value=0.0, Identity=91%"; Hit description =Putative UDP-N-acetylglucosamine pyrophosphorylase
  Pfam annotation: Domain name=UDPGP; Domain location=61-477; Score =44.7; E_value=1.8e-16; Accession=PF01704.9; Description=UTP--glucose- 1-phosphate uridylyltransferase
MTEMVVAARTPAPAAGRWGAAPPQELLERLKDYGQEGAFAFWDELAPEERDRLIRDIESLDLPRIDRIVRCSLRSQGAPIPTFEPVPESSVSTVDDRTPEDKERWWRRGLRAISEGKLAVVLLAGGQGTRLGSSDPKGCFSIGLPSRKSLFQLQAERILCIQKLAAQCTDAPGSTVQIHWYIMTSPFTDEVTRKFFETHRYFGLEPNQVTFFQQGTIPCVSHDGRFIMETPYKVAKAPDGNGGVYAALKSKRLLDDMAAKGVKYVDCYGVDNVLVRVADPTFLGYFIDRGVSAAAKVVRKAYPQEKVGVFVQRGKGGPLSVVEYSEMDAAMTTEINQTTGRLRYCWSNICLHMFTLDFLNQVTNSLEKDSIYHLAEKRIPSVHGYTSGLKLEQFIFDVFNYSPSTALFEVLREEEFAPVKNANGATYDTPDSARLMLLRLHSRWVVAAGGFLTHSVPLYMTGVEVSPLCSYAGENLEAICSGRTFHAPSEISF

SEQ ID NO: 83157 - protein, 147 aa, Zea mays
  Coding DNA Sequence Number=SeqID_39782
MEMGSPLSLGLNCITWSTHSWRPWEGRLMNVCPQEDGGYIIVIQKNLTEKNPEMRILVLAMDLIASAMAVEVMVVVATLISIIHVEDDYVLSAAVFNRIIRQTDCTLIIALEWDFAQIGAKVLEGLPHPKQLRATPSCDNILDLNGG

SEQ ID NO: 83158 - protein, 266 aa, Zea mays
  Coding DNA Sequence Number=SeqID_39783
MEAQAHASCNRHAGCYVRATAPPLAPLPRLLDCGTSGQEQRSRRQPSLRPIQGRRENPLSRHEDSVPVFCSSNGSRTCNGRLVNHSPVALTPRRDRRRLRQEKQATLHLRHNDRVKKGNRPRASLLIRGSKAGPSEGFNGRLRALGFRAHYWSEVRRSAPRKGSTAASGHSGSAPTTDQGFVGWPSKVHSRLRHRARDDPGYVRYITKARATLPRGSGAALANPAPAKPLTASTYQPENLGPDRAPGLWPARMREQPDQLKCCEMH

SEQ ID NO: 83159 - protein, 624 aa, Zea mays
  Coding DNA Sequence Number=SeqID_39784
  Homolog annotation: Hit_ID=A3BAF3; Match level="QueryCoverage=36%, HitCoverage=96%, E-value=2e-37, Identity=72%"; Hit description =Putative uncharacterized protein
MGNSIGGRRKGAKVMQLDGTAFRVKPPASAGAVLRDHPGFQLLESEEVGARERLESLMLTRRSTSDLSLPASAATATATAPPSPLSESEGGPVRLRMRLPKAQVERLMAESRDGAEAAARIMQLCAAANNPASGAATPERGILRTPERRSPRFVPTPDWGVGVGATAASSPQTPERSPRFAAMTPDWGTDGFMVPAGVATAPRTPERWPALPRTPEYASPDVRASRKELLLDEMALMEARITDAIEGRSSLSDTEVTVGSHARNIPDSVVADLAADHLFGGAFGLDNLTPMAAQAPSAKEVPQPKAEVVASSESEPATYAELAAALSKCSTIDLNRGIYSVPNPVLHRQHLLRDCDDNQVGVDVDILPTSEFDEGPIFDEEPCFHRSLLDSDPDSPYDLFVPVLSSPCDDERIIALSSDCTATNSFRVGSCDDNLVRVKQSSVDTQSLRTASSAGEFEAPYRDRCEQPRRNEALDVVCELYRDRHEQTHGYETPDAPSFSSGIDDDIDVVEELHIPVRAHQKEQAHEFERAEDTAPPSHALCYDPHRADVPTVHSALKVFDQMSSRGSDASPGFRDLVFLVASASSSCSVEDERPKVPSSIGNDMHLVSRFLSSRLDGGVKKPS

SEQ ID NO: 83160 - protein, 75 aa, Zea mays
  Coding DNA Sequence Number=SeqID_39785
MRGLRMFPGTLIGGFEGYDPHLYPKRPATVRERGNDDRFWSSASAKVAGSLGGSYCREESGKKIHRAAVAGSKKR

SEQ ID NO: 83161 - protein, 79 aa, Zea mays
  Coding DNA Sequence Number=SeqID_39786
MGWMPEGIVTPDLIPARAPQRSEKGGMMIGFGAQLARRSAGSSGGSLLPRGIGEEDPQGCGRGEQEEVNSIGFSRGWYQ

SEQ ID NO: 83162 - protein, 166 aa, Zea mays
  Coding DNA Sequence Number=SeqID_39787
  Homolog annotation: Hit_ID=A2YD96; Match level="QueryCoverage=49%, HitCoverage=9%, E-value=1e-21, Identity=60%"; Hit description =Putative uncharacterized protein
MEANPMESYPSKEVENLREKLVEENFYLITELGEQGRVSVLLLKLDDPIPRRKPAIVFLHSSYKCKEWLRPLLEVFLSLRFDGDIGKDEIEEKEVNQRGINIGKNEEVPKQLPVSNKKKTRHELISKARQEVDADLRAISFSLDPKERKGIKKKQFLLCLRLTFAF

SEQ ID NO: 83163 - protein, 165 aa, Zea mays
  Coding DNA Sequence Number=SeqID_39788
MAGEHREDKEGEFFVRFGHGGGLTPSGITVKMEVRCQTSFCQNEDGFPKLLRACTVRLGIRSQPEYDGREFVEHGTEKMRALEEQQLLEDDPTVVYLTAYLLTLDAQYDFLARHHRQMIARAEDAEKHNCKLHVDLTTAQACVAALESHEVIVVEALKQAKDEHV

SEQ ID NO: 83164 - protein, 68 aa, Zea mays
  Coding DNA Sequence Number=SeqID_39789
  Subcellular localization annotation: CTP_CleavageSite=32; ConfidenceScore=5.33e-01
MELALTQPPRVSRGMIRLGWVASRRRPPPPVLVARVAPTTSDTDPHTGVTVATSRTSLTTPPKLYCRR

SEQ ID NO: 83165 - protein, 71 aa, Zea mays
  Coding DNA Sequence Number=SeqID_39790
MTRIKDNTLAGFAIGPKAHDDLTANVGPRRTHLCFSKVNHFVAFNEAPGRAQHDEPRQAPGYEGQGLASLE

SEQ ID NO: 83166 - protein, 228 aa, Zea mays
  Coding DNA Sequence Number=SeqID_39791
MDRDLSPYFVSLRRRGRLAPLPPSAWGEAEATKGLSDCVSALGRRRAGAALTVLLFWLMMKSRFSKQMTALVVYLMRGSLAVLAIMVRFLGGGGQASWALIALPLPSKEKSRLSKQIAISADRLASWLAILSLKNFVVNVQALPSFSVSNLASTSKFVVRVLGFKRCAWWAQDLYWFRHNVPTSSHWWLVLPTPLMIKAHSRGYKRAIEGGEAPKALIHGGGGYKMEY

SEQ ID NO: 83167 - protein, 101 aa, Zea mays
  Coding DNA Sequence Number=SeqID_39792
MSYYGSSSISPHAFPPQLCHAPVVIIALVVRDHIPTFDDLEFVGMVDGRGYLIFNTLYTDSNLDLSPPKSSEEEPSSGQENKDCLTAVLRTQGWLIPCGSG

SEQ ID NO: 83168 - protein, 191 aa, Zea mays
  Coding DNA Sequence Number=SeqID_39793
  Homolog annotation: Hit_ID=Q6QP51; Match level="QueryCoverage=70%, HitCoverage=59%, E-value=2e-27, Identity=53%"; Hit description =Putative growth-regulating factor 1
  Subcellular localization annotation: CTP_CleavageSite=24; ConfidenceScore=5.38e-01
MTTTSKRVRQPPQSTRPPSPLLIRGSKAGPSKGFDSRPRARRIRDDPGNVRYMGEARATLPSRQGRRDRSHFAPLLTDLTGNQRYSPRSDCCANHQGKTESRSSTSSASGATGSYASPDLRPRPQPRPREKVSASPDLRPRPQHSASGEGLHLARPQASASASASGEGSRHFSDSHLSSCTGLKALLRQPR

SEQ ID NO: 83169 - protein, 537 aa, Zea mays
  Coding DNA Sequence Number=SeqID_39794
  Subcellular localization annotation: CTP_CleavageSite=68; ConfidenceScore=5.17e-01
MTTSLVVERSEPGCGLPCPQLQGCSSSALGRRASRVGAPPSAWAGGPLLPPAFGGEARSPALRRRRTSATRGRPSEAPSAASCLAPRPGWLWCRLRCCLLPLGRGVHVRPPHGQRSRLAQVGHIHGFSRAAGRPGGSYKTSYAAGAAARWSLPLEGLMWSPPLVRLPTAEVVASAGETVSATYRRTLGSLALMASLSPPVGRRGRGPFRNDVHAEMIAAAWRVVGAEVAATVGADVVTSAGEPLGASYPVALTGVEVVHTCRVEMELGLHLKIDVILSLFVRAVERAGPRYGTRLSGCMGSGPPQETNAHSLAPIPRPMVRDQAERLHGLRTIPWNGVPFSRAGPQAIGPPNFRIRGPKLQAWLLNSDVAMSDKWEPYGPIGWVYGDRPHRVVVHGPTQLGESYGALLGLVLAVGLGPDPGSPPAFDTGALVSGCGHFRVYLLVAWIHGGIQKAVFTRVRASDEDILQVPFGRLIPEVPLSRGHLAIVHLFFARLAARWRAVFGRLLTLLTDAFREFHKMRRELDQGNEDATPQKKT

SEQ ID NO: 83170 - protein, 186 aa, Zea mays
  Coding DNA Sequence Number=SeqID_39795
MVTGQSAVGIGVADGMTIGESSAITSTGAQVQQANHQSDSGPACRLTSSSEVGPGATVGTLNQGYPLLQYEGAAPVRHLQVTRRAAPDPTTWTDLRIPHGKKGQYVPRSTDWVRTSAEEHRTPVSTSPELPRRHVRSPRVRSGPWQGPGMEKTLTQARVRCRHVSKSCPTLPAQAETHRVRMACGP

SEQ ID NO: 83171 - protein, 111 aa, Zea mays
  Coding DNA Sequence Number=SeqID_39796
MAEECQSPWGCTPLTKTRGRQDRRRHHERELFGNKIAGGDDPDADPSREHQCTPSGGLEGGRAWWMQVERGMATTWEIDRILKGRSPHSCLEMAMGKYPPGITTPYPYPYP

SEQ ID NO: 83172 - protein, 198 aa, Zea mays
  Coding DNA Sequence Number=SeqID_39797
  Homolog annotation: Hit_ID=A2XFR6; Match level="QueryCoverage=73%, HitCoverage=41%, E-value=4e-26, Identity=43%"; Hit description =Putative uncharacterized protein
  Subcellular localization annotation: CTP_CleavageSite=18; ConfidenceScore=5.24e-01
MTQTTLVMMMTMKKNKKRLSTRKPMVNSRITSWGYGMTFCMRWDPMSDPCDRGFKTLSAHESLALLSTYTASVSDAARRTLWSLSHTYRQQLHNMKYRHLPLCLRGESQTSIVLGRAGEDRLNTLVCVVVGLNTDLDSATLDLSRVHLELEDAHARIAALEAQLEGRDPPEAQVPGMALSPPRKRILYGEPGSITRLL

SEQ ID NO: 83173 - protein, 1448 aa, Zea mays
  Coding DNA Sequence Number=SeqID_39798
  Gene Ontology: Mol. function=protein binding; Cellular component=late endosome; Biological process=protein transport
  Homolog annotation: Hit_ID=A5ALG6; Match level="QueryCoverage=89%, HitCoverage=92%, E-value=0.0, Identity=33%"; Hit description =Putative uncharacterized protein
  Pfam annotation: Domain name=ATG_C; Domain location=1301-1389; Score =67.8; E_value=3.5e-17; Accession=PF09333.2; Description=ATG C terminal domain
IDQFFECFEELRNSQSSLGNSGIWDWTCSVFNAISFASTLASGSDQVPKEPVVERTLRASITEISVLLLFSDDTDIKNSSVPISALDDMRHSEMFSSCLSSEHFEKSIISPATASSLNMHHLKAKCENIHLDLQTYPKNVRLKASIAQIKLDEYYHAGNNISDDSNLGNHFLNNNLRQGVQASLPQCLFAVGDHSVETYEFCGNSSTELTRVELLKTFGECTFCYDVSTKDQDGNLVSSTSMSIYLAPLLLWVHFHTIYMLLSFVSNVESDLSHGEHKIQKHGDEKGSRLTTSTTMSSSGSLKVQISLAQARIVLCFPSEFSWDLSHPSVLDKFLVIDHTSCLNMVETASHPQNEMQNEVHLSKSCTSIHLAVGDIDVYLVKPVNNVLVGRICSSSRQTFSAMKILSVTGSSYNDSGITLIRRNILEICTELNETVEVGPLLQAELKGSWNSVKLNVSKFCLFSCSNVGGLNNASFLWVNHGEGELWGSVSAKNDKIPGESKDFLIVACKDSACRRGDGEGTNVLSIGAAGCSVTHIRNPKLKENYTSVDVRSGTIVAPGGRMDWINAICLLFSSGSDRTEKSDDSNTPNSYQSGEPYSSSLFIELADVAVSYEPHFKHSTLSAGAADRKFFSCLLAASSFKLHNKSASASAATDFDIQLRDLGVLISQSSGSTNGTCSYGVDYLRQAGYTKVVQNTFIEASLRLDSSFWKLEISDSQFDIGTCHDTTYGLIGLGSQLQQLYGPDMQDALDHLQSRWNSVQQANKQNMAADASDKSESSLEILVDSGDYQSDGLLDDIIENAFNTEDCMDTNFWENNYHHLFSSSETDDGFELNAATSHVFPISTPEGNVTQISLEQNVCPDQIIDSYCVPEFHQSLSTLCDEEHKCTSGDNSHRTLESEDAGWYNNVPLTIVENHVLKKKNEQVLQHKVSSVCSLNPDEYCNLKGKVHIHDIDVKWRMYAGDDWLLPQKDLTSLTCTDGRNRSSSLEFTVRGLNIQVDMYPNGDVSISRLSVAAEDITLCDQSIHAPWKLVLGCYNSKDYPRESCSSAFRLELESVRPEPQAPLEDYRLHLEILPLQLHLDQEQLNFLINFFKNDSCNNDPHLHCENDTVDVKSTSNGSNMVVDEALLPFFQKFDVKPLILHINYIPRQFDPIALSKGNYAELLNILPWKGIDLKLKHVSAMGIYGWNSIGDTVAAEWLEDISKNQVHKLLKGLPPIRSLVAVGSGTRKLVSLPIKSYKKDRKLLKGMQRGAVAFIRSVTIEAVGLGVHLAAGAHDMLVKTECALTTVPPPLASCEVKRTKHNIRANQPESAQQGMKQAYESLTDGFGRTSSAIIGNPIKVYNRGAGVGSVLATAICGAPAAAVAPISASARALHYALLGLRNRLKLCLEAAPISCLEGYLQTRIGGDDLLKTTPFLLNQIAQQIADATVNSVQIVRQIIFGIKATH

SEQ ID NO: 83174 - protein, 410 aa, Zea mays
  Coding DNA Sequence Number=SeqID_39799
  Homolog annotation: Hit_ID=A5ALG4; Match level="QueryCoverage=90%, HitCoverage=73%, E-value=8e-38, Identity=29%"; Hit description =Putative uncharacterized protein
MGFLDGFRPDTLLKRVCKSLLKKRLGDLILGDLDLDQFDIQLGHGTLQLNDLALNAEFINRKLSGSPITLKEGSIKSLLVRFAASCEIVVEELELVLSPSVASEVDDVHTECSVSGSTSDTHTLVKIQRNESDSNQCSTSVSRDVDDGVKRIANAVKRFLTSFNIKLKNAYVIFDPQTSLSSRFPETSRSLVFRIKELEFGTQLGLFKLDNFLTFREAVIEFLKMDDVDTLLQNDLNRGTADISAHHSTTAVLTGPIGGFSGKLNLSIPWNKGCLSFEKIDADVSVDSLELRLQFSSIRWIMNVWDSLQRKPVDEQSCVHNIADISISASSSAYCPPASSSLKPCSDSVIASDYMAQSTFSQNRQDKVQDSFLTSAHVITDWMEPVARKDLCDPDSDCDERFVSALHFIP

SEQ ID NO: 83175 - protein, 143 aa, Zea mays
  Coding DNA Sequence Number=SeqID_39800
  Subcellular localization annotation: CTP_CleavageSite=35; ConfidenceScore=5.04e-01
MDIEVAFYIPDNIHLEGCRSRLSPSFGSGGFSRLRQNSEGQTSRSPAREADSSVRVCTGHRVRARGRIEGERRIRPGRPRQRRIQPGRRDPAKGNDGSSREGRSYVDPAEKAAAAMDPTKAMKGWAAGRVQPGRGLRRTWQGV

SEQ ID NO: 83176 - protein, 334 aa, Zea mays
  Coding DNA Sequence Number=SeqID_39801
  Gene Ontology: Mol. function=monooxygenase activity; Cellular component=intrinsic to endoplasmic reticulum membrane; Biological process=electron transport
  Homolog annotation: Hit_ID=Q69SQ2; Match level="QueryCoverage=87%, HitCoverage=100%, E-value=8e-80, Identity=50%"; Hit description =Flavin-containing monooxygenase-like
MAHADAAELVRGKLVAVVGAGKSAMDIVAQCAEANGSRYPCTMVYRSAHWMVDPKVARRVKFFTFTSARWTELMVHKPGEGFLLSLLATTLTPLRWLISKLAEVYYKRSIPMQKHGMVPDCSFSQGSLGWRLGILPEGFYDRVDDGSVELRRCRGTIAFCADGLVLDGGAVVGADVVILSTGFHIDQPLRDVLASPWFGDMIVAADDGSAAVLPLYRHCVHPRVPQMAVVGYAESGSSIYPYEMMAKWVAHLLDGAVRLPAVRDMERGVAEWARWGRWARRACGGFFLKSCIASVTTWYHDQLCRDMGHRPRRKAGLLAECLQPYGPTDYAGIQ

SEQ ID NO: 83177 - protein, 137 aa, Zea mays
  Coding DNA Sequence Number=SeqID_39802
MAPVLYFEMREKSREGAMTEVGACILHGVRFGEEDRPNRVGPHVCVMSMPSQGGVGLTECPHASVEARSGAWCVAVLLGPHVGAGDSGVGWSGPRDATGSGEREEKQVPRGCLLEEEQIGFVEAVVRDCHELVCLEV

SEQ ID NO: 83178 - protein, 360 aa, Zea mays
  Coding DNA Sequence Number=SeqID_39803
  Gene Ontology: Mol. function=protein binding
  Homolog annotation: Hit_ID=Q5Z845; Match level="QueryCoverage=100%, HitCoverage=100%, E-value=0.0, Identity=82%"; Hit description =Putative uncharacterized protein P0468G03.24
  Pfam annotation: Domain name=DUF266; Domain location=57-351; Score =659.1; E_value=3.7e-195; Accession=PF03267.5; Description =Arabidopsis protein of unknown function, DUF266
MAPRSRPSSKRPLWFIVLVAFVCAVAIGAYLYTPRHYTACYLVPSEACNSRPPPEPARVYTDDEIAARAIMRDIIRARPVQSKNPKIAFMFLTPSSLPFEKLWEKFFMGHEDRYTIYVHASRDRPIHASPVFSGRDIRSEKVIWGTISMVDAEKRLLAHALQDPENQHFVLLSESYLMETNVSFVDCFDDPGPHGAGRYSDHMLPEIVKKDWRKGAQWFTVKRQHAVLILADTLYYGKFKRYCKPGNEWHNCYSDEHYLPTLFNMADPTGIANWSVTHVDWSEGKWHPKVYRAVDTSFELLKNISSIDESVHVSSNAKHVAQRRPCVWNGMKRPCYLFARKFYPEALGNLMNIFSNFTVI

SEQ ID NO: 83179 - protein, 822 aa, Zea mays
  Coding DNA Sequence Number=SeqID_39804
  Gene Ontology: Mol. function=serine-type endopeptidase activity; Cellular component=cell wall; Biological process=negative regulation of catalytic activity
  Homolog annotation: Hit_ID=Q5Z852; Match level="QueryCoverage=100%, HitCoverage=100%, E-value=0.0, Identity=83%"; Hit description =Putative meiotic serine proteinase
  Pfam annotation: Domain name=DUF1034; Domain location=702-822; Score =47.2; E_value=5.7e-11; Accession=PF06280.3; Description=Domain of Unknown Function (DUF1034)
  Pfam annotation: Domain name=PA; Domain location=394-507; Score=57.8; E_value=3.8e-14; Accession=PF02225.13; Description=PA domain
  Pfam annotation: Domain name=Peptidase_S8; Domain location=143-668; Score=101.3; E_value=3e-27; Accession=PF00082.13; Description =Subtilase family
  Pfam annotation: Domain name=Subtilisin_N; Domain location=25-131; Score=54.3; E_value=4.2e-13; Accession=PF05922.7; Description =Subtilisin N-terminal Region
  Pfam module annotation: Pfam domain module=DUF1034::PA::Peptidase _S8::Subtilisin_N; Domain location=702-822::394-507::143-668::25-131
MRRIRLACLLVIFVQVQWAALGTHDVYIVTMEGDPVVSYRGGVQGFPATAVDSDEEIDLTSEAVKSYALHLRGHHDKLLDSLLVEGTYEKLYSYHHLINGFAVHMSPLQAEFLKKAPGVKHVERDMKVQKLTTHTPQFLGLPTGVWSTGGGLDRAGEDVVIGFVDSGIYPEHPSFAAHKTDPYGPAPRYKGKCEMDPVTQRSFCNGKIVGAQHFAKAAMAAGAFNPDVEFASPLDGDGHGSHTAAIAAGNNGVPVRMHGHEFGKASGMAPRARVAVYKVLYRLFGGYIADVVAAIDQAVQDGVDILNLSVGPNSPPTATRTTFLNPFDAALLSAVKAGVFVAQAAGNGGPFPKTLVSFSPWITTVAAGVDDRRYKNHLTLGNGKLLSGLGVSPATHGNMSFSLISAADALLGSSATKYSALDCQRPELLNKRKVQGRILLCGYSFNYISGTASIKKVSQTARNLGAAGFVVAVENNYPGTKFDPVPFSIPGILITDVSKTEDLIDYYNSSTIRDWAGRATAFKATAGIADGLAPTLYNSAPQVALFSSRGPDVKDFSFQDADVLKPDILAPGNLIWAAWAPNGTDESNYAGEGFAMVSGTSMAAPHIAGIAALIKQKNPKWSPSAIKSAMMTTANTLDKGSRPLRAQQYTASEMMTLSRATPFDCGSGAVNPKAALDPGLVLDATHEEYIAFLCSIPDVNQSEVSNIAGSACNSSSKGRQRPFDLNLPSIAISQLRGTVTVTRTVTSVSEETETYTIMTRMPPEVALEVTPPAVTVLPGASRELAVTLTARSVTGTYSFGEIAMKGDRGHLVRIPVVAMGFK

SEQ ID NO: 83180 - protein, 840 aa, Zea mays
  Coding DNA Sequence Number=SeqID_39805
  Gene Ontology: Mol. function=anthranilate synthase activity; Cellular component=cytoplasm; Biological process=folic acid and derivative biosynthetic process
  Homolog annotation: Hit_ID=A4UIY9; Match level="QueryCoverage=100%, HitCoverage=100%, E-value=0.0, Identity=63%"; Hit description=4 -amino-4-deoxychorismate synthase
  Pfam annotation: Domain name=Anth_synt_I_N; Domain location=290-450; Score=85.5; E_value=1.7e-22; Accession=PF04715.4; Description =Anthranilate synthase component I, N terminal region
  Pfam annotation: Domain name=Chorismate_bind; Domain location=534 -819; Score=323.5; E_value=3.9e-94; Accession=PF00425.9; Description =chorismate binding enzyme
  Pfam annotation: Domain name=GATase; Domain location=55-208; Score =13.0; E_value=8.9e-07; Accession=PF00117.19; Description=Glutamine amidotransferase class-I
  Pfam module annotation: Pfam domain module=Anth_synt_I_N::Chorismate _bind::GATase; Domain location=290-450::534-819::55-208
  Subcellular localization annotation: CTP_CleavageSite=21; ConfidenceScore=5.08e-01
MAALRLPAQPVARWPHLPSAYAAAAAARRVSAPRGHLAARRAKGEEPPEPPVRTLLIDNYDSYTYNIFQELSVVNGGVCLRILLECGDIPILGVCLGHQALGFVHGAEIVHAPEAIHGRLRQGLEFIEIEHDGCHLFNRVPSGRNSGFKVVRYHSLVIESGSLPDDLTSIAWTASPNLLSYLESDRTNVSTFLGTLDNNLMRNPLEYSNNGGELSNIGHACESDDSRVIMGIRHSSRPHYGVQVNSASHHDSIPKDLLHTERMELSESVLGKRGIGKKCLRLQWKKIENFVCPTVGSEDIFAVLFGHQSGEDTFWLDSSSVDQNRARFSFMGGKGGSLWKQMSFHLSGQRANCGGMLSIQDAYGFTAKKFIKDGFLEFLNKEIESIQYNEKDYEGLPFEFHGGFVGYLGYGLKVECDASSNKAKSSTPDACFVFADNTVVVDHSNGDVYILSLHDEFYSSNGDGICKNSTHTSWLVETEKKLLRLGGMPSGSPIIRKTHARSSSVHKQAGSPINGKTYVRSSSALKQSFVVEKSKDQYVRDVQNCLDYIRDGESYELCLTTQMKRRADCINALQLYLKLRKQNPAPYAAWLNFSSENLSICCSSPERFLRLDRAGVLEAKPIKGTIARGRTPEEDECLRLQLRYRQRSYATAIFSLLHVLNSTSEKDQAENLMIVDLLRNDLGKVCEPGSVHVPRLMDVESYRSVHTMVSTVCGTKKPDLSPVDCVKAAFPGGSMTGAPKVRSMEILDSLETSPRGVYSGSIGFFSYNHTFDLNIVIRTVILHDGEASVGAGGAIVALSSPEAEYDEMLLKAKAPTEVVEDLVQTIYSSDRSDSMQTTIS

SEQ ID NO: 83181 - protein, 131 aa, Zea mays
  Coding DNA Sequence Number=SeqID_39806
  Pfam annotation: Domain name=IQ; Domain location=84-104; Score=24.8; E_value=0.00031; Accession=PF00612.18; Description=IQ calmodulin -binding motif
  Subcellular localization annotation: CTP_CleavageSite=36; ConfidenceScore=5.20e-01
MDRRSMKPGIRGRLSSPPPAAHPSPPPAATHPSPPPAAATPSHPPSPAPDAFTRLEESFGRFAEQWDQFVVMFHRYKEKTEKELQAAVRLQAAARGFLARRQVPKVHNKPIKRPRNGSNKESKRQPKGTLV

SEQ ID NO: 83182 - protein, 37 aa, Zea mays
  Coding DNA Sequence Number=SeqID_39807
MWMGSVRRRGERNAAHNEIEPHAAKNSQEAQLIDSMR

SEQ ID NO: 83183 - protein, 85 aa, Zea mays
  Coding DNA Sequence Number=SeqID_39808
MPRNIGKSVSLVPDLNLASGHIPLTRPETWSPHFRLWWGTSAVTARRPVGGSLEDMVAGVTWPSTLPPGWTVEWDPASAEEEHEE

SEQ ID NO: 83184 - protein, 122 aa, Zea mays
  Coding DNA Sequence Number=SeqID_39809
MVPPGRWYVTCHKMSATVAVVAEEEGRHQCHLHGCHGSRELLDSWCQGLKREGGGGAVDEDVAGLGSDGVEIGSVAEEGDDRMVVDGGLAISDTRLLWSAFGDDVMWFLGSQVLFAGWGCDG

SEQ ID NO: 83185 - protein, 97 aa, Zea mays
  Coding DNA Sequence Number=SeqID_39810
MQRCCLLLVAILFLLHQSSPPRHQRHRHGHAGRVAQEKLEVGVHTDRAKYVLAFFAPNPNDMGCTYLEIWFNNIPVRTVGWVTNRQSPILGGVDAGP

SEQ ID NO: 83186 - protein, 282 aa, Zea mays
  Coding DNA Sequence Number=SeqID_39811
  Gene Ontology: Cellular component=integral to membrane; Biological process=positive regulation of gene expression, epigenetic
  Homolog annotation: Hit_ID=Q8RZQ8; Match level="QueryCoverage=71%, HitCoverage=73%, E-value=1e-100, Identity=91%"; Hit description =Putative MtN3
  Pfam annotation: Domain name=MtN3_slv; Domain location=145-231; Score= 138.5; E_value=1.9e-38; Accession=PF03083.7; Description=MtN3saliva family
  Pfam annotation: Domain name=MtN3_slv; Domain location=28-111; Score =65.5; E_value=1.7e-16; Accession=PF03083.7; Description=MtN3saliva family
  Pfam module annotation: Pfam domain module=MtN3_slv::MtN3_slv; Domain location=145-231::28-111
  Subcellular localization annotation: CTP_CleavageSite=50; ConfidenceScore=5.36e-01
MPFLPLLHAYLMVFFLPRLISVRSVSPGNVIALFLFLSPVVTFWRVIRKRSTEDFSGVPYNMTLLNCLLSAWYGLPFVSPNNILVSTINGTGSVIEAIYVVIFLIFAVDRRARLSMLGLLGIVASIFTTVVLVSLLALHGNARKVFCGLAATIFSICMYASPLSIMRLVIKTKSVEFMPFLLSLAVFLCGTSWFIYGLLGRDPFIIIPNGCGSFLGLMQLILYAIYRKNKGPAAPAGKGEAAAAAAEVEDTKKVAAAVELADATTNKAADAVGGDGKVASQV

SEQ ID NO: 83187 - protein, 489 aa, Zea mays
  Coding DNA Sequence Number=SeqID_39812
MNKTLAFKMPLQTEPRFHLRRYEQPHTIGGPAEQQKADGRLTVARSSSSDNDPRYGWPNCSSDGLRANAAATLPWPTPMLEGRGQEPSALRQIPTQILPDEWSTDLRAEAPYQCKGRTAPEHERHPSSARRLGRSSRARGATTALVAGGGTESQAGEPNALKLTTPAVDQPRVVEVRPSRRASERPLPRMLKERLTHEPAREVELRLSPASAPARMMNILEAEGGTKIAARLASPHPGAGAVVDRVFSNTLQGPPLWRGGWVPRVIQAGPGQKKPNHRAWCMQPPSGYKRPSAFAQTSGPTRHATGAPVAMCEQLHRHSRHYHASSTAEPAGRSSGHVVSQAYVPSRGSERTLSHGVKTARPCSVPRMARARTTAASRTTRPVALTPRRDRRRLWQGKQATLRLRHNDRVKKGNRPRATLLIRVSKAGPSEGFNSRLRACGLHTRYWLEVRRPAPRKGSTAASSHSGSAPTTDQGFVGWPSKGSQPPQT

SEQ ID NO: 83188 - protein, 79 aa, Zea mays
  Coding DNA Sequence Number=SeqID_39813
MAHRTVRCTPDMSGAPATSPVPLESDRWSSDFWARLEVWWRTGHELFSVRCAGSRWREAAVAPRMHRTVRCTPDMSGEL

SEQ ID NO: 83189 - protein, 151 aa, Zea mays
  Coding DNA Sequence Number=SeqID_39814
  Subcellular localization annotation: CTP_CleavageSite=22; ConfidenceScore=5.29e-01
MNKHTGIRSAITNGTPVPPPQRSSLGSSFGAGVTTGGLSPAEDENQPFRQADGDPGPPAPYLSRHGWRKSPWDSRTPFPPGAGGRKRQPTHAGAAPRLASSSILAWMTKILEAEGGVEAAAWPAFPTVELEVTILGDRRLREATRPRDENP

SEQ ID NO: 83190 - protein, 335 aa, Zea mays
  Coding DNA Sequence Number=SeqID_39815
  Gene Ontology: Mol. function=nucleic acid binding
  Homolog annotation: Hit_ID=Q2QU58; Match level="QueryCoverage=37%, HitCoverage=28%, E-value=2e-18, Identity=40%"; Hit description=Zinc knuckle family protein
  Pfam annotation: Domain name=zf-CCHC; Domain location=235-252; Score =6.7; E_value=0.15; Accession=PF00098.14; Description=Zinc knuckle
  Pfam annotation: Domain name=zf-CCHC; Domain location=282-299; Score =2.9; E_value=0.55; Accession=PF00098.14; Description=Zinc knuckle
  Pfam module annotation: Pfam domain module=zf-CCHC::zf-CCHC; Domain location=235-252::282-299
MSRGLRNESTSKLEMVEVVSTSSFGADVDPRAIDLAMRITESMFLKMKEDEAKNKIKGEENDRWRPNDESTTSQGSSFKSTSHMCFVANGSDSESESEDEEEHESDSEDEDDLQQFFAQLSKKNRMSLLKLMKRAEEQKEVLHKQEDFLIRKIEDLENLTKEHEKLKCSHDDLVQRVKKVEKGTTVACTKPLRKNTKLSKKDMSKTQGDKINAHIICSNNVPMCFNKERSKRSDRRCYGCKEKGHEIGSCPRMKNQDLARSRKMTIKKDESKRQMHCKDKHRICYNCCERGHLFKPHRKNGALKNDLKGIYLALEKIQLYGRLHIHFHIMAIYML

SEQ ID NO: 83191 - protein, 201 aa, Zea mays
  Coding DNA Sequence Number=SeqID_39816
MKFDADAVDYLFPMFGDVMEAHRGAGSAVGGGWGGCERVKPRRPSAAAGCRDVELEYDDAVALAKSMSVLIAAAAAAPEPKTARWGRLIPWKIKALRNRPAGDRRDSVPERPAPCVKDACALSYPDRTWASELDGAARWEDLVAGLRLMSYRAKGVPARFVSVGPATAAKTSSGGWRLCLRPNICPPRDQFDKVTWCRRRR

SEQ ID NO: 83192 - protein, 108 aa, Zea mays
  Coding DNA Sequence Number=SeqID_39817
MTVAGAREQRSRRQPSSRPIRGQQENPLSRREDNAPVIRSSNGSRTRNGRPASYSPRCINSAAGQAALLAGAAGDASPKQPRQKRDRERGIPRKGSFPVKEPGSEPPY

SEQ ID NO: 83193 - protein, 225 aa, Zea mays
  Coding DNA Sequence Number=SeqID_39818
MMGASSPPARHVALCYTPIVHLDPLLTPIKGRTRAFLEKVGRAGTRTGQALSWGRSLPSPAWTLVTPYCKRTRPGRGTNTKAAGFPPLSSPSPATSLPPFALAHALDPSGLGHAAHSLVGLRDPPVSRRRQVQSVNGCFELIDGAAAHDGIVRIYHVHDIKGYLLTSGIGCYTEGERQLYFADGEGALAAEAIQRVVRRLKQAVDYAHAIEGVKEDDVRLTAVVN

SEQ ID NO: 83194 - protein, 600 aa, Zea mays
  Coding DNA Sequence Number=SeqID_39819
  Gene Ontology: Mol. function=transcription factor activity; Cellular component=cytoplasm; Biological process=regulation of transcription
  Homolog annotation: Hit_ID=Q84PD5; Match level="QueryCoverage=99%, HitCoverage=95%, E-value=1e-150, Identity=51%"; Hit description =Scarecrow transcriptional regulator-like protein
  Pfam annotation: Domain name=GRAS; Domain location=206-510; Score =245.5; E_value=1.2e-70; Accession=PF03514.5; Description=GRAS family transcription factor
MQMQLQERADAAAGGGVLKRSLGELERWQHQQQHVAAQQALYLRAVRQRTAAAVDIAALLGGIPSQVVPGSSFGGGLASPSSTLSSLTTASRAAVPLMQPQPQRQGPLMTSSPQTQAFGLSRAPLPQPSVSSDLFILQELEKQLLDDDDDDNEPVAAMSGTGSAVTNSEWEETIQQLSSIAAAPSPGPPAAATPTNNNNNNVGMTRSPSNSSSSTASSSASCSPPTPGAASRQLLSEAAVAIADGNHDAAASHLAALKRAANQHGDAEQRLIAMMVAALSSRIVPAASAPAQHLAELCGFEQRAGSQLLQDISPCFRVALHAASVAIVDAVGDHRAIHLVDFDVSLPQHAALIQYLADQPVQGRSLKVTAVTDPSSPFTQSLTASLPAIGERLKKLAERAGVEYRFKVVSCRAAELDASRLCCEPGEAVAVNLAFALSHVPDESVSPANPRDELLRRVRALGPQVVTLVEQELNTNTAPLAARFTDACAHYGAILESLDATLGRETAEKARAEAALSRKAANAVGRDGPDRLERCEVFGKWRARFGMAGFRPVSLGSSIAEQMVAPRVGPVPPGFTVKAENGVLRLCWMGRVVTVASAWR

SEQ ID NO: 83195 - protein, 56 aa, Zea mays
  Coding DNA Sequence Number=SeqID_39820
MGLGVRYGFTQSISGLSPRLVLTLVDATDDVAKPIVNTDLPISEYLQETLYFWLSI

SEQ ID NO: 83196 - protein, 89 aa, Zea mays
  Coding DNA Sequence Number=SeqID_39821
MAWGGKRGGPCPSIYSHGGGIRGRDERISGRMRGLVGGISQEENTWRYIGGIFGQYFWKELEGITREISGQYFWKEFEGDHWGIICRIF

SEQ ID NO: 83197 - protein, 635 aa, Zea mays
  Coding DNA Sequence Number=SeqID_39822
MPSSSSSADATPPAAASSEETLSDVMVEELRAGDSVEFGVSRMTSARIEDMQRLGYFGGGVARAPGTEEVPEPEGELVVFEAFFVAGLRLPAHRVFELNQLPYDGYPGQDEADRRGKKPAVETGGDPALVAAASSKKRKLGTAMGRLGRGTAKAEASGGGKPPLPAKVGASAPGKAREVTVGAGGPKLTKVVPSVSGVAEAAKAARTLPPPGRRVADFGTEINVEDYLGGSNEGPLALVVPGAAITTAAPAPKAGGETLGAGGEVSALALVRDEAGVATRRLKGATEALSRATEALSQVADFTSRTASGALTAALSAEVERLRTQHADAVREKSASDSKCRKLAEKVAALEKEKADLRRQLAGERREANEAVAKEQAAQAEARLARAEGNIAKELAGELQRRLTALESRAEGAEAAARAEAERTRTQLMTAYRELGVRTGDFEEELQELPTVLAGLMSFTSLVTCEAAMNALSREGCRHFEALDQADEDFGRDIFEVEDPVVKESAGALYDRMWGSYGCEVVRARAEAARAQAERGERVDDFGALNSALPDPETTPAEAATGVAPGPTPETAEDAPCAPAPAAAGEDLPPKVAEGAPDAPAAAVPSAEDPAEVGAGAAAEASAEAPAAAGPSQVA

SEQ ID NO: 83198 - protein, 92 aa, Zea mays
  Coding DNA Sequence Number=SeqID_39823
MDGGDRVAGLVLPYGRDRGTRGGRSTAKRLGGGAKGLRRAIKRSREPKRGRERAEEVPYLKANPRDSSVAAMARRRPGSTVADLGGCTEDGW

SEQ ID NO: 83199 - protein, 94 aa, Zea mays
  Coding DNA Sequence Number=SeqID_39824
MVPVARCLARAQCQARRVVPRQCYEIDISAVLAVMSGQGSSIDLRYLIRDGWFTGGDEDDGYDNGNGCPCCNHYSGEDEVVEEDFQEFQEYDEF

SEQ ID NO: 83200 - protein, 88 aa, Zea mays
  Coding DNA Sequence Number=SeqID_39825
MPRWRSLDFETVGFRADDTTEAAALEALTTFCGYHPLEMMMHPLGLFPAEKRDDPMWCNRRWYNFTHKPCIPSSLGLYGPLNTGEVNG

SEQ ID NO: 83201 - protein, 259 aa, Zea mays
  Coding DNA Sequence Number=SeqID_39826
MTSHGSSDDGNTLSHTDGLAREGFPRILWEVLQGAEYTTPPQYAVQQFEKHRVPRCRVRMTLEPHPLQPGCRSLDSESFGYRAEDTIEAIALHGLTTFCGFHPLELSTHPIGLFPAEREDDAMWKDRVEHAKDIWAIYPGQTCSLDSTVHECPVPSASDARWWKKNLQVEQLSNEIQELEELVGTRENTIEVLEDQLINTQQQLAEANEHLDMHHQEIQDMEANEDVDIEGGEEPASSLDTAGSGRPPSPESSVASFAH

SEQ ID NO: 83202 - protein, 191 aa, Zea mays
  Coding DNA Sequence Number=SeqID_39827
MQLFEEHGVPRCKVWLVLEPHPLQPEWRSLDSETLGFRAHDTTEVVAMHTLTTFCAFHPLEMATHPLGLFPAAKEDDLMWQDWVDHAKVDLQREAVSELMGLAQYVKITIADQDVLVADLSTELVEKDLQTEQMSARIRDLEEQEMQQDMEEDEDMDIEGRIPSQHLAWTPLAQLAPGPPYPDSSFASHAR

SEQ ID NO: 83203 - protein, 43 aa, Zea mays
  Coding DNA Sequence Number=SeqID_39828
MAVAMGVEARKLVNDLPKQQKLQVDYPRILLAASVITLIGVVD

SEQ ID NO: 83204 - protein, 47 aa, Zea mays
  Coding DNA Sequence Number=SeqID_39829
MAHRIALSTRGGKRSKSGDGDSAPPHLSGFDLGFTRYEEAKLGLSLG

SEQ ID NO: 83205 - protein, 258 aa, Zea mays
  Coding DNA Sequence Number=SeqID_39830
  Homolog annotation: Hit_ID=A2XFR6; Match level="QueryCoverage=72%, HitCoverage=54%, E-value=2e-09, Identity=29%"; Hit description =Putative uncharacterized protein
  Subcellular localization annotation: CTP_CleavageSite=54; ConfidenceScore=5.08e-01
MPLHHHRASRLLEGTLTETETTTLPVAVRAIAQSSLRSRNRRVGSLDTSLMTSRAGVTSTTLSTPCCIGPSTDTLGLYSTFVVYEHCRELYPDQWEATCLVRCPDNDLRGAEAFLEHYYITKRDTAEAAMQDATRRALSQYCSLFSEVADGLDLKYYPRRSTDSAGGVIVSPIGEGNPRLNSMVNLVAVFNTELDHTLDELGKVQAEVAELRAERATRHYQDGGSPAPVGIQHPYRSPPRGRFAYGTRDCRTQIDLEP

SEQ ID NO: 83206 - protein, 93 aa, Zea mays
  Coding DNA Sequence Number=SeqID_39831
MKAGTRHIVARILGAGSGRPILCHGGDLNDTEDLVDFPIGSKASARAITTFGFRATVVIGAAVVQGSVKPPPRLGQGIAQLGLRKKMHKDSRI

SEQ ID NO: 83207 - protein, 231 aa, Zea mays
  Coding DNA Sequence Number=SeqID_39832
  Homolog annotation: Hit_ID=Q9XHE1; Match level="QueryCoverage=55%, HitCoverage=14%, E-value=2e-34, Identity=64%"; Hit description =CENPCA protein
MAKNFGSKTVQIAMNAVVTSHLLVCLYSTAGSTVIRPWIHLSVEKKTWKDDEDKSSQLLEMPQEDINPLNQAQMHGGSTKKSAPDLSPTKQKKQQAVQERKRKQQSKRGKKWLDFLAFKGHITPLLARFSYGENCVYTAEGESLKIPQTNFESENQPHNDDVNIEKQTITSSTPSPNGAKEQKRAQRRNQPKKRNQRKILGGLYFFTFYTFKVVFRRILMAYVSILMDFYP

SEQ ID NO: 83208 - protein, 310 aa, Zea mays
  Coding DNA Sequence Number=SeqID_39833
  Homolog annotation: Hit_ID=A2WSN2; Match level="QueryCoverage=100%, HitCoverage=100%, E-value=9e-32, Identity=61%"; Hit description =Putative uncharacterized protein
MGESSKELLDLPSDPRPPASFIESLLAGREQQQQDKEGKRKLGASTDPLPKSQGTVELALQLVDLCSVPTAHCLAIASASPSSEACGRGGEVSRGEGQRVDGEAGRYHRTSVKENRYGVEGRLLARHSERWAAANSARVAGVLLWAVLGLHRRVVVEFFWARPRLQPPPALGPESASGSYIIGKVKDFLGEIARANQKLQLDAQNKPPVEYDIEALTGNEEEYIEMDLLLGVADLHSEQAVEAAEATINGRQTSEISSDSEDDSDDSDEDADDKPLTSDKDNKCKSPDDAEMGPAKGKKPNKRQKIVVLN

SEQ ID NO: 83209 - protein, 98 aa, Zea mays
  Coding DNA Sequence Number=SeqID_39834
MRMRVRTTEPSGLPTTLKKKGNARMAAGGHNMSDEPEKGRIQVACRGRGKADLEEEKSDEEVVEVPIQNEVPLASLQLGSKPEAQSKPKSSFKGTPRK

SEQ ID NO: 83210 - protein, 44 aa, Zea mays
  Coding DNA Sequence Number=SeqID_39835
MATRPRKAAKNMATRYTFGVLLCTWFSGRYLRVALSSYHRQFRN

SEQ ID NO: 83211 - protein, 214 aa, Zea mays
  Coding DNA Sequence Number=SeqID_39836
  Gene Ontology: Mol. function=metalloendopeptidase activity; Cellular component=mitochondrial respiratory chain; Biological process =proteolysis
  Homolog annotation: Hit_ID=A2Y6N6; Match level="QueryCoverage=69%, HitCoverage=11%, E-value=5e-68, Identity=83%"; Hit description =Putative uncharacterized protein
MSMPPHPNPLLPAAEEPFHVFVGYDPREHELAVFVDYDFLYLVDLADLLAIAGRIGVASVKHDVRNPAFLDWEVKEQLQNIKSEIADVSANPQGLLLEALHSVGYSGALAKPLMASESAVNRLDVSSLEEFVAEHYTAPRMVLAASGVDHDALISVVEPLLSDLPCVKRPEEPKSVYVGGDYRCQADSQNTHIALAFEVPGGWNQEKTAMVVSF

SEQ ID NO: 83212 - protein, 132 aa, Zea mays
  Coding DNA Sequence Number=SeqID_39837
  Subcellular localization annotation: CTP_CleavageSite=44; ConfidenceScore=5.45e-01
MAGIARWSNLDPPGAPPLPFPRPESRSHSRNPTIEFVGPPTRVLANSGNPIPPRGRACLGCGGFAAAGGTTSAAIVNPLAPDPNRPLLIQQLGFSDTDNEQSEVPKCVAGDFPEQQPGEGKCPLTHYVLLTL

SEQ ID NO: 83213 - protein, 57 aa, Zea mays; identical to SEQ ID NO: 45068
  Coding DNA Sequence Number=SeqID_39838

SEQ ID NO: 83214 - protein, 379 aa, Zea mays
  Coding DNA Sequence Number=SeqID_39839
  Subcellular localization annotation: CTP_CleavageSite=59; ConfidenceScore=5.10e-01
MKANRRTRSVLPPHGSAPPRLRRNQRSNLWHGGLGPHVMHLACRFQGAEKPNRRSCQYRASSGPPQKKEKLNFQNQCSGLEEPRAWPNKDIKCGSDGLVPSPEASPGATVGTLNQGYPLLQYGDTVPTIPSVGPDLLEKAPDPCTHDPDLRVWSRAPMQASRTPWVRLYPVRLCSLLRRRPDAATWLVAHDAMCRLSIYCDLSTQLAGDVQAILQAACLSSPSPNRCKKIAPATPSMTSIIFLGPHVGAQHPWRGKYDSTIAEVKSYYTSAGTGKIKKERYIFMPVSEYRGDKKRKNNPRVVDIGDNHEAPLLNDGQRGAAALDHVQAVASRELVVHSGACDHVGLLLEVELTVAKLLLVIDERRQRECLLLMVFVRGF

SEQ ID NO: 83215 - protein, 138 aa, Zea mays
  Coding DNA Sequence Number=SeqID_39840
MAGGKELAGAKEGCLAGDASPPASSDDSDDSQGIAPEVWTYIRAIERAGLEGSDESEYSSDEENSSDEENSSDSSEEGGGGDGGDSDDDGGDGDGGGDCGKGGDGGGKGGSGDGGDGSKGSSRGSNKGSSKGSNKASG

SEQ ID NO: 83216 - protein, 258 aa, Zea mays
  Coding DNA Sequence Number=SeqID_39841
MRKGGAVLARAAVRLLCTLEPVPKEGDSWARAPVSESGPLVLAEAKRRTTAGHGVLFTRRFAFSAHRNRHARCMTCGPRPPCQRLDRWLRRRRGGALPWGGSTLLVRRFAFMTVGRGEDEGGALPRGGSTLLMWRFAFCALEDQRASCMTCGTGPRVIGCRCFGSDRAPGVAPQGAFWSRTVLLTLARWFVPDARETMDNCVQLTHPRSVPMYGVPAREEVSLVLVSLYALEVSILPLGVDDSLGAPKVHPMGVAPEL

SEQ ID NO: 83217 - protein, 84 aa, Zea mays
  Coding DNA Sequence Number=SeqID_39842
MGKSKKGGSSSHHSGYKRKREPTPPLEDFGDSEYSEEEFSSESEGSPVHASVAEPPELFQLKCLSHASGAATHLNRNNPSVPQI

SEQ ID NO: 83218 - protein, 359 aa, Zea mays
  Coding DNA Sequence Number=SeqID_39843
  Subcellular localization annotation: CTP_CleavageSite=78; ConfidenceScore=5.60e-01
MASSPVLATSPPFPLPGHLKKDRPEPLVPPHQASTTQPPSLRPNRARRRRPSPLRVSSALLSLVAYGQIALALKLRLSVANLAHTFSSLIAPGSLDGDFTAASARHRAMDRPPQAPSGQIGPTPMIPYPRPCFATTPPSQNWSPGGEPPRGFTGGWAPAGSPPPSPLDAVSPPSSGTWAHAHGTVPAPFPHWRACNKNTPTWRKRLQALSRRDPTEDDPTIVYMAGYLHTLDNHYDDLSSHCTHLNSQELKKEKASLQECLDIAEGKEANTREAYRTLKMDYDKKLKKLAPMKKIQKKTKSQGCQTERKKKAPPAPPPSRIENLSDVEDMSLAILDDLLKEFGDTLEQEFGSTSESARV

SEQ ID NO: 83219 - protein, 264 aa, Zea mays
  Coding DNA Sequence Number=SeqID_39844
MASHGSSDEGNALSHTDGLAREGFPRILWEVLQGVGYTTPPQYAVQQFEKHRVPRCRVRMTLEPHPLQLGWRSLDSESFGYRAEDTIEAIALHGLTTFCGFHPLELSTHPIGLFPAEKEDDPMWKDRVEHAKDIWAIYPGQTAHLTIWCMNALYRLQVMRGEAMSHLMALLEATKITLDNREELVVDLFTKMVEKDLQVEQLSNEIQELEEPVGTRENTIEEIQDMEANEEVDIEGGEEPASSLDTAGSGRPPSPESSVALFAH

SEQ ID NO: 83220 - protein, 192 aa, Zea mays
  Coding DNA Sequence Number=SeqID_39845
  Subcellular localization annotation: CTP_CleavageSite=38; ConfidenceScore=5.00e-01
MADEHLHVFDAFCARQSTPAPDPARSAPRQAVPASPARACAYKSPSGIDRTPPRTLDLTEARNHQRLPRAWRARGHPSPCHRRPANRALPSHALLLEETVHASVKLPEQGIRLCFAGEASPRSPDFTRPLVNVDRPEHPPPTRSPACVRGPVDFGHLRRRVVHRCDRQDLPELTPPLAGPLSLQGIVAQGYN

SEQ ID NO: 83221 - protein, 369 aa, Zea mays
  Coding DNA Sequence Number=SeqID_39846
  Homolog annotation: Hit_ID=Q5VNT7; Match level="QueryCoverage=88%, HitCoverage=67%, E-value=1e-77, Identity=46%"; Hit description =Putative uncharacterized protein P0663E10.2
MEFTFEDAAELCALVSNQQSHVDEKRRYLPESYIRSDDWGPFFQRSCDKVRGNIKRIWSSECNGYTHHLVLEGLQLFDFQKKENEPLGPEYLGVMQDTISKLTYETLQSVACVVSHDKVTFDKTRSVMEKIVNSHLPSYLASLDQNDIACQLFNIFRNPCSYRSGSVRLVTPVSPQLLSSIKHALDELDGMPMQGLVAMNRKIKGKSCAPKFGLTASFSKRMHIIKMIRKRCNKILTELEEGNYLPKELAKAMSVVNLYQKQKLKNVSISQSEFFPFAKETISLQNDILNALWSLPNLKHAKLKLLHTILDHDSKFERKHLATLRNYLTECLFGCDDGLPDVALQAIASINQISRCQHVVLTEEREDAE

SEQ ID NO: 83222 - protein, 172 aa, Zea mays
  Coding DNA Sequence Number=SeqID_39847
MVTGQSAVGIGVAVGMTIGGLTVIEPTGAQEQQANRKSDSGPTYRLASSPEAGPGATVGTLNQGYPLLQLKTLHPYDTSSKTPKPLLILGFRADALRYPAGDLLSDKYNGSSSLISYEKQTIRIGFLFLQVTALVPTITGMGDHVSGRVRRAICGQVHSGIRTLILIPISVS

SEQ ID NO: 83223 - protein, 239 aa, Zea mays
  Coding DNA Sequence Number=SeqID_39848
MNKNGDLHNGVGIQMGQIQAIEIKETTEERRNGKSKAADEKRNVNDGFVGVFCRNSDPTTDPPRTEFLRRKNSDGYEMEKVGFRDNRHVVTCERQLTVGIDRRNDRDRRTWSLPLGRHLNLAGERSGSNIAREQRRPGSRKAKLGHRMQRHATVQYIWGFPRPDAISKKRPIITQLLFLKRWRAMSSLGIGCLQYLSVSSLLLILFGVGRYLSVSSLFVVLMKVFKVLKNMILPSFKPK

SEQ ID NO: 83224 - protein, 123 aa, Zea mays
  Coding DNA Sequence Number=SeqID_39849
MVAKLRLRKNHSGERGPDIPERGAHRRVSRVADDKAKLTVALDGVRAQRRPRNRRWTSAGGGGGSRFAWAERERARELGRERKWKRGGGRAGRGVQTGRGGSDVAGERADVGASMAGRSWARG

SEQ ID NO: 83225 - protein, 263 aa, Zea mays
  Coding DNA Sequence Number=SeqID_39850
  Subcellular localization annotation: CTP_CleavageSite=46; ConfidenceScore=5.03e-01
MQPGRNFRPVVIHNDNYQPCGGEASRTAASPCPQLQGCSSSALGRRASQVGVPPSAWAGGPLLPPTFGGEGRSPALQRRRTSATRGRPSEAPSAAACLAPRPGWLWCSLRRCLLSLGRGVAVRPPHGRWLRRAQVGHIHGFSRATGRTRGSYKTSYAAGAAAAFLDGLVLTPVVRTGARTSSLVLGQPPPIGVEVVAAAGGAEAVAAAEVATTVGADVVASTDEPLGASYPAALTSVEGGGACRPTVRDQAERLHGLRTTPGD

SEQ ID NO: 83226 - protein, 143 aa, Zea mays
  Coding DNA Sequence Number=SeqID_39851
MECREIIDLTKRVSEWREQSSKDGSPPRRRPGKEKVDDGEVVAAERDLGYQSPEGDLKDVFAGGSYSGMNYLHTSKGRGIASSERLVSGGDHISTDGGGHLCTDNSPAASITSACMPLWKGPRPRLPTGGDNEAIKAKEPKVR

SEQ ID NO: 83227 - protein, 286 aa, Zea mays
  Coding DNA Sequence Number=SeqID_39852
MARTLRWSPPLGRLPGAEVVATAGEAARCRGGRLRWRAARSRGGRCRCRWRAIGVEVVAATGEPLKASYPRDPTGVEAVHTCRVEMELGLRLKADTSIPKKELAMAPRRPTILDQAERLHGSGPPQETSVHSLIPDPRDDALPPILCAGHPYFPAPWLPSSDALLPLGSSFLDAPCSFSLAQQQQGAPLPQHAEAPPAVPYALHFSPMESSRINAAQAPAPPLFPTKQQPQRARRRPWRAASPPRRAGALFPPRDSAPNSLSRQRSSPPVRSPLPSSRVITLVLAA

SEQ ID NO: 83228 - protein, 124 aa, Zea mays
  Coding DNA Sequence Number=SeqID_39853
  Homolog annotation: Hit_ID=A2YZT0; Match level="QueryCoverage=94%, HitCoverage=22%, E-value=3e-23, Identity=50%"; Hit description =Putative uncharacterized protein
MADVDDATIARRAKEEIVRRAKEARLRTATLDEYECVHEALWTQATTVVNIKALILVILVQATNTYTKWRNMFLTILDKYALTRHILQDEAFPSIVPLNLFVWPFCEGSTRQDHDRQACLPLVY

SEQ ID NO: 83229 - protein, 157 aa, Zea mays
  Coding DNA Sequence Number=SeqID_39854
MADRRSLPALEHGGCFDVAGVVVGVGEVRFVLPDGVGKRGAVDAGRGRGYMVEGVAVFAVEEAVESARRLRTPPTPTASSISAALGGILLATRGVSSGVLVGDVMHLLLVAAVSTEVRLRSPRPRAAGLWSIFWLPLRLNLALVELFGFGVFFKQLI

SEQ ID NO: 83230 - protein, 87 aa, Zea mays
  Coding DNA Sequence Number=SeqID_39855
MTSTGNHRRACDYRVELVRVMLQWVGMFSKIKLDGGSVKGLYGFNIEKDVPLPGYSFVLLMMVLSAGGLDLLISLSNPSIFLLRMVT

SEQ ID NO: 83231 - protein, 240 aa, Zea mays
  Coding DNA Sequence Number=SeqID_39856
  Subcellular localization annotation: CTP_CleavageSite=51; ConfidenceScore=5.07e-01
MPGARPRVPRVALSRARAIACARAYKASQDFNRTPPLALDLAGVQDHRRLPCTRRASGRPRTHYRRPANRAFPSPVRPTRETLLASVKLPERGIELCLAEDTRSRSPDFTRPPASAGAPAADELARLRTWTSRFRAITVVEPYLVPQGLPGANPVLCRTSLAACKPHHPIYFCGYCSKGGRDLGEEGKEVRGVFELSETQMNSCAGEQRVVQEVAQDPALEPAIEDLPAPTLEGKPRFYA

SEQ ID NO: 83232 - protein, 266 aa, Zea mays
  Coding DNA Sequence Number=SeqID_39857
MARAQAARGERVDDFRALNSALPDPEPTPAEAVSGAAPEPPPETAEGAPDAPASAAAGGDLPPETAEGVPDAPAAAAPSAEDPATVAAEATGEATAEATAEATAEAPATAGSSQVQDFGPAHATATTKFLAASTVDGGNKCDGSASEFSDFADSGSSVESSEEDLDYFAALDVAAAEASPHAADTEDVPGPSTGRRRRRAVAKRRVSGAEGGRLRVSRAGRQELLSLPAAASTGEGELRSLFAGEELRIMLFNYREMGIIPKVEPM

SEQ ID NO: 83233 - protein, 329 aa, Zea mays
  Coding DNA Sequence Number=SeqID_39858
MTSPTPANGGDTRFSSDFLSHKGFLSILWEAHPLQQGWRSLDSETIGFKTDDTTKAAAMKTLTTFCGYHPLEMVMHPLGLFPSEKRDDPMWCNRVSHVKDMWAMYPNLVGRITIQCMSTLYRLQDLQSDAMVHLANLAQTTKLTLDNREDFVVDLSSELVEKDLQVERLSQRIATLEQLVEIRDNTIDVLENQLHDVQQELEEANDHLDMHHLEMEANEAGSEGEEAPEELVLAPGTNVTASEMPPSPMAARQRRRQNEQVPPPPPPAPTVQELMAQQNEILRQFLQRQPHPQQHEDPLDADVWLRVVESKFPLLTGDCPDDTKARFAA

SEQ ID NO: 83234 - protein, 264 aa, Zea mays
  Coding DNA Sequence Number=SeqID_39859
MKLLQARTEALPHRNSEIIVAGLRSPATVRRPSYLDRPEPSPLTSSPAYARGSAYSDHSRRRSAHRRDHHDLPYTLGHLTGVISPPDPAPIPTPLPTSTLLSLTAPMAHHASPPVFGALASPSFSPRRRYWLPPPTTPPSSSSLVPTAGSTARSLILAFVDARRWPATAVFVHMTPPLALHLSLLGSTALWKPTWPDVLAAPRMPHPTSCSATVEHQHPLPLGETESRASSGRGRDPEAGCGAQEGVRITRRFVSDSAFPGWLT

SEQ ID NO: 83235 - protein, 175 aa, Zea mays
  Coding DNA Sequence Number=SeqID_39860
MARTQGGFGSMAAELRLHGEKADERGPGKTEGLGANQRVSRVAGEEAEFSEATDVTEAQRRSTMGVRMVQERGVRPTVGRLGAVGTPDMSGAHRTVRCPLLAVGSATCPAQIARAGRWLGPTVGSPDSPVHTGTVPVNYKSYVTGEIPESGQFARTSLAHRTLSGAPPDSPVLPD

SEQ ID NO: 83236 - protein, 336 aa, Zea mays
  Coding DNA Sequence Number=SeqID_39861
  Subcellular localization annotation: CTP_CleavageSite=32; ConfidenceScore=5.03e-01
MGVGLWSNRRPTSGLPPPALTTTTMTPAPDGRAAAAQASGWALLQSCPRPHRRSRGEDKCEEPEARGADGGGDPVGDGDFSSRLRLGTDGRAHRLPGRSPLKSSRRGSRPPTGGAAGSQANGPDTLEVTTPAVDQPRVVEVRAARRASERPLPRTPWERVTREPAWEVERRLSPAPTPARMMNILEAKGGTKIAARLASPHPGTGGHRLGQLHRHLRHRRASSVAEPMLRLEATQRCQPGATVNAAESGPAVMTVAGGREQRSRRQPGSRPIQGQQESLLSRREDGAPVIRPSDLGRPSEGTRNGRPANHSPRRINSATGQAAFLAGEAGDASPSP

SEQ ID NO: 83237 - protein, 477 aa, Zea mays
  Coding DNA Sequence Number=SeqID_39862
  Subcellular localization annotation: CTP_CleavageSite=46; ConfidenceScore=5.00e-01
MNKRHRHSKCHHKRNSGSVPAGMDNLHTGGACGATSSGRLASDLCSSSYGPGTGAATGRLSFASPLKGREPDIKAKEPEAGPLNGGEASPGCHHVSTDGGVRLSTNAAPANADRSKAHRQVLAPVLATKARKRTECCILAGQQQFAFPGMAGGRLLRRAGGCFHHQKLEEEVASRPVREVEPRLASLSAPARMNILEAEGGTKIAARLASPHPGAGGHRLGCSPSGGSEGGKTRCIREREDMVAFQGGHPPFKGDSPYLRPQPSRAESSPTRSKILPLRRGGWVPRVMQAGLEQKKPNRRARCMQLPSGYEHSSTFAQTSGPTRQATGAPVATCEQLHRHSHHYHASSTAEPAGRSNGHVVSQAYDPSRDNERTLSHGVKTTRPCSVPRTTRARAKAAPRTTRPVALTPRRERRRLRQEKQATLRLRHNDHVKKEGFNSRLRALGFRAHYWSEVRRPTPRKGSTAASGQSGSVPTTD

SEQ ID NO: 83238 - protein, 313 aa, Zea mays
  Coding DNA Sequence Number=SeqID_39863
  Pfam annotation: Domain name=Lem_TRP; Domain location=117-126; Score =3.0; E_value=74; Accession=PF08262.2; Description=Leucophaea maderae tachykinin-related
  Pfam annotation: Domain name=Lem_TRP; Domain location=136-145; Score =3.0; E_value=74; Accession=PF08262.2; Description=Leucophaea maderae tachykinin-related
  Pfam annotation: Domain name=Lem_TRP; Domain location=174-183; Score =3.0; E_value=74; Accession=PF08262.2; Description=Leucophaea maderae tachykinin-related
  Pfam annotation: Domain name=Lem_TRP; Domain location=212-221; Score =2.5; E_value=93; Accession=PF08262.2; Description=Leucophaea maderae tachykinin-related
  Pfam annotation: Domain name=Lem_TRP; Domain location=231-240; Score =3.0; E_value=74; Accession=PF08262.2; Description=Leucophaea maderae tachykinin-related
  Pfam annotation: Domain name=Lem_TRP; Domain location=79-88; Score =3.0; E_value=74; Accession=PF08262.2; Description=Leucophaea maderae tachykinin-related
  Pfam annotation: Domain name=Lem_TRP; Domain location=98-107; Score =3.0; E_value=74; Accession=PF08262.2; Description=Leucophaea maderae tachykinin-related
  Pfam module annotation: Pfam domain module=Lem_TRP::Lem_TRP::Lem _TRP::Lem_TRP::Lem_TRP::Lem_TRP::Lem_TRP; Domain location=117 -126::136-145::174-183::212-221::231-240::79-88::98-107
MGRARGRARRGESEVARDGHERGGNPAAFVFVPRPGRVGRHGGSSEAGVESVFRCRGRARAPGPGEAEVVRQRPGRSPSPGVGRSGVRRLPGLSPSPSPGVGRSGVRRLPGLSPSPSPGVGRSGVRRLPGLSLSPSPGVGRSGVRRLPGLSPSPSPGVGRSGVHRLPGLSPSPSPGVGRSGVRRLPGLSPSPSPGVRRSGVRRLSGLSSSPSPRVGRSGVRRLPGLSPSPSPGVGRSGVRRLPGLSPSPSPGSAGAELPMAPLVGPDCLSVSLCQVALQSEWRQAALSFCQTGQWCGESDGGHFGSAGGRASG

SEQ ID NO: 83239 - protein, 253 aa, Zea mays
  Coding DNA Sequence Number=SeqID_39864
MGRRETEREGGRKPEGDGRERWNPVAFVFVPRPGWARWRLLRGRGRVCLLRPRSSLSPWVGRGRDCRLRARAEFEPWGRAKRSSSSSGAEPKFEPWGRAKRSSSSSGAEPESEPWGREKRSSSSSGAEPESEPWGRAKRSSSSSGAELESEPWGRAKRSSSSSGAEPESEPWDWVKRSSSSSGAEPESEPWGRAKWSFLWRLRPDLAAVSLTLSSGTAVGAAQAALSSCQTGQWSGEVTAVTSALSTGGRASG

SEQ ID NO: 83240 - protein, 112 aa, Zea mays
  Coding DNA Sequence Number=SeqID_39865
MEYDFPTEQRLRPRLFIEIPTTAPTISETQGAAADELALGQCRDPGVLLGGLPGVKKGVFMKADALECPVVAYFLTGLGVHRGTALHRSGDSLRHHLWYDPMSLIRFTLYFA

SEQ ID NO: 83241 - protein, 121 aa, Zea mays
  Coding DNA Sequence Number=SeqID_39866
MRNWARPGPLLLLLLSCWSSIPLDRPTWWQGGRPSHTINHVLKRTCKNCATSKTEYTNTQLDLPDYKKSSSLISCEKQTIRIEFLNLARACIQMLGLRADLLWQAQELAPGLPRGQLLARE

SEQ ID NO: 83242 - protein, 182 aa, Zea mays
  Coding DNA Sequence Number=SeqID_39867
  Gene Ontology: Mol. function=transferase activity; Cellular component= protein acetyltransferase complex; Biological process=positive regulation of transcription, DNA-dependent
  Homolog annotation: Hit_ID=A2WSM9; Match level="QueryCoverage=55%, HitCoverage=11%, E-value=2e-48, Identity=91%"; Hit description =Putative uncharacterized protein
MSLRYGRIYTLGALKAKRPHLSLNVAILAKGRYPRTKVGIAVDRNNTKVDTEPKAQKIMLIAATVATATKGSAATGVNPPMVGLVEKTVVLFTKDGDQHNNLHDMWFMWYQLASGESYYCQGDLGQALKNFLAVEKHYADMTEDQFDFFSYCLRKMTLRAYVSMLKFQDRLHAHEYFHKVAA

SEQ ID NO: 83243 - protein, 240 aa, Zea mays
  Coding DNA Sequence Number=SeqID_39868
  Subcellular localization annotation: CTP_CleavageSite=2; ConfidenceScore=5.49e-01
MSSSSLMCRVFPSSKPPDGGYPPSFRLLVGGTQLRGSWYLSAIVRLQGFSSAGPAAPPRRRSPKMVTTSSWVGKSKPGCDLGPTLSFKDVHHPRWGGVQAEPALYLPRGSAGHPLPRRSREEALTGPAGGADLDNVGLIDGGRRHLQRVGVVGLAPGGPSCRRAAAAPGRCPTRLGGFEWGSAGGLVAPAISVEAEAAREVPVADGITATIRAPGLRFFVLVLAPRASAWARARLQQRPP

SEQ ID NO: 83244 - protein, 39 aa, Zea mays
  Coding DNA Sequence Number=SeqID_39869
MRVEWGGYEIDDGFDYDYDAGEDEAVEGDFQEFQDYDEF

SEQ ID NO: 83245 - protein, 356 aa, Zea mays
  Coding DNA Sequence Number=SeqID_39870
MGDTRSPSAWSLEERNSVGVGTFQPSFGFKDFHHAARLHPLAGGHPRWERALTGPAGGANFDNAGLVDGGRRQLQRVGLAGLAPGAPSCRKGGYRAARTGGPPKTSRAARAAFVFWGGPTFAPVRRLRAEVGAPLVWEDPSGDLPGCSGVRPEAIAAAVRPPVEGVVVATAGAGDDSPVGCLNRFTKRESPRAKVTSEESLGSVGLAVRGFSCLVKGTPRPLFDEPKPGVAVSAWTEAELAQKEDLIGRSLAGSSVSGTDAGVDLPRPRAGLMSSGDNWPRPRGDQPSRLLEPDSWRRPRRRWPGRDDEAVLQSGDPRTASPSEARPDLAEGVVDAEGAAAPFNRQDPSLQDRIIL

SEQ ID NO: 83246 - protein, 570 aa, Zea mays
  Coding DNA Sequence Number=SeqID_39871
  Gene Ontology: Mol. function=cysteine-type peptidase activity; Biological process=proteolysis
  Homolog annotation: Hit_ID=Q5NKQ2; Match level="QueryCoverage=92%, HitCoverage=77%, E-value=1e-153, Identity=59%"; Hit description =Putative uncharacterized protein 9C20.3a
SASALTYRVLPAGTVRPETRHAADEDDDFMPLSKKRKLDDSPGKVLKKILNDRQQQAIARRGFSSILDMRLDALGSRSHLAWLMEKLDHNDMTIRAGPGKELKITKDTVHLILGLPNAGGGTALGIDEAVVANNLRAELGLSKEDFGVTALQDRLRKGSDDDLSIRCFFLILFNRLLFPTASWGITNHEVLLTEQMDRFHQIDWCQLIFNDLCQAAKKWHNRSVTNVSTTIYGCSIVILLYYLDHLHDSAAPQNKRGTPRIKYFDRNIIQALTRADKGKIRKGEEAFGHCSHKTRTNTFDVPRPDPSGQHSIHIELPLIRDLISSKLNQLPSRHRMGFIEKLSHFDAEVGKACTVIKQTLQQIVEKQFNLSDVFGELIDEVLRAEAGDNEDAYDVQKTTSKSDDILPQTAVYQLDTQFTDTQGKHGDGGKNMPTNTNVTPKATPHMDPDAPIFDATPQIKCFIQCVIHDAKNQQTSMSSNSLVLDVNVGSILNFEEQERHSRNPQPFDESVLHTLLDNSLPETDELDQCKAIMVPMGNTSEIRSLALHYITFHPKNKALSLLQDIQRFKV

SEQ ID NO: 83247 - protein, 258 aa, Zea mays
  Coding DNA Sequence Number=SeqID_39872
  Gene Ontology: Mol. function=binding; Cellular component=nucleus; Biological process=embryonic development
  Homolog annotation: Hit_ID=A2Y3U0; Match level="QueryCoverage=27%, HitCoverage=10%, E-value=3e-12, Identity=44%"; Hit description =Putative uncharacterized protein
MTWTSEYDPRPPRSPEWDPDTSKRVSAPRSGGDPVLPRGVRPVTGHHDLYDAEEPSAARQSNPSGGCWGTRRYHKGGCTPPPGRRIPSPTVSYNTTTLSSSHYEAGHIDTALRVYQDMIVSAPFLPSVFTFRHLTKGLVTAGRIGDAWDRAFELFNELAERLRFQRAPIPIPPPCPTTILHLLFTHPTDPLRWEDIMCPLVLFHDYPVLLATVTRFRGPCHYLLLYRLARCRAGTVGSLLCCLFVLHDMLPLLYYDDD

SEQ ID NO: 83248 - protein, 60 aa, Zea mays
  Coding DNA Sequence Number=SeqID_39873
MAHDFRADSGGLRNRAEVCAEFVERVDLDIGSHRRGRVLGRHSLGVHLSVAERALGGAHR

SEQ ID NO: 83249 - protein, 242 aa, Zea mays
  Coding DNA Sequence Number=SeqID_39874
  Homolog annotation: Hit_ID=A3AMF8; Match level="QueryCoverage=70%, HitCoverage=19%, E-value=1e-24, Identity=46%"; Hit description =Putative uncharacterized protein
MTQHVSMISITLSPRELDKHTPGYQAPVYVEQPRQQQVPPPHRQPRRPPAQFQQLEYEDSYARGRGRGVGVEGAGVEVATVAMVDMETTKVAIIRVVGIMTIKVEIMAMIIKTDIVAMIIKVGMVVDMAITKADMGTIKAMTHLDKLIQKMVDITETQEVVCEEEAIGVTEESVVVDCISKIPFDTIQLPSSDYIVIIDHHCSLYYDRGEPSTKTSAHAHVGWKQSFQCMLEVRDVIDIIHA

SEQ ID NO: 83250 - protein, 152 aa, Zea mays
  Coding DNA Sequence Number=SeqID_39875
  Subcellular localization annotation: CTP_CleavageSite=27; ConfidenceScore=5.09e-01
MMAVSLQLRPIPRLPPSRNRCAGTSPRMAALSCRYNQIHVRHTVVENFLVYMTWTSPTNVQGRTRLTSHITRRDALSFMSSGVLAAFVLVVASPAEARPSRLENKRKALEKLEKLREKALGPKEKSGATGNGKEMPPPANLLIPPAAVEAFL

SEQ ID NO: 83251 - protein, 250 aa, Zea mays
  Coding DNA Sequence Number=SeqID_39876
  Homolog annotation: Hit_ID=Q6QP51; Match level="QueryCoverage=19%, HitCoverage=22%, E-value=9e-15, Identity=81%"; Hit description =Putative growth-regulating factor 1
  Subcellular localization annotation: CTP_CleavageSite=31; ConfidenceScore=5.11e-01
MAGMYYCARACLNWRMQPPARTAMRTFFSPVVKAKGSAEKRWVHRSQWGVNPQKAFTNRREDGRLRDGVGVEIVQLHPVVMQERPHETACRHSEPPLMEGDETQHIPRRRGRAGPARRDHPLWLRATGEGTEQAIGDKGLQIVHRDGGERPRVARRNDGYPVGHHQVKGVAAERTRDRERGYSERDPSPRRKRASSPPTDQGFEGWPLGRVRQPPQSTRASGSLLIRGSKAGPSEGFDSRLRALGLRAHY

SEQ ID NO: 83252 - protein, 386 aa, Zea mays
  Coding DNA Sequence Number=SeqID_39877
  Gene Ontology: Mol. function=nucleic acid binding; Cellular component= cytoplasm; Biological process=mRNA catabolic process, deadenylation -dependent decay
  Homolog annotation: Hit_ID=A2Y7T0; Match level="QueryCoverage=68%, HitCoverage=72%, E-value=3e-48, Identity=41%"; Hit description =Putative uncharacterized protein
  Pfam annotation: Domain name=zf-CCCH; Domain location=311-337; Score =53.2; E_value=9.2e-13; Accession=PF00642.15; Description=Zinc finger C-x8-C-x5-C-x3-H type (and similar)
  Pfam annotation: Domain name=zf-CCCH; Domain location=349-375; Score =23.3; E_value=0.00089; Accession=PF00642.15; Description=Zinc finger C-x8-C-x5-C-x3-H type (and similar)
  Pfam module annotation: Pfam domain module=zf-CCCH::zf-CCCH; Domain location=311-337::349-375
MQEALVSPANAGRLRSALELKPFAFGDQRLASPRYLNLASVAGGGGGDDALFRCSSPFSPSFGFSSPSPLATSSTISLSPSSSSSLVGDCDCDDDADADAATGHRLQLARLALQYQEVADRYELCLARLADAADEAAALRRENAELRVANGDLTRRLALLSGIGKQAAAAAIADEVRRLRFGEQKAAKERAPEKPAVLPKSISVRSNDYLKMNQPQQVQAPATPAEDNRKPRASNPTTNRSSVSSPSSRSRLANLTPRSLASDIVACTLLMRCMDQQRVYKGNGGDKRSEEPKEHRTAGGVELEVYNQGMLKTELCNKWEETGACPYGDQCQFAHGVAELRPVIRHPRYKTQVCRMVLAGEVCPYGHRCHFRHTLTPAERLHLPRP

SEQ ID NO: 83253 - protein, 166 aa, Zea mays
  Coding DNA Sequence Number=SeqID_39878
  Homolog annotation: Hit_ID=A2ZVY4; Match level="QueryCoverage=98%, HitCoverage=96%, E-value=3e-23, Identity=43%"; Hit description =Putative uncharacterized protein
MEAEAFPIRFTKGIRSYWRRRADGSGAAGRGRRRHGLVRLGDGSGPKPWAARIGGMFRARRVRATAPAAPSRAATVAKVPMRVLGRIRDAYVDVMLGAAKTRPAAARALPSAPEALWQKRVPVRRSSSSQAGRKPDELGQRLVMEMYKSVLASRNISGMLQASVAR

SEQ ID NO: 83254 - protein, 100 aa, Zea mays
  Coding DNA Sequence Number=SeqID_39879
MGARAGPTTAVGCRSAGWTRVGDGSASGLDERRQWIGQGDGRLDRATVSRSAGRTRNGGGQPERASQRAGRTRSGGQPECDRRAGQRVSADSGEDCSEGE

SEQ ID NO: 83255 - protein, 145 aa, Zea mays
  Coding DNA Sequence Number=SeqID_39880
  Gene Ontology: Mol. function=iron ion binding; Cellular component =integral to membrane; Biological process=transport
  Homolog annotation: Hit_ID=Q6H7J6; Match level="QueryCoverage=53%, HitCoverage=10%, E-value=7e-35, Identity=89%"; Hit description =Oligopeptide transporter OPT-like
MCARGLMWPLIAKKKGSWYCLHLAYSGGILSWGLMWPLIAKKKGSWYPANLEDSSLHGLQAYRVFISIALILGDGLYNFIKVLIRTIAGFISMVQQNSKSMLPVWGKLNLLSSNIVLRIDYFDIVFRIEYKNIVLRIDYENHDCI

SEQ ID NO: 83256 - protein, 137 aa, Zea mays
  Coding DNA Sequence Number=SeqID_39881
  Gene Ontology: Mol. function=iron ion binding; Cellular component =integral to membrane; Biological process=transport
  Homolog annotation: Hit_ID=A2X7J5; Match level="QueryCoverage=82%, HitCoverage=15%, E-value=1e-35, Identity=68%"; Hit description =Putative uncharacterized protein
MAPHTTAGGEGGAGAEDEVSEAATASPALRHRHAGKGEGEGLGGNGVAGGDDQAYVERVFADKAVPSWQEQLTLRAFVVSALLAVMFSVIVMKLNLTTGIIPSLNVSAGLLGFFFVRMWTAAAERMGFLRQPFTRQA

SEQ ID NO: 83257 - protein, 82 aa, Zea mays
  Coding DNA Sequence Number=SeqID_39882
  Gene Ontology: Mol. function=bile acid:sodium symporter activity; Cellular component=integral to membrane; Biological process=organic anion transport
  Homolog annotation: Hit_ID=Q5VRB2; Match level="QueryCoverage=62%, HitCoverage=12%, E-value=5e-18, Identity=86%"; Hit description=Na(+) dependent transporter-like
MAPEAGLGCCQPHPGGWHSSRSRAGDAVFLSEALKTQGGQLIIPVTLLHVAAFALGYWLSRLSTFGESTSRTISIECGMQVA

SEQ ID NO: 83258 - protein, 71 aa, Zea mays
  Coding DNA Sequence Number=SeqID_39883
MQSYNVTRKVTKLQKSFLWEHRVRSEATKDVPKGVQNASSQTRRLEYKGTLYNEKMLRCERKEGKVFFAFG

SEQ ID NO: 83259 - protein, 654 aa, Zea mays
  Coding DNA Sequence Number=SeqID_39884
  Subcellular localization annotation: CTP_CleavageSite=49; ConfidenceScore=5.18e-01
MDKDRQGAAQKRQAAVRPHEARPKRQRGTAKAAASGGGKPPLAAKSGASASSKAPEAPNRRRWCRRRVADFGTDINVDDYLGGSDEGKLAIVAPAAAIATAAIVPKARGEALGAGGEVSALAVVRDEAGAATRRLKEVTEALSQVADFASRTASGALTAAVSAEVERLRTQHADAVREKSASDSKCRKLTDKVAALEKEKADLRRQLAGERREANEAIAKEQAAQAEAKLARAEGNLAKELAEHLQERLTALESRVKGAEAAMRAEAERTRTQLMDTYRELGARTGDFEVPDREPGLRCLEWVQEELQELPTVLGGFMSYASLVTCEGAMNALSREGCRHFEVFDQADEDFERDVYKVEDPVVKESAGALYDRMWGPHGREVVRERAEAARAQAARGERVDDFGALNSALPDPEPTPAEAVSGVAWEPTPKSAEDAPDAPTSAAAGEDLPPKVAEGAPDAPAAAVPSAEDPAAVAAETTAEAAAEPTAEAPAALGPSQVQDFGPAHATATTEFLAASTAEGGNEYGGSASEFFDFTDSGSSVEWTEESSEEDMDYFAALDVAAAEASPHAADAQDVPGPSTGRRRRRAVAKRRVSTEEGARLRVSRAGRQELLSLPAAASTGEGELRSLFAGEELRIMLFNYREMGIIPKVEPM

SEQ ID NO: 83260 - protein, 284 aa, Zea mays
  Coding DNA Sequence Number=SeqID_39885
MSLGVVSPSESIKDRVDVGLLTEDPLTGHMPHHGIHFSKHFCKTESLIIEKPYLDSLNQHTLESLFFSRVRKKILNLSSGSGAPTGLSEKMPPRTRRTARKHTGPIGVPSHQLAPRHDNSSSGSNDPIGDLEAEVSRLQVELRRRTAIWVVDGDRINELRRDVRHLRDQLADRDLALDWVVQSRSLAWDKEQKAQARVAELNLAVDDLQTYCNTLHEEVHVLYSQLHPSDPTNPVESEAEPSHVAGQALGGELDLFQPPPSMRLVDEWSPTPDDEAAKSNGKQE

SEQ ID NO: 83261 - protein, 149 aa, Zea mays
  Coding DNA Sequence Number=SeqID_39886
MWSIVRSRRLPFLPPANAHELLPLPLSLLGASIWLRGSPWAPFIPGGHRPRGIVGVVTMVEADPGFLEQSVYRGGQQEMNLTTRAHTPMKATSAGVVATMARGSGITGPPTSEKDSVTHAVEDWAVAPFVSLRRRRPARDQSWQVGSET

SEQ ID NO: 83262 - protein, 123 aa, Zea mays
  Coding DNA Sequence Number=SeqID_39887
METGATSAGHPRAAAGEDQGRRRERTWGGGGYGSRGGGDGRGSKGRIQGRRQESPPTDARAGWLAGRKQRSGQKEMKRYVCKEWQCGSLVINIWSMSPTSCRKVKYHLKESLAWSCVSVTPGF

SEQ ID NO: 83263 - protein, 217 aa, Zea mays
  Coding DNA Sequence Number=SeqID_39888
  Subcellular localization annotation: CTP_CleavageSite=41; ConfidenceScore=5.19e-01
MGPDGQSPLPFAFLSCLHVGQPCQPSRPARIHCDIAGFGSSASCVPRLRGVGFPERFVKVVAATHHAPPTSLDSGPIKLCASRDREGREERNRDENAAATSHRHYRSGSVNWVGGASAVPGKVGMASRLLKGPRGALNCSPVRADHRRSPWPGLYMLPSPNCAGTALFGKGAAARAGTPPSSSCGRKRYCGALISRPAAWINPGILLGGIGSPPWIQ

SEQ ID NO: 83264 - protein, 115 aa, Zea mays
  Coding DNA Sequence Number=SeqID_39889
  Subcellular localization annotation: CTP_CleavageSite=34; ConfidenceScore=5.07e-01
MGLPDSQQSKRKRQGAQMGWPRLFWPSRRRRKGRVEMGWTAFGPVHNKSYPSKEKDSQGYAGLWESRVHATLAISPLPLHGGLSGIGPTKAKLTHDERYFFSYVEPITPVMDPPS

SEQ ID NO: 83265 - protein, 50 aa, Zea mays
  Coding DNA Sequence Number=SeqID_39890
MVCLQIMRRRMVMIMLMVMVAFGATYAQVKKKVSIGSPGVPGLRSVRGLG

SEQ ID NO: 83266 - protein, 62 aa, Zea mays
  Coding DNA Sequence Number=SeqID_39891
MAVSQLGPEDPRRSGCGHSGVIFAVRLKEKKTRPDLRDPPGSDTGYSLGQVRLWQGEVVARV

SEQ ID NO: 83267 - protein, 25 aa, Zea mays
  Coding DNA Sequence Number=SeqID_39892
MTDLIGIDDTNDAIVMAWVVDLHDV

SEQ ID NO: 83268 - protein, 146 aa, Zea mays
  Coding DNA Sequence Number=SeqID_39893
  Subcellular localization annotation: CTP_CleavageSite=38; ConfidenceScore=5.41e-01
MWVLFHRVVSLARNSRRGRSQWPERRARNSFPFSRNCKATTPTPWARWIKAERTRSFSPIPSFSPISHRHQNAAARRVRGFGPPSSTGRFLSDRTEVWGAGATPGAVGHGCNLALAHRAANFGEFLAVAEDSRSDRLTPWAELLRG

SEQ ID NO: 83269 - protein, 50 aa, Zea mays
  Coding DNA Sequence Number=SeqID_39894
MARTTLTTTDRHPTIDEFARTPPISVTTSPELDRRMGNDFHFIPQILKKA

SEQ ID NO: 83270 - protein, 117 aa, Zea mays
  Coding DNA Sequence Number=SeqID_39895
RCFRVELEAQEHADRVLEKIVKKVTLLWMEHWSQAYKALRLTGRRWLGSMEKTDWRGAPTIDAEVVHSIGGKSHGRYSMFTGVIDSTELQSRGGSSSQAGCGSSRSRHSSMEEATRE

SEQ ID NO: 83271 - protein, 258 aa, Zea mays
  Coding DNA Sequence Number=SeqID_39896
  Subcellular localization annotation: CTP_CleavageSite=51; ConfidenceScore=5.40e-01
MEQRMVNGDGANTPPVWRFQNGGAPRACANSTPTTRPPFSRRLLEQRELTRGSTRQCNGRKGTFSEHIDTFQIEYRSATHSGTPGGTIYVNIYDISCPDADLIGSFESTRNHDIWWKGFSPEGTLDEVDLSLPSEQHTRVLRQEVNYMVAHSLHRHSKSLMNAFEPMVVIIVQEIMKHLYSPTGSVLGSHKGEIPFQTRPPIPYSVAALETQLASSSAYVVYKTCGGPEDCQFFNEQPNHIPHKYSCMYVPDYATTVQ

SEQ ID NO: 83272 - protein, 250 aa, Zea mays
  Coding DNA Sequence Number=SeqID_39897
MPPAPPHGIPAVGGDLDRDGGDDDAGGSLSHGTERSEEPEPELEGWIARPITRDTARGCHFHDALDTMLRRALYRHTWSIEYRCVVYQHRRGLYLDQWEATCLVRRPDDDLRGADAFSEHYSITERDTAEAAMHDAARRALSQYCLLFSGVADGLDLKYYPRRSTGSAGGVIVSSVGEGNPRLSSLVNLAAVLNTELDHVVDELGKVRAEVAELRAECAARHYLDGGSPAPVEIQHPYHLPPVVASTMVP

SEQ ID NO: 83273 - protein, 238 aa, Zea mays
  Coding DNA Sequence Number=SeqID_39898
  Subcellular localization annotation: CTP_CleavageSite=37; ConfidenceScore=5.15e-01
MKSPVAETPYTAPSRNSGGKGNGIRPKSAHLDSSRARASPVSDWRVPPVGADQHAHSSPSLSVPWARPVGAGSLARTRSPSLRPTVPTCQPISNLSPTISPPWMHPRPRVLQPHPSPRVPFEPSALLAHLPSLICAFCPAPSPSLSVCLHEPRAPPPPADAHRLFRGRRCARALSSATVSFALPSTTRDTLRCALSLPVASGLRSPERFLAQPESATVTPSSPYASAVVSRRQRFCSR

SEQ ID NO: 83274 - protein, 60 aa, Zea mays
  Coding DNA Sequence Number=SeqID_39899
MGSHDPRAKWESRLMGKRYLIRDGWFTGGDKDDGYDYGNGKEEGVEANLQEFQDFDEFED

SEQ ID NO: 83275 - protein, 117 aa, Zea mays
  Coding DNA Sequence Number=SeqID_39900
MARCSDEGMSDIGSSSRRKPNADELCNADERRSLGAVLKQGRESGERKEWRGALLDAENNNWRAYLSCSPPGAMKRIPAPAPCSFSEPSKYILHTSAVSWLSGTCCSVYSDTKSTSA

SEQ ID NO: 83276 - protein, 36 aa, Zea mays
  Coding DNA Sequence Number=SeqID_39901
MESRHSACSAEAECRGKEEGVEADLQEFQDFDEFED

SEQ ID NO: 83277 - protein, 79 aa, Zea mays
  Coding DNA Sequence Number=SeqID_39902
MVVGESAGCLETGPSSLVCARKTEKDVVELQPWKRKRYLIRDGWFTGGDKDDGYDYGNGKEEGVEANLQEFQDFDEFED

SEQ ID NO: 83278 - protein, 154 aa, Zea mays
  Coding DNA Sequence Number=SeqID_39903
  Subcellular localization annotation: CTP_CleavageSite=30; ConfidenceScore=5.62e-01
MRSAPHRANPASTLASASIKATPGSLVHPRASLTQPELKFAGVCPVSEVPAAVQATATVGQPNQPLPSRPTLGLASTDPSEAPREGIGLYLIGNAGSTSPDFNRPPSHVERAPQEYILVPEQGVAQEVVQEPAPEPTIEDLPAPAFEGKPRLYA

SEQ ID NO: 83279 - protein, 209 aa, Zea mays
  Coding DNA Sequence Number=SeqID_39904
MDGLAREGFPHILWEVLQGAGYATPPQYAVQLFEEHWVPAVERRRNSTSHSGSASEKTFLDNLRESRNKAGNSTTSSALSEDYLLQARSGKFIHPKNPVVHLIHRRMDTDYKEKKKQRPVKLPFWCLRPQRRTERSMSSRQLRSTPMFSLSGREWNRPPSPTTKQPCLEKNHLSGKLVDEVTDAVTPDDIMKPENKTRRNLCHETRSQR

SEQ ID NO: 83280 - protein, 51 aa, Zea mays
  Coding DNA Sequence Number=SeqID_39905
MGLGVCGSFCQGGDEDDVYDYGNGCLCCNHCLGEDEVVEEDFQEFQEYDKF

SEQ ID NO: 83281 - protein, 311 aa, Zea mays
  Coding DNA Sequence Number=SeqID_39906
  Homolog annotation: Hit_ID=Q6J9V9; Match level="QueryCoverage=20%, HitCoverage=33%, E-value=1e-07, Identity=45%"; Hit description =Putative uncharacterized protein
MAERYQLPRSCVPPTTRRKDCGCPPSGGSEGGKTRCIREREDMVAFQGGHPPFKGDSPYLRPQPSWAESSPTRSKVLPLRRRGWVPHVMQAGPGQKKPNFSRVVHATVQRLQAPLHFRPDQRTKGRAAMQAACNHAKWAHLSDFQHAQHGGPRPRVMQPARRSLRASNFTATCTTTAPPRLRNQYRDSRRPSARPSSASLARRRSKRCFAFAIMTALKKGPGKGDTPKRILLREGNRLRASLLIRGSKAGPSEGFNSRLRARGLHTHYWSEVRRPAPRKGSTAASGHSGSAPTTDQGFEGWPSKGSQPPQT

SEQ ID NO: 83282 - protein, 129 aa, Zea mays
  Coding DNA Sequence Number=SeqID_39907
MGGREENLLVVAAVRAIELKGGRRRELGLEPSCWAPAMEQGLAQRLFVMGGAKSSQGETATGRGARLASSLEEGARRKGRPAAMGLLRAGGCCCGAGRKKGAGLLLAMEGSAQSCCVREKKAGEKGSGG

SEQ ID NO: 83283 - protein, 35 aa, Zea mays
  Coding DNA Sequence Number=SeqID_39908
MGGRKKGAGLLLAMEGSAQSCCVREKKAGEKGSSG

SEQ ID NO: 83284 - protein, 87 aa, Zea mays
  Coding DNA Sequence Number=SeqID_39909
MSQLMGIVESTKITLDNREDLVVDLSTELVEKDLQVEQMEIQDMEAEGADEDVDIEGGEEPEPASSLDTAGSGRPPSPESSVASFAH

SEQ ID NO: 83285 - protein, 139 aa, Zea mays
  Coding DNA Sequence Number=SeqID_39910
MAALSPLTEAGGRQQGLDSPDSCPSARLQRSSDYHDATRTRKDQGPLREGWPHGRTGRRVKSLALSHVDACNPLLQAHPTWAQDNTKAAGFPFLPVSLLWFPPSCSVSRRPIWAGARGDISLVGPGTPRSRNADSWRTR

SEQ ID NO: 83286 - protein, 30 aa, Zea mays
  Coding DNA Sequence Number=SeqID_39911
MAPPDDVVGPCPRLGDVEAPPRLRKRMVVV

SEQ ID NO: 83287 - protein, 79 aa, Zea mays
  Coding DNA Sequence Number=SeqID_39912
MAGRRDGRVAVGASALHRGGLIRSKEVFAGRCLPPDHLDPGANRGADRSSASSDSQDLGQIYSGFLMATSGSANDKVVV

SEQ ID NO: 83288 - protein, 144 aa, Zea mays
  Coding DNA Sequence Number=SeqID_39913
MGKSKKGGSSSRHSGDKQKRKPSPPSEDFGDSEYSEEEFSSESEGSLAYTSPPVWTYIRVVKRSGLEGSDESKISLDKEDSSDSSEEGSGGDGDDEGDSGDGGDDDGGGDGNGSKGDGGSGKGDGDIDKGDDGSGRASGKAPLA

SEQ ID NO: 83289 - protein, 162 aa, Zea mays
  Coding DNA Sequence Number=SeqID_39914
MGKSKKGGSSSHHSGDKRKREPTPPSEDFSDSEYLEEEFSSKSEGSPVHASPPVSSDDSDDSQGLTAEVWTYIRAIERAGLEGSDESEYSSDEENSSDSSEEGGGGDGGDGNDDGGDGDGGGDGNGGDGGGKGGSGDGVDGSKGSSRGSNKGSSKSSNRASG

SEQ ID NO: 83290 - protein, 102 aa, Zea mays
  Coding DNA Sequence Number=SeqID_39915
MAQSLELMLIQFFMGSWLIQAVLCSIGYMIMHYGQIMVTDTVILLSDDLPFLVTCGLDLNLLSSCSWHIFDHNPQLKLLQNFLCKELKHGIAAMWKQTTNVL

SEQ ID NO: 83291 - protein, 496 aa, Zea mays
  Coding DNA Sequence Number=SeqID_39916
  Gene Ontology: Mol. function=phosphoprotein phosphatase activity; Cellular component=nucleus; Biological process=protein amino acid dephosphorylation
  Homolog annotation: Hit_ID=A2YWZ7; Match level="QueryCoverage=95%, HitCoverage=94%, E-value=1e-120, Identity=76%"; Hit description =Serine/threonine protein phosphatase
  Pfam annotation: Domain name=Metallophos; Domain location=89-378; Score=48.3; E_value=2.8e-11; Accession=PF00149.19; Description =Calcineurin-like phosphoesterase
MDPSPAPAPAPAPAPVPAPTVVEWPEGGALTRDWVAGLASTLDWCSRHLPADRLPAVLPPALVQRLVLAAAAILHREPNLVRVDPRPGQAVVVVGDVHGQLHDVIFLLRDAGFPSEDRIFVFNGDYVDRGAWGLETFLLLLAWKIHGRRLMHVKAVNKFSRGGTNWLSCFRGSGSGSAEAQTVANNGLSFVWIGPKNKYRCYSQTVCSFSGETTNPSTARQVYGFEKEVMTKYKDQGPQIYRKFLRCFEDLPLATIIAGCVYTAHGGIFRGTIVVPSKKSKKGKKGHKYKANFTVDLTSMKLGSLDELLKARRTVLDPPWEGSNLIPGDVLWSDPSLQMGLSPNKERGIGLLWGPDITQQFLRTNHLKLIIRSHEGPDARDKRHDLLGMDKGYTIDHEVECGKLITLFSAPDYPQFQYYGINSLFLDLVKASEERYNNRGAYIVLSPPDFATPVFHSFGAVKPRPAAHPFYDFEQVIDSDEELDLIAMDSGTSSLS

SEQ ID NO: 83292 - protein, 550 aa, Zea mays
  Coding DNA Sequence Number=SeqID_39917
  Homolog annotation: Hit_ID=A3BUU4; Match level="QueryCoverage=83%, HitCoverage=57%, E-value=1e-101, Identity=49%"; Hit description =Putative uncharacterized protein
  Pfam annotation: Domain name=UVR; Domain location=285-320; Score =21.7; E_value=0.0017; Accession=PF02151.10; Description=UvrBuvrC motif
MASRDDGWGGGEDGSSLFEGMVLFAPEPTAAEDSVPAPAPAPAPAEDSVPVPAAVPELPSAARHDADAASSVPPPLDEDLFSDLTLFAPPQEPLSLEQTPPPLLPQGEDRSHAALAPRAASPYSGALSAAVHLVAAQEEEGPCASAAAAISASTIAFLDASPYPAATRTLDQLPDRQLDVHVNGYEAHAEAVDVDTNSPHVVEAVDVDTNSPRVEEEEAKEDDDGKEDEDAGVAALGVKERLGLLRSQISGKLDSIQQRAAAVAAKRRLLAGRRRKVAEEATSVASRHKDLERELEVACEAEDFERAESISDSLAALEKEKDGLLTALRDAELDYDSVDSELQEVLESRIAAEEEAAILLEQFAKDANEHAISESKQAQELSSKEIEGWQTSMELLETKKLEMEVETQLVLEARSGLEGSIEHLVEEDKLEEGTLSIKGEVLTKELADLLELVRLKEAEIAENNARIHEVQERISAVVSRFHGSQSDVDLKLNSLKEAQCKLDLETEALVLKKNEIDNFISLTEQKDSELREIYWCLFSLKQKLANNQLK

SEQ ID NO: 83293 - protein, 25 aa, Zea mays
  Coding DNA Sequence Number=SeqID_39918
MTRIEGLSTGSFVKRAHSRKKNGEL

SEQ ID NO: 83294 - protein, 107 aa, Zea mays
  Coding DNA Sequence Number=SeqID_39919
MVEAHRRRRPSPEPNTKSSIGDELLVGSTNQRYQGKALDEANATVPSDSINDARIESNCSPDLLPELEPPPNFCDRFREFQIEYEGRVSNFGKGSTRGFQPHIPYIY

SEQ ID NO: 83295 - protein, 175 aa, Zea mays
  Coding DNA Sequence Number=SeqID_39920
  Subcellular localization annotation: CTP_CleavageSite=41; ConfidenceScore=5.18e-01
MTVNFGISSWHNHANGSVASPMCDINPYPMPLGSSSMSIVRSTCITERDRTKKDSPWGRAHGLLGHGELPDSLGFHGPTSPICVSWAAAVRHHEGYPLTEDFGPNKWAYTMIRCYRVCRAHIRSGLDHRAPGWITSRPKRMDTPSAMGQLHMSPVILYNQPAFHFSVKIILDWSF

SEQ ID NO: 83296 - protein, 238 aa, Zea mays
  Coding DNA Sequence Number=SeqID_39921
MNSRLPKRSTVPGLERLLETTHLELDGKLFVNTQQAPTWRANCQRFDPGGSLDRRVNCRRVPQPRWVGTRRSAKGGNRRETGVKGKPAAFVLSRAQVGPGSGEAEAPPRSRSSLSSVVEVGPEPWGQARTESVVFRGRGQVRALGSGEAEFVVFRGQGRVRALGSGEAEFVVFRGRARVRALGSGEAELLMAPEIGLGRCQPHSVEWHSSRSDAGGAVFLSGWSVERRSDCGHFGSVD

SEQ ID NO: 83297 - protein, 328 aa, Zea mays
  Coding DNA Sequence Number=SeqID_39922
  Homolog annotation: Hit_ID=Q6J9V9; Match level="QueryCoverage=26%, HitCoverage=34%, E-value=1e-10, Identity=48%"; Hit description =Putative uncharacterized protein
MTASKKVCHVIRFRILFHFLFLSLATGIGKGDTSKGILLHEGSGPRAPLLIRGSKAGPSKGSTAASEHSGSAPTTSQSRLRARTTRDDPGYVRYITKARAMLPRKLRLARPQGSAPVSASEDGLRLARPQGSDTASAPEDDGLRLARPRARTRPRRWTTGLRLAPTLGLGHKPRASKDGLRLARPRARTRPRRWTMDSASPDPQGSDTTSASERRSPPRPTQGSDSTSTLDDGLRLARPQGSDTASASEDGLRLARPRARTRPRPRKTDSASPNPRGRTQPRPRKTDSASPDPRGRTQPRPQPRRSLHLAQTRARTDHVTGGPSLPYP

SEQ ID NO: 83298 - protein, 339 aa, Zea mays
  Coding DNA Sequence Number=SeqID_39923
  Subcellular localization annotation: CTP_CleavageSite=58; ConfidenceScore=5.35e-01
MLDASKSKGCAPLVRLHAACMAVRPFTRSSGRKWGNARKQLRESWYLSAIVRLQGFSSGSPAASPRRWLPKTVTTSSWVGRSKPGYDLCPVLNFKDLHHPGWGGGRAEPELYLPRGFVGHLLPQHSRERALTGLAGGSDFDNAGLVGGKRPLRWWRLKKSSSSTGSLPPSTLRASGSLALIACPRPSSGDVGEGIVAAASALRPSPLQFGHLEPYRPAGPPMWGVDSPVGYLNRFTKRELPRAKVTSERQSWLEKKTSLAGPSTGGTSAGVELPRPRAELMSTGDSWLRLRAGRAICSGRIPGGDPGGNGPGAVLMSSFGAEILRPRCRPRLGWTSPKV

SEQ ID NO: 83299 - protein, 158 aa, Zea mays
  Coding DNA Sequence Number=SeqID_39924
MGATGILCDSTHDAVTKECVAPLSNKTFAEWYSIENVPSATPGVYWIVSASKWFNFPYWARGHWELPAAELLSLGNDSPNGLVPHSENTHDFLLALVLLGCSGWLLRQEDGLPGCSDAGIDFLLAGCSDGTAAVAKETVSGGAAAAGSDAGAGAGDLA

SEQ ID NO: 83300 - protein, 129 aa, Zea mays
  Coding DNA Sequence Number=SeqID_39925
  Subcellular localization annotation: CTP_CleavageSite=47; ConfidenceScore=5.03e-01
MVKNFGSKTVQIAMNAVVTSQLLVSLYSAAVDRKDQTVTLQGGTDTRSEVGSYLRNELREGVFWTFGFPKLKRLFSRVKLVTKNDLAPRKGLLLGLCFGAPKVSHEETASAEVVSKRWPKVPFHGASAF

SEQ ID NO: 83301 - protein, 87 aa, Zea mays
  Coding DNA Sequence Number=SeqID_39926
  Homolog annotation: Hit_ID=Q5NKP3; Match level="QueryCoverage=42%, HitCoverage=15%, E-value=4e-11, Identity=81%"; Hit description =Putative uncharacterized protein 9C20.7
MHDPDGQTPLQCIRSYVCCIKLLLLLRRNEQQDARIHLSAEALALASLIDDEKKLGDCQFDLWKQYYVVACVALFGKLRRSRRLDVA

SEQ ID NO: 83302 - protein, 53 aa, Zea mays
  Coding DNA Sequence Number=SeqID_39927
MAATQTARPVALTPRRDRRRLWQEKRATLHLRHDDRVKKETGKGGYPKKDPSP

SEQ ID NO: 83303 - protein, 204 aa, Zea mays
  Coding DNA Sequence Number=SeqID_39928
  Gene Ontology: Mol. function=sequence-specific DNA binding; Cellular component=nucleus; Biological process=regulation of transcription, DNA-dependent
  Homolog annotation: Hit_ID=A2ZC92; Match level="QueryCoverage=33%, HitCoverage=28%, E-value=7e-22, Identity=66%"; Hit description =Putative uncharacterized protein
  Pfam annotation: Domain name=GATA; Domain location=130-165; Score =79.4; E_value=1.2e-20; Accession=PF00320.18; Description=GATA zinc finger
MSKRQPGVLGDIQDDDPLHLAHRLFPVYTAADPPPTSSLWALGIGPAYAPPPPSPRLWWWAAIPIPLHALPPVAPPPANPGPGNDENDDGKNRSATLPVALAPLVGTGGGAVGRRRSVPRRRNRQAYRVCSHCQTSETPQWRESPDGSVTLCNACGLRYKKRGLLPEYRPTTAPSFQAGQHSNRHQRIMKMREQKNGSSSSSRS

SEQ ID NO: 83304 - protein, 472 aa, Zea mays
  Coding DNA Sequence Number=SeqID_39929
  Gene Ontology: Mol. function=sequence-specific DNA binding; Cellular component=nucleus; Biological process=regulation of transcription, DNA-dependent
  Homolog annotation: Hit_ID=A2ZC92; Match level="QueryCoverage=44%, HitCoverage=27%, E-value=7e-22, Identity=67%"; Hit description =Putative uncharacterized protein
  Pfam annotation: Domain name=GATA; Domain location=258-293; Score =78.0; E_value=3.2e-20; Accession=PF00320.18; Description=GATA zinc finger
  Pfam annotation: Domain name=GATA; Domain location=402-437; Score =77.4; E_value=4.6e-20; Accession=PF00320.18; Description=GATA zinc finger
  Pfam module annotation: Pfam domain module=GATA::GATA; Domain location=258-293::402-437
MSNQPPHASLQDDLPDCDGDDPLALAIRLFPAHTTGAGLSPAALGIGRVAEPPRREQEPLANSTYGVRGAGPDPWGLRLSRSVLGGLDGFDVDTFFADDALDGGGEATEGDSPPAHVTAAARGSLANDDASPLPAAMPAVALEAYDACSAPVPAACGGAPPVLVANNSMPPASCLGARGALYIVSKRTRTHAPPPLAAESMTPAVAPPPAMPDGGNGGNNRSAALPVALAPPSGSTGGAVRRRRPVPRPRNREVQRTCSHCQSSKTPQWREGPDGRRTLCNACGLRYKSHRLVPEYRAAESMTPRDLHPNAGLVGASSGPSSRPSSSSTTTPSQSQIDFPSHALPAVAPPPAMPDPDGGNGGNNRSAALPVALAPPSGSTGGAVRRRRPVPCPRNRQVQRTCSHCQSSETPQWREGPDGRRTLCNACGLRYRSHRLLPEYRPTTSPSFQIGQHSNRHRRIMQIREQNGTAGS

SEQ ID NO: 83305 - protein, 107 aa, Zea mays
  Coding DNA Sequence Number=SeqID_39930
  Gene Ontology: Mol. function=sequence-specific DNA binding; Cellular component=nucleus; Biological process=regulation of transcription, DNA-dependent
  Homolog annotation: Hit_ID=A2ZC92; Match level="QueryCoverage=42%, HitCoverage=19%, E-value=7e-11, Identity=65%"; Hit description =Putative uncharacterized protein
  Pfam annotation: Domain name=GATA; Domain location=41-64; Score=8.1; E_value=0.037; Accession=PF00320.18; Description=GATA zinc finger
MNEYNDDGNHAALPVALALAPPIGTGADDSAGGGAVRRRKRNRETSRRTLCNACGIRYKQRGLLPEYRSTTAPSFQVRQHSNRHRRIMKTREQKQNETSGSSSSSGS

SEQ ID NO: 83306 - protein, 160 aa, Zea mays
  Coding DNA Sequence Number=SeqID_39931
MGHYCTSTTYVKYGYDEQKRQLLDAPIIFYLSDKESKMDASQASNGELHTSVLNHYAINVCTIVGPQYPFYGGGAGRNKTSTQAVTPVVCSSGFAGLTLLIIGDESKVKKEILGPLPPPLSRIVAVDETEEGLQVLKFTKIFMVHSQSWFTKKSKRIMWI

SEQ ID NO: 83307 - protein, 195 aa, Zea mays
  Coding DNA Sequence Number=SeqID_39932
  Subcellular localization annotation: CTP_CleavageSite=30; ConfidenceScore=5.11e-01
MAILTRYVVVISSFAAPKWISNQNNLRTPRAASKLNSIGAVVVILYLKNHIFLPTHCFLPTNDALPQRLRTPFPNVSFYARLPPHALLWPRCRLLRRERQQSRSPSPSRLQRRISPQILASLQHRQPLPKFLPTNDALPQTPPCLQRRQLTQILAHFPSMEKGVLLKDHATPKTDRRCQQSHPGTSLQSMNQDSE

SEQ ID NO: 83308 - protein, 657 aa, Zea mays
  Coding DNA Sequence Number=SeqID_39933
  Gene Ontology: Mol. function=alpha-N-arabinofuranosidase activity; Cellular component=extracellular region; Biological process=L -arabinose metabolic process
  Homolog annotation: Hit_ID=Q2QY88; Match level="QueryCoverage=97%, HitCoverage=97%, E-value=0.0, Identity=82%"; Hit description=Alpha-L- arabinofuranosidase C-terminus family protein, expressed
  Pfam annotation: Domain name=Alpha-L-AF_C; Domain location=457-640; Score=197.9; E_value=2.4e-56; Accession=PF06964.3; Description=Alpha- L-arabinofuranosidase C-terminu
  Pfam annotation: Domain name=CBM_4_9; Domain location=74-240; Score =23.9; E_value=2.3e-05; Accession=PF02018.8; Description=Carbohydrate binding domain
  Pfam module annotation: Pfam domain module=Alpha-L-AF_C::CBM_4_9; Domain location=457-640::74-240
MGITSNDAAPRAVLLRFLFLLCIGCKCLASEVEATQTATLAVDASPQLARKIPDTLFGIFFEEINHAGAGGIWAELVSNRGFEAGGLHTPSNIDPWSIIGDDSSVFVETDRTSCFSRNIVALRMEVLCDNCPTGGVGVYNPGFWGMVLILAMFKNIEEGKVYNLVMFVKSPETTDLTVSLTSSNGLQNLASATVTVSGESNWIKVEQKLVAKGTNRTSRLQITTNKKGVVWFDQVSLMPEDTYKGHGFRTELISMILDLKPRFLRFPGGCFVEGGWLRNAFRWRESIGPWEERPGHFGDVWHYWTDDGLGYYEFLQKVPSCNSGVSHNDEVDTVAIAPFVKDVLDSIEFARGSANSTWGSVRAAMGHPEPFPVKYVAIGNEDCGKKFYRGNYLKFYNAIRQAYPDIQMISNCDGSSTPLDHPADLYDFHVYNDSKTLFNMKSTFDRTSRSGPKAFVSEYAVWRGDAGRGSLLASLAEAAFLTGLEKNSDIVSMASYAPLFVNDNDQTWNPDAIVFNSWQHYGTPSYWMQTLFRESSGAMFHPTTISSSYSGSLAASAITWQDSENSFLRVINFGSDAVTLTISTSGLQASINALGSTATVLTSADVMDENSFSNPTKVVPVKSDLSNAAEQMQVTLAPRSFSSFDLALAQSKLVAEM

SEQ ID NO: 83309 - protein, 101 aa, Zea mays
  Coding DNA Sequence Number=SeqID_39934
MGVPDFCARWRAINASAVEQPLQIPEAAMFQSRVLLEHRTLSGVHRTCPVNYSASALKIPEAEEFSAKSPGAPDTVRWHTGQSGEEQVLAEEEYYDEFDDV

SEQ ID NO: 83310 - protein, 213 aa, Zea mays
  Coding DNA Sequence Number=SeqID_39935
MSRAFNDYYIEDCGAILAPEVTQRRIDNSDQFVILATVRVHTWVGDVDSGVRRDKALAGVRRDDPAPAIGATREELFSDESAMRTVSLTVTRRYVHEHIRSHEGLYMFGKDDRGVEDDGHGVVVDQCRTPYLARQLSVFTVRLRTTWFPCDAFEQDDIVDCDSMHVFLLIWSSVASSAEFNAESLALQVCTTSSREISTFQSAHNSDIQSSSS

SEQ ID NO: 83311 - protein, 67 aa, Zea mays
  Coding DNA Sequence Number=SeqID_39936
MSRDEPRTFIVHVQSHKSHMFAFENKSPTLAPTSGEPFFDHLRQALTFVMPPKKVSAPKKGGSIQVL

SEQ ID NO: 83312 - protein, 204 aa, Zea mays
  Coding DNA Sequence Number=SeqID_39937
  Gene Ontology: Mol. function=carboxyl- or carbamoyltransferase activity; Cellular component=ornithine carbamoyltransferase complex; Biological process=amino acid metabolic process
  Homolog annotation: Hit_ID=Q8SA97; Match level="QueryCoverage=49%, HitCoverage=15%, E-value=3e-16, Identity=52%"; Hit description =Ornithine carbamoyltransferase
MAPPIDVVGPRPRLGDVEAPPRSRSSLSSVAEVESEPLGRARQRPSAEARAESEPWGRAKRSSSSSGAEPESEPWGRAERSSPSSGAEPKSEPWVGRSGVRRLPGLSPSSSPGSGGADSRSGAGGAVLLSGRSVERRSDCGHFGSVDWRTFVLMGVTSGELGALRGRVAGAWYYHPSTTRPSMPSAAHQQYHGVLLFYPAAATY

SEQ ID NO: 83313 - protein, 92 aa, Zea mays
  Coding DNA Sequence Number=SeqID_39938
MGIGGYLLVDGRWAKSRQGLTAPSSQGKEYHVVAAVEGHELKTPETEYRPGLERLLETAHLELDGKLFVSTQQAPTWRANCRRFETGGSLGR

SEQ ID NO: 83314 - protein, 87 aa, Zea mays
  Coding DNA Sequence Number=SeqID_39939
MKCGRGSPRPRLLGLGPSQRGPPATAAWTRDPRREGLHAGTARRALARPLRRLRAAAISGYGHGAGAATPAPARARVKAMKEMNTAV

SEQ ID NO: 83315 - protein, 231 aa, Zea mays
  Coding DNA Sequence Number=SeqID_39940
  Homolog annotation: Hit_ID=A2XHS3; Match level="QueryCoverage=88%, HitCoverage=100%, E-value=9e-46, Identity=48%"; Hit description =Putative uncharacterized protein
  Pfam annotation: Domain name=DUF581; Domain location=129-186; Score =63.9; E_value=5.4e-16; Accession=PF04570.5; Description=Protein of unknown function (DUF581)
METRRASRYRVHGRRSRRLRNPKPRRGIVEKARSMARKLEIPQWKHDGLPSPTSPLDRASPRGWRHRDAVGGVGLGILAALEAEGPLPGAGAAAAPRVSIPRRAARLEVSELACSGRCATSLCGGPVSGRAGGGGGAAFRVAEFLSCCDMCRRALDGKDVFMYRGERAFCSMECRYHAIVSDEFREAEEEKERKRRAAAADVPRKSAAEMVAGSPCSGGGQIFFTTGIVVA

SEQ ID NO: 83316 - protein, 131 aa, Zea mays
  Coding DNA Sequence Number=SeqID_39941
  Homolog annotation: Hit_ID=A2YZY3; Match level="QueryCoverage=48%, HitCoverage=17%, E-value=3e-11, Identity=46%"; Hit description =Putative uncharacterized protein
  Subcellular localization annotation: CTP_CleavageSite=38; ConfidenceScore=5.52e-01
MVSPSGSSSSSTNLFVDPAPPSASSLVMLNIRSHASIVLSTDAGNFRQWRSYFELTFHKFGLLDHIDGTVDAAAKFDDPECLQVDAWHRLLALQHDLHGDLGTTSTAPTPAPTPPGLRSTTSSSTTAFSPP

SEQ ID NO: 83317 - protein, 250 aa, Zea mays
  Coding DNA Sequence Number=SeqID_39942
  Gene Ontology: Mol. function=protein binding; Cellular component =nucleus; Biological process=regulation of transcription, DNA -dependent
  Homolog annotation: Hit_ID=A2XHS7; Match level="QueryCoverage=68%, HitCoverage=62%, E-value=8e-59, Identity=68%"; Hit description =Putative uncharacterized protein
  Pfam annotation: Domain name=CCT_2; Domain location=186-212; Score =48.5; E_value=2.4e-11; Accession=PF09425.1; Description=Divergent CCT motif
  Pfam annotation: Domain name=tify; Domain location=105-140; Score =77.1; E_value=5.9e-20; Accession=PF06200.5; Description=tify domain
  Pfam module annotation: Pfam domain module=CCT_2::tify; Domain location=186-212::105-140
MAPAESGEKATSFAMACSLLSRYVRQNGAAAADLGLAIRGEASSLVEEKFGVSRRVLYPVSAESDAKRTSTDMEKGETGKETMDLFPQIAGFGSEAATKEAPDAREPEKRQLTIFYGGKVLVFDDFPAEKAKDLMQMASKGSPVAQNPGLLPPSTAATVTDSTKIAAVPAAPIAVANAQKSAADIPQAPKASLRRFLEKRKDRLTAKAPYPGSPSDVTPVKKEMSDGQPWLGLGPQIANPDLSLSKEASQ

SEQ ID NO: 83318 - protein, 275 aa, Zea mays
  Coding DNA Sequence Number=SeqID_39943
  Subcellular localization annotation: CTP_CleavageSite=8; ConfidenceScore=5.52e-01
MSSSSLMRCVFPSSKPPDGGYPPSFRLIVGGTQLRGSWYLSAIVRLQGFSSCSPVVSPRRWSPKTVTTSSWVGRSKPGCDLGPTLSFKDVHHPRWGGGRAKPALYLPRGSVGLLLPRRSGEGSLTGPAGGPDFDNAGPVDGGRRHLQRVGLVGLAPGGPSRRRAAAAPSGLSVSGTDAGVDQPRPRTGLAPLEDGQPRPLGLFVGNRDVCASESCFSRKVMSEKVMSEEFLTFGDGDASLEDARGAAVVELLLIAQQDERLGVSRYPPSLGLVEG

SEQ ID NO: 83319 - protein, 300 aa, Zea mays
  Coding DNA Sequence Number=SeqID_39944
  Subcellular localization annotation: CTP_CleavageSite=87; ConfidenceScore=5.57e-01
MQAACNRARWTRFSDSPTRQHGGPGPRVTQPGRQMLHASNCTATCATTAPLQSRNQYRDSRRPSARPSSASLARRRSGRRFAFAVITASTKGPGKGDTSKRILPCEGTGFRAPPTDQRFEGWPSEGFNSRLRSRGPYTHYWSEVRRPAPRRAPRPPQATRAPCPLLIRGSKAGPRRVHSRLRRRARDDQGYVRYITEARAALPSSPETPCSVPIEGNMALSPLLLAERRRRGVCKKAESVPDRPLALCGGSGAALAKPAPAEPLTASTYQPESLGPDRAPGLRPVRMREQPDQPKHYARH

SEQ ID NO: 83320 - protein, 32 aa, Zea mays
  Coding DNA Sequence Number=SeqID_39945
  Homolog annotation: Hit_ID=Q8W0X4; Match level="QueryCoverage=100%, HitCoverage=1%, E-value=2e-08, Identity=84%"; Hit description =Putative pol protein
MTGEKNMFTSYVKNKDSHDMILFGDGNQGKNK

SEQ ID NO: 83321 - protein, 101 aa, Zea mays
  Coding DNA Sequence Number=SeqID_39946
MAFTLAQGHQRAQTTAGQANGGVGLLRNNKCKINLLPPQWCSPKLKMRNKYIKTMAWIKGEHKNNREGRRKECHRHLQPKFALTFKEIIRWIKFLVTLARE

SEQ ID NO: 83322 - protein, 113 aa, Zea mays
  Coding DNA Sequence Number=SeqID_39947
  Subcellular localization annotation: CTP_CleavageSite=80; ConfidenceScore=5.66e-01
MSSFSFPLLLATLSPRQVTSPRCVFSPSCCASRCGNATAAPLPFLLPHFAAPVPLPPPCSLSLSTQTQPRSRYGLCADLVAPAVSDTLLSYMRHPLTARLYVPLLELLLMPCH

SEQ ID NO: 83323 - protein, 49 aa, Zea mays
  Coding DNA Sequence Number=SeqID_39948
MADNVGYPKLELGLSAMTKNQLADNLSYNSLKVIILRNEALEKYKILLY

SEQ ID NO: 83324 - protein, 85 aa, Zea mays
  Coding DNA Sequence Number=SeqID_39949
MGLSTGSTAKPKLLKKFSATEEISVLSLVPAGRSELSPPPEPYDPEVDPSLKGALDIIKIANEAVDEAVNRLLEEAADKVLKEDD

SEQ ID NO: 83325 - protein, 103 aa, Zea mays
  Coding DNA Sequence Number=SeqID_39950
MAVFRFHGVCPAVVVKRSRDGWVLEIIAGITMSMPESAWGCSRGSTLKAHSGSQSTTSQGEVYPWQREGGLLSFYRFLRPKPPRLQIIVSKNQLQNMVTNYSA

SEQ ID NO: 83326 - protein, 457 aa, Zea mays
  Coding DNA Sequence Number=SeqID_39951
  Homolog annotation: Hit_ID=A2YDM1; Match level="QueryCoverage=99%, HitCoverage=48%, E-value=2e-24, Identity=44%"; Hit description =Putative uncharacterized protein
  Subcellular localization annotation: CTP_CleavageSite=52; ConfidenceScore=5.33e-01
MRRHHHLFVILRRAVASSASQRAQPLPLLHSVALRNGAAGSFSPCFFSSRARSSVGAAKSLVEDEAELSDWISDLKTDSFHLGLSSGDEGDAPSTRRSSVGSSRGGRGGSDSRGSFPRSSTAGGEFSGDRRGGFEQRGRMISSGLDDADSGFGSSRGRRGRGERTSGFVRRGGRGNGFDEEATFRSPREQRSQRGRASGVARRGGRYSDFDQDDGDTGFGSSRGRHGASGQLSVSSHRRGRVSDLDDDEDSDDDLVGFGDLDGKQHHGRRKGGRENTVGLGRGRGRRDLGLSRKGGSYNDFGDYDDGRRRTSDLLQRTGRGSDLDDDEDDDAGPVGFDGYSVRQQGGRRGKMAKSVGPHRGGRGSDTDFGHRQPRGLKKIDFGLSEDDDEAGEVDEEDEPSGFEDDLFEDEGDKEDVGHIIGNKSGSSMLPEDEPAKNESVQGRSAGGGDSYLSQKR

SEQ ID NO: 83327 - protein, 130 aa, Zea mays
  Coding DNA Sequence Number=SeqID_39952
MGTDWNQVIAQYGSFLYEEDGTQFQNTGFAPPQPDIPAHGSPAAPLVKKGPQRTKLANFTSEEDMRRHTTLEEDQCREVYEISDEQTSLAATRFAAVEKRPFHFIGTLKQGYPLLQYEDAVPTRLSLVAW

SEQ ID NO: 83328 - protein, 194 aa, Zea mays
  Coding DNA Sequence Number=SeqID_39953
  Homolog annotation: Hit_ID=O48967; Match level="QueryCoverage=100%, HitCoverage=37%, E-value=4e-45, Identity=54%"; Hit description =Putative uncharacterized protein
MVYIVEHHDFMPKDFPMEEEAVSSTPRATNRPAPGAAVVHSVRQHTPAQTSRASRAEPGALSAARELLRHPPSSTTSPGAMKQWRDDVDCLLGMVHSGLARPRPRSSRHQHEASASVRSPSVRAAPTEDLRAELNRKHAGEDAPVCLERSNDLRAELNRRRAGEDARVSLERAHERRQNVEGHNLDYDFAAVAP

SEQ ID NO: 83329 - protein, 314 aa, Zea mays
  Coding DNA Sequence Number=SeqID_39954
MGKPVPSLLMLLLSRGRYNGSSSLISCEKQTIRIEFLSLQVTALVPTITGMGDHVSGRVRGYVCGQVHSGLNYDSGLIISKNFIKIISFPQCKQYRGKEKGGAAYRWRDRSGDGQGWLGEALAVTARCGLTARMAGIARSTCACGCSRRRRVYRPNHGDLVQSKGTLRAPATVDWPLRRSRLRFLTRGASLSGAHSSLRVGWGWGKLDWPVYGGSGLGGRGHTAHGQTAVNWTPVRLEHARKSVTDAWEGFIGAGAGQGAGWPLARRGARAGVLWQAQGASNTWSLQSARVPQLTQVANVRILAKIRRESFPGT

SEQ ID NO: 83330 - protein, 118 aa, Zea mays
  Coding DNA Sequence Number=SeqID_39955
MYFIFWLLHSPESICKDDVRCAACVNQDIVDQKSLDDTRYNHCIIVRLIFELKIFLREELEPPAIGSTSFVTEGATTWLLCEAIVTTVEVSSPEVGANVGHLFSNAINQEQGNMIVNG

SEQ ID NO: 83331 - protein, 242 aa, Zea mays
  Coding DNA Sequence Number=SeqID_39956
MSAFAQRKSTSTASYLGSSSELIRICLEASLLGSRGGFNRLRWLEVAGVALHVWHLLREALQVGDEGLGFGEGLGVLHALHVAFERVSVRGADDDDPVGSRHLELEVGVVGDGHELRVALPPQYCVVGSSEPDHLERDGLPSEVGGCPKADGKIELSEGLDAFPGDDPMERRSACSDRGQINTQEPEGLGVDDVEAAASVHEDLGEPDVADDGVDDERVFPRARHAVGVVGLVEGDGLVGPV

SEQ ID NO: 83332 - protein, 75 aa, Zea mays
  Coding DNA Sequence Number=SeqID_39957
  Subcellular localization annotation: CTP_CleavageSite=54; ConfidenceScore=5.07e-01
MEGRVARAAGVKARVENSKGIALILSSTRIACSRRQVGVLLSLSRFRRARGPSRAEGDTEGPPRRCCFPRSTSVM

SEQ ID NO: 83333 - protein, 55 aa, Zea mays
  Coding DNA Sequence Number=SeqID_39958
MKHKIKIQIKIKEDREGGGDGPSLQDVVAMMDRNNIDDTDWYSRDVGVDPKHQRF

SEQ ID NO: 83334 - protein, 89 aa, Zea mays
  Coding DNA Sequence Number=SeqID_39959
  Subcellular localization annotation: CTP_CleavageSite=58; ConfidenceScore=5.38e-01
MSGAPTTSPGRWDSTVGASDFWARLAVRCTPDKYCRLSGAPSRACQTSARFWRALNAPAARVSSHTFNAQQVVGNNVHELTKCGSSCEV

SEQ ID NO: 83335 - protein, 110 aa, Zea mays
  Coding DNA Sequence Number=SeqID_39960
MNKTPAFKMPLQTEPRFHLRRYEQPHTIGGPAEQQKTDRWLAVARSGSSDDLGADAAAMRPSPMPSLERQGRAEGRRVGGSRLGVATNPHLELVVVLELLEVSFHGFIFA

SEQ ID NO: 83336 - protein, 175 aa, Zea mays
  Coding DNA Sequence Number=SeqID_39961
MVCLGLGGRRKHTLQDNPILQARILTVEGSSSTLGVNYTFGEDDIITTPRPSPPGSSQGIRLEQTARPVTPRPRPAVPEDISPARGLDNSIPASAPPVDDPARLWSTKHSFRANSASVRADTATPGFGSSKSGRGVPLTKEEKPRTARPTEPRDSYASGIRIPHSSPLHGATHAW

SEQ ID NO: 83337 - protein, 104 aa, Zea mays
  Coding DNA Sequence Number=SeqID_39962
MGAQAHASCNRRAGCYVRATAPPLAPLPRLLDCGASTATRVNPAYNPAVPARRDGQYGQKWVGSNGGGWWRLWREKQATLRLRHNDRVKKGTGKGGYPEKDPSP

SEQ ID NO: 83338 - protein, 200 aa, Zea mays
  Coding DNA Sequence Number=SeqID_39963
MAITSARAQLRKGPRPRLLTGGDNEAIKAKESEARRQVALTVSPAEATTSVVGSLTSGGDHLSTDDSGHLRTSAIPANGGRPSARKEVLAPVLTAGVRTRPSKNANAAPTAYDVLYDPPISPLAPRSVTGKVSPDVHQGYRPMTRGQAPHVIQTDPKHEEGETPHKERATAPQLCAPSFSEQPAVRKANRRIRSMQPPLG

SEQ ID NO: 83339 - protein, 75 aa, Zea mays
  Coding DNA Sequence Number=SeqID_39964
MFGLQVVKRMMVLIMIMMLVVSIATTAQAKMKLWKETSRSSKITTSSRCGLAATPSRLPVKAAFIYVSFPHFDLL

SEQ ID NO: 83340 - protein, 627 aa, Zea mays
  Coding DNA Sequence Number=SeqID_39965
  Homolog annotation: Hit_ID=Q6JAD6; Match level="QueryCoverage=75%, HitCoverage=82%, E-value=1e-103, Identity=55%"; Hit description =Putative uncharacterized protein
MEKSKPIKTPMPTNGHLDLDEGDPLAGDHPASTVSGRAPATSDLLRSSLLPLVRMPRTKNVSAPGGADDEDPRRPFRQVKGKTVYLEQQEGRKKRRTDRAARAAAAAAAAAQAELGDQPETPLDQIVYHVRRLASQPRSSTHTTASTPPPTLPAPVTPVAPSTTTAIPATSTTPASTAPPPAPASAPPIPPPRFRERDETERDPVAVDLFSTRIQESFFRAQMYVEEWVRVFYATVWIDPDHHWMRFRFEREDVTITASWIRQLFGFPESSTRLHSLCYGTSDPPRRPHDGVAPGTAHVAALFRPPFSDGSRRSPADFTTAAKFLFELIRRTLLPRMRYREATTHIQLWLLGALVSHSEFDVVDFLICEIEDTGTLEASRLVFGSYRPAPEAPVPASAPVFDSQAEDVALHQFEAQDAAVHDDDDDDDDDFGVPPPPPPPMPPRSHDHEAGSSSATTAAPPAIDPAIASILHSLTQQQAHLAAEQTRLSERMLSMFQTIQDRQDSLLQQYSRIELRAGHSWLLCYSILVSRFPRFSLHHLLRFRFLLCQRFSQDPLFLLLVLLPLLSHPDFGAPRPGREQSPASSMRLILWYPFCETARVSSHTFIAQQVVGNNVHELAKGGSSREV

SEQ ID NO: 83341 - protein, 304 aa, Zea mays
  Coding DNA Sequence Number=SeqID_39966
  Homolog annotation: Hit_ID=Q5Z9G5; Match level="QueryCoverage=20%, HitCoverage=24%, E-value=6e-07, Identity=48%"; Hit description =Putative uncharacterized protein P0655A07.24
MARGRDGGVLSSFIPTAGLGGLAPGVDCDGIVTCVGARYYTRADQPPDRDHWSSPAEIRQHLLARPELYGEDDAPDQWALRAVTTEHGRAVAAEEGLTSEPHQSSAGITTCPREHARRPLTGWARLSARRAARFSRAAAAAVPSGVRGGAREQESPGRRGALQPADWRSWRGREEEPQRPRRYSFRRHRSGAAEWAAVVLFMVLAVVVLLGAVAVLVVVLLLQPRVSYVAGAPLGDAGSAAMEAALCDGVVPFRVDVEARTRWKVAGIIVVDQWTRLACQLRFFWPNGTVLPFRCISKSKFLFF

SEQ ID NO: 83342 - protein, 203 aa, Zea mays
  Coding DNA Sequence Number=SeqID_39967
  Homolog annotation: Hit_ID=A2YVV7; Match level="QueryCoverage=72%, HitCoverage=76%, E-value=5e-80, Identity=93%"; Hit description =Putative uncharacterized protein
  Pfam annotation: Domain name=Cupin_5; Domain location=32-180; Score =159.2; E_value=1.1e-44; Accession=PF06172.2; Description=Cupin superfamily (DUF985)
MGPPKPAGAERHPMGCHSNRHREVGTRPQFGASPRIRTLGGSTCDQWPCHCAVTHKVNRAVSTAIYFLLPAGSVSRLHRIPCAETWHFYKGEPLTVFELHDDGHIDLTVIGPHLEAGQRPQYTVPPNVWFGSFPTLDVESFASDGSVLVKSRKRDPELHYSLVGCTCAPGFQYEDFEMAKFEDVRSIAPKAEPFLKFLIPSTD

SEQ ID NO: 83343 - protein, 565 aa, Zea mays
  Coding DNA Sequence Number=SeqID_39968
MEKDRQDAAQKRRTVVRLRDPFREAKKAWAAAKSAAPGTSKPLPAAKPPAPGPSKASAGAKAVASGTGKPPSGGPAKGRRLPSLTRTEGAAAHIADFDTDICVGDYFLGSDGGQLAVVPPPVEATSPTAVVGAKGATRDSWAAFGASGEILSAAAAKDVAGSMSQQLRQASQQLSQQLKHAADFADHVVSGALTADFAAEVESLCAQHADAVQENSAAESKSRRLSEKAAQAEAKLARTEGSLARQLAEELQARLDALRSRVDKAETSVRAEVERTHAQFVDAYRELGARTAAFEAPGQEAGLRFLEWMKEELGVLPTIVTGLMSFASLVTCEGGVNALSREGCRHFEVFDQNDENFEREIFKVEDPVLKQSAGALYDRMWGPHGRETVRERSARAIEQIAHAEGVEDLSGLDGALLEAAEVDLAPPSDAGEGPSSTPAPTAPTGGSEDPAPMGEDALKAVAEPAAEDPTTLVGPSQVLRFGPAHATATDNTIFVAASTVAADDDSFGSVSKCFESDDSGSSIAWTEESSDEDLDYFAALDVAAMELSHPDFGAPRPGREHNHQV

SEQ ID NO: 83344 - protein, 207 aa, Zea mays
  Coding DNA Sequence Number=SeqID_39969
MPSSSSFAANTPPGKSSSEETMSDLAAELHPGHMVEFGVSRISSVRVQDMQQLGYFGNGVGRVPGAEEIPEPEGEIVVFEAFFYCGPSVTRASFCGGGVAEKRKVGNKIAQFGSCTFTPRTGKTSAEVVELVPCARNKWGNWYDYWFYVAGGEVEDLLGLLTAMMCSHSYVAFPLFDVAEDDSDEGALRCAARMSSGRDLVEEFIGY

SEQ ID NO: 83345 - protein, 107 aa, Zea mays
  Coding DNA Sequence Number=SeqID_39970
MTHCLSRSPRCDRGKEEKIETSGCERAKDVHLEEAVLGLIIDKRDDARADNLDEVGVKGAYVGGRGGAVILSPAPSAGFETMPGHPQEPDGTSGPSRHRGGGGITVV

SEQ ID NO: 83346 - protein, 155 aa, Zea mays
  Coding DNA Sequence Number=SeqID_39971
MTISYIISELVQAGSYEHGRRRHPTSASAGYPFPIPTTRIPDASPVMRQQDPDRHAPCGVTCDGVSPHATPSALRRHRAACRPAHGHGQASRRQTPHVVMPRCRIGPGVRGRQAVRSVSGRPSQSLRPQAKPPVLQLQLQLVVKKRDAVGLLACR

SEQ ID NO: 83347 - protein, 163 aa, Zea mays
  Coding DNA Sequence Number=SeqID_39972
MTLGWATRRSAPWVHQQAWCSALDRVQAATAPELVVHSDACGHVGLLPEVELALAKLLIVADERRQRERLLLVVFARGFQLDVGCTENGNGLLRNAEQRMGIGMEMRMGLVGRCNPSLAFFYAKYLSLFGSMLTRGVLGDLPIPMHTLGSLLPDGGSLLGNKS

SEQ ID NO: 83348 - protein, 101 aa, Zea mays
  Coding DNA Sequence Number=SeqID_39973
MEQYLSITRAYYNPRLRDHGFDLLERDLSVFLSCDSAILIRALSSLLLEDQQAGMEALDAMAVGAELRCCGSVGSSLGCDLRISVLEPTGEAAIVAGEGLL

SEQ ID NO: 83349 - protein, 36 aa, Zea mays
  Coding DNA Sequence Number=SeqID_39974
MGSRHSACSAGAECRGKEEGVEADLQEFQDFDEFKD

SEQ ID NO: 83350 - protein, 331 aa, Zea mays
  Coding DNA Sequence Number=SeqID_39975
MVAIQGGHPPFKGDSPHLRPQPSRTEFTSTLQDPPPATWGLGPTRHARWPRTEGAKPPRAEHTTAQRLQALLHFRQDQQVKGRTAMEAACNRTKGAHPFDSDASSMGAQAHTSCNRRAGYYVREAAPPLAPVPRLLDCGTSATTRGDPAHGPTLPTEHVDHGSVSRGRRRDGQYGQKWAGSNGDGRRAEAADRRHLWQAKQATLHLRHNDRVKKGTGKGDTPKGILLREGSGPRAPLLIRGSKAGPSEGFDSRLRALGPRALLLIRGSKAGPSEGIDSRLRAFGLRAHHWSEVRRLAPRMGSTAASGHSGSAPTTDQGFVGWPPKGSTAAS

SEQ ID NO: 83351 - protein, 357 aa, Zea mays
  Coding DNA Sequence Number=SeqID_39976
  Subcellular localization annotation: CTP_CleavageSite=69; ConfidenceScore=5.36e-01
MAPRMLCDDDGSQPPYGSKKTSARTQPLRQLSLRQAPSLLRRPRHHTSWVPKSLRLPRRHGPLREGWPRGDEDENRCSLGAARSLSRVDACNPLLQAHSTWARDEHEGRGIPTSLTPVSGRLALPPFALALALDPSGLGHAATFTRRPRDPPDGQRHPPLHLEQEHTQPQEHSGHDDAGAPRHEPRQHAPVPVPRQDEPPSQHDDWHLQQEGRISLQHDDRPPRHRLRAPRQPAEHPSQEKKPGQLQHGGQEQEHGQSAQLQPLEQQLLHWGRQWPQPGGVLQLQLGRLQVQQPGLHEGVFEQRQIGVQHCVSRQVQQEQLKQLGALGFGKQWHQQHRHEKHVRNFDLRKVSFFMNS

SEQ ID NO: 83352 - protein, 458 aa, Zea mays
  Coding DNA Sequence Number=SeqID_39977
MESHDLRAEWESRLVGGYEIDGSGYGYGAASPLQPNRILAEYVDVYSPLLYTPNPPQVVSIATTAQAKMKLWKETSRSSKITTSSRCGLAATPSRLPVKAALSTFLFRTLIYCKNYMDVSDMARLRHTARKSVIPFLPSRLAERPLRRPVAGQSSHLERLHHRLREEQERRRQEQRSSSLSLHQEIESVRSCSPVLSLEPPPAPPLGAPASGVAAGGDPDDGGGDDSSSHDTDFSANPEPEGWVARPITRDAARGCHFHDALDTLLRRAFDRHTWSVEYRCVVYQHSRGVYPDRWEATCLVRCPEDSLQGAEACSEHYSISERDSAEAAMQDAARRALSHYCSVFGGAADGLDLKYYPRRSSGSTGGVIVSPVGEGNPRLSSTVNLAAVLNTELDHALDELSRARAEIALLRAERAERRFLDGGSPAPVGTQHPYRSPQRGHQSYGNPACKTKITLEP

SEQ ID NO: 83353 - protein, 79 aa, Zea mays
  Coding DNA Sequence Number=SeqID_39978
MKPLKKCVILFKMNKIKGPNTGSFVKKAYSTRMHAIHRPPGHNSRLRHHYNRPIPEASSQKGVSTLNNNGNSGRNPKLA

SEQ ID NO: 83354 - protein, 265 aa, Zea mays
  Coding DNA Sequence Number=SeqID_39979
  Homolog annotation: Hit_ID=Q6QP51; Match level="QueryCoverage=15%, HitCoverage=19%, E-value=4e-14, Identity=85%"; Hit description =Putative growth-regulating factor 1
MLQDPPPTTRGLGPTRHASWPRTEGAKSLRAERTTAQRLQALLHFRPDQRVKGRTAMQAACNRTKGAHPFDSDASSMGAQAHTSCNRRAGYYVRETAPPLTPISRLLDCGTSAATRGDPAHGPTVPTEHIDHGSDSHGRRRDGQYGQKWAGSNGGGRRAEAAVKSDRERGYSERDPSPRRKRALSPPTDQRFEGWPLGRVRQPPQSTWAPSPPTDQRFEGWPLGRVRQPPQSTRAPRPPLVRGSKAGPSDGFDSRLKPLGFRAHY

SEQ ID NO: 83355 - protein, 31 aa, Zea mays
  Coding DNA Sequence Number=SeqID_39980
MAIWPKVASPRRLGLGRAEGLCSFVLMGVTS

SEQ ID NO: 83356 - protein, 110 aa, Zea mays
  Coding DNA Sequence Number=SeqID_39981
MTIDDFFKLLSSTCGLGTIKREELGELEGNGEEEQGGHADGVTAREERRTGQGELTRNLSAQESGAWPWKDREMGWAPTGEVAARELQGLNGDKWGRKNTEEIQGDGQPS

SEQ ID NO: 83357 - protein, 96 aa, Zea mays
  Coding DNA Sequence Number=SeqID_39982
MWQNPPNYSSLSAQVTPQRPQHTYIGISRQSLRSSLIKPLIWDQIPQIHSKYKGSSSLISYEKKTIRIEFLNLAREILDGSLGSLLLVFLMDSSLL

SEQ ID NO: 83358 - protein, 132 aa, Zea mays
  Coding DNA Sequence Number=SeqID_39983
MSMTQHVIPMPTYEKVTPIFTENAFLSDVRASLKHEHAGNPDVDVIAPRTAPVCVAGTPSFTICPTEVTVEFVFIDRAPLPPRRAHLDACKLSAKPLSLSLSLSLLGKETRVAGENRKNPWGFLQTVIDSRE

SEQ ID NO: 83359 - protein, 141 aa, Zea mays
  Coding DNA Sequence Number=SeqID_39984
MESERRASSGKVRATQGESAGESEVPGRFDLAEPAEEEPRELEERAVGAEERAPGRTERALGTDTGGESRRAEKEDERAASLEEQGCDTGGGRWPSEHLRQATVAMGRELDRARPEQRDERTGAQERLVSAAIDREKGSAI

SEQ ID NO: 83360 - protein, 188 aa, Zea mays
  Coding DNA Sequence Number=SeqID_39985
MDPFPREIATVIPRIFPRGDPFNPKWDQPEGRALIGGDSEQQYSDTVASSAMFAVMQLYNSSERNLEMQLNNVKAWNANLHEEVFQLHGQLNPVNLPEPEEADAAAIDDGGAVFEMVTTRHINLGAAGTSGGGNQEGNQEVPLPPPTPYTLEQFFTQFLGAQRNMENLQRNMEVELRNIADNTRHGQP

SEQ ID NO: 83361 - protein, 207 aa, Zea mays
  Coding DNA Sequence Number=SeqID_39986
MTLPVDVAGLCPRRGDVGAPPKPRLSLSSVAEAESEPWGRARRRPFGRGQGGVRALGSGEAEFRRLPGLSPSPSPGVGRGGGRLAEARAESEPWGRARRSFVVFRVLARVRALGSGGAEFVVFRVLARVRALGSGGAEFAVFRVLARVRALGSGGAEFAVFRVLARVRALGSGGAEFAVAPLARPDCLSDSLFALNAPATRSVGVAI

SEQ ID NO: 83362 - protein, 302 aa, Zea mays
  Coding DNA Sequence Number=SeqID_39987
  Subcellular localization annotation: CTP_CleavageSite=2; ConfidenceScore=5.36e-01
MSSSSLMRRVFPSSQPPDGGYPPPFRLLVGGTQLHGSWYLSAIIRLQGFSSRSLVAPFRRWPPKTVTSSSWMGRGKPGCDPALSIGCVRHPRWGGGRGEPGLYLVCGSANHLLFQLLVVATVLPRYDGVVLQSCRGRRTVAVQLGCNIPSSPSHSRRGRQRGSTGALGSGPLFGFDGLFASLERDREQEPSGGRVHLGSWLPLQRSLASLPAFVPPQARGRSYPRGRNRSSVCDGTSNANVFCSLWLSGPEHDPLSEVVKKHESNPSKKRSFFEEKFDAEGVSPLLAPEGGSGFAEARPTLP

SEQ ID NO: 83363 - protein, 214 aa, Zea mays
  Coding DNA Sequence Number=SeqID_39988
MRLCLERAGEDTNLVRALATTKSRARKDGFNSSTANASTHEARWTKSECDAVTTSTHASVNASQRQARVLRTTAADELEHHRVADVGEQSRQDAERHGELENDLAWELDAPWRAENFTHTIEGFDTSSTGKPGAREIREEGAEDGRAAMGEDWGVTAQRVGRHGRGQSSASSKEMGRSAEQSDGSDLGEIRTGHRETRKDDEVGRGAMGEVEDE

SEQ ID NO: 83364 - protein, 82 aa, Zea mays
  Coding DNA Sequence Number=SeqID_39989
MKLGPIRSPGTLGVILELHGHQNEEEIEVEETRTTPPPPEEPHAGNCFYFDICGAKPDSPITQGKPRCICHLLAILKSFSLA

SEQ ID NO: 83365 - protein, 182 aa, Zea mays
  Coding DNA Sequence Number=SeqID_39990
MEDSHLHDGHQAGRLHLGEEEQALEHGQKQTPTCSTRSGAPEHAPALGPARTAPRQAELVPPLAPSPIKPAKASTVRLRSLSTSTERKITGVCPAHGVPAAAREPTTVDRPTEPSQPRPTLERDSTCLGEAPRARNRALPRRRHRIKVTELHPTAGERRPSSTKSFGMTAEKRNRLKDEKPN

SEQ ID NO: 83366 - protein, 116 aa, Zea mays
  Coding DNA Sequence Number=SeqID_39991
MARVACTLRGKRLDGGVSMLSVGVNLICFPPYGDMPPRTRKTARKSTRPIGMPRHQLAPRHDDSSSDSNDPIGDLEAQVEQLRTELRHRNSVWVEDGQCINELRTNIRHLQDELVE

SEQ ID NO: 83367 - protein, 24 aa, Zea mays
  Coding DNA Sequence Number=SeqID_39992
MAVGVSEALYAKAMDTHLVLRESH

SEQ ID NO: 83368 - protein, 122 aa, Zea mays
  Coding DNA Sequence Number=SeqID_39993
MGLAASLPRSSVGETSCGEGSGRRRRWRNSSTQGAGLEMGPRWIYGAGSKGNRELGHGAHGNSDYHGRPSKMEEASAKGRGHGRHGELRRPAASVAPWIESRAALEGRECSALDELRAMGPK

SEQ ID NO: 83369 - protein, 222 aa, Zea mays
  Coding DNA Sequence Number=SeqID_39994
MAAGTVQIDGARCIPTEVERGGDVVREQGKQGARPWRSWQQRLPWPAIQNGGGECLGQGARAPWGAEEAGCERGTMDREPGGAGGKGMLGPGRTPSNGAQVGGRHERGGSSLRAAVWDEERGQRRSAEAKEGRWLLSEVEEKGVLQGDGSGWRRGTPRLLADLPAGRRGEERLHGYELETPAPRGSASAQAERWRRHVQGASAEEGRRQRGGEGGCWWRLEK

SEQ ID NO: 83370 - protein, 87 aa, Zea mays
  Coding DNA Sequence Number=SeqID_39995
MGLGVCGSLCQGGNEDDGYDYAYGNVRMVKWLETSSCEHSQSKRKQSQETRDFIPWFGQVTLAYFHVVASQWTRVALNPFQVIQRST

SEQ ID NO: 83371 - protein, 204 aa, Zea mays
  Coding DNA Sequence Number=SeqID_39996
MAVWSFPACVGRPVGPAFVKNILRRWPRGDVGACAAVCLSCAWRPAPQPRDSWAQAPLSVTELFGCYVCAKRISPGCAGSIFLKRGFPRAVVSLSHFPQLLCPFASKPSTPLRVRAPPSFAVVVAMAMLVRPDHYQTEKALDSVRRLLGWGMPVFAKRIRADTTPLGDLAAGEFVLFVSYLFCGLALPISPFFLLLLEEFGLQL

SEQ ID NO: 83372 - protein, 255 aa, Zea mays
  Coding DNA Sequence Number=SeqID_39997
MTYIASLGGARWENWRSDWVIASAEVSDRLALPSDGPRLERKQWRVKPCLVPEFEPVLDRIRELAGITGEAFIPESLIPPEGISPLCDNPGLRSAVLARLLTLNESGVVVRQTGGRDPHRGIHIPDAPVGGSQPVDVAPRVPPAVPNPSEKGKGPASSSSTPDAAGRSEEVRRHRLRHADGSFVLDLPRDSGSPQKHQKTAGGTKEAEPRVQDRQRGASPLPPPSSDQIPPPPPPVSDRPPSPRGQRQQQQQGRQ

SEQ ID NO: 83373 - protein, 216 aa, Zea mays
  Coding DNA Sequence Number=SeqID_39998
MDSFIRENVKSIVMTSRAQLHDLEHGHYEMTKAITGNADRSLGEDYKDLSVALLTFILRFLNGGHRRRRGTDLVAHRLLRAAHRHGRRHAKKRSKKDARATLDPERVHRTGGDPGTGPSNAAAPAAPPQQPLAPRQDRWVRPPSPSPERVAERLRESETQQPLRPMRYCPLHGWGRVLLASRGLLQRMQTLQPPLFDRADCSFKSPLQRALVPGHG

SEQ ID NO: 83374 - protein, 114 aa, Zea mays
  Coding DNA Sequence Number=SeqID_39999
MALTSTSDTNRWIPRWSMQVVVEKRMDVITIFESLINTHSSTDSLTHRRSCSRRPNVQELEIMRMREEMRQQREFMEACNAHNQAMYQLMQQQGMTSNIPPPPQWSQFTSTPAP

SEQ ID NO: 83375 - protein, 567 aa, Zea mays
  Coding DNA Sequence Number=SeqID_40000
MVMIVVVCTIIENCGFQIDEVERVPKVSMLVGAYFMPRVEEVLCAIAALDELIIDLSRPRTFDLKALPLDVVVNPVEFLDEGLEFLLLLLEVEADIPLLGWEVPRPPAPIVEDASELATRSSPVAVAKKSREQKSMRLLDAKISPIVKKLGDNRICVREEKLARTHSEWVVCGVAPPFIMNLGTPSSVRKPARASSTATCLPPLLCLRVRRRLSYPVSLPGGTPSDSPSCASGSLAEPSAGRPRRGRRPHLAGRRADIAEPGGLAELQAPGAAQCLTEPSGLAKPDVGRLSAQTEPPTQQPSSTCANATGSETSVSSSSRVAVRVPLLEYSSSFSSCRVTAKLVITSAINSASSSNEKELSASSSNDDFKSFESTTSYTTAASRSSTIILVAMHGTAPWVIMLAACQMREDVVSRKAAQKMKRMQRSTPATTSSSTMAASGPIVARAHFPRAPFREVITIGHYINDDTFYARKPNQKKGKYQKARSFSNMSSKTGYTTDHGDNVSAGSDRRANDAIGSDRRANDVVDTLPARHLAIDANTDATADAVGISSSWAVTLTRIALTLTRI

SEQ ID NO: 83376 - protein, 170 aa, Zea mays
  Coding DNA Sequence Number=SeqID_40001
MDFARRETDLTFREEMLTRRGEMLAEHELEAEEKEKKMEERIRQFQAAQRIAAWASEASTALVPLGMSPIPVSELPTSISNALPVLDSTADRLQCLDQILGARLEAEGGRIYRAVIEYILTCFRSHNLAISLEPVIAGPVAATEDAAWEGVQDVVELVAERFQQYPADDE

SEQ ID NO: 83377 - protein, 124 aa, Zea mays
  Coding DNA Sequence Number=SeqID_40002
  Subcellular localization annotation: CTP_CleavageSite=25; ConfidenceScore=5.51e-01
MPGPPTGLALSSRLPCSSRGSGGSSASVKRRCNGADVERRRNGGGGAEQEAAPVPLPRMLSRVHQVLSDTGAAILREWEALEAEHQRLSDWRIQLEERTKSASRQFLSERSQLERDRKEYKRDL

SEQ ID NO: 83378 - protein, 394 aa, Zea mays
  Coding DNA Sequence Number=SeqID_40003
MQDDAGAEVAPLGPQDPPVTVEATPSGSQVPAGGPEVVASPTTVADPTSAIPSDAPSVVGVGGASSSVPLPTSKGPEVILRRPLRSGIEPGATLTPLPHVLTRAHQTLQETEAAILREWEALETEHQRLGDWFSQLERRTKATSCQFASERVELEQEREDFKEDIQKKQRDKQAAAEAKLQQELADKANDIARTEENLKAREASLAKQATDLTWQEEDLIFREEMWARWNKLLDELELKAEEKGKRLEGRVQTLEEQVRQFQAAQAVQATQTASDPQAMEVMRKTLDDLQTEQRAEAQRIAAWAGEASTALVPLGMSPIPALILGARLEAEGSRLCRSAIEYVLTCFRSHDPAISLGPVIAGPVADTEDAAQEGVQDVVDAVVRRFQRDPADDE

SEQ ID NO: 83379 - protein, 74 aa, Zea mays
  Coding DNA Sequence Number=SeqID_40004
  Subcellular localization annotation: CTP_CleavageSite=39; ConfidenceScore=5.17e-01
MVRVARTLLAKDRLKGVAFVKVPRPAKGVPARFVSVGPAAAAKASSEGWRLCLRPNICPPRDQFDKVTWCRRRR

SEQ ID NO: 83380 - protein, 66 aa, Zea mays
  Coding DNA Sequence Number=SeqID_40005
MEGRGRGELEMEAEPEPEPGARRRVEDEHGWRGERREREWHCLRWSARQAEDKDSTRSGTKIREGR

SEQ ID NO: 83381 - protein, 186 aa, Zea mays
  Coding DNA Sequence Number=SeqID_40006
  Homolog annotation: Hit_ID=Q6J9V9; Match level="QueryCoverage=49%, HitCoverage=31%, E-value=3e-21, Identity=64%"; Hit description =Putative uncharacterized protein
  Subcellular localization annotation: CTP_CleavageSite=33; ConfidenceScore=5.01e-01
MMTASKKGPGKGIFRKGSFSAKETGPRALLLIRGSKAGPSEGFNSRPEHSGSEPITDQGGSKAGPSEGFDSRPGACRVRDDFGYVRYMAEARATLPRYPRTFPRPPPTEARRRQQDPNRTANCASTGLRHFSDGHVIAYIGLKHFSDSHVGMYTGLRHFSARHLTFQGLTSVWVWKNGMDERVEQR

SEQ ID NO: 83382 - protein, 300 aa, Zea mays
  Coding DNA Sequence Number=SeqID_40007
MGCTRVAFFLRLLEEHNPVGVGALQTSLGFKDYHQAARLQSPTGGERALTGLAKGANFDNAGPVGRKRRQLQRAWLAGSAGSGAASDVASCSLVRALLSVRRTGGCRVVRTGGPYKTSYAAWAAFVFLDCLVLTPARHLRPEVGAGPSGRTWPLSSVLRWWQPEEVVSVDETIGATCGQTSGSLALMACPRPSCGDVGEGLFTAASALRSSLLLFSRSRQRSLSLPVERSPMSHLEFVIPQALWCGGCSFLREWIRSPICNEAVVSAWTEAESARKEALSAREHVASQAEEVQQRRLELG

SEQ ID NO: 83383 - protein, 192 aa, Zea mays
  Coding DNA Sequence Number=SeqID_40008
MTNGLAITAELPPYGDMGRSAIIEEGVMIVTFRVEISYVLRDSEIDDRRNALDFDSLGTANRIVLCEDSPHVPIAVSAATWPPLHRPDPHRQQAHRRRPRLTAQFGPGVRHPTPLLGGTSGGVVLILATAVIAAKPEEKAEEEPEFPLEVISNAGGVPIVMNETIGFNFDSDTKSSIPGRYATLPSVLQDCY

SEQ ID NO: 83384 - protein, 147 aa, Zea mays
  Coding DNA Sequence Number=SeqID_40009
MTYTLHSYAYIEVISAGETEEHQTRALSASEGGQPRYSGKSSAQMGGSFLGGVFVKTRIVQAERYGWKQHSKRRFVVNENKGRCFLPLAQKLQAMVLGVCFVAEDPKEIKYLRQILSKAAPKLSPIKLRHSDMSQDEGVNRLKDEMT

SEQ ID NO: 83385 - protein, 101 aa, Zea mays
  Coding DNA Sequence Number=SeqID_40010
MTKINRNNIELYLYLRLDRRTFGRRRPPTPIVVDVLFKLQESDTLRQGAYNFSTGTVEDASHDFLVDPAKEHQSRLVATRDCKFFQLRYVLFRKLLATQVP

SEQ ID NO: 83386 - protein, 230 aa, Zea mays
  Coding DNA Sequence Number=SeqID_40011
  Subcellular localization annotation: CTP_CleavageSite=19; ConfidenceScore=5.07e-01
MQLACNCTTGTHPFDFDASSMKAQAHTSCNRRAGHYVRKTAPPLAPIPRLLDCRTDATTRGNPAHGPTVPTEHIGHGSVSRGRRCDGRYGQKWADSNGGSRRAEAAVKSSAGSRPLLEQQESHLPRREDDAPVFRPSNSSRNDRSANHPSCRVNFAAGQATPLAGEAGDVFHLCHNDYVKKGTGKGDTPKGILLREGSGPQALLLIRGSKAGPSEGFDSRPRALTLQARY

SEQ ID NO: 83387 - protein, 151 aa, Zea mays
  Coding DNA Sequence Number=SeqID_40012
MRLTAAESSLRRHRKLRLARPWAPASGEVSASPDLGPRPQEKSLPRLTPGLSPRLGLGRWTPPRPTLGLGLDLDLGGWTPPRPTPGLGLDLDLGGWTPPRPTPGLDLGPDLRRNRVLTQPRPWPQEEFSPRPTLGSDRPRHRGDHHYPTPS

SEQ ID NO: 83388 - protein, 135 aa, Zea mays
  Coding DNA Sequence Number=SeqID_40013
MTLTRRAHGQVARVGGQECSGLTGGPQQERARWSAIEGRCGSGEVRGRTDGWGPPISDPRKGKRGRRWEADGWALAVRVPIFAGRACMVSAWRKDEAALWSSVGGPSSLGGSGAWVVAEKCVTWVRPWQGVWAGG

SEQ ID NO: 83389 - protein, 274 aa, Zea mays
  Coding DNA Sequence Number=SeqID_40014
  Pfam annotation: Domain name=DUF1635; Domain location=48-258; Score =50.9; E_value=1.2e-12; Accession=PF07795.2; Description=Protein of unknown function (DUF1635)
MMTRSHSSPAAAGGATLAYAWGYYQQQQPSAPFGEHQADSGEQQLDLTTAPELRRALVRALAELHASRAAHQAELRRVESEAARLAALVSSAAAERDELRRQCHSLLLLLHHQAQAAAAAAAVAPAPSLHAAASVLSAGGGGCSASASATAAAVVTNENAPDADDAELEMALARRLPEKGRLVEAVVSAGPLLQTLLLAGPLPRWRHPPPPAPADIPPFHPGGRHSPLAAGDASNSFSSASAGSSSPESNCSGGPPPPVAPHALPSFHMSPFCM

SEQ ID NO: 83390 - protein, 60 aa, Zea mays
  Coding DNA Sequence Number=SeqID_40015
MGGVGFIAIISGVHGRWANCGGDIDWGRSSSLLDEPTIEDPGVQQVETVEQELVEGKLCP

SEQ ID NO: 83391 - protein, 154 aa, Zea mays
  Coding DNA Sequence Number=SeqID_40016
  Subcellular localization annotation: CTP_CleavageSite=33; ConfidenceScore=5.06e-01
MMMVLDTVVTTSFAILLLFSLSSCLHLRATPFSAEGVGACAYSPYSSDTSPDSDSRSGYCTSMRTFHIMRAPSFSPSSDVPFVFTTFILFFLPNLLPPPTVAATSRPTLVDAGTGLLSFGSGSTFSAFAKMSEDKKAVAESKLSLSEEMHLGFL

SEQ ID NO: 83392 - protein, 92 aa, Zea mays
  Coding DNA Sequence Number=SeqID_40017
MVPEAVAALQLVKGPVGVVYSIVPAKKPRCVLGVHTTPGDTHAVNQKFRIIIRKLMSSRYYVRLLADLTRCTCFFSKNVWFSSHIKLASWGI

SEQ ID NO: 83393 - protein, 329 aa, Zea mays
  Coding DNA Sequence Number=SeqID_40018
  Subcellular localization annotation: CTP_CleavageSite=68; ConfidenceScore=5.66e-01
MPSHSPHASHPSTSRAPGWEVPALPSSCHWRSATLRRWHPSPFARLQGFSSGSPTAFPHRWSPRMVTTSSMVGRRKPGCGLCPASASRIFIILVVEEGEASRGLPSSSGGGNHPPALRRRRPLAIRGKANCCCLARVQHSVLYPGDCGRPHRRVSQHVVRREGGTRVLRRSRSRSCGEDGSEDLPVDVVVGAEVVAAREGFSADEIVGATHATGLQLFGFNGWFSSPARDANEGLPVKVTSEVSVSRRRRSPSARSALPRKASLAQLKNPRLLCDEPEPEAAVSAWTEVESAHEEASLAREHVASLAEEMQRRRLELGQVVRWRDQPRS

SEQ ID NO: 83394 - protein, 282 aa, Zea mays
  Coding DNA Sequence Number=SeqID_40019
MDALDFEYPDYERLDKDAEGQKRKRVAGALNKEATKLMKDDEEQLIKKKLKPEPKTDASKKSKATTPKQKAIDEEEEETAATLSHPVLKDKAGAGFLPDRHRSKINQGPPYTDHSPTALAPFGSSAPTAARRRGSSDDARQWPSRCTPLPLGMTPQRKNACPWSRISAHGIHETVAGVGVEAADRGCGRSCGSPSPRPPSPLSKSGSCVSADDDTRSGAPPATATALPGPAVEATDARKGEGNRVPGRTRKGTGRRKPPADSVEVGREMRGIDLGFRVLSYG

SEQ ID NO: 83395 - protein, 119 aa, Zea mays
  Coding DNA Sequence Number=SeqID_40020
MQSCNHFEGDETTKVVPKGAQKIVWLQRQSASLNTKKLRFKHVHRHFMQGNASMCTKRREGVFRLRLKSHTWGFRPQQSNSHMDGKEVIKGSFSPATFRMRFRLLTFGAAILQINNGIR

SEQ ID NO: 83396 - protein, 61 aa, Zea mays
  Coding DNA Sequence Number=SeqID_40021
MGLGVCGSLCQVWVRPLGRSGNEIDGFGYDYGAGCQHGNHCSGEDEAVEGDFQEFQDYDEF

SEQ ID NO: 83397 - protein, 153 aa, Zea mays
  Coding DNA Sequence Number=SeqID_40022
  Subcellular localization annotation: CTP_CleavageSite=26; ConfidenceScore=5.13e-01
MAADFSLPRTQQWRRRWCVSGAKGARARLRQGRDGSRKRVARSFISWRGQSHQRHSRRTRRGHGGLSVAWSPWVGDRADEVGPLGSENVQALVSPTQGPQRQRPSKGNASAERMTSGPAVSAPIPEAGLCGMDSEVGRKLVCGPDLYLDYMAP

SEQ ID NO: 83398 - protein, 187 aa, Zea mays
  Coding DNA Sequence Number=SeqID_40023
  Homolog annotation: Hit_ID=Q6J9V9; Match level="QueryCoverage=55%, HitCoverage=36%, E-value=6e-45, Identity=84%"; Hit description =Putative uncharacterized protein
  Subcellular localization annotation: CTP_CleavageSite=27; ConfidenceScore=5.08e-01
MRGSKVAPSGVRQLPQSTRAPCPLVIRGSNAGPSEGFDSRLRARRVRDDPGYVRYMAEARATLPRYPRTFSRPAETICNGIPPEGGIEPSDPIKWVRVRQITCRGKLKEKGHMLHAKGQAAEGQESRMQLTKRQATEKFTRFVRSEIHSNPLLILGCKRVFHYSRCLEAYKSHFSAFHEYLGITQIP

SEQ ID NO: 83399 - protein, 129 aa, Zea mays
  Coding DNA Sequence Number=SeqID_40024
MAHALRWPLPLAWLLKTPPRRSYKTSYAVEMAAARFQRDPTDVEAGLMRVDLAGLAYTYAQPSYKREKTQPLRLAPMDRTYRDALGVRKRYSFSCSEVVTLGSAYFRRLEGSFPAGGEFVEPFSVQYLP

SEQ ID NO: 83400 - protein, 255 aa, Zea mays
  Coding DNA Sequence Number=SeqID_40025
MEAGRGQAGTEDRVSSELGAPRPWAREELGRERAEGEIEEMRATGASSRGRQRATQGSGKEQRELGRLRHPGEPEVTREHHGRSLRAEKKLGWASSKAPSREELRPGMEQGTGCGHGTGDARAGREIGDPGWGLGRDATPMGERRAREKSRRSWATVRQAPRLGTERCKKEISSVRKISRTAHGARAAAKNLLGTAARVRQALDGRTGDKDHEHELGLGWSTVEQGTCVESSEEGRYFPFLIHFFELKNLHLFIS

SEQ ID NO: 83401 - protein, 68 aa, Zea mays
  Coding DNA Sequence Number=SeqID_40026
MGYRIPRKILNPAPIPAVAEPPKLLGPHAPALVSKTSDGYACAPDNLTGSVRVSQGPRINHEQPGLQD

SEQ ID NO: 83402 - protein, 255 aa, Zea mays
  Coding DNA Sequence Number=SeqID_40027
MEAGRGQAGTEDRVSSELGEPRPWAREELGRERAEGEIEETRATGASSRGRQRATQGSGKEQRELGRLRHPGEPEVTREHHGRSLRAEKKLGWASSKAPSREELRPGMEQGTGRGHGTGDARAGREIGDPGWGLGRDATPMGERRAREKSGRSWATVRQAPRLGTERCKKEISSVRKISRTAHGARAAAKNLLGTAARVRQALDGRTGDKDHEHELGLGWSTVEQGTCVESSEEGRYFPFLIHFFELKNLHLFIS

SEQ ID NO: 83403 - protein, 601 aa, Zea mays
  Coding DNA Sequence Number=SeqID_40028
  Gene Ontology: Mol. function=oxidoreductase activity; Cellular component=glyoxysome; Biological process=fatty acid metabolic process
  Homolog annotation: Hit_ID=Q6L4L7; Match level="QueryCoverage=95%, HitCoverage=79%, E-value=0.0, Identity=77%"; Hit description =Putative glyoxysomal fatty acid beta-oxidation multifunctional protein
  Pfam annotation: Domain name=3HCDH; Domain location=371-464; Score =113.7; E_value=5.7e-31; Accession=PF00725.13; Description=3 -hydroxyacyl-CoA dehydrogenase, C-terminal domain
  Pfam annotation: Domain name=3HCDH_N; Domain location=190-369; Score =246.7; E_value=5e-71; Accession=PF02737.9; Description=3-hydroxyacyl- CoA dehydrogenase, NAD binding domain
  Pfam module annotation: Pfam domain module=3HCDH::3HCDH_N; Domain location=371-464::190-369
MGKLLEIVLGFKVLSSYILSTFVRYGTQRLPRLVGLPKALEMMLTSKTIKGKMAHELGLVDAVTSANKLVNTACSWALEIFEKKKPWFKSLHRTDRLPDLEEVKDILKFARVQAEMKAANVQHPIVCIDVIKEGIISGPRAGLMKEVLSGKMLEQSQTSKSLRHFFFAQRATSKIPNITNIGLTARKIKKAAIVGGGLMGSGIATILILNNFNVVLKEVNEQFLSAGINRIKVNLQSLVRKGQLTEEDYEKKLSLLCGALDYEQFRDTDVVIEAVIEDMVLKQQIFSDLEKYCHHNCIFATNTSTIDLNIIGQKTASQDRIVGAHFFSPAHVMSLLEIVCTHHTSSQVIVDLIDLAKKIQKTPIVVGNCTGFAVNRMFFPYAQAASFLVDYGLDVYHIDHVITQFGMPMGPFRLADLVGFGVAIATRKQYYQSYPERSYKSMLLQILVEDNRTGESSCKGFYVYDDKRKASRDPDFGKYIEKSRNMAGVMQDPKLMKLTDNDIVEMIFFPVVNEACRVLDEGIALKASDLDVASIMGMGFPSYRGGVMFWADSLGAKYVYDKLDAWSKDYGEFFRPCEYLAVRARQGASLAAKVDGVKSRL

SEQ ID NO: 83404 - protein, 532 aa, Zea mays
  Coding DNA Sequence Number=SeqID_40029
  Subcellular localization annotation: CTP_CleavageSite=70; ConfidenceScore=5.59e-01
MAERYQLPRSCVPPTTTRRKNRGRSPSGGSEAVANRVFSNTLQGPPPTTRGLGPTRHASGPKAEEARPPRAVRVTAQRLQALLHFCLDMRVKERTAMQAACNRTKGAHPFDFDTSSMEAQSHTSCNRRAGYYVRQNCTTTRATTAPSRLWNRYRDSRRPCARAEAAVKSSASSRPLLGQRESPLPRREDDAPVFRSSNGSRTHNGCPANHSSRRTNSAAGHAAPLAGEAGDAFTSAMMTASKKGTGKGDTPKGILLREGNGPRAPPTDQRLAPRKGSTAASGHSGSAPTTDQGFVGWPSKGSTTASDAERGMTLASAPEDDELRLARPQGSAPVSASEDDKLRLARPQGSDSASALEDDELRLTRPQGSDSALAPEDNELRLARPQGSDSASALEDDELRLARAQGSDSALASDDGLCLARPGARTRPRPRKTDSTSTLEEPPPRPTQGSDRPRHRRGHHYPTPSSLRLRGTRPASHLARPGKQIMMAPRVLHDDSGSQPLTEARRRQQGLDSPDSCPFARLQRSSDDHDIT

SEQ ID NO: 83405 - protein, 60 aa, Zea mays
  Coding DNA Sequence Number=SeqID_40030
PSCRQWGSVYAARSAKVDLSLGEECGGYEIDGSGYDYAYGNGEDEAVEGDFQEFQDYDEF

SEQ ID NO: 83406 - protein, 132 aa, Zea mays
  Coding DNA Sequence Number=SeqID_40031
MKLAELLWQAAWVELAGRGRPDELRARRDSIVERLYAAAVGCSNCVGRQRTARRRLRLLRGRRLTRKPVARKHRPRCSAPASLISRAGGTNIHYDDAGMGDGLSSGAHRAGVQPHEVVIHLAERRNGEEKGK

SEQ ID NO: 83407 - protein, 93 aa, Zea mays
  Coding DNA Sequence Number=SeqID_40032
MASAAVPLAASSGSAASVATAGLTALHASTNDVVVNYDLLQEEPLGTVWIAAHFELFEQRQILSSIRWRLKSAVLSMASGANAVESCDTRSIV

SEQ ID NO: 83408 - protein, 117 aa, Zea mays
  Coding DNA Sequence Number=SeqID_40033
MASRIRICSGLGFHRGFGSGVRSSPPTHAQIENQDNQPGASRMGRSHDNCRGGDRTTSRGAGHGWWRGVVQHRGEVDTKNGRRWEPQEQGQCRSGRGFQVSRARLLQPVAADAIAGT

SEQ ID NO: 83409 - protein, 221 aa, Zea mays
  Coding DNA Sequence Number=SeqID_40034
  Gene Ontology: Mol. function=carboxyl- or carbamoyltransferase activity; Cellular component=ornithine carbamoyltransferase complex; Biological process=amino acid metabolic process
  Homolog annotation: Hit_ID=Q8SA97; Match level="QueryCoverage=39%, HitCoverage=16%, E-value=3e-13, Identity=47%"; Hit description =Ornithine carbamoyltransferase
MAPPVDVAGLRPRLGDVEAPPKPRSSLSSVAEAESEPLGRARRRSSAEARAESEPWGRAKRSSSSSGAEPESEPWVGRSGVRRLPGLARVRALGRAERTRVRAPGRAERSSSSSGAEPESEPWVGRSGVHRLSGLSPSPSPGSGGAEFAVFRDLARVRALGRAERSFLWCLWQGLSACQSHSAKWHCSRSGAGGAVLLSGRSVERRSDGGHFGSAGGRASG

SEQ ID NO: 83410 - protein, 124 aa, Zea mays
  Coding DNA Sequence Number=SeqID_40035
MKLFITVAVPPRLAMLDQHEVVHYCGGAAAAPALALATKRPTEGVPGLGKVPNMLYASAITLDIVLVHKSRQVIHGSVDSVAAHVRSQASCTRRTAEDKFALDFSAAPTLGCTGPKFSLTDRLH

SEQ ID NO: 83411 - protein, 61 aa, Zea mays
  Coding DNA Sequence Number=SeqID_40036
  Pfam annotation: Domain name=efhand; Domain location=30-58; Score =23.3; E_value=0.00092; Accession=PF00036.23; Description=EF hand
MDASDAISSTGYGQQEVGSLATSINVPIVKLKKVFDLFDTKHNGILRFEDFAQVLSACHKD

SEQ ID NO: 83412 - protein, 57 aa, Zea mays
  Coding DNA Sequence Number=SeqID_40037
MVDKPENTVTGGGNQASSRAQFVFEKFSICFEKFSKNYIRIALVAGCMKEAKKVRKQ

SEQ ID NO: 83413 - protein, 147 aa, Zea mays
  Coding DNA Sequence Number=SeqID_40038
MGKGHKRKREPTPPSEDFGDSEYSEEEFSSESEGSPAPVSPPASSDDSDDSQGIAAEVWTYIRAIERSGLEGSDESEFSSDEEDSDGGEDEDDDDDDDGDDDDGGDGDGDGSYGGGGSGGKGSTRGGSSTGSTRGGGGKGSSSKASG

SEQ ID NO: 83414 - protein, 208 aa, Zea mays
  Coding DNA Sequence Number=SeqID_40039
MGQREIEHKGGKREPRLVLSCAQGECACSRRLQAFAREGESLLVSPSSRATTFSYEDPGPSFYRCKERAQAGAEPQGRARWSFLWRLRLDSAAVSLTLAGGTAVGAGQAALFSCQVILALNAPAIRSVGEAIWPRLLHCEACPSWASGESKAFAACADGGYQPSLGVLEPGFMVRFRVLGLRRAPKVPAGDLPDPVPFDRVLGLDASL

SEQ ID NO: 83415 - protein, 39 aa, Zea mays
  Coding DNA Sequence Number=SeqID_40040
MEGQSAQHLCCPHNISAVGQQQQQFLTARTAADSTTAIF

SEQ ID NO: 83416 - protein, 76 aa, Zea mays
  Coding DNA Sequence Number=SeqID_40041
MSGAHRTVWCPLPTVGLATCRAQIPLPTVGPADRWLTGQSGAHRTVRLFSMGLVNEGIDMEEGNPEIGIAILLHDS

SEQ ID NO: 83417 - protein, 114 aa, Zea mays
  Coding DNA Sequence Number=SeqID_40042
  Homolog annotation: Hit_ID=A2Y3X6; Match level="QueryCoverage=47%, HitCoverage=90%, E-value=6e-16, Identity=72%"; Hit description =Putative uncharacterized protein
  Subcellular localization annotation: CTP_CleavageSite=41; ConfidenceScore=5.65e-01
WTSLRSLIAVTKSNQLFSNQLCPFQNTSLVIFFFFRVMQIRLMSFMRLLPQRLPQLIRQVEQDVETVIHVLQPGPIGIVEHKFTDTEILEARATVKRAVDNWRRNWTLEKNVGR

SEQ ID NO: 83418 - protein, 73 aa, Zea mays
  Coding DNA Sequence Number=SeqID_40043
MKYYLRLVLYLKVLLTQGSVIEPIVVVRGNEMISLVIGENEVVIMLVIYKYAYVVFTMFFMVEFYYNNIVIYA

SEQ ID NO: 83419 - protein, 186 aa, Zea mays
  Coding DNA Sequence Number=SeqID_40044
MPPAPPQGIPAAGGDPDGDGDDDVGGSSSHGTERSEEPELEGWIARPITHDAARGCHFHDAIDTLLCRAFDRHTWSIEYRCVVYPASSRVIPRPVGGNFLVGEGNPMLSSMVNLAAVLNTELDHTLDELSKVRAEVAELRAECVARHYLDGGSPAPVGIQHPYRSPPHGRFDYGTPDCRTWIDLDP

SEQ ID NO: 83420 - protein, 92 aa, Zea mays
  Coding DNA Sequence Number=SeqID_40045
  Homolog annotation: Hit_ID=Q6UUN3; Match level="QueryCoverage=77%, HitCoverage=7%, E-value=1e-07, Identity=47%"; Hit description =Putative gag-pol polyprotein
MEDRKRKIGGPQNCPKKAAQQPPTVNAPTRQGAPQQAPGVRGQAYNRGKVNHLEAEAIQDAQDVAVGTFPVESYLAKVLFDTGATTTKQPPL

SEQ ID NO: 83421 - protein, 117 aa, Zea mays
  Coding DNA Sequence Number=SeqID_40046
  Pfam annotation: Domain name=Chromo; Domain location=1-36; Score =13.8; E_value=0.011; Accession=PF00385.15; Description='chromo' (CHRromatin Organisation MOd
MYKVQWSHHSVEEATWETEDFLRSRFPDFLPKGVVAKRMTFEEQLTRKLEYKERVAHQHTFKHPSKGLYLKSRDEIPLRGEGCNTSGVTMARAHLGPKDYDHMWQELKEQKCKGFGN

SEQ ID NO: 83422 - protein, 204 aa, Zea mays
  Coding DNA Sequence Number=SeqID_40047
MGRRGRGSGCAKVAPLSADRTQKRGKWHTEGCPEQLTGAGYATPSQYTVQLFEEHRVPHFRVRMTLEPHPLQPGWCSLDLESFGFRADDTIEATALHVLTTLCGFHPLEMPSHPIGLFSAEKEDYPMWKARVDHDKDVWALYPGHTAQLTVRCISALYHLQALRAEAMSQLMGLVESTKMTLDNREDLVVDLSTKLVEKDLQVE

SEQ ID NO: 83423 - protein, 281 aa, Zea mays
  Coding DNA Sequence Number=SeqID_40048
  Homolog annotation: Hit_ID=Q7XBW4; Match level="QueryCoverage=48%, HitCoverage=12%, E-value=1e-46, Identity=62%"; Hit description =Expressed protein
  Subcellular localization annotation: CTP_CleavageSite=29; ConfidenceScore=5.06e-01
MLPARIRRGSERNFIPLPQDTTTSAPAVRRGMRAQRARLAEALRLKMVQVPVPLVEYSKNFLYSKYSSRREIQGVQIDRKRRSGSSQGADRSPDRNVYVFWHVMMLQLCLRLHKMLLIIFSTKATITLVERLPQVVLGSEETTALSHARMLLALTFYAGHSSQFSGSMDKLIVSKPLSIGYLYSVAELKSGAYSKDTTNISLHATSTSAASKISVIHDNALPNALLGTVEYELPHVPPWFFHAGSQKLYGVLAGIIRLVGLSTVSVDGFDSLKLTVVVTSP

SEQ ID NO: 83424 - protein, 330 aa, Zea mays
  Coding DNA Sequence Number=SeqID_40049
  Subcellular localization annotation: CTP_CleavageSite=30; ConfidenceScore=5.22e-01
MSSRSLMHRVFPPSKPPDGGYPPSFRLIVGGTQLRGSWYLSAIVRLQGFSSHSPVAPLRWWSPKTVTSSSWMGKGKLGCDPDPALSIEGVRHPRWGGERGEPGLYLLRGSAGHLFFQLLVVAIALQPCGGDVLQPCRGRRTVAAQLGCNIPPSPSHSRRGRQRGPAGALGSGPLFGFNSWFASLERDREREPSGGRVHPGPWLLLQRSLAGPPTFVASQARDSPVDYLNRFTKHESPRVKVTSESGDPWTASPSKARSDLAEGVVDAEGATAPFQRQDPSLQDQNFFVGNRDVCASESCFSRKVMSEESLGSVSLAAYVYSVVFRIHFSK

SEQ ID NO: 83425 - protein, 59 aa, Zea mays
  Coding DNA Sequence Number=SeqID_40050
  Subcellular localization annotation: CTP_CleavageSite=22; ConfidenceScore=5.30e-01
MSRPKHVSPTSPAACAHASPTPATTTGDSPLDVTARSPRTSSDPPPDLSYRRELEKSIH

SEQ ID NO: 83426 - protein, 310 aa, Zea mays
  Coding DNA Sequence Number=SeqID_40051
MALVSRGGASSNPSSAMFDLSSLLTITEEQGKQEAGPHDHHSSRRKGKQEYTSGKHKSEGVLDKEALKKYLDLNHDSDDTSCFSSDEESNRRVKDKLKGLCFLTNTVGGLCTMALGDDAMDSDGQDIDNDTTSEVLPSADDLATEVEELNAALASQDNLLRQAARERREFRSKYESTLRELQSWCPTRLNCFETIREIYTHSQDYQNHPLKPITLVRDGVIEEPVRVHSQKEVWIQKPNHRRNTLDTLPDISSDPLLRALQPPKKKVPSHKQNPPKREDEHEPPFSWCSCSASLEMSYEAYRPLPLAARP

SEQ ID NO: 83427 - protein, 179 aa, Zea mays
  Coding DNA Sequence Number=SeqID_40052
MAVTTVCGSASELVGPRAQAGELVSASWGAPRKVRDVVGAKNLRMAHLVAQSTRGGGRSKTGQVALAVSVGQGLGSSLEKLHGLSGKLSKGSGEVGGLRKRLATVAMLGSGGGRWRLLFAANSGCRALMTYEPLGLQHIYGPCIPSQRSTHELSRLGLSAQTARKAQHNELHQAQGYEG

SEQ ID NO: 83428 - protein, 115 aa, Zea mays
  Coding DNA Sequence Number=SeqID_40053
MAVTTVCGSESEVVRVVSWGVPRKVREVVGAMNFRMAHLVARSTRGDGRPKSGQVALAVPVGQGLVSGLEKLHGLLGKLSKGSSEVGSLRKRLATAAVLRQWWRAVALAFHGELR

SEQ ID NO: 83429 - protein, 97 aa, Zea mays
  Coding DNA Sequence Number=SeqID_40054
MEHHVFHCQHVDVIEESIMDVASPEELLGCERVEIWGGHHRLKEPIEVLKVQHKPIKRYKLGFKRKEQKKPKRTLVWRTGLSGVPPDSVRCTRDRTG

SEQ ID NO: 83430 - protein, 99 aa, Zea mays
  Coding DNA Sequence Number=SeqID_40055
MADASSQSTRGRGSKQRIQGPPAGGIYCHGDGERAEPQRRHRFSLPHSLSPLGNGGTAANSETPSFGPKLQGVGVERIGARGGPALYLGQSPSRISFRI

SEQ ID NO: 83431 - protein, 144 aa, Zea mays
  Coding DNA Sequence Number=SeqID_40056
  Gene Ontology: Mol. function=methyltransferase activity; Cellular component=cytoplasm; Biological process=fatty acid biosynthetic process
  Homolog annotation: Hit_ID=Q5N8J5; Match level="QueryCoverage=82%, HitCoverage=31%, E-value=5e-36, Identity=64%"; Hit description=S -adenosyl-L-methionine:jasmonic acid carboxyl methyltransferase-like
  Pfam annotation: Domain name=Methyltransf_7; Domain location=1-144; Score=-146.0; E_value=2.6e-06; Accession=PF03492.6; Description=SAM dependent carboxyl methyltransferase
MGLWAGAWPGPAQFPALMMPRRPACSASSCLLQGLLEQDVVDAYDAPFYAPSAREIEEEVSKEGSFSLDYVRTFEGSMSSGAGVETDGRKVSMAIRAIHESMLTHHFGAAIIDALFHMYTELVTESMHKGEVKSVQIGAVLVRI

SEQ ID NO: 83432 - protein, 327 aa, Zea mays
  Coding DNA Sequence Number=SeqID_40057
  Gene Ontology: Mol. function=methyltransferase activity; Cellular component=cytoplasm; Biological process=fatty acid biosynthetic process
  Homolog annotation: Hit_ID=A2WU61; Match level="QueryCoverage=99%, HitCoverage=86%, E-value=1e-119, Identity=68%"; Hit description =Putative uncharacterized protein
  Pfam annotation: Domain name=Methyltransf_7; Domain location=1-327; Score=409.0; E_value=7.2e-120; Accession=PF03492.6; Description=SAM dependent carboxyl methyltransferase
MDSATLVYEALRPESFTVADLGCASGTNALGVVEAIVRGVGEACRGRGPSSSSPPPEFSVLLNDLASNDFNTVFARAPEVAGRLKADAGAVVFLSGVPGSFYGRLFLCRSVHLVCSFNSLHWLSQVPAGLRDETNKPLNKGKMFISSTSSPAVPAAYLRQFQKDFNLFLRSRGAEVVSGGRMVLSMLCRETEDYTDVKMTLLWDLLSESLAALVSQGLLEQDVVDAYDAPFYAPSAREIEEEVSKEGSFSLDYVRTFEGSLSSGAGAETDGRKVSMAIRAIQESMLTHHFGAAIIDALFHKYTELVTESMHKGEVKSVQIGAVLVRI

SEQ ID NO: 83433 - protein, 70 aa, Zea mays
  Coding DNA Sequence Number=SeqID_40058
MPAVCSLFCTAPNIDVVHPGGENPVFCVEKASRSTLVDVVAMHKSESPSFLQTPIGFVYGRNMVVLMISS

SEQ ID NO: 83434 - protein, 137 aa, Zea mays
  Coding DNA Sequence Number=SeqID_40059
KRPTEWKKGDAAPGKLGLGHGRGEAELQRSAGFLLARGAGDVLQVGEGALGAIEGAEGAAACLQGGSQAPWGDLGQRPWRRKPPAQGKPGRCLLLHGKRRKETWGGREGCWWRLKIFEGWECKITKCKERGLLFIAM

SEQ ID NO: 83435 - protein, 107 aa, Zea mays
  Coding DNA Sequence Number=SeqID_40060
MGKPVPSLLMLLLSRGRVPLDSPTRWQDGRPSHSSNHVLQRTCKNYATSKAEYTNTQLDLPVTALVPTITGMGDHVSGRVRRAICGQVHSGTRLTNLPYFSDLITLR

SEQ ID NO: 83436 - protein, 43 aa, Zea mays
  Coding DNA Sequence Number=SeqID_40061
  Homolog annotation: Hit_ID=Q9XEJ4; Match level="QueryCoverage=62%, HitCoverage=2%, E-value=6e-07, Identity=92%"; Hit description=Copia -type pol polyprotein
MTSDRPLELLHMDLFGPIAYISIGGKKISYPRDLKGILETGSK

SEQ ID NO: 83437 - protein, 156 aa, Zea mays
  Coding DNA Sequence Number=SeqID_40062
MGKSKKGGGSSHHSGDKRKREPTPLSEDFGDSEYSEEEFSSESEGSLAPASPSVSSNDSDDSQGIAAEIWTYIRAIERARLEGSDKSEYSSNEENSSGSSEEGGGGDGSDCDGTSQKQQKSATSSPKNNKGINPEYGILSKSYPTKEKTPKGMLDK

SEQ ID NO: 83438 - protein, 340 aa, Zea mays
  Coding DNA Sequence Number=SeqID_40063
  Gene Ontology: Mol. function=kinase activity; Cellular component =ornithine carbamoyltransferase complex; Biological process=amino acid metabolic process
  Homolog annotation: Hit_ID=Q6QP54; Match level="QueryCoverage=22%, HitCoverage=26%, E-value=1e-15, Identity=62%"; Hit description =Putative kinase
MAPPVDVVGPCPGLGDVEAPLRSRSSLSSEAEVESEPPGRARLRPSAEARAESEPWGRAKRSSSFFGAEPESEPWGRAEQSSSSSRAEPESEPWGRAERSSPSSGAEPESEPWVRAERSSPSSGAEPESEPWGRAERSSPSSGAELESEPWGRAERSSPSSGAEPESEPWGRAKRSFPWHLGPGLAAVSLTMSSGTAVRAAQAALCFCQTGVPPRPYILDRRALHVDMITMCAKFSRLILAQFRCTGPLRGKVGSQLRSRLKSIGPSGPALIQSCVNLPYWTFLPGPRRDDLANYWVHGSFVRSFILPVDPGDICPPQAPDLWVDFEITDSKILGLACSL

SEQ ID NO: 83439 - protein, 308 aa, Zea mays
  Coding DNA Sequence Number=SeqID_40064
MAPPVDVVGPCPGLGDVEAPPRSRSSLSSEAEVESEPPGRARRRPSAEARAESEPWGRAKRSSSFFGAEPESEPWGRAEWSSSSSGAEPESEPWGRAERSSPFSGAEPESEPWGRAERSSPSSGAEPESEPWGRAERSFPWHLGPGLAAVSLTLSSGTAVRAAQAALSFCQTGQWSGEATFALNAPAIWSVGVAIWPMLLLGEDWALGKPKLCADGGYQLRFRSLEARGARSGPKFSGWYVDAVNGLAGAGAPNMVSPVSYWRVIRVDARAPFVRGRLEARRRTQKYLRVICRTRSPFGGVRGLDAFL

SEQ ID NO: 83440 - protein, 42 aa, Zea mays
  Coding DNA Sequence Number=SeqID_40065
MALVFRGGSASNPSPALIALSSLLSIIEEQVESLGDEELTLV

SEQ ID NO: 83441 - protein, 362 aa, Zea mays
  Coding DNA Sequence Number=SeqID_40066
  Gene Ontology: Mol. function=hydrolase activity; Cellular component =mitochondrion
  Homolog annotation: Hit_ID=Q6H4N6; Match level="QueryCoverage=96%, HitCoverage=100%, E-value=7e-35, Identity=63%"; Hit description=MutT- like protein
  Pfam annotation: Domain name=NUDIX; Domain location=36-321; Score =29.0; E_value=1.8e-05; Accession=PF00293.19; Description=NUDIX domain
MSATGVLWPQRAVAMSSDAVAEARKGRLKQRYDNEFRLVAGCVPYRVNKKDDDEVAGSPCSSSLGDDTGTAEVEVLMISTPNRADMVFPKGGWEDDEDVYQAASRETMEEAGVKGVIHAVRAPSAETEEGSGRERGEGHLGDGATFAPEIHGRGSAMACGMGTCDRLLLFSEARNSDDKSLGLRPQTGGSEESKEGTRWRMKVDEEGKERRLGSRGRGEGRGGGALRDEHRWGAWRTGAGSAEVYERAALGHWVFKSKSSQSRAGPTGACKGYIFAMEVTEELDTWPEQDTHDRRWVAPAEAYQLCRYDWMREALTALLERLPVLEPVVAAAAAAATAELTTDQAGMYMMLQATSDGAVALC

SEQ ID NO: 83442 - protein, 166 aa, Zea mays
  Coding DNA Sequence Number=SeqID_40067
  Subcellular localization annotation: CTP_CleavageSite=50; ConfidenceScore=5.67e-01
MAVAPSAPRFFPSSPSARFAAANPLPPRRVLPILSLRVGSLPMSTNAGVRDGAPGAAVDAAFARHALQAEALLGYLPALATSPRAGGNRVNPAVAATQLGALGRWKGSARGLLEYMVVHDIGGAIVAAPGRAKAKRRRPQSTGFGNHAPAKRDERKEARSFWVDLA

SEQ ID NO: 83443 - protein, 293 aa, Zea mays
  Coding DNA Sequence Number=SeqID_40068
VLYRARVHPDGRVHRSTHTLFVLFSEAVAALMSLSGGPTVILRAAINRQREITASSSPFFRRRCYWRVHLAGHIDIGDVCRLSSSNPNLPNPLNHGGASASSRLAAVVIEIPVHRRGNLLAVVWASPVSSRDYSRSLWGLIAKQGTTIARRRCLFAADAHLTVVGSPARSVHGYCGSKRRRVCLCDCAVAGGRHQPSAPSSLSSTTAPITEQSSNMGDTDDVAVNEVNAKEQIATDADKGKEEQPNDAPTEEDGKKRKAIAPRSDPYAAAETREQAVHQTPVWRTGHCPVHPD

SEQ ID NO: 83444 - protein, 190 aa, Zea mays
  Coding DNA Sequence Number=SeqID_40069
MDSYHELGARTGDFEVPDREPGLRCLEWVQEELQALPTIVEGFMSYASLVICEGAMNALSREGCRHYEVFDQADEDFERDIYKAARGERVDDFGALNNALPDPESNPAEAVPEAALEPPPETAEGAPDAPAAAAAGGGPPQRPPKAPLMPPQPLLRGLRILRRWRRRQQRRRQRRLPRRLGLRRWRSGCG

SEQ ID NO: 83445 - protein, 446 aa, Zea mays
  Coding DNA Sequence Number=SeqID_40070
  Homolog annotation: Hit_ID=A3BQI5; Match level="QueryCoverage=44%, HitCoverage=19%, E-value=2e-12, Identity=29%"; Hit description =Putative uncharacterized protein
MAGRLRAPVHQPLPVHAAQCSIEGAGGSLPDEGLCSRRRLESGITVDVVCTEKPHIAPTWIIPWSPSFNQRAEELDRAIVLNVTVAINEAVEEAILANFARRLELVHDSLSLCRLGPASFLLILPSLEMADRAYDGGRIVNLSPTTKIHVMRWSRFLNSSVTASLPFHVEIEVSGIPAHAWELESVQALLNEWCWIADLHPDCERQREVFKVIAWCSSLSSIPREFKLQIVDPVTSDGGMLRRSLVYPIRVSVKVLDRPNLLQSLQPSPPPVEDDPDQGRRRRRRRSRRSSFGINAPGKSSTTAVLPRASVHQRLGPCVQVFVKEGIRMPRLPVHNRLGPLEVFIAEKGAIKKMKRVWIPKRKLARYNGPDHTWASELDGAAQWDDLVAGLRLMSYEAKGVPARFISVGPMTAAKASSEGWRLCLRPNICPPRDQFDKVIWCRRRR

SEQ ID NO: 83446 - protein, 138 aa, Zea mays
  Coding DNA Sequence Number=SeqID_40071
  Homolog annotation: Hit_ID=A3BY07; Match level="QueryCoverage=26%, HitCoverage=7%, E-value=2e-07, Identity=61%"; Hit description =Putative uncharacterized protein
MVERLICTNDWIRGSNFISVEENLEFSKLEEGSGGRLGPYLPGHRAPTPAKAVVVVYLLNLEVCKYFGLKCHRYSDDIVDFMQMVYNKSSLGQDIDHRAALHLLRNVREDTDIRDPGGRGGSVHRRGAEPGKFGCETQ

SEQ ID NO: 83447 - protein, 170 aa, Zea mays
  Coding DNA Sequence Number=SeqID_40072
MRLILRYLFLTCGGCETARVSSHTFIAQQVVGNNVNELAKDNKSVIMNNVSSYPKPHKSSSKYYPKSSVVNKVFLPCLGCAHYLQRTQGSRGKIPKTQKILDWTADLNGTAHATRTSRRSPPTTVEVLALAQKGKQHTADFSFLPPPSEAPILFPGNGALLVGGVVDVER

SEQ ID NO: 83448 - protein, 281 aa, Zea mays
  Coding DNA Sequence Number=SeqID_40073
  Gene Ontology: Mol. function=transcription factor activity; Cellular component=nucleus; Biological process=regulation of transcription, DNA-dependent
  Homolog annotation: Hit_ID=Q6H4L1; Match level="QueryCoverage=66%, HitCoverage=73%, E-value=3e-35, Identity=49%"; Hit description =Branched silkless 1-like
  Pfam annotation: Domain name=AP2; Domain location=36-87; Score=76.6; E_value=8.1e-20; Accession=PF00847.11; Description=AP2 domain
MDFSYLFSSSSSEKKSSKRLQQQQLLQQQDNNSNETRYLGVRRRPWGRYAAEIRDPATKERHWLGTFDTAEEAAIAYDRAARNIRGANARTNFAYPDLPPGSSVTPYLSPDLSADQLQHYYYANNDPVAPAADQPPTPACDQSAHGGAAGTEAYQYYHHVPVEMMSSYGAAEGNGSGGDDDRAWCEASSELLFGGYSDDAAAAPANASHGMYFEEGAVLSFGRLSAALVNGGLAPAGGGYIASGVSALDTCRQPNTNSDKVNAHSDAGRDGAANQSHDVLQ

SEQ ID NO: 83449 - protein, 221 aa, Zea mays
  Coding DNA Sequence Number=SeqID_40074
MTATLQAPGCLLLHQDPVRTTHSSGRGKALKGKCALGPFLSILVIECKHKCLNVKICPWMNKVQITSKGKRKEVESGCVQPKAASGWGTGLSGVHRTVSGAPDQHRANQPLSGFSPATSAKIHRTVRCAPDCPICIRQQRSDALFMETNRAPDSVRCAPDCPVRHETEGKDGLPDLFPTAPSCLGAIKGTPWRMEEYTKYSYNTSKHQDIDFAHSFHCDSI

SEQ ID NO: 83450 - protein, 196 aa, Zea mays
  Coding DNA Sequence Number=SeqID_40075
  Pfam annotation: Domain name=zf-C2HC_plant; Domain location=138-193; Score=52.8; E_value=1.2e-12; Accession=PF07567.3; Description =Protein of unknown function, DUF1544
  Subcellular localization annotation: CTP_CleavageSite=72; ConfidenceScore=5.46e-01
MSASRPSSGRQPLCPPLCPPLAACPSARRPPPAHLCPPPSSGCVPSSGRRPDAHLQPSRARGLQPLRRPPLAAAHLQPSRKPAHLCPDKSQQPVPPSQVTTSSRDMEDASADRPQGESGSQQPYDPAKDPKKKAKSKDPAWNYCYWLDLNKKDVVKCILCGKIVHAGVRRLKQHLVGGHGDVAKCPKTTSAISKEM

SEQ ID NO: 83451 - protein, 994 aa, Zea mays
  Coding DNA Sequence Number=SeqID_40076
  Homolog annotation: Hit_ID=Q7XBD4; Match level="QueryCoverage=16%, HitCoverage=19%, E-value=4e-09, Identity=28%"; Hit description =Cinful1 polyprotein
  Pfam annotation: Domain name=Transposase_28; Domain location=26-180; Score=-55.8; E_value=0.017; Accession=PF04195.3; Description =Putative gypsy type transposon
MSSSSSSAADTPLAGASSEDTLSNVAAEELHPGDTVEFGVSRISSVRVQDMQQLGYFGNEVGRVPGAEEIPEPEGELVVFEAFFTAGLHLPAHRFVAEVLRKFEPSVEVFAKHYCLHWQKRKTGDEIAQFGSCTFTPKSGKTSMEVVELVPCARNKWGNWWDFWFYVSEGAVKDHPGLPMAVMCSHHYVAYPQFEVAEDDEDEGAFRYAARMSSGRDLVEEFVGYGVWPLAHGWALGEVCPHEMPSRGGQLDIRGSNDRLNRVFDLDRLSYDDYPGVDAADHRGKKPMGGTEEGPSQEPAPASKKRKLGTIVGGMGVSDNFAVELMGTCAAPGGRMSSPKLRESSARMLEVTGGRWPKNLPIPWAEGEDMSMSRIARGLKIFPYGRNIAVVVSAVMTKDRQDAAQKRRAVIRMANPRREAKRARGSVKAAASASHRRREDGYRWRDQVSPVEAAKGRELPSPGKRVTDFGTDISVEDYFVGSGEGQMVVVLPSVATAMPSVEVRARGTAQDPWAAFCASGEILTAAAAKDVAGTMSQWPREASQWLSQQLSQAADFADRVASGVLTTDVAAEVERLRARSGEVGRGEQKPLAEAKVAQAEGSLASQRAEEWEARFNALRGRVDKVEASTCSEVERTLAQFVSSYRELGARTADFEVPDQEASLRFLEWLQEELLVLPTIMEGFMSFASLVTYEGAMNALSREGCRHYEVFDQADESFEREIFKAEDPIVKQSAGALFDRMWGAHGREAVREQSDRAREQMERAEDVEDFGSLVDAPPEAAEANPVLPLDAGEGPSAVAVPAMTGGEDPLSAPAPTIEGALEVADEPPAEDPTAAARPSQGFGPTHATATDTANFVVASIVVAEDVSDDSVSKFFESGDSGGSIVWTEESSDEDLDYFAALDVATVEASPRVVGAEVIPSASVGRRWRRAVTKRRVSEVEGSRLRVDGAGKRELLSSPAGMSVGEGELRNLFEGEELRIMLFNYREMGIIPKVEP

SEQ ID NO: 83452 - protein, 128 aa, Zea mays
  Coding DNA Sequence Number=SeqID_40077
MEAPGVLVGTVTSEPAVQLVSTILSMSATPPGSGNQVTEVIPQDDSPCLKVYFKRKKFVLEPVQDEESVLSSQLQEFKNDVTKPINSLLPPPRITNRRRRTVPANFIPRHSRRVPSFSKWVLVLLPSL

SEQ ID NO: 83453 - protein, 315 aa, Zea mays
  Coding DNA Sequence Number=SeqID_40078
  Gene Ontology: Mol. function=sodium:dicarboxylate symporter activity; Cellular component=membrane; Biological process=dicarboxylic acid transport
  Homolog annotation: Hit_ID=Q2R3B7; Match level="QueryCoverage=99%, HitCoverage=60%, E-value=1e-124, Identity=74%"; Hit description =Expressed protein
MEKVDVIISRAWRSLLRVTRIDRLFSRWCLLPRKDTKKTDGINDDVEEPDLYVERVRLEKMELSVMNLLRKMTIQEPTFERMIVVYSLLANTVAYSDPNVIGRLAQKPEKKNPSLTPMDWVTFLISAVIGLVTLIGSLEMPKADIWFVTAILSGLVGYCAKIYFTFQANMVQYQNLITKSMYDKQLDSGRGTLLHLCDDVIQQEVKEVIISYYILMEQGKATVQDLDSRCEQLIKEEFGMECNFDVVDAVKKLEKLGIVSRVSQPCPFQVFGPYNDSLSTQDSIGRILCVPLKRANEIIGTTTEEMVMRAQQASG

SEQ ID NO: 83454 - protein, 125 aa, Zea mays
  Coding DNA Sequence Number=SeqID_40079
  Homolog annotation: Hit_ID=Q2R3B8; Match level="QueryCoverage=56%, HitCoverage=37%, E-value=6e-29, Identity=81%"; Hit description=TPR repeat region family protein, expressed
MCWPTASSEWGRGRAGRRWVGARPAPAVLRVRERPRGAAVALRLSSGLADWGLEENPDLWKWLTSQEQPPEDLISNPVFSAIKSKVTDNLIKHASPETRSTPGQPWVRGWDDIKKGKDGPNYGNQ

SEQ ID NO: 83455 - protein, 155 aa, Zea mays
  Coding DNA Sequence Number=SeqID_40080
MTKHTPEGTLHTCSSEGQPQVPPPGFTPPAGKDAAEDGEVLGVSAEEQLQLRSLCLRNRNLQKQKEILEAKRQRVTVQAKLRQMIRDEEHRVQELEQEIALLQREGQHDLQQHGPPLQQRAPVEDLFVPHRRPFIPHAAAFQGINYLDERRPLAP

SEQ ID NO: 83456 - protein, 150 aa, Zea mays
  Coding DNA Sequence Number=SeqID_40081
MVVYNLGSPQSITRVMCQGDTQRKDERTEWNHNLRRRHCCASSPSLWPLCWVMEVHWGSWITHPHLGGCKGHWSVRILLPSFVKRVGPAALRGQHPYRHPIQESYSRMLGACSPVLATVENLCAAAWLRREEEKARGVDLVINGSGWTIV

SEQ ID NO: 83457 - protein, 114 aa, Zea mays
  Coding DNA Sequence Number=SeqID_40082
  Homolog annotation: Hit_ID=Q2R3B8; Match level="QueryCoverage=69%, HitCoverage=46%, E-value=2e-27, Identity=73%"; Hit description=TPR repeat region family protein, expressed
  Pfam annotation: Domain name=DUF339; Domain location=65-114; Score= -5.7; E_value=0.013; Accession=PF03937.7; Description=Protein of unknown function (DUF339)
  Subcellular localization annotation: CTP_CleavageSite=75; ConfidenceScore=5.76e-01
MAASTTSFQEYKSWKLSSQDPYNSFNAFSFPFQTRLSPAFSATPTPKTSQQNAATTTIDLSSDESRRRLLNRLVYRSKQRGFLELDLVLGTWVEQHVHAMDEPNIRALLQVLDL

SEQ ID NO: 83458 - protein, 104 aa, Zea mays
  Coding DNA Sequence Number=SeqID_40083
MSFQRFDLNLEAQGFFLEEGDEQALVQIRDEGEMQGTDIPWPVLGDAMGVDEELQPRRSARVAREVDEEDWESEKEDEDNVHEYINYEEDNYEISNTSDYVHGE

SEQ ID NO: 83459 - protein, 215 aa, Zea mays
  Coding DNA Sequence Number=SeqID_40084
  Homolog annotation: Hit_ID=A7QDK0; Match level="QueryCoverage=97%, HitCoverage=95%, E-value=3e-25, Identity=69%"; Hit description =Chromosome chr10 scaffold_81, whole genome shotgun sequence
METIKCCIACILPCGALDVVRIVHSNGRVEEISGGPVLAAEIMKAYPKHVLRKPPSTCPADAAGIVVHKPVVLPPSAELHKGKIYFLTPVMADATPPAPAPENKPPAASLQPPPPPPPAAQQTASSAARTRRRRRKGHTTAAAREGAPACSSGAGAGARTAAGLAPQEGDKERLLDNERYLSEIMKETASTPRDRRQGRVAVWRPHLESITEDDL

SEQ ID NO: 83460 - protein, 193 aa, Zea mays
  Coding DNA Sequence Number=SeqID_40085
MGEAKVGTTRRAGLGRGEILARLGRKGQAVAISGGGGVVEGSGADCAEVGERYPLPYLAALFSLTLDAGDDCSRPLSSFARTEPPAPDNGNFSLHLATPRPIRGRAILRGNAAADLPSAGGVGPGPARLRRRGTRLRDHAVPFAAEDEEGSNPLPPRYLATDSLASVSDHRRLHQIHTETLRFGVLRPRSPLL

SEQ ID NO: 83461 - protein, 59 aa, Zea mays
  Coding DNA Sequence Number=SeqID_40086
MTPPLAIVAVSTLPSASGDGAETSGLGAEADEADDDDPPTRFVIDLGSVDVCRLHGSCQ

SEQ ID NO: 83462 - protein, 239 aa, Zea mays
  Coding DNA Sequence Number=SeqID_40087
MALSPPPPCRRRHRGVCKKVESVPDRPLALCRGSGAALANLAPAKPLTASTYQPENLEPDRAPGLRPAHMRERPDQPKHYASRQSRSDRSHFAAPLTGLTEGQRRLRRSDCCVARQSEAERQSGPTSGTIGSSASPDPGLGLGLSPGRRRPPLRPTQGSDSGSAPEDGELRSARPRARTRAQPRKTANSALPDPGLGLGLRPGIRRTPLCPTQGSDLGSALEDDELRSARPRARTWAQP

SEQ ID NO: 83463 - protein, 310 aa, Zea mays
  Coding DNA Sequence Number=SeqID_40088
MAERYRLPRSCVPPTTRRKDCGHPPSGGSEGGKIRCIREREDMVAFQGGHPPFKGDSPYLRPQPSWAESSPTRSKVLPLRRGDWVPHVMQAGLEQKKPNRRARCMQPSSGYKQFSTFAQTSGRKGGQPWRRHATTPSGRTSPTSNAPNLEAHAHASCNRRAGRYVRATAPPLATLPRLLDCGTSTVTRGNPVYDPAVPARRDGQCGQKRAGSDGGGRRAGAAVTSSAKLTSHPGAGPGKRDTPKRTLLREGNRLRASLLIRGSKAGPSKGFNSRLRARGLHTHYWSEVRRPAPSEGFNGCLRPLRLRAHY

SEQ ID NO: 83464 - protein, 49 aa, Zea mays
  Coding DNA Sequence Number=SeqID_40089
MGFGVCGSLCQETFWFTDDNEAGYDYAYGNGEDESVEGDFQEFQDYDEF

SEQ ID NO: 83465 - protein, 309 aa, Zea mays
  Coding DNA Sequence Number=SeqID_40090
MGRSKSGYDLGPALSFKDVHHPCWGGERGEPGLYLPRGSAGHLLFQLLVVETILQLCGGGVLQPCRGRRTVAAQLGCNIPPSSSLSWRGRERGPAGALWSGPLFGFDGWFASLERECEREPSSGRVRPGTMAAAAEVAGESPGTRRPAGSPESLGSVGLAVRGFSCLVKGTPRPLFDEPKPGVAVSARTETELARKEDLVGRSLAGSSVSGTDAGVDLPRPQAGLMSSGDSWPRPRGDQPSRLLEPDSWRRPRWRWPGRDDEVVLQSGDPRTVSPSEARSDLVEGVVDAEGAAAPFNRQDPSLQDRIIL

SEQ ID NO: 83466 - protein, 190 aa, Zea mays
  Coding DNA Sequence Number=SeqID_40091
  Gene Ontology: Mol. function=hydrolase activity
  Homolog annotation: Hit_ID=A9PJM9; Match level="QueryCoverage=53%, HitCoverage=41%, E-value=8e-35, Identity=61%"; Hit description =Putative uncharacterized protein
  Pfam annotation: Domain name=DUF1637; Domain location=23-190; Score =92.4; E_value=1.4e-24; Accession=PF07847.3; Description=Protein of unknown function (DUF1637)
MTDSTMELQLSVAALGTGNWVHSFESLSTQITEFLQEKSGAGVNLLTDEIRPLDVGLDNEAQIARNWSSTTRPSNGRRGRNGANQFTAPIKYLHIHECESFSMGIFCMPPSSVIPLHNHPGMTVLSKLLYGRLHAESYDWVDVPDHPIDQLQQNILNGNETCSFEVICLFLNPKKWNFTISCFLHIYCVL

SEQ ID NO: 83467 - protein, 42 aa, Zea mays
  Coding DNA Sequence Number=SeqID_40092
MASGLYVEDPLKRQFVSGEPKKPSFVATNEGVLRAMKKLGAF

SEQ ID NO: 83468 - protein, 531 aa, Zea mays
  Coding DNA Sequence Number=SeqID_40093
MVCLGLGGHRKHTLQDNPILQARILTIEGSSSTLGVNYTFGEESGSSRRLGRPPRGLGQLSPEGISSARGLGNSTPASVPPVDDPARLWPTKSSFRANSASVRAHTATFGFGSSKSSRGYLTRHLCTRQLTLDEAVQIADRRVLVLEMRKKHGSAPKIHTCTNNPTRLGGPAEQQKADGWLTVARSNSSGDDDFCSGGPNSSSDDLRANAAAMRPSPMPSLERQGRAEGRRVGGQSVGGTGYLVGGGTSSSCRGGRRRRERLRSHSGCPRAEEAKPPRAVHATAQRLRAFLHFRPDLRVKGWTSRQSACNRAKWAHPFDSNAPSMEAQAHTSCNRRAGCYVRATAPPLAPLPRLLDCGSSTATRGNPARDTTVPARRIDHGLVGRGEGATVDAAKNGPAVMAVAGGPKQRSCRRPSSRHLVGQRENPLSRREDDAPVFRSPNGSRTRNGCPVNHSPRRINSAAGQAAPLAGPSEGFNSRLIALGLRAHYWSEAGPRRVHNCLRHRARDDPGYVRYITKARATLPRYPRTFS

SEQ ID NO: 83469 - protein, 163 aa, Zea mays
  Coding DNA Sequence Number=SeqID_40094
MGNSAQGSDSALASADGLRLARPRGSDSTSASEDRLDLDLGGASTSPNPGLELTTSQEAPSLPYPKLTQATGNKTGVPSGSLRYTRPSYEGWPRVEGRDGARVRPLAPSRVDACNPLLQAHPTWARDKHEGREISPLTPVSLRLLPPFALRLAPTHLGWGTRR

SEQ ID NO: 83470 - protein, 359 aa, Zea mays
  Coding DNA Sequence Number=SeqID_40095
  Gene Ontology: Mol. function=RNA-directed DNA polymerase activity; Biological process=RNA-dependent DNA replication
  Homolog annotation: Hit_ID=A2ZFH7; Match level="QueryCoverage=62%, HitCoverage=43%, E-value=6e-28, Identity=32%"; Hit description =Putative uncharacterized protein
MPIVGLAADGLGFYLSHFAKPLTKKPKRVFIGLVKVIEGLVSAEDLERDFGFHFPWNKMWKATKCHSGFLMQFPSQERLEEMISFPELKMKMSGAKIVVVPWSSRAKPKSRLHTVWVIAENVPEELQNYQSICEIGSMIGAVEEVDLMSLDSDDIVRFKIHIKSVAMIPLVVEVGVKPFLYDIFFRIESICDEGWNDDSVNLGKRASIQIHGSSDPLFDKSGKKPKNLDDVTLEDDPNPNLKIGESSSQGKEFAKMSDPNLVPSKDMSDEEQKLDNLSDEKVDFDPNEDDLLSSQELEEFAKDMEEDQTDFQSKIGVMISTPPPMTRLFMMGKTKSLWTCPLTRVMASEKALGWRRMMM

SEQ ID NO: 83471 - protein, 234 aa, Zea mays
  Coding DNA Sequence Number=SeqID_40096
  Gene Ontology: Mol. function=phosphatidate cytidylyltransferase activity; Cellular component=integral to membrane; Biological process=phospholipid biosynthetic process
  Homolog annotation: Hit_ID=A2WV89; Match level="QueryCoverage=72%, HitCoverage=41%, E-value=4e-60, Identity=60%"; Hit description =Phosphatidate cytidylyltransferase
  Pfam annotation: Domain name=CTP_transf_1; Domain location=51-232; Score=-16.6; E_value=0.00019; Accession=PF01148.11; Description =Cytidylyltransferase family
MQRDTSSSDVSASHVGRVRRRKHPSEATTDGNRANGQPLLVNDQNKYKSMLIRTYSTVWMIGGFAFIIYVGHLYIWAMVVVIQIYMARELFNLLRKSSEEKQLPGFRLLNCQKNSIYGSFVPGFVWFILTLKKKTYKYQFKQYAWTHMILLTVFAQSAFTVANIFEGIFCCKKYSNLEPLNLRGKFCTSIVQHYMPLCSIYNLNLLLQQHWFLIALFASECLIVDFCAPWTNKY

SEQ ID NO: 83472 - protein, 35 aa, Zea mays
  Coding DNA Sequence Number=SeqID_40097
MARPTFGSRVWRVWYPETFLQLRYMKYIMNIRKMT

SEQ ID NO: 83473 - protein, 192 aa, Zea mays
  Coding DNA Sequence Number=SeqID_40098
  Subcellular localization annotation: CTP_CleavageSite=58; ConfidenceScore=5.13e-01
MSFVDGPYQVHYTASRASHGVRSVQPPGEIASSPARGAGAPMPGAGPGPGAAGLFPLPQQEVESERPPSPAPQPEMPPAPPQGILHRRGLYPDQCEATCLVRRPDDDLRGAEAFSEHYSITERDTAEAAMQNAARRALSQYCSLFSGVADGLDLKYYPRRSTGSAGGVIVSLVGEGNPRLNNMVNLVVVLNT

SEQ ID NO: 83474 - protein, 156 aa, Zea mays
  Coding DNA Sequence Number=SeqID_40099
  Subcellular localization annotation: CTP_CleavageSite=81; ConfidenceScore=5.49e-01
MTVSSTLAILLLLGVVAGAFVTFGSSASTGGLRISGNTIVFLNSGSLAAPSLASADPTIGTFGTIVDPSALRTAGAACSASAMEEVPLPNSGTMVVSIYLRWWVKTLIFLPFSTAEMAEVAVFLFFSLLSQGIAVIRIYKNQLHQKPCSTFSCPDP

SEQ ID NO: 83475 - protein, 96 aa, Zea mays
  Coding DNA Sequence Number=SeqID_40100
  Homolog annotation: Hit_ID=A5B6K0; Match level="QueryCoverage=98%, HitCoverage=11%, E-value=2e-12, Identity=40%"; Hit description =Putative uncharacterized protein
MEKKDAIRKMVVDSKWYDLPDVKSKKGKEATTMVLSIPFWIGVSLCLKVFEPLVKLLRLVDGDVKSSMGFLYGELINAKKAIKEALGMLRQNTKKL

SEQ ID NO: 83476 - protein, 96 aa, Zea mays
  Coding DNA Sequence Number=SeqID_40101
MASPGLQTPRDIGDCLLGQPTTFCLSLILQAIYDTPSIVGGTHGAPSMLHANDDTRTIFGVEKRGYVWSIGAYSTSQGHSVAPNFKVSNVDKYEPK

SEQ ID NO: 83477 - protein, 937 aa, Zea mays
  Coding DNA Sequence Number=SeqID_40102
  Gene Ontology: Mol. function=RNA-directed RNA polymerase activity; Cellular component=nuclear RNA-directed RNA polymerase complex; Biological process=small RNA-mediated chromatin silencing
  Homolog annotation: Hit_ID=A2ZTX5; Match level="QueryCoverage=96%, HitCoverage=79%, E-value=0.0, Identity=75%"; Hit description =Putative uncharacterized protein
  Pfam annotation: Domain name=RdRP; Domain location=586-937; Score =437.0; E_value=2.5e-128; Accession=PF05183.3; Description=RNA dependent RNA polymerase
MGSLRGAAASSAAPRAGDLVTTQVSLGGFDATVKALDLADFLELNAGSVWRCRLKTSWTPPDAYPDFLLPTVTSAAAPPPQYDRVPPHAFVHFARPEGARAAADAAGRSELILSGKPLRAASAQDSSLRASRRRSVSPFRFPGSRLEVGDLPASDAFIAAWRGPASGLEFSVDPFDGSCHFIFARDTAFKVREFRESVVMRCDVKLQFPVRDVAEVRVFRLDCSLLIRLSAAPLVCYRTADDDIHVSVPFDLLDDDDPWIRTTDITPSGAIGRCGAYRITFSPRFWPKMERALTYMRDRRVAILDCVGGWGARRGLTVRDEPEFGERMQDLFFCVQHAEGLKFPVLFLVNALVHKGVISQHHLTPEFFGLLQRKEDDVNVAALREFWGDKFPVFDACGRLKNLQDRVARYLKHLRNKIGDVNSEVRRLVITPTKAYCMPPEVERSNRVIRHYSEVSDRFLRVTFMDERMQMLNSNVLNFSAAQIVKDLMSNSFLHKTTVYKRVKTFLTEGFHMCGRKYSFLAFSSNQLRDRSAWFFAEDRTTTVETIRKWMGRFTSKNVAKHAARMGQCFSSTYATVVLQPHEVNECLDEVEHNGYIFSDGIGKITCDLALEVAQKLQLTDNPPSAYQIRYAGFKGVISVWEGKNDGIRLSLRPSMHKFESNHTVLEVVSWTKFQPGFLNRQIITLLSSLNVPDAIFAQMQEAMLSNLNNILSDSDVAFDIVTASCAEQGTTAALMLSAGISPGTEPHLKAMLLAIRSSQLLGLLEKTRIFVPKGRWLMGCLDELGILEQGQCFIRASSPSLNNCLVKYGSRLSAANTNAETILGTIVMAKNPCLHPGDVRILEAVDVPELHHLVDCLVFPKKGERPHANEASGSDLDGDLYFVTWDENLIPPGKKSWNPMDYSPAEAKQLPRAVSQHFWTMSLYGYIVFYSLQSGF

SEQ ID NO: 83478 - protein, 47 aa, Zea mays
  Coding DNA Sequence Number=SeqID_40103
MAKVVDAKCLIPCSLEDMVAGVTWPSILPSGWTVEWDPTSAEEEHEE

SEQ ID NO: 83479 - protein, 160 aa, Zea mays
  Coding DNA Sequence Number=SeqID_40104
MRLMVLVMTMVLMARLRHTARKSVIPFLPSRLAERPLRRPVAGQSSHLERLHHRLHEEQERRRQEQHGSSFSLQQEIESMRSCSPVLPLEAPPAPPLGAPASGVAAGGDPDDGGGDDSSSHDTDFSADQEPEGWVARCWDHASSPKVLQEETASAEAVCT

SEQ ID NO: 83480 - protein, 52 aa, Zea mays
  Coding DNA Sequence Number=SeqID_40105
MARVVCTLRGKRLDDGVSVLSVKKQQIFVASVLRWCPKKKIKTEAVGGSVLL

SEQ ID NO: 83481 - protein, 217 aa, Zea mays
  Coding DNA Sequence Number=SeqID_40106
MLMIFFENKIPMHVNSRSWEVMLDSNGQYQYGPRYRGLSYHDARVLCLERDIKRTSTLRSKLTRLGYPLCPNNLDTLTGPYAHHPRLLWLHAMLHGGSGGTPAPPDSHDQGWHNGGGANGKHLSYLRVCSALTFSIDDESFHIDFLVIALEGLGVSRPPAFALSTDNLRQLIAKFADIFAEPTGLPPSRPFDYRIPLPSERAAYRHQTVPQPTVVEG

SEQ ID NO: 83482 - protein, 112 aa, Zea mays
  Coding DNA Sequence Number=SeqID_40107
MPWSMTMLKNTNMKRQSQRWQRVPETQKLGGFWRVWDDFSTRGYVSGQESLPVGYTGMGTVLEFETFMAGMGKILYTRAYMGNPTGIIFGDGYGYGMGLPDGYIPVAMGGQR

SEQ ID NO: 83483 - protein, 325 aa, Zea mays
  Coding DNA Sequence Number=SeqID_40108
MEVGRCWSTCVGGGGGTFALRTVTKHREAEDLRTSVEGMEVLGRSQGGLARSWEEDEGDGHRFLLLEPNICIVPTIVSSRPPSRSSFAAVAALLPPAPPLFTSASADPSAPSAVAQIRPLHVHHRRNRPDPRPSSRIPAAARPPSRKQPLPASASGVPGQLRPAALPSAAGASATGGSGRTRPFIPLPRASLGSCAQPRFPLPRAPLPRADLGGPAPSFLCCGRSRHPSSAPASTCCTPQTVAAEKICATAIDPIITPQNSLRIRICAAVVAICALHRRHLRRAPVAAIAGRLSNSSSATRHSVNSSNFDCCQLRFLRFVLPDFH

SEQ ID NO: 83484 - protein, 248 aa, Zea mays
  Coding DNA Sequence Number=SeqID_40109
MWQDAKKSFAQMNINGNLQNGIGIQMGQIKTIEIKEAAEKGRNGKTETAEKKRNINYGFVGILCRDSDPMANPPRTKLPRGKDPDGYEVEKWHLATGLVAALAAAAAAPAAAAVAAPAATVAAPAATVTVVAVVASVIVVVVVTFAVLLGRVLLVRGVLRLIRALEPGALDGPDVSPDLHGNPLRVVRVIGRRWGETGAGDPSDSEENSSSEYSESPKSSDGGVSSRLRLLFLPMVECKERKKASSGE

SEQ ID NO: 83485 - protein, 149 aa, Zea mays
  Coding DNA Sequence Number=SeqID_40110
MVHRVTRSTCSGGFTNSSERDYTIPVGLVIGSSSGKLHGLLGKLSEGLDRAEVGGKGFGHGGCPRAALAGRGEVAEAAGELKRVRRGIEEATGTMVRRSEGFERRVASSPLPQHLPSEGPVRLSHLVSKTSLDGGDAALARSGPTGVFE

SEQ ID NO: 83486 - protein, 111 aa, Zea mays
  Coding DNA Sequence Number=SeqID_40111
MQIIERKCEAQKGVGIRSNLNFYVVLWTVGKKTLDKLTDQPGNLIPIDVAEVPDLSASRDNSDLAEDDPCDPTTTSKPEAPMQSLNQLPVVEGVAPGLGKMVPGLEKVLLV

SEQ ID NO: 83487 - protein, 50 aa, Zea mays
  Coding DNA Sequence Number=SeqID_40112
MASYDFVKDVNLFFNTFKSPRNILSRKALIIVFRASDSQLKRSEFLSKSV

SEQ ID NO: 83488 - protein, 232 aa, Zea mays
  Coding DNA Sequence Number=SeqID_40113
MSGEGSGEVRGSLAVTSRCGSSAVVTEGGLAACAGDRARRRCVLRPANGGRVKSKCSGSFTGSQWCRGCKEFGNGSPWSSVHARRRSARVWRWRFGASGEVAFGLRAQEALRGSREASRGAGSGGGGPEWPVHGGQARVAGGAPCSGKTPANSGSGRAEGMRGSTVAALGCFIGAGSGIAWHGRVGAERLGMLWRARRGRTRGAYSVYVKTIFLIFGFKGQGGWGIVTYRSP

SEQ ID NO: 83489 - protein, 230 aa, Zea mays
  Coding DNA Sequence Number=SeqID_40114
MTSHVPTDRGDAPFDTDGLAREGFPLILWEVLQGAGYTTPPQYTVQLFEEHRVPRCRVRMTLEPHPLHPGWRSLDSGSFGFQADDTTKATAMHVLTTIYGFHPLEMSTHPIGLFPAKKEHDPMWKDRVDHAKDVWSLYPRHTARLTVRCMSALYRLQALRGKAMPQLMGLVEFTKITLDNREDLVIDLSSEIVEKDLQVEQMVNHIRELEEQVEARDITIEVLEDRLQTT

SEQ ID NO: 83490 - protein, 116 aa, Zea mays
  Coding DNA Sequence Number=SeqID_40115
  Gene Ontology: Mol. function=aspartic-type endopeptidase activity; Biological process=DNA integration
  Homolog annotation: Hit_ID=Q2RBH8; Match level="QueryCoverage=34%, HitCoverage=3%, E-value=3e-08, Identity=73%"; Hit description =Retrotransposon protein, putative, unclassified
MSTLMTLDTDEDGEPVEKEYRSMIGSLLYLTATRPDIHFATVCMWSLDGPRVRRDGGVRQQHMDLAPRRDPVKEEKSWVRLQIDRSPKTPPGNIESKRGEIEMEEGYFAATPRARK

SEQ ID NO: 83491 - protein, 106 aa, Zea mays
  Coding DNA Sequence Number=SeqID_40116
  Subcellular localization annotation: CTP_CleavageSite=88; ConfidenceScore=5.68e-01
MELAKTLSACFTPWPLRLLSRAPFSSPQRVRSFLKLPCAQLAPARRLDSTCQVLNKKVRTSRLPSSSSNGNRCAGMSMSSIAILVYAKSQAVKTLSCWPRVTSSTK

SEQ ID NO: 83492 - protein, 121 aa, Zea mays
  Coding DNA Sequence Number=SeqID_40117
MGRGGSTPRKPGRHGGAERVEERKKPRKVAGGRWSRGRAMGTSWLGKKLSREEHAAGKGAGAPWRAGAGDPGHGELAAPETPGWRSGRARTASGGDAATMELGAVHAGCRARAEAPGKKKT

SEQ ID NO: 83493 - protein, 231 aa, Zea mays
  Coding DNA Sequence Number=SeqID_40118
MAKEASPPPPPLKLLYIAVAAQAALHCVPVHAPRAAEHPASHGMQASPYLQARCENCSREAVPALERTDKTDCTVNVKTAGKKNKEANGYRHKTVLYWDSINLVFGKDHATGEAAKTPADGARDMSKEEGTGKELTSSTTSGSLKRQRSSDSFTSMMAEKLDKFTEAIRDEAPKGPTSKEIFSTLEEIDGLDEDTFLDLFDILTGGARKYESLLALPLILRKRWLLKQLKK

SEQ ID NO: 83494 - protein, 102 aa, Zea mays
  Coding DNA Sequence Number=SeqID_40119
MDEQTRHGGCESAKDVTVGAPVEKGDEPSRALESEWTREQARLGWATATDGYMDGASPIGNNRASDARELGMVEHATKVFPIALHDTTLLSALQRRTAMMME

SEQ ID NO: 83495 - protein, 224 aa, Zea mays
  Coding DNA Sequence Number=SeqID_40120
  Subcellular localization annotation: CTP_CleavageSite=24; ConfidenceScore=5.35e-01
MAAQGAGRAVSSSLAKSLGLRKPKREAGSGAKNRHQTLSRAPSLPTDQRFKGWPPEGFDSRLRSRGPYTHYWSEVRRPAPRRVPRPPQATRAPRPLLIRGSKAGPRRVHSRLRRRARDDHGYVRYITKARAALPSSSETPCSAPIEGNMALSPPPSLRKGDAGAYVKKAESVPERPLALCRGSGAALANPALAKPLTASTYQPENLGPDRTPGLRPARMREQPD

SEQ ID NO: 83496 - protein, 158 aa, Zea mays
  Coding DNA Sequence Number=SeqID_40121
MGYTGSVTRHRGRRVHMEVRNAPTKTTTSDNGGVQPCGRPSGSEVKTLATSTGDERIRKTWRRRGQNPSDDAATSTGDDRIQKTWRRRGQNPSDDAASSDLDFLLAPISLPCERELAGDPGPSSDLAPVRRPRTLLSVGAIITIDSFLLRGVGRACRG

SEQ ID NO: 83497 - protein, 253 aa, Zea mays
  Coding DNA Sequence Number=SeqID_40122
  Subcellular localization annotation: CTP_CleavageSite=50; ConfidenceScore=5.28e-01
MTEPRDSYAFGIRIPNSSPSAISNSRSDKVIPRTEQVFTFGSSSAEAILRAFSTESVTEPHGQVKVRISGKADRAEGLPRLRDRDTSLITFGEKQLSLAQTSLLPTKRRHTLQDTLILQARVLTLEGGSSTLGIDDTFSEVRPSLGRRRGPRISALKDDVIATPGKSLPGSSPGIRPEQAAWPVTPGASADHLPRAPARPEASAGQLRRRSRQRTTRLGSGQTGFIFEPTLPLFMLISLPLASAHRRAAKGSL

SEQ ID NO: 83498 - protein, 47 aa, Zea mays
  Coding DNA Sequence Number=SeqID_40123
MGSTSKKMYLWQVTSHLIVIGVKRRWARPSISLSTSSILLIEDDHLS

SEQ ID NO: 83499 - protein, 54 aa, Zea mays
  Coding DNA Sequence Number=SeqID_40124
MASAVVWWAAPPHTGVCWHEETVAVDPGEQQIEVAEQELIEGKLCPGALLTNSS

SEQ ID NO: 83500 - protein, 104 aa, Zea mays
  Coding DNA Sequence Number=SeqID_40125
MESHDLRAERESRLVGGNENDGFGIDSGNDKWYSFRLERVVSIATTAQEKMKPWKEISRSSKTTTSSRRGLAATPSRLPVKAACIYVSFPHFDYCKDYVDVSDI

SEQ ID NO: 83501 - protein, 56 aa, Zea mays
  Coding DNA Sequence Number=SeqID_40126
  Homolog annotation: Hit_ID=A2YRS5; Match level="QueryCoverage=75%, HitCoverage=12%, E-value=2e-16, Identity=92%"; Hit description =Putative uncharacterized protein
MANSEMGNYYSIQIVCYDWSRGAENHNPAAAKTSIYLHSPQETEVKGKPRIATGRK

SEQ ID NO: 83502 - protein, 110 aa, Zea mays
  Coding DNA Sequence Number=SeqID_40127
MAAEEERGGGAYRRRDCSGEVVEYVGEVMRVTAMCGSPSGMGASPEIKEDMCARNRRKTHQIARSTRAGGQPKSGEDDLGSSVRFCQVQALGKLHRPLAKLTEGPGAAGT

SEQ ID NO: 83503 - protein, 215 aa, Zea mays
  Coding DNA Sequence Number=SeqID_40128
MEEERGGGAYRRRDCSGEVVEDVGEVLRVTTMCGSPSGMVGVSRSTCSGGGALRRRGVRPNQGAIGQSNGSGSFTRDQGRHVCKESEKDSPDCSVYARRRATDFLRGRSWVFSEVLPGPSARKASQATSEANRGAGAAWTRLERAGRGGQGFGGGGGRRKSSPELWRGVWPARDFAYWFQRFGALKSGMSPSPSPRQILGFVMSGARVPMPSSGK

SEQ ID NO: 83504 - protein, 119 aa, Zea mays
  Coding DNA Sequence Number=SeqID_40129
  Subcellular localization annotation: CTP_CleavageSite=61; ConfidenceScore=5.01e-01
MEQGVTDLTPLTGILPPRFKKKLARKQAANPLNRSVDTRLVKMMPTLILTDLKELEVAKWTCARGKNSGLERAGGEPNYLTLWHSPSKQMPLWTKGHNTSTLIPKKQINHSRRTNIMST

SEQ ID NO: 83505 - protein, 197 aa, Zea mays
  Coding DNA Sequence Number=SeqID_40130
MSSQRDAHARAKRLGREPRAFSTRKWCSASDSSQTLPADSTIELPAETPRVSFPLIHGGGRCGGQISPGSTRRLEGLAKDSGPITSQGHPFVGQGRNHWQNGSTRRRDSSSYSGSIGEEALLENLRKSQNEAGNSATSSAPGEGYLLQDRSREFVYPENSVVHLIHEKMDADYQEKRSKQDKGPSSCSSDTSALKGE

SEQ ID NO: 83506 - protein, 351 aa, Zea mays
  Coding DNA Sequence Number=SeqID_40131
  Gene Ontology: Mol. function=microtubule binding; Cellular component =nuclear outer membrane; Biological process=mRNA export from nucleus
  Homolog annotation: Hit_ID=A2YRS5; Match level="QueryCoverage=66%, HitCoverage=68%, E-value=1e-135, Identity=96%"; Hit description =Putative uncharacterized protein
  Pfam annotation: Domain name=WD40; Domain location=126-164; Score =36.4; E_value=1e-07; Accession=PF00400.23; Description=WD domain, G -beta repeat
  Pfam annotation: Domain name=WD40; Domain location=41-79; Score=29.8; E_value=9.8e-06; Accession=PF00400.23; Description=WD domain, G-beta repeat
  Pfam annotation: Domain name=WD40; Domain location=84-122; Score =23.6; E_value=0.00071; Accession=PF00400.23; Description=WD domain, G-beta repeat
  Pfam module annotation: Pfam domain module=WD40::WD40::WD40; Domain location=126-164::41-79::84-122
MQACLLFCRSPGELFLSRAATGLLATANADDYIYTKCPSRLRLHQILPNPGDSVSSLSFSPKSNLLVATSWDNQVRCWEIVGGNSQPKASISHDQPVLCSAWKDDGTTVFSGGCDKQVKMWPLLSGGQPQTVAMHDAPVKEVAWIPQMNLLVSGSWDKTLRYWDTRQSNPVHIQQLPERCYALTVNYPLMIVGTADRHLVVFNLQNPQTEFKRIQSPLKYQTRCLAAFPDQQGFLVGSIEGRVGVHHIDDAQQSKNFTFKCHREGNDIFSVNSLNFHPELCLFIKKIRINPVLRKTGFETYTGSPNNTSSGNPTHKAHPESSLPSSTQGTSSSDFARRAAHGYKNTTTPTP

SEQ ID NO: 83507 - protein, 103 aa, Zea mays
  Coding DNA Sequence Number=SeqID_40132
MATCLDLSYSRAVSTALEVEAKYAGPGKSKGYGCNTSDCNLADGEYILVPEQGVAQEVTPDLAPEPTPENLPAPALEGKPRFYAQPIILCTTNYTIHLSVGVE

SEQ ID NO: 83508 - protein, 57 aa, Zea mays
  Coding DNA Sequence Number=SeqID_40133
MAMMGSTSEKMYLCQEHYIPEVVLHMKQEEFMKLKQGGDTVTQYLNKFSHLSQYAID

SEQ ID NO: 83509 - protein, 766 aa, Zea mays
  Coding DNA Sequence Number=SeqID_40134
MGELGVSDGFARELMRTCAAPGERMSSPELRESSARMLEVTGGCWPRNVPIPRAASGDVFTSRMVRKWRVFPYGRNITVVVSAVMDKDRQGAAQKRQAAVRLVEARPKRQRGSTKAAALGGGKPPLAAKSGVPASSKAPEAAAGAGGSKPAKAALPPSRVAEAAKAARALPSAGKRVADFATDICVEDYLGGSDEGQLATVAPAAAIATAAIVPKARGEARGSEGEVSALAVVRDEAGAATRRLKEVTEALSQVVDFASRTASGALTAVVSAEVERLRTQHADAVREKSASDSKCRKLTDKVAALEREKADLRRQLAAERREANEAIAKEQAAQAEAKLARAEGNLAKELAEHLQEQLTALESRAKGAEAAMRAEAERTRTQLMDTYRELGARTGDFEVPDREPGLRCLQWVQEELQELPAVVGGLCHTPPWSPARGAMNALSREGCRHFEVFDQADEDFDRDVYKVEDLVVKDSAGALYDRMWGPHGHEVVRERAETAMAQVTFSFVWRLSDVGCVAGERVDDFGALNSALPDPEPTPTEAVSGVALEPTPETAEDAPDAPTFAAAGEDLPPKVAEDAPDAAAAAAPSAEDPAVVAAEATAEAAAEPMAEASAAPGPSQVQDFGPAHATATTEFLAASTAEGGNEYGGSASEFADFTDSESSVEWTEESSEEDLDYFAALDVAAAEASPHAADAQDVPGPSTGRRRRKAVAKRRVSAEERARLRATSARIVFARDFGFFRTCCAGPATPLGDFCADLSHARVASA

SEQ ID NO: 83510 - protein, 61 aa, Zea mays
  Coding DNA Sequence Number=SeqID_40135
MKGKKKAPSSSSSCEEEEEEEDDKESDQASTSSSEDKETVEDLLFNINMKKQRKREDALHV

SEQ ID NO: 83511 - protein, 113 aa, Zea mays
  Coding DNA Sequence Number=SeqID_40136
  Subcellular localization annotation: CTP_CleavageSite=30; ConfidenceScore=5.18e-01
MTSPTISGEFATVVATNHRASDSVPLSGCRASLLNSLATAKACYKLSAPAAPLENEEEIEVEEARTTPPPEEPQAGNCFYFDICGAEPDSPITQGKPRCICRLLAILKSFSLA

SEQ ID NO: 83512 - protein, 124 aa, Zea mays
  Coding DNA Sequence Number=SeqID_40137
MGKPVPSLLMLLLSRGRVPLDYPSRWQDGRPSHSSNHVLQRTCKNYATSKAEYTNTQLDLPSYNGSSSLISCMKQTIRIEFLSLQGLRFLPQHNGLRLGMPLKCFSRYSRGFAGLVRGGFELQQ

SEQ ID NO: 83513 - protein, 123 aa, Zea mays
  Coding DNA Sequence Number=SeqID_40138
MAQCSALTILFGKPYTSQLLLCSKDVTFDPVPRFIICVRLGPSTPGDYVRARVLVPLKPGCDILQAKMNLHGPAAIDPHHARHIDMARGKTSIPSSSDDSSSDDGEGEGKPSLDELVEAIKYF

SEQ ID NO: 83514 - protein, 74 aa, Zea mays
  Coding DNA Sequence Number=SeqID_40139
MDEGLKPKFFKLSELRLKRRIFVISEGEMSQDKKVAAETKLTEEDKLFEEKKAMNPYIAGFIESMAKNKYREDY

SEQ ID NO: 83515 - protein, 69 aa, Zea mays
  Coding DNA Sequence Number=SeqID_40140
MPSLHLASSRSELCLLVVRRATRALPSMSGLLRYRRHGVSLLFIDVHTSLPAFFFFRFACRFARVVRVP

SEQ ID NO: 83516 - protein, 128 aa, Zea mays
  Coding DNA Sequence Number=SeqID_40141
  Subcellular localization annotation: CTP_CleavageSite=71; ConfidenceScore=5.52e-01
MSNFPTVPATRLWRSSTGRGSEDIRKPSKSTSGVISQSGSRRSVKGAPSGDEWRQPPPRRKVQGSRTRRLVARENGPTRKSLALSHADACNPLLQAHPTWAQDNTKAAGFPFCLSPFPPSCSVSRRPI

SEQ ID NO: 83517 - protein, 240 aa, Zea mays
  Coding DNA Sequence Number=SeqID_40142
  Subcellular localization annotation: CTP_CleavageSite=61; ConfidenceScore=5.75e-01
MPSAATCSIFPFLSLSLPLGSLSPAPTRQKPSSPGAGDRPTPSRPCTRDFGLPAPRPCSLRANRPTAPCPCPAPRAAPRCREPDRRSPRRDAPTALRARRDPARPFLNVNETSMSRLLLPLLMAINEIHGHHFFSSPATSALPPSLYKTPTEPSPSACPSSLSKLSRVHCRRCGTKPEPRLTRRRASLECLAGVRPRRSTSYLAIRTLTDDRVRSLPTKTVVHPKVENNPNPLMYFLNSV

SEQ ID NO: 83518 - protein, 82 aa, Zea mays
  Coding DNA Sequence Number=SeqID_40143
MQESLAGPPSQQNPPEGLPTLTTPLLPLPLSEHEWVKEVIKGTTCLGLEIPVSWTGRIITEKCRGSGVKLLKTQTILSWMAG

SEQ ID NO: 83519 - protein, 120 aa, Zea mays
  Coding DNA Sequence Number=SeqID_40144
  Subcellular localization annotation: CTP_CleavageSite=56; ConfidenceScore=5.74e-01
MPSAAAAPSPLSLSPTRLSLSPLHRRARSQAAQEQPTGQPRAVPAHATSASPRRARAACAPAARPRPVHALHLASRPGAANPTEGHRAAMHRLPYAPNAIPRDHFLSLMKLQCRGYSSLC

SEQ ID NO: 83520 - protein, 280 aa, Zea mays
  Coding DNA Sequence Number=SeqID_40145
MHRALGPCRRGLGPTNHPQRLGGCSRTRLRPKLLTASTNQLDNLEPDHAPGLRPCRMRERSNRSRHHEKHSDLRGVKPLLRGLGGYTRRENSAARPAPTTVSTTQAKTDNKSRSTTEFGLGHNRKLRLARPQAPASGGGFRLARPQAPASGGCLRLARPQAPASGGGLRLARPQAPASTPASGGIASSSDPGLGLKRSLRLARPWTRTDRANRGYIITLFLACSGYKEQDRRPIWLTPATGNEGALFFLSPVALSPLRQQGDISRILAALPHCQLCSYRT

SEQ ID NO: 83521 - protein, 78 aa, Zea mays
  Coding DNA Sequence Number=SeqID_40146
MAGGIKLAGAKGRWLAGEEIWSQEIWSVSLPKPEANPRKTLSDTGVSQPSPLKGISSRDSGQSPPGVKRRVRLIGKGW

SEQ ID NO: 83522 - protein, 196 aa, Zea mays
  Coding DNA Sequence Number=SeqID_40147
  Subcellular localization annotation: CTP_CleavageSite=57; ConfidenceScore=5.30e-01
GVAQAALSFCQTGQWSGGVTAVTSALPGARVRIEVSGHLCVKCPCNLVSRCGDLVKVASERSQGLGQAGDVSAIKRGPRARRKSLEADRSQGLGPAKQGHGPQRLRAGNYGCTPRRGTGSPPSLPDQRERGRGRRCCCTTRPTWGMATNGRVSSDAGNDEGAGGGGATGRAATPTADHRARLPDAVAAESRLEGGE

SEQ ID NO: 83523 - protein, 114 aa, Zea mays
  Coding DNA Sequence Number=SeqID_40148
MANSTFCSGGIPVSHGYSVAESGCLLLAEAHSALLGHWGLTAAGLPSSDIASPNGLALHSGNMFCFHPELEDEVPADSASGTGLLLTDCSGDSDAGAEDTAFGTAAAEVDVGST

SEQ ID NO: 83524 - protein, 305 aa, Zea mays
  Coding DNA Sequence Number=SeqID_40149
MFGLQVVMRMLVLALTLMMMARLRHTARKSVIPFLPSRLAERPLRRLVTGQSSHLERLHHCLHEEQERRRQEQEQQGSSFSLQQEELEGWVARPITRDAARGCHFHDALDTLLRRALDWRTWSIEYHCVVFQHSRGVYPDRWEATCLVRRPKNSLWGAEICSEHYSISERDSAEAAMQDAARRALSHYCSVLGGVADGLNLKYYPHHPSSSTGGVIVSPVGEDNPRLSSTVNLATVLNTELDHAVDELSRARAEIAQLRAERAERRHLDDGSPAPAGTQHPYRSPRHRHQSYGNLDCRTKINLEP

SEQ ID NO: 83525 - protein, 95 aa, Zea mays
  Coding DNA Sequence Number=SeqID_40150
MPPKSKKSVKGLFKGLGLFQGSSSSSSKRRELLSVAHGDQEATRGQKPSDIEVYQEGHKGPDPNNPDLLCSQTTTDRLHVLSSTERAGVGDYEDA

SEQ ID NO: 83526 - protein, 175 aa, Zea mays
  Coding DNA Sequence Number=SeqID_40151
SRGEEKGGGAYRRRDCSGEEVEDEGEVAGITTGGPRDAREDMSERNWAETHWIARSTRGGGRPKSGEVDLGPPVKSGRVRGLGKLHGLLAELAEALAGLEGGWSGLATAAEALAAMAGGIKLAGAKGRWLAGEGECGAKREIWSQEIWSVSLPKPEANPRFCRIKVNIPDLWLKV

SEQ ID NO: 83527 - protein, 397 aa, Zea mays
  Coding DNA Sequence Number=SeqID_40152
  Subcellular localization annotation: CTP_CleavageSite=51; ConfidenceScore=5.31e-01
MSSRSLMHRVFPSSKPPDGGYLPSFRLIVGGTQLRWSWYLSAIVRLQGFSSASPAAPLRRRSPETTTTNPWMGRSKPGCDLGPTLSFKDVHHPRWGGGRAEPELYLPRGFAGHPPLRRSRERALAGPTGGSDFDNEGLVDGGRRQPQRVELIGLAPGGTSCRKAAAAPCAREDRPRCRALLGRRSCSGVVLPLHRRRRLEKSPSPTGSPPPSALQASGSLYLSSPLERRRGRGQDCSSAHPEAYAAAVRTPGAGVVVVAVRAGGGEPPVSLLLLRRPSPIECGYSPVGCLNRFTKHESPRVKVTSEPKPRVGLAPSEDGWPRPWGDRLSRLLGPDSRRRPRQRLPGRGDDVVLRSGDLRTTSPSEARSDLVDGVVDAEGAAAPFQRQDPSLQDQIVL

SEQ ID NO: 83528 - protein, 163 aa, Zea mays
  Coding DNA Sequence Number=SeqID_40153
MAVMKAIHKTPPPVSAEKSVAPANVEVNADAEADEVAPKAKNSRGPLGTTMLEIDRIIADVVPEKEMAEVTTDRALPLEMKELEGASSEDIELDLQHLHDQELFVEDICELKEFTIADGYKPGSLTVPEQKLSILYQGVSDFRSSIEISTIIGDNILLGACSI

SEQ ID NO: 83529 - protein, 108 aa, Zea mays
  Coding DNA Sequence Number=SeqID_40154
MMYRLALTRPCVNPLHWSFLLGPRGDDLTNSGALGPFMRSFILLVDPGDICPPQQQQPFIFPQFQPSMPQWGLHAPTPAPQTPNQTDDFVNNFFTSRGSGHNSNDPYM

SEQ ID NO: 83530 - protein, 146 aa, Zea mays
  Coding DNA Sequence Number=SeqID_40155
MQSSSSSGAELKSEPWGRAMRSSSSSGAEPESEPWVGRGGVSYGARGRTWLLSASLCRVAQQSERRRWRCPLVRPTTFALNAPAIRSVGVATWPRLLLGEDWASGEPKLCADGGYQLRLGVLRGAEHGVSSELLTGNPSGRPCPIC

SEQ ID NO: 83531 - protein, 226 aa, Zea mays
  Coding DNA Sequence Number=SeqID_40156
  Subcellular localization annotation: CTP_CleavageSite=28; ConfidenceScore=5.07e-01
MQSACNRAKWAHPFDSNAPSMEAQAHASCNRRAGCYVRATAPPLAPLPRLLDCGTSTATRGNPACDPTVPARHIGHGPVSRGRRRDGRCGQKRAGSNGGGRRAEAAVTLRHLWQEKRATLRLRHNDHVKKGTGKGDTPKGILLHEGNGPRAPLLIRGSKAGPSEGFNSCLRALGLRAHYWSEVRRPAPRKVSTAASGHSGSAPTTDQGFVGWPSKGSQPPQTQSKG

SEQ ID NO: 83532 - protein, 201 aa, Zea mays
  Coding DNA Sequence Number=SeqID_40157
MPGPRRHAEAEPRIASRQRGRASLGYAPRAWADKTGPLRHAGRANRGLGHAEAEAGPRAGTGAGGIARPGRADALPRGEGGAARTTPWPRAALAGAGGRTVAASRAMAGPGGTRRWGAPCLAGWPCHGCRELAVPAAGGRVRTPPGRAAGRAHSEGRRHDGEGESGRRREWEKGRLGKTSRGGAAGWVGPTHRRQRRAPAL

SEQ ID NO: 83533 - protein, 60 aa, Zea mays
  Coding DNA Sequence Number=SeqID_40158
MELIDDKVGVRGGVARRRQWRRGREGDDLVMEGGGGFRGGGGGWLRRGTTAARKRRRGEI

SEQ ID NO: 83534 - protein, 144 aa, Zea mays
  Coding DNA Sequence Number=SeqID_40159
MGTLELWRPPRDPPEPPEGNHRGQPFSRPPLLDPSLRIAPLGGRKACMSLNRTTGIAKSCSPEIGTPPKHVDREPPTTPAACARGQGSSDHLRRRPAHRRDRRDLPDVTGHPAGALLPPSFELNKKTAKNLILEGKIEILLDQG

SEQ ID NO: 83535 - protein, 202 aa, Zea mays
  Coding DNA Sequence Number=SeqID_40160
  Homolog annotation: Hit_ID=A2XFR6; Match level="QueryCoverage=45%, HitCoverage=26%, E-value=6e-12, Identity=42%"; Hit description =Putative uncharacterized protein
VVEEIPVDLPRIRVENRVILEDSSKEFLPTPTPLAESLAFVAGSSALASPAPAVQAPALGGDNPDDSGDDDEDDKEEEEDGEENINEEANEEQQDHYVGLWPVTGHYTSIESQTSIVPGGAGEDCLNTLSGVVAGLNTDLDSATLDLSRVHLELEDAHARIAALEAQLDGRNPPEVQVPAMALSPHRKRIRYREPGSITRLL

SEQ ID NO: 83536 - protein, 156 aa, Zea mays
  Coding DNA Sequence Number=SeqID_40161
MANLVVENFSPWNILCLGPPQTKDNALCVVFSGYVVTFVLLLNWVGIYLYLVTANKILTNFKSNAQLQPSSVSGTENLGSCSNGYSCSSALGTFSCDPTTLSFCFQGQLPCSAKSGNWKSCGSITGSSKVQSSLPRNVLGASRQCPLPKGRNVKAG

SEQ ID NO: 83537 - protein, 249 aa, Zea mays
  Coding DNA Sequence Number=SeqID_40162
  Gene Ontology: Mol. function=transcription factor activity; Cellular component=nucleus; Biological process=regulation of transcription, DNA-dependent
  Homolog annotation: Hit_ID=A6NAX7; Match level="QueryCoverage=100%, HitCoverage=58%, E-value=1e-63, Identity=53%"; Hit description=AP2 domain transcription factor
  Pfam annotation: Domain name=AP2; Domain location=152-183; Score =11.7; E_value=0.081; Accession=PF00847.11; Description=AP2 domain
MELDLNVAEVAPEKPSAALEASDSGSSGSSVLNAEAASAGGGGPAPGEEGSSSTPAVLEFSILRSDSDAAGADADDGDATPSPPRHHQQQLVTRELFPAPQHWAELGFFRAGPQQQPDIRVLPHPHPYPPPPPPAQPQQAKKSRRGPRSRSSQYRGVTFYRRTGRWESHIWAYDRAAIKFRGVDADINFNLSDYDDDMKQMKSLSKEEFVHALRRQSTGFSRGSSKYRGVTLHKCGRWEARMGQFLGKK

SEQ ID NO: 83538 - protein, 113 aa, Zea mays
  Coding DNA Sequence Number=SeqID_40163
  Gene Ontology: Mol. function=transcription factor activity; Cellular component=nucleus; Biological process=regulation of transcription, DNA-dependent
  Homolog annotation: Hit_ID=A6NAX7; Match level="QueryCoverage=79%, HitCoverage=16%, E-value=3e-17, Identity=62%"; Hit description=AP2 domain transcription factor
MAFDSQRVEYRLDIRFSLPFRDPRAYDKAAIKCNGREAVTNFEPSTYDGELLLTAEASAEVADDVDLNLSISQPASSQSPKRDKNCLGPQLHHHHGRPFDGSAVLKKTKASAK

SEQ ID NO: 83539 - protein, 115 aa, Zea mays
  Coding DNA Sequence Number=SeqID_40164
MEHACNGIDLAQLYEIYGGGHSSKSRSGSSSEEDDDGGGGSNRREEAADGAAAAVVAVLENPDDAAADDVDGSGNGNRVVVGGGGAAAVTFHAAAAAQLGSLLDASLCMHGQQIN

SEQ ID NO: 83540 - protein, 285 aa, Zea mays
  Coding DNA Sequence Number=SeqID_40165
  Subcellular localization annotation: CTP_CleavageSite=61; ConfidenceScore=5.05e-01
MAIYVWLLPSVVSLLKHQALVPAPGSLIFNPLTALPSDVPPSLKPAPPPPTSPPHRRHLAPCSHGRTPSMDSSSWGSQDVASWMGSSTERPQPFPKLGSVWKIAIGRRTPTSPFPSPTPPWSSRRLLLLNLGLWDAAPYLSSTLCHRTHPAPAVGHRQPLRRPSHLMGVQSFSSSSVMASWCLTALHYLIALAVDLVGPPHVEPASSAIVTQLHASTSPSPTQPCYSLVVVRSYFPPAICRLAMMRVVVFDLISSSDTRLAVLRLLVVSTIWAMRAVDLDTPSHI

SEQ ID NO: 83541 - protein, 61 aa, Zea mays
  Coding DNA Sequence Number=SeqID_40166
MTKVMLAEDVQSSRNGIKLRLDHALVYPQPDSEDTCSHTWKTLSNHVFEDLRKPKAPNNCI

SEQ ID NO: 83542 - protein, 413 aa, Zea mays
  Coding DNA Sequence Number=SeqID_40167
  Gene Ontology: Mol. function=kinase activity; Cellular component =ornithine carbamoyltransferase complex; Biological process=amino acid metabolic process
  Homolog annotation: Hit_ID=Q6QP54; Match level="QueryCoverage=26%, HitCoverage=38%, E-value=2e-30, Identity=67%"; Hit description =Putative kinase
MASTAAGEGHRLGEIAASEGHLLLLKLWQREEDRLGRRACALEAHMDAARRDAFYLCAAFLAFHGLSLALLFAASVVAAATTSPSAACRRWWASSSLSLAASLALAAAVQLLVGAYWRAAARLCRDRGDARALARAVQELRLKGAAFDLSKEPRPLNVGLPPALPSPWPGSAQVRRPPNSMGAGTSFLLHPAPPPFSQPLDLPSPRSPLSCSPASWPPLPSCRPAPPLPWLHACRLTGRGRPPSPASQAAPLDPCPPVSASLDSRKERIQVYDGGVAECYVSSGGRASALSTCQCGSRRDLGTLLLRAAIVTGHAGHHHCLSGGASQMGHRSCSLRPESAWGRVMMALPVDVAGPRPRPGDVGAPPKLGSSLSSVAEAEPEPLGRARRRSFGRGQGGVRALGRTERSSPSSGS

SEQ ID NO: 83543 - protein, 157 aa, Zea mays
  Coding DNA Sequence Number=SeqID_40168
  Subcellular localization annotation: CTP_CleavageSite=22; ConfidenceScore=5.17e-01
MQAACNRARWTRFSDSQRASMEAQAHASRNRRAGCCMQEKRATLRLRRNNRAKKGVRRLAPEGFTVAPDAERGMTRDHPQVFLGVPLGPYPTPNERGTDVHSDYPLAAHRRHHVRCPSRAKPRKTAISASPDPGLGLGLSPGRRRSPLRPTQGSDSG

SEQ ID NO: 83544 - protein, 319 aa, Zea mays
  Coding DNA Sequence Number=SeqID_40169
MGGTRRLSASSLEERNSVGVGTFQPSFGFQGFFITQPGCTPPPAVTQHGDLRLDGGGKRAGLRPLPLPQPQGFLSPRLGRGVRRVGVGPCVGGGPLLHSVMGGGAGVVRGAGSCSVPGFRAQVASEPLAAPASATAAGRGSSAGVIARAGHGLTSNSTAFCLSCLTSFGMGGGLLAAASTLRSALPLFGPPEQKSSSSPLLEQRRSWLESENLVGRSLAGLSVSGTDAEVDQPRPRVGLAPLEDGWPRPQGDVCASESCFSRKVMSEEEEEKKKVGCVQPRGCFGLGHRTVRWCTGQCPVHQAASAEETALRNLLTAYG

SEQ ID NO: 83545 - protein, 156 aa, Zea mays
  Coding DNA Sequence Number=SeqID_40170
MEHVDLDELDDEEAPCVALRNMSIGICVQKNPRSLHKHKINLHLPYKHLHQLKMRIRLKKKRVKIKTMSHLKRRRLIKAEMKMIKTRKMIKKFKTKDRHTQESTKHFKEITPSTLYLVTFTRGIEDALRDPDWVMAMQEELNNFTRNGDMPFSSMS

SEQ ID NO: 83546 - protein, 128 aa, Zea mays
  Coding DNA Sequence Number=SeqID_40171
MVSGVNRRCFAARAAPNESVVPMERRNGNRSALGFDGEVRAWSRGHQSPRFSCGGYGARKSVSERNTTRHARSRDRARGDRLIWLESAMFGSWEEIPPQFVLRTWGAFDSSREIELTKMARVQVAGAR

SEQ ID NO: 83547 - protein, 64 aa, Zea mays
  Coding DNA Sequence Number=SeqID_40172
MVNSSRDRTKARDMERTTGSQIGEQVKLDQREGVEVEVQRDGCWRVKELKASGETDGRKKKDEQ

SEQ ID NO: 83548 - protein, 26 aa, Zea mays
  Coding DNA Sequence Number=SeqID_40173
MKRIIRVDVGLVTSTGFKGSLSQKGL

SEQ ID NO: 83549 - protein, 304 aa, Zea mays
  Coding DNA Sequence Number=SeqID_40174
  Pfam annotation: Domain name=IQ; Domain location=34-54; Score=25.0; E_ value=0.00028; Accession=PF00612.18; Description=IQ calmodulin -binding motif
  Pfam annotation: Domain name=IQ; Domain location=76-96; Score=27.0; E_ value=7.2e-05; Accession=PF00612.18; Description=IQ calmodulin -binding motif
  Pfam module annotation: Pfam domain module=IQ::IQ; Domain location=34- 54::76-96
AFTRLEESFGRLEEKWDQFVVMFHRYKEKTEKELQAAVRLQAAARGFLARRQVQPLRGEKHLVVASRATPWPSSHEQAVVRLQAAVRGFLVRRAVRKLHLLISSSLHQLAACAPNQHVSSILFEPPAEVEIWLEDELDFEAGRDVMASYERAEYRDYLASASQFTTNWYRSHYTRIATMASAHDDLVTYSAKMDLILAQLATINARLDSHDARLTKLEQAWVSPSASTAGCLGASEGGQGAGGGGQVEDDGLQPDTPREEVEAVFYVVVAVPLLQPAFVLVEVQAWPDPVVDVSHLGHRRGVVN

SEQ ID NO: 83550 - protein, 852 aa, Zea mays
  Coding DNA Sequence Number=SeqID_40175
  Pfam annotation: Domain name=DUF605; Domain location=508-716; Score= -137.8; E_value=0.05; Accession=PF04652.7; Description=Protein of unknown function, DUF605
MEVVELVPCARNKWGNWHEFWFYVLEGTVEDHQGLPVSEMCSHLYSAYPPFEVVEDDVDEGALRCAAGLSSGRDLVEEFVAYGVWPLAHGWALGEVCPRQMPSHGGKLVRSPAFALDLHSRDPAAFVREAEDGAVRIVSRYVPRTEGQRSWDIRGSNDRLNRVFELNRLPYGGYPGQDDVDRRGKKSVVESGDDPTPAAAPSFKKRKLGTAMGGLGVSDGFARELMRTCAAPGGRMSSPELRESSARMLRVTGGWWPKNVHIPRAAGEDFFTSRMVHEWKVFPYGRNIAAVVSAVMDKDRQGAARKRQAVIRLHEARPKRQRGAAKAAAPGGGKPPLAVKSAVPASGKAPEAAAAAGGSKSAKAAPASSRVPEAAKAARELPSSGKRVADFATDISVDDYLVGSDEGQLVVVPPTAATTAAAIVPKAKGGALSAGVEMPALTAVRDEAGAVSRRLKEMKEALSQAADFVDRAASGALTAVVSAVVERHRTQHADAVREKSAADMPDREPELRYLKWVQEELHALPTIVEGFMSYASLVTCEGAMNALSREGCRHYEVFDQADEDFERDFYKVEDPIVKESAGALYDRMWGPHGREVVRERAETARGQAARGERVDDFGALNSALPDPESNPAAAVSEAALEPPPETAEGAPDAPAAVAAGGGPPPTAAPRAEDPVTVAAEATAEAPATAKSSQVQDFGPAHATATTNFLAALTVDDGNKSDGSASKFSDFGDSGSSVEWTEESSDEDLDYFAALDVAAAEASPHAADAEDVPGPSTGRRRRRAVAKRRLCALAHSAMLVKALCTRSLRGQFGVVVFAFVMLRPAVPSGNCCTDSLRGRLQFFALVVLVRLHP

SEQ ID NO: 83551 - protein, 42 aa, Zea mays
  Coding DNA Sequence Number=SeqID_40176
MEAPAVLVGTVTSEPAVQLVSTILSMSATPSGSEYHVTEVIP

SEQ ID NO: 83552 - protein, 60 aa, Zea mays
  Coding DNA Sequence Number=SeqID_40177
MFGSWEEIPPQSVPRTWGAFDSSREIELTKMARVQVAGTSVYHRLRNMVKIDMDEIDYMM

SEQ ID NO: 83553 - protein, 131 aa, Zea mays
  Coding DNA Sequence Number=SeqID_40178
MRERESCWTRGALAHATALHPSNPRALRLPFLRSIGTALSLGAVRAAEHRRLTPDTIAGAHREFGCRCGGHGKEAVLGAGESPGCPCRVLASAGGSTGERESTGEDAVSVPGKLEVGEGTWAVGSLLDVWD

SEQ ID NO: 83554 - protein, 246 aa, Zea mays
  Coding DNA Sequence Number=SeqID_40179
  Gene Ontology: Mol. function=quinolinate synthetase A activity; Cellular component=chloroplast; Biological process=NAD biosynthetic process
  Homolog annotation: Hit_ID=A3CGJ6; Match level="QueryCoverage=52%, HitCoverage=16%, E-value=4e-42, Identity=70%"; Hit description =Putative uncharacterized protein
  Pfam annotation: Domain name=SufE; Domain location=76-204; Score =42.1; E_value=2e-09; Accession=PF02657.6; Description=Fe-S metabolism associated domain
  Subcellular localization annotation: CTP_CleavageSite=42; ConfidenceScore=5.59e-01
MDTAAASLLPRAAAVKTRRVFSPLHVSRSGLLPRQSSFLAARCAHSRAPPPPPPLPRADCDDAAAKAHPRLRLRLLAEEFRALPSDADRARRLLSLAAALPRLPEPDRAQGNRVMGCVARVWLVARCNAATGWRMWFAADSDSDLSRGYCACLVAALDGAEPEDVLAVDPADPDLAPLGAGTTAARSRASTWHNVLVGMQKRARTAIAAREGRHPGKPFPSLVIARDGAIRAQGSYAEAQVSSFSS

SEQ ID NO: 83555 - protein, 167 aa, Zea mays
  Coding DNA Sequence Number=SeqID_40180
MADPLRNHGCKVSDHTLVLNVLRGLNKRWTQHAFGSTSRFLLQQLLALAPLYLVTPPLLRDRGVAADVAMGKAVGGLVVTIRDTATPLLDQRRLTEGHNSSIAPNSSRPSSLPLDRSWGCLSSHPRWPPSLLQRSPMVPSNNRRLPRFHGLRGREPKISRPWPNPST

SEQ ID NO: 83556 - protein, 25 aa, Zea mays
  Coding DNA Sequence Number=SeqID_40181
MEAQPDKISIKQDGKMIDNVNPQNI

SEQ ID NO: 83557 - protein, 123 aa, Zea mays
  Coding DNA Sequence Number=SeqID_40182
  Gene Ontology: Mol. function=nucleoside-triphosphatase activity
  Homolog annotation: Hit_ID=Q2QS10; Match level="QueryCoverage=65%, HitCoverage=21%, E-value=1e-27, Identity=71%"; Hit description =Expressed protein
MASDMAARRTREGLAPAGERERHRGVVGRRWEGGRWQAQGLDVVQKPAQNGPQGASVSPQCDNNYSTRNYGVRPSWNSRRGPRGSFIPPIRNNGGSGTTISRVTGKNDESMEDSTRKWFAFST

SEQ ID NO: 83558 - protein, 130 aa, Zea mays
  Coding DNA Sequence Number=SeqID_40183
MRIDERGMDGGDRQGWQMDSNRMVHQQLATGTGQGIERFVGGGDWWTGPHMSLIDVGGIDEAIGSCVAQAEAMVLLAARKRVGEEEEHRRIRHRGREVGRSLVTRGGANMGENILTKDNMPRDDAVGEKI

SEQ ID NO: 83559 - protein, 785 aa, Zea mays
  Coding DNA Sequence Number=SeqID_40184
  Gene Ontology: Mol. function=magnesium ion binding; Cellular component=chloroplast; Biological process=metabolic process
  Homolog annotation: Hit_ID=A4KAG7; Match level="QueryCoverage=91%, HitCoverage=91%, E-value=0.0, Identity=50%"; Hit description=Iso -kaurene synthase
  Pfam annotation: Domain name=Prenyltrans; Domain location=87-131; Score=16.9; E_value=0.052; Accession=PF00432.12; Description =Prenyltransferase and squalene oxidas
  Pfam annotation: Domain name=Terpene_synth; Domain location=225-428; Score=74.0; E_value=5.1e-19; Accession=PF01397.12; Description =Terpene synthase, N-terminal domain
  Pfam annotation: Domain name=Terpene_synth_C; Domain location=446 -714; Score=214.2; E_value=3.1e-61; Accession=PF03936.7; Description =Terpene synthase family, metal binding domain
  Pfam module annotation: Pfam domain module=Prenyltrans::Terpene _synth::Terpene_synth_C; Domain location=87-131::225-428::446-714
  Subcellular localization annotation: CTP_CleavageSite=35; ConfidenceScore=5.48e-01
MTPLRYAASPHLQPPFLGYKSSNVDGRSRTRQQAMIAERSSSSSTSGRGGQLEDRIREQLLNAELSPSSYDTAWAAMVPAPGSLAASRYPQCVDWILRNQRSDGSWGLDPSLRKDALSSTLACVLALRTWGVGEEHVGKGLRFIGHNSTSVTDCDKCDTPAGFNVIFPGMLERGIGMGLEIPLAHADLDAILRLRDTELKSIAASGRSKAYMSYVAEGLGDLLDWDQAAMAYQRKNGSFFNSPATTAAAAIHNGYNKRAIGYLDALISESGSSSSVPAVYPRKVHSQLRMVDTLERMGISPSFSYEINAILDMTYSSWLRNDDEISSLKVCCADALAQFSEESSFHDSIEAHLNGTEALLELYKASQVQILEEEPVLESIFSWSGKLLRRKQCSDSDDPAEVEHVLKFPSYATLDRLEHRRNIERFKTGGFQMLKSAFRVSHADEEILTLATDGFHSSQAVYQQEIEQLNRWVKEVRLPELEFARVLPLPILFSAAATMFPAELSEARIAWSKSSVLTTIVDDLFDTGDSMEELENLVTLFDLWDAHQEAGFYSERVEIVFRAVYDTCKHLVGKAAAVQNRGVMDHIADLWVDVVRAMMPEAEWRMSGRVPSMEEYLPIGEVSFAIGPIVPMAAYLVGPELPEDVVGSAEYEEMLSLVNLSGRLLNDLQTYERERKQGKINSVLLLADPSYCGSVEAATREVRSVIEASRRKLLRLVLRDGAAVPRPARQLFWNMSKVLHLFYMDRDGYSSPLTNAIDEVLIKPLQMGRRREEDQLPGRVRSNQN

SEQ ID NO: 83560 - protein, 389 aa, Zea mays
  Coding DNA Sequence Number=SeqID_40185
  Homolog annotation: Hit_ID=Q2RWD1; Match level="QueryCoverage=37%, HitCoverage=32%, E-value=6e-07, Identity=30%"; Hit description =Putative uncharacterized protein
MPKVLSSTQTAAKTKRTAAVLCLHNLKTAALHCSKDQQGLLMSFPKTKDCCCPSHRPQDLFQQPRLWLVVVRTKHYNLNFLLDQRLSSPGAPLVLAPKAPLALATRAPHTSSPQCTSSIGPRDTLSIGSQGTSCHDPQGTSCPSPHGTWCTDPKGPLALALGAPCVSSLRVTLALALRAPQASANLLCWPSGAPCVSSLRVPLALALKAPQASAPRVPLAPILRANRALALKPQGNSCIGPQSTSHMVTLAHSTGQKGIQKTLKRMCKDFYIPGDRVLVRDFVHACVTYGWRQAPPEHNIPNQIDGQPEVVNKAQQYAKCYYESKTTNIMSSSSRSAIESDSAFSIAQHKLGPRYASPFQVLERVGQGLTTDDATWEQLNNFKNLYLDV

SEQ ID NO: 83561 - protein, 219 aa, Zea mays
  Coding DNA Sequence Number=SeqID_40186
  Gene Ontology: Mol. function=nucleoside-triphosphatase activity
  Homolog annotation: Hit_ID=Q2QS10; Match level="QueryCoverage=40%, HitCoverage=23%, E-value=2e-19, Identity=56%"; Hit description =Expressed protein
MASDMAARRTREGLAPAGERERHRGVGLDVVQKPAQNGPQGASVSPQCDNNYSTRNYGVRPSWNSRRGPRGSFIPPIRNNGGSVLKCFVLLMGTGKTMIGKAIAGEAKATFFYISASSLTSKWATLVSSTKAIRSRGCCNRARLVGVVAWVSNCVLDVELRFKLRYGPGHIAVLLSPGRVSWTSDTHCEVRLAEAMQAVAGCHAGASSGGSAAQQGKRG

SEQ ID NO: 83562 - protein, 82 aa, Zea mays
  Coding DNA Sequence Number=SeqID_40187
MAVAENFSGDVRRSEEEEEYWRGGLVSSAVAIAPTINGEPLRLTTMRWKVRATRRTPMSENRRRGARRAQPEQQAPQEEATP

SEQ ID NO: 83563 - protein, 180 aa, Zea mays
  Coding DNA Sequence Number=SeqID_40188
MPGSIARRRSDEGRVGVVTKGTLACPLAPSTAFWPVQGLDCGKPVAAAVDATRLLLCCCWVRSRARAGGGRRMDERMHARAAYWRLPPYAERASGRGEGSGGAWEEQERGWERAGWRLGQPGSDGQREGRGRPRPGAEGRPGVGEAGAGEAAGARGDRDIEKASYLGFFEASYLKIDPTS

SEQ ID NO: 83564 - protein, 150 aa, Zea mays
  Coding DNA Sequence Number=SeqID_40189
MKLENVIQLNLSLGMKPLKLGTSSMKEHTESAATPATVITVMLRSAIGNVTPGFRRQTECEAWRHDGLNRGHNADAGAPEGVNHGGAAQRWSGLALASNRAKDRATNGEIRAWGDCSPREETLEHRSNSRDAGMPRVDGGGASAAWGKLR

SEQ ID NO: 83565 - protein, 222 aa, Zea mays
  Coding DNA Sequence Number=SeqID_40190
MGAASTLPWMKRTSGKKELRLVCTPSTSLEDRAVGVITGDALWVLLGPGAFISLCQVIHVHSQVGEVKNKVRRAGEVLADRAAAVRAFLGMVLCRTTPLCFVGRILARAVRDFPVAVFGDTREDFSWVGPLCGAGFPPVCNAGDASEAEDRFWIEGDHALEADRLPTYLESSSIVRSSYHWEFSLSGDRNRSARYARAPVALNSGVGLRRLRLGLLGLVALG

SEQ ID NO: 83566 - protein, 100 aa, Zea mays
  Coding DNA Sequence Number=SeqID_40191
MKLWKETSRSSKTMTSSRCGLAATPSRLPVKAAFIYVSFPHFDLLLSSYIDLTDLFGWLTATAIRTATKYCRNRSLSYNQIKTATNKYKIHVSVARINPG

SEQ ID NO: 83567 - protein, 330 aa, Zea mays
  Coding DNA Sequence Number=SeqID_40192
  Homolog annotation: Hit_ID=A5BKB8; Match level="QueryCoverage=20%, HitCoverage=19%, E-value=4e-14, Identity=63%"; Hit description =Putative uncharacterized protein
DPPVVTPRETWKFGSTREGKRNSPKSWEGVSSAEPRTPSRPSRGRSAPYRAQLRLALLAAWPAVKCLRAATRPTGSRARYTLPSSSSPPGVRLVGSRAPAAFASCRRRPMAGGTEDTSLALLVSDVAHAEGRRRVGVTRPRIGPPERTTASPARRLRAEAGAGPSARTCYLVDPASSHMLVSKIKPCMCNVPARGRPFGPKDPSSDRACPRTATPEASSATDRAQVLWKGTPGRVRAPSGPDPVAPRGAVNESGCLGMQPKSGGFELEHACRDPKDGELCLSGAKPEETLVEARSDTDDSWSPHEFYRVKPMIRGIGGATPSTYSQTLNR

SEQ ID NO: 83568 - protein, 144 aa, Zea mays
  Coding DNA Sequence Number=SeqID_40193
MGKNNKRKREPTPPSKDFGDSEYSEEEFSSESEGSPAPIPRRESSDNTDDSQGLAAEAWTYIRAVERSGLEGSDESEYSSDEEDSDDGGEDEDGDDDDDDDDDEGGGGGDGDGSGRGGGSGSKDGDGGGSGGGGSSKGSNRASG

SEQ ID NO: 83569 - protein, 196 aa, Zea mays
  Coding DNA Sequence Number=SeqID_40194
  Gene Ontology: Mol. function=kinase activity; Cellular component =ornithine carbamoyltransferase complex; Biological process=amino acid metabolic process
  Homolog annotation: Hit_ID=Q6QP54; Match level="QueryCoverage=46%, HitCoverage=40%, E-value=8e-11, Identity=47%"; Hit description =Putative kinase
MSICFAGCPSPGPRKNDLTIYWALGPFVRSFTLLVDPGDIYPPTVTSLLVYRGEPDGTPPKVGRRGDSSEVEAESEPWGRARRRPFSEVKVESKPWGRARRRPSSGVEVESEPWGRARWRPSSGVEVESEPWGRARRRPSSKVEAGGEPWGRARRSFLWRLRLDSAAVSLTLAGGTAVGAGQAALFSCQVSVTPGF

SEQ ID NO: 83570 - protein, 131 aa, Zea mays
  Coding DNA Sequence Number=SeqID_40195
MTGVRTCRCALGRPALAGAVLVDAAVGADVVAAGESFPVDKLISATRGPTSGSLVLMSGIFGLKSVSQQEKTKIIRRLIQRRRCEQYPRTVHADLAFTFASHLYFHLLQAEAFENKSPTLAPTSGELTSTL

SEQ ID NO: 83571 - protein, 208 aa, Zea mays
  Coding DNA Sequence Number=SeqID_40196
MTLGQGSVHSRDTISLRPSPASGRDSRPRQIHASPEGLLKQQAHLRLVRGPAQAGFTENSAACPTPTAVPPARVRLTAAESSLRRHRKLRLDLGRRSPPRPTLGLGLNLDPGRRSLPRPTPGLGLNLDPGRWSPPRPTPGLGLNLNSGRRSPPRPTPGLGLNLDLGRRSPPRPTPGLRLSLNLGGVTASPDLGLGPTMLQGGTSLPYP

SEQ ID NO: 83572 - protein, 118 aa, Zea mays
  Coding DNA Sequence Number=SeqID_40197
MKLLAGERELHGGAQQLRPFAKNACRVRLTAAKSSLGRHRKLRLTRPQGSAPVLASEDGLRLARPQGSDSTTTQKTMDSASPDPRARTQPRLRKTVSASPDPRARAQPRRSTTNSALA

SEQ ID NO: 83573 - protein, 89 aa, Zea mays
  Coding DNA Sequence Number=SeqID_40198
MAKLPGPDPRPERQHKRGPAVESIFSRPRSAADWMVARRTPPLDGSEGGGACLSTQGTPVKVDLFLFLALVSLIRDVIVDITPQLITLT

SEQ ID NO: 83574 - protein, 128 aa, Zea mays
  Coding DNA Sequence Number=SeqID_40199
  Homolog annotation: Hit_ID=Q6QP51; Match level="QueryCoverage=34%, HitCoverage=20%, E-value=5e-14, Identity=81%"; Hit description =Putative growth-regulating factor 1
MPCLLDCGTGAATRGNPAHGPTVPTKHIGHMSVSRGKRRDGRYGQKWAGSNGSGTGKGDTPKGILLCEGSGPRAPTTNQRFEGWPLGRVRQQPQSTRAPRPLLVRGSKAGPSEGFDSHLRPLGLCAHY

SEQ ID NO: 83575 - protein, 253 aa, Zea mays
  Coding DNA Sequence Number=SeqID_40200
MGSARVAFVLLLLEERNFMEVGTFQPSLGFKDFHQAARLHPLTNASSGAASGATSHRWAECGYLPAVRAAVAPRAPGDVQDVTRCQGGVRVLGLSCPRSGTTPPCGGRCSLIREDSSGDLPVGRWPPSSVLRWWPPEKASPPTRSSAPSALRASGSLALIACPRPSSGDVGEGLVAAASALRSSLLLFGRLERRLLSLLQWSATSHPELVVPQALRCGGCSHLREWNRSSVCNGTLSAGVCSLWLSGPEHLGI

SEQ ID NO: 83576 - protein, 177 aa, Zea mays
  Coding DNA Sequence Number=SeqID_40201
  Gene Ontology: Mol. function=nucleic acid binding; Biological process= RNA splicing
  Homolog annotation: Hit_ID=A2XH96; Match level="QueryCoverage=66%, HitCoverage=49%, E-value=3e-19, Identity=47%"; Hit description =Putative uncharacterized protein
MDTNSSGRGVRQFKTYLLHILEKGNLEDFGFIQYFDPEDASDAKYHMDGKMLLGREIAVVFAEENRKKPADMRAREKKHFKRQKLIYSCNFYLCSGRGHSYDGRLRSRSPGLNDSPGVDHGPKAEATRQHLSERTIQGYLNMYYVLGIPKSLMSEVGCEPMNLDVGRADQCAGAYVV

SEQ ID NO: 83577 - protein, 111 aa, Zea mays
  Coding DNA Sequence Number=SeqID_40202
MSERKFSGRPKGGTYKDVEPRHVGPGAKWREYIIGVTNYGRVAYQWNRQARRLRNGLVTSCQRNGQGSLNAEAAHRLPVEWTGLNKCQGGTSPSSGMDRRCALSAINAEAA

SEQ ID NO: 83578 - protein, 163 aa, Zea mays
  Coding DNA Sequence Number=SeqID_40203
  Homolog annotation: Hit_ID=O48967; Match level="QueryCoverage=58%, HitCoverage=20%, E-value=3e-09, Identity=42%"; Hit description =Putative uncharacterized protein
MVQIIEHHDFVLEDFPMEEETAYSTPRATNRPAPGAAAAAVYSAGQHTPVQTSGASRAAPGALSAARELLRHPPSSMASPGAMKQWHDDVDRLLGMAHSSSARPRPRSSRRRHCGATTTSRATVDCNAFNAHLYAQRTEDAQKAHQTVYRTCPVHHRTAQRTH

SEQ ID NO: 83579 - protein, 458 aa, Zea mays
  Coding DNA Sequence Number=SeqID_40204
  Homolog annotation: Hit_ID=A3CJQ4; Match level="QueryCoverage=84%, HitCoverage=88%, E-value=1e-72, Identity=44%"; Hit description =Putative uncharacterized protein
MDSDQESVDDWVVLASSSDDDERVIALSSGSCSDSEPDHAAGSPNLLPASIDPDDAEGLYALSDAEDTDASLQPSPLLPNPLSGLLHHTLAGDVAYSAFDPVPPAAKQLVPDTTFAAFFPEPVAALASTRGLVCLRGACSAAYYVANPATFASERLPAPARDHRAHGDPAVVIAFDLDLDPDPCDADPERAESEGEGFYRHYHVVVAFPVGEGIYAFESFSSRAWAWATGSGVADAEAVLPGSGVGALGCAFWRTTMGLFLCYDPVSRRADLVPAPAEVMQWPYWELGEMDGTLCVTCMGARVDAVVVIRLDIVSGAINWTLAGYFEGGCLRGRKDVTLLRSQGKAEVVMWDPSSETVVAMDIEGRTTRVIRFIPGSGYYADFIPYVSSLAAVSRSGFWPPKAAADCQTLSFSGSFYKIRLAEGRLMLSVRLLLQIMTSWLRLLMLRHTNYTGGTKLE

SEQ ID NO: 83580 - protein, 144 aa, Zea mays
  Coding DNA Sequence Number=SeqID_40205
MGKSKKGGSSSHHSGDKRKREPTPPSVDFGDSEYSEEEFSSESEGSPAHASPPASSDDSDDSQGIAAEVWTYMRAVERAGLEGSDESEYSLDEEDSSDSFEEGSGGDGGDGDDDGGDGDGGSGSGKGGGGDGGSGSKGSNKASG

SEQ ID NO: 83581 - protein, 617 aa, Zea mays
  Coding DNA Sequence Number=SeqID_40206
  Gene Ontology: Mol. function=cysteine-type peptidase activity; Biological process=proteolysis
  Homolog annotation: Hit_ID=Q109R5; Match level="QueryCoverage=83%, HitCoverage=46%, E-value=6e-37, Identity=24%"; Hit description=Ulp1 protease family, C-terminal catalytic domain containing protein
  Pfam annotation: Domain name=Peptidase_C48; Domain location=80-248; Score=-8.1; E_value=0.0007; Accession=PF02902.10; Description=Ulp1 protease family, C-terminal catalytic domain
MESLFVGLSHNKPKNSVATAIVREVLSHDWLLLDYICTQGDLALIDFIKEIPCEPRVEVVLIDDAFVERKWMECLFQPNAYLGDEVIDCYINLIKAQKHLKCRSRGRVHIENAFQFNFLKRDGDVEIKTEELYPNKDMTQICSVERRVLLYLDHDMVFIPINIRETHCYLVVIHARNMEIQVLDSLGTSQDHKDLTDSIKGLQRQIDMISQRKELKDHKWPDLQVTSWLLREIDMGYAKQTDRMTCHTLGKKMAAILLFSDLNKRRGCLLYKNEKEVDSGSPLDVEILENPTYSNKRKLLHMLDDSEVVHEDEEGPITQADLQRWFVDDWDKRAPIKVSTDGCTNDFLMVGLSTKDMPVTKADSIDVLCDYIMAIEDDTTLERTWVRSFNPFKIEISVKDLQNILTINQDMILRCFDMAVRLLANKESRRPKEEIINNKKHYMDMRFWRMIGYGKLPKYHQDPTTEELAKTLGCWPSMNYCITGCRYVLMPWKFNGCHALFVIDHVKKHVTFIDFTPTQDWCKHMPYRGSRKRYHGLKKNIRLLTARNVLMGGGYLKWEHTIQTGVPIDLRGFNTSYLVLQAMAMWGNDRRLKFVGDAKTLRKNFVIDLLSYEDNSC

SEQ ID NO: 83582 - protein, 44 aa, Zea mays
  Coding DNA Sequence Number=SeqID_40207
MAGWVIGFSAPAVLPPHDEQATVESEVEQVEIAEQELIEGKLCP

SEQ ID NO: 83583 - protein, 25 aa, Zea mays
  Coding DNA Sequence Number=SeqID_40208
MAQRVVFFVADIDLASRGEEILRGF

SEQ ID NO: 83584 - protein, 231 aa, Zea mays
  Coding DNA Sequence Number=SeqID_40209
  Homolog annotation: Hit_ID=A3AQ03; Match level="QueryCoverage=30%, HitCoverage=42%, E-value=2e-07, Identity=42%"; Hit description =Putative uncharacterized protein
MPEGFGPEASRWEIWCFGYDKTPKGATSLLLPGKVPKVQLKANTKTKKGLRRKEQRKPKCSLVWRTGLSGVPPDSVRCTKEDRLQTLHLRVSQVHLRYNSPDYSVGHRTVWCASGATVICAQRSTLTVNSAKRTKDDTYQKLKEENERLKMSLTQLKGKCIAQPSQDNRDHMVKKLEKGTTVACTNSLEENVKDLRIAKRKEQKKKINTSSKSLNHASIKGERDDMKLWGT

SEQ ID NO: 83585 - protein, 171 aa, Zea mays
  Coding DNA Sequence Number=SeqID_40210
  Gene Ontology: Mol. function=kinase activity
  Homolog annotation: Hit_ID=Q6QP54; Match level="QueryCoverage=67%, HitCoverage=44%, E-value=9e-09, Identity=45%"; Hit description =Putative kinase
MEHAGCHHYLFYRGEPDGTLVRRGDGSSEVEAESKPGGRARRRPLSEVEVESEPWGRARPRPSSRGEVESEPQGWARRRPSSGVEVESEPGGRARRRSSFGVEVESEPWGRARRRFLWHPRLDLAAVSLTLAGGTAVGAAQEALLSCQVSQWRGEVTAVTSALSTGEHASG

SEQ ID NO: 83586 - protein, 100 aa, Zea mays
  Coding DNA Sequence Number=SeqID_40211
MAPSQVSEVSAWACSGTSKRHPSLTGLALDFGTICRHVVQNPDRYKKAVRGVVQLKTIYLLTLMDEKVHLGLVRFYLNQYGLSGIEEISIPSIYAIRYTA

SEQ ID NO: 83587 - protein, 190 aa, Zea mays
  Coding DNA Sequence Number=SeqID_40212
  Gene Ontology: Cellular component=integral to membrane
  Homolog annotation: Hit_ID=Q75L87; Match level="QueryCoverage=93%, HitCoverage=60%, E-value=3e-69, Identity=72%"; Hit description =Putative uncharacterized protein OJ1729_E02.7
  Pfam annotation: Domain name=Tetraspannin; Domain location=8-189; Score=103.3; E_value=7.6e-28; Accession=PF00335.11; Description =Tetraspanin family
MLRGGTGMLGVVNFITFLISIPILGGGIWLASRANSTDCIRFLQWPIIVVGLVLMVVSLMGFAGACYRQTWLLRLYLFAMFFVVLALLFFVVFAFAVTDRGAGQVVMSRRFPEYQLSDYGGWLRDRVADPQYWATISACLRDGHACAGMRRLARDPNTGMLVPETPAMFYGRNLSPIQVSSSLRTLALHA

SEQ ID NO: 83588 - protein, 75 aa, Zea mays
  Coding DNA Sequence Number=SeqID_40213
MGPGIDLEGSRMSSSSLTADDLLRRVAGMVGRLDAGKDGLAFVEAFLAQEVNLGGVGLLPLFRSYKFQRIRSLFR

SEQ ID NO: 83589 - protein, 349 aa, Zea mays
  Coding DNA Sequence Number=SeqID_40214
  Gene Ontology: Mol. function=cycloeucalenol cycloisomerase activity; Cellular component=integral to membrane
  Homolog annotation: Hit_ID=A7PHF1; Match level="QueryCoverage=53%, HitCoverage=93%, E-value=2e-34, Identity=59%"; Hit description =Chromosome chr17 scaffold_16, whole genome shotgun sequence
MTAIAAKSSRGPPYTDHSPTALAPFGYQGDLQMTRDLTLVVAIQTNICTTGQGNQTPPYTLGGQWPGLFGSEPPIYRFDSIIPLPAPCRPAGGRCKRNQPGNGRRGWVPRTRLFPGAARARVSDPRGSPLLPLAAARRPGAKPRGGGGAGKRSAWLAADGSKRWGEAFFLLYTPFWLTLCLGVVVPFKLYEVLLHLVTIVLCSQPHDSRLVVGRSMDRVLDWILDDRFTELEYLILGLVSTVPAFVIPLFLVGKFPYYEFVDRDIMYKVGSLFYAIYFIVSFPMFSRIDEKDEKWSLSRVAVDSLGAAMLVTIILDLWRIFLGPIVPVPESRQCGQPGLAWFQAQNGST

SEQ ID NO: 83590 - protein, 284 aa, Zea mays
  Coding DNA Sequence Number=SeqID_40215
MEDSWVIRTSYCSGEEGFPHLLRSCALRMGIRKKPEYVWKEYHDNGIEKCSMVVYLGESRNYPNHPPFQVNFTGHHFPDICQGVARKDLKQLCQNYIQEISETPLRYFPPSNKNTPTWRKRLQALSGRDPTEDDPTIVYMAGYLHTLDNHYDDLSSHCTHLNSRVESLERQVRELKQEKASLQECLDIAEGEEANTREAYRTLKMDYDKKLKKLAPKKKIQKKTTNQGCQTEKKKKTPPAPPPPRVDDWSDAEDLSLASLDDLLKEFGDTLEKEFGSTSGNALV

SEQ ID NO: 83591 - protein, 266 aa, Zea mays
  Coding DNA Sequence Number=SeqID_40216
MATVRGRGLCHQKQMGTQGRDLVLWQVPNLEGLHNAPPARKDPSSTQRYLTKRKSITSAFKRNPSSISTLQPHQRQQPPLQWAAPASGGDHLSADNSGHLCTGGLPATTDASARAERSSSPSSCGGEDKTIQERGRHLHGVRHLVQPPLGGVGTAWPAAQGTLRVRRTCARHDRRPCGGQTATSHLTAGGSIGGGTKAIQAKEPDTRQLTAPAAGRPRVAEVRLLRKAGEHPSPPNAGGRSGSPTHVEGRASTRLAFHPSEDDEHP

SEQ ID NO: 83592 - protein, 494 aa, Zea mays
  Coding DNA Sequence Number=SeqID_40217
  Homolog annotation: Hit_ID=Q6QP51; Match level="QueryCoverage=36%, HitCoverage=77%, E-value=2e-24, Identity=42%"; Hit description =Putative growth-regulating factor 1
  Subcellular localization annotation: CTP_CleavageSite=64; ConfidenceScore=5.14e-01
MATTQEVDPFLKATLPARVLSRRGLSLHQHAPRSSPTAWGLGPTRHASWPRTKEAKPPRVERVTAQRLQASLRLRPNQRVKGRTAMQAACNCTKGAHPFDFDASSMEAQAHTSCNRRASYYMQKTAAPLAPTPCLLDYGTGAATRGNPAHGPAVPTRHVGHGPVSRGRRRDGQYGQKWAGSNGGGRRAEAAVKSSASSRPLLEQRESPLPQREDDAPGRRHLWQAKRATLHLLHNDRVKKGTGKGDTPKGILLREGSGPRAPLLIRGSKAGPSEGFDSRLRAFGLRAHYWSEVRRLAPWKGSTAASGHSGSAPTTDQGFVGWPPEGFDSRLRAHRARDDSGYVRYITKAQATLPSRQGRSDRSHFAPPLTDLTGKQRRLRCSDCCATRQGLGLNLDSGRRSPPRPTPGLGLNLDSGRRSLPRPTLGLGLDLTSGRRPPPRPTPGLGLDLDLGQRSPPRPTLGFGLSLDLGGATASPDLGIGPTTPQGGPSLPYP

SEQ ID NO: 83593 - protein, 249 aa, Zea mays
  Coding DNA Sequence Number=SeqID_40218
MGSSRVVFVLLWKERNLMEVGTFQPSLGFKDFRRAARLRSPTNWQFGGEKRAGLRPPPCPQLQGFSSSGLRRRSAPSGGLPLRGPVTLFFPQRLGEKGILQPRGGFPQPCGGRRTAASWTGCSVPSFVRAVVAPRTSRPRPGLPRVDSHARRLPSMSHAARAVLMFWGGLGEGGSEDLPVRFGVAGARWCGVGGQVDAAVGAVVAAAGEGFSTDEISNSACTPGPPSPWLEWLERAAVSRWEFVVPRAP

SEQ ID NO: 83594 - protein, 904 aa, Zea mays
  Coding DNA Sequence Number=SeqID_40219
  Gene Ontology: Mol. function=nucleoside-triphosphatase activity; Cellular component=ribonucleoprotein complex; Biological process =ribosome biogenesis and assembly
  Homolog annotation: Hit_ID=Q6Z742; Match level="QueryCoverage=100%, HitCoverage=71%, E-value=0.0, Identity=60%"; Hit description =Putative kurz protein
  Pfam annotation: Domain name=DEAD; Domain location=241-407; Score= -24.0; E_value=0.0026; Accession=PF00270.20; Description=DEADDEAH box helicase
  Pfam annotation: Domain name=HA2; Domain location=794-873; Score =28.3; E_value=2.7e-05; Accession=PF04408.14; Description=Helicase associated domain (HA2)
  Pfam annotation: Domain name=Helicase_C; Domain location=638-731; Score=68.3; E_value=2.6e-17; Accession=PF00271.22; Description =Helicase conserved C-terminal domain
  Pfam module annotation: Pfam domain module=DEAD::HA2::Helicase_C; Domain location=241-407::794-873::638-731
MEDSNALILPCKRKNKAQVKAKDGKKAKKEDPKMSKTKLKKLQKLEVHHLALPIGSTRSQRMHIHCFMLQGLLVNSILLQAETLKEKRRRAVQFSKAGLDVPEELSLFKKSGGTKVPENSDVGEQVSPLKFVEPAPIVDSGRECNNKMKDLVKAIECQPIMGFGAGIPEPETEEPSDDAHMLTNQKIQLSIPSCSGAELDLQGKELGQGQHSVQECINPPIVVPVSRLHEVEKARRDLPIIMMEQEIMEAIYENSVVILCGETGCGKTTQVPQFLYEAGFGTSDRADRKGMIGITQPRRVAVHATAKRVSYELGLKLGREVGFQVRHDRKGDFLLKRYSVIILDEAHERSLNTDILIGMLSRIIKIRKDLYAKQQEKLRSGFKIKPEDKISQLKVVLMSATLQLKDFISNRRLFGVIPPAVKVPVRQFPVSVHFSKRTHDDYLGLAYKKVMSIHKRLPPGGILVFVTGQREVEYLCKKLRRASKVQTAKNPGKTDGEDNGPCPKVDEKEIFEAYDIDRDEPEHRYDMFSSYDDDGMYDDDGMNVETNIDSSDNETESEMDTETDDEESVTIETTEEDVPVLAFLKDAESSSALKASFGALSGIPNVLESVEELSDAKCEEKTSTSLRCFSKCTEHKPVSHGRLRVLPLYAKLSASQQLQVFEDVPEGERLVVVATNVAETSLTIPGIKYVVDTGKEKVKNYDHATGMSSYDVQWISKASASQRAGRAGRTGPGHCYRLYSAAAYGKDDLFPEFAEPQIKKIPVEGVVLMLKFMSIDKVENFPFPTPPNKESLVEAERCLKTLEALHSDGKLTPMGKAMAQYPMSPRHSRLLLTVIKNLKNKQQGFARSNFILGYAAAAASGLNFTNPFLKQLDECDTYGESVENTNLEANGPWERKRQKKLKAV

SEQ ID NO: 83595 - protein, 309 aa, Zea mays
  Coding DNA Sequence Number=SeqID_40220
  Homolog annotation: Hit_ID=A5BMH4; Match level="QueryCoverage=22%, HitCoverage=8%, E-value=1e-12, Identity=44%"; Hit description =Putative uncharacterized protein
  Pfam annotation: Domain name=zf-C2HC_plant; Domain location=146-201; Score=61.3; E_value=3.4e-15; Accession=PF07567.3; Description =Protein of unknown function, DUF1544
MECLHVGSGAPCLSLHPGIEEEATTASARRRPSLLHPVRRAAASSIQRLAPPSGGTLLHPVRHSAVCSSSSSASLAADCSAAARFLFLFLCGFAFSVHLLTALLLDCFLRPTAPWHLYQSMASPSSVNNVNYDPKTDKARKASSNDPGWKYGYWANLANRDQVTCTLCDTIVSGGIKRLKQHLAGGYGDTKICSKTTTAIRKEMRDYLESKRRKRAIFLDDNEQQEEEEDVMVVDAAAESVQVQQDAPIESQGSKVQPSSGTAAKHRRATYLYKDTTSIKTKANQVSKQKSIVEMLRKSPEDVVDEMRK

SEQ ID NO: 83596 - protein, 439 aa, Zea mays
  Coding DNA Sequence Number=SeqID_40221
  Gene Ontology: Mol. function=dihydroorotate dehydrogenase activity; Cellular component=cytoplasm; Biological process='de novo' pyrimidine base biosynthetic process
  Homolog annotation: Hit_ID=A2X9D2; Match level="QueryCoverage=99%, HitCoverage=90%, E-value=0.0, Identity=85%"; Hit description =Putative uncharacterized protein
  Pfam annotation: Domain name=DHO_dh; Domain location=40-375; Score =26.0; E_value=1.9e-11; Accession=PF01180.12; Description =Dihydroorotate dehydrogenase
  Subcellular localization annotation: CTP_CleavageSite=31; ConfidenceScore=5.16e-01
MESLTLRASTAASPLQRRRLLPGRQRATYVRATASAGEPDLSVRVNGLQMPNPFVIGSGPPGTNYTVMKRAFDEGWGAVIAKTILEPWTCCSRYFHWFRDRSYVGTQVSLDAEKVINVTPRYAKLRAEPNGAAMGRIIGWQNIELISDRPLETMLNEFKQLKKEYPDRILIGSIMEEYNKAAWHELIERVEESGVDALEINFSCPHGMPERKMGAAVGQDCDLLEEVCGWINEKATVPVWAKMTPNITDITQPARISLKSGCEGVSAINTIMSVMGINLKTLRPEPCVEGYSTPGGYSARAVHPIALAKVMQIARMMKEEFADGQSLSAIGGVETGNDAAEFILLGADTVQVCTGVMIHGYPLVKKLCAELQDFMREHNFSSIEEFRGASLPYFTTHTDLVHRQQEAVRQRKAIKKGLQSDKEWTGDGFVKETESMVSN

SEQ ID NO: 83597 - protein, 690 aa, Zea mays
  Coding DNA Sequence Number=SeqID_40222
  Homolog annotation: Hit_ID=A2X9D1; Match level="QueryCoverage=99%, HitCoverage=99%, E-value=1e-168, Identity=65%"; Hit description =Putative uncharacterized protein
  Pfam annotation: Domain name=MACPF; Domain location=197-394; Score =29.1; E_value=8.8e-08; Accession=PF01823.10; Description=MACPerforin domain
MAVAAAEKAVRCLGRGFDMTCDMRLKYCKHAGGCLVDRGGVETAPLAVPGVGTIGGVPVDVKCGKGDRVRIKSGVLEFNKMSELFNQRSSVEGKIPSGLFNACFDLDSGAWAQDAAATKCLAMDGYFISLFDLRLDRRPLALADRVLRDAPAAWDPAAIASIVFGVFTIEPQFFHETGPGRRRRLSRYIPAVSWDDVGVTMRSYGMILHWMDSFQVWTDLSMSKSKSSETVTRFIDKYGTHVVVGLSVGGQDVVYVKQDGSSALPPAEIKEHLDRLGDQLFTGACAMPPLRCKSKDKLKVEMPEAFNVFDAQLVAQQRLQAAGMITTLVSSKEGVTVIYSKRGGDTTAGSHSEWLLTVPATPDVISIEAVPITSLLKGVPGAGYLSHAINLYLRYKPPVADLKYFLDFQHHKMWAPALGELPLGPCSNRQQGSSPALHFSPLSAKLYVSPTQVRDLSVPNARFSFRNGMHDHRQNKMQAIVPKLPVTGMRLHLEGKKHNRLAVHLQHLSTTPTFIAAARHDKPPVWRGSDAASDDRYYEPVQWRMFARLHVAAHDATHVLHLRLLYAELPGCAVVQSRWARGVARLSGKSSGFLSPSSSPGSSGGGSGSGGSQKERHPPEGVVNINSGVLAGGPPVPVAAQKMLRLVDTSQVTMGPQDSPGYWLVTGARLDVDNGRISLHVKFSLLAPAS

SEQ ID NO: 83598 - protein, 785 aa, Zea mays
  Coding DNA Sequence Number=SeqID_40223
  Gene Ontology: Mol. function=RNA-directed RNA polymerase activity; Cellular component=nuclear RNA-directed RNA polymerase complex; Biological process=small RNA-mediated chromatin silencing
  Homolog annotation: Hit_ID=Q6RFI0; Match level="QueryCoverage=99%, HitCoverage=69%, E-value=0.0, Identity=77%"; Hit description=RNA -directed RNA polymerase 1
  Pfam annotation: Domain name=RdRP; Domain location=199-577; Score =642.1; E_value=4.8e-190; Accession=PF05183.3; Description=RNA dependent RNA polymerase
MTYLKSTCLNPTDWLSVQYSRIRKSRHASQKLSNISLDDGLVYVHRVQVTPAKVYFYGPEINVSNRVVRHFSADIDNFLRISFVDEDCEKLRSADLSPRSTSGNDARRTALYNRVLSVLSNGINIGDKHFEFLAFSSSQLRDNSAWMFASRQGLTASDIRKWMGDFRDIRNVAKYAARLGQSFSSSTETLKVHKSEVERIPDITNGTKYIFSDGVGKISANFAVEVAMKCKLKRFAPSVFQIRYGGYKGVVAVDTRSNHKLSLRKSMSKFQSENITLDVLAYSKYQPCFLNRQLITLLSTLGVSDNVFELKQKEALRQLNRMVTEPQAAREAVELMPMGEVTNVVKELLSCGYQPDHEPYLSMLLQTFRASKLLELKTKSRIFITQGRAMMGCLDETCTLKYGQVFVQASYSADDHRKVVVTGKVVVAKNPCLHPGDIRVLQAVDVPALHHLFDCVVFPQQGPRQVFNNILPHPNECSGSDLDGDIYFVSWDPHLIPSRLVDPMDYTPASAETLDHDVTIEEIQEYFTNYIVNESLGIIANAHVVFADQERMKAESPPCVQLAKLFSIAVDFPKTGVPALIPHELHVKEYPDFMEKLDKVTYESKGVIGKLYREIKKHTPHIKHFTREVARRSYDTDLIVDGYEDYITEAIEFKEEYDFRLGNLMDHYGIKSEAEIISGCILKMAKNFTKSSDADAIRMAVRSLRKEARSWFNEMSTGEDGQDAMEAKASAWYHVTYHQQYWGSYNEGYDRPHLISFPWCVYDKLVAIKQGRNLLTRMDRNLRFR

SEQ ID NO: 83599 - protein, 141 aa, Zea mays
  Coding DNA Sequence Number=SeqID_40224
  Gene Ontology: Mol. function=carboxyl- or carbamoyltransferase activity; Cellular component=ornithine carbamoyltransferase complex; Biological process=amino acid metabolic process
  Homolog annotation: Hit_ID=Q8SA97; Match level="QueryCoverage=82%, HitCoverage=18%, E-value=4e-15, Identity=43%"; Hit description =Ornithine carbamoyltransferase
MAPPVDMAGLRPRLGDVEAPPKPRSSLSSVAEVESEPLGRARRRPSAEARAESLPWGRAKRSSSSSGAEPKSEPWVGQSGSSGAEPKSEPWVGRSGVRRLPGLSPSPSPGSGGAEFPMVGQWSGEVTAVTSALSAEGRASG

SEQ ID NO: 83600 - protein, 129 aa, Zea mays
  Coding DNA Sequence Number=SeqID_40225
MQESLAGPPLQQNPPEGLPTLTTPLLPLPLSVYHGTGLGVKFIKVKGARGNNSKAQRIALVDGGLIPQNFRGPLIKLPGPKGMGTQRSLDLKSAVQIRVCLAWLCSTPEQLYSKTLGGAALLQSLDCFS

SEQ ID NO: 83601 - protein, 167 aa, Zea mays
  Coding DNA Sequence Number=SeqID_40226
  Subcellular localization annotation: CTP_CleavageSite=29; ConfidenceScore=5.03e-01
MAKGSSSTLGVDNTFGEVRPSLGRRRGPRVSALKDHVITEPGPSPPGSSPRTRPEQAARPDISPTRGLDRSILASVPLTDDPARLRPTRFSFRANSASVRADTATPGLGSSKSDRGVPLTERREASGNKADRAEGLLRLRDTDTSLVTFTRGDSRLVKRFRQPTGES

SEQ ID NO: 83602 - protein, 190 aa, Zea mays
  Coding DNA Sequence Number=SeqID_40227
MYRKCLKDRALEYVRMATALYRNLTKGLSVIQRDKSCLAREWAARFWVLETLELKSRVRSFILQSSRVFWLAPLRSIWLDQSCKNFLDSILFLRELTAAQQLWAAIRVDREWWEREWLAEVLRAAAALEHGSDDEMDGAAEALRAATSPILCIHFSLLSGSSPASESPWISMRRMLEHGTNADSERKLVR

SEQ ID NO: 83603 - protein, 109 aa, Zea mays
  Coding DNA Sequence Number=SeqID_40228
MDVTVAIALVPSFSSLQQGPAAARLCNTNKLGILNWKAVEWSADRLPGWKLKSVSTGVQPQPAAPARHQLTADQQINRRSAVQHHHTAALQEGRNRTKIITHSGNNSSQ

SEQ ID NO: 83604 - protein, 208 aa, Zea mays
  Coding DNA Sequence Number=SeqID_40229
  Gene Ontology: Mol. function=RNA-directed RNA polymerase activity
  Homolog annotation: Hit_ID=A2X9D0; Match level="QueryCoverage=84%, HitCoverage=16%, E-value=7e-59, Identity=63%"; Hit description =Putative uncharacterized protein
MVGRTIQVQGFALTDSAESVKLFLERIAGAGTICALKLRHPRNISANSRAFAIVQFQSQESASLVENAAQRQVLKIGRFYLRTRPADRDIVPRPRIPMFSLEDIVLHLGCLVKENILSALFRASNVSVQFGFDMKKIYFYLSYNFTKFKLELSYESIWEMQLHRPPAYRSRTQFLLIQVGFSYNLPFLDILADFRLYLFNLLKRYISR

SEQ ID NO: 83605 - protein, 68 aa, Zea mays
  Coding DNA Sequence Number=SeqID_40230
MERTRDSGPPATGSKVGGPSSPGYLMTVGRGLVVVGVGMWSYGDFGVKTCDTKGCHISYHDNMGIQPR

SEQ ID NO: 83606 - protein, 119 aa, Zea mays
  Coding DNA Sequence Number=SeqID_40231
MKDIGIELDDYDDQIDVFKEEEKLRAAIAEANYKTHVEKINNRNAPQTEEEIQEYAMEAITNSDRNYEWEGAQDGPMVPVTQKGMRSFLLFLGRLQSYKGGGDDELLEALEARDNTEIH

SEQ ID NO: 83607 - protein, 507 aa, Zea mays
  Coding DNA Sequence Number=SeqID_40232
  Gene Ontology: Mol. function=microtubule binding; Cellular component =cortical microtubule, transverse to long axis; Biological process =cytoskeleton organization and biogenesis
  Homolog annotation: Hit_ID=A2X9C9; Match level="QueryCoverage=98%, HitCoverage=83%, E-value=1e-179, Identity=67%"; Hit description =Putative uncharacterized protein
  Pfam annotation: Domain name=Myosin_HC-like; Domain location=118-469; Score=626.6; E_value=2.2e-185; Accession=PF07058.2; Description =Myosin II heavy chain-like
MLTAELEKVDEKLKLTESLLESKNLELKKTNDEKKAAMAAQFAAEATLRRVHGAQKDDDMPPIEAILAPLEAELKLCRKEIAKLQDDNRALDRLTKQKEAALLEAERTVQIAMAKAAMVDDMQNKNQELMKQIEICQEENKILDRLHRQKVAEVEKLSQTVRELEEDVLQGGAAANVVRDYQRKVQEMNVTYYLSSLREEKKIRDRELARAKVTANRVAVVVANEWKDANDKVMPVKQWLEERRFLQGEMQQLRDKLAIAERTARSEAQLKEKYQLRLKVLEDGLRGTPSGSCRPSMEGKCISNGPPRRLSLGGADSISKISPNGRTSKSFDGGTRSLDQGKVLGSGPHSLNRSTDAVRDCETADSWKANAEEKSNETANNDSADMVSGVLYDVLQKEVVSLRKACHEKDQTLKDKEDAMEKHRSDDDKQYKFLEFVGLMLAKKVDTLHKAKEVEAKKKRQEIAALEKKFAAVCLEQERLGNLRGPGTSQTVSGRTASRGGLTRNLQ

SEQ ID NO: 83608 - protein, 220 aa, Zea mays
  Coding DNA Sequence Number=SeqID_40233
MGHKSITTEVVVVPFFTYGLSLIQKFVHAAEAFRAWLSPLAPSYPDENPHHIGKVGANYVGTTMCYLGANDDSVEVTQKIDVADKAIGIMQESIKCVLRICQEKLPLGKPLNAFDVRVLREALEFVVEVLDHVSFFFSIRGPGTTSFWAAICSPLRPTRVDDCAPLWLSAHGSAGTWEPWDSTTFSGAPHTILASQAAVATHEDGPPVNETSIREPHGNE

SEQ ID NO: 83609 - protein, 244 aa, Zea mays
  Coding DNA Sequence Number=SeqID_40234
MRLGVPFIAPRQLRAIGGILGRPKLPSVGWHTGQSGVPPDNHCSCPVRDFLPFLAQPTVATSCWLAHRTVRCPQPTVGAGHASYADLAANRYAGGRWHTGQSGAPPDSPESSTARPSPTAVPPARVRLTAAESSLRRHRKLRLARPWASASGEVSASPDPRARPPPRPRKVDSASPDPRAQPRPRPRKVVSASPDPRARPQPRPRAESRPRPTPASALGGVSASPDLGLGPTTPQEAHHYPTPS

SEQ ID NO: 83610 - protein, 327 aa, Zea mays
  Coding DNA Sequence Number=SeqID_40235
  Gene Ontology: Mol. function=acyltransferase activity; Cellular component=integral to membrane; Biological process=metabolic process
  Homolog annotation: Hit_ID=Q7XEM4; Match level="QueryCoverage=89%, HitCoverage=57%, E-value=1e-129, Identity=79%"; Hit description =Fatty acid elongase, putative, expressed
  Pfam annotation: Domain name=ACP_syn_III_C; Domain location=195-279; Score=13.7; E_value=5.7e-07; Accession=PF08541.1; Description=3 -Oxoacyl-[acyl-carrier-protein (ACP)
  Pfam annotation: Domain name=Chal_sti_synt_C; Domain location=138 -281; Score=9.5; E_value=0.0003; Accession=PF02797.6; Description =Chalcone and stilbene synthases, C-te
  Pfam annotation: Domain name=FAE1_CUT1_RppA; Domain location=3-181; Score=128.1; E_value=2.5e-35; Accession=PF08392.3; Description =FAE1Type III polyketide synthase-lik
  Pfam module annotation: Pfam domain module=ACP_syn_III_C::Chal_sti _synt_C::FAE1_CUT1_RppA; Domain location=195-279::138-281::3-181
MVVAATHALPGCCSPVQVPALPYYTRFTAVNGSLTRVICAVLVDKLACIATVHSDTYALVVSTENITLNAYMGNNRPMLVTNTLFRVGGAAILLSNRRADRRRAKYQLIHTVRTHRGAHDQSFGCVTQEEDDAGCVGVSLAKELMVVAGEALRTNITTLGPLVLPMSEQLRFLATVVLNRVFRARVRAYLPDFKLAFDHFCIHAGGRGVLDELERSLNLSAWHMEPSRMTLCRFGNTSSSSLWYELAYCEAKGRIRKGDRVWQIAFGSGFKCNSAVWKALRTVDGGEEGNPWTPEIDVLPIHVPKVSPIDETTYKFADGATYKISLG

SEQ ID NO: 83611 - protein, 282 aa, Zea mays; identical to SEQ ID NO: 80283
  Coding DNA Sequence Number=SeqID_40236
  Gene Ontology: Mol. function=hydrolase activity, hydrolyzing O -glycosyl compounds; Biological process=carbohydrate metabolic process
  Homolog annotation: Hit_ID=Q9AT30; Match level="QueryCoverage=99%, HitCoverage=91%, E-value=1e-128, Identity=76%"; Hit description =Class III chitinase RCB4
  Pfam annotation: Domain name=Glyco_hydro_18; Domain location=11-263; Score=20.7; E_value=1.9e-08; Accession=PF00704.19; Description =Glycosyl hydrolases family 18

SEQ ID NO: 83612 - protein, 70 aa, Zea mays
  Coding DNA Sequence Number=SeqID_40237
MGLGVCGSLCQAWVRPLGRSAVHLGNLTGGNEIDGSGYDYGAGCQHCNHCSGEDEAVEGDFQEFQDYDEF

SEQ ID NO: 83613 - protein, 327 aa, Zea mays
  Coding DNA Sequence Number=SeqID_40238
  Homolog annotation: Hit_ID=A2YGC2; Match level="QueryCoverage=33%, HitCoverage=48%, E-value=8e-08, Identity=33%"; Hit description =Putative uncharacterized protein
MARLRHTARKSVIPFLPSRLAERPLRRPVAGQSSRLERLHHRLHEEQERRRQEQQGSSFSLQQEIESMRSCSPVLPMEAPPAPPLGAPASGVAAGGDPDDGGGDDSSSHDTDFSADQEPEGWVARPITRDAARGCHFHDALDTLLRRALNRRTWHSRGVYPDRWEATCLVRRPENSLQGAKACSEHYSISERDSVEAAMQDAARRALSHYCSVLSGVADGLNLKYYPRRPSSSTGGVIVSPVGEDNPRLSSTVNLAVVLNTELDHALDELSRAHAEIALLRAERAERRHLDDGSPAPVGTQHPYRSPRRGRQSYGNPDYKTKINLEP

SEQ ID NO: 83614 - protein, 412 aa, Zea mays
  Coding DNA Sequence Number=SeqID_40239
  Gene Ontology: Mol. function=GTP binding; Cellular component =intracellular; Biological process=small GTPase mediated signal transduction
  Homolog annotation: Hit_ID=Q53KJ1; Match level="QueryCoverage=38%, HitCoverage=43%, E-value=3e-78, Identity=91%"; Hit description=Short integuments 2
  Pfam annotation: Domain name=MMR_HSR1; Domain location=121-224; Score= -8.6; E_value=0.0066; Accession=PF01926.14; Description=GTPase of unknown function
MAFNAGGGAVNWFPGHMAAASRAIRDRLKLADLVIEVRDARIPLSSANEDLQPVLSAKRRILALNKKDLANPNIMNRWLNHFESCKQDCISINAHSSSSVNQLLGFAELKLKEAISKEPTLLIMLVGVPNVGKSALINSIHRIATSRFPAKDKNKRATVGATARCYTRYCRIYGYDCSFLRSIVSRHADQLLPGLLQLGILLDGRAAITIGGGRSIFGLVRRTSWEADGRRGRVQRMPPRQWSPCDSGRHDQIIIDAAGGCRLGLREGFRTVSAATSSSSGKEIFRAYLGDSDPSAEAHMTSASDNHHYLNSVLEEVVPICEDSAAAGAERAQSPDAIASPSVEKINSPPIMTLLGQPKDTCGPPDGFDGWSSGALAPVSPQHQESGAGLLEWASSSSPHPAEHPAWRTANP

SEQ ID NO: 83615 - protein, 348 aa, Zea mays
  Coding DNA Sequence Number=SeqID_40240
MPTMSKVTCSLLALGAMSRDSGATVGGMHGCSSGVVRGDMGGRFYNGDGGIGEGGSINARDPPTAQQPRPPRALVSHLVPQPLALLGPPINSAPLAAHALNVGTLPAALAHPSGHTAQQASALPATPFHSSCAGGRRKSWPRSRPSRGSKALGPHAVPHSPCLASRPYTVAPRRGSPNAVVRRPVAASGCARQPARAQSGGQVRRHGTPHRVPALVAPMVPASRRRIGIVSPRPEPPHSHSPGIVPAQLPRRRVRACPVVMWRSLHNIHNRKSASCRTSLTCLAVEWSSSWEPHLVMVVTPGVTRLRSPGAVRAACVVQPNPLCDPDAIASPSSYLAMSSPSHPSSLR

SEQ ID NO: 83616 - protein, 172 aa, Zea mays
  Coding DNA Sequence Number=SeqID_40241
MTMCGSQLDDHSTARQVNDVRQDADLRLWMMRRLLHITTGHARTRRRGSYTGHDAWRMDVRQLRAWRGDADAAVMASRWPEEGLRRAVADDGGRATGDSTRPGEGRTARSRRGSRRCEDCRRLAGTIGATRAGAWRGVPRRLAWPPRWARVGCRAHPLSATGHRTTALGEPR

SEQ ID NO: 83617 - protein, 37 aa, Zea mays
  Coding DNA Sequence Number=SeqID_40242
METGLKLALTGQHSAPYNIIGLIVVLQMLDATSSTLL

SEQ ID NO: 83618 - protein, 276 aa, Zea mays
  Coding DNA Sequence Number=SeqID_40243
  Homolog annotation: Hit_ID=Q6J9V9; Match level="QueryCoverage=17%, HitCoverage=16%, E-value=4e-13, Identity=85%"; Hit description =Putative uncharacterized protein
  Subcellular localization annotation: CTP_CleavageSite=41; ConfidenceScore=5.43e-01
MALGQTLLPNSPHSRPLTGDKNQPLKPKSRRPGAQVALTVSSEEATTAAVGSLTSGGHHFSTGDSSHLRTARPSPGWRTDSCTLTRQQQFALPRMAGGRLLHRAGGCPSPPNAGGRSGSPAHAEAGPNLGKRHLRQEKRAPFRLHHDDRIKKGTGKGGISKKDPSQRRKRAPSPPTDQGGSKAGPLEGFDSRPRARRVRDDPGYVRYMAEARATLPSLGCNRELRLARPQALASASASGGVTTSPEPSLGLRRSLCLARPRPWTDYAIGDTSLPYS

SEQ ID NO: 83619 - protein, 439 aa, Zea mays
  Coding DNA Sequence Number=SeqID_40244
MVCLGLGGRRKHTLQDNPILQARILTIEGSSSTLGVSYTFGEESGSSRRLGRSPRGLGQLSPEDISPARGLDNSIPASIPPVDDPARLRLTKSSFRANSAFVRADTATPGFGSSKSGRGVPLTKQEKPQTARPTEPRDSYASGIRIPHSSPLHEATHAWLDSHNEQRTGIQGAITNGTPVPSPRDGRGHRKALVRVPAQGTRTRHQSQRAGGRPVGGTDGLDGGEAFPGCHHVSTDNGVRLSTNAAPANAGRSKAHRQVLAVVLATKTRKRAECCILAGQQQFAFPGMAGGRLLRRAGGWFPPPEAGRGGGQPTRARGRAPARLALRPSKDATRQKDCGCSPSGGSEGGKTRHMREREGMVAFQGGHPPFKGDSPYLRPQPSWAESSPTRSKFLPLWRGGWVPRVMQAGPGQKKPNRRARCIQPPSGYKHSSTFAQTSG

SEQ ID NO: 83620 - protein, 141 aa, Zea mays
  Coding DNA Sequence Number=SeqID_40245
MAAVPKMKMCPPDQTASAGCLHRRRPVFAVIRATAVVIHVDDDPIRPPSKSHAPGDNSGDSPPYPSCSAAVEDKFTDESRLPALCHVPEYLHRTVHTLESLFLSRVRKQQIFVAFAPRWYQMKKNKTEVREDLVLHIGSFA

SEQ ID NO: 83621 - protein, 147 aa, Zea mays
  Coding DNA Sequence Number=SeqID_40246
MGTGRERAGRAEEMLASTARHRTWGAAQGEQGAWRAGQRTARRAGTARAQELRGKGERGAELGAATRGNRAEGRSPIESEQRAERRTHRKQRRQLAMGAWTARLGGELLPLCGRGRCRALKYPSRAAAGERDESVRDKAKGQATVGR

SEQ ID NO: 83622 - protein, 81 aa, Zea mays
  Coding DNA Sequence Number=SeqID_40247
MAIPGGVGKAKGSLTTSPRRLAASKASLSLHILHMAWLSHGYPKPRSPGNEEGGPDHTPLRRPETTMTVDGRSATMKARRR

SEQ ID NO: 83623 - protein, 121 aa, Zea mays
  Coding DNA Sequence Number=SeqID_40248
  Homolog annotation: Hit_ID=A2XKV5; Match level="QueryCoverage=87%, HitCoverage=64%, E-value=2e-39, Identity=77%"; Hit description =Putative uncharacterized protein
  Pfam annotation: Domain name=4HBT; Domain location=47-118; Score =30.9; E_value=4.7e-06; Accession=PF03061.13; Description =Thioesterase superfamily
MDHRQPPPNKTAELDPVLHSIGFQIEEVSPSQVTGRLPVTPRCCQPFQVLHGGVSALVAEGLASMGAHMASGFRRVAGVSLTINPFRSAKVGDVVLVRAAPLHVGRSTQWSADAERVSFKA

SEQ ID NO: 83624 - protein, 95 aa, Zea mays
  Coding DNA Sequence Number=SeqID_40249
MALTMPTHDPKDERRHKPPLLVGLDNSGESGGARVKRRLGCKKADSNPVEVAGEQDRTHEGHAKETLSSVDFERAPKQLSSPSVFFGSNGGRRHS

SEQ ID NO: 83625 - protein, 126 aa, Zea mays
  Coding DNA Sequence Number=SeqID_40250
  Homolog annotation: Hit_ID=Q6QP51; Match level="QueryCoverage=29%, HitCoverage=16%, E-value=5e-10, Identity=78%"; Hit description =Putative growth-regulating factor 1
MPCLLDCGTSTTTRGSPTRDPTVLIECNDHGASDTSGRRSGRRFISVIMIASKKGLGKGDISKKDPSQRRKRALSPPTDQGFEGCALRGSTTTPEHSGSVPFTDQGFEGWPLGRVRQPPQSTQSQG

SEQ ID NO: 83626 - protein, 460 aa, Zea mays
  Coding DNA Sequence Number=SeqID_40251
  Gene Ontology: Mol. function=oxidoreductase activity; Cellular component=integral to membrane; Biological process=electron transport
  Homolog annotation: Hit_ID=Q8GUI2; Match level="QueryCoverage=96%, HitCoverage=91%, E-value=1e-126, Identity=50%"; Hit description =Putative uncharacterized protein At5g39940
  Pfam annotation: Domain name=DAO; Domain location=46-303; Score= -47.6; E_value=0.014; Accession=PF01266.15; Description=FAD dependent oxidoreductase
  Pfam annotation: Domain name=HI0933_like; Domain location=45-455; Score=344.9; E_value=1.4e-100; Accession=PF03486.5; Description =HI0933-like protein
  Pfam annotation: Domain name=Pyr_redox_2; Domain location=46-438; Score=-28.5; E_value=0.0031; Accession=PF07992.5; Description =Pyridine nucleotide-disulphide oxidore
  Pfam module annotation: Pfam domain module=DAO::HI0933_like::Pyr _redox_2; Domain location=46-303::45-455::46-438
  Subcellular localization annotation: CTP_CleavageSite=16; ConfidenceScore=5.10e-01
MPPWPPCLQPTLTTARRATVFSRTRCLSSTPASPTYEQGQHEEEPSLVVVGGGAAGVYASIRAKTLAPHLNVAVVEKGRFLSKVKISGGGRCNVTNGHHLEPMGLARNYPRGNKELRGSFFTAHGPQDTMRWFTDHGVKLKAGKTVSSASVAQDGKFVLKVEKRTADLVDYINANYILVATGSSQHGYSIAAQLGHSIIAPVPSLFTFKIADKRLADLAGVTFPIVKAKLKLDGVQKSVPELTQVNMPFLFSNWRALREVVNWLYTSLATSDLSLQTGPMLVTHWGLSGPVVLRLSAWGARELHQCNYQGNLMVDFVPDIHIEDVKRVLFHYKDQHAKHKVSNTFPTEFGLVKRFWRFLLEQESLNGDTHWASMPNNHLNAVAFRLKQWTFEVVGKGQFKDEFVTAGGVPITEISLGTMESKKQPNLFFAGEVLNVDGVTGGFNFQGYQQVCNQDKDIPR

SEQ ID NO: 83627 - protein, 186 aa, Zea mays
  Coding DNA Sequence Number=SeqID_40252
MGTTVMTMCSRCCFFPPYCEAYHPAARPFLMEWCGSREGRGCIARAVEELGDVVRRMQGKATSSSDEAASRGRWRSWATRSDEGEVKNHCWAARKSPIRREMFMFPPALPRIWVHDAAEVCGHGGDYRLHGPIRRNCMTRVRDARLGLFVWFIERWVVPFSNWVPLLLSFEQPFSFFESEDIQASE

SEQ ID NO: 83628 - protein, 389 aa, Zea mays
  Coding DNA Sequence Number=SeqID_40253
MGRLHASCAAIWLLPFRVSPHDEWDPAPASEGRSHAFTLLAFIAPFHLSSPQMGYTCVAFFLQQFEERDPMGVGALQSLLGFKDFHHAARLQSLTNAFRGEGHPLALWRRRPPAMRGKVNCCCLARVQLSVLHPIDGHAVRRWLLSPVLKRRPPLVRLPTAAVVASADETVSATCALGLRLFGFNGWFSSPVRGQVVVALLVQWSPASHLEFVIPQAFQSGQPSRALPTSESRYHCYPKITYPSVSYLSRKVTSEDSTIDAVERHKSHFGEKLFRGKFWRRGGFPSLDPRRPLGPGPLQRVWPWSSGLSELPEAWPHSSVPGPRVCFVRSVTLFLSPFFTLRLKKVVLPSAGFEMALDEAVKNCKALAEAAEQKEAERVAMSEAISAFC

SEQ ID NO: 83629 - protein, 98 aa, Zea mays
  Coding DNA Sequence Number=SeqID_40254
MFASFVCMLRNLRNLGLKLSVVQIKVFSEIICRLLNCIGSMTMLKERLVFAFAALRGAVTLRTKALKEVNDFILISVHTVGMQMEDMTFFFAELALMQ

SEQ ID NO: 83630 - protein, 98 aa, Zea mays
  Coding DNA Sequence Number=SeqID_40255
  Subcellular localization annotation: CTP_CleavageSite=49; ConfidenceScore=5.07e-01
MGKPVPSLLMLLLSRGRVPLNSPTRWQGGRPSYPSNHLLQRTCKNYATSKAEYTNTQLDLPGYNGSSSLISCEKQTIRIEFLSLQGIRTLILIPFSIS

SEQ ID NO: 83631 - protein, 47 aa, Zea mays
  Coding DNA Sequence Number=SeqID_40256
MSRGRGVDSSHPGSLEEMVAGITWPSTLPPGWTVEWDPASAEEEHEE

SEQ ID NO: 83632 - protein, 219 aa, Zea mays
  Coding DNA Sequence Number=SeqID_40257
  Gene Ontology: Mol. function=drug transporter activity; Cellular component=membrane; Biological process=multidrug transport
  Homolog annotation: Hit_ID=Q5JLG3; Match level="QueryCoverage=44%, HitCoverage=16%, E-value=2e-12, Identity=48%"; Hit description =Pentatricopeptide (PPR) repeat-containing protein-like
MAAHSDTVATLAADDAADVDATDTDTDGLPQHVRPGLVLVRVVRFGRVGGFEPEDEDGGNRVRAEESAVEVQPLAVVELPPEPELAALLDVSSRAGDADKVYEYMHKLRQAVSEETAGVVETWFRSDEAATACKPQWDAAQVEHQRRREGWSKIHHRIGKELSRWEYGIGKKKPWSAVRSLHTSDGVEEDLIGEILGEREDRNCASAEQSSRGVCVSSG

SEQ ID NO: 83633 - protein, 156 aa, Zea mays
  Coding DNA Sequence Number=SeqID_40258
MGRGKRGKGWPRRADGKHKRPPSPPSEDFGDSEYSEGVSSEYDRSPTPASPVVSSEDSDTPWGCPVRRASTGDPSSVPGLVGEMTRRRPPRRRWKIPLTPRSGVAATRTTTRAATTVTAKVATTRATAKAMARTTVAMAKVTAIARAMVATARPAT

SEQ ID NO: 83634 - protein, 107 aa, Zea mays
  Coding DNA Sequence Number=SeqID_40259
MAITRKKEVNIPYRGRRTHQAILPIPPPSKEDGKKERNLPSVMPGDGETDAEMCGDIMKLENRIQHNPYPGTKPRKWGKLPMNEYTKKDATPTAAIAEGLGARARTS

SEQ ID NO: 83635 - protein, 120 aa, Zea mays
  Coding DNA Sequence Number=SeqID_40260
  Subcellular localization annotation: CTP_CleavageSite=38; ConfidenceScore=5.03e-01
MPNTHDPSTVTNHRHRPKNTTMDVTDPFPPPRFVLSVLGRYGGGKEEVARHPRIRFLLPHPSLVGWRVFQMTAIATAASTQVCYDDEADDPDPPFSETHEQRTRKTQVDERAREPVWVRE

SEQ ID NO: 83636 - protein, 107 aa, Zea mays
  Coding DNA Sequence Number=SeqID_40261
MSGAPRRSGLRNSSASGIHFGHSAIIHRTVRCTPDCPVQQRGNSYFGANGYLRRIKCARCARRDHPIIRKLGKRHQRCGGPWGKADWQVFGEEKFIRSEGPFESGKA

SEQ ID NO: 83637 - protein, 208 aa, Zea mays
  Coding DNA Sequence Number=SeqID_40262
  Homolog annotation: Hit_ID=O48967; Match level="QueryCoverage=51%, HitCoverage=23%, E-value=3e-29, Identity=63%"; Hit description =Putative uncharacterized protein
MHHQVRTSTEDPRTPVRIARTLGCGPKLPRRHADGLQVSPSKTLRPLLILGFRAGALRHPAGDFLSDIWHASSTRLHKRPRLRQGQRLRRCLQPGSCYATPSSTASLGAMNQWRDDVDRLLGMAHSTSTRSRPRSSWHQREAMASVRSPSVRGAQTDNLWAELNHRRAGEDAQVSLERVREHRQNIEGHNLDQDFAVESPRTLVGARF

SEQ ID NO: 83638 - protein, 204 aa, Zea mays
  Coding DNA Sequence Number=SeqID_40263
MPRFSCIHRALPPPEPLDEARWCLLGGSASGSPPPAISPPGSPRSSAIAWLQGFSSCSPAAVPRQWSSRRMTTSLVVGRSKSGYGLPPALSFKDVHHPRWGGRRGESGPFPPHGLVTRFFLQHLEEKDVHQPCGGGEPRLCGAGWLQAVSCSVSGPLGLMALVLPPMLPPAVWLGRGCSSTARVTVALCAGSPHPRLLLHRRPH

SEQ ID NO: 83639 - protein, 133 aa, Zea mays
  Coding DNA Sequence Number=SeqID_40264
MDYATPAGVALEAGSGQPHQRRRPPLHQRFADDSDHLCTSSDNHLRSERPRAAATTSGCAPLRRGPRPRPPKGGDNEAIRAKESETRRQVALMVSPAEATTSTMGSLTSGGDHLSTNDSGHLCTGGRRLPQHV

SEQ ID NO: 83640 - protein, 163 aa, Zea mays
  Coding DNA Sequence Number=SeqID_40265
  Homolog annotation: Hit_ID=O48967; Match level="QueryCoverage=63%, HitCoverage=22%, E-value=1e-38, Identity=73%"; Hit description =Putative uncharacterized protein
MADKCARAVEGRAWHSAPQTRTTQTGGSGAVPRDGKKKKKGCGYERPQSTVLVVAAASESWGDCNKRPRPQRGNSGSCPIHPNGRHSAAECREIIDLMKRVSEHASKRREQSSKDGSPPRHRPGKEKVDDSEVAATERDLGYQSPEGDLKDVFTRDSHSDGDD

SEQ ID NO: 83641 - protein, 297 aa, Zea mays
  Coding DNA Sequence Number=SeqID_40266
  Gene Ontology: Mol. function=binding; Cellular component=endoplasmic reticulum; Biological process=Notch signaling pathway
  Homolog annotation: Hit_ID=Q10NT7; Match level="QueryCoverage=83%, HitCoverage=35%, E-value=1e-134, Identity=91%"; Hit description=Sel -1, putative, expressed
  Pfam annotation: Domain name=Sel1; Domain location=138-173; Score =20.0; E_value=0.009; Accession=PF08238.3; Description=Sel1 repeat
  Pfam annotation: Domain name=Sel1; Domain location=174-209; Score =30.1; E_value=8e-06; Accession=PF08238.3; Description=Sel1 repeat
  Pfam annotation: Domain name=Sel1; Domain location=58-89; Score=1.5; E_value=12; Accession=PF08238.3; Description=Sel1 repeat
  Pfam module annotation: Pfam domain module=Sel1::Sel1::Sel1; Domain location=138-173::174-209::58-89
MDYWITPPDDQVFCDWWMRVKFGLCSSLSKSLKRHPYGAVWALEATMLYKSVAERGPWSSLSRWALESYLKGDVGKALLLYSRMADLGYEVAQSNAAWILDRYGDQSICMGESSFCTDMERHLRAHALWWQASEQGNEHAALLIGDAYYYGRGVARDYERAAEAYMHARSQSNAQAIFNLGYMHEHGHGLPLDLHLAKRYYDQAVEVDSAAKLPVMLALTSLWLRKNYADSFLVRFIDSLPEIYPVVNKWVEDVLLDEGNATILTLFACLVTVLYLRERQRRQVAAANPQQPDDVVM

SEQ ID NO: 83642 - protein, 111 aa, Zea mays
  Coding DNA Sequence Number=SeqID_40267
MKGLNSAVILGAWCLWLQRNRVVFDKDSPSIGKMKSSFLKESSYWVLAGAKQLGVLGLADALREVSLTCTSLLHPKPEQKPFENEKPYQRGRSVTITERSQLATIASLGNH

SEQ ID NO: 83643 - protein, 85 aa, Zea mays
  Coding DNA Sequence Number=SeqID_40268
  Gene Ontology: Mol. function=binding; Cellular component=endoplasmic reticulum
  Homolog annotation: Hit_ID=Q10NT7; Match level="QueryCoverage=90%, HitCoverage=11%, E-value=5e-28, Identity=77%"; Hit description=Sel-1, putative, expressed
  Pfam annotation: Domain name=Sel1; Domain location=24-59; Score=26.9; E_value=7.7e-05; Accession=PF08238.3; Description=Sel1 repeat
MSFESGMEKQAKELFELAAENKEAGGHYNLGVLYLKGIGVKRDVIRACNLLLHAVNAGQPKAIYQVAKLFQKGIGLKRNLHMVND

SEQ ID NO: 83644 - protein, 361 aa, Zea mays
  Coding DNA Sequence Number=SeqID_40269
  Gene Ontology: Mol. function=RNA binding
  Homolog annotation: Hit_ID=Q5W690; Match level="QueryCoverage=49%, HitCoverage=17%, E-value=7e-11, Identity=30%"; Hit description =Putative uncharacterized protein OSJNBa0076A09.5
MAPSQSRAVAILLHPICSLSDIHQWPAGLSWPCLAASALLVHRGRASPPPACMFSVDCPSAPVLSGVRCDLPVRAIRPRPPSSCQFIGCTRLLSAAAPPIQSSTLLQKVWIALLVLYSAHCSVAVLYSVHCCAVVLYSAIFIGWLRQSQAAVVPPAVHAPIAVGENQSDPKKCKEDLDRPKKNKRDKLRAETDLRDDVIITGGREGSEAESRAGSLSEGSPIQNLGPMDRWARPIDPKATKEEVKMQQSLNETLWKERTHQVHQAINIVLHWYTLMRGKFYEVQGDFRCIVSHTIEVIFEMMDKTINELEADNVVHVVKDNASNNMAAKTLLLEKRPNIFRNTCATHNQFDAPRYWQPAEV

SEQ ID NO: 83645 - protein, 396 aa, Zea mays
  Coding DNA Sequence Number=SeqID_40270
  Gene Ontology: Mol. function=binding; Cellular component=endoplasmic reticulum
  Homolog annotation: Hit_ID=Q10NT7; Match level="QueryCoverage=84%, HitCoverage=47%, E-value=2e-90, Identity=57%"; Hit description=Sel-1, putative, expressed
  Pfam annotation: Domain name=Sel1; Domain location=110-140; Score =2.0; E_value=10; Accession=PF08238.3; Description=Sel1 repeat
  Pfam annotation: Domain name=Sel1; Domain location=141-176; Score =18.9; E_value=0.019; Accession=PF08238.3; Description=Sel1 repeat
  Pfam annotation: Domain name=Sel1; Domain location=265-301; Score =32.7; E_value=1.3e-06; Accession=PF08238.3; Description=Sel1 repeat
  Pfam annotation: Domain name=Sel1; Domain location=302-337; Score =35.9; E_value=1.4e-07; Accession=PF08238.3; Description=Sel1 repeat
  Pfam module annotation: Pfam domain module=Sel1::Sel1::Sel1::Sel1; Domain location=110-140::141-176::265-301::302-337
MARVLHRRLLLLAAVSFAVVASLLRPAAAVRPFVLVLSGEDFLKDSAAHPSLPSADSTDDDGWDDFADDSPAADPLLSPSSWVPLLDPASPPLSGDETDSSADALFVAGARAMLSAASDGDDAAFATAAAQIEAAAEAGHPGAQSALAFLTGAGMTRPASRSLAFLLHKFAADAGDLQSKMALAYSYFRQESSYKLEMYEEAVILYAELAEAALTSSLISKEPPVIEPIRLHSGTEENKEALRKSRGEDDEDFQITEYQAQRGNAANMYKLGLLYYYGLRGLRRDYGKAFHWFSKAVEKGETRALELLGEIYARGAGVERNYTEAYKWLALAAKQQHYSAYNGLGYLYVKGYGVEKKNLTKAIILVLPLPVSRTSQDSRKGYVLLACSSSENFNLA

SEQ ID NO: 83646 - protein, 115 aa, Zea mays
  Coding DNA Sequence Number=SeqID_40271
  Subcellular localization annotation: CTP_CleavageSite=2; ConfidenceScore=5.04e-01
MTASNAMSITGAATHGTTGSNGGMVVRSRGSQQIGLRYGDGYRQSQTHAHEASWEGVSRGGGVVGADNGCLAKSRASRGGDRMDDVRGEAGHGIAPACRPWPSSRSWDRRFRAVR

SEQ ID NO: 83647 - protein, 222 aa, Zea mays
  Coding DNA Sequence Number=SeqID_40272
MTCGTQPPRRGGENLGACWRRLNPQRLRTQVERVALKRGATPLEGHHVFALPSCIVSFHLLSPWAGDARNPSVLSSEERNFVEVGTFQPSFGFKDFHHAARLHPSAGGHPRRIRPEVIAAASRPPGAEVVVVAAAGASDDKPFVGLLLLRRPPRTKTRLVDYLNRFTERELPRAKETSESGGPPTPSPFEARSDPAEGVVDAEGAAAPFGCRRPSLQDQVVL

SEQ ID NO: 83648 - protein, 150 aa, Zea mays
  Coding DNA Sequence Number=SeqID_40273
  Gene Ontology: Mol. function=heat shock protein binding; Cellular component=small subunit processome; Biological process=rRNA processing
  Homolog annotation: Hit_ID=Q5N7Y0; Match level="QueryCoverage=40%, HitCoverage=17%, E-value=2e-16, Identity=68%"; Hit description =Leucine zipper factor-like
MELQFRWDQVATFVKQTDGSPVQLERTISIDVIEIHTYGCIFNVCLYGLHCEAGQNKKRQRIGDTLDFEIKRWSTGKQGNLRALLSTLQYIRPSDKKVDYQIQKLTNAVDNATAREKSGNAEANGKDRHSDEEDLLKYRPNPDMMDTDWS

SEQ ID NO: 83649 - protein, 110 aa, Zea mays
  Coding DNA Sequence Number=SeqID_40274
MSKDTRDTRFIPRFGHTTKVPYFLVEAPTKSWVSFNPNPPFADHKGQAHTLIFAQTSGSEVRGVRDQLNCPSGPVQPVLTSEFRRENPSSTARRQVQLLKKLNSAEVQLS

SEQ ID NO: 83650 - protein, 128 aa, Zea mays
  Coding DNA Sequence Number=SeqID_40275
MDHILVIMRQGALVHMAYVFFFRTNSWLHVHSRSLFLQRIGDTLDFEIKRWSTGKRATCALCYQLYNMQIKDLKHVEGVESRTLTVDGVPADTVRHNEMQGAQSMRNNTERHNSAFQFVILIGLDRLA

SEQ ID NO: 83651 - protein, 137 aa, Zea mays
  Coding DNA Sequence Number=SeqID_40276
  Subcellular localization annotation: CTP_CleavageSite=26; ConfidenceScore=5.06e-01
MSKNTRDTRFILRFGHTTKVPYFLVEAPTKSRVSFNPNPPFANHKDWLNRPLGRLNRPWQVRQTVCQSDCQTDWQTDLQADQDCRSEVRGVRDQLNCPSGPVQPVLTSEFRRENPSSTARRQVQLLKKLNSAEVQLS

SEQ ID NO: 83652 - protein, 306 aa, Zea mays
  Coding DNA Sequence Number=SeqID_40277
  Gene Ontology: Mol. function=transcription regulator activity; Cellular component=nucleus; Biological process=regulation of transcription, DNA-dependent
  Homolog annotation: Hit_ID=A2YNU4; Match level="QueryCoverage=68%, HitCoverage=33%, E-value=2e-66, Identity=54%"; Hit description =Putative uncharacterized protein
MGNKQLDAYVVNPSLSQDQLFSILDVSPSCAYIGTNTKVSVTGTFLVNKEHVESHRVACSEVREIEYRDSEAHYMETSHSQANGVNEMHLHIRLDKLHTLGQMTIKCLFINSLILDGKWSNQESSVKEVVSTARVQSLKKLVKEKLHQWLICKVNDDGKGPNVLCKEGQGVIHLVAALGYDWAIRPIIIVGVNVNFRDAHGWTALHWAASLGRILLIRKFKKVACQRMRKKNSRLKKPGGKLLMIWILRGKGKPKSKSNPKDTGSWFDGDRKAIIQLAGELFWKMGEDLDSIAKDYTASFQEWHVC

SEQ ID NO: 83653 - protein, 243 aa, Zea mays
  Coding DNA Sequence Number=SeqID_40278
  Gene Ontology: Mol. function=nutrient reservoir activity
  Homolog annotation: Hit_ID=A3AZB6; Match level="QueryCoverage=99%, HitCoverage=37%, E-value=2e-82, Identity=56%"; Hit description =Putative uncharacterized protein
  Pfam annotation: Domain name=Cupin_1; Domain location=127-243; Score =34.7; E_value=3.3e-07; Accession=PF00190.13; Description=Cupin
MAPVDLTPRQPRKAYGGDAGAYYEWSPADLPMLGVASIGAAKLSLAAGGLSLPSYSDSSKVAYVLEAHGPLLGDTSKGHRPGQFTNFQLTGASGHLHGLLHRPASGIVRASSPLPAPSAQDREGVALNCLEAPLDVDIPGGGRVVVLNTANLPLVREVGLGADLVRIDAHSMCSPGFSCDSAYQVTYIVRGSGRVQVVGPDGVRVLETRVEGGFLFIVPRFHVVSKIADASGMEWFSIITTPK

SEQ ID NO: 83654 - protein, 207 aa, Zea mays
  Coding DNA Sequence Number=SeqID_40279
  Subcellular localization annotation: CTP_CleavageSite=28; ConfidenceScore=5.30e-01
MQAACNRAKWAHPFNSNAPSMETQAHTSCNRRAGCYVRATAPPLAPLPRLLDCGTSTVTRGNPAYDPTVPARRIGHGTCGTFGRRSGRRFAFAIMTASKKAGPSKGFNSRLRALGLRARYCSEAGPRRFHSRLRRRARDDPGYVQYITKARAMLPRGSGAALANAAPAKPLTVSTYQLENLGPDRAPGLRPARMREQPDRPKHRKTH

SEQ ID NO: 83655 - protein, 261 aa, Zea mays
  Coding DNA Sequence Number=SeqID_40280
  Subcellular localization annotation: CTP_CleavageSite=34; ConfidenceScore=5.41e-01
MGNTRDLSALFVGGTQLRGSWYLSAIVRLQGFSSGSSAASPRRWSPKTVTTSPWVGRSKPGCDLGPALSFKDLHHPCWGGGRTEPELYLPRGFVGQPLPQHSRERALTGLAGGSDSNNAGPIGGERRQLQRVGLAGSAGSGSAPGAPSRRKGGCRAVRTGGPPKTSRAARATFVFWGCPAFAPVWRLCAEVGAPLVREDPSGDPPVGRWLLSSVLRCFSLSLCVTAMSAILVGFFNRELRLLILVTTRPPHLFPPRSSPVG

SEQ ID NO: 83656 - protein, 68 aa, Zea mays
  Coding DNA Sequence Number=SeqID_40281
MGTYSWLRYLTQGASTIDLNLSGLLSIKSEDYCLQAENREFTRPKDSAAHFAHKGVDADYKKEISKHS

SEQ ID NO: 83657 - protein, 69 aa, Zea mays
  Coding DNA Sequence Number=SeqID_40282
  Homolog annotation: Hit_ID=A3AYU9; Match level="QueryCoverage=47%, HitCoverage=15%, E-value=4e-10, Identity=81%"; Hit description =Putative uncharacterized protein
MEWEEAGHMPPNMYRCFTGLCEAASQGGAIPVAAARGNNKVKVFKGDGKVWFGAYGHCTGSLARVLRQS

SEQ ID NO: 83658 - protein, 96 aa, Zea mays
  Coding DNA Sequence Number=SeqID_40283
MSARAAKRKQGGWERCSRSTEIILEDPLDLQNLQGVKEEEATNGEVGEALSPNKDGKEEALKGDISTKKDEVKTGPANGKGEGTSKGQIGKLPLSN

SEQ ID NO: 83659 - protein, 130 aa, Zea mays
  Coding DNA Sequence Number=SeqID_40284
MSLRYGRIYTPSALKIERPRLSVNVAILAKGRYLRIQVSITVDQSNTKVDTEPKENSTPVLFGLTWHSLFASRLYYHLLPVGDCNLADGEYVLIPEQGPVQEEDQEQASEAAIEDLPAAPAIEGKPRFYA

SEQ ID NO: 83660 - protein, 96 aa, Zea mays
  Coding DNA Sequence Number=SeqID_40285
  Gene Ontology: Mol. function=nucleoside-triphosphatase activity; Cellular component=integral to membrane; Biological process=transport
  Homolog annotation: Hit_ID=Q8GU82; Match level="QueryCoverage=91%, HitCoverage=6%, E-value=1e-23, Identity=68%"; Hit description=PDR -like ABC transporter
MGQPTTPATVELTGSEDEDWHAAATAGRTQQPPPPLTHDDNRSFLRMLRDMKEKLGVDAPKVEVRFERLTVEADVRVGRRAVPTLLNAAINAAQES

SEQ ID NO: 83661 - protein, 283 aa, Zea mays
  Coding DNA Sequence Number=SeqID_40286
  Gene Ontology: Mol. function=aspartic-type endopeptidase activity; Biological process=DNA integration
  Homolog annotation: Hit_ID=Q8SBB2; Match level="QueryCoverage=71%, HitCoverage=14%, E-value=8e-11, Identity=28%"; Hit description =Putative copia-type pol polyprotein
  Pfam annotation: Domain name=zf-CCHC; Domain location=190-207; Score =11.5; E_value=0.028; Accession=PF00098.14; Description=Zinc knuckle
MDTHRPPHFDDTNFPYYSARMTCYLEVVDLGNELVRDMYSRLNLTINELNSVDINKLGDADIVGKIISLLPQQRYESIIIILHNMEDLSQMTLTIVIGKIVAFEMSRKMGRQDEPTSSRPYAFACDEKSKGNKKARTPSSSSEEEEEEESDDDEDNQPSTSSSEDEEIIRRIRKVKDLLFNIDKKKQRKRGYFACGEKGHFRDSCPNMAKPTKGRSKGKALRSVKTWDDSPSEDEPQRTRSHRSSSRSSWSSCKCLMARGKMSIPTSSDDDSSDDDEGEGKPP

SEQ ID NO: 83662 - protein, 351 aa, Zea mays
  Coding DNA Sequence Number=SeqID_40287
  Gene Ontology: Biological process=pollen maturation
  Homolog annotation: Hit_ID=Q6Z8U1; Match level="QueryCoverage=54%, HitCoverage=19%, E-value=4e-74, Identity=70%"; Hit description=C2 domain/GRAM domain-containing protein-like
  Pfam annotation: Domain name=GRAM; Domain location=189-256; Score =64.0; E_value=5.2e-16; Accession=PF02893.11; Description=GRAM domain
MSLIEAPSPSPSSSSGSDDFAAFLASELELASGADSAFPGDPSSVFPATDDEGEDEDPEELEVEAIEQNGDKQICPDLSLLGFRASSAGGDDDVEDDSGSIAASIGLYFLRPSLSRLFICRFLSYKMRLRYNISKGKGYSFTAKSDLEIRELARAQHTNHRTKLHLRIFLNNSKGTGMVTEYLSKMEKEVGKKELFSLPVEEFLISSFTCYLKRKLPTQGQVFLSPRTIGFYSSMFGRKTKFYFLWEDIEDIQGIPQSISSWSPSIIITLHKGRGMDAKHGAKSMDNGKLKFCLQSFASFSVANRTIMALWKAISLSIELKVQLAEEQSQINTLQSEDSGVFVGIEDAKSL

SEQ ID NO: 83663 - protein, 128 aa, Zea mays
  Coding DNA Sequence Number=SeqID_40288
MQYQRKEEAVDVSTVGNKATGRITVRRNSFKDFMDTRPPIFKEATEPLETDEWINTMEQKFRLLRLSNNLKAEGNYIPPGLMAMKEQDFDLLFRRRFNSKDLGVRRLSKWLYLMRRLDQEVQREVPLK

SEQ ID NO: 83664 - protein, 143 aa, Zea mays
  Coding DNA Sequence Number=SeqID_40289
  Subcellular localization annotation: CTP_CleavageSite=43; ConfidenceScore=5.21e-01
MGFNKESKGQPKAPLVCFALFTPPSRRLSTTINGGGAPWVCARCEASAEGCECTSGGKESEWGTGHLEMGRGGDERGLDVRHGRGVHDDARVVRGQFGREGSDRRDPWVSEGRCACVEEIGADKWAPLGSERDKGERACADRR

SEQ ID NO: 83665 - protein, 24 aa, Zea mays
  Coding DNA Sequence Number=SeqID_40290
MAVMGSTLDKMYLCQVVPKDEPQQ

SEQ ID NO: 83666 - protein, 111 aa, Zea mays
  Coding DNA Sequence Number=SeqID_40291
MDLLHHHIQIYQICIHEDYNMGMDKFPLHRPITISMTNWINITTLPTCLSTITMTRAEHVWTSRGLNLWSPKIIASYSAMLLVHLSKSKVKLSRVAYLYLAHDSVVMTVAP

SEQ ID NO: 83667 - protein, 255 aa, Zea mays
  Coding DNA Sequence Number=SeqID_40292
MSKVICSLLAFGTAVNYAHMIKGVQENGVCLVAVIDEYFVQIPPCNCIIDRQRVCMGHTMNVDISCIEVEWHMGPLCLDDGPRSLLALVVVGEVVGVGLDVEVVEVAALGFLGVEGVVDMEKDCGFAAGAGIALAIQSFVGLVSGQSMVGGGLEVWFKTASLIMPSRGLKPSRGFRGRPSELHVRTVPSGRRLPSPRLLERWWPSKSLSWEPSWDCFVKAPHGCRVFDPCKGRDSEPPKVAVTPSEVLRSPHFKR

SEQ ID NO: 83668 - protein, 222 aa, Zea mays
  Coding DNA Sequence Number=SeqID_40293
  Gene Ontology: Mol. function=protein transporter activity; Cellular component=clathrin coat of trans-Golgi network vesicle; Biological process=intracellular protein transport
  Homolog annotation: Hit_ID=A2ZH90; Match level="QueryCoverage=79%, HitCoverage=11%, E-value=3e-82, Identity=85%"; Hit description =Putative uncharacterized protein
  Pfam annotation: Domain name=Clathrin; Domain location=7-155; Score =43.3; E_value=8.6e-10; Accession=PF00637.11; Description=Region in Clathrin and VPS
MEFSTELVEADIEDSNAAGEQQFRWESTGEQRNMIWEATTFLLDVLKPNLPEHAFIQTKVLEINLVTYPKVVDAILANGMFSHYDRPRIAQLCEKAGLYLRALQHYSELPDIKRAIVNTHVIEPQTLVEFFGTLSREWALECMKDLLLVNLRGNLQIVVQAMKEYSEQLGVDACIKLFEQFKSYEGLYFFLGSYLSSSEDPDIHFKYGFARSFSNWPCNFNT

SEQ ID NO: 83669 - protein, 129 aa, Zea mays
  Coding DNA Sequence Number=SeqID_40294
MQFPEAGEFLRPPFLGAPDTVRCTPVSPVNYSGVPLEIPKGGEFELESSGAPDTVRCTPDSSVYQTRAPPPSTRVLVVPRTPFVSPQAFSQDNEQLVIPECVPEDLPEQQPGGDEGNMEDFEFQDYDEF

SEQ ID NO: 83670 - protein, 129 aa, Zea mays
  Coding DNA Sequence Number=SeqID_40295
MKLKQLEGLLGGLTQFSDPKVLLTAPPPPPPPLGWPFFLPFSYPARFRLAQPRQKGGGKAEEYLTFATNGVFFYNEMALLGVAGAGAVCDGPSHRVADALHALAKQNTYNFHHGMKGSSMEHFETSIEA

SEQ ID NO: 83671 - protein, 377 aa, Zea mays
  Coding DNA Sequence Number=SeqID_40296
  Homolog annotation: Hit_ID=A2XZP0; Match level="QueryCoverage=71%, HitCoverage=99%, E-value=3e-26, Identity=35%"; Hit description =Putative uncharacterized protein
  Pfam annotation: Domain name=DUF569; Domain location=94-242; Score =26.0; E_value=1.1e-08; Accession=PF04601.4; Description=Protein of unknown function (DUF569)
MAPHVSQRTHERNRPTLVELRLASPDSIAFHEITRLASACNRPIALQGRNTCSAPLSPLASPSKQQPAGCLPSPPRHHNTSPPPRGRAADATTMELFPHGGFVRLRSRARDKYIHADADASGVSLRPLGAAPSVNAVWKPERWPSEGDFLILQGVAYGRYLAVSDKDAPPGHRGVRAVQRDYNSPHAEAPFLWTAFRVDADQNYVRLHNHQRWLRANGRHRYWNNVVTIDTRNASLTTMMQWRVEEIPVSPEPLPLPPPPQQPTIHVSRGLFKRRAKVHPSGRMIQHVRMDDDGFILDNWPDFNFDDYSVSNLRAEVALRQDDENITLCLRAGKHALLIPLITDLPHNTDPLDIIVMPTGSPGLDAIEYPQFDAPEP

SEQ ID NO: 83672 - protein, 293 aa, Zea mays
  Coding DNA Sequence Number=SeqID_40297
  Homolog annotation: Hit_ID=Q6J9V9; Match level="QueryCoverage=42%, HitCoverage=43%, E-value=3e-56, Identity=85%"; Hit description =Putative uncharacterized protein
  Subcellular localization annotation: CTP_CleavageSite=64; ConfidenceScore=5.30e-01
MAKSGPAVIAATDEQKQRSNHLQARILSRNGRGALSRGGPGKRVFRKRTLPSEGNGPRALLLIRGLKVAPSGVRQPPQSTRAPSPLLIRGSKAGPSEGFDSRPRARRVRDDPGYIRYMAEARATLPRYPRTFPRPAGTICNGIPPEGGIEPSDPIEWVQGAPPRPTSGLGLSFGLGRRSLPHPTSGPGLSLGLGRRSLSRPTLGLGLSLGLGRSHHLARAQPRPQEKSPSCPTWASDRLRYSGYIITLLLASCLRLRRNKTGVPSKVTPGSRNFSDGHVSSCTGLKALLRQPR

SEQ ID NO: 83673 - protein, 82 aa, Zea mays
  Coding DNA Sequence Number=SeqID_40298
MIVALNWHCWVTRRAALSGGTGLHAGPPDATKPKGCTTVVRLHVSRMAERDPVGVGALQSSLGFKDFHQAARLQSPAGGHLG

SEQ ID NO: 83674 - protein, 164 aa, Zea mays
  Coding DNA Sequence Number=SeqID_40299
MARTTEAITAAHSGGQHAQGSKPPTQESPGALRCANEGGHKGRETYHGLRGQCSGFEAQRRANSGHRLPRDTGFLLRTAQRDLENTWVRFRAPNHAESSDRPLACSREVPAVGKKPTDAPQPPRVVNGCAAGNPPYSQRHTGEASPALGQLTEPHAHHMNWRGP

SEQ ID NO: 83675 - protein, 330 aa, Zea mays
  Coding DNA Sequence Number=SeqID_40300
MRTLLSPIVEAKSSTEKRWVHRSQWGGNPQKPFANRHEDGCLRDGFGAEIVQLHPVEVQNCPHETTCWHSEPPLVKRDETQHIPRRRGQGGPARRGHPLQLWVTGEATKKAVGNEGLQIVRRDGGERPRVAQQNDGHPIGHHQAKEVAAERTRYSLHALHGCDSFEKYTDNSWASPQWVWARDSLSNKRKRESTPPSEDFGNSEYSEEEFSSESEGSPASISPPASSDDSDDSQGLATEVWTYIRAVERSGLEGSDESEYSSNEEDSSDSSEEGGGGDGGDDDDDGGDGDDGDDDGDSGSSRGGNGGSKGGSSRGSNGGGSSKDINKASG

SEQ ID NO: 83676 - protein, 71 aa, Zea mays
  Coding DNA Sequence Number=SeqID_40301
MSSAPTAPRLPTVDCAVYGKKSGTGHVRCAPDCPWSEKTLRVGCSGMEDPVSKCPALQIKLIPQISIEVQI

SEQ ID NO: 83677 - protein, 108 aa, Zea mays
  Coding DNA Sequence Number=SeqID_40302
SETTDQAKDGGKKSFEVPSAREKVKEAEEPKAKGEEEGSQSQGTVSGGAPDSVRCARLNSDELAALGNSPATYGYNSPDCPDILRQDLPFRCNLLEESSHSTAYKVFE

SEQ ID NO: 83678 - protein, 122 aa, Zea mays
  Coding DNA Sequence Number=SeqID_40303
MCSRLSVLCRLNAYSLFEVRVSGDGNCQLKECNSLYEGYIPMKYKHYCKKMKKYGYYYINFAASIIEVPEFVIFLTVVLLKIIFSRYGEWGDHVTLQAAADKTQDQFSKYSCTWNHQQRVKE

SEQ ID NO: 83679 - protein, 124 aa, Zea mays
  Coding DNA Sequence Number=SeqID_40304
  Gene Ontology: Mol. function=membrane alanyl aminopeptidase activity; Cellular component=cytoplasm; Biological process=proteolysis
  Homolog annotation: Hit_ID=A2X2G7; Match level="QueryCoverage=59%, HitCoverage=10%, E-value=3e-23, Identity=59%"; Hit description =Putative uncharacterized protein
MAMRMRFNFWIYQNRTEFDMIKYVAVVVAHELAHQWFGNFVTMEWWTHMWLNEGFATWYLEESTIGFKLDALAGSHPIEAANIITLYDVSNIWRIPLLLHEQKAHEAILKVLNLERMDKRLMRL

SEQ ID NO: 83680 - protein, 124 aa, Zea mays
  Coding DNA Sequence Number=SeqID_40305
MARAGISRVDDVEAAKLAGSTRSEDHEQSREDASQKPYSPSPGAGSRRRRVPKTCSPDRRCTSAVGMKRTGRRLSCEERRKRNWDDLDAGCQAPFKGRVRDQITIFDLIRPRNLAFSLDFIAIG

SEQ ID NO: 83681 - protein, 445 aa, Zea mays
  Coding DNA Sequence Number=SeqID_40306
MGDARNPSALSSEERNFVEVGTFQPSFGFNDFHHAARPHPLAGGHPKTVTSSLMAGRSEPGCDLVPPSVSRISSSVQGRGVCRVGVGPCAGGGPLLPSVIGGKGVRRPWHGQLPRSRLSEPSGFGAAPGVAFRHGSWKRFRHRRASRRHPRTDLQLFGLLPVLASRVGGMGEGLMAAASALRSSLLLFGPPGQKSSSLPLPGRATTSHSSVFCCSAGPPSRVGFTETRLVDYLNCFTERELPRAKVMSESWLRKGGVVGQSLAGSSTGRIDAGVELPRPQAKLMSLGDSWPRPRGGRPSRLLGPDSRRRPWRRWPGCGADVVLQSGGPSTASPPEARSDPPEGVVDAEGAAAPFGCRRPSLQDQYPDSFVGNRIVCEGKSCFSRKAMSEGSVTDAVEKARKIISAEELSSMKTCSVRGVTYPSVSYLSQKVMSEENFDAEGVAPF

SEQ ID NO: 83682 - protein, 179 aa, Zea mays
  Coding DNA Sequence Number=SeqID_40307
  Subcellular localization annotation: CTP_CleavageSite=44; ConfidenceScore=5.23e-01
MAPHMPCDDGGSQPPYGSKRTSARTRQPQQLSLRQAPALLRQTRHHAGSARIQILVQLVFKYWFSWFSGWFSWYSNTGSTGFQASSADVDPRAIDLALRITERMFLKMKEAEAKNKIEEENDRWRPNNKSTSSQGSSFKSTSHMCFVANGSDSESESEDEEEQESDSEDEDDLQQSLLI

SEQ ID NO: 83683 - protein, 545 aa, Zea mays
  Coding DNA Sequence Number=SeqID_40308
MDKDRQAAARKRQATVRVHEARPKRQRGASKAEASGGGKPPLPAKAGASAPGKAPEATVGAGGPKLSKVVPSASGVAEAAKAARSLPPPGKRVADFGTEIDVEDYLGGLDEGPLALVVPGAAVATAAPAPKAGVETLGAGGEVTALALVRDEADAATRRLKGAMEALSQVADFTSRTASGALTATLSAEVERLRTQHADAVREKSASDSKCRKLAEKVAALEKEKADLRRQLMEERREANEAIAKEQSAQAEARLARAEGNVAKELAGELQRRLAAFESRAEGAEAAARAEAERTRTQLMTSYRELGVRTSDFEVPEREAGLRCLEWVQEELQELPTVLAGLMSFTSLVTCEAAMNALSREGCRHFEALDQVDEDFGRDIFEVEDPVVKESGGALYDRMWGSYGREVVRARAEAARAQAERGERVDDFGALNSAPPEPETTPAEAATGVAPVQDFGPAHATATTGFLAASTAEGGNECGGSVSEFFDFTDSGSSTEWTEESSEEDLDYFAALDEAAAEAALHAADAPGVPGPSTGHPTTKGGCEA

SEQ ID NO: 83684 - protein, 146 aa, Zea mays
  Coding DNA Sequence Number=SeqID_40309
MQAACNRAKWACPFDSNVPSMEVQVHASCNRHVGCYERATAPPLTPLPRLLDCGVNTVTRGNPAVPAKRDGQMRTGGASGGRSKRRFAFAITTASKKGPGKGDTPKRTLLREGNRLRAPLLIRGSKAGPSEGFNGRLRSIGFCAHY

SEQ ID NO: 83685 - protein, 308 aa, Zea mays
  Coding DNA Sequence Number=SeqID_40310
  Gene Ontology: Mol. function=sequence-specific DNA binding; Cellular component=nucleus; Biological process=regulation of transcription, DNA-dependent
  Homolog annotation: Hit_ID=A7P3L1; Match level="QueryCoverage=39%, HitCoverage=51%, E-value=1e-36, Identity=69%"; Hit description =Chromosome chr1 scaffold_5, whole genome shotgun sequence
  Pfam annotation: Domain name=HALZ; Domain location=135-179; Score =22.9; E_value=0.00073; Accession=PF02183.9; Description=Homeobox associated leucine zipper
  Pfam annotation: Domain name=Homeobox; Domain location=80-134; Score =64.3; E_value=4.1e-16; Accession=PF00046.20; Description=Homeobox domain
  Pfam module annotation: Pfam domain module=HALZ::Homeobox; Domain location=135-179::80-134
  Subcellular localization annotation: CTP_CleavageSite=19; ConfidenceScore=5.22e-01
MGSTSPSGLELTMAVPGLSSSSGSEGFGCNNNNGSGNGNNMRDLDMNQPASGGEEEEFPMGSVEEEEDERGGAGGPHRAKKLRLSKEQSRLLEESFRLNHTLTPKQKEALAVKLKLRPRQVEVWFQNRRARTKLKQTELECEYLKRCFGSLTEENRRLQREMIWDNPRTVRDADRLAFPEATGNSQHVDCLRGKTSSANTRFCPRKPIPPPTSGPARREVDGDTGAAAGAEGDVLGTSPRRGTPRSREPKHQATVDSDQRNTAPHRDRTDRSTCDWNSKLEKEKPRGADSGYTRHAFKELKKGEEPTG

SEQ ID NO: 83686 - protein, 67 aa, Zea mays
  Coding DNA Sequence Number=SeqID_40311
  Homolog annotation: Hit_ID=Q6QB11; Match level="QueryCoverage=95%, HitCoverage=86%, E-value=1e-28, Identity=89%"; Hit description =Little protein 1
MAFVPVCVQCGTRSNPCRCKVVGPTLGFVAFVVAGVIEWPLGAAVYLFRHRKGRRIMAHPATVVLSE

SEQ ID NO: 83687 - protein, 99 aa, Zea mays
  Coding DNA Sequence Number=SeqID_40312
MAYVRRHSIPSDIRDAYVRRLAAGPSDLRLWGPLAGREKTFGPLLGKNASLRKGKEEAMRKEAAKDLPLQYIRREIDNSLQKTEQKKKQKRRKTYTNSI

SEQ ID NO: 83688 - protein, 73 aa, Zea mays
  Coding DNA Sequence Number=SeqID_40313
MAWRCNDYGGQAAARQADSPTPELGDLPAVPLHCTAPAPRQAPLISTAKCYGHQLMLEQSGFTLLGNYSCDRV

SEQ ID NO: 83689 - protein, 127 aa, Zea mays
  Coding DNA Sequence Number=SeqID_40314
MAPTYIFAFVSLLNPCNQEDPISCKLVGSLIPKMKLAIGMRQPGERVHQESRLVSEVEGLISDNSQQLGQNKEDDVFQTSERAERESLAPSWLKFAFRVLPYVGFIFLFLVDSFRLVFMDPFADGTN

SEQ ID NO: 83690 - protein, 176 aa, Zea mays
  Coding DNA Sequence Number=SeqID_40315
MASSLGATEILEVMTRPFSFSTLSPLGSNLTSLLLIMKDKNAKGEASKGPLEAAIEESTKAWGKNVPQKKRQIKMVIKAICRTPSVVAKKKALVVEENVGVGITVGTGQDIEDSRDVLECILDRDGARVVNTLTKSIGFSKLESKLSNIRKQHITGVGHLFSIAMDQEQGNTFVIH

SEQ ID NO: 83691 - protein, 122 aa, Zea mays
  Coding DNA Sequence Number=SeqID_40316
  Homolog annotation: Hit_ID=Q8S468; Match level="QueryCoverage=99%, HitCoverage=60%, E-value=1e-07, Identity=34%"; Hit description =Putative pol protein
MGEKKMFTFYIKNKDSDDTIIFGDGNKGKEISLPSESWSLDEGTKGRLIPKSFLETIGCIDYLDIHSRYTYFLGSIKYCLQKLLSPAKRDPQLGKSIQITVISSDKGHLITDLQSKSWMESQ

SEQ ID NO: 83692 - protein, 188 aa, Zea mays
  Coding DNA Sequence Number=SeqID_40317
MTVVGLDSIGWGASLEVGDAAGARNRATAYWVALATITSERMKYDERWHAPRGELRVRGLAENLLRDSRKLTVELTRLKGGCDGRTTVAGAQATRVSGGTLNCGEISVRLFSGSPVHPPCRCSQLVSGPLSSSRDSPTKEIDPKVKGKVTEEKEIINNKPSRDKPVDSSSNNKKKDGKKKKRIKKIVY

SEQ ID NO: 83693 - protein, 144 aa, Zea mays
  Coding DNA Sequence Number=SeqID_40318
MTNPGTLDDGVEEKQRQRQFLFGSPRQWLCPRRKSGCRVATLEDLYSGRVHGSRGSGSNQSWSSFAEQGAVNGHGGEIGLFGHDQLGRQDDRRVPHGERLQVVEIPRKRDIVKQSKTSWYSSGSLDRLRGVECNPRPLGRHNVE

SEQ ID NO: 83694 - protein, 34 aa, Zea mays
  Coding DNA Sequence Number=SeqID_40319
MAPVYSTTPEQVTAGVKDLLGALEVHPMGVAPEL

SEQ ID NO: 83695 - protein, 129 aa, Zea mays
  Coding DNA Sequence Number=SeqID_40320
MGENPEIGLTQMNKNGNLQYRIRVQVGQVQIVEIKEFAKEGRNGESKATCKKRNIDDRLMGVLRRNSDPRQIRQEQSSFGAELCLFRFGAIAISSAERTGAESQGNRGVVRGRNVKLGLRNQKRMPTRV

SEQ ID NO: 83696 - protein, 153 aa, Zea mays
  Coding DNA Sequence Number=SeqID_40321
MGKDKKGRGSPGRSGDKRKREPSPPSKDFGDSEYSEEEFSSEYEGSPVYASPPGVVRRLGRSQGIEAEVWTYIWSVERAGLEGSDESEVSSDEENSFSSSEEGSGGDNDNEGNGSGGGGGGGSKGGGGGSDGSRSNDDGKGGCNKASGKAPLA

SEQ ID NO: 83697 - protein, 145 aa, Zea mays
  Coding DNA Sequence Number=SeqID_40322
MVAWLTGARKVRRRAGLDPGGPGGHIEVRLVDGVGQNRSVHVRRWSGSSAAYAPACSWRYCSIQWHRKLYGVLRTLPVQGIDGRLTVELGLQAIPRVGWGGEWLGWPVYGCRGSRGRWHLAHGANSGITNVRISPRVLCKSLPGT

SEQ ID NO: 83698 - protein, 158 aa, Zea mays
  Coding DNA Sequence Number=SeqID_40323
MDEDDGRKDKRGREKSGGGKYLQPKELRRERWLDTRSTGKLGVEIKEKYDFAFLFFKRKGGDAHIHGAGLRREPKAFAKEGVVAGSYKVRIFQSCNDCCTQKFGSHTRSQLFTKMECFSDLDVNVHLVEVYAGLLRYSGYAGLIMLLSLVYAKIRYEN

SEQ ID NO: 83699 - protein, 213 aa, Zea mays
  Coding DNA Sequence Number=SeqID_40324
  Gene Ontology: Mol. function=protein transporter activity; Cellular component=cytoplasmic vesicle; Biological process=retrograde vesicle- mediated transport, Golgi to ER
  Homolog annotation: Hit_ID=Q9MAX6; Match level="QueryCoverage=38%, HitCoverage=28%, E-value=2e-34, Identity=90%"; Hit description =Coatomer subunit epsilon-1
  Pfam annotation: Domain name=Coatomer_E; Domain location=21-211; Score=-43.7; E_value=2.1e-06; Accession=PF04733.5; Description =Coatomer epsilon subunit
MDKNSKNKDKQLKSHPPKNVESEILREHIKKEREAAKAGKRPYYLKKYRACLSVFVQLVISEIDSSAATSLQVVKLLALYLTGDKEGAISSLKEWLSDSAIGSNPVLRLIAGIIFMHEQDYNEALKHTHSGGTLDLEAIIDPAAIFEQLEKRKLIPQPLAAKRKNRYCKEAKACTSDPLKHPATVLQAQPPRKFTFRRGKVLNPEESSGSTPK

SEQ ID NO: 83700 - protein, 143 aa, Zea mays
  Coding DNA Sequence Number=SeqID_40325
  Subcellular localization annotation: CTP_CleavageSite=93; ConfidenceScore=5.91e-01
MVAQLQPPAFWSLQPQTIASRSSWPSSPSALSFSFSPTLRSSTTAKRRCSCSPDTSPCFLAAGAACVPRVRRTVQCWNLMSVQGDPTGVSECPASCVKDACALSHLGYPWNIPIKRARAAKASSEGWRLRLRPNICPSRDQFD

SEQ ID NO: 83701 - protein, 115 aa, Zea mays
  Coding DNA Sequence Number=SeqID_40326
MTQKRWSAVEGTRTPGAGAEPPLARLREQGGEADSTARHWSMGGGRGMGRLQRALWRIGKGAACLRKKKGRGKDAMAAGGACSKGDWPWKKMGGHGEEHGSLLAAVGTTEEERAG

SEQ ID NO: 83702 - protein, 93 aa, Zea mays
  Coding DNA Sequence Number=SeqID_40327
MRDGGGKLDTLRSPSCPAIATNANPETRAKPLGPLARLQFGAEHYGRGWHTHSVQRRVTAPTAHNDCAQRGTVNRAGERRDNGGERSGSVVAA

SEQ ID NO: 83703 - protein, 70 aa, Zea mays
  Coding DNA Sequence Number=SeqID_40328
MGRDLAERALWRIGKGAACLRKKKGRGKDAIAAGVACSKGAWPWKKLRSHGEEHDSLLAAVGTREEEHAG

SEQ ID NO: 83704 - protein, 82 aa, Zea mays
  Coding DNA Sequence Number=SeqID_40329
MTTKQTTGLSAKWAIGTEVGQLVVAPTKPVEERAPGKTVAVTSLYPWAQFCVAADGGKEVVDASAADGVVATVARAALCEFF

SEQ ID NO: 83705 - protein, 51 aa, Zea mays
  Coding DNA Sequence Number=SeqID_40330
MGDHVSSRVRGYVYGQVHSGGLNYNSDFKIFKNLVKVTVGEYWALKSVLKF

SEQ ID NO: 83706 - protein, 104 aa, Zea mays
  Coding DNA Sequence Number=SeqID_40331
MVGTSAVTARRQPGSVEHCIIQEMVDGVTWPTTLPPGWTVEWDVAPGSSDHLRRRPAHRRDRRDLPDVTDHPAGDLLPPGFELNKKTAKNLILEGKIEILLDKG

SEQ ID NO: 83707 - protein, 196 aa, Zea mays
  Coding DNA Sequence Number=SeqID_40332
MSRATAMPTPDCKLSHAPWLQANAPDPTDGAIFFLPRQRPHQAAQTPLDSILGLTNPTPLNRNLVLEIFKKKNVEEIVCSPWVIRKAGVYMSIATLLCRIKDIFKAVIGLGVGLLVLKVTLGTGFQSVKSPFIFRRKRFRPTVNIPLIPLLSHPDFRGPKPGREHKHQDWASISEELRGSGALFPKTQTNLIWTAG

SEQ ID NO: 83708 - protein, 125 aa, Zea mays
  Coding DNA Sequence Number=SeqID_40333
MWMAQRISPSLGDASVDPGAFGWGKCRKKIAPSVGSGAFACNQGACESLQSGVGIAVALDIASGRLVPRSWRIAHRCPLPAADSWSFTEWALRQTAADVKPSGGPLVHMDVDHALLVQARGGGCE

SEQ ID NO: 83709 - protein, 704 aa, Zea mays
  Coding DNA Sequence Number=SeqID_40334
MEGTVEDHEGLPVSEMCSHFYSAYPPFEVAEEDADKGALRCAAGLSSGRDLVEEFVAYGDGAVRIVGRYVPRTEGQRSWDIHGSNDRLNRRIDEDMHGPGGKDVFAGAPGVFGADAEVMDKDRQGAAQKRQAVVRLHEARPKRQRGAAKAAAPSGGKPPLAVKSAVPASSKAPEVAAGAGGSMSAKTVPPSGRVPEVAKAARGLPSPGKRVADFATDISVDDYLGGEMPALAAVRDEAGAVSRRLKEMKEALSQAVDFADRAASGALTAVVSAEVKRLRTQHADAVREKSAADSKCRKLADKVAALEGEKTDLRRRLVEERREANEALAKAQAALAEANLARAEGNLARECTEQLGERLNALQSRVERTEAATRAEAERTRKQLMDSYHELGARTGEFEVPDREPGLCCLEWVQEELQALPTIMEGFMSYASLVTCEGAMNALSREGCRHFEVFDQADEDFERDIYKVEDPIVKESARAIYDRMWGPHDREVVRERAETARAQAACGERVDDFGALNSALPDPESNPAEAVSEAALEPPPETAEGTPNAPAAAAVGGGPPPETAEGAPDAPAAAAPRAEGPATVAAEATAEATAEATAEAPATAGSSQVVQDFGPAHATATTDFLAASTVGDGNEYDGSVSEFFDFADSGSSVEWTEESSEEDLDYFAALDVAAAEASSHAADTEDVPGLSTGRRRRRAVVKRR

SEQ ID NO: 83710 - protein, 94 aa, Zea mays
  Coding DNA Sequence Number=SeqID_40335
MSSDRDLVEEFVACGVWPLAHDWDLGEVKLRPMPFLNNLMVQSPAFTIELRGRDEVAFVRLTNRACDGIVIGLDRQLRDLVADGLCARIRARRW

SEQ ID NO: 83711 - protein, 103 aa, Zea mays
  Coding DNA Sequence Number=SeqID_40336
MAMMGSTLEKMYLCQVMKQQTFVASVTSDGKGPSRVPTEEAEGPPSAGGSSLHHDTKAPCPSTKGTTVAAAMPPLEMSATRRVPSPPQVAEVAAAEETVEAYR

SEQ ID NO: 83712 - protein, 303 aa, Zea mays
  Coding DNA Sequence Number=SeqID_40337
  Gene Ontology: Mol. function=transcription factor activity; Cellular component=transcription factor complex; Biological process =regulation of transcription, DNA-dependent
  Homolog annotation: Hit_ID=Q6QP49; Match level="QueryCoverage=18%, HitCoverage=15%, E-value=8e-22, Identity=91%"; Hit description =Putative casein kinase I
  Subcellular localization annotation: CTP_CleavageSite=32; ConfidenceScore=5.22e-01
MALIIKSFRQILKQRRGKTTSRTPRRFATGVRCRRRGGEGTGPLGTSKWCGGEAHGQCRTLPRLRRAEAQQVGDAEKKGIRFSDSVRRGHMGGCHEDDIASKSAPPASIDGARYGFEPLVLQSSHQVIIEGFTGRRSEHSSSIPKLTSLVNPFWCYLTNITKVILAFCYSLCALDSARAGIPHLKWFGVEGQYNVMVIDLLGPSLKGLFNYCSRKFSLKTVLMLADQMNQGFMTRNDLLLKWCRRALASMSMPRLDAEMVVTVPVATAFVVLLPCRHLSLCGAAMPCLVCLCVRTGSVEAILY

SEQ ID NO: 83713 - protein, 146 aa, Zea mays
  Coding DNA Sequence Number=SeqID_40338
MGKPVPSLLMLLLSRGGVPLDSPTWWQDGRPSHSSNHVLQRTCKNYATSKAEYTNTQLDLPGYNGSSSLISCEKQTIRIEFLSLQVTALVPTITGMGDHVSGRVRGYVCGQVHSGGLNYNSDFKIFKNLVKITVGEYWALKSVLKF

SEQ ID NO: 83714 - protein, 82 aa, Zea mays
  Coding DNA Sequence Number=SeqID_40339
MAQAIEMAQQMLSLWVSIYMPSARQLGGPHLSLTFAILVKGSMIRMKDELTPKLWLEKLQLNTRMMMKDETDLKEKRPLSPR

SEQ ID NO: 83715 - protein, 116 aa, Zea mays
  Coding DNA Sequence Number=SeqID_40340
MDTLTRLTTAFHSAAAVISPTQFITTPGCTPHPETYCYIMLRPRRTISRCLTEDLELCRCLTMTRCGITGFTDAVMETTRALTPAPAKKVAETITAHAETKGGPLVPTEAEPTATE

SEQ ID NO: 83716 - protein, 188 aa, Zea mays
  Coding DNA Sequence Number=SeqID_40341
MEVCCCAMGERSCGRRAAKGRTPLEEEGERGEGRWLPARRPSQGDPAMEGKDHAPCALLHRMGSASRGGRMEQRELDSMAVGRAPSSGDCWRPQSRRGRWERESRGATPWTPASSLLELGPEEMPRPGWSRGGVGGRRRCCPVRWSLGKAGRPWDSTLAAGGAELHGRRRLPACFVGKKKSGWRLGEV

SEQ ID NO: 83717 - protein, 206 aa, Zea mays
  Coding DNA Sequence Number=SeqID_40342
MEVCCCAMGERSCGRRAAKGRTPLEEEGERGEGRWLPARRPSQGDPAMEGKDHAPCALLHRMGSASRGGRMEHRELDSMAVGRAPSSGDCWRPQSRRGRWERESRGATPWTPASSLLELGPEEMPRPGCSRGGVGGRRRCCPARWSLGKAGRPWDSTLAAGGAELHGRRRLPACFVGKKKKWLAAGGSVGVGMQKWPSARKEHPYL

SEQ ID NO: 83718 - protein, 90 aa, Zea mays
  Coding DNA Sequence Number=SeqID_40343
MAHWIAQSTRGGGLPKSDNDDLAIPVRQGFDSRLDKVHASSGKLSKGSVEAEGLWKWLATAAGARVARAGGADLARAKGGVWPAKAYEFC

SEQ ID NO: 83719 - protein, 64 aa, Zea mays
  Coding DNA Sequence Number=SeqID_40344
MKTLTTFCSYHPLEMVMHPLGLFPAEKRDDPMWCNHMAARKRRGQNEQVPPPPPPAPTVQKLMA

SEQ ID NO: 83720 - protein, 197 aa, Zea mays
  Coding DNA Sequence Number=SeqID_40345
MLTRDDGGRPDELAAKHEDDDAAAAPGSCKDESGLRRGLRRRKRGQLGHATGCHGRRAERARGERLGREAGVQEEASLEIGLRPSIRGVHGDYRWQGEHGTVELWAQVSARLLLRMGKEERRGGTAWSGDVGQSGSRSRGKMNRAIGGGFLGAGAYIAEGVVRLTGSLGACASARLAAQEIKRACWRGKGRGSGPEG

SEQ ID NO: 83721 - protein, 88 aa, Zea mays
  Coding DNA Sequence Number=SeqID_40346
MDLDPAAEDEEAERQLEDHNEAMDARQALLGVGVTHLTDKVFAITLDNASSNNTAMKYLRPFLSGYLGVHAPVVTDDDDDSFTPTDDD

SEQ ID NO: 83722 - protein, 59 aa, Zea mays
  Coding DNA Sequence Number=SeqID_40347
MARARATTAPRTARPVALTPRRERRRLWQEKQATLRLRHNDRVKKGTGKGGYPEKYPSP

SEQ ID NO: 83723 - protein, 204 aa, Zea mays
  Coding DNA Sequence Number=SeqID_40348
  Gene Ontology: Mol. function=hydrolase activity, hydrolyzing O -glycosyl compounds; Cellular component=anchored to membrane; Biological process=carbohydrate metabolic process
  Homolog annotation: Hit_ID=A2XP05; Match level="QueryCoverage=94%, HitCoverage=37%, E-value=7e-77, Identity=73%"; Hit description =Putative uncharacterized protein
  Pfam annotation: Domain name=X8; Domain location=109-198; Score =112.2; E_value=1.6e-30; Accession=PF07983.4; Description=X8 domain
  Subcellular localization annotation: CTP_CleavageSite=47; ConfidenceScore=5.21e-01
MTETGWPTAGDLDQFGANVRNAATYNRNLARRLASGAGTPRRPGVPVPAMVFALFNEDLKWGPDTERHWGLFYPNGSAVYEVDLTGRRPLASYPPLPPATNDQPYRGPLWCVVRTAGINETAVREQVAAVCDDDEAEDALCDPVRPGGACFLPNTVAAHASYVFSAHWNRFSEDYGACYFDGWGMETTIDPSHGSCKFPSIHLK

SEQ ID NO: 83724 - protein, 173 aa, Zea mays
  Coding DNA Sequence Number=SeqID_40349
  Subcellular localization annotation: CTP_CleavageSite=23; ConfidenceScore=5.29e-01
MKWLANTPNPLSWKGVKLTTQPTGGAGSCSSPGTINSSYGPWRRGRRLDVHQCLQVIVGDGGDRSWVAGRKDIYFLGHQRWGRRQDKRKKAARAGRRKQKVGPSTGFEKLPQDNMGSEPVTDHGFEGWPLGSFITTSEHRVRDDYGYVRTWPRLGLQSRGTLRHIRDHWERFV

SEQ ID NO: 83725 - protein, 67 aa, Zea mays
  Coding DNA Sequence Number=SeqID_40350
MHPSDGDAWKALDTFDPDFAADLRNEEEDKEEEVQHHEEEEVQAHEEEEVAGIDAEADDDNTEAPAV

SEQ ID NO: 83726 - protein, 173 aa, Zea mays
  Coding DNA Sequence Number=SeqID_40351
MEKTNTEKITNEMLVGLSEDSSDSDSFDVENRAQLTPLSPTHAVLINVTTPRQCPVSASSGVAIASAPKTRGAARASPRLSSSRVSLRPTADVRTHPSLPVSSLAVANERHSILRPGKTRNPTFGAHWRQCPGVPVAPPCRPSRWPVDPARQSAPALASRTEDALAADVWDPP

SEQ ID NO: 83727 - protein, 60 aa, Zea mays
  Coding DNA Sequence Number=SeqID_40352
MKLSPRACAQVHVGAIIGVKGAAVIDPARYGGAVIGGPPSSPRQICQMANDEPVNLSVNL

SEQ ID NO: 83728 - protein, 201 aa, Zea mays
  Coding DNA Sequence Number=SeqID_40353
MEVCDLRKVPDAAASGDPRPCRQSGDGGGSQVTEAILAFDLLQQRCEDEVLEVAQRDHELVMEPAQQPRALDLAPTGDPRRGLLSRITPHLELHRRLNLPGQGHVPCGGTRIGQPFSNILISFPDAAYLSSPFPPPSSSDVQKYRTSLRSSITSFNYVDLELLHEHVVTALSVESYYSFSCVDLELLQEHVVTTLSVKSYY

SEQ ID NO: 83729 - protein, 197 aa, Zea mays
  Coding DNA Sequence Number=SeqID_40354
MGAQPISGTLAARWHENSIFLNKERVSLDLYQFGFIPRYEVWEHHGEAVPNPNVEEEENNDWASDDAMHEMLDSQLPELNLSSEDPPTPEEHEGDKKCLKCGQYRFVEVVNDEGDKVETILNYKSTFGLTEGKKYNCDAKASIRQREQYGGTVHLFIGMGHSPCKITSKPFTFANNFKVVNAYMKRLGHSINNFQQY

SEQ ID NO: 83730 - protein, 143 aa, Zea mays
  Coding DNA Sequence Number=SeqID_40355
MAPAAGPDCLSASLCQVAPQSERRRQHCLSVRPLYADGGYQLRIRSLEGTPNYDPRQEAHQQPFGFPQFQSSMPQWRLHAQTPPLQGSGVMCHNTPPPVIPALEGAFEGEGTTTEETPNQTDDFVKIFFASRGNGHNSNDPYM

SEQ ID NO: 83731 - protein, 280 aa, Zea mays
  Coding DNA Sequence Number=SeqID_40356
  Gene Ontology: Mol. function=hydrolase activity, hydrolyzing O -glycosyl compounds; Cellular component=extracellular region; Biological process=carbohydrate metabolic process
  Homolog annotation: Hit_ID=A2XP05; Match level="QueryCoverage=71%, HitCoverage=38%, E-value=1e-52, Identity=58%"; Hit description =Putative uncharacterized protein
  Pfam annotation: Domain name=Glyco_hydro_17; Domain location=29-276; Score=-10.3; E_value=2.4e-10; Accession=PF00332.9; Description =Glycosyl hydrolases family 17
MAVSQLHLVVMVILVSAVASAPAVAAQYLGVNYGTLGDNLPPPHRGMELARSAGAVSVRFYDANATLLAAAAASGLDFVPSFPNELIPSLAGSQRAADALVAATLLPFRGNPRLRYLFVGNEFLSNPTAKPNWALIVPAMTNAARALRRHGLAHVKVSTTLSMNDLGNTVLPPSAGAFRPEIAEAVMGPMLAFLQRTGSCLFLGRLHLLHLVGEPHHLSPLPYALLERRRGSRTTTPGTALVRHLLDKNLDTAGGRHVPPGPIAAGFGPWRKRGGPRGAT

SEQ ID NO: 83732 - protein, 194 aa, Zea mays
  Coding DNA Sequence Number=SeqID_40357
  Gene Ontology: Mol. function=cysteine-type peptidase activity; Biological process=proteolysis
  Homolog annotation: Hit_ID=Q8S456; Match level="QueryCoverage=70%, HitCoverage=16%, E-value=6e-57, Identity=81%"; Hit description =Putative uncharacterized protein 163K15.6
  Subcellular localization annotation: CTP_CleavageSite=41; ConfidenceScore=5.34e-01
MSGAHRTVRCRLPTVGSTTCPARIARPTVGPGRPLAHRTVRCTPDSPKWPKGTFPFQQRDAVARLGFSSIFDLRTDALESRSLIRWLMDKLDPHDMVIRPGAGKELKITKDMVRLILGLPCAGGGREFTDWYGEVDAAAKLRRDLNVGKEEFDVIKLQDKIVLGNDDELSIRCFFSDSIQSTSFSFCFLGHYKQ

SEQ ID NO: 83733 - protein, 116 aa, Zea mays
  Coding DNA Sequence Number=SeqID_40358
MTKVDACRRWSKRVRAPRTFGSRRPPTVLITKIKNMEELTKEHEELKCSHVDLVQSFSPARKSFFELEFLGIDDIVYQELKEENERLRTSLTQLKGSALLNLLKITVMSDLRQEQP

SEQ ID NO: 83734 - protein, 200 aa, Zea mays
  Coding DNA Sequence Number=SeqID_40359
  Gene Ontology: Mol. function=hydrolase activity
  Homolog annotation: Hit_ID=A7R4A2; Match level="QueryCoverage=47%, HitCoverage=73%, E-value=7e-31, Identity=65%"; Hit description =Chromosome undetermined scaffold_639, whole genome shotgun sequence
MTVYLSMVVDLPAWAIKANGKIRRGFLWRGRVPKGGFLVAMLTEYLKLWDLLAKVELQQDVQDTHGDFHRLVNTQVMCTENVKEKRELLYALINGRKLSDLPKINQQTLIIWGEQDRVFPLELGLRLKRHLGDTSELIIVKNAGHAINREKPAELCRLIKHYIVDPSVKCRDDRKGSWKNAIKRFVGSSLRKVDSSRPLL

SEQ ID NO: 83735 - protein, 135 aa, Zea mays
  Coding DNA Sequence Number=SeqID_40360
MNALSREGCNHYEVFDRSDEDFGREIFKVEDPVVKDPAGALFDRMWGPHGREAMARAEDVEDLGGLNSAPPEAAEGRPVLPSDAGEGPSDVPVPAAAGEDPVSAPVPTVEGAQEVVAEPAVEGPTAADAPTQVAK

SEQ ID NO: 83736 - protein, 482 aa, Zea mays
  Coding DNA Sequence Number=SeqID_40361
MGAGRKYALARCPPLGGRKVRSPLFALDVRGRDPAAVVREAEDGAVRIVGRYVPKTEAQRSWDIRGSNDRLNRVFELNCLSYGGYPGEDVVDRRRKKTATVTEDDPAPEAAPATKKRKLGTVVGGQGVSDSFAMELMGTCAAPGGRMSSPELRESSARMLEDRQDAAQKRRAVIRLPDARHEAKRALGSAKAAIPGGSQPMLTAKPAAPGSSKVSKSTKAVGADGTKSAPDGAAKVWELPSPGKRVADFGTNISVDDYLVGSGEGQLVVVPPAVATTASTAVLGVKGGAFSAGGEILAATVVKDEAGTMSRRLREASQQLSQQLSQAADFADRVASGALTADVSAEVERLRAQHADAVREKSAMESKSCRLAEKVAALEGERTDLRRQLVEERREANQAIAKVQAAQAEAKLARAEGSLASQRAEEWEVRFNALHTRMERAEASTRSEVERTRKQLVDSYRELGARTADFEVPDREAGLRFL

SEQ ID NO: 83737 - protein, 94 aa, Zea mays
  Coding DNA Sequence Number=SeqID_40362
MAAVGALQRGVGGGSALQRGHGRRCYCAWRRARVRGARVSGGVNDPDVCGLWFQESLPLCMLVPGFKGKLSGIFLGLYQSEEKLHYPMHAEDWV

SEQ ID NO: 83738 - protein, 336 aa, Zea mays
  Coding DNA Sequence Number=SeqID_40363
MEVQCQTSFCQNEDGFPKLLRACTVRLGIRSQPEYDGREFIEHGTEKCVVTVYIGSSPHHAEWSVTTDGRRFKDTCQVVARKALRALCQIYEEEVADTPLRFFPPFQRDRPVWMARMRALEEQQLLEDDPTVVYLTAYLLTLDAQYDFLARHHRQMIARAEDAEKLNPLKQAKDEHVQKLMEAYLVTHNQRRALRIQEPASSNPVQPRRVEDPQILEGHPVSTRGEKKARELLEGTIVLEGIPVFPQAMDKQEHPESPQDPPPELFEPLTMKKIPAPSLEVKEEAASTLPAPSPSKELQEPVQLEEEFDRVLPSQSSPEEVINISSLLTHPGDVSD

SEQ ID NO: 83739 - protein, 271 aa, Zea mays
  Coding DNA Sequence Number=SeqID_40364
  Gene Ontology: Mol. function=hydrolase activity
  Homolog annotation: Hit_ID=Q10KC9; Match level="QueryCoverage=80%, HitCoverage=63%, E-value=4e-49, Identity=52%"; Hit description =Hydrolase, alpha/beta fold family protein, putative, expressed
  Subcellular localization annotation: CTP_CleavageSite=12; ConfidenceScore=5.16e-01
MPPLSPPASLTPAAGGRRRWKCRLSPTIARDRCYTRSFRSAGLRPAAIPLPDGAVVHLWLPPPAADPAKPLYPVLLLHGFGAQATWQWAPFLGPLLAAGLAPYVPDLVFFGASSSPAADRSPVYQAACVAAAMAALPGAPQRYAVVGVSYGGFVAYHLAHAFPAAVERLVLVAAGVCLEEADLAAGLFAVEDIAEAASLLLPQRPEDLRRLVGLTFCRPQRFMPSCFIRDYIRVWWFGAKGKNHGFDPQLLPVSIHCCIGGVVSSKRLWIG

SEQ ID NO: 83740 - protein, 126 aa, Zea mays
  Coding DNA Sequence Number=SeqID_40365
MVERTDERERFAVRHDRVELAPRATAPTPTASCSAACTRHAPRRLEKVARRRGPVVNTPGAELRWASRLLPRHQCCIALITVRKPPPEFALSFFAYYLKESRFGAPGGALVRSGETCRHGQGALPP

SEQ ID NO: 83741 - protein, 304 aa, Zea mays
  Coding DNA Sequence Number=SeqID_40366
MTVAGGRERRSHRRPDSRPIQGQQENPLSRREDRAPEKQATLRLRRNNRAKKGTGKGDTPKRILPCEGTGLRAPLLIRGSKAGPPRGSTVASDRVRRLAPEGFTVASDAERGMTRGSGAALANPAPAEPLTASTYQPENLGPDRAPGLRPGSDSGSAPEDGELRSARPRARTRAKPRKTANSAPPDPGLGLGLSPGRRRTPLRPTQGSDSGSALEDDELRFTRPQGSDSALASAERPPPRPTQELGLGLGHGRQTRPRLRRSLHVALPRAQARHVNRKRHHHPTPSRLGPQRTRPVTHLASSAR

SEQ ID NO: 83742 - protein, 294 aa, Zea mays
  Coding DNA Sequence Number=SeqID_40367
MVLRWATLLFLTSYLDEFSCLQNGISKLSIASRSDRNHQTLKNLSTLPQEFQASIEIDITYILREAQPRPLYLYVFSSVGRWTWRGVADTVQRSLTSIRCSFVPISHIGPLLQTKFVSKKRAIGIFAYTDIITMHATPPSTLSHTEARRIRKRVLDQRKLESAGRATWRLLRSRGRVCLPWPRPSPSSWVGRGGGRSAEARAESEPWGRVKRSSSSSRAEPESEPWVGRSGVRRLPGLSPSPSPGSGGAEFAVFRGLARVRALGRAERSSPSSGAEPESEPWVGRSGVRRLPGL

SEQ ID NO: 83743 - protein, 115 aa, Zea mays
  Coding DNA Sequence Number=SeqID_40368
MSATAHCRKPTVVRARFSPFPDDHPAPCLKSQCRQNPRQPWVESEPWGRVKRSSSSSGVEPESEPWVGRSGVRRLPGPSPSPSPGSGGAEFAVFRGLARVRALGRAERSSPSSGA

SEQ ID NO: 83744 - protein, 80 aa, Zea mays
  Coding DNA Sequence Number=SeqID_40369
  Gene Ontology: Mol. function=kinase activity; Cellular component =ornithine carbamoyltransferase complex; Biological process=amino acid metabolic process
  Homolog annotation: Hit_ID=Q6QP54; Match level="QueryCoverage=48%, HitCoverage=13%, E-value=4e-10, Identity=84%"; Hit description =Putative kinase
MALPVDVAGLRPRSGDVEAPSKPRSSLSSMAEAEPEPLGPPSQQNPPEGLPTLTTPLLPLPLSEHGWVKRSDQGHNLPGT

SEQ ID NO: 83745 - protein, 60 aa, Zea mays
  Coding DNA Sequence Number=SeqID_40370
MEDLSIEAKEAAVRIPHPPCGGLPPSTHPPHPLSSPSIASSSYYRKYKGLLLLLDQDSPG

SEQ ID NO: 83746 - protein, 76 aa, Zea mays
  Coding DNA Sequence Number=SeqID_40371
MPSMSLSGLRQAWSIRLVLLKKGIKEFRTLCTDCHSMEFRKQEMHWSLVWAYWEREVVALPFLQSGENKNLTGTSR

SEQ ID NO: 83747 - protein, 455 aa, Zea mays
  Coding DNA Sequence Number=SeqID_40372
  Gene Ontology: Mol. function=transferase activity, transferring glycosyl groups; Cellular component=integral to membrane; Biological process=metabolic process
  Homolog annotation: Hit_ID=A1XFE0; Match level="QueryCoverage=98%, HitCoverage=97%, E-value=1e-156, Identity=64%"; Hit description=UTP -glucose glucosyltransferase-like protein
  Pfam annotation: Domain name=UDPGT; Domain location=2-452; Score= -82.8; E_value=2e-06; Accession=PF00201.9; Description=UDP -glucoronosyl and UDP-glucosyl transferase
MGHLVPFTRLAVALSAGHGCDISLVTALPTVSSAESRHIAALYAAFPAIRQLDLRFAPFDASSEFPGADPFYLRYEALRRCAPSLLGPLLAGAGASALVVDMALASVAIPVARELHVPCFVFFTASATMLSFKAYFPTYLDDVGAGHGVGDVDVPGVYRIPSSSVPQALHDPDNIFTRQFVANGRALATADGLLVNAFHAMEPEAVEALQGRFVLSVLPPVFAVGPLMPVNDLRETGEAAQKQGNYRAWLDEQPPRPVVYVSFGSRKALPKDQIKELAAGLEACGHRFLWVVKGAVVDRDDAGELSELLGEAFLRRVQGRGLVTKSWVEQEEVLRHPAVALFVSHCGWNSVTEAVSSGVPVLAWPRFADQRVNASVVVRCGLGVWAEQWSWEGEEALVRAEEIAALVMEAMGDDAMAVKTANVREAASRAVVDGGTSYLCLAAFVHRCIAPREVI

SEQ ID NO: 83748 - protein, 47 aa, Zea mays
  Coding DNA Sequence Number=SeqID_40373
MRGELREPWLDLEGDDGAGEDMVEHLGCVAEGVELIRYHPFEHRHKN

SEQ ID NO: 83749 - protein, 246 aa, Zea mays
  Coding DNA Sequence Number=SeqID_40374
  Subcellular localization annotation: CTP_CleavageSite=33; ConfidenceScore=5.24e-01
MVPQWRTHRKHPIDAHRSPNLNPRVLRRARVTRNQMRGVPIDNGASQRADGGDVSSTTVLGASTRNYSEFCCTRGQRTERARFLPHGESPQCYAEYRPAARRAIKRDGDCLTRTTTFSHYYGCGCEGGERKMVRRTRGSWPRKWMRSGSGAATDLREDRALCHAWKFVDGDGGDSRGHLPVTERLSDSMRSRRLVCGPHETESGQERTCVRNDDEQSVVPECIDEDLPEQQPSEECPLTYYVLLTL

SEQ ID NO: 83750 - protein, 117 aa, Zea mays
  Coding DNA Sequence Number=SeqID_40375
MKMLVRKQRRAGGERWRLSGDERHWGDGYPVEEVARKLVAVFVGDEGFQGVPTAVVSRELESARALVVVSDETECDECAIHISSITTLQTKSGSDAQLDKVGEWSGLKPSEKPPTTP

SEQ ID NO: 83751 - protein, 166 aa, Zea mays
  Coding DNA Sequence Number=SeqID_40376
MAMNVVCCRCEGESSSCSHPLNSYPHPLSGGSLDAWEMNSTPVLFTLTGTRSCVTLVSLSSVKSKCHMIIHVTSHVSYASSFINICCYDEGLYKDELATLWFLQARSAIIHRTVRCDNGATATSRNGRLQKSGDQMNSEEQCAESELQITPIHPPRADFQMPNWVT

SEQ ID NO: 83752 - protein, 171 aa, Zea mays
  Coding DNA Sequence Number=SeqID_40377
MGRLLTVIPIVPRAIHGERRIPAFDDESRPPEGQFFPIRPRVFHWPAHEASGLIADPQTSVVDGDDADGVVGAELPVHEDGWLGCDTMNLDAPRVVNQRRAERGATTVRVHGAWRLTVKRPRTYTQAMRQSRKGSSARIESKGARGYAGVADRWGHGVGARSLRKTGPTGK

SEQ ID NO: 83753 - protein, 263 aa, Zea mays
  Coding DNA Sequence Number=SeqID_40378
MEETPASALTTFPMRAFPLSCGRFSAPLDTPHPLCTWCSYMRSIGADDTTEATALKALTTFYGFHPLEMMMHPLGLFPAEKRDDPMWLQITLDNWEDFIVDLSSELVEKDLQVEQMNQRILTLEQQVEIRDNTIDILEIQLHDVQEELTEANDHLEMHHQDMEANEAGSEAEEDLEEIEPASGPNAASSGVPPSPASSVASTNHGSPATSSSSHDFQELMAQQNEILRQLVQQDPLDADVWLRVVESKFPLLTGAALMPRRLA

SEQ ID NO: 83754 - protein, 74 aa, Zea mays
  Coding DNA Sequence Number=SeqID_40379
MESFLGARPKRRAGRDASLTKEPSFEGGDGEELQGARDPVKKKDVAAAMEAGKPGKTPWEGERAAGKSAGRERA

SEQ ID NO: 83755 - protein, 83 aa, Zea mays
  Coding DNA Sequence Number=SeqID_40380
MCHTLPKIIILIGTWRTTQENSCTTRVELDALGQVIREARERLPYPKGASREASLQSIGRFSGRTAAMAVQTRDSYASFFLKQ

SEQ ID NO: 83756 - protein, 893 aa, Zea mays
  Coding DNA Sequence Number=SeqID_40381
MNDLAAVELHPGHTVEFGVSRISSVRVQDMQQLGYFGNGVGRVPGAEEIPEPEGEIVKRKVGSAEDCQDFGRGCGVPCARNKWGNWYDYWFYVAGGEVEDLLGLLVAVMCSHCYVAFPPFQVAEDDSDEGALHCAARMSSGPDLVEEFIGYGVWPLAHGWALGKVCPRQMPSLGEKLVRSPAFALDLRGRDPAAFVREVEDGAVQIAGCYVPRMEALRSWDIHGSNVRLNRVFELNRLPYGGYLGEDAAVAVDRRGKRPVAVTEEGPSQEAAPAAKKRKIAFGGGMSSPELQESSARMLKVTRGRWPKNVLIPRAAGEDFFTSRMARGLKIFPYGQNIAAVVLAVMEKDRQDAAQKRWAVVRIGDPFREAKKARGAAKSAALGSSKPLPAAKPVGHGPSKASASAKAAASGAGKPPSRGPAKGRTDEAAARVAYFDTDICVGDYFVWSDVGQLAVVPPPVAATSPTAMVGAKGATRDLWATFCASGEIMSAATAKDVAGSMSQQLRQASQQLSQQLKHAADFADHVASEERREANKAIADAQAAQAEAKLAWAEGSLARQLAEELEARLDALRNCMDKAEASTRAEVERTHAYSHVLCLPRHLRGGRECFIPHFEVFDQSDENFEREIFKDEDLVLKQSTGALFNRMWGPHGRETVWERSDRAIEQMAHAKGVEDLGGLDGALPKAAGVDPEPPSDAGEGPSSTPTPTGASEDPAPAPAPTCEDASKAVVEPATKDPAAAEPSQVPTFGPAQATTTDNTDFAAETSIVVHVDDSVPGFMSECFESDGESGSSFPWTEESSDEGLDYFVALDVVVAETSPRVEGTMDLPGASTGCRRRRVVGKQSVGEFSRSGRRRRMGMERGRLRVDGVGKRELLSSPIGAGIGEGDLRELLR

SEQ ID NO: 83757 - protein, 73 aa, Zea mays
  Coding DNA Sequence Number=SeqID_40382
MDNESLEDDLAYFVALDFSVTESPSRVAPYGGRDFGQGCLREGDLRALFDGEELRLMLFNFHEADLIPKQEPM

SEQ ID NO: 83758 - protein, 150 aa, Zea mays
  Coding DNA Sequence Number=SeqID_40383
MNYLFWANMPEFGPSRYTNAAQLSLGADMWTQVVIPSSRLSRSLTSWGHLVNHSGLVPLQSPHTRPWTRSGGDKPPNTGALARSTELWAHRVSYFFSHLRNKPGSNTLQSNTWGLEHLAPAGALLGWKRAAAWLRHEEESAWDVRSYVDG

SEQ ID NO: 83759 - protein, 58 aa, Zea mays
  Coding DNA Sequence Number=SeqID_40384
MALVSCREAPPVHGDVLCGFAVENRRPGARDFFTRDREPTVLRGQLPPLPSNCGYFLT

SEQ ID NO: 83760 - protein, 231 aa, Zea mays
  Coding DNA Sequence Number=SeqID_40385
  Subcellular localization annotation: CTP_CleavageSite=61; ConfidenceScore=5.11e-01
MQEFGPSRYTNAAQLSLGADMWTQVVIPSSRLSRSLTSWGHLVNHSGLVPLQSPHTGPWTRSGGDKPPNTGALARSTELWAHRVSYFFSHLRNKPGSNVRTELAGRCTEPRLIRGTSPVGLRCSTIKLSPLPWIRIIGASFVTSLATSEQGGIGGELKPPPPIGDFAVDSTSARGNKRPLRVPAHVRRRSRQEDPPVACELLTGVWREWQIRTTAWPTLAPSLSAGENRLH

SEQ ID NO: 83761 - protein, 58 aa, Zea mays
  Coding DNA Sequence Number=SeqID_40386
  Subcellular localization annotation: CTP_CleavageSite=21; ConfidenceScore=5.01e-01
MALVSCRQAPPVHGDVFCGFAAQNRRPGARDFFTRDREPTVLRGQLPPLPSSCGYFLT

SEQ ID NO: 83762 - protein, 115 aa, Zea mays
  Coding DNA Sequence Number=SeqID_40387
MGIDWKHTYYHAWCFLDCFSLQMVQSPKGLIVAKLPSLDNASPNGLALHNGNMLCLHLELGLLDCSGWLLGQEYEVPADSASGTDFLLSDCSCDSAADAEGTASKTTAEAGADSA

SEQ ID NO: 83763 - protein, 161 aa, Zea mays
  Coding DNA Sequence Number=SeqID_40388
MVVAYDEVSVEVYESPTSSPPWEAHTGFGPRGRLTKLLPSHDKLCKYSFRFPVGSTCPVEQVPTFGAHRSCYEKQPAMAPSELVRRQPRPSTKQRRQRYWRRKKARPSQTTPPKRPSKMKLSAKDSAETIPSLKAPYTPAAPEAYRKHHHQASLHQRAKTQ

SEQ ID NO: 83764 - protein, 22 aa, Zea mays
  Coding DNA Sequence Number=SeqID_40389
MAVGVSEALYAKAVLWRTWLLE

SEQ ID NO: 83765 - protein, 220 aa, Zea mays
  Coding DNA Sequence Number=SeqID_40390
  Subcellular localization annotation: CTP_CleavageSite=38; ConfidenceScore=5.63e-01
MARARTYKAHPGIDHTLPRTPKPHRSSTHRRLPVRGVSAATRAPATVDRPAQPFPTLSNPRRRVKKNRKDCNLADGECILVPEQGAAQVVAPDPAPEPAPEDLPTTALEGKPRWLVDTDPWGCVVYEMKLEKGLTCGYLCQAFEHTKHMPRNMVNRRLPSSRDLRRGLPFQLWWVQVRSLHDGSRGSLEDMVAGVTWPSILPPGWTVEWDPTSAEEEHEE

SEQ ID NO: 83766 - protein, 178 aa, Zea mays
  Coding DNA Sequence Number=SeqID_40391
MARTKTTQRKATGPQGVPRHQLAPRHERSSSGSNEPIGDLEGACVIVAASLSCQQRLTVCSGRLCERDRAIDWAINSRSIAWDCEATARARVEELSVAMENLQAYSNTLHEEVHVIYDQLHPNVPPEVAAMGAGATGVAGGGPYGELDLFRAPPSMNIEDDRSPEASSGVGAAKDTDD

SEQ ID NO: 83767 - protein, 391 aa, Zea mays
  Coding DNA Sequence Number=SeqID_40392
MGVSGMLLFLEICATIEVLTIVRCMGGSRRVVPWPLQINHPLVTVFFTHSGFSSHSHFSTIKTTMVGGKGSKGKCGPKDGKRPTPPSEDFGNSEFSEEQFSYEGKESSPPVPLSSLSDCSDDSMGLLTVERAYVRSVERAGLEGLDDSEEEDSSKDSQEEDSEEEDSGEEGGGCHNPTKLSGPRTPILAIKASDRYVSGSDNLLVVPSFNELVHFQGPFTHSCKYYNKLTRTLSTFRPWGVPGPTSKLSLRVPAQMGRRDTEHKGGKNQQGETAAFVLSCAQGGCACSRGLQAFAWEREREPCASARSPARPTFSYESPGPSFYRRKERAQVYNGGCSNVLTCLAERSQSPEYISSWLSERFWRPIHVMSWPSEERLSPVEVQLSRLSDPC

SEQ ID NO: 83768 - protein, 35 aa, Zea mays
  Coding DNA Sequence Number=SeqID_40393
MADKELVRDHYVNGNMENHPGKRATTREEWDPLAN

SEQ ID NO: 83769 - protein, 120 aa, Zea mays
  Coding DNA Sequence Number=SeqID_40394
MAVRWGILALLFLETVAGFLKIVELDKGLVVLPCLPSLVEVKGCRIDLPANPFNRRVLRQQQQQAEMNPPNAPNPPLAGADPASAAQMRIMQQMVDTMEDMHAQMRHERQEMCQEREQMC

SEQ ID NO: 83770 - protein, 182 aa, Zea mays
  Coding DNA Sequence Number=SeqID_40395
  Gene Ontology: Mol. function=DNA-dependent ATPase activity; Cellular component=nucleus; Biological process=DNA replication initiation
  Homolog annotation: Hit_ID=Q5I285; Match level="QueryCoverage=34%, HitCoverage=7%, E-value=3e-20, Identity=77%"; Hit description =Minichromosome maintenance protein
MPLSEVRVDPYLLHTAFEWHNCDLDDDTLPASCPQLRRGRQEYVPLQLLPCLPLLGTALICYWCYSACTANEIGPTTQDLKLYLCKDYLRFEPYLWNACKRFVLEHRAGENRAPIISDDSPNKDINIAFYNILMLKKSKILFLGLSNLLDPNASFAQMWQKRIVSPIVSTFASSKVVQRRKR

SEQ ID NO: 83771 - protein, 217 aa, Zea mays
  Coding DNA Sequence Number=SeqID_40396
  Homolog annotation: Hit_ID=Q6QP51; Match level="QueryCoverage=22%, HitCoverage=22%, E-value=9e-10, Identity=67%"; Hit description =Putative growth-regulating factor 1
  Subcellular localization annotation: CTP_CleavageSite=4; ConfidenceScore=5.18e-01
MQAACNRTKGRTLSTPTRPAWGPRPTRHVTGAPVTTCGKLHRHLPVPRLLDCGTGAATRGNPAHGPIVPTERIDHGSVSRGKRRDGRYGQKWAGNNGGGRRAEAAVKSSAGSRTGKGDTPKGIHLREGSGPRALLLIRDSKAGPSKGFNSRLRALGLRAHYWSEVRRLAPRKGSTVASGPSGSAPTTGQRFEGWPLERVRQPPQATRAPHPLLIRGS

SEQ ID NO: 83772 - protein, 587 aa, Zea mays
  Coding DNA Sequence Number=SeqID_40397
  Subcellular localization annotation: CTP_CleavageSite=13; ConfidenceScore=5.00e-01
MSSSSSSAAATPPAAASSEETLSSLMVEELRAGDSVDFGVSRMTSARVQDMQRLGYFGGGVARAPGTEEVPEPEAYPPFEVAEEDADEGALRCAAGQSSGRDLVEEFVAYGVWSLAHGWALGEVCPRQMPFHGGRVVRSPAFALNLRNRDPAAFVHDAEDGAVQLVGRYVPRTEGQRSFDIRGSNDRLNRVFELNQLPYDGYPGQDEADRRGKKPVVETGDDPAPAAAPSSKKRKLGTAMGGLGVSDSFARELMRTCAAPGERMSSPELQESSARMLRVTGGCWPRNVPIPCAAYEDCFTSRMVADFANRTASGALTAAVSAEVERLRMQHADTVREKSASDSKCRKLADKVAALEREKADLRRQLAAERREANEAIAKEQAAQAEAKLARAEGNLAKELAEHLQERLTALESRAKGAEAAMRAEAERTRTQLMDTYRELGARTGDFEVPDREPGLRCLQWVQEKLQELPTVVGGGVYVVFDQADEDFERDVYKVEDPVVKESAGALYDRMWGPHGREVVRERAETARAQAARGERVDDFGALNSALPDPEPTPAEAVSGVALEPTPETAAIATAAPHLLRPAKTCP

SEQ ID NO: 83773 - protein, 140 aa, Zea mays
  Coding DNA Sequence Number=SeqID_40398
MLKECLVYTSMRLGVPFIAPRQLGAVESISRRQFLHSVTWRTRQSGADFFPSSAKPTVGALEPLAHRTLFGAPSDRWLLCRARIMRPTVGPTDCWLTGQSGKDGLAFVEAFLAQKTYFRKFGLWSLFRGYGFRINDPRFF

SEQ ID NO: 83774 - protein, 690 aa, Zea mays
  Coding DNA Sequence Number=SeqID_40399
  Homolog annotation: Hit_ID=A2WWB3; Match level="QueryCoverage=100%, HitCoverage=100%, E-value=4e-46, Identity=58%"; Hit description =Putative uncharacterized protein
MSASDLPDELWARVLELGAASSALGFRDLCSIAIASRRLGRLSVYPALWSKLLSRDFPSQSEPSTSSASTSQPPPQRLHPKSLYKTKFERHKVRMAEARRRAVFEAEARVLASRRRLVELEESIREEGERMKTAAQELDNLERPLQDPPAPQRRQQRWGAERLRRLLCDAHAKDLSRLGYCSTYRWLVDAGDMCEDCVAAAVPEKALLSSMGQCDLDERDLACACCSVALESGFYWLSLLLTMSARHGSDCGHKQEEKARRPNGRRRSETRWMKRGEASRSMRASVALNVWQPQVVRGRQKQLVQQCTVPVDSRLSDLNMELKSKEKHKLNDCEEALKRAKYHPLQDSHTSGTINEPQISLCNLGSSLWMDEPSVDFSAEGVSSRSGLCQSTCLNPGCKHDRACWEDDYVKAVISHGQDDLAVDEIGLALTEVMHAYDDDKWSSLYEDFDDGVGDEPILPLESDSTGDFVDIDSASPTFPSDDAMESSITNSFARNCSINGTPSLVSAMKGTRVKKGITTKLSVSWAPDVYDPPITSDSHTVKGHHTSSTKGNYKYKTSKSSSTTRRKKDKKHSRHSSSNGGGSKRDKKHSYRSSASSSRAITSGSQYCDAYSGGGINSRTVPESAKISPLVVAENVTPQEMVPVLKTLEPIKCTTSCGKEKPFALLSRQFSPARYKGMFTFWNQNQLAS

SEQ ID NO: 83775 - protein, 283 aa, Zea mays
  Coding DNA Sequence Number=SeqID_40400
  Gene Ontology: Mol. function=transferase activity, transferring glycosyl groups; Biological process=metabolic process
  Homolog annotation: Hit_ID=Q2R1N0; Match level="QueryCoverage=38%, HitCoverage=22%, E-value=3e-27, Identity=58%"; Hit description=UDP -glucoronosyl and UDP-glucosyl transferase family protein, expressed
  Subcellular localization annotation: CTP_CleavageSite=62; ConfidenceScore=5.50e-01
MVRETTFLLGISPSTCSTSSRRLVLATTSFATARDIAVSARCLFMPMNLHMLSLVVHLSELAASLPGEFRDLAEPVRLPGCVPILGPDIVSSLQDRFDPSYVVMLHLVVRCREAAEAILINSFDAIKPEAVEVLRHPAKSGGHQCTLSTQILQAEPNDGGSVDVDFLQREEAERRERGDGGKEVSWGRKKWGGGDLLAAAGWEIWWCLRLDRRTSTRQANWRGSARARDGGSARSQDLAGAADGIDDGAGQEIARRSRGAVPLSAREWGRTGGGTVDAHVTSL

SEQ ID NO: 83776 - protein, 90 aa, Zea mays
  Coding DNA Sequence Number=SeqID_40401
  Gene Ontology: Mol. function=binding
  Homolog annotation: Hit_ID=Q8RZK3; Match level="QueryCoverage=75%, HitCoverage=11%, E-value=8e-24, Identity=77%"; Hit description =Selenium-binding protein-like
IDIAESATKRLLELEPHNPENYVLLSNLYASNSQWDRVSYLRRKMKGKNVTAIAGRSSIEINGHLHEFVPFCMTSVKRKRKLRFVNTVKG

SEQ ID NO: 83777 - protein, 260 aa, Zea mays
  Coding DNA Sequence Number=SeqID_40402
MYRGAVMEAIPTPRQTNTLPTMITLGVEENAMITAPPKNSASTMLFSTAAKSSLMYRRAPDMTPADLKALARSRASSSHSLSYPIRNGQEGAPGAKGSHLANKKTKYGFNKRAKGQPKAPLVWRTGLSGAPPDSVREERPQELASFGNLQRLVHYNSPDMSDVHRTVRCDNGATYISAPMATCGALNARQRAQKSGTPILADRTLYSTCPVRHRTSRRAQKSELQRSEPNGFGDMAGALDCPVHHTTVSPTKRLVWWLGL

SEQ ID NO: 83778 - protein, 478 aa, Zea mays
  Coding DNA Sequence Number=SeqID_40403
  Gene Ontology: Mol. function=pyridoxal phosphate binding; Cellular component=chloroplast; Biological process=cysteine biosynthetic process from serine
  Homolog annotation: Hit_ID=A2WWB4; Match level="QueryCoverage=81%, HitCoverage=90%, E-value=1e-125, Identity=65%"; Hit description =Cysteine synthase
  Pfam annotation: Domain name=PALP; Domain location=107-394; Score =331.0; E_value=2.2e-96; Accession=PF00291.16; Description=Pyridoxal -phosphate dependent enzyme
  Subcellular localization annotation: CTP_CleavageSite=56; ConfidenceScore=5.70e-01
MAMAPPPACSLFPRVAAAAPSSVTSNSVLTSRGPGILPSPRLAFARRHLSAAWSSKAAASASVEIQDDYTDEMDAVNIAQDVTQVPRPPLCFLTFSAFPHVLYSDLLIWLIGKTPMVYLNRVADGCVANIAAKLEYMGPCRSVKDRIGLSMINDAEEKGLISPDKTILVEPTTGNTGVAIASVAAARGYKLIATMPSSLDVERRILLRAFGAEIVLTDPTKGLKGAFDKAEEIVLRTPNAYMFQQFNNEANNLLRNHLGKLQIHFQTTGPEIWEDTLGSVDILVASIGTGGTISGTGRYLKRMNKDIKVIGVEPAETSVISGDSPGYIPSILDVQLIDEVVKVSTAEAVDSARELALKEGLLVGISSGAAAIAAINVGKRPENAGKLIANEEEIASLVLLQARCQSPSLDLTGFHDMIDKREAVKTLFDCNFRVRSFEAAQSFYQIEGRACNCKIKGQAERSLSNKMQRLHSGRSGKL

SEQ ID NO: 83779 - protein, 216 aa, Zea mays
  Coding DNA Sequence Number=SeqID_40404
MSRMSWSSWRRTRTVTRAAGEGGRGDPAGQSWSGGRDRHRGRATAGRLGAARDREAEEPALVRLRASGKGGSAAAARDTVGGVVPGDLGVATRRGREEGEGAVPGGHAPRRRGRAGAGDAAPAPPGRRAATRAAGCLGKGGGGTGGGSKHLDCGGRGSGAVVQGDYDGDAGEDQRLSSVGRTGRKRARVGAPLRGGAGGAQDRQGRSQVGGGRRLA

SEQ ID NO: 83780 - protein, 70 aa, Zea mays
  Coding DNA Sequence Number=SeqID_40405
MNSINVIFFGTNILVLILAFFAVRIRRLVDTRNVEEELSAGKPHSSKRDTGLLESSGSVDKSKLSVKKDG

SEQ ID NO: 83781 - protein, 644 aa, Zea mays
  Coding DNA Sequence Number=SeqID_40406
  Homolog annotation: Hit_ID=A2ZWZ1; Match level="QueryCoverage=92%, HitCoverage=75%, E-value=1e-114, Identity=49%"; Hit description =Putative uncharacterized protein
  Pfam annotation: Domain name=WD40; Domain location=132-182; Score =4.4; E_value=9.2; Accession=PF00400.23; Description=WD domain, G -beta repeat
  Pfam annotation: Domain name=WD40; Domain location=200-245; Score =34.6; E_value=3.6e-07; Accession=PF00400.23; Description=WD domain, G-beta repeat
  Pfam module annotation: Pfam domain module=WD40::WD40; Domain location=132-182::200-245
MSIFPYSRTQLRLMDPVDWLDFVTGSWTEKNKASKDVRADRCCAADRLAKRGLDHPERVGGFIYDGNEVDLDASKDADFSMEPCSKSKKKSLKKTVKPRDEVVAVNGRNSTGNVKASLSSNEQNKSLPLITAKQYACRAAHLSSLVVSWSPVVSLSDRTSCLLRHWCILAVGSKSGNISFWKLYKPEYYTIDAGVVTSDPMLIGVLHAHESWVNAITWQVLSAGSSKSSLLLATGCSDGSVKIWLGNIEGLNQCAIGEEVPFVLVAEVAANLSAPVSSISLGIPARSQHELSKVSDRCYGLTLSPGEEIIAVVRSLDLNLLNQMYQVSPQSADLSSSNLMWWGSNILWSLKKYENVEKRLVLWDVVAALQELKKTAPAFLETLVHSWASALFAGDSQCVSITAQSSRSMHDMMPHVSSRKLHLLNIICRKVMLGNHARHGPGAGNNSNDGTTDFWSTLLVASETELRERLVGFTFAAVVKRTACLFNGTSTANCWFPVGVAQMDSWVSMNYEKVHGQLQSIRSKIKELGSRIDGYSDVESCPYCSSPVRFESPDVAICGERHTLSRCRTSMTLCSVAQPVWHCSCCGGTVDKLLPESFFTMPLDAVRDDKGSLDLSAASAPLCPFCGVLLQRSMPAFLLSTSPV

SEQ ID NO: 83782 - protein, 266 aa, Zea mays
  Coding DNA Sequence Number=SeqID_40407
  Gene Ontology: Mol. function=metal ion binding; Biological process =metal ion transport
  Homolog annotation: Hit_ID=A2XNE9; Match level="QueryCoverage=73%, HitCoverage=91%, E-value=1e-56, Identity=69%"; Hit description =Putative uncharacterized protein
  Pfam annotation: Domain name=HMA; Domain location=196-256; Score =47.5; E_value=4.6e-11; Accession=PF00403.17; Description=Heavy-metal- associated domain
MSGSDERASGQAGPPPLSHKTTTLVTLHRRYELGMEWWAYYVLPSIRTLLVSRGAMAPLLFRDMKGLSCSSQASTATCPSLERHPAPRPHKASAGASPLAPVPAAEPRTRTHRLDGKKGQQPQHKAAVVPANAGGGLVSPAGSSRYLLLSGRFAAVAEEIQEVLEPAPAVDAIAKREEASDAADAKTAQAQEQVVVVLKVSLHCKACAGKVKKHLSKMEGVTSFNIDFAAKKVTVVGDVTPLGVLSSVSKVKNAQLWAAPPAIAAA

SEQ ID NO: 83783 - protein, 216 aa, Zea mays
  Coding DNA Sequence Number=SeqID_40408
  Gene Ontology: Mol. function=actin binding; Cellular component =intracellular; Biological process=response to stress
  Homolog annotation: Hit_ID=Q41764; Match level="QueryCoverage=54%, HitCoverage=84%, E-value=3e-61, Identity=98%"; Hit description=Actin- depolymerizing factor 3
  Pfam annotation: Domain name=Cofilin_ADF; Domain location=37-158; Score=125.0; E_value=2.2e-34; Accession=PF00241.11; Description =Cofilintropomyosin-type actin-binding pr
MGTVGCAMQNKVCESNCLLNYGWCKQANARSGVAVNDECMLKFGELQSKRLHRFLTFKMDDKFKEIVVDQVGDRATSYEDFTNSLPENDCRYAIYDFDFVTAEDVQKSRIFYILWSPSSAKVKSKMLYASSNQKFKSGLNGIQVPWLPEDHEDPLLVSGSGSDPCLIARMPSQVLNRVEQPFSHLKRIIVSFDLICYPAPSANHMRQKVSNSQASV

SEQ ID NO: 83784 - protein, 257 aa, Zea mays
  Coding DNA Sequence Number=SeqID_40409
  Homolog annotation: Hit_ID=A2XNG1; Match level="QueryCoverage=93%, HitCoverage=83%, E-value=2e-63, Identity=60%"; Hit description =Putative uncharacterized protein
  Pfam annotation: Domain name=CRAL_TRIO; Domain location=41-198; Score= -30.7; E_value=0.026; Accession=PF00650.11; Description=CRALTRIO domain
MQLPFRTVTINEHILFNKLSMPLLFLSVTTTVSELSSKRDDEPDNNTEHSETNELASTSGTSDAADGTKEIVQENWLVLLFRELEKQGITLPERFPMQMMRSFVTVAQENYPNRLGVLFVVRLPPVVRVIAQTFLQVLKPSTKQKLRFEGDSYKKTLAEFLQAVPAFLGGKCSCPRCEKPRNSSVVQAGEGSKNQARLVSVDGGSPVVDFDFDEEEIPSPYSCENAIRAAIICLLMVCIFIAFLAGMNDPASVPPSA

SEQ ID NO: 83785 - protein, 46 aa, Zea mays
  Coding DNA Sequence Number=SeqID_40410
MASWDKDNKSFMFASKKVTDVVKASPKGEDYVVHAKGSQAPVGVYG

SEQ ID NO: 83786 - protein, 420 aa, Zea mays
  Coding DNA Sequence Number=SeqID_40411
  Gene Ontology: Mol. function=translation initiation factor activity; Biological process=RNA metabolic process
  Homolog annotation: Hit_ID=A2WVF9; Match level="QueryCoverage=40%, HitCoverage=41%, E-value=3e-11, Identity=30%"; Hit description =Putative uncharacterized protein
  Subcellular localization annotation: CTP_CleavageSite=40; ConfidenceScore=5.47e-01
MSTTWKIKVPFGSASGRILAARSRSVSQTPKFSTRFCAPRLDEKPAAYATPEAALTPPLLPIASPAPALVVGRKPASFATATTLVSSPIASPAAALVVCAADSIVDKAIGRMQEIADKIFSVARETIRPGRGLTSFDATKLRVALEDIACMLEQDSRVLQENLNNVNNVINPGDSSYEPSAFSSPPPADDYLTPDWDFAEHFENFWGLEYDSDQMPSFSDNEINNSNGHLKVGNTMLLQAMPGCTMFKIAPLENEDELKVMFGPIVCTNQTTLVPGVEDAISSSDDHVEATLGGGENSTPDPCSNATGKHKVRHDSPKPKKKKDTREEYMKRLVEAFESRSMTTNKSITSAETDPVRVEVNVQLQQVIDDGAPEGSDLHLFATHLLIEKKFRDVFATLKTKEGRNAWLRNAFEIHVKKST

SEQ ID NO: 83787 - protein, 40 aa, Zea mays
  Coding DNA Sequence Number=SeqID_40412
MAGRTAPASLPSFSLTPDSLAAPLSWISSWTLPRPTFVGD

SEQ ID NO: 83788 - protein, 593 aa, Zea mays
  Coding DNA Sequence Number=SeqID_40413
  Homolog annotation: Hit_ID=Q10BA1; Match level="QueryCoverage=40%, HitCoverage=29%, E-value=2e-31, Identity=34%"; Hit description =Expressed protein
MGGTSASGRRRWARRSCRTGGQAGGVVRRTIAAPTAPRVTEGFAHVDKQRRVHGALSDFRCNSGSTVHLSLDIEEFKHKGSHKSSVRCLPSSQRNVTEISHMQPVARGLQVDKSFSDKGLCHASRTVSGMPIRPKYYLSSPNNNLKSPPTVKSCSQMSDFSYRLVRSAKRSASPGMGLTSTNYSLYEKMSLLRQRRHGDNHQNQNRINALNRRHKIMNPRGAADLLSKDKVHEHLNSSLERHSQALLNNALIREKQLCCSDILNQKAPEQIWSSVSSESEKILCFSSGDSIDDLQGSYSSETSDSSNLSSLGAVAGDEWNTAFKKVYYPQTACMDSTSVMYTKEVGQASPISVLKPLSEDCSDSENIRREPADPYDLQLRLELGTFAPTETAAEASSIGRTSDCLSSEVQPSDDKPIQLVEDILEELEDDEEREFSYLLDILIASGIHGTVEDQMYKVCQSTEYPASDDVFEKVEKKYTKVVQWSRSDRKLLFDMVNTILSQILAPCLNMRPWVNTTRNLAPLWGAEGLLEKVLQVLTQRREQLAPSETKPEKKGLDPKWPDLADWIDRAGRDIERMIKDDMLEELALELLFS

SEQ ID NO: 83789 - protein, 259 aa, Zea mays
  Coding DNA Sequence Number=SeqID_40414
  Homolog annotation: Hit_ID=Q6QP51; Match level="QueryCoverage=48%, HitCoverage=56%, E-value=4e-55, Identity=84%"; Hit description =Putative growth-regulating factor 1
  Subcellular localization annotation: CTP_CleavageSite=48; ConfidenceScore=5.10e-01
LAPRKGSTAAPEHSGSKPITDQGFEGWPHGRVRQPPQSTRAPRPLLVRGSKASPSEGFDGRPRARRVRNDSGYVRYMAEARAMLPSRQGRSDRSHFALSLTDLTGKQRRSPHSDCCATHQGETDNSQVQPRAQQEAPPRPTLGLSLGRRSPPRPILGLSLGRRTPPRPTPGLGLSLGLGRNRVLAQPRPRPQDKSLPRPTLGSDRPHHGGYIITLPLASSSYEGTKPASHLARPGNRHFSDDHVIAYTGLKHFSDSHVG

SEQ ID NO: 83790 - protein, 192 aa, Zea mays
  Coding DNA Sequence Number=SeqID_40415
  Gene Ontology: Mol. function=nucleotide binding; Cellular component =plasma membrane; Biological process=small GTPase mediated signal transduction
  Homolog annotation: Hit_ID=A2Y5G7; Match level="QueryCoverage=92%, HitCoverage=93%, E-value=1e-70, Identity=75%"; Hit description =Putative uncharacterized protein
  Pfam annotation: Domain name=Arf; Domain location=1-155; Score=-91.7; E_value=0.014; Accession=PF00025.12; Description=ADP-ribosylation factor family
  Pfam annotation: Domain name=MMR_HSR1; Domain location=16-109; Score=- 10.8; E_value=0.01; Accession=PF01926.14; Description=GTPase of unknown function
  Pfam annotation: Domain name=Miro; Domain location=17-109; Score =37.2; E_value=6.1e-08; Accession=PF08477.4; Description=Miro-like protein
  Pfam annotation: Domain name=Ras; Domain location=17-157; Score =266.8; E_value=4.5e-77; Accession=PF00071.13; Description=Ras family
  Pfam module annotation: Pfam domain module=Arf::MMR_HSR1::Miro::Ras; Domain location=1-155::16-109::17-109::17-157
MAAPPARARADYDYLIKLLLIGDSGVGKSCLLLRFSDGSFTTSFITTIGIDFKIRTVELDGKRIKLQIWDTAGQERFRTITTDIRNWIRNIEQHASDNVNKILVGNKADMDESKRAVPTSKGQALADEYGIKFFETSAKTNLNVEQVFFSIARDIKQRLSETDSKPEDRTIKIKAEGEADAAEAQKSACCGS

SEQ ID NO: 83791 - protein, 210 aa, Zea mays
  Coding DNA Sequence Number=SeqID_40416
  Gene Ontology: Mol. function=aspartic-type endopeptidase activity; Cellular component=lysosome; Biological process=sphingolipid metabolic process
  Homolog annotation: Hit_ID=P42211; Match level="QueryCoverage=34%, HitCoverage=14%, E-value=7e-33, Identity=90%"; Hit description =Aspartic proteinase precursor
MGHHHISRSYFRQTDIKRSGNASIDIMSKFFKLMVVLQLMNDLNEVFKMPLSLVLRLIVCLRFFDLSIIPLRYWNKRIIASLRANQFCERLPSPNGESTVDCHQISKMPNLAFTIANKTFTLTPEQYIVKLEQAGQTICINGFMAFDVPPPRGPLCYAKHICTTLKCAMRASTEGITVPPLAPSTPAPVCIRPLRLPAMAASLPHVYDDN

SEQ ID NO: 83792 - protein, 221 aa, Zea mays
  Coding DNA Sequence Number=SeqID_40417
  Subcellular localization annotation: CTP_CleavageSite=36; ConfidenceScore=5.34e-01
MAALNPMVELAQPIASIAGFVIDSSQVRVQRGGLSRSAARSSRRSTQDPAEVEQLREELRRHQDYLKQQVAQHEYYATQIQQQQTLIQTPPATLPTHEREDRLDFVETLFASGDVEWDESLVGVGPKTPLGKPAAKAVTETGSARSAAAAAAVPLVRSSDTLAARLSFAAGDTPCSPMMDSSTASQRSLLSIATPPATGTDESLEKATWMERIGAEQQREY

SEQ ID NO: 83793 - protein, 85 aa, Zea mays
  Coding DNA Sequence Number=SeqID_40418
  Gene Ontology: Mol. function=chalcone isomerase activity; Biological process=flavonoid biosynthetic process
  Homolog annotation: Hit_ID=Q08704; Match level="QueryCoverage=92%, HitCoverage=34%, E-value=5e-22, Identity=72%"; Hit description =Chalcone--flavonone isomerase
YSRCCSAPIRSIQVAFSRDSSVPVAGGVAIDNKLLCEAVLESIIGEHGVSPAAKLSLAARVSELLTKGTAAAAAALRAEPVSVTA

SEQ ID NO: 83794 - protein, 431 aa, Zea mays
  Coding DNA Sequence Number=SeqID_40419
  Subcellular localization annotation: CTP_CleavageSite=32; ConfidenceScore=5.54e-01
MPSHSPHASCPSTFRAPGWGALALPSSCCCWRSTTSRGLAPFSHHSASRIFIMQSGCSPPSTVTQDDDRRPRGGEKQAGLRPPPRPQLQGSSSSGQGRRAGRVGAYLRVGRRPACSSSIRGRGASSSCAEEASSSHAGESELLLPGQGAAVRPPPGRRSCRAQVDAVTCLAEGANFDNAGTVRHASDPSRATDCTGGSSKTSYAARAAFVFLDCLVLTPARRLRAEAGAGPSARTLVGICRCRLRRPPFIGVASARRWPLSSLLRWWQPEEVVSADETVGATYGRTSDSLASMASPRPSRGDVGEGPFTTAFALRSSLLLFNRPKQRSLSLLNLWTLCDELEPEAAVSAWTEAESARKEASSALEQVASQAEEVQQRRLELGQVVRERDQSRSHVAEAESRLRSSGNSWLRLRSGQPRCPLGPGPRRRPWL

SEQ ID NO: 83795 - protein, 77 aa, Zea mays
  Coding DNA Sequence Number=SeqID_40420
MAGVNDLTRAKKGMGRWRLAGEPRHNDAVPVLGVSHPVLEDAKPTQAADSGFATKKELEHVIFLELLEVIHVASITS

SEQ ID NO: 83796 - protein, 52 aa, Zea mays
  Coding DNA Sequence Number=SeqID_40421
MTGSCKSTFNDTTRLSNALLSSKMYVSATSTIIVPVLMTKGTVKYWREKKIF

SEQ ID NO: 83797 - protein, 105 aa, Zea mays
  Coding DNA Sequence Number=SeqID_40422
MVTGMGLGAVPPDALLLAHAHATERPSGQRTLSGKAAALKEPVVAVEEPATTAGKLTWASNPSLVVCATINIPFNHGGVCEGGSMCDASYRGIEPLVSSWALVDE

SEQ ID NO: 83798 - protein, 147 aa, Zea mays
  Coding DNA Sequence Number=SeqID_40423
  Gene Ontology: Mol. function=shikimate kinase activity; Cellular component=nucleus; Biological process=transcription from RNA polymerase II promoter
  Homolog annotation: Hit_ID=A2YKI9; Match level="QueryCoverage=66%, HitCoverage=49%, E-value=1e-47, Identity=91%"; Hit description =Putative uncharacterized protein
MRFGHRNILDHLEVAKVCDELEDMMEEGGILVDYHGCDFFPERWFDLVVVLQTDNSILHDRLTGRGYMGSKLANNIECEIFQVLLEEARESYREDIVMPLRSDNVEDISRNGRVHGTGTVKRHGHLIKLCLALSTPLLSIRTPPSQI

SEQ ID NO: 83799 - protein, 137 aa, Zea mays
  Coding DNA Sequence Number=SeqID_40424
  Gene Ontology: Mol. function=shikimate kinase activity
  Homolog annotation: Hit_ID=A2YKI9; Match level="QueryCoverage=41%, HitCoverage=28%, E-value=2e-16, Identity=70%"; Hit description =Putative uncharacterized protein
MAVGSGGGSRRARPNVLVTGTPGTGKTTTCSLLADAAGLRHVNIGDLVREKSLHDGWDADLECHVINEDLVGLPLFLLLDAVKETGPRGSSVDHYITEIGSVSVVYCFAYIEDCKETNQGLSVMRTITCLFLDYLLK

SEQ ID NO: 83800 - protein, 212 aa, Zea mays
  Coding DNA Sequence Number=SeqID_40425
MKAESVVVKKKKKKRLRRSSDLELVTAPVVLNPDDSTMIADLEDVVEGYNGVRTERYMMEGDDEKGEETLPLVHRERRRKAGGDKSGLASVGIINIRGLIMSVDDSVLEDSIPEDLLLELPEIRVVDVRIECPDDVPSVGLLVRPETDDVAVMSSDMLIGPASLATLEVNGHGDEDPMDVPSVEGPMGAFGVEIPMGVALSLDYPLSSSSDA

SEQ ID NO: 83801 - protein, 81 aa, Zea mays
  Coding DNA Sequence Number=SeqID_40426
MELADDDGAATKQTRLDDGVSAARERRHTAGRMAGVNRTRKQLAERSREGTEEARMASSAVTGELQGQKRRGHGWDAESRE

SEQ ID NO: 83802 - protein, 83 aa, Zea mays
  Coding DNA Sequence Number=SeqID_40427
MTNDDNPQRREQEGFTEAGSEWVDAAGNNDRQRYTKGAGTTRKQLAERSREGAEEARTASSAITSELQGQGRHGHGWDAERRE

SEQ ID NO: 83803 - protein, 157 aa, Zea mays
  Coding DNA Sequence Number=SeqID_40428
MAGNKGGKGKRVQGEGKPKRPPTPPSEDFGDSEFLKEHFSSEGDDSPLPAPLSSSSDYSDDSMGLLVAERVYIRFVERVGLEGSDDSKEEDSEGGDYEDSEEEDGGGGDRRGYEGDSSGNGGSGGAGGGDDSGYNDGDESSGGKGDDGCVGGKAPPT

SEQ ID NO: 83804 - protein, 203 aa, Zea mays
  Coding DNA Sequence Number=SeqID_40429
MAPSYASAMFHAQALQEDGRSTHALRLCTFFSNPGLPIKRPSFGFNKGAKGQPKAPLVWRTGLSGVPPDSAQYLSGAPGDSDSNSSPSGIPGGTRLKFTGLSGVHRTVSGAPKEVGLRNSPASGKANGSSAINHRTVRCSPDCPVQLRDNGRLRANGSLPRIQCAVCARRSQNRPCWHTGHQTVPVRCAPDTQAGPHVRSSNG

SEQ ID NO: 83805 - protein, 89 aa, Zea mays
  Coding DNA Sequence Number=SeqID_40430
MAWVHCSHHISPRHGPSYNDRVVYGLDWDMARGKGITTHFIGQRSVQVGARRAHPVGFARQVSSESGHEYTRVGSVRSLSETESDYDEG

SEQ ID NO: 83806 - protein, 162 aa, Zea mays
  Coding DNA Sequence Number=SeqID_40431
MGSGKRGKGWPCRADGKRKRPPSPPSEDFGDPEYSEEASSEYDRSPAPASPRSIKRAGLGGSNDSEETSSEEVEDSFDFKERSGDEGDGGEDDSSSGDDDGNGDGDGDDEDGETDGDDKGDGDGSGKGDSKGDSGDGSGDGNGKGDDSGKGDGKAGGIMLLV

SEQ ID NO: 83807 - protein, 335 aa, Zea mays
  Coding DNA Sequence Number=SeqID_40432
  Gene Ontology: Mol. function=methyltransferase activity; Cellular component=actin filament; Biological process=actin cytoskeleton organization and biogenesis
  Homolog annotation: Hit_ID=Q7EYV5; Match level="QueryCoverage=95%, HitCoverage=94%, E-value=1e-118, Identity=67%"; Hit description =Putative uncharacterized protein OSJNBa0077F02.121
MEVEEAGGEVENAGKDEAEAEYHSRDFEWEDLKEEVESGPVFSYHLSPFLDPAASTTSPPQPSSEAWRSFHRRHASGKFFKERRYLLKEFPELCSSKDHAKVLEVGCGNGSTAVSILRIFLMMTIIVYGFFRSSERITVFACDCSKDTLEKAYEIISNTKGINIKDRFHPFLMDVSKETFPDWLFCKACQTSLGKAAASLLDPSHHGIREEHPVFLGENQCCAGGMDFITMIFTLSAIPFDIMPTTIEQCVSVLKPGGLLLFRDYGLYDMTMLRFLPHQRVGFREYMRSDGTFSYFFSLDTVRELFRAAGLVELELEYCCVKSVNRKNGKTMRRV

SEQ ID NO: 83808 - protein, 130 aa, Zea mays
  Coding DNA Sequence Number=SeqID_40433
MEPSMWPCRQRRFTLKGAHGPGCLTRLLKEWVGDRHWRVGTGVEAGVDGRWASNAASIWGEDGSQPAPHVGTTLKEWVVLGVIERVSAAATSPDPFPIEQVDGEVDGEGTSPGLEKKAQRKRACVERPSS

SEQ ID NO: 83809 - protein, 98 aa, Zea mays
  Coding DNA Sequence Number=SeqID_40434
MEAPPSARNRCITSSDSSPFYSFASVVDEKKATKGAVGGLHLPKALKNTTNMFSKYNTFTGTFGLGMKLYTILKAWSGRRMSQFRSYAWRSFGLAVEN

SEQ ID NO: 83810 - protein, 303 aa, Zea mays
  Coding DNA Sequence Number=SeqID_40435
MAKLNSTSAVNLFDHTPAELASGQLSWVCQSDWQTGRQELSGAVQPVLVNFDQSARQSASQTGRQAARPARGELWYYIEFFVDSLLLELLAPRRLGVSCFNLPIQPPSRQLSKAFSNVCAFIATRDIVQEHIAYRVWHLWIAGKCRRRLPLNPVKLSLEERKKEENCRFGRHRCTEGQDNEGFDTPASVVVPELGEGTSSTAEVEQAAPAARSAEGSTVVPKVPTVGPTEAKDDSAEEPKVEKTVKMLEILSPPAGVGLSKVQKAPTATPKRRRMASVLDTVMETTMALSHAPTKKIVEAVKV

SEQ ID NO: 83811 - protein, 190 aa, Zea mays
  Coding DNA Sequence Number=SeqID_40436
MASHGSSDDGNALSHTDGLAREGFPRILWEVLQGAGYTTPPQYALQQFKKHRVPRCRLSTHPIGLFPAEREHAKDIWAIYPGQTAHLTVRCMNALYRLQVMRGEAMSHLMALLEATKITLDNREELVVDLSTEMVEKDLQVEQLSNDIQELEELVGTRENTIEVLEDQLINTQQQLAEANEHLDMNHQEI

SEQ ID NO: 83812 - protein, 50 aa, Zea mays
  Coding DNA Sequence Number=SeqID_40437
MSSLQASPDQKKGAYGLCARDWLPRTSEFLVGVRTSVQQPYSIRLRLLLT

SEQ ID NO: 83813 - protein, 138 aa, Zea mays
  Coding DNA Sequence Number=SeqID_40438
MYKIVQSLVHLARTIELQSVTPSYSKKHLKGQPQVRGGEWNRPPSPTTNQLFLGKNLFSGKLVDEGTDAVTLSDILKLENEIRRSLCHEMRSRRWEKLQINESSGKEGIPADVIDAKLKSKPSRRRDSVERILSSDEI

SEQ ID NO: 83814 - protein, 93 aa, Zea mays
  Coding DNA Sequence Number=SeqID_40439
MASPGLQTPRDIGDCLLGQPTTFCLSLILQAIYDTPSIVGGTHGAPSMLHANDDTRTIFGVEKSMIGIMASLRKGHSVAPNFKVSNVDKYEPK

SEQ ID NO: 83815 - protein, 133 aa, Zea mays
  Coding DNA Sequence Number=SeqID_40440
  Subcellular localization annotation: CTP_CleavageSite=70; ConfidenceScore=5.24e-01
MARAHAYITPSDLDRTPPHALNLTGAQTHRRLPVHGVSAATRAPATVDRPAQPFPTLSDPRRRKPIITVRCQQKQPLGQNSPLIKRYCNLADGEYVLVPEQGAAQEVAPDPAPEPAPEDLPATALEGKPRFYA

SEQ ID NO: 83816 - protein, 42 aa, Zea mays
  Coding DNA Sequence Number=SeqID_40441
MASSGGLAGDEEDSIEELVTEDPGAQQIEVAEQELIEGKLRP

SEQ ID NO: 83817 - protein, 94 aa, Zea mays
  Coding DNA Sequence Number=SeqID_40442
MRRYKDINIRLAKGTRMPDKQSDQEQGNTIVNYYGPSSSEALSPHEYNAYQTKKVKTRESDTIQREQYGATVHLFYRHGTQPEYKYIYALDIHL

SEQ ID NO: 83818 - protein, 102 aa, Zea mays
  Coding DNA Sequence Number=SeqID_40443
  Subcellular localization annotation: CTP_CleavageSite=38; ConfidenceScore=5.28e-01
MAHARAYITPSDLDRTPPHALNLTRAQTHRRLPVHGVSAATRAPAAVDRPAQPFPTLSDPRRRYVLVPEQGAAQEVVLDPAPEPAPEDLPATALEGKPRFYA

SEQ ID NO: 83819 - protein, 94 aa, Zea mays
  Coding DNA Sequence Number=SeqID_40444
MASSGGLAGDGEDSCEQLIDSLMTRIERGAVCVWVGVIRWSGIRQGWGQTEYSPLIGIRVARNRSKLEEPLTEDPGAQQIEVAEQELTEGKLCP

SEQ ID NO: 83820 - protein, 179 aa, Zea mays
  Coding DNA Sequence Number=SeqID_40445
MQNAARRALSQYCSLFSGVADGLDLKYYPRRSTGSAGGVIVSLVGEGNPRLNNMVNLVVVLNTELDHALDELGKVRAEVAELRAQCATRHYLDGGSPALSGFSTLTIHRPVVASTMMSENRRRGARRAQPEQQAPQEEVAPQQHLPPTPPMTIEQMFLMQTQAVQAIGQTLAAMQQAQQ

SEQ ID NO: 83821 - protein, 141 aa, Zea mays
  Coding DNA Sequence Number=SeqID_40446
  Subcellular localization annotation: CTP_CleavageSite=37; ConfidenceScore=5.30e-01
MSGAPEDSNSNSSPSGNSRGVSAIIHRTVRCTPDSVRCSKEERPQELASLGNSLRLLRYNSPDMSGTPMLAHRTLYSTCPVCHRTSRRAQKTELQRSEPNGLGDVAGAPDMSGVHRTVRNFVFQVIEKRKLTRSEGPFERG

SEQ ID NO: 83822 - protein, 41 aa, Zea mays
  Coding DNA Sequence Number=SeqID_40447
  Homolog annotation: Hit_ID=Q7XBD4; Match level="QueryCoverage=95%, HitCoverage=3%, E-value=2e-07, Identity=74%"; Hit description =Cinful1 polyprotein
MDNIGYLKLELGLSAMSKDQLADSLAYNILKGLILSKALKA

SEQ ID NO: 83823 - protein, 114 aa, Zea mays
  Coding DNA Sequence Number=SeqID_40448
MASGRGASGSAVSDWIRVKAIVPSPKYGWENGTHHSVDTNTLEILEISVLWFFFNLLWWQDCYLIFFSEVEEEKLESELDAGEGSSEAQNICNLVFDKSSNICLGGYDKVSFDF

SEQ ID NO: 83824 - protein, 156 aa, Zea mays
  Coding DNA Sequence Number=SeqID_40449
  Gene Ontology: Mol. function=nucleic acid binding
  Homolog annotation: Hit_ID=Q5NKQ1; Match level="QueryCoverage=69%, HitCoverage=12%, E-value=2e-39, Identity=67%"; Hit description =Putative uncharacterized protein 9C20.4a
MDDGREEEAGDDNSASLHRAAPDTCSGLPAAPTSRIISPNCGASPRINIVTPPAELRAPGVNDGNTTVIETMVAANQMVPMRTISDHEQDTPNILRSHPESIDPTMVPRIGMTFGNVDEAYNFYSRYAYEVGFPLKKYRERKNCKWLNCSMEEYRK

SEQ ID NO: 83825 - protein, 51 aa, Zea mays
  Coding DNA Sequence Number=SeqID_40450
MAAVGALQRGAWGGGRAHGGGHACEGHGLFQASRVSFPVSSWVRHFSLEMG

SEQ ID NO: 83826 - protein, 642 aa, Zea mays
  Coding DNA Sequence Number=SeqID_40451
  Gene Ontology: Mol. function=cysteine-type peptidase activity; Biological process=proteolysis
  Homolog annotation: Hit_ID=Q5NKP7; Match level="QueryCoverage=99%, HitCoverage=84%, E-value=0.0, Identity=52%"; Hit description =Putative uncharacterized protein 9C20.3c
ILDMRLDALGSRSHLAWLMEKLDHNDMTIRAGPGKELKITKDTVHLILGLPNAGGGTALGIDEAVAANNLRAELGLSKEDFGVTTLQDRLRKGSDDDLSIRCFFLILFNRLLFPTASWGITNHEVLLTEEMDRFHQMDWFQLIFNDLCQAAKKWHTRSVTNVSTTIYGCSIVILLYYLDHLHDSAAPQNKRGTPRIKYFDRNIIQALTRADKDKIRKGEEAFGHCSHKTRTNTFDVPRPNPSGHHSIHIELPLIRDLISSKLNQLPSRHRLGFIEKLSHFDAEVGKACSVIKQTLQQIIEKQYNLSDVFGELIDEVLRAEAGDNEDAYDVQKTTSKSDDILPQTAESFPDEADIDPLVHTNITKQNKTPTTSVGKHGDGGKNMPTNTNVTPKATPHMDPDAPIFDATPQIKCFIQCVIDDAKNQQTSMSSNSLILDVNVGSLLNFEEQERHSRNPQPFDESVLHTLLDNSLPETDELDQCKAIMVPMVSRGHWTLYVVNKVKKCIHILDSNPYGPTLGGTTWKDYHFAHLGSGGRKLPWAKVIMSRLNNAIQHVRPRTCFPKFGNFTIDLCPDCPNMAAGSNDYGFYVMGFILFYQCDEGSLRSDIEAGNTSEILSLALHYITFHPKNKALSLLQDIQRFKV

SEQ ID NO: 83827 - protein, 432 aa, Zea mays
  Coding DNA Sequence Number=SeqID_40452
  Homolog annotation: Hit_ID=Q6JAD6; Match level="QueryCoverage=48%, HitCoverage=41%, E-value=2e-43, Identity=43%"; Hit description =Putative uncharacterized protein
MVCMKNVLAPGGGDDEDPPRPFRQSRGRCLLGAMSVQIALREHRLLDLTAFLLAVGADSEIDPDHQSMRFRFEREDVTIHASQIRQLLDSPSHRLTFTACVMVLLILLGALTAELLQLQLTSRPCSDHLSQMGRDALRQISLQCPKFDVVDFLICEIEDTVIQPPQFQGTLEASRLHFGSYRPAPEDLVPVPDPVIDTQAKDATYHQFETQGTAVPDDDDDFGIPPLPPVPPRSHDHGARSSHAAPAAPPAIDPALATILQTLTQQHDTLQQQLLADKAENRLHDSHTSAYRCLEPSCSVCTPPALQATIMPAIQPGPPLPLFGPSSSPFRPVTLVFSSPVISSVSAQPPVPPAPTVTTAAVAVAVTSSALAAPATQPPSESVLAPASTADPGSELTLTLNWCLLFYHDRDRMRLRLLLPLLVYMFGFPFGV

SEQ ID NO: 83828 - protein, 521 aa, Zea mays
  Coding DNA Sequence Number=SeqID_40453
  Homolog annotation: Hit_ID=Q6JAD6; Match level="QueryCoverage=72%, HitCoverage=63%, E-value=1e-116, Identity=55%"; Hit description =Putative uncharacterized protein
MEKCKPIKTPMPTNGHLDLDEGEFVDSPLGLAPSLPLHPPLLPPHLPLRPLQSLLSHPPPITSTTPASTAPPPAPFSEPPIPRARFRERDEIETHVSPDSSASAPAIGSPYFPVSIRCRLLTLLTTSDRYVEEWVRVFYASVWIDPGHFWMRFRFEREDVTIHASQIRQLFGFTESSHLHSLCYGTSDHPRHPHDGVAPATAHVAALFRPPFTDGSRRSPADCTPAAKYLYQLMRRTLLPRMGYREATTHIQLCLLGALISHSEFDVVDFLICEIEDTVLDGLHARRQMLYAHYLCYISAQLIQPPQFQGTLEASRLHFGSYRPAPEDPMLGTTVPDDDDDDDDDDDFGIPPPPPVPPYSHDHEARSSRAAPPTVDPALAAAIQQQMFERMVSLFQTIQDRAKHWAFMTHILQHTGKTPTSPSSSLIRPVTLNFSSSVISSVNAQPPVPPALAITTAAVAVSVTSSAPTAPAVQPQSESVPAPASMADPRSETDSDPQLAFALLPRPRPDAPPPPPSSSGL

SEQ ID NO: 83829 - protein, 121 aa, Zea mays
  Coding DNA Sequence Number=SeqID_40454
MVGAEKEAGGGAVDAGVVEVVGMAEVVDGAGVTGAGEVGGGVVAVAGVEGAEERDREASRRTLFIRKATKSRSRGAFRFTLRESQLLEKAASWIQPFGWLLAFREAKAKAKSQTKHTLGLL

SEQ ID NO: 83830 - protein, 258 aa, Zea mays
  Coding DNA Sequence Number=SeqID_40455
  Gene Ontology: Mol. function=transporter activity; Cellular component= integral to membrane; Biological process=transport
  Homolog annotation: Hit_ID=Q19KC1; Match level="QueryCoverage=45%, HitCoverage=37%, E-value=5e-28, Identity=59%"; Hit description =Aquaporin NIP2-1
  Pfam annotation: Domain name=MIP; Domain location=96-258; Score= -81.5; E_value=0.00018; Accession=PF00230.11; Description=Major intrinsic protein
MEMEFVSGGITELCPGTWLCTDTPFISFRHSCCFNVSCLSLPCRDLALTNSMQDPINCFMKTSMPLFNKLAHSIETPSNPFAPATSSVLFFIDKVSQSSPSSIQVSEVVSEVVSTFLLVFVMCGAAGIYGSDKDRISQLGQSVAGGLIVTVMIYAVGHISGAHMNPAVTLAFAVFRHFPWIQVRDNESRIWPSWPSSERGQWRQQWGTGEERGRWRQQWGTGGGGSKWGGEMKEGREKGMVASHEGSKVKEAGRRMAA

SEQ ID NO: 83831 - protein, 258 aa, Zea mays
  Coding DNA Sequence Number=SeqID_40456
  Gene Ontology: Mol. function=structural constituent of ribosome; Cellular component=ribonucleoprotein complex; Biological process =translation
  Homolog annotation: Hit_ID=O22453; Match level="QueryCoverage=21%, HitCoverage=20%, E-value=3e-24, Identity=98%"; Hit description =Ribsomal protein S4
  Pfam annotation: Domain name=Ribosomal_S4e; Domain location=150-231; Score=70.8; E_value=4.4e-18; Accession=PF00900.11; Description =Ribosomal family S4e
MGESAPEITMLLDSRQIEEPYQRFIFVIYEVTISVLLFCTPNESLYEQKPEETALVLPSSVIASTTARSKPHTSRFEYVENAPAPKTGSSLEGNLMSGHVAPLKSSNFFVEFGMDSGYHKKYTSSSSKVQVVLWLLMNKPSCCQNILFLCTGLRLVVLVDYGGTMPQLQENLCGLLYLARQFKLCKVRSVQFGQKGIPYLNTYDGRTIRYPDPLIKANDTIKIDLETNKIMDFIKLYLPFHGLHQVIYLVRLNVSTNS

SEQ ID NO: 83832 - protein, 139 aa, Zea mays
  Coding DNA Sequence Number=SeqID_40457
  Subcellular localization annotation: CTP_CleavageSite=35; ConfidenceScore=5.07e-01
MRRSVACAPTAASITFSAIGISVLGAASLNLVTAVANLTGTKFDFLAYSSALKHLVLGQFFLVQVSLSSWWQHDYSGHHGKLLFTYLDTDRQAEKHQLVKMLAGFQLGVIRSLALSIASSVAIVICNKALICTLGFLFG

SEQ ID NO: 83833 - protein, 161 aa, Zea mays
  Coding DNA Sequence Number=SeqID_40458
MADDWVLVGYDNGIIKISMKKVPEPSVLDTRMSGGKGGSHLYTIVQKNFTTSNVYLFDLICFGINHQKWGDFELVLRGSSTGPEGQFNWSLTPLTSNQQSASHTSKQVDRVVRGGSTGLVNLVRLQISLFTSPLGNFQKLQAFHTYWIATLEALGFSPFQG

SEQ ID NO: 83834 - protein, 344 aa, Zea mays
  Coding DNA Sequence Number=SeqID_40459
MVEFSSDSDEIQEESLIPSPLPHRSLSKRGQGSGRLEGEGPSMPSQPLLGGRRKIGASHPHRSTSSAGYAPCQEEDGAFYDEVDPPSSDALLIFGLHMHPATMSRGPREPPVDFSSKGVDSLQRLRFTNPTLIPRHPASTSLPRHSAHLRITRRTTFSMLLCVVAARWGPLVRLILIRCRLLHRVTNHAVSPLPTEAPIVLGSVSAERLHPAELGEARDPVAVSTTSAIAEFRGRLTTSTPTGRICRACVVAARRRCARRGRFRASQPSAVLRARLELHLTTVRAAVFSAQAWNSSLEFCEIAVVFGPVAPSSLDGRVGQRLYRVSSNYGVPWERYWRRVNRSE

SEQ ID NO: 83835 - protein, 128 aa, Zea mays
  Coding DNA Sequence Number=SeqID_40460
  Homolog annotation: Hit_ID=Q2RAL0; Match level="QueryCoverage=25%, HitCoverage=3%, E-value=8e-07, Identity=69%"; Hit description =Retrotransposon protein, putative, unclassified
MEGFGPSHTGAGQKVYLHLSSYNSGDGANMMFWSDCWLEGCFVSEVAPEVYRKAQRRATDSHFWSGLMKVKDTFISKGTFVIHDGSQGFGSTIDGPMVSFGLTCSAYRIEFKQGLIQMELDRQRDVYG

SEQ ID NO: 83836 - protein, 1693 aa, Zea mays
  Coding DNA Sequence Number=SeqID_40461
  Gene Ontology: Mol. function=ARF guanyl-nucleotide exchange factor activity; Cellular component=intracellular; Biological process =regulation of ARF protein signal transduction
  Homolog annotation: Hit_ID=A2X1Y6; Match level="QueryCoverage=99%, HitCoverage=99%, E-value=0.0, Identity=81%"; Hit description =Putative uncharacterized protein
  Pfam annotation: Domain name=DUF1981; Domain location=1095-1180; Score=165.8; E_value=1.1e-46; Accession=PF09324.1; Description =Domain of unknown function (DUF1981)
  Pfam annotation: Domain name=HEAT; Domain location=1106-1143; Score =4.4; E_value=6; Accession=PF02985.13; Description=HEAT repeat
  Pfam annotation: Domain name=HEAT; Domain location=1149-1184; Score =1.0; E_value=19; Accession=PF02985.13; Description=HEAT repeat
  Pfam annotation: Domain name=HEAT; Domain location=1265-1300; Score =3.9; E_value=7; Accession=PF02985.13; Description=HEAT repeat
  Pfam annotation: Domain name=HEAT; Domain location=72-108; Score=8.3; E_value=1.6; Accession=PF02985.13; Description=HEAT repeat
  Pfam annotation: Domain name=Sec7; Domain location=544-729; Score =304.4; E_value=2.1e-88; Accession=PF01369.11; Description=Sec7 domain
  Pfam module annotation: Pfam domain module=DUF1981::HEAT::HEAT::HEAT:: HEAT::Sec7; Domain location=1095-1180::1106-1143::1149-1184::1265 -1300::72-108::544-729
MATSTMPLGGASPSGRVLGPALDRIIKNAAWRKHSALVAAAKAALDLLSSSPAYPSSDPISPQSSLLLGLPSAAADAALHALLLALESASPKVVDPALDCVTKLLYHRLLFGDLGCAGDDASSPTSRLFTAVLTCGALSDDAMELATLRVIIAAARCPTVAIRGEGLGQVLKTCYNIYLSSNSGANQLCAKLALAQVLLIVFARVEVDSMDVRIRTVSITEMMDVSDRNLNDSSIVQVAQGFINETMEGSVAPEPGSHLEPTEVDGKEDTGMSKIREDGLALLKNLCKLSMKFSTPDNPEDQMLLRGKVLSLELLKMVIDNAGPFWRTNEKYIGAIKQYLCLSLLKNSALSAMSIFQLLCSIFVGLLSRFRSGLKEEIGIFFPMLVLRVLENVHQPSFLQKMTVLNLLEKICKESQVLIDIFVNYDCDVDAPNIFERVVNGLLKTALGVPPGSTTTLTIAQDQTFRIESVKCLATIIKSMGSWMDQQLRIGDFSPKISEASLSSLSSIDNPNILIGEDGSGIDYELQSDSGSPDVSGAPSLEQRRAFKIELQKGISLFNRKPSKGINFLVKSKKIGHTPEDVACFLRNTAGLNATMIGDYLGERDEFPIKVMHAYVDALNFEGMDFGEAIRYYLRGFRLPGEAQKIDRIMEKFAERYCKCNPNSFTSADTAYVLAYSVIMLNTDAHNTMVKDKMSKSDFIRNNRGIDDGKDLPETYLGTLYDQIVKNEIKMSAGSSVPQNKQPSSVMKLLGLDNIISFVNWKQADDRVVGANDLLIKTIQEKFKLKSGKSESVFSVITDTTILRFMMEVCWAPMMAAFSVTLDQSDDKAATSQCLQGFRSAVHVTSVMCMETQRDAFVTSVAKFTYLHCAADMKQKNVDAVKAIISIAIEDGDYLQEAWEHVLTCLSRFEHLHLLGEGAPTDASFLTVPLVDSEEKTQKSTSMSSKRTNALQNPAVMAAVRGGSYDSTTAKNKASPLVTPEQINNFISNINLLDQIGIFELNHIFAHSPRLNSDAIVAFVKALCKVSMTELQSPTDPRIFCLTKIVEIAHYNMNRIRLVWSRIWKVLSDFFVSVGLSENLSVAIFVMDSLRQLAMKFLEREELANYNFQNEFLQPFAVVMQKSNASEVRELIVRCVSQMVLSRVNNIKSGWKSVFTVFTAAAADDRKNIVLLAFETMEKIVRDYFPYITETETTTFTDCVKCLITFTSSKFSSDASLNAIAFLRFCAVKLAEEGFISHEKDTEQQPSKIDSSDGNSMVHKDDHVYFWVPLLAGLARLTTDSRPTIRKGSAEVLFDILADHGHLFSQSFWANIFESVIYPLFSSESFAPNGQISSVNSTEDDSWNFETKTVALKCLADLYIMFFEVMRPELSRVTSVITNFIRSPYKQSASTGISVFQRLTEGLASKLSNDEWGTVLLCFKESASHTFVVFDKIVKMMKVIEIPDRNESYSEAEQYSDHDIYNDEEEEANMETASYAIVRMKNHMALQLLIVEGIIKLYEVHRSFLGAEHIVIMLEILSAIASHASEVNSESNLHRKLHKACSILEVPEPAVIHFESESYQSYLKLLQALLHDNPSLSETMNVESQIMLVCEKILRMYLTCAEHELSNGVSGRGPALQRMPLGTSKKEELGARTPFVLHVMGLLGSLEKNCFRRNLPRFFPLLANLIRCEHNSGEVQVALYDIFQSSIGPIISA

SEQ ID NO: 83837 - protein, 114 aa, Zea mays
  Coding DNA Sequence Number=SeqID_40462
  Homolog annotation: Hit_ID=A2X1Y5; Match level="QueryCoverage=59%, HitCoverage=44%, E-value=2e-07, Identity=49%"; Hit description =Putative uncharacterized protein
MDRQASRRGRRRGRHVRLGSLLRLRVRLFGGLAGLVARCLEELNCCPTRRTTTRRRRSHKMAVSHGDRRHHRPAPAEREENSLHAEAIADCLEFIKRSYLPAAAGAGGDRKPDR

SEQ ID NO: 83838 - protein, 99 aa, Zea mays
  Coding DNA Sequence Number=SeqID_40463
MAPPVDVAGLRPRLGDAEAPPKPRSSLSSVAEAESEPLGRARRSPSLSPRSGGAEFAVFPGLSPSPSPGSGGAEFAVFRDLARVRALGRAERSSPSSGT

SEQ ID NO: 83839 - protein, 176 aa, Zea mays
  Coding DNA Sequence Number=SeqID_40464
MAERYQLPRSCVPPTMRRKDGGYPPSGGLEGGKTRCIREREDVVAFQGGHPPFKGDYPYSRPQPSWAESSPTRSKALPYGAGAGSHMSCKPAQSRRSQTAARGTGKGDTPKRVLPREGTRLRASLLIRGSKAGPPKGSTAASDRVGPTPTTGERFEGRPPEGFHGRLRLLGLRAHY

SEQ ID NO: 83840 - protein, 243 aa, Zea mays
  Coding DNA Sequence Number=SeqID_40465
MVTSSLMVGESEPGCGLCPSLSLKDFHHQGWGGDCTMPGSRTRVASEPLAAPASATAAGRSSSADEIARVGHGPTSNSTAFCPSLPHEFGHGRGPLGSSIRPEVSAAAVRPPGAEVVVIAAAGAGDGAPFVGLLLLRRPSPIEWGCSSLRRGNRSSVCNGTLNASVFCSLWLSRPEHDSPVGRLNRFTKRESPRVKVTSESGDPWTASPSEARSDLAEGVVDAEGAAAPFQRQDPSLQDQIVL

SEQ ID NO: 83841 - protein, 102 aa, Zea mays
  Coding DNA Sequence Number=SeqID_40466
MAAVGALQRGVGGGNALQRGRGGGGSAHGGGHACGGTEKTFLRKMKRKHTSSAMISTNKSNVLNKGRIEFFQSTDYSDSGAKHNYYCSASELRTMLTRTYEH

SEQ ID NO: 83842 - protein, 36 aa, Zea mays
  Coding DNA Sequence Number=SeqID_40467
MGGAEPGSFAEKDPSRGEGEASRRSLLPEPPRVPVL

SEQ ID NO: 83843 - protein, 78 aa, Zea mays
  Coding DNA Sequence Number=SeqID_40468
MGTRYPWWILCDYASELKVGIRSNRSQPRLPPPHEYRTWFQTRIGGMASSPRTDDPMAQLLAKIEDGNRETYRMVEVM

SEQ ID NO: 83844 - protein, 59 aa, Zea mays
  Coding DNA Sequence Number=SeqID_40469
MDLEVEQREDELNGLVWEEESGRDHAQLRICSVIPVTYRLDGDVDAREKQYSCNLLLDR

SEQ ID NO: 83845 - protein, 387 aa, Zea mays
  Coding DNA Sequence Number=SeqID_40470
  Gene Ontology: Mol. function=transcription regulator activity; Cellular component=nucleus; Biological process=regulation of transcription
  Homolog annotation: Hit_ID=Q10CH6; Match level="QueryCoverage=100%, HitCoverage=100%, E-value=2e-93, Identity=49%"; Hit description =Helix-loop-helix DNA-binding domain containing protein, expressed
  Pfam annotation: Domain name=HLH; Domain location=197-239; Score =38.7; E_value=2e-08; Accession=PF00010.17; Description=Helix-loop -helix DNA-binding domain
MDGNARSTAASQKKSIVPDDDLVELLWHNGSVVAQPQGHHRPAPPSDRDCPGTSGLTAEETAAWFPDTLDDSLEKDLYTQLWYSTIADAAPQHEGMFPGPTSQPSPPPPVASSGVESSWAGDICSTFCGSNQVPRTPAGIRGKDAALQPEVPSGAGAHDGTSSSGGSGSNYGGSGLPSDSVHVHKRKGMCRDESDSRSERRRDRIKEKMRALQELIPHCNKTDKASILDETIEYLKSLQMQVQIMWMTSGMVPMVFPGAHQYMPPMALGMNSGCIPAAQGLSQMRRLPYMNHPMPNHIPLNSSPAMNPMNPLNTVNQFQNGHLREASNHFLHLDDGRAAVPRVPRPGPHVYGHQIAQAEEHNRILEVAASTVIPTSKAGQPPTFDGV

SEQ ID NO: 83846 - protein, 134 aa, Zea mays
  Coding DNA Sequence Number=SeqID_40471
  Gene Ontology: Mol. function=catalytic activity
  Homolog annotation: Hit_ID=Q10AY8; Match level="QueryCoverage=39%, HitCoverage=49%, E-value=4e-11, Identity=64%"; Hit description =Expressed protein
MNFRPIVLIFLLLVLIVTSQFEWKQHIGEAEANPTATRRRQQALGREDAVKEKGDLMVVANVGDSRVVLGSASNDSAITSQESSVPAMSRAFDDYYILDCGVISAPEVTQRRTDINDQFVILATVGIAFVLACL

SEQ ID NO: 83847 - protein, 263 aa, Zea mays
  Coding DNA Sequence Number=SeqID_40472
  Gene Ontology: Mol. function=metal ion transmembrane transporter activity; Cellular component=membrane; Biological process=metal ion transport
  Homolog annotation: Hit_ID=A3BNR9; Match level="QueryCoverage=96%, HitCoverage=90%, E-value=1e-100, Identity=71%"; Hit description =Putative uncharacterized protein
  Pfam annotation: Domain name=Zip; Domain location=5-250; Score=-39.4; E_value=3.8e-05; Accession=PF02535.13; Description=ZIP Zinc transporter
MDPKVGVALTLSLVGGLSTSLGALLAILNHAPNNRTLGILQGFATGLMLSMSFFDLAYDAVNAIGFLRGNLWFFAGALLFSTIADVFPEPDCSAADENGKQQVGGKELMMRHRRRVIFSVIVTAIVAGVSLQNFPVGTAAFLGTTKGFRVGLNLALAIALHYIPEVIYSALAFVKGISVALPAYFATSSKWQAFKLATLSGFAEPLGVIIVAYLFPSNLNPEILEGLLGLGRKDAVKAVFVGMAFMSMSLYFLDASLPKEMSA

SEQ ID NO: 83848 - protein, 41 aa, Zea mays
  Coding DNA Sequence Number=SeqID_40473
MDSMMFEVAELDGATIIYHTNSKMKGYMVIVVSRRNARATD

SEQ ID NO: 83849 - protein, 554 aa, Zea mays
  Coding DNA Sequence Number=SeqID_40474
  Gene Ontology: Mol. function=binding; Cellular component=CCR4-NOT complex; Biological process=sex differentiation
  Homolog annotation: Hit_ID=Q10CF3; Match level="QueryCoverage=37%, HitCoverage=62%, E-value=5e-71, Identity=65%"; Hit description=Cell differentiation protein rcd1, putative, expressed
  Pfam annotation: Domain name=Rcd1; Domain location=1-214; Score =254.1; E_value=3.1e-73; Accession=PF04078.4; Description=Cell differentiation family, Rcd1-like
MASCTLIWFCTPFCFLNFLFVLLVLQCVASHPDTRMPFLNAQFPLYLYPFLNTTYKTREYEFLRISSLSVIGALVKSDDHEVIVNLLCSEIVPLCLRAIEMGSELSKKVATFILQKIMLDDTGLAYVCASSERFCAVANVLAQMVEALAEQPSPRTLKNTIRCYLRLTDDRRACQALRDYLPIALRDGTFNGLIEVDLTARLWLHQLLHNVMMSDSGGGPRPAPGPVMGMGSVDCPRYLPARVSEIPSRNGLPHRTAARRRAYTAPARPPPARPPQTAQPTTLALLPILPRIGCPQQSPAPAALGQTERYRRAARSDFAAYPKARPRAQSPKPRAQFAVASAKAGRDVCPRPCSPHATHVRDAGDPQPPSPSPLPALDLPTLRASVMPGIHNPSSSEGTPEVGYEHLGTSAASIGTRASLHLLSPISPVRTLSPPQAADWLAKSPRDQSRSNLVSEMGASTAMGALEQAHLAAVASACDDDEQNDYIDMLSGDTAVTGLHRGANGARWCWGLMRTAAMRACAGHSSMSPRPSAMAPEAHNHTCLDGTLAILFPF

SEQ ID NO: 83850 - protein, 54 aa, Zea mays
  Coding DNA Sequence Number=SeqID_40475
MEQLVTEFEALELPVTLCGTRLCDVLCHCGVMGATDDIVNVCFNTDSLEILKHL

SEQ ID NO: 83851 - protein, 506 aa, Zea mays
  Coding DNA Sequence Number=SeqID_40476
  Gene Ontology: Mol. function=receptor activity; Cellular component =chloroplast; Biological process=amino acid biosynthetic process
  Homolog annotation: Hit_ID=Q6EUE9; Match level="QueryCoverage=28%, HitCoverage=67%, E-value=8e-64, Identity=81%"; Hit description =Antigen receptor-like
  Pfam annotation: Domain name=DUF565; Domain location=444-506; Score =115.1; E_value=2.1e-31; Accession=PF04483.3; Description=Protein of unknown function (DUF565)
MMLIHTLEDAKAKATVLHIFEEADTTPPAAWGQAALQGVGNNVKALSSQLSEASTELSLQLSSEEELLRQIDRVREHCEGLRMDDDVVILGDKIAAHLSLLQKIYLALDAYSPTLQQHPGGFEGFLDLREKVFFLLKCPGAVLPPQVEFQAAAHRSPDLDSRLELDDSQSQFLSSATAKSKTLAAGAELARASGPARFVCFAACGHASQPAAAPESIAATTRLRATTGWLRRRLSAEGYPAVVSRGWPVRAAKRQVHLPSAAPPSEAALPLNPSSICLSAPPVLSPLVSGLIFSSDRVLKSRGLTTSSVMKSCRLSELSNAEVSSLKARPRIDSSSMSIFGTVNPIVEGVCVRGDAADKQYQVKNCRWRPTFALETDGPSNTDGQDFDEDSGFLGRTRLGRLIQAAARELLDKLNSARTNSPTKIFLVLLGFYTANALATILGQTGDWDVLVAGVVVAAIEGIGMLMYRKPIARPPGRFQSLISMVNYWKAGVCLGLFVDAFKLGS

SEQ ID NO: 83852 - protein, 48 aa, Zea mays
  Coding DNA Sequence Number=SeqID_40477
MAAPPSLAASTPLRHHVHGRRPLQQVLTTRASQRQIFEKLDIEQNTIQ

SEQ ID NO: 83853 - protein, 114 aa, Zea mays
  Coding DNA Sequence Number=SeqID_40478
MRSRAWVAVAGALVVAAVVVEWDLLVKYVALLGALASRPSLSTVASFHDTFLARHFRRSTTDSGACAEGKAGEDDGSVVTVTDPVEEDCGGARIAMGMENLGFSTRATRRRARA

SEQ ID NO: 83854 - protein, 63 aa, Zea mays
  Coding DNA Sequence Number=SeqID_40479
MQLGNVIVRLGPNDTGMQLREKRHVMILWAQQEWVIFRFLDFKTVELYDTVIHCIVSQLCFCG

SEQ ID NO: 83855 - protein, 181 aa, Zea mays
  Coding DNA Sequence Number=SeqID_40480
  Gene Ontology: Mol. function=aspartic-type endopeptidase activity; Biological process=DNA integration
  Homolog annotation: Hit_ID=Q10CF6; Match level="QueryCoverage=50%, HitCoverage=12%, E-value=1e-09, Identity=45%"; Hit description =Expressed protein
MGVDATIESNAQLANDDFDFDNDDRITKFALHMMEENDEMCLIDNATTNLTLREKISIKTLLKRTENIITIVDNNDPIVLSERTNPLLNKSPSPSVVAGLQPDAGNGSGFYVGVYSFLDTAKPCTNRFSSGSLTSEDSPVLTPRLLSFQFSSSPDNCSSSAEWPDRAVAPRSNRYLFAANA

SEQ ID NO: 83856 - protein, 172 aa, Zea mays
  Coding DNA Sequence Number=SeqID_40481
MAPPLDVSSADPVSALKLSLPTMHSTPGRCFPRPAACAHGYIIQPAAFTTHDALHPPPPPAMASTQLTFSRFQLPRSRSDTDAHHVSNAKHHSFDLGKHPPLHHRLIAPPPLSLACSSRSMCMGLNGWNKSSSILRSWEFMAGAFLRSPKPKIPPPQGRILLQPARNPPSSS

SEQ ID NO: 83857 - protein, 68 aa, Zea mays
  Coding DNA Sequence Number=SeqID_40482
MAGLIALTVLPGDFSLSEKLGRCRSHGQRGDCRSMQLQVSLVIHMATEIDVIVITPQVPQVVGKSLTV

SEQ ID NO: 83858 - protein, 208 aa, Zea mays
  Coding DNA Sequence Number=SeqID_40483
  Gene Ontology: Mol. function=nucleotide binding; Cellular component =protein complex; Biological process=protein polymerization
  Homolog annotation: Hit_ID=A2XYN7; Match level="QueryCoverage=39%, HitCoverage=17%, E-value=3e-32, Identity=86%"; Hit description =Putative uncharacterized protein
  Pfam annotation: Domain name=Tubulin; Domain location=2-175; Score= -31.7; E_value=9e-05; Accession=PF00091.16; Description=TubulinFtsZ family, GTPase domain
  Subcellular localization annotation: CTP_CleavageSite=14; ConfidenceScore=5.29e-01
MGSSASPDPGLGPSLNIGRRTPPRPTPGLGLSLDPERRTPPRPTPGLGLSLDIGRRTPPRPTQGSDSASASEDGLRLARPQGSDSASTSEDELRLARPQGPDSTSTSEEPLPRPTLVLEALEKLEKSVDTLIVIPNDKLLDVADENMPLQDAFLLTDDVLRQGVQGISDIITIPGLVNVDFADVKVVMKNSGTSLLSYPLKDTEVIDH

SEQ ID NO: 83859 - protein, 130 aa, Zea mays
  Coding DNA Sequence Number=SeqID_40484
  Subcellular localization annotation: CTP_CleavageSite=78; ConfidenceScore=5.46e-01
MAGSAARPTPPARPLGRPAPCPAPLRALRLGRHAPCSAGSAAPCAARPPQPDPPPARPPGRRFNRPAQRLSRPASPARARAPPRAGSTALGPRHCGTGGNEIDGSGYDYGAGEDEAVEGDFQEFQDYDEF

SEQ ID NO: 83860 - protein, 48 aa, Zea mays
  Coding DNA Sequence Number=SeqID_40485
MAEMSNVVSGNAAVKGSDDCASGEGFMSRITGVEGRTPDMGRSTDTGE

SEQ ID NO: 83861 - protein, 54 aa, Zea mays
  Coding DNA Sequence Number=SeqID_40486
MAVMGSTSEKMYLCQNKITRNGSGEMARVACTLRGKRLDSGVSVLSVGVNLIWS

SEQ ID NO: 83862 - protein, 46 aa, Zea mays
  Coding DNA Sequence Number=SeqID_40487
MNGWAKVTHCDVVKAPKHMAQGREVANSEIQSSKVSPIHWFWDLGI

SEQ ID NO: 83863 - protein, 127 aa, Zea mays
  Coding DNA Sequence Number=SeqID_40488
MAQSVVFFIEDLDLASREGPHRGGEILGGLERFLECLSIRTGSLDDRLGKQCNHEGGGNEDDGFDYAYGNVSASPLQPNGIIAEYVDVYSPLLYTPNPPGCPHCNHCSGQDEVMEEDFQEFQEYDEF

SEQ ID NO: 83864 - protein, 158 aa, Zea mays
  Coding DNA Sequence Number=SeqID_40489
  Subcellular localization annotation: CTP_CleavageSite=35; ConfidenceScore=5.13e-01
RRAPAIRSHPRPSGLAQPPTTSDPSTPSPAPDHARAASAPYKLPVTGPYTVSVFLEKGFLSILGFILAGDNLIANLYLKIAQILKISDKSLQIHMTSLKNLKMMRKGTKPEKKGFDPKWLGLADCIDRAGRDIERMELLAIQQQGPCNRVLWNPQLEI

SEQ ID NO: 83865 - protein, 121 aa, Zea mays
  Coding DNA Sequence Number=SeqID_40490
MASPRPRGGGTSKAGEQAAPVDVRVATATHEARGSSERRHERREMRATMIARDILRYGTVWVARVMTYICASVIDDILRPLPLLIRVFFLIIVFYAYHMYYLRLKRVCRGPYGPPAGSAPE

SEQ ID NO: 83866 - protein, 608 aa, Zea mays
  Coding DNA Sequence Number=SeqID_40491
MPSSSSSAPNTPPAGASSEDTLSNMAAAELHPGDTVEFGVSRISSVRVQDMQQLGYFGSGVGRVLGAEEVPEPEGELVVFEAFFTAGLRLPAHRFVAEVLRRFEVQVHQLTRECRGGSGEVCLGDDFVWWSALCGGAVEDHPGLPKAVMCSHYYVAYLQFEVAEDDEDEGALRCAARMNSGHDLVEEFIGYGVWPLAHGWVLGEVCPREMPSRGGQRVRSPAFALDLHGRDPAAFVREAEDGAASIVGRYVPKTEGLRSWDIRGANDRLNRVFELNRLPYDGYPGEDAADRRGKKPMGMTEEEPSQVAAPAAKKRKLGTAVGGLGVSDSFAMELMGTCAALGGRMSSPELRESSARMLEVFPYGRNIAAVVSAVMNKDRQDAAQKRRAVVRIADPRREAKRARGSTKAAAFGSSQPMPAVKPAAPGPSKASEGAKTAASDGTKPPPGGSAKGRELPSPVRRVVDFGTNISVEDYFVGLDEGQLVVVPPSAATVTPQRGRACLLAALDLCLGKPQPLSNHLSLATSPVSVDLPMSGVLPSTPVILDMNPCSSSTSAAPPSAVEQLSPSTNALVYNSITSPDAQSSLPLTAALPDTTLLISAMFLFVLST

SEQ ID NO: 83867 - protein, 328 aa, Zea mays
  Coding DNA Sequence Number=SeqID_40492
  Pfam annotation: Domain name=DUF834; Domain location=231-301; Score= -1.2; E_value=0.082; Accession=PF05754.5; Description=Domain of unknown function (DUF834)
  Subcellular localization annotation: CTP_CleavageSite=20; ConfidenceScore=5.04e-01
MSTVPIDSPFASRPHRLGIQCSTDPGCRRAVTALGSDSTSTPEDGLRLARPQGSDSASTSDDGLCLARPQGSDSALTLEDGLRLARPQGSDSTSTSDDGLRLARPQGSDSASTLEEPSPRPTSGSDRPCHRGAIITLPLASSGYGEQDRRPIWLAPVKQVMMAPRVLHDDDGSQPLTEARRRQQGSDSPDSCASIGLKRSSDDHDITRTGQQHLSDSHDDMALAGELVGGEESDLSRAQLTNQTGQRASPGTKEGGRPKSGEGDLGLPVKFYRVRGLGKLHKLLAKLTERLARLGSDWSGLATVAEALAAMAGGKELAGAKEGRLAGE

SEQ ID NO: 83868 - protein, 141 aa, Zea mays
  Coding DNA Sequence Number=SeqID_40493
MGSLTVPVVEERAEGLTGGETAPAGKLIGGEESGLSRAQLTNQTGQRASPGIKEGGRLKSGEGDLGLSVMFCRVRGLGKLHKLLTKLTERLARLGSDWSGLATVAEALAAMAGGKELAGAKERRLADEGIKVNTLGLWLKV

SEQ ID NO: 83869 - protein, 212 aa, Zea mays
  Coding DNA Sequence Number=SeqID_40494
MSFPACARGSADSDHPRRRPAHRRDPQDLPYTLGHLTGAVSPPVTNEIGHQRKMQTQLKDCNLADGEYVLIPEQGTVQEEDQEQALEAAIEDLPAVPAIEGKPRYGGYKCGHCTAATGVSGALYAKAVRFRIWLMSTVGEVDRCSVGSPDSLVNYSGVTLRKSESGQFARCLGLGTLVSPHILVFTPNFEEFPNSFSLLVYVELYVPEINGN

SEQ ID NO: 83870 - protein, 600 aa, Zea mays
  Coding DNA Sequence Number=SeqID_40495
  Gene Ontology: Mol. function=transporter activity; Cellular component= integral to membrane; Biological process=transport
  Homolog annotation: Hit_ID=Q7FS87; Match level="QueryCoverage=80%, HitCoverage=39%, E-value=1e-172, Identity=62%"; Hit description =Putative glycerol 3-phosphate permease
  Pfam annotation: Domain name=MFS_1; Domain location=85-490; Score =147.1; E_value=4.9e-41; Accession=PF07690.7; Description=Major Facilitator Superfamily
  Pfam annotation: Domain name=Sugar_tr; Domain location=37-539; Score=- 136.3; E_value=0.0012; Accession=PF00083.15; Description=Sugar (and other) transporter
  Pfam module annotation: Pfam domain module=MFS_1::Sugar_tr; Domain location=85-490::37-539
  Subcellular localization annotation: CTP_CleavageSite=56; ConfidenceScore=5.00e-01
MRWCFSIQNLGGGGGGEGGCQVPIVTDSRYRCSCAGTNCAATFLSNLMLMSHSQQMANSRKPPGLRLLGGAGSLTTYQTLVLVLTFLAYTCFHMTRKIPSIVKSALDPQTKVGFSHWGRLHASRNALTTGWLPFNTADGSALLGEIDVAFLAAYSAGMFFAGHIGDRMDLRVFLTVGMAGTAVFTTLFGAGYWLNVHSFYYFLVIQMVSGLFQSVGWPSVVAVVGNWFGKSKRGLIMGIWNAHTSVGNIAGSLLAAFLLKFGWGWSFAVPSLIMALVGLMVYVFLPVSPEAMEIDSDGGELNCEKDAVKEPLLEPGQEVKHSAVGFLEAWRIPGVAPFALCLFFSKLVAYTFLYWLPFYISHTRIGGEYLSDATAGSLSTIFDVGGVLGGVLAGHISDRLNARAITAASFTYCAIPALFLYRTYGSMSMAWNVSLMFVTGMFVNGPYALITTAVSADLGTHSSLNGNSRALATVTAIIDGTGSVGAAIGPLVTGYVSSRSWSAVFTMLMAAALLAGLLLSKLVCAELQGKTHSSVSKDAGGEHGAYSDEVVYVKWRANHLLYTGMANSAFTLNVGLLFCRGNSATTPDIKYCSGESVKED

SEQ ID NO: 83871 - protein, 82 aa, Zea mays
  Coding DNA Sequence Number=SeqID_40496
  Homolog annotation: Hit_ID=A2YRC8; Match level="QueryCoverage=36%, HitCoverage=39%, E-value=5e-09, Identity=93%"; Hit description =Putative uncharacterized protein
MGCLLRRLFPFLVGAAVGVYAAQNYKVPNIRRLADRGADAARRYEEAYRKKPAAAADDDARPVGGCRKKKVVQVDIDDDDQE

SEQ ID NO: 83872 - protein, 356 aa, Zea mays
  Coding DNA Sequence Number=SeqID_40497
  Pfam annotation: Domain name=zf-CCHC; Domain location=337-354; Score =27.9; E_value=3.7e-05; Accession=PF00098.14; Description=Zinc knuckle
MWKDRVEHAKDVWALYPGQTAHLTVRCMNALYHLQVMRGEAMSQLMALLEATKITLDNREELVVDLSTEMVEKDMQVEQMANQIQELEELVGARENTIEVLEDQLINTQQQLEEANQHLDMHHQEIQDMEANEDVDIEGGVEPEPASSLDTAGSGRPPSPESSVASVSRHLNTMVVVITINVPQQQPLIRSSSALSHRYSLEQRIHLMLIPAQTWWDHFLAMQPVDHVVEWRELKAFNDLCQYAGYHADTDEKKRDMKTVSRPARQKRKGRPPVAGRSAQPQRFRIVSDTQNRGPQQQQGRWVIRPQQQQQAPNRSQPPVQRNNNQPQQQYRQANDNRCFTCGNTGHYAKNCPRNQ

SEQ ID NO: 83873 - protein, 81 aa, Zea mays
  Coding DNA Sequence Number=SeqID_40498
MGKPIPSLLMLLISRVTALVPTITGMGDHVSSRVRGKVCCQVHSDSKVILGLCVKNHRKRPTGYLVAKNDLNGKPYLNLVY

SEQ ID NO: 83874 - protein, 172 aa, Zea mays
  Coding DNA Sequence Number=SeqID_40499
MASTVVFSFSLNNVCLTRIDNGQLAKSEEVAGEDPEQELVGEGKGLERFLECLSVRTGSLDDHPGKQYNHEGVPSAILESNEFVAEPACAPDTVRNNNVLASNPLDVKATDTKLLYKADISGTRRRYGPTRGFAASPKVDPGATIGTLNTGYPLLLCQGESSVATIKDFTGS

SEQ ID NO: 83875 - protein, 221 aa, Zea mays
  Coding DNA Sequence Number=SeqID_40500
  Gene Ontology: Mol. function=structural molecule activity; Cellular component=endoplasmic reticulum; Biological process=lipid transport
  Homolog annotation: Hit_ID=A2YRD4; Match level="QueryCoverage=100%, HitCoverage=100%, E-value=7e-79, Identity=63%"; Hit description =Putative uncharacterized protein
  Pfam annotation: Domain name=Motile_Sperm; Domain location=12-119; Score=144.1; E_value=4e-40; Accession=PF00635.17; Description=MSP (Major sperm protein) domain
MAAPAPATTGDLLRVDPLELRFPFELKKQISCSMQLSNHTDDYIAFKVKTTSPKKYSVRPNTGVVLPRSTCDVVVTMQAQREAPPDMQCKDKFLVQSVVAPAGITVKDVTGDMPPSPVPEESEEGSPPRASESENGDGPSGGFTRALRERIEPQDKSTEAGALVSKLTEEKNSAIQQNHRLRQELDLVRQEISKRRGGGFSFIVVIIVALIGAILGYLMKS

SEQ ID NO: 83876 - protein, 285 aa, Zea mays
  Coding DNA Sequence Number=SeqID_40501
MGRRIGTHGRADGAAKLSDPNIPFPPLELSLACRAGPSAPRTAASLRARPPRAPSHRPQDGPHGRRATQAHRHPHRTKASPLGSAAVLVAQERRFRLRFPVPAAVTPDGGPRVVSPRQWAMAVLWAPLRLSQIKTEPREPGSCVARVSTRLPAATTCDGPQVLRDLHGRRPPAAAEHIQTPHARAAQAQPQTCSAAQLAVAVLPTCRPPHAATAQAASARRVFRAVFWRAEQAATAQARPTTAGELSRLQASREQAEQSRAVSTKQRLAEHSSEQPVSPSASVLI

SEQ ID NO: 83877 - protein, 76 aa, Zea mays
  Coding DNA Sequence Number=SeqID_40502
MAKYELRSGSLCLRRRLQFPFNTPMTWFEIHLKNTLVIAYERDMIKAKEISRIKNIELMPKFGKSLFIKRLGKDIG

SEQ ID NO: 83878 - protein, 111 aa, Zea mays
  Coding DNA Sequence Number=SeqID_40503
  Gene Ontology: Mol. function=heat shock protein binding; Cellular component=nucleus; Biological process=protein folding
  Homolog annotation: Hit_ID=Q7F1J8; Match level="QueryCoverage=99%, HitCoverage=32%, E-value=3e-40, Identity=68%"; Hit description=DnaJ protein family-like
  Pfam annotation: Domain name=DnaJ; Domain location=6-48; Score=37.2; E_value=6.1e-08; Accession=PF00226.22; Description=DnaJ domain
MVRETGYYDVLEVSPTASEAEIKKAYYVKELGEAYQVLSNPKQREDYDLHGKPGISTEAIIDPAAIFAMLFGSELFEDYIGQLAMASMASLDGFTENEQIDPRRLQEQMRV

SEQ ID NO: 83879 - protein, 311 aa, Zea mays
  Coding DNA Sequence Number=SeqID_40504
  Gene Ontology: Mol. function=zinc ion binding; Cellular component =nucleus
  Homolog annotation: Hit_ID=Q94IQ6; Match level="QueryCoverage=85%, HitCoverage=89%, E-value=1e-130, Identity=86%"; Hit description =Putative methyl-binding domain protein MBD111
  Pfam annotation: Domain name=MBD; Domain location=145-222; Score =32.6; E_value=1.5e-06; Accession=PF01429.10; Description=Methyl-CpG binding domain
  Pfam annotation: Domain name=zf-CW; Domain location=85-138; Score =83.5; E_value=6.8e-22; Accession=PF07496.6; Description=CW-type Zinc Finger
  Pfam module annotation: Pfam domain module=MBD::zf-CW; Domain location=145-222::85-138
MDIICKHLMFGPESTRSGWANLPFVFNKRYERGASCVPYVGKKVRYSETASNQMVVFNSEAADELGENRLQKSVITKGISPSIGAFTVQCAKCFKWRLIPTKEKYEEIRERIIQEPFVCKRAREWRPDITCNDPEDISQDGSRLWAIDKPNIAQPPHGWERQIRIRGEGGTKFADVYYTSPTGRKLRSLVEVDRFLQENPEHVAQGVTLAQFSFQIPRPLRQDYVKKKPKLINASDEASTITSKSSEPEEVNPIAWAVPTKHEGDASEEASFADETLASEVVLTRKRKIGSSLSVEPNHLSDELEPKLEDA

SEQ ID NO: 83880 - protein, 183 aa, Zea mays
  Coding DNA Sequence Number=SeqID_40505
  Homolog annotation: Hit_ID=Q5GAU8; Match level="QueryCoverage=16%, HitCoverage=22%, E-value=1e-08, Identity=87%"; Hit description =Putative uncharacterized protein
MTDAEKEVATERRMDSPPRCDCGDRDVIDEDTAKHFVCPNIDYSQRQRKRKNEWAEELKFDPVLCKCGIEAKYGLVPSELGVGYFCGHMVDYDEETRKCGWESYDDKGEVMRTIKSKRLMGQKMHCGSQLVDLYVNDRIQDMRRFAKSTSFDSPMRAEQRRLKATNEKRAQDAREWEAARAKK

SEQ ID NO: 83881 - protein, 428 aa, Zea mays
  Coding DNA Sequence Number=SeqID_40506
MVTTSSWVGRSKPGCGLYPSLNFKDIHHQCWGGECAELGSVSTRTAARFFPQRSGGRAFAVRGAGSCRVSGSSVRAASALLPVPPSTAAAERGFFVDEIVGAARGLTSNSTAFCSSSPLEWGRGRGPYGSSIRPEVIVAVVRPLRTEVVIAAAGAGGGEPSVGLLLLRRPSNRGGLFVPAEPKPEAAVSVWTEAELARKEDFIGQSLAGPSAGGTDAGVELPRPRAGLVSLGDSWLRLRGGRPSCLLGPDSWRRPWRRWPGRGADVVLRSGDPPTVLPSEARSDFAEGGVDAEGAAAPSNCQAAEAQTYCRRVVKLRFFSSCFEYLNLFVGNRIVCPSESYFSQKVMSEDSAIDIVEKARKIISAEEFSSVKTCSVRRITYPSVSYLSQKVMSEDPTFEVVEEHERRPGTKIFSEENFDAEGVPPSSP

SEQ ID NO: 83882 - protein, 352 aa, Zea mays
  Coding DNA Sequence Number=SeqID_40507
  Subcellular localization annotation: CTP_CleavageSite=76; ConfidenceScore=5.65e-01
MAAFQGGHPPFKGNSPHLRPQPSRAESSPTRSKVLPLRHGGWVPRVMQAGPGQKKPNRRAACNRTKWAHPFDSNTSSMEAQAHTSWTGKGDTPKGILLHEGNGPRAPLLIRGSKAGPSEGFNSRLRALGLRAHYWSEVRRLAPRKGSTAASGHSGSAPTTDQGFVGWPSKGAIGNSASPDPRARTRPQPRKTTNSASPDPGLGLGLGPGRRRTPPHPTPGLGLGHDPGRRRTPPHPTPGLGPGLSRRSPPRPTQGLGLDLDLGRQTRHRPRRSLRLARPRARTDHVARGAIIALPLASSGYGEQDRRPIWLAPAKQIMMAPRVLHDDGGSQPPYGSKETSVRTRQPRQLSFR

SEQ ID NO: 83883 - protein, 22 aa, Zea mays
  Coding DNA Sequence Number=SeqID_40508
MPNYAFFDCLGMKFNLEFRYAS

SEQ ID NO: 83884 - protein, 349 aa, Zea mays
  Coding DNA Sequence Number=SeqID_40509
  Gene Ontology: Mol. function=ARF GTPase activator activity; Cellular component=cytoplasm; Biological process=regulation of ARF GTPase activity
  Homolog annotation: Hit_ID=A2X930; Match level="QueryCoverage=54%, HitCoverage=45%, E-value=4e-80, Identity=77%"; Hit description =Putative uncharacterized protein
  Pfam annotation: Domain name=ATP_bind_1; Domain location=150-344; Score=87.3; E_value=4.9e-23; Accession=PF03029.8; Description =Conserved hypothetical ATP binding pr
  Pfam annotation: Domain name=ArfGap; Domain location=21-142; Score =136.8; E_value=6e-38; Accession=PF01412.9; Description=Putative GTPase activating protein for Arf
  Pfam module annotation: Pfam domain module=ATP_bind_1::ArfGap; Domain location=150-344::21-142
MSTANRYQHIKSTKPVVGKARKLKDLMIKSDNRICADCGAPDPKWASANIGVFLCLKCGDVHKALGPDISKVLSVTLDDWSDSDIDSMVEVGGNSHANSIYEAFLPKDRPKPKPDSTMEYRTKFIRAKYETQDFLKPSLRISSRSSFKSTTSVKSVDSNFSSTSRKDVSEDTREFVGELNITLVKGTNLAVRDMLTSDPYVVLTLGGQFCSKNSTIGSNCIKLNRRHLEDSLDDWFDEQLENYLDDDYLVFDCPGQIELFTHVPVLRNFVEHLKRKIFNVCAVYLLDSQLELPHINILSKMDLVSNKKDVEVDDYSMVSFIPLDLRKESSIQYVLSSIDTCIPYGEMQM

SEQ ID NO: 83885 - protein, 197 aa, Zea mays
  Coding DNA Sequence Number=SeqID_40510
  Homolog annotation: Hit_ID=Q6Z9U4; Match level="QueryCoverage=53%, HitCoverage=45%, E-value=2e-25, Identity=56%"; Hit description =Kinesin-like
MENLKRRLDALHSRAHDDLDASFSRISKRIKVKICSNCMTQNQACQHLADEVDKEHKKMSDNIKESSEIARAKYKQIIAEAQASTTRVCKVTIPEMTKSVEKAIDGFTKVDTIEKLEKYVDLEFLNQQHNPVVLRLSENSGVMLPKSRVEALEMGDDRRRAMYDGFNSNTLGHFDAWVKVADEFVVRTFAGEPRVVT

SEQ ID NO: 83886 - protein, 170 aa, Zea mays
  Coding DNA Sequence Number=SeqID_40511
MWRNFIHILKSLRTRISVRNLMLKSLRTWYKYHMMFRGLGKGKGKKKGESSYRSIRSRSSREADPTVDVVGGLRFPKELQNQTTFSVERWKSIEGSFVITTMGRWCKEKQSRMSDQHWRPPPVNSTTTFVIAPKKTTALGAVLAPLDTNQDGVLLREAQSQKRKATCPTP

SEQ ID NO: 83887 - protein, 43 aa, Zea mays
  Coding DNA Sequence Number=SeqID_40512
MGCPRGYLKSHGEQHPTPSRGRLRGRHVDREDNTLQGIFGIGS

SEQ ID NO: 83888 - protein, 35 aa, Zea mays
  Coding DNA Sequence Number=SeqID_40513
MAEALAAMAGGIELAGAKGKWLAGEGCVQGNLARL

SEQ ID NO: 83889 - protein, 163 aa, Zea mays
  Coding DNA Sequence Number=SeqID_40514
  Homolog annotation: Hit_ID=O48967; Match level="QueryCoverage=100%, HitCoverage=37%, E-value=5e-17, Identity=35%"; Hit description =Putative uncharacterized protein
MVHIVEHHDFVPEDFMVEEAAASSTSWATNLPPENCCATLLAPRPPRGAMKQWRDDIDRLLGMAHSSSTRPRPRSSRRQHEASASVRSPSVRATPTEDLWAELNRRRAGEDAPVSLERSNDLRTKLNRRRAGEDARISLERARERRQNVEGRNLDYDFAAVAP

SEQ ID NO: 83890 - protein, 546 aa, Zea mays
  Coding DNA Sequence Number=SeqID_40515
MNGGNHPRGGEPSFSQLLQGLQKGLEILLFLARAPVAPVTASGGHHSLRKRREPPVVIPEIKPPALPPLVRRREDGRDVLLCPRLPQLEDAATGPHRHANSSFPRRRGKKLRGEEMGPQVPVGGNPKKHFANRREDGCLRDGVGAEIVQLHPIDVQNRPHETTCRHSEPSLVKRDEAQHIPRRRGRGGSTRRGHPLQLRITGERTKQTIGNKGLQIVRVTVEKGHGSRGETTVTRSAITKQKRWRWSGQGARFSFSGYSLRLRKPKWEASSRVKNRHRSLSRIYKGPGETRSTLCPNPSRDSKLKGKTPVPRTARARTTAAPRTTRLVALTLRQDRRHLWQAKQATLHLRHNDRVKKGTGKGDTSKGILLREGSGPRAPLLIRGSKACPSEGFDSRLRALGPRALLLIRGSKAGPSEGFDNRLRALGLRAHHWLEVRRLAPRMGSTAASGHSGSAPTTHQGFVGWPPKGSTAASEHAERGMTLGTSDTWPRLGLRSRGTLGHFRDQQEQFCNGIPSEGGIEPSDPIKRDRVRQITCRNFWSAPLGH

SEQ ID NO: 83891 - protein, 84 aa, Zea mays
  Coding DNA Sequence Number=SeqID_40516
MPKTVDAVFFDILCLSFCGGFLQECSRSSPDGIVSLYALGDAFVLTMKGPSHFGSSLPHDSVRVIRTSTRSPSSNSIGMTVWSR

SEQ ID NO: 83892 - protein, 190 aa, Zea mays
  Coding DNA Sequence Number=SeqID_40517
MPHNICKEGLRSDTSCDGTSQKQQKSATSSPKNNEGINPEYGILSKSYPTKEKTLKGMLVIWESSKAKHQKAFVKQLIKEANEPFHYFEESLTRHKKTLRFLSIHDLKSTTPFMRGRAPASIYVGRLGQRQGSPSSGHGINTTPTIFPQPNCTNSELSSSVRVNRMGGGQLIVFPVIGELAVQIGGSAAS

SEQ ID NO: 83893 - protein, 84 aa, Zea mays
  Coding DNA Sequence Number=SeqID_40518
  Subcellular localization annotation: CTP_CleavageSite=62; ConfidenceScore=5.09e-01
MGSLLPLLLSSCLGASWCRASSSAEAVVLIDPVFASSGVIASSPNKSLKGGSGPNKSRPHLCSGQVGCINWVRDEGCFWSLAHL

SEQ ID NO: 83894 - protein, 231 aa, Zea mays
  Coding DNA Sequence Number=SeqID_40519
  Subcellular localization annotation: CTP_CleavageSite=58; ConfidenceScore=5.31e-01
MAHLPPLTGADVPTNLGPSAIAALTAGTAAGVAAGPGSSVASPSRTTSQATLIGWLLPSATVTPPRIRMIADDDALYIDALRHLPRAISPTQLHSRRPPPGFTLTTLAPMTPAVDPALVTTIAMIQATVAASQERERAASLALEQERALGAALTTLMATAQRLLVGRPSVAREDPRVVLSWLHNTITVELQDITHDQVDTARQAWLALKDQFLGNWDARALHLDTRFHLFS

SEQ ID NO: 83895 - protein, 282 aa, Zea mays
  Coding DNA Sequence Number=SeqID_40520
  Subcellular localization annotation: CTP_CleavageSite=21; ConfidenceScore=5.33e-01
MNLESGVHTPPRFCLCLPRFRQSRVSPNRPAALPPLFAQIWIPSPSSAPPPPRVRDPVPSLPRQALQSLLTFLPSPSLLGPYGGLTVNRIFLGLLSLRPSGHHGARRPDLQPPRLPSPTVKRRIGRSSPTLPSADLPTRPWISPWPPSADLPAQPIFEAVAARVCRLCGGCGRRRSDRPLFHAFVSAALSPLPLSDFGISRTHYRPSLLPRRCFAAAANRIQGLARAFCGAPASRVDVEANGTPSPQLAAVHAAAEGMSPLCASSSTAVRGREKRCSSQNDN

SEQ ID NO: 83896 - protein, 221 aa, Zea mays
  Coding DNA Sequence Number=SeqID_40521
  Gene Ontology: Mol. function=oxidoreductase activity, acting on paired donors, with incorporation or reduction of molecular oxygen, 2-oxoglutarate as one donor, and incorporation of one atom each of oxygen into both ...
  Gene Ontology: Mol. function=donors; Biological process=protein metabolic process
  Homolog annotation: Hit_ID=Q5GAV6; Match level="QueryCoverage=62%, HitCoverage=33%, E-value=3e-19, Identity=43%"; Hit description =Putative uncharacterized protein
MEGGGLASGGRLTAGWGAAECQSRSRGLGRHGELLEEKLVPHSMEGGEGDDPLDESLQVAIARAEATQKAHRGRGEVRHALHLVVVLSHGEVPLREQVEPSVEVERPCIPVPEELVLESEPRLTGGVHLVVGDVLEFHGDGVVEPREDNTVHQALGGRQRSVVIEDVPPQCEKDMSSPTGVEGGRRFQHNGHEGPDVVQSGSLSMESSDVVGVEARGGKGL

SEQ ID NO: 83897 - protein, 94 aa, Zea mays
  Coding DNA Sequence Number=SeqID_40522
MAHLPPLAGADVPTDLGPSAIAALTAGTAAGLAAGFFLHPQCRSLAHVHCLELQSMALQLGDLEHTLFTRQLLSSQQQQQQQQSLFSPKQVGID

SEQ ID NO: 83898 - protein, 120 aa, Zea mays
  Coding DNA Sequence Number=SeqID_40523
MEEEESRGEEESRGERGLTALSSSPASGVKEAARTRRASELVEVAPPQCRLVVRRHRGAHTVDRPRDALSLLRRMHLVGCPPNEFALASALGAISLAPVGTGHARQLYALSVRLGFGSSV

SEQ ID NO: 83899 - protein, 137 aa, Zea mays
  Coding DNA Sequence Number=SeqID_40524
  Gene Ontology: Mol. function=identical protein binding; Biological process=negative regulation of catalytic activity
  Homolog annotation: Hit_ID=Q6ZKR5; Match level="QueryCoverage=27%, HitCoverage=4%, E-value=1e-11, Identity=89%"; Hit description =Putative subtilisin-like proteinase
MPESKLNLFRSAGLKHTTTSLDAVISPPREDQSGRPSLPSSAPLLLGTPECGGGQVRARHSTGSRRARVRQAVRNGVRRASSGGASSVSDGYSASMCLDGLLDPAAVRGKIVVCDRGVNSRAAKGDVIRRVGASRWC

SEQ ID NO: 83900 - protein, 51 aa, Zea mays
  Coding DNA Sequence Number=SeqID_40525
MEEKTKQPLSIVDHSHFILAHLFDILSDLSSVLLSDRKHNVLVNPTKHRIE

SEQ ID NO: 83901 - protein, 113 aa, Zea mays
  Coding DNA Sequence Number=SeqID_40526
  Homolog annotation: Hit_ID=Q6ER15; Match level="QueryCoverage=43%, HitCoverage=32%, E-value=4e-07, Identity=57%"; Hit description =Putative uncharacterized protein P0707C02.18
  Subcellular localization annotation: CTP_CleavageSite=56; ConfidenceScore=5.73e-01
MKWQYLLKRSTTVRMTYFPPTRGSASTKSSPMSAQSATGTGRGNSRPTGRWSDLLTCGVGTDLPELIVVPEEAWLEFGNIKFMPEQEGKLQLNNGLSGLSAQKTSGSDKVANS

SEQ ID NO: 83902 - protein, 181 aa, Zea mays
  Coding DNA Sequence Number=SeqID_40527
MVLGHQAYIDKVLNRLRRRHYTETLFSCKSPARSQLNHFNPKTWYLAEGFKEGNQVQGRENNKPRKIGFTILGIFYHFLEFFKVLLKKKKEKQKQGWADSSLGGPTLEGKRARARWLLCKNTLGVLTNWDPVFQCLTQSLTVCIKVLPLLSILGLKSPTVHGAAELRRAPGPADWGKDRYY

SEQ ID NO: 83903 - protein, 212 aa, Zea mays
  Coding DNA Sequence Number=SeqID_40528
MSSRIFTLAFPHGEPPWYRSNRNLLLPHLKTTKGETLSMGLLSKSYPTKAILSIVKPFCKNRVSRKQASEKDLKTSREVANAPGLAFVRRENNKPRKIGFTILGIFYHFLEFFKVLLKKKKEKQKQGWADSSPVGPTLEGKRARARWLLCKNTLGVLTNWDPVFQCLTQSLTVCIKVLPLLSILGLKSPTVHGAAELRRAPRPVDWGKDRYY

SEQ ID NO: 83904 - protein, 33 aa, Zea mays
  Coding DNA Sequence Number=SeqID_40529
MVFCPAEPSYEGLLLGMVQLDYVYNDRGHVGIK

SEQ ID NO: 83905 - protein, 185 aa, Zea mays
  Coding DNA Sequence Number=SeqID_40530
MAPPVDVVGPWCPRLSDVEAPPRSRSSLSSVAEVESEPLGRPKSEPWGRAERSSSSSRAEPESEPWGRAKRSSSSSGAESESEPWGRAKRSSSSSGAEPESEPWGRAKRSSSSSGAEPESEPWGRAKRSFLWRLRPGLAAISLTLSSGIAVGAAQAELSSCQTGQWSGEVTAVTSALSTGGRTSG

SEQ ID NO: 83906 - protein, 84 aa, Zea mays
  Coding DNA Sequence Number=SeqID_40531
MGGHGLGACGAGLPALAERAGAGGESLAPGPREGERWGAGVGWGAGLREGEAWRGSGPGKVGRVRCGVGRGTQGSGVRPPALGG

SEQ ID NO: 83907 - protein, 125 aa, Zea mays
  Coding DNA Sequence Number=SeqID_40532
MEGDPDEHSEAESQPRVRRASKAGDPWTHRRPDLNSLNGGADTTTMEMRRGRARGGCRAKDECAGSDVQDGERQADDQLDTTAGVLRNGKKGNAPSSEYICVGGEDVRIFHMSEGIRRIRLNKRW

SEQ ID NO: 83908 - protein, 122 aa, Zea mays
  Coding DNA Sequence Number=SeqID_40533
MEGDPDEHSEAESQPRVRRASKAGDPWTHRRPDLNSLNGGADTTTMEMRRGRARGGCRAKDECAGSDVQDGERQADDQLDTTAGVLRNGKKGNAPSSEYICVGGEDVKDISHERGHQEDKTE

SEQ ID NO: 83909 - protein, 78 aa, Zea mays
  Coding DNA Sequence Number=SeqID_40534
MEVSHRKKYTRRSRGETRRLPEPMVRSTNRTRPDEALDETNAAVPSDSADDARIGSNCSSELSQELEPLRSSASNTGS

SEQ ID NO: 83910 - protein, 83 aa, Zea mays
  Coding DNA Sequence Number=SeqID_40535
MQAACSCTTGMHPFDFDASSVEAQAHTSWTGKGDTPKGILLREGSGPQALLLIRGSKAGPSEGFDSRPEHSGSAPTTDQRFEG

SEQ ID NO: 83911 - protein, 215 aa, Zea mays
  Coding DNA Sequence Number=SeqID_40536
MQYNGSSSLISCEKQTIRIEFLSLQVTELVPTITGMGDLVSGRVRGYVYGQVLWRRLWCWVRGYLLSSSLLQHEDVLSVSKVTVYRNAMNITRGIDYGGEAYRRQQSSGGVVGDVREVTTVTSVCGSASEVVGATLATSTGGGGRRRLLFRPNHDGIVQLCARGAPWGDVEAMRATNFGNVQRLTRSTCADGFFELPAKQRLRYSGDAGPRFKLE

SEQ ID NO: 83912 - protein, 183 aa, Zea mays
  Coding DNA Sequence Number=SeqID_40537
MNRRSSFDDQEIKLFEFYKAKDPEHLFGEGKCRRFDPGGPWTDEGLRTAVVMGARGVPSLLVYQGEPDGTPPKVGRGGDSSGVEVESEPRGRARWRPSSEVEVESEPWVRARRRPSSEVEVESEPWGRARWRSSSEVEVESEPWGRARQSVAELPELFQLKCLSPALEARPHLNRNNPSIPRI

SEQ ID NO: 83913 - protein, 93 aa, Zea mays
  Coding DNA Sequence Number=SeqID_40538
MGWGRAGLAVWACGTGPPALAERAGAGGKPLAPGPREGERWGTRVGWGAGPREGEAWCRNGPGKLFSVLGYTVTYGISYCYVWTKASSIKPNR

SEQ ID NO: 83914 - protein, 331 aa, Zea mays
  Coding DNA Sequence Number=SeqID_40539
  Pfam annotation: Domain name=S-antigen; Domain location=1-259; Score=- 256.3; E_value=0.063; Accession=PF05756.2; Description=S-antigen protein
MTRSKGVSQHTKGDTKILGTDYDVCADSWDSTSWAEQRANPALRQRQRDSSETLCSYGSTAWTNRHDTEVRVHQGRELEGRRLERNLAERRTTTGKAKPDDEVEQGIASASARNSDDSRTGNRTLANLADATMNACWRGQDNSGGRARDGAKIGGRKDGQDGAQIGATETKTGRRDAHHFPGHDGGLGQNRPRPGGMHSHHGRPSEQKTAAPEEQGEQGDPGWGKMEAGRVLQGQTRRTEGPSRAGADSHGRQGSSRLRSQGERNARDEPETEPGRGTETRERTRRAEKPRRRNVRPDAASGERNVCRRAEQTRDWAGRNLEDGRAGRARS

SEQ ID NO: 83915 - protein, 20 aa, Zea mays
  Coding DNA Sequence Number=SeqID_40540
MTKVMLAEGVQSSRNGTLYL

SEQ ID NO: 83916 - protein, 56 aa, Zea mays
  Coding DNA Sequence Number=SeqID_40541
MKVCKGVDGDAILNAFCWGPSASEGPQKRDLTMFSKYASRYVFHDLRPRFIISEGK

SEQ ID NO: 83917 - protein, 141 aa, Zea mays
  Coding DNA Sequence Number=SeqID_40542
MTKRWCAHDVKRPRGCAIATAESVSRLVSDEYGEYAHAPTPSAKNGVTRRWRHDGREKRSRIANEVVATEARTIIIVRSMHAPSFSPLSDVPFVFPAFALFFLPNLLPLPTVAAASRPTLVDAGYLGDDESRSGILDNQSL

SEQ ID NO: 83918 - protein, 478 aa, Zea mays
  Coding DNA Sequence Number=SeqID_40543
  Gene Ontology: Mol. function=drug transporter activity; Cellular component=membrane; Biological process=multidrug transport
  Homolog annotation: Hit_ID=Q10A00; Match level="QueryCoverage=100%, HitCoverage=98%, E-value=1e-166, Identity=63%"; Hit description=MATE efflux family protein, expressed
  Pfam annotation: Domain name=MatE; Domain location=257-420; Score =148.0; E_value=2.7e-41; Accession=PF01554.9; Description=MatE
  Pfam annotation: Domain name=MatE; Domain location=36-196; Score =129.7; E_value=8.4e-36; Accession=PF01554.9; Description=MatE
  Pfam module annotation: Pfam domain module=MatE::MatE; Domain location=257-420::36-196
MEAALLAAAGTGRKDGGSEESGVVCEVKKQLYLAGPLVVGFLLQNTVQMVSVMFVGHLGELALASASLATSFAGVTGFSLLAGMACSLDTLCGQAFGARQHHLLGVHKQRAMLVLALVSVPVALVWAYTGDILAWCGQDPEIAAGAGSYIRCLIPAMVVYGALQCHVRFLQTQNLVVPVMLSSGATALCHPAVCWLLVRGLGLGCNGAALANAVSYLANLSFLAVYVRVAPACKATWTGFSAEAFRGVPDFLRLAVPSAVMVCMEWWSFELLVLLSGLLPNPKLETAVLSICLNTSSLAFMAPLGLGAAISTRVSNELGAGRPHAARLAARVVVLLALIVGTSEALVIVLVRDLWGYAYSSEEEVARYTARMMPVLAVSVMLDGQQCVLSGVVRGCGRQKAGAFINLAAYYLAGIPAALAFAFVRRLAGMGLWFGILCGLVVQMLSLLSVTLCTDWNKEALKAKNRVFSVALPADMET

SEQ ID NO: 83919 - protein, 129 aa, Zea mays
  Coding DNA Sequence Number=SeqID_40544
  Subcellular localization annotation: CTP_CleavageSite=17; ConfidenceScore=5.03e-01
MAEASKPMALKLVDVLVGNALPSRRRESPKGRTPSRFLPRSREASWDCVILGGGPDIVCPRGFGTLQDTIIDCHLELGEEDVENVQGPYMAHNYQCFELAPTNRQGAQAMSESQGYGLIGHKWVSGPGS

SEQ ID NO: 83920 - protein, 127 aa, Zea mays
  Coding DNA Sequence Number=SeqID_40545
MWDSIHGNGPCEDKRDNGHVCNRADRFPTFGAHRSGYEKQPAMAPKRANSKAAPSIDDAVKAALLANKKGKALADATHQESFEDDAVNSKRQYEDHPTPTALYALTVPKTRPKHHRQAPLHQRAKSP

SEQ ID NO: 83921 - protein, 126 aa, Zea mays
  Coding DNA Sequence Number=SeqID_40546
  Subcellular localization annotation: CTP_CleavageSite=56; ConfidenceScore=5.52e-01
MGRGNGNTCSTVADTPGSRPPDFTGGPRSTSPDFGLPPPRVDRANRPDSSPPTSILACARGPTDSGHLRRRPAHRCDPRDLPYVLDHFTGAISPPEMVDGVTWPTTLPLGWTVEWDVAPAGEEHEE

SEQ ID NO: 83922 - protein, 44 aa, Zea mays
  Coding DNA Sequence Number=SeqID_40547
MEQMANDEEVDDFGGLESTDFIFVILKVGCCASSDVWACASNPY

SEQ ID NO: 83923 - protein, 127 aa, Zea mays
  Coding DNA Sequence Number=SeqID_40548
  Subcellular localization annotation: CTP_CleavageSite=71; ConfidenceScore=5.04e-01
MDCEFAPSSGVLGLRRCRLAVTTATVASLCCSALAPAAPYLAICPAQRSCSPLQCSSSLSLCCSCLPLPPFASIVPALILLPFLADLLTISINFGYDDEATNNSAGYGDEQDKDKNDGGIYDLDDGY

SEQ ID NO: 83924 - protein, 894 aa, Zea mays
  Coding DNA Sequence Number=SeqID_40549
  Gene Ontology: Mol. function=nucleic acid binding
  Homolog annotation: Hit_ID=Q2QWG4; Match level="QueryCoverage=23%, HitCoverage=22%, E-value=4e-11, Identity=29%"; Hit description =Transposable element protein, putative, Transposase_28
  Pfam annotation: Domain name=Transposase_28; Domain location=1-178; Score=-44.0; E_value=0.0021; Accession=PF04195.3; Description =Putative gypsy type transposon
MSSSSSAVSASSAGPSSEDTLSDLVATELQPGHTVEFGTSRISSFRVQEMQQLRYFGDGVGRVPGAAEIPEPEGELVVHQLTPNAVVALAKYVWAVASYGGQPSVQVFAKNYCLHWQKRKKGNKIAQFGSCTFTPRTGRTLAEVVEIVACARNKWGNWWDLWFYVSGGEVEDLPGLPAAIMCSHCYVAFPPFEVAEDDVDEGALRYAACMSSGRDLVEEFIGYGVWPLAHSWVLGKVCPRRMPSLGDQLLRSPTFALDLQGRNSAALVREVEAEAMRIVGRYVPRTETLRSWDIRGSNVHLNRVFELNRLPYGGYLGDDDAVIDRRGKRAATAVDEGPSRGAVPAAATKKRKLGTAAERLGVFDCFAVDLLGTCTTPGERMSSPELRESFTRMMNVTGGRWPRNVPIPRATGEDDPWAWFCASGEISSATAAKDVAGSVAQQLKHAAAFAEQIASGALTLEFAAKGRNERLRTQLTEAMRDKSVVERKSRNLMDKLSAAEAEEEELGRWLAAEKEDADKACAEAQAARAEAKLARAEASLALQRAAKAEANHRSLRGHLDKAEASTRTGVDRARAFLVDTYQQLGAHTTPFDASGKEVGLCFLGWLQEELEVLSSIVTGLISFTSLITCEGAANALSREGCRHFEVFDRSDEDFDREIFQVEDVVLKRSTGVFYDRMWGSHDRDTVQERSNRAMEEMANDEEVEDLGDLKSMSPLVEGVRAGAEDQPVPPTGVGEDDPLAAAVLHEDTTGAAVPAFEDPAASASPTQVLTSGPAQASPTNGINFVAAANAVPANDSFSGSESGSFLSDGGGFESPFSWTKESSDEDLDYFAALDVAAEESSPRLEMGEELDPTAGVRIECRQRKVVAKHSVGESSRSGRRHQMGLERTRLRVDR

SEQ ID NO: 83925 - protein, 185 aa, Zea mays
  Coding DNA Sequence Number=SeqID_40550
MVVRRSPPVWVLVGGGGVVDFGDVEAVVVGPGPLGAGKRGWLDAGFARCGRVVVDGMCALLPSGCRSVVLWTFCPWWPWSLDNPCRVSTVFTVKQTEESAWLLCPSAASSPYVVVAALGVVFLTTGGLFGWLLVGNVLHLMMIAVVPAEVWLRYLGSAGLWRVLGLPLRLNLALMELFGPGILLK

SEQ ID NO: 83926 - protein, 133 aa, Zea mays
  Coding DNA Sequence Number=SeqID_40551
  Subcellular localization annotation: CTP_CleavageSite=67; ConfidenceScore=5.32e-01
MGRGNGNGCSTVADTPGSRPFAHRASQCTPAPDFTGGPRSTSPDFGLPPPRVDRANWPDSSPPTSIPACARGPTDSSHLRRRPAHRCDPRDLPYVLDHFTGAISPPRLSPPRRLGGDSVELFEKVVKKPHMRL

SEQ ID NO: 83927 - protein, 125 aa, Zea mays
  Coding DNA Sequence Number=SeqID_40552
MNNIKLHLYLRLDRRQKSKRDARVNTSQREQYEDLRKSKAPNSRSEAEWRSGGATLLWRAIARVLRQGMGNQGHGEAELTRATYTAEIRRRSRNKPKIAMDGDGASRAHAVRGKSVGALQRGTTG

SEQ ID NO: 83928 - protein, 227 aa, Zea mays
  Coding DNA Sequence Number=SeqID_40553
  Gene Ontology: Mol. function=nucleotide binding; Cellular component =membrane; Biological process=intracellular protein transport across a membrane
  Homolog annotation: Hit_ID=A2YK44; Match level="QueryCoverage=100%, HitCoverage=21%, E-value=1e-101, Identity=79%"; Hit description =Preprotein translocase secA subunit
  Pfam annotation: Domain name=SecA_SW; Domain location=25-213; Score= -47.5; E_value=1.9e-06; Accession=PF07516.4; Description=SecA Wing and Scaffold domain
YMQAVADEIVLVNVDPQKPPKAWNLVKLLDEFVSLGGKLSESFKDIREQNLQSALEQMQGWGPVKADSFALPNMPLPPDSFRGIRKRTSSITRWFSICVDDTSKKGRYTNTVNLLRKYFGDFLIATYLNAVQESRYDDAYIGGIEREVLLKTLDTLWKDHLVNMNKLSSAVNVRSFGHRNPLEEYKIDGCRFFISMLSATRRLTVESLVHYWSSPMESEEIFNTEDQ

SEQ ID NO: 83929 - protein, 672 aa, Zea mays
  Coding DNA Sequence Number=SeqID_40554
  Gene Ontology: Mol. function=triacylglycerol lipase activity; Biological process=lipid metabolic process
  Homolog annotation: Hit_ID=Q53LH1; Match level="QueryCoverage=98%, HitCoverage=97%, E-value=0.0, Identity=64%"; Hit description=Lipase, putative
  Pfam annotation: Domain name=Lipase_3; Domain location=107-245; Score= 36.9; E_value=7.2e-08; Accession=PF01764.16; Description=Lipase (class 3)
MDDAAAEEEASMFETSHVLGALLASSPLLARAWDRCTAASAAAPWFVHGEDGGKVYVGFSGVQAALTAAGAAVAGGGADIFAPVSLGGDAAGRMFAPLVAAEPDPAATGEPVAVQALALQCFLKLCCSPDFQIAFSSVVKLLVCEVNSDPRTQNRMLLNQIRGKAVVFTGHSLGGAVAALTALHYLCISSSSSPPAPPVLCVTFGSPLLGNEALSRAILREHWGGNFCHVVSQHDVVPRLLFCSPDAVPAHIIVGMQLQQWPAWTRHTGAVSTVTAHMADTDKDVLRQLIQTHVGAVAVEQKLAASETTGGSPYRPFGTYVLCSPEGAACVDNPTAAVQMLYATFASQSSAGAESPEAAHSCYGELVLKMPHHLLLKRWLRVDDDMPATPNYDDGVSLALEASGIDVMVRAMEASTARHWLKTSKRAGRRPSLNCARLATQLGRVTPCRAQIEWYKALFDAEMGYYDAFKQRRSPRKYTKVNLNRIKLGQFWDRVLSMLDAGQLPHDFHRRAKWVNASRFYQLLVEPLDIADYHRHGHHLTSGSYMTHGRERRYELFDRWWHEKGCTGAGGGITSSMSAASASSRRRSKYAGLTQDPCFWARVEEAREQTESARRERDVAELAMKLEELQEFERYSRELVATKEVSVDVLAPQSSYTLWVEDWNQLKLRAQG

SEQ ID NO: 83930 - protein, 94 aa, Zea mays
  Coding DNA Sequence Number=SeqID_40555
MEKDRQDASQKRRAFARVGDSRREVKMARGVAKSIAPGTCKPPPGSEAGQLAVVPTLVAAGSVAVTQKAQGAACVNLHSCPSRLLLTYGQPNED

SEQ ID NO: 83931 - protein, 149 aa, Zea mays
  Coding DNA Sequence Number=SeqID_40556
  Gene Ontology: Cellular component=integral to membrane
  Homolog annotation: Hit_ID=A2YK48; Match level="QueryCoverage=73%, HitCoverage=24%, E-value=3e-45, Identity=81%"; Hit description =Putative uncharacterized protein
MAAKATGHVGTEAMEVSVEVANGDDDAARLDDDGRPRRRGTMWTASAHIITAVIGAGVLSLAWAMAQLGWAAGTAMMLLFAGISYYTSTLLAECYRCGEPGTGKRNYTYTEAVRAILGGAKFKLCGVIQYANLVGIAVGYTIAASISML

SEQ ID NO: 83932 - protein, 242 aa, Zea mays
  Coding DNA Sequence Number=SeqID_40557
  Gene Ontology: Mol. function=carboxyl- or carbamoyltransferase activity; Cellular component=ornithine carbamoyltransferase complex; Biological process=amino acid metabolic process
  Homolog annotation: Hit_ID=Q8SA97; Match level="QueryCoverage=53%, HitCoverage=23%, E-value=9e-12, Identity=41%"; Hit description =Ornithine carbamoyltransferase
MAPPVDVAGLRPRMGDVEAPPKPRSSLSSVAEVESEPLGRARRRPSAEARAESEPWGRAKRRPDCLSVSLLSSGTAVGVAQAALSFCQVGQWSGEVTAVTSALPAGGMRQDKGLYADGGYQLRIRSLEGLNALRNASAGLVVPSCELAVARGERAIRDRLGFFTYAPALPFRKEEGGKAPCCPRWAPNMVSPVSCKRVIRVDVRAPFVRGRLGAQRHAQKYLRVICRTRSPGDGVRGLDASL

SEQ ID NO: 83933 - protein, 196 aa, Zea mays
  Coding DNA Sequence Number=SeqID_40558
MAERYQLPRSCVPPMMRRKDGGYPPSGGLEGGKTRCIREHEDMVAFQGGHPPFKGDYPYLRPQPSRAESSPTRSKALPCGARAGSRMSCKPAQSRRSQTAGPGKGDTPKRILPCEGTRLRATLLIRGSKAGPPEGFDSRLRSCGPYTHYWSEVRRSAPRKGSTAASGYSGSAPITDQGFEGWPPKGSQPPQTPSEG

SEQ ID NO: 83934 - protein, 191 aa, Zea mays
  Coding DNA Sequence Number=SeqID_40559
MARRGGSWLGVDRRGRLSSKGEGFDAGYGRRSEGEQGAAAPLVRTAQRGLLRLAAVADRHAAGGCARAVRNELGSDGQRERGVRRAGGGRVGDCLGRECPRGRVDYCSPASHGSCCTCARMAAMAAGSWVSDQRREGGRLPTSGTSAGKALAGSGRGGSEPPREVAMNREESGVWEKVGLRPGMVAAPGRG

SEQ ID NO: 83935 - protein, 230 aa, Zea mays
  Coding DNA Sequence Number=SeqID_40560
  Gene Ontology: Mol. function=nucleotide binding; Cellular component =membrane; Biological process=intracellular protein transport across a membrane
  Homolog annotation: Hit_ID=A2YK44; Match level="QueryCoverage=81%, HitCoverage=21%, E-value=5e-73, Identity=63%"; Hit description =Preprotein translocase secA subunit
MGPQSALATKGTISRPRSGGEGDDTTGASSVESSEYLSELLKVHKIPHNVLNARPKYAAREAEIIAQAGRKHAITISTNMAGRGTDIILGGNPKGLSNVELSPSSVGLLAKAAIMSKYIHKSERNEWSLSKAKSTIAESIEMGQMIGMEKLQERMTEESEMYPLCDAIGLAYLSVLRDCEVHCSFEGAAVKRLGGLHVVGTSLHESRRIDNQISCPSSAAFILTLDASMH

SEQ ID NO: 83936 - protein, 41 aa, Zea mays
  Coding DNA Sequence Number=SeqID_40561
MAGGIKLAGAKGKWLAGEVASYWCIILCPKIWGLKSSLLLK

SEQ ID NO: 83937 - protein, 242 aa, Zea mays
  Coding DNA Sequence Number=SeqID_40562
MLVEWPGSVGVEGGALPRRWGIEAACGTGRVNEAAHEDGEAARGVGNGARRGAWEGWVLGSDSKRESRSVGGEEPARGNTSSSKDVTGNDDAIGGEVKTVIPLVVRGVAKEEAASGAWRQLMRSSSGSVGIAGTAEHAEGIYLIANRERRLEEKAADHIGGEKTEYRGGPEITMNQVKSLLRLRRRGSKRETTPGWPRRRCQMVEVVVETRTGGGDALTSSAAISTDSPVAPDPSMIVTSTA

SEQ ID NO: 83938 - protein, 141 aa, Zea mays
  Coding DNA Sequence Number=SeqID_40563
MGVALRETASAARLQTETQREPTPPSEDFGDSEYLEEEFSSESEGSPAPVPPPASSDDSDDSQGITAEVWTYIRAVERSGLAGLDESEYSSDEEDSSEEDGGGGGKGDDDDDDDGGDGGDDDGDGGDGGSRGGSRGSKASG

SEQ ID NO: 83939 - protein, 197 aa, Zea mays
  Coding DNA Sequence Number=SeqID_40564
MARVACTLRGKRLDGGVSVLSVGVNLICLCNRFRLFVSPMNYNVCVTGETLLGKSLYERPDRKSALYRRLNQLRKMPPRTRKTAHKHTGPIGVPCHQLAPRHEDSSSGSNDPIRDLEAKVNQLQTELQRRTDIWVADGNRINELRSDIHRLQDQFADRDLALDWAVHSHSLAWAKEAKARARVEELNSAIDTLAGLL

SEQ ID NO: 83940 - protein, 185 aa, Zea mays
  Coding DNA Sequence Number=SeqID_40565
  Gene Ontology: Mol. function=pectinesterase activity; Cellular component=cell wall; Biological process=cell wall modification
  Homolog annotation: Hit_ID=Q2QZJ9; Match level="QueryCoverage=98%, HitCoverage=35%, E-value=1e-36, Identity=47%"; Hit description =Pectinesterase family protein, expressed
  Pfam annotation: Domain name=Pectinesterase; Domain location=1-174; Score=-193.7; E_value=6e-07; Accession=PF01095.10; Description =Pectinesterase
MGTKATFYNCTIEGGQGALYDQTGLHYFKACVIKGTIDFIFGSAKSFYEECKIISVFKEAVALPMAPPEQDQSRNPIKIALGKSGLAFKTCTIEGEGEKIYLGRVGTHVIYSYTDIGKEIVGIISDGQDVQTVERGYYSATFKCYGPRMSPMVTSTLTYVQAIPFIELHYISGESWIPSLPPDEE

SEQ ID NO: 83941 - protein, 153 aa, Zea mays
  Coding DNA Sequence Number=SeqID_40566
MGKKKNSGSSLHHSGDKRKREPSPPSEDFGDSEYSEEEFSSESERSPVHASPPMSSDDSQGIAAKVWTYIRAVERSGLEGSDESEVSSDKENSFDSSEEESGGDGDNEGDGSDGDDGEGDGDGNGGKGDGKGDDDGGKGGGGNSKASGKAPLS

SEQ ID NO: 83942 - protein, 147 aa, Zea mays
  Coding DNA Sequence Number=SeqID_40567
MGKKRKREPTPPSEDFSDSEYSEEEFSSESEGSPAPIPLRESSDDSDDSQGLAAEVWTYIRAIERSGLAGSDESEYSSDEEDSSEEDGGDDGEGDDDDNDNGGDGGGDDGDGGDGGSRGGNSSSRGGSGGSRGGSDDDGRGGNKASG

SEQ ID NO: 83943 - protein, 270 aa, Zea mays
  Coding DNA Sequence Number=SeqID_40568
MARLRHTARKSVIPFLPSRLAERPLRRTVSGQSSQLKRLHHRLREEQERRRQHREQQGSSSPPQQEVESVRRRSSAPQLEAFDRHTWSIEYRCVVYQHSRGRYPDRWEATCLVRRPEDDLRGAEAVSEHYSISERDTAEAAMQDAAQRALSQYCSLFGGVADGLNLRYYPRRPTGNTESVVVSPVGEDNPRLSSTVNLVAVLNTELDHSLDELSRARTEIAELRAELAERRHQEGGSPAPVGTQHPYRSPPRGHHTYGSPACKTRIDLDP

SEQ ID NO: 83944 - protein, 443 aa, Zea mays
  Coding DNA Sequence Number=SeqID_40569
MPEGFGPETSRWATWCFDYDKMPEGGTSSRLPEKGHSSSPRLRRRWRGSSSTLGVNSTIGEVRPSLGRQHGRRISTPKDDVSTTPGPSPLGSPLGTRSEQTARPAAPKPQPAVPRGHQPGSWARQLDSGVGPGQAPADEAPFFEPTLPLSAMAPLPPAPAHRRAAEGLDSHNEQTLALKVPLQTELRFHPRMYEQRPTLEGLRGDKTPGGLPMPAPAAATTTPAPKWPNSSSDDLRADAAATSSSPTSPLKGRGQAIKAKEPEAQSADGGGDLVGNEDIFSRHHLNVDDGSHLPTCGSPLGSSQTDEAPTSVQEAFEPNALKLTTLVASPALSESAPSARPPGCLMKILEAERWLKGTNFRKVAFLQQQQDESDASAPHPGAQKPSRTESSPTRSKVLPLRHGGWVPRVMQAAPGQKEPNRRARSAQQPSGYKHFSTIARTSG

SEQ ID NO: 83945 - protein, 185 aa, Zea mays
  Coding DNA Sequence Number=SeqID_40570
  Gene Ontology: Mol. function=binding
  Homolog annotation: Hit_ID=Q94LU2; Match level="QueryCoverage=80%, HitCoverage=13%, E-value=2e-57, Identity=72%"; Hit description =Putative uncharacterized protein OSJNBa0082M15.22
  Pfam annotation: Domain name=TPR_1; Domain location=107-140; Score =21.2; E_value=0.0039; Accession=PF00515.19; Description =Tetratricopeptide repeat
  Pfam annotation: Domain name=TPR_2; Domain location=107-140; Score =21.0; E_value=0.0045; Accession=PF07719.8; Description =Tetratricopeptide repeat
  Pfam annotation: Domain name=TPR_2; Domain location=73-106; Score =8.9; E_value=2.3; Accession=PF07719.8; Description=Tetratricopeptide repeat
  Pfam module annotation: Pfam domain module=TPR_1::TPR_2::TPR_2; Domain location=107-140::107-140::73-106
MVPRYDNPRNAWTMSVAMPSVGLGFMSCNNHESLIDFDPAAEANLRRQLEQTLAAEPSSPLHHYNLGVFLWDRAEAEQEGDGEEARKLRAEASEHFLAAAKLNPNDGVPFRFLGHHYARGGDNQRAVKCYHRAVTLNPDDSEAGDTLCGLLDVEGKESLELAVCKEAAGKSPRAFWAFRRLGYLQ

SEQ ID NO: 83946 - protein, 85 aa, Zea mays
  Coding DNA Sequence Number=SeqID_40571
MADLGDCAENGGVLHTRSETESFLDNELREGVFRTFDFLKPKRLFSRIKLVTKNDLAPRRGYCWDHASSPKVLQEETASAEAVYT

SEQ ID NO: 83947 - protein, 134 aa, Zea mays
  Coding DNA Sequence Number=SeqID_40572
  Subcellular localization annotation: CTP_CleavageSite=9; ConfidenceScore=5.15e-01
MKPWKETFRSSKTTTSSRRGLAATPSRLPVKAAFIYVSFPHFDLFLPSKTGCDNILEVAKQETIACVTNTISFKFLSSDILSIGNNLFYGKKCQYKVLKGKEITKKEVSTNDEKKNIKVTPPQILLLMQFKIPL

SEQ ID NO: 83948 - protein, 207 aa, Zea mays
  Coding DNA Sequence Number=SeqID_40573
MGAQAHTSCNRHAGCYVQETAPPLAPLPCLLDCGTSTATRGNPAYDPTVPARHAVKGTGKGDTPKGILLRKGNGPRAPLLIRVDRAEVRLTASKSGFGRHRKLHLARSQGSDLASAPEDDELRLARPQGSDSASAPEDAELRLARPQGSDSASAPEDDELRLARPQGSDSTSTSEDRLDLDLRGASASPYPGLGPTTSQEGPSLPYP

SEQ ID NO: 83949 - protein, 312 aa, Zea mays
  Coding DNA Sequence Number=SeqID_40574
MGGADGLNEGGAFSGCHHISTDGDVHLSTNKARRQVPTLVLAAKARRRTECCILAGQQQFAFPGMAGGRLLRKAGGWFPPPEAGRGGDQPARAGGGVSGRGSKRRFAFAIMTASKKGLGKGDTPKGTLLREGNRLRASLLIRGSKVGPSEGFNSRLRARGLHTHYWSEVRRPAPRKGSTAASGHSGSAPTTDQGFVGWPSKGSQSPQTCTDQGFIAFLINHSYMILMFQMGSLMLGVGRGRPERGHLTSAYSTGSGRLDTGIVPKALPCGPDYKLVTKFADEDMMLNSMDASLVIPPVILWMDVHVSLYFDE

SEQ ID NO: 83950 - protein, 182 aa, Zea mays
  Coding DNA Sequence Number=SeqID_40575
  Gene Ontology: Mol. function=hydrogen ion transporting ATP synthase activity, rotational mechanism; Cellular component=proton -transporting ATP synthase complex, coupling factor F(o); Biological process=ATP synthesis coupled proton transport
  Homolog annotation: Hit_ID=P09004; Match level="QueryCoverage=91%, HitCoverage=76%, E-value=7e-80, Identity=92%"; Hit description=ATP synthase protein MI25
  Pfam annotation: Domain name=Mt_ATP-synt_B; Domain location=1-152; Score=120.1; E_value=6.7e-33; Accession=PF05405.5; Description =Mitochondrial ATP synthase B chain precursor (ATP-synt_B)
MSFALLGARCFIGFLILSRKSLGKTFKETLDGRIESIQESLQQFFNPNEVILEESNEQQRLLNLRISLRICSTINVVESLSAARCAPKCEKTVQALLCQNLNLKSATLLNATSSRRIRLQDDIVTGFHFSVSERFVSGSTTLVEASTVEQIREAFLLEPRDLLREGFIVLRNEFFDSLFEFK

SEQ ID NO: 83951 - protein, 94 aa, Zea mays
  Coding DNA Sequence Number=SeqID_40576
  Homolog annotation: Hit_ID=A7PHC4; Match level="QueryCoverage=30%, HitCoverage=36%, E-value=3e-08, Identity=93%"; Hit description =Chromosome chr17 scaffold_16, whole genome shotgun sequence
MVKPELLEERIFNSITWAPRLWGKLADRDWKPIAFIFLIAGHMFITAWKIRQPTRNRNDPIARAELYQLSYIPPKPSGACMKESDASSILIPGG

SEQ ID NO: 83952 - protein, 317 aa, Zea mays
  Coding DNA Sequence Number=SeqID_40577
MTSLTVSDLLTLQTAVAVDRCSLDTGQSGAPQAGAILSGTIIRGTPKTPNLSCPLKDTISPRTSPASGKGSRPRRIYVSPEGPLKQQTHLRLARGPVFAKKQPWPNRHDDRPHFATPLTGLTRRQRRLRRSDCCATRQRLGLGLGTGRRRTLPRPTLRLGLGLDPGRRRAPPRPTPGLRFDLDLGRQTRPRPRRSLRLALPRARTDHVTGGAIITLPLASSGYGEQDRRPIWLAPVKQIMMALRMLHDDGGSQPRYGSKETSARTRQPRQLSFRKAPALLRRPRRHTNRGPPGVETPTVGAPGRCLLRVDKQLPVKI

SEQ ID NO: 83953 - protein, 231 aa, Zea mays
  Coding DNA Sequence Number=SeqID_40578
  Homolog annotation: Hit_ID=Q6ZGL3; Match level="QueryCoverage=94%, HitCoverage=54%, E-value=1e-113, Identity=84%"; Hit description=Leaf senescence related protein-like
  Pfam annotation: Domain name=DUF231; Domain location=53-222; Score =107.4; E_value=4.4e-29; Accession=PF03005.6; Description=Arabidopsis proteins of unknown function
MTKDLKLLDETKNSEVRKDGIKGTYRVDVDIPANDWINVTKFYDVLIFNTGHWWDRYKFPKDTPLVFYKGGKPIEPPLDMHNGLKVVLKSIASYIEREVPRKTLKLWRTQSPRHFYGGEWDHNGSCVSDRRLEEHELNSWFDPQFGGVNKEARTVNLAIQEALAGTEIQLLNLTYMSEFRADAHPAIWLGKKDAVAVYGQDCMHWCLPGVPDTWVDILAAQIMHHFKQEKG

SEQ ID NO: 83954 - protein, 117 aa, Zea mays
  Coding DNA Sequence Number=SeqID_40579
MAAWRGGGRARAAWRGGGRAAGRGGGRGGGEAEGEEKGEGKEKEEESRPGGRETRRGKGATQGETVEPAAGRTAGRGTAEPAGPAAIGDGRGVVPGGENAGGGGPATGDGEGTERKA

SEQ ID NO: 83955 - protein, 32 aa, Zea mays
  Coding DNA Sequence Number=SeqID_40580
MAKVAVQVLLDEGDCNLADGEYVLIQEQGTEQ

SEQ ID NO: 83956 - protein, 126 aa, Zea mays
  Coding DNA Sequence Number=SeqID_40581
MSGRYTIPSKVKTEAITTKGSNTLPSQLGCDKAPSDHQPQEAEGDEASEEDLTHNQEAIFTTYSFSSFGKPSPAAWALAQPLVMAPTSSNNQQPKGQRQIQQQRDAREESEARTVNSTVQVSRHIY

SEQ ID NO: 83957 - protein, 51 aa, Zea mays
  Coding DNA Sequence Number=SeqID_40582
MADGDNVFPSAADGNNRSLEDMVAGVTWSSILPPGWTVEWDPTLAEEEHEE

SEQ ID NO: 83958 - protein, 200 aa, Zea mays
  Coding DNA Sequence Number=SeqID_40583
MAWLAGLWWWVLGRLLARPAAISRYILLWLLKNVRINGLSRYFKHWLQHTPSQVQCDDADTGFQPTSLPKGSTNDALMASNVVDSSLSVVLQTIMQHRSSAKEKDKGKNRLLHRVRLQLLHISLRTTKNLENTQAAIEYIHSLSRAQPARSLNGTGLCPASRSLSTHAATTSSTPQLKAHHVKHPGRHYVKQNRRREELM

SEQ ID NO: 83959 - protein, 283 aa, Zea mays
  Coding DNA Sequence Number=SeqID_40584
MWSLEVCCRMAHRTVRYATGHCPTVQCANCACSVLFARRRALNALQSTVARERRVPWCTGHCPVVHRTLSGGTPDNPVRQTKAIALHGLTTFCGFHPLELSTQPIGLFPAEKEDDPMWKDRVEHAKDIWAIYPGQTTHLTVRCMNALYRLQVMRGEAMSHLMALLEATKITLDNREELVVDLSTEMVEKDLQVEQLSNEIQELEELVGTREDTIEVLEDQLINTQQQLAEANQHLDMHHQEIQDMEANEDVNIEGGEEPASSLDTAGSERPPSPESSVASFAH

SEQ ID NO: 83960 - protein, 132 aa, Zea mays
  Coding DNA Sequence Number=SeqID_40585
  Subcellular localization annotation: CTP_CleavageSite=44; ConfidenceScore=5.16e-01
MKLWKETSRSSKTTTSSRCGLAATPSRLPVKAALSTFLFRTLIYCDVDVGATFHQHLLNPAFPNHRVDKQQVLAGVIEFKPLISSDEGYGVLQPSYSSDENRIFGPPIEVFDHSCISNLKDTVPRCLKSSKE

SEQ ID NO: 83961 - protein, 70 aa, Zea mays
  Coding DNA Sequence Number=SeqID_40586
MAKRRAQTTGGVGDARTERGQAGLTGAGRCGFAPPFPSRLTAAGRLHGTHGIFTAGAGSSVEFTVSVVHL

SEQ ID NO: 83962 - protein, 178 aa, Zea mays
  Coding DNA Sequence Number=SeqID_40587
  Subcellular localization annotation: CTP_CleavageSite=57; ConfidenceScore=5.17e-01
MQFNPRAREASQGAMESTRARNRRKAHRGGRSTLVDGRVKSGDLDQTSPARQSSIPRSASFTEARRVSSEGWTGREMAQFAGLRWRVIGRPLASYMQGKLRRSHAPVLGLPPLHSTHVITIHGYKYGVRALVTPGVLQPSPLKGISSRDLGRDPLEGSKKIQKGRWGWGFGLRTDSFG

SEQ ID NO: 83963 - protein, 266 aa, Zea mays
  Coding DNA Sequence Number=SeqID_40588
MNSSLSGKGEGAAAINHRTVQWCTGLSGREAPTCGDSSQMGRELKKKKLWITYSPPSRCSQLPQLIQGGGRRENKGSQRLQPSDGGSPLLKESFEAEEVVELSIIDETPLAKMEVELKKMSSPMLSVETSKKNMTKEIGETKTAPKTSEEKVATTIMATEDASLCQAITTMVITEELPTSMSLAAEEAKAKVLLAPPELVKSKGDALEIIPGDNKGKNFMEAEEPKPKDDPKLKIALAAINQVEKTVDEVVLKICEDIYDEVMKEG

SEQ ID NO: 83964 - protein, 35 aa, Zea mays
  Coding DNA Sequence Number=SeqID_40589
MGEFSCDKWLEAVEGNRNEVLGNFNKKEGSPIHPL

SEQ ID NO: 83965 - protein, 52 aa, Zea mays
  Coding DNA Sequence Number=SeqID_40590
METMNELGGLDQNALSEEDQKQLAKSERFAISLSKDMLRPVATYGHYCVLLK

SEQ ID NO: 83966 - protein, 103 aa, Zea mays
  Coding DNA Sequence Number=SeqID_40591
  Subcellular localization annotation: CTP_CleavageSite=58; ConfidenceScore=5.12e-01
MTADIGLATVVAQPLVSVLHLFGRGPTHMMGLGMMALALVPSGRPCMVAMDRARSWTVVAKVSSVRGCRRGWWYKHHGGVWQWDGGGRWMWRVGGRWRIAGHL

SEQ ID NO: 83967 - protein, 105 aa, Zea mays
  Coding DNA Sequence Number=SeqID_40592
  Subcellular localization annotation: CTP_CleavageSite=38; ConfidenceScore=5.75e-01
MTPTHAPSSLLRAPPVPCAHPHLISRSFTPSRALPTLPAVAGDQRLRSRPSSSPETTPSLPELRPEVRHPSPCPISLIAPCARPISPSPVLGRIGPPCSRGGQPI

SEQ ID NO: 83968 - protein, 58 aa, Zea mays
  Coding DNA Sequence Number=SeqID_40593
MRVEWDALSRIIRGTGVAMRLMVLGIGSGNGCQHCNHCLGEDEAVEGDFQEFQDYDEF

SEQ ID NO: 83969 - protein, 133 aa, Zea mays
  Coding DNA Sequence Number=SeqID_40594
MGTGARTPARGAEARGAAASVRLGHGGVRAHRGRGRRGRGGGARRGGAEAECGNAGGGGLAGAGAGAAEGLAGEGARARVGRGRACQGGRARRARSRGDSPGKGHGRGDSPGREGAARRGGAGHVGRGSAGRE

SEQ ID NO: 83970 - protein, 143 aa, Zea mays
  Coding DNA Sequence Number=SeqID_40595
MDNDPWGCVVYETEIGIRIKLVLLAKQTPQPNSYMSRGRGVDSSHQEILQGAGYTTPPQYTVQLFEKHRVPRCRVRMTLEPHPLQPGWHSLDSESFGYRAEDTIEAIALHGLTTFCGFHPLELSTHPIGLFPTEKEDDPMWKD

SEQ ID NO: 83971 - protein, 128 aa, Zea mays
  Coding DNA Sequence Number=SeqID_40596
MSQLMALLEATKITLDNREELVVDLSTEMVEKDLQVEQMANQIQELEELVGARENTIKVLEDQLINTQQQLEEANQHLDMHHQEIQDMEANEDVDIEGGEEPEPASSLDTASSGRPPSPESSIASFIH

SEQ ID NO: 83972 - protein, 66 aa, Zea mays
  Coding DNA Sequence Number=SeqID_40597
MALAGRNWLVGVRRELFLVVDLENEEESEVTEEKTPPPPLESRARTWLYFDICESEPDSPVNKGKP

SEQ ID NO: 83973 - protein, 104 aa, Zea mays
  Coding DNA Sequence Number=SeqID_40598
  Homolog annotation: Hit_ID=Q6QP51; Match level="QueryCoverage=47%, HitCoverage=22%, E-value=3e-11, Identity=65%"; Hit description =Putative growth-regulating factor 1
MAVAGGRKQRSRRQPSSRPLMGQRENPLPRDRERGYPERDPSPRRKWAPSPPTDQRFEGWPLGGVQQTPQSARAPRPLLVRGSKAGPSKGLNDRLRPLGLRAHY

SEQ ID NO: 83974 - protein, 233 aa, Zea mays
  Coding DNA Sequence Number=SeqID_40599
MNKTPALKVPLQTELRFHLRRHEQPHTIGGPAEQQKADGWLAAARSNSDNDDFCSEGLNSSSDDLRADAAAIRPLPTSSLERRGRGEGRRVGCQSVGGTGYLVGGETSSGCRGGRGWWSPSWVTTGEGMRPGCLMKILEAERWLKAIMGLVFSNTLQGPPHTTRGLGPTRHASWPRAEEAKPPRAVRATAQRLQAFLHFRPDQRVKGRTTMQSACNRAKWAHPFDSNASSMEA

SEQ ID NO: 83975 - protein, 120 aa, Zea mays
  Coding DNA Sequence Number=SeqID_40600
MAHRRAWSTRAGGRPKSDEVDLGLPVKSGLVRGLGKLYGPLAELAEALARLGGGWSGLATVAEALAAMAGGKELTGAKEGWLAGDALAANASARSGAWHSVEHEAAQREVEFKRGLAPNL

SEQ ID NO: 83976 - protein, 76 aa, Zea mays
  Coding DNA Sequence Number=SeqID_40601
MALAGRNWLVGVRRELFLVVDLENEEESEVTEEKTPPPPLESRARTWLYFDICESEPDSPVNKGKPRCMQPLSLSF

SEQ ID NO: 83977 - protein, 241 aa, Zea mays
  Coding DNA Sequence Number=SeqID_40602
ELESFYEILVFQWSCGDYFKRSDIPKHPSTSGHALFLEDNHVALSDPLVYHHQARLMESIPIGQDSVESASARVLMVVLELQLTRGHSRQKWQQLYTGSYAAFKMMEMAKNSACTQAQERLEETKVQAEQVIGLKHQVTELQMQHQADQNHIKELEHQLTNAHSKLKILSKQQEEICLYAVAVREDLKETMSFISHLDQAIKELNRAHPMEFQVAQRLVNHLQQSVHRLNAAVDPTPASVD

SEQ ID NO: 83978 - protein, 93 aa, Zea mays
  Coding DNA Sequence Number=SeqID_40603
MAIWRVQPWPSQWRKGTRGRRPRRGGLTAALDSSGEQSREQQSRDDQIKGTGGLLTLGEVLESRSNSGGVGTRRGDGGGALAAQEPLWVFNSN

SEQ ID NO: 83979 - protein, 276 aa, Zea mays
  Coding DNA Sequence Number=SeqID_40604
MNSPTPASGGDTPFSSDFLSHDGFPSILWEVLNSAGYPTPPLYMVQLYEEHRVPCCRVWLTLEAHPLQPGWRSLDSETIGFRTDDTIEAAAMKTLTTFCGYHPLEMVMHPLGLFLAEKKDDPMWCNRVSHLKDVWAMYPDLVGRVTVQCMSALYRLQALQSDAMAHLANIAQTTKLTLDSREDFVVDLSSELVEKDLQRELEEANDHLDMHHLEMEANEAGSEGEEAPEELGPAPGANGTTSAMPPSPMAARQRRRHNEQVPPPPPPAPTVQELMA

SEQ ID NO: 83980 - protein, 136 aa, Zea mays
  Coding DNA Sequence Number=SeqID_40605
MNSLDGHQWREREGETGEEEAAVSGSVHSAGASVGAIGGSGRTGSGVAAGTSGVGTVGSLPGAAFGWKGESREERRRTRRGCDGSTEYEQVLQQGGEETCVATVHMASRLAYRRREQGVTKSTPLKKNLVLEIKKG

SEQ ID NO: 83981 - protein, 154 aa, Zea mays
  Coding DNA Sequence Number=SeqID_40606
MPPCCAARRVVLVHACCCTVLCIALVPLYRRPTLCSHLTVVFLPRCWDSSASTTCCYTAVSTALLTSSTVNPRQISQFASAVPISYASVSCAVARLAVILRLVEICHASLSPVRLLVPSIQLVEAMYEFHVKTFYSLTIEAATACCATNTRLRR

SEQ ID NO: 83982 - protein, 89 aa, Zea mays
  Coding DNA Sequence Number=SeqID_40607
VRLLAALGFVGAGVAAGALGQTRGSGRVGEARLSRLGATDDGFCGLLAAADTQQLASSSSGMGGGYTVEGAEETLEIEETYCQMGPTTM

SEQ ID NO: 83983 - protein, 163 aa, Zea mays
  Coding DNA Sequence Number=SeqID_40608
  Subcellular localization annotation: CTP_CleavageSite=26; ConfidenceScore=5.33e-01
MFPFPVPCPDGARRARFPRPASPSPRAPAPGEPSPRAPAPCEPLPMRALPRRRLGRATPSSTSPLLGPGEPLPHRGPAPASPPRHHAPCRAPVAAPGLVPRTLAVRRRLCCAPRAPAPRASGLALERAPSAACPSRAPAASRHARLHGSCALGTRSVLSRVRP

SEQ ID NO: 83984 - protein, 40 aa, Zea mays
  Coding DNA Sequence Number=SeqID_40609
MRLMVFGIDPSNGCQHCNHCSGEDEGMEGDFQEFQDYDEF

SEQ ID NO: 83985 - protein, 45 aa, Zea mays
  Coding DNA Sequence Number=SeqID_40610
MESHDLRAEWESRLVGCLWCNLCSGKEEGAEADLQEFQDFDEFED

SEQ ID NO: 83986 - protein, 161 aa, Zea mays
  Coding DNA Sequence Number=SeqID_40611
  Subcellular localization annotation: CTP_CleavageSite=40; ConfidenceScore=5.24e-01
METRRPKRATSRASTQAGRRARRARGQRPGRGRFGLRWARVSKKTALWALFGEDKQGLGEIVAAVSICKPSVVDGQQRIAASGQEQRQGVASVLGCGAAPRLGHAERSCAGTGQGKRRAGLRYCSRTSWVTEAGHAGGPHGGGRGAAGPQEGKGGDEVGWR

SEQ ID NO: 83987 - protein, 493 aa, Zea mays
  Coding DNA Sequence Number=SeqID_40612
  Homolog annotation: Hit_ID=A3C568; Match level="QueryCoverage=16%, HitCoverage=20%, E-value=1e-17, Identity=48%"; Hit description =Putative uncharacterized protein
MASHLSYLASTVSASVAASIEEEDASTFPVCITYKGAPSSLLDDIEAYLNPNSRELLAVADPALRLTRYFAAVKLLLPHDIGGVGCLACGPVGQCSPRPSSGRYIRCSTFGGGSPDEHNLHTGGQVVKAPTIERNLSCNLEELYKGITKKLKISREIVDASGWTSPCQIYAWLISAIGFKLNLHQCVDHLVELIDLYLAIWVCNWASASPDVVGQRQRHPLAPIGGSGDGTSFHLQQPMEADDGASGVWNDSRVDAPTPHGCAVHPGSLPGCSWRSLRVPVDKRSLEMAVEVDVRWEPMGAQEYYDYWRAMYSARSNRGYFKLDSYLDPLFMSIIKDPDLWCKEMGKFAQAQKGFNYASNYNYRGVGIEGHPIMVVVGAHFLLQCLDLEWFVLHVVRPRVAKFVELENPVERDLPIATQLLSRSNGQKYLVTHLYMMVVYKLVIDISILMKGGGHYQILVHIWASVDKTTSVVHLSNSTLSFNVGRDDTDLSR

SEQ ID NO: 83988 - protein, 69 aa, Zea mays
  Coding DNA Sequence Number=SeqID_40613
MELLMELVLGYSKVLREHNYIASEHLFLGLLREGKGKRRSLITSKVGYISETLHPIIKEVFEVQLLMVL

SEQ ID NO: 83989 - protein, 137 aa, Zea mays
  Coding DNA Sequence Number=SeqID_40614
MAYQTVSGAPGPYNPNQSLSGIPGIKSPSAFDLATLHAISCSDDDLLEVPPPPRRPPPGPPPSLGLHLALPMTSPAVSLYAPQQSAPLPCHLLPLSRGVPLLEVVTFWLARHVLNQMREQTIPRLIFILGIAYWCPQ

SEQ ID NO: 83990 - protein, 49 aa, Zea mays
  Coding DNA Sequence Number=SeqID_40615
MGTTWGGVVCKARLRASHFTLMVALLSRVVTPQIGPYGEALRKQPEPLK

SEQ ID NO: 83991 - protein, 140 aa, Zea mays
  Coding DNA Sequence Number=SeqID_40616
MPPTPPQGIPAAGGDPDGDGDDDDVSGSASHGMERSKELEPEGWIARPFTRDAARGCHFHDALDTLLRWAFDRHTWSIEYRCVVYQHRRGLYPDQWEATCLVRHPDDDLRDAEAFSEPYSITERDTAEAAMQDAARQALS

SEQ ID NO: 83992 - protein, 146 aa, Zea mays
  Coding DNA Sequence Number=SeqID_40617
MADFDEAKNDDQASNSTTDAGVGDRHSTGKLRNLARVDSARRALSISGEGCAGLGPGAAWRGRVGLGRVLALAGCDFWRRSASWARASRQGRWDRRVVSSERLEARSARGLAGVGLDAQALGASGRRGLVAWARLTTASAGSWRLL

SEQ ID NO: 83993 - protein, 137 aa, Zea mays
  Coding DNA Sequence Number=SeqID_40618
MNTCDQANSDVRSNPEREQGRPGASREERPSGARSCAQGAERAQGSREIRAPCGARPKGRPGTGRRHGAEQEGALGIEQGRAREIEAEQREQPGSAAARIRGEQAGHRAPDPSQGRAPEISGNWKRWTRPVEERRRA

SEQ ID NO: 83994 - protein, 125 aa, Zea mays
  Coding DNA Sequence Number=SeqID_40619
MEWSEFEKISEFEFLGCYKYYPRRSIGSAGGVIVSQVGEGIPRLSSMVNLAAVLNTELDHALNKLGKMSENRRRGARRDQPEYQAPQEDAAQQQQLPLRPPITVKQMFMMQTQAVQTIGQTLAVM

SEQ ID NO: 83995 - protein, 114 aa, Zea mays
  Coding DNA Sequence Number=SeqID_40620
MAKLEASRAPSTGEDGDQVESSQPWQRNKGAWLAVVVRERERRRERRKPRVSIYRRGSSKGADCSHGRRQLCALVGMGGCQALQFFLWTKQRTHSGRPFSSFSPWIGSRFYNFY

SEQ ID NO: 83996 - protein, 135 aa, Zea mays
  Coding DNA Sequence Number=SeqID_40621
  Gene Ontology: Mol. function=nucleic acid binding; Cellular component= intracellular; Biological process=regulation of transcription
  Homolog annotation: Hit_ID=A7PI24; Match level="QueryCoverage=38%, HitCoverage=3%, E-value=2e-17, Identity=75%"; Hit description =Chromosome chr13 scaffold_17, whole genome shotgun sequence
  Pfam annotation: Domain name=JmjC; Domain location=25-101; Score=7.3; E_value=0.00015; Accession=PF02373.13; Description=JmjC domain
MPPPPQITPTLPRPRQPASINEVICFAITMWSSLIITVHGSAASLAVLGEKTTLMSPDVLVARGVPCCRLVLYPGEFVVTFPRAYHIGFSHGDNSSAQESAEQGGVELYAEVNNHGLCAIAQAESSAIRFSVDSP

SEQ ID NO: 83997 - protein, 355 aa, Zea mays
  Coding DNA Sequence Number=SeqID_40622
  Homolog annotation: Hit_ID=A2YGC2; Match level="QueryCoverage=45%, HitCoverage=70%, E-value=1e-10, Identity=29%"; Hit description =Putative uncharacterized protein
MAGIARSTRAGGCPRRRRVYRPNHGELVQSDGMVSFTGSHSDCVHKESKDGGVVYPVHVLRRGRELRRAWTGFSGEVNSDSLLGEPHGGDRVREELLPCASPGGAPASRVAAGGDLDDGGGDDSSSHDTDFSTDHEPEGWVARPIARDAARGCHFHDALDTLLRRALNRRTWSIEYRCVVYQHSRGVYPDRWEATCLVCRPENSLQGAEACSEHYSISERDSAEVAMQDAARRALSHYCSVLCGVADGLDLKYYPRRPSGSTGGVIVSPVGENNPRLSSTVNLAAVLNTELDHALDELSRARAEIALLWAKRAERRHLDDGSPAPVGTQHPYRSPRRGHQPYGNPDCKTKINLEP

SEQ ID NO: 83998 - protein, 272 aa, Zea mays
  Coding DNA Sequence Number=SeqID_40623
  Subcellular localization annotation: CTP_CleavageSite=51; ConfidenceScore=5.48e-01
MSSSSLMRRIFPPSKPPDGGCPPSFRLIVGGTQLRGSWYLSAIVRLQGFSSASPAAPLHRRSPRMVTSGLMVGENEPGCGLCPSLSLKDFHHQGWGGEYAELSVPGFRTRAASEPLAAPTSATTAGRGSFGGVIAKVGPRTDPQLYGLLPVLASRVLGHGRGPPGSSIRPEVITAAVRPPVAEVFIVTAAGVGDDEPLVGLLSLRRPTPMEWGYSSVDYLNRFTKRESPRVKVTSEESLGSVGLAVRGSSSSVKGTPRPLFDEPRPGVAISA

SEQ ID NO: 83999 - protein, 407 aa, Zea mays
  Coding DNA Sequence Number=SeqID_40624
MALPVDVAGLCPRLGDVEAPPKPGSSLSSMAEAESEPLGRARRRSSAEAESEPLGRARRRSSAEAESEPLGRARWRSSVEAESEPLGQARRRSSAEAESEPLGRARWSSSSSGALARVRALPESEPWVGRSGVRRLPRLSPSPSPGSGGAEFAVFRGLARVRALGRAELPMASGKPEMCPPLKGGLGRDGNPFGLYADGGYQLRIRHLEGDQPFSVAFGSGGCARAHPPGVAPEASEEWFHSFEVLMPCVMLSAGLVVPSCELAVARVYGRGPSSRAGMLTLSTVRSEPGLREQPRASAQGERAIRDRLGFFTYAPTSPFRKEEGGERHVTLDGHRIMVSPVSCKRVIRVDVRAPFVRGRLGAQRHAQKYLRVICQTRSPGDGVRGLDASLRWDSVTRSLPLVSEMS

SEQ ID NO: 84000 - protein, 110 aa, Zea mays
  Coding DNA Sequence Number=SeqID_40625
MPNVTATLAVVHLPLPRDGNGGGIARDGGGATAGERNQREKGREGTNLAPEASRELFPGPFKAMRAYLCAEGNMEDTVRQAGWQVAPVASSPLRGLGTRGGHLTWDFENL

SEQ ID NO: 84001 - protein, 469 aa, Zea mays
  Coding DNA Sequence Number=SeqID_40626
  Homolog annotation: Hit_ID=A7QTD1; Match level="QueryCoverage=83%, HitCoverage=83%, E-value=1e-137, Identity=65%"; Hit description =Chromosome chr1 scaffold_166, whole genome shotgun sequence
  Pfam annotation: Domain name=DUF1350; Domain location=105-407; Score =102.1; E_value=1.7e-27; Accession=PF07082.2; Description=Protein of unknown function (DUF1350)
  Subcellular localization annotation: CTP_CleavageSite=39; ConfidenceScore=5.76e-01
MAAASQPPSSALRMHGCGGAASASSAPVRLFTESRGRVVASIGRGRRRRRAISCCSSPDADGPRPAAPPTSAAPSDGSIQLYSQIERVITEAAKQSREGWGSTGDWTEVEGSWVLRPKSLEPSFVVHFVGGIFVGAAPQITYRFFLECLANRGALVIATPYASGFDHFFIADEVQFKFDRCLRNLDEPVNDLPTFGVGHSLGSVIHMLIGSRYAVQRSGNVLMSFNNKEASSAIPLFSPVIVPMAQSFGPIFSQLASYPTIRFGAEAAIKQLENLSPPVVKQLLPLLQQLPPLYMDLIKGREDFIPKPEETRRLNQNTDKICEHYLNLCLVLYSVIKSYYGISRNLLIKFKDDQIDETSTLAQVLSSEAAISSLLDMSIRSLPGDHGLPLQQVLPDVPPAMADAVNRGGELLTNLTTGTPWEAVAKEVGTTLGTDSGILRAQISKDVETLVDVIASWTSSNSGPRLLRP

SEQ ID NO: 84002 - protein, 152 aa, Zea mays
  Coding DNA Sequence Number=SeqID_40627
MDLDAAAEEEERKLEDYNDVEDAMFFIGFSENETHGDPIQIDTVASSGIGNGTGSTSLPELVPDPDAGGRNSNSKKRSKCWNDFDELTKIVMPQPPQSGRWKAAVAWRTGQSGAPPDTVQCASHVSRPLGFDRWSSVLWARLAVRWCIGQAL

SEQ ID NO: 84003 - protein, 416 aa, Zea mays
  Coding DNA Sequence Number=SeqID_40628
  Gene Ontology: Mol. function=cysteine-type peptidase activity; Biological process=proteolysis
  Homolog annotation: Hit_ID=Q5NKP7; Match level="QueryCoverage=100%, HitCoverage=73%, E-value=1e-104, Identity=67%"; Hit description =Putative uncharacterized protein 9C20.3c
MKHVDRPPNNPKRITIQSSQECFSVDIPCAEQSNPSQIVGNPPNVDSQTLIKETIEVDSDDDDFMPAVKKRNVSESHTRVLRKVVTKRIKAEDLSRQRLNVRCNPQDVIASIHILNDRQRKELKITKDTVHLILGVPNHGGGKPLGIDEAVAASNLRAELGLAKDEFNVTLLQDRLRKGEDDDLTIRCFFLILFNCLLFPTASWGITNHEVLLTKEMHSFHETDWCQLIFNDLCEAAKKWRNRSTTNNNQPKCKTNIFYAPRPAPTPRPTFNIQLLSIKDMMSSKINQLPPRHRTKFTEKLAGYDLEVDKACLAIKDNLNKIVEKQYDIADNFIELIDEVLRAESDNLEDEIDKPEQSRHSDESVELDCVRSLWDLLCSKDMDQSRVVIDYSEYSGNCLDVFESFSEGKCLENVFM

SEQ ID NO: 84004 - protein, 94 aa, Zea mays
  Coding DNA Sequence Number=SeqID_40629
MARAAPATSDADPHTDVTAVTSPTSPTTPPELYCRRIQISYSLHSIDCNLADGEYVLIPEQGVDREGVQEPAPEPATEDLPAAPALEGKPQFYA

SEQ ID NO: 84005 - protein, 79 aa, Zea mays
  Coding DNA Sequence Number=SeqID_40630
  Subcellular localization annotation: CTP_CleavageSite=45; ConfidenceScore=5.31e-01
MGKPVPSLLMLLLSRGIKHLAINHFFQVITFPLVTHCSSMDQAVSLAARSRRFESSFNLASDRTCTHHNREWETTSQVA

SEQ ID NO: 84006 - protein, 152 aa, Zea mays
  Coding DNA Sequence Number=SeqID_40631
MGKNNKRKREPTPPSEEFGDSEYSEEEFSSESEGSPAPIPLRESSDDSDDSQGLAAEVWTYIRAVERSGLEGSDESEFSSDEEDSDGGEDEDDDDDDGDGDDDGDDDDGGDGDGDGGNGGGGSGGKGGTKGGSSVGSTGGGGGKGSGGRASG

SEQ ID NO: 84007 - protein, 127 aa, Zea mays
  Coding DNA Sequence Number=SeqID_40632
MSNEIQELEELVGTRENTIEVLEDQLINTQQQLAEANQHLDMHHQEIQDMEANEDVDIEGGEEPEPASSLDTAGSGRPPSPESSVASVSCHLSIMVVVTTMSVPQQQPLIRSSSVRSLRCSLGLRIR

SEQ ID NO: 84008 - protein, 407 aa, Zea mays
  Coding DNA Sequence Number=SeqID_40633
  Homolog annotation: Hit_ID=A3A7I9; Match level="QueryCoverage=37%, HitCoverage=39%, E-value=5e-19, Identity=42%"; Hit description =Putative uncharacterized protein
MVPLLSSKRGISNGLLQRLREMPHPHVLRLVMGGPQTTDSRMEEKAADTTATVAAAAAAAADQDGAVYCSEHPYPPGAAAAAGAGAGGICAFCLQEKLGMLVSSSKSSPFHPPPQQPVSAASPSSTTPPPSNRASSEAPPPPLYPPAASRKVMPAQSAGGGAGGGLKRSKSVAPRPEEPLPPPAVTADSPRKKSFWSFLHLSSSSGSHKGGASSASAAGGGAARRNSVSVASASSASLGGRLEAIVEPESPGRRSEGSSSSSFGRKVARSRSVGCGSRSFSGDFLERLSTGFGDCALRRVESHREPKPKAALGHLGGGEEHEQDQDQHHRIKCAGFFGGGLGAAAPPSSSYWLSAPDGASASASGSARGSGSRSHRSWAWALASPMRALRPTSSSSSKSIMAAPTAA

SEQ ID NO: 84009 - protein, 153 aa, Zea mays
  Coding DNA Sequence Number=SeqID_40634
MDEGREEDQRRGDWRGRVLRTGNTRGNRIRHSRKGRGGARNGEGPTGGVRPYPPRRPERRGGGNGPPRPCHQRLRARRGGSGGGWEGWGWAVGARPPTAAAAVAGSARPGEAAAARLPGEAARAQEERGGKVEGERGGRCSLAMGGEWCGARA

SEQ ID NO: 84010 - protein, 126 aa, Zea mays
  Coding DNA Sequence Number=SeqID_40635
MAKPLLPTSAQSEPSDSFLERPCHRRPPPHALVARAAPATSDADPHTDVTAVTSPTSPTTPPELYCRRIQISYSLHSIDYNLADGEYVLIPEQGVDREGVQEPAPEPATEDLPGAPALEGKPRFYA

SEQ ID NO: 84011 - protein, 472 aa, Zea mays
  Coding DNA Sequence Number=SeqID_40636
  Pfam annotation: Domain name=Tropomyosin; Domain location=209-413; Score=-116.5; E_value=0.061; Accession=PF00261.11; Description =Tropomyosin
VSDRFAVELMGTCATVGGRMSSPELRESLARMLKNIAAVVSVVMDKDRQDAARKRRAFTRVGDPSHEVKKARGGVKSTAPGSSKPPSAAKLAVPRPSKSSVGTRVVASGTGKPPSAEPMKERRPPSLVRADEVAAGGADFDTDICMEDYLVGEFFLGLGPEQGCGAGSNGGQLAVVLALVAATSPTAAVGAKGTSQDPWSKFCANAAENKSRRLTERLAAAEAEKEDLRRQLAEERRDANRACAEAQAAQAEAKLARAEASLARQCAEEMETRLDGLHDRLVKMEASTRAEVERTHTQLVDAYRKLGVWIAPFKAPSQEVGVRFLGWLQEELKVLPIIVTGLMSFASLITYEGAVEDRVLKRSVGALFDRMWGPHSRETVRERSDQAMDQMAHDEVVEDLGDLDSTLPEASGVELAPPSDAGQGPLAIPTLTRAGEDPTPATVSTGEDALKVVGKLAVEDPAASALPSQVAE

SEQ ID NO: 84012 - protein, 286 aa, Zea mays
  Coding DNA Sequence Number=SeqID_40637
  Subcellular localization annotation: CTP_CleavageSite=43; ConfidenceScore=5.08e-01
MPTATGPAHQFSSMLTGQVKADWKRLCRLRYRLGVDQVPNTLLALAVPSLHSARRAYSPLPELQAKRPHSPQATGATARHLRARLESERTLQGFNPINQPQNIRNSKINKIGEEGEKDKEKQAKSNSRKKKKRREVESGCVQPKAVSGWGTGLSGVHRTVSGAPDQRGANQSLSGFSPATSAKIHRTVRCAPDCPVRQICNGLQRSTALFMETNQAPDSVRCAPDCPVRHETEGKDGLPDLFSTAPSCLGAIKGTPRRMEEKTKHSLSTLDHSHINLAHLFDILVI

SEQ ID NO: 84013 - protein, 18 aa, Zea mays
  Coding DNA Sequence Number=SeqID_40638
MTYHVTAKFGKSESFTVK

SEQ ID NO: 84014 - protein, 24 aa, Zea mays
  Coding DNA Sequence Number=SeqID_40639
MAGGIELAGAKEGWLAGDDSLLLS

SEQ ID NO: 84015 - protein, 172 aa, Zea mays
  Coding DNA Sequence Number=SeqID_40640
MGRGKRGKGWPHRVDGKRKCPPSPPLEDFGDLEYSEEVSSKYDQSPAPASPVASSEDSDDSMGLSIAVRAYWRSIERAELDGSDDLKQASSEEVEDSSDSEEWSDCLGDDGEGNGSSDDNDGQGSDDDGGEGNGDDDGKDEDKGGGEGDNDDGKGEGDDKGDGKAGDIMLLA

SEQ ID NO: 84016 - protein, 328 aa, Zea mays
  Coding DNA Sequence Number=SeqID_40641
  Gene Ontology: Mol. function=metal ion binding; Cellular component =intracellular; Biological process=regulation of transcription, DNA -dependent
  Homolog annotation: Hit_ID=Q5QMF4; Match level="QueryCoverage=91%, HitCoverage=90%, E-value=1e-73, Identity=52%"; Hit description=Zinc finger CONSTANS-like protein
  Pfam annotation: Domain name=CCT; Domain location=181-225; Score =88.4; E_value=2.2e-23; Accession=PF06203.5; Description=CCT motif
  Subcellular localization annotation: CTP_CleavageSite=22; ConfidenceScore=5.21e-01
MFRQSSPSYSDALMHHHAASFSAAALSVTVPAQIPRGGAAAGGYLDGNVGAFSSPPSSCYSSSFPSSYYNSIQRSISSHSLPMRLQLADVSLGGSSGFYSPSSPSTHQLPLQPLSSSPSSSAGELFEFTSSCPVRRVFSTGDLQGMNGSSPPRPVPSADGCGQEGGGPFSPKVGRYSAEERKERIERYRVKRHQRNFNKKITYACRKTLADSRPRVKGRFARNGETDTEAEEREASDNSYGYDYGCGHNELSNGNGNTTYSAGSCYDGHNSNRLNGDNGEWWWRAPVAAAVAAAADDEAQRQRQIVGFDEDEELWASLGDMLSVNLAS

SEQ ID NO: 84017 - protein, 515 aa, Zea mays
  Coding DNA Sequence Number=SeqID_40642
  Homolog annotation: Hit_ID=Q6QP51; Match level="QueryCoverage=49%, HitCoverage=95%, E-value=2e-18, Identity=33%"; Hit description =Putative growth-regulating factor 1
MMTASKKVRHVVQFHILFLFPFISLAIGTGKGDTPKGILLREGSGPRALLLIRGSKAGPSEGFDSRLRALGLCAHYWSEVRRLAPRKGSIAASVHSGSAPTTDQGFEGWPPEGFDSRLRTRIARDDSGYVRYMAEARATLPRKATKGRMIKAESVLDRPLALCRGSGAALANLAPAKPLTASTYQPENSEPDHAPGSKLRPLKGHDLASPEPSLGQKQQTHQPSLASGAIGSSASPDPRARTQPRPRKTVSASPDTSARTQPRPQKTVSASPDPGLGLNLDLGRRSPPRPTPGLGLNLDLGRRSPPRPTPGLGLSLDLEGVTASPDLRLGPTTPQGGPSYEKVAARENRLTDRLSLSLSPSRTLVTPYCKRIRPGRRTTRAAGPPGVETPTHGEKVGADIKAYFQLDIDRTKEKKSSRFRQQLRADEVARTHFGNDEYEDELKAALHQSRVEHEFSQRAGARYDRGGGSSSQRVSQGPLDRMMGRSREQVPERVRDYNLASLWTKATNDRYWSLD

SEQ ID NO: 84018 - protein, 163 aa, Zea mays
  Coding DNA Sequence Number=SeqID_40643
MVTSGLMVGESEPGCGLCPSLSLKDFHHQGWGGECVELSCTVPGFRTRVASEPLAAPASATVAGRGSSAGGIAKAGHGPTSNSTAFCLSLPYEFWHGRGPPGSSIRPEVSAAAVRPPGAEVAVVAAAGAGDGAPFVGLPLLRRPSPMEWGLFVPAEGESEFRL

SEQ ID NO: 84019 - protein, 98 aa, Zea mays
  Coding DNA Sequence Number=SeqID_40644
  Gene Ontology: Mol. function=kinase activity; Cellular component =ornithine carbamoyltransferase complex; Biological process=amino acid metabolic process
  Homolog annotation: Hit_ID=Q6QP54; Match level="QueryCoverage=78%, HitCoverage=36%, E-value=5e-15, Identity=53%"; Hit description =Putative kinase
MALPVDVAGLCPRSGDVEAPPKPGSSLSSMAEAEPELLGRARRRSFGRGQGGVRALGSGEANPSLSPGSGGAEFAVFRGLARVRALGRAERSTPSSGA

SEQ ID NO: 84020 - protein, 60 aa, Zea mays
  Coding DNA Sequence Number=SeqID_40645
MKEVARTVHARQLGYGTQSLVSDSVQSGGDEDDGFGYDYGTGEDEVMEEDFQEFQEYDEF

SEQ ID NO: 84021 - protein, 105 aa, Zea mays
  Coding DNA Sequence Number=SeqID_40646
MGRRETEREGGGSRRETGVRGGIPRPSCLSRAQVGRKERIQVYNGGVARHSAIIHRTVRCIPDSVRCSKEERPLELASLGKTQRLLRYNSPDCPVYTGLSGEPAE

SEQ ID NO: 84022 - protein, 853 aa, Zea mays
  Coding DNA Sequence Number=SeqID_40647
  Gene Ontology: Mol. function=kinase activity; Cellular component =myosin complex; Biological process=keratinization
  Homolog annotation: Hit_ID=Q6I5J6; Match level="QueryCoverage=99%, HitCoverage=98%, E-value=0.0, Identity=54%"; Hit description =Putative kinase interacting family protein
  Pfam annotation: Domain name=KIP1; Domain location=11-84; Score =144.3; E_value=3.3e-40; Accession=PF07765.3; Description=KIP1-like protein
MLRRVASNAYSWWWASHIRNTQSKWLDNNLQEMEMRVKSMIKLIEINADTFAKKAELYFKNRPELANLVEETYRSYQALADRCDRISGELHKSNHTITTVFPEQVQLSLQNDNGDGFPRGITGINIIRGTSPASKRTQTHRRITSQMSKEKAQEEIERLQKEILVLQTEKEFFKCSYESSLDKYLDIERRATETQEEVWSLQETFNTNTVIEDNEARALMAARALISCEDTLINLQDQQNRSCQEATTEFQRVIDTKKKLKAFKSECGHSENQKELSDQQHIVTSSAHPSIENNGPILQDHRLHLQEICQKIKLQFNSCSEASVVHLAGMVDEFVDKVIALEIAATTQTAQINRMRAEADELQKCMNSLEEEKEGLVGDSNKLSERLRQVEEVLQTIQRIEKSVHIENGNIQRQLTEACNNLTDFVERLDVPLSEETIDSSEGSKGIASEEDADKPDTLSDPFQADSGTVGESMDGDSLYSFDISSEAHEEDVDDTLGWQQVVLNGLEGKDKILLKDYASILRNYKDTRKQLSEIEKKNQEYHLDSMSKTEELKSVNATKDDEIHSLRQMLSSLQSKINTYRIQFVEKSEESSKTNNDPCLEDKEICEIEEYLKNCQNEEPHVSLLEEKFREEINKVLDESLDFWLRFSTSYRYIQKFQKAFDKAKAEVDRLTDTKALEGLDTGCTGQFVRKQEPTILEKKLRDLSTDLQVWLEKNVLLQGELERRFLLICNIQEEISKVTTLNRTNEAHFTPLQAAKFHGEVSNMKQENNKVTKELQAGLEHVRGLQVEIGRTVLKLRDNIELSFGRSSRAHQNFRYLSGKAGVPQRTSLFGSRTKKTSLFSCMPPIAKADF

SEQ ID NO: 84023 - protein, 197 aa, Zea mays
  Coding DNA Sequence Number=SeqID_40648
MASRCGRDPSEETNLRENGGLKFDLLDHLRRVGCNPHHLGHHNERKLSIGIGDQHFIYESYKSKRYRVECDKIKDEKATNSRYKNKDDKKQRMKKVVYYETIVGVSNLRSDRPRYGSTAGSFLKKDLLCIGKTRSSTLVSLTGLFMAGDVGGEDSRCHHYHPCVTSTPVFHSLDFGVDRRVVGPVEGSVLWPRLGRS

SEQ ID NO: 84024 - protein, 310 aa, Zea mays
  Coding DNA Sequence Number=SeqID_40649
  Homolog annotation: Hit_ID=A3B2G6; Match level="QueryCoverage=42%, HitCoverage=18%, E-value=4e-09, Identity=27%"; Hit description =Putative uncharacterized protein
MGDNQIVAENVAEELQNYQAICELGSTIGTVEEVDILSLDSKDIVRFKVHVKSVAMIPPIIEVGVKPFLYDIFFKIDDITDEGWNDESINLGKRASVDRQGLDDLSYEKTGKKARNVGDKSVKEELRLENIGDMMSQGKSSGRGPDLGDNNENLNPVSEDKGYDNNPINEDEEFHESEDDLLSSQDLEEFAKDDEGCLPSSQEKINKSPLGAQAKGSGKAKAEKQVMNMEVEHGEGIRRRSRLESNDDMKIADKAAARAMAKDAFINKDLGIALGIALGICQRCLPLLHITSSIYKYLFPWHNATRIIAE

SEQ ID NO: 84025 - protein, 91 aa, Zea mays
  Coding DNA Sequence Number=SeqID_40650
  Homolog annotation: Hit_ID=Q5NKP3; Match level="QueryCoverage=39%, HitCoverage=14%, E-value=7e-12, Identity=91%"; Hit description =Putative uncharacterized protein 9C20.7
MSCAFDDYYIKDYGVILAPEVTQRRTDNNDHSSSSGGIELFFYGDLPSIQKVQQQFNDELACWIMAGAKGLGQLGLDCFMRSVGSSPFALL

SEQ ID NO: 84026 - protein, 174 aa, Zea mays
  Coding DNA Sequence Number=SeqID_40651
  Subcellular localization annotation: CTP_CleavageSite=101; ConfidenceScore=5.45e-01
MALWSPAVVAARRAPPPARVLAPPTFRPARRLAGYAHPPRVLVRPPRLRSETLPTHLGSVQGSVQPEAKRESRLMGKVTMRLMVLGFDSSNASPLQPDRTLAEYVDVYSPLLYTPTPQVVRIAATAQERSKPWKETSRSSRTTMSSRRGLAATPSRLPVKAAFIYVSFSHFDLL

SEQ ID NO: 84027 - protein, 145 aa, Zea mays
  Coding DNA Sequence Number=SeqID_40652
MAPSPRTLSATAAIFLLLAAIVTTAGLVDTTYIRKFAERRGQKEVVTLQSLPESGPLPSAGGFAECLLYRTPQSPALGKELIYRAQDTRHIQALGKDCFAESQILGKDGSRQRAVSGRLQLTAVSLCRVSNIWHSAKRVFTEYPL

SEQ ID NO: 84028 - protein, 120 aa, Zea mays
  Coding DNA Sequence Number=SeqID_40653
  Subcellular localization annotation: CTP_CleavageSite=42; ConfidenceScore=5.32e-01
MPWKNTYLHSAQPPNPVSSVVAIRIDRRPMSNRSPPRPLGLPAAQEKEQAALLDALSKAVSTTRAHERTAELAWEEKATLATLERQLKDAEEDNDHSIPDVIGTYEAAEVANLHEQAAAV

SEQ ID NO: 84029 - protein, 409 aa, Zea mays
  Coding DNA Sequence Number=SeqID_40654
  Gene Ontology: Mol. function=metal ion binding; Biological process =metabolic process
  Homolog annotation: Hit_ID=A7QJA9; Match level="QueryCoverage=95%, HitCoverage=70%, E-value=1e-84, Identity=45%"; Hit description =Chromosome chr8 scaffold_106, whole genome shotgun sequence
  Pfam annotation: Domain name=PHD; Domain location=78-136; Score=7.2; E_value=0.0019; Accession=PF00628.20; Description=PHD-finger
MCAVFSPYLSLVECVGLSSATKGTWCCRYCENRQQRESCLAYNNNAIAAGRVEGVDALEQIFTRSIRIATTLETGFGGCALCKLHDFSKKKFSTRTVLLCDQCGREYHVGCLKEHNMADLTALPEGAWYCSTDCVRINQTLQDLLNSGGEPVLAMDLDVIKKKREVKGFNDDDADLDVRWRVLKDKSSDDSKLVLSKAVAIFHLTIGSLSKVGRICNKLWPALEGGGLYRLQPPRDGGSAADARAEGHGSTIGRQERRALEKETFDPIIQVSTGRDLIPAMVYGRSARDQDYTGMYCTVLTVNNIVVSAGLFRIMGSEIAELPLVATSRDRQGLGYFQALFSCIERLLSSLEVKHFVLPAAEEAESIWTERFGFAKISQDELREYLKGGRTTVFQGTSNLHKLVAKLEC

SEQ ID NO: 84030 - protein, 791 aa, Zea mays
  Coding DNA Sequence Number=SeqID_40655
  Gene Ontology: Mol. function=1-phosphatidylinositol-4-phosphate 5 -kinase activity; Cellular component=plasma membrane; Biological process=phosphatidylinositol metabolic process
  Homolog annotation: Hit_ID=A2XB57; Match level="QueryCoverage=98%, HitCoverage=96%, E-value=0.0, Identity=71%"; Hit description =Putative uncharacterized protein
  Pfam annotation: Domain name=MORN; Domain location=115-138; Score =19.2; E_value=0.015; Accession=PF02493.11; Description=MORN repeat
  Pfam annotation: Domain name=MORN; Domain location=139-161; Score =40.0; E_value=8.4e-09; Accession=PF02493.11; Description=MORN repeat
  Pfam annotation: Domain name=MORN; Domain location=162-184; Score =28.9; E_value=1.8e-05; Accession=PF02493.11; Description=MORN repeat
  Pfam annotation: Domain name=MORN; Domain location=185-207; Score =32.2; E_value=1.8e-06; Accession=PF02493.11; Description=MORN repeat
  Pfam annotation: Domain name=MORN; Domain location=208-228; Score =12.5; E_value=0.3; Accession=PF02493.11; Description=MORN repeat
  Pfam annotation: Domain name=MORN; Domain location=47-69; Score=25.6; E_value=0.00018; Accession=PF02493.11; Description=MORN repeat
  Pfam annotation: Domain name=MORN; Domain location=70-92; Score=37.0; E_value=6.9e-08; Accession=PF02493.11; Description=MORN repeat
  Pfam annotation: Domain name=MORN; Domain location=93-114; Score=3.5; E_value=4.5; Accession=PF02493.11; Description=MORN repeat
  Pfam annotation: Domain name=PIP5K; Domain location=467-787; Score =466.6; E_value=3.2e-137; Accession=PF01504.9; Description =Phosphatidylinositol-4-phosphate 5-Kinase
  Pfam module annotation: Pfam domain module=MORN::MORN::MORN::MORN::MOR N::MORN::MORN::MORN::PIP5K; Domain location=115-138::139-161::162 -184::185-207::208-228::47-69::70-92::93-114::467-787
MATPVAPLLHDEPQAAGILLPGTTQHSDQTNSDSRVGELILPNGDTYRGALSGNTPHGPGCYIWSDGCVYEGDWRRGLRHGRGKTLWPTGATYTGDYSGGYIYGQGTYTAGLNSYRGGWKLNLKHGHLGLQTYPNGDTFQGSWVHGQMQGHGTYTWANGNTYVGAMKDGVMSGKGILTWNNGDSFEGNWLDGAMHGYGIYTWKDSGYYVGTWTRGVKDGKGTFYPKCRGIPVTDIDDLRNRGVLPGAESQTHGSRILHSASSDMADMVASRNQDSVGISSVRSLNFEKTRSTNVLLERRWSLGVAIEKFLGRETNESSAIERCENKADSNLPILEREYMQGVLISEVVVDASFSNPLKRVSRRQKKIVKDIKKPGQTIIKGHRSYDLMLSLQLGIRYTVGKITPIQRREVRASDYGSRASFWMNFPKNGSRLTPSHHADNFKWKDYCPMVFRNLREMFKIDAADYMVSICGSDALRELSSPGKSGSVFFLSQDDRFMIKTLRKSEVQVLLRMLPEYYHHVRTYENTLITKFFGLHRVKPSSSQKFRFVVMGNMFCTELRIHRRFDLKGSSLGRSTDKVKIDENTTLKDLDLNYSFYLEPSWRQTLLAQIETDSKFLKQHAIMDYSLLLGVHFRAPQSLRTQASFHQAILPDRLAVLSEEGALEEDVLNSPEGLVLVQRASDQNDVVIGSHIRGARLRSSSASFEEIQLGVNMPARAKQTVEDDDSEDNGQVYDVVLYLGIIDILQEYSIRKKIEHAYKCIQYNSLSISVVEPSLYSERFLKFIQTIFPENS

SEQ ID NO: 84031 - protein, 202 aa, Zea mays
  Coding DNA Sequence Number=SeqID_40656
MKAGEHREDKEGECFVRFGHGGGLTPSEKGDRVLFPTLLVAVGPLICFAAYIGLLQPHSDDTSRVVDQLLKLIATFIASWKAPCWGPQQMEREANTLRPRVHYTLVVTGSRLDDWSCGIENSSAMLTNEGQGSRGSGVLHSPRHWEVRPCCSSKSQGSSLSPSKGYKNEVSIALDHPDEVQVIGGGEVALGDEGHDHPWCVV

SEQ ID NO: 84032 - protein, 69 aa, Zea mays
  Coding DNA Sequence Number=SeqID_40657
MEIVLQELVVMVRPAHGAARYDGSREFLVSTSRRSNRSPGSQSGHTIQGTVQHADRRKRKTQRQVKGAR

SEQ ID NO: 84033 - protein, 251 aa, Zea mays
  Coding DNA Sequence Number=SeqID_40658
  Gene Ontology: Mol. function=nucleic acid binding; Cellular component= intracellular
  Homolog annotation: Hit_ID=Q94FY3; Match level="QueryCoverage=74%, HitCoverage=56%, E-value=3e-37, Identity=68%"; Hit description=C2H2 zinc-finger protein
MNKSHGSVGPIVIIQGSSTVKGLEGAELLDTLVTYLWRIHGVDYYAQMVLNGRINLIHSSKTEFKAPGGTPIMQQPAPRGNGRQRPPIGSRLRDERGNHRFDRNVDSPTHDGSGENPDDPIYDLFGDPAMHGAFPPDIPAPPVLMPVPGVGCSPFEPMAKWKSCSRLCRGSGAWEWAESADQGKCGRGRAVALIVSGSAAWGGWVGAVKAAGLGKELWKPPARERGGGGYWPGEKVVVDRRAGEAIGEVTS

SEQ ID NO: 84034 - protein, 789 aa, Zea mays
  Coding DNA Sequence Number=SeqID_40659
  Homolog annotation: Hit_ID=Q7XBD4; Match level="QueryCoverage=26%, HitCoverage=21%, E-value=5e-11, Identity=28%"; Hit description =Cinful1 polyprotein
MALDWLESDPVRAGRRTCRWVPRVSDKDEAAHVHILTNKQSPHVGASARVNTEDGKKRKRVAKGSGKAPKKTVDADIENEGVAFGGSSSSEKDNEKTTEGGRSSRHEKVEGELKEADLTLEIDAAEPTQTTGDEIDELGFFVRHLGGGELNDKDASELENKGEAMGYHPRAMLFRGGDKMLMCIPDPDESKIVRNITRSIGFLEVEGQLSHVKKRKLSHSLAYTSIKGSNSGSAPEDGELRSARPRARTRAQPWKTAPPRIRLEQVARLVTPRPRPAVPRRHQPGPRPRQINSGVGPANGRPGQAPADKSSFRANSASVRADTATPGFGSSKSGRGVPLTKQEKPRTARPTEPRDSYASGIRIPHSSPFNSSPSPAWLEDASSAELGDGFHHQKLEEEVASRPVREVEPRLATLSAPTRMPGCMMKILEAERWLKGTNSHGVAFLQRRGGRIAGVPHPGARKPSWAESSPTRSKVLPLRRGGWVPRVMQAGPEQKKPNRRARCMQPPSGYEHPSAFAQTSGRKGGQPCRRHATAPSGRAPPTSNAPGMGAHAHASRNRRAGRYVQATAPPLAPLPRLLDCGTSTVTRGNPAYDPAVPARRDGQYDQKWAGSNGGGRRAGAAVTSSAKLTSHPGAGSDSGSAPEDGELRSARPRARTRAQPWKTANSAPPDPGLGLGLGPRRRRTPLRPTKGSDSGSAPEDDELRFTRPQGSDSALASADGLRLARPRGSDSTSASEDRLDLDLGGASTSPNLGHGPTTSTGGAIITLPQADSGYGEQDRRPIWLAPPDK

SEQ ID NO: 84035 - protein, 246 aa, Zea mays
  Coding DNA Sequence Number=SeqID_40660
  Gene Ontology: Mol. function=exonuclease activity; Biological process= DNA metabolic process
  Homolog annotation: Hit_ID=P15032; Match level="QueryCoverage=100%, HitCoverage=38%, E-value=1e-84, Identity=87%"; Hit description =Exodeoxyribonuclease 8
MGDATYQETFDEESQVEAKENDPEEMEGAEHPHNENAGSDPHRDCSDETGEVADPVIVEDIEPGIYYGISNENYHAGPGISKSQLDDIADTPALYLWRKNAPVDTTKTKTLDLGTAFHCRVLEPEEFSNRFIVAPEFNRRTNAGKEEEKAFLMECASTGKTDAFYSDGYEAQFGVQPTFVFLVASTTIECGRYPVEIFMMGEEAKLAGQQEYHRNLRTLSDCLNTDEWPAIKTLSLPRWAKEYAND

SEQ ID NO: 84036 - protein, 232 aa, Zea mays
  Coding DNA Sequence Number=SeqID_40661
  Gene Ontology: Mol. function=DNA binding; Biological process=DNA metabolic process
  Homolog annotation: Hit_ID=P33228; Match level="QueryCoverage=100%, HitCoverage=86%, E-value=1e-126, Identity=99%"; Hit description =Protein recT
  Pfam annotation: Domain name=RecT; Domain location=15-230; Score =295.1; E_value=1.4e-85; Accession=PF03837.5; Description=RecT family
MKEQLAAALPRHMTAERMIRIATTEIRKVPALGNCDTMSFVSAIVQCSQLGLEPGSALGHAYLLPFGNKNEKSGKKNVQLIIGYRGMIDLARRSGQIASLSARVVREGDEFSFEFGLDEKLIHRPGENEDAPVTHVYAVARLKDGGTQFEVMTRKQIELVRSLSKAGNNGPWVTHWEEMAKKTAIRRLFKYLPVSIEIQRAVSMDEKEPLTIDPADSSVLTGDYSVIDISEE

SEQ ID NO: 84037 - protein, 247 aa, Zea mays
  Coding DNA Sequence Number=SeqID_40662
MGKDKKGQGSPHRSGDKQKREPSPSSEDFGDSEYSEEEFSSESEGSSESAPSLPELRPEVRHPSLCPISLIAPCVRPISPSPVLGRGDNEQSEVPECVVGDLPEQQPGEGKSVLPAGETASSPARGAGAPTPGAGAGAVGLSPLPQQEVEYERPPSPAPQLEMPPAPPQGIPAAGGDLDGDGDNDDTGGSLSHSTELSEELESDGWIARPITRDTTRGIIAGYTRISGRLLAWCAIRTMISGVYVTP

SEQ ID NO: 84038 - protein, 160 aa, Zea mays
  Coding DNA Sequence Number=SeqID_40663
  Subcellular localization annotation: CTP_CleavageSite=33; ConfidenceScore=5.18e-01
MGMGSYRLTGRRNEVTAQPAAQQRCHLTTSNRRCSAIQSCRVRPRATPRERVEAPHPRVRPYREHMRGLYISLGNDSPNGLVPHNGNMHDFLLALVLLGCSGWLLGREGRVPGCSNVGIDFLPGSCSDGTAAAAEETASGTVVAGSDADAGAGAGAGYLA

SEQ ID NO: 84039 - protein, 101 aa, Zea mays
  Coding DNA Sequence Number=SeqID_40664
MMKHLRTSPQHWRPPPVNPYRPLSASTDLRHAAEESFSDRGCCTAATGPKPRNSFSPRSSELEKKGHQSNAPVGGVGPRDQGYGVHPSASTKKEGEDGATG

SEQ ID NO: 84040 - protein, 439 aa, Zea mays
  Coding DNA Sequence Number=SeqID_40665
  Homolog annotation: Hit_ID=A2YGC2; Match level="QueryCoverage=50%, HitCoverage=96%, E-value=2e-08, Identity=27%"; Hit description =Putative uncharacterized protein
MNVAALEPSSELQLCLKPHLHSLRKKSRDLVAQFGVLLPPRPRCPAPPITSLSTAPKCAKVEVCPIPSPTELRASIQGGLETKPLPAPVSPYCPGRAPPLPRPCSSLRLPPRLFRKVRNDDVDPNLVTYNMLIFDLACAGIVTKARELLSTWHGGTIGNKFWMSLGLPLIATVNFAGNTRTPVAVRGHGTELSVEPEPEEWIARPITRDAARGCHFHDALNTLLRRAFDRHTWSIEYRCVVYQHRRGLYPDQWEATCLVRRPDDDLRGAEAFSDHYSITERDTAKAAMQDVARRALSQHCSLFSGVDDNLDLKYYPRRSTFSAGGVIVLPVGEGNPRLNNMVNLVAVLNTELDHALDELGKVRAEVAELRAECTTRHYLDGDSPGPVGIQHPYRSPLCGRFDYGTPDRRTRIDLDPYIDRMSENRRRGARRAELEQQAP

SEQ ID NO: 84041 - protein, 69 aa, Zea mays
  Coding DNA Sequence Number=SeqID_40666
MERVGAAANGEERKRGRGPAAKGVERVGGDCNHWGEGEGRYCESVSGRAATPLIPNMYQVPALSNARVR

SEQ ID NO: 84042 - protein, 139 aa, Zea mays
  Coding DNA Sequence Number=SeqID_40667
MLEEEVDADQIRVDAERLAAWGCARAQGADVRSREISRGSGGRWGAHGTRAGGRAATMSSTGANWTEPELEERGERLGEAAAQENGGDHGKRDSAVGETEQGLGELEAGHGKTRGRSSDWISKGSKQRARHPWKQGCAP

SEQ ID NO: 84043 - protein, 200 aa, Zea mays
  Coding DNA Sequence Number=SeqID_40668
  Homolog annotation: Hit_ID=A2X0H0; Match level="QueryCoverage=81%, HitCoverage=38%, E-value=3e-13, Identity=30%"; Hit description =Putative uncharacterized protein
  Pfam annotation: Domain name=Transposase_23; Domain location=93-164; Score=-13.1; E_value=0.032; Accession=PF03017.5; Description =TNP1ENSPM transposase
MDNEKTYSQKIKAVDARQGKLRRTHRLATTHKARQFELERDITFDNTKFAYSSKSMTKKATSNSLNEEASKQQVKLKEQSTTTFDKTKCATTSKTGAQVFLKSWRCPTKIFALGTVLGRDPNHKVGGVKLGKEFWMVRVRLVVLPIEPLIRPYDNKEVIGDVGNNLIAWPSCWFQSCKISTESEDYLLQTGWRGSLPPFK

SEQ ID NO: 84044 - protein, 151 aa, Zea mays
  Coding DNA Sequence Number=SeqID_40669
MRLHILRGMKAEVILAFADICTHEEYMKCDITMLLLWFLPASGVANGLDLKYYPRRSTGSAGGVIVSPVGEGNPRLSSMVNLVAVLNTELDHALDKLGKVRAEVAELHAECVAHHYLDGGSLAPVWIQHPYRSLPRGRFDYGTPDYRTCID

SEQ ID NO: 84045 - protein, 240 aa, Zea mays
  Coding DNA Sequence Number=SeqID_40670
MSQHRHRAVRRRRSVCLHRVQVAAQRSSSCGGTPPSLAVFACSEPPLHLVVACLLCQGPGSPRPPLTGHGGRKVSLSAMVAGPARPGPSTAVLAFGMALALASSTACVCAPDAAYEAPTRILHGPGAAAASRVLMPRRELVWPSLRGFGNQVIELFEFYEAEDPEHLFGEGNDTLPDHIGSDQWGLALPGQKGNHDSWRYLIRDGWFTDDDDDGYDYGNGKEEGVEANLQEFQDFDEFED

SEQ ID NO: 84046 - protein, 233 aa, Zea mays
  Coding DNA Sequence Number=SeqID_40671
MSQHRHRAVRRRRSVCLHRVQAAAQRSSSCGGAPPSLAVFAYSEPPLHLVVACLLCQGPGSPRPPLTGHGGRKVSLSAMVAGPARPGPSTAVLAFGMALALASSTACVCAPDAAYEAPTRILHGPGAAAASRVLMPRRELVWPSLRGFGDQVIELFEFYEAEDPEHLFGEGKGTRGVVASPSCRQWGPGTVLALPRLSAEVLDGDDGYDYGNGKEEGVEANLQEFQDFDEFED

SEQ ID NO: 84047 - protein, 137 aa, Zea mays
  Coding DNA Sequence Number=SeqID_40672
MGLSARPEKKERKKRSKLRAHGHRLTAARCTSRVLPCPGLRSPRGRRLDNDESAAGGWTTCESASRRLDFGRRRGEGPATCGSAPADRRSGLRAPGEQRCGLQRCSGVRAWAAPPPRLAAAGAGGTKDNNRILKLFL

SEQ ID NO: 84048 - protein, 147 aa, Zea mays
  Coding DNA Sequence Number=SeqID_40673
MVTRSAITERKGWRRKGQEGRFSSSLAKFLGLRKPKREAGSGAKNRQQALTQGPGKGDTPKRILPREGTELRASILIRGSKAGPPKGSTAASDRVGPTPTTGQRFEGRPPKGSTAASGYLGSAPITDQGFEGWPPKGSQPPQTPSEG

SEQ ID NO: 84049 - protein, 134 aa, Zea mays
  Coding DNA Sequence Number=SeqID_40674
MNLTPKGLSPAHGLDSLAPRLVPLTDSLAELQLPLPHLLDLGSHLLPDRQSLRSCQRRLCPCRCCLRLQPVTKQPKVHRLDAPLGKALIGFGKHDPLGSQQLPNVTFAAEEQRLGGACVCELLRKENKMSRRMP

SEQ ID NO: 84050 - protein, 106 aa, Zea mays
  Coding DNA Sequence Number=SeqID_40675
MGVAPELRVDFWKIIHSKVWTYIRAVERSGLEGSDESEYSSDEEDSPEEDGEGDDDDDNDNDGGDDIDDGDGGSRGGNDGSRGGDGGSSRGSGGGGSSKGSNKASG

SEQ ID NO: 84051 - protein, 15 aa, Zea mays
  Coding DNA Sequence Number=SeqID_40676
MARNPGCTVFIVLFK

SEQ ID NO: 84052 - protein, 188 aa, Zea mays
  Coding DNA Sequence Number=SeqID_40677
MDAATGRLSFVSPLKGCEPAIKAEERAAPKRTGNNSSPSPAWLEDISSAELEDGFHHQKLEEEVASRPARKVEPRLASLSAPARMMNILEAEGGTNIAARLASPHPGAGGHHLGLRASLLIRGSKAGPSKGFNSRLRARGLHAHYWSEVRRPAPRKGSTAASGHSGSAPTTNQGFEGWPSKGSQSPQT

SEQ ID NO: 84053 - protein, 577 aa, Zea mays
  Coding DNA Sequence Number=SeqID_40678
  Gene Ontology: Mol. function=voltage-gated potassium channel activity; Cellular component=integral to membrane; Biological process=potassium ion transport
  Homolog annotation: Hit_ID=Q9SM12; Match level="QueryCoverage=99%, HitCoverage=67%, E-value=0.0, Identity=86%"; Hit description =Potassium channel protein ZMK2
  Pfam annotation: Domain name=Ank; Domain location=294-326; Score =35.5; E_value=2e-07; Accession=PF00023.21; Description=Ankyrin repeat
  Pfam annotation: Domain name=Ank; Domain location=358-390; Score=8.1; E_value=2.2; Accession=PF00023.21; Description=Ankyrin repeat
  Pfam annotation: Domain name=Ank; Domain location=391-423; Score =25.5; E_value=0.00019; Accession=PF00023.21; Description=Ankyrin repeat
  Pfam annotation: Domain name=cNMP_binding; Domain location=138-228; Score=58.0; E_value=3.2e-14; Accession=PF00027.20; Description =Cyclic nucleotide-binding domain
  Pfam module annotation: Pfam domain module=Ank::Ank::Ank::cNMP _binding; Domain location=294-326::358-390::391-423::138-228
MTTVGYGDLHAQNTVEMIFNIFYMLFNLGLTAYLIGNMTNLVVEGTRRTMEFRNSVRTASSFVGRNHLPPRLKQQILAYMCLKFRAESLNQQQLMDQLPKSICKSICEHLFVPVVKDVYLFKGVSREMLLSLATKMKPEYIPPKEDVIVQNEAPDDVYVVVSGEVEVVLFDGVDERVEATLGTRNIFGEVSALSDRPQAPFTFRTRTLSQLLRLKQATLKEAMQSWPDDSVIIIKNYVKHQVEMHGMKADDSLGDNTSEHDDDANVLTVAAMGNSGLLEDLLRAGKDADVGDAMGRTALHIAASKGYEDCVLVLLKHACNANIRDAQGNTAMWNAIAAGHHKIFNILYHSARASNPHAGGDVMCLATRRGDLDALRELLKLGLDVDSEDHDGATALRVAMAEGHADAARFLITNGASVDKASLDDDGSGSGAARLTMSPTELHELLQKRELVHSITITDSPPVVPDGGSSGHSRPGRLQSTGSDNTRWPRVSIYRGHPFLRNRSSEAGKLINLPATMEEFIAVVGEKLKVDTEKALIVNDEGAEVDSIDVIRDNDKLFVVTEEDLTRLAPMDSVPSS

SEQ ID NO: 84054 - protein, 227 aa, Zea mays
  Coding DNA Sequence Number=SeqID_40679
  Homolog annotation: Hit_ID=Q5GAU8; Match level="QueryCoverage=14%, HitCoverage=23%, E-value=7e-10, Identity=90%"; Hit description =Putative uncharacterized protein
MTDAEKEVATERRMDSPPRCDCGDRAVIDEDYEKQFCCPNIDYETRKCSWESYDDKGEVMRTIESKRIMGEKMRCGSRLVDSRQMRRDHRMQGNGKRLKPRNRCWIILLIASREDKMATVELMEEEDDTSRLSELIALAEAGLHEEEEDDTSRLSELVALAEAGLRAQEEEDEFMPQATEEVEAAYYKKKSDEAEAEDELFSQAADEVEANYYKRTGDKCDAGQCIK

SEQ ID NO: 84055 - protein, 121 aa, Zea mays
  Coding DNA Sequence Number=SeqID_40680
LELHRSLANTTHPFPSPIALGNLAGDPTAVGARHLVVDRPSQAPSGQIGPTSVIPYLRPCLATTPSTQNRDRDGEPSRSLTGGRTPAEIQKKLHHERGKQKPEEVAPPTVEDTHPATLLVI

SEQ ID NO: 84056 - protein, 323 aa, Zea mays
  Coding DNA Sequence Number=SeqID_40681
MVVGRLDEMILLHFHLLPFRALEDERGRSVRAPPGAGSVGSMTPVEEEVVVAGDGGSWSSATTAGSIAAPDKPTVTDVPEGKRVGAAPTRKQPLSAASPRGVAGGGVATDRTFSRCVARSTSVGGGNAASPPSTHAAGVEDDPVASVLPSWRPTGMATLLTHHCGRLICFLLPLHLDSGAFRERRKGGIDNTKPLQERPPLRPKQGGKGKEKEKLNRSLNLAWSNDKVPLSSRKSNLKALMHESAYQPLVEKAPPMLLGDGIQYITDLSLELLLFTIRPLRLSHQDPASEHWRTPLEVANKEPLAFVSTNEGRERDPQVGRLP

SEQ ID NO: 84057 - protein, 117 aa, Zea mays
  Coding DNA Sequence Number=SeqID_40682
  Subcellular localization annotation: CTP_CleavageSite=55; ConfidenceScore=5.04e-01
MGEGVMEEEKAALNSINSKTNGRCVGRGRLGLVLGAARVFRARRRRVVRGCARRLARMAWARVLGAGRVKQGQARGLGSAVCAVEREEGEREKCRGRRRLLAGRRRQVKGRETTQLG

SEQ ID NO: 84058 - protein, 117 aa, Zea mays
  Coding DNA Sequence Number=SeqID_40683
MGEGVMEEETAALNSINSKTNGRRAGRGRLELVLGAARVFRARRRRVVRGCARRLALMARARVLGAGRFKQGQARGLGSAVCEVEREEGEREKCRGRRRLLAGRRRQVKGRETARLG

SEQ ID NO: 84059 - protein, 253 aa, Zea mays
  Coding DNA Sequence Number=SeqID_40684
  Pfam annotation: Domain name=zf-CCHC; Domain location=212-229; Score =10.3; E_value=0.042; Accession=PF00098.14; Description=Zinc knuckle
MVADIWDAHSCENVVECVVSPVRSRTGGTRVQDMGDKHAEIYLDAAFDAASAWITPIDMDFHDSNNKACDALFSCLSLLSLSELDIWLRLTRFAPLSRDSMRATIKEYENFMQVAREAIDMMFSQFQTLIVDELFSKPKSIEIDHQTWAKIENPGQPTMVLISGGSSSSNPSPAMFTLSSLLTITKEKVEVLRDEKLVLVASRFTWHGGSKDGCNSYGDPEHFIASCRKKGKQEAGPARPLLWLVQGQVGVHL

SEQ ID NO: 84060 - protein, 109 aa, Zea mays
  Coding DNA Sequence Number=SeqID_40685
MSESSSPAGWRSAPALNPKMRRGLGVLLDRWSEGEELKNTQGLEWFGPPERNTLLHWAARPHVRFGPIAYVMGHKQRASAWVGREGQGPDTCQHRTPAHTRVLLVPRPC

SEQ ID NO: 84061 - protein, 351 aa, Zea mays
  Coding DNA Sequence Number=SeqID_40686
MATETRRQPESAVADLGGCAENGGERGQRDSGRERVNWGASRVADVGAELTVAEGTTGLQRRRRNEPGRRWFNGGGAVACAQRGGGGRGVCRCANEGGGEGERGSGLKWPRRVTHVRMSDSADRTSLHARKLFCRSDSSSLIDCVGDRAPWTGKSARKRQGRPSRGTPTPPGYGYLTQHLPREATLARTNIFVTDEKVQILETRGKETQLYNTARVCFGLGGRRKHTLQDNPILQARILTLEGSSSTLGVDNTFGEVRPSLRRRRGPKISTLKDGVITKPGPSLPGSSPGIRLGQAARLVTPRPRPAVHRGHQPDPRPRQVNSGGGPANGQPGQAPANQVFFSSQLCLCSC

SEQ ID NO: 84062 - protein, 191 aa, Zea mays
  Coding DNA Sequence Number=SeqID_40687
  Homolog annotation: Hit_ID=A3AHD8; Match level="QueryCoverage=16%, HitCoverage=10%, E-value=9e-07, Identity=83%"; Hit description =Putative uncharacterized protein
MGIGTRGHQTTTLLPDQLRSVWALESILSRTAVNAHASESDLRLIVDGIMAHYNKIFNTKVDGNGILIDTAIFLTMAYPKGSRQVLPTRDTTHLVPFNHNRIQFILAGVYDRIQALQDHDADINGWLREREGGDRGVSTSALVGVPVSPPCALGGLFDVQVIAFVLMGLNYIVFSSKAACSGSADLSICLD

SEQ ID NO: 84063 - protein, 452 aa, Zea mays
  Coding DNA Sequence Number=SeqID_40688
MTKSRIVGNKNVSRINRHYVQAGLKVADHTIEVKGKRPTWPISSHAPALLPPPLSARPHPSAALALAPSQPPSLWQAGPACQPLPRARDQAIDAITVGRRALHRFAINTLASSVWRLASPRTVPELSLHPACPSHPVATTVRHHRRRGKLAALELHSSLANTTHPLPSPIAPDNLAGDPTAAGARHLAVDRPSQAPSGQISPTSIIPYLRLCVATTPSTQNWDRGGEPPRSLTGGRTPAGLPPLTPSPPLLAGAWARAHGAVPTPSTAGGPAGPSDRARARARLGRIPPGLALSGRDPTEDDPTIVYMAGYLHTLDNQYDDLSSHCTHLNSWVESLEQQVKELKKEKASLQESLEIAEGEEANTREAYRTLKMDYDKKLKKLAPTKKIQKRTKSQGCQTERKKEAPPALPPSRIENLSDIEDMSLASLDDLLKEFGDTLERQFGSTLESTRV

SEQ ID NO: 84064 - protein, 268 aa, Zea mays
  Coding DNA Sequence Number=SeqID_40689
MSDSADRTSLHARKLFCRSDSSSLLDCVGDRAPWTGKSARKRQGRPSRGTPTPPGYGYLTHHLPREATLARTNISVTDEKVQILETRGKETQLYNTARVCFGLGGRRKHTLQDNPILQARILTLEGSSSTLGIDNTFGEVRPSFGQRRGPKISTLKDGVITKPGPSLPGSSPDISPTRGLGRSIPASVPLTGNPARLRPTRFSFRANSASVHADTATPALGSSESGRGVPLTKLEKPRTTRPTELRDSYASGIRIPHSSPLHGATQAW

SEQ ID NO: 84065 - protein, 203 aa, Zea mays
  Coding DNA Sequence Number=SeqID_40690
MDHSSTLSSMRESSPQPSWGFALAAQWSLGLYRSGRLLAPGARHYGSKLIGEESELPRVGCGKALKQWRTMAFLWLQCSTPTAVRQGAKRQPPRSPLMETREEVLGSLPPRQASSAQQRERVRRSLVSPAALRPVPAPASFTAATPPSTNFPSNGTVRLIEERRRSLTPEHVEMLSLAKDWEQAAVQQQHCVENKDLEELMEN

SEQ ID NO: 84066 - protein, 375 aa, Zea mays
  Coding DNA Sequence Number=SeqID_40691
  Gene Ontology: Mol. function=sequence-specific DNA binding; Cellular component=nucleus; Biological process=regulation of transcription, DNA-dependent
  Homolog annotation: Hit_ID=A2ZXR6; Match level="QueryCoverage=91%, HitCoverage=88%, E-value=1e-75, Identity=47%"; Hit description =Putative uncharacterized protein
  Pfam annotation: Domain name=GATA; Domain location=246-281; Score =70.0; E_value=7.7e-18; Accession=PF00320.18; Description=GATA zinc finger
MEAAASAEYGYYGGGAGPHETKTAGCGDHFVVDDLLALPPYDDEEEGATGETPLCLQPVKEEEGGLGNFSADSSIVVTAIDSCSNSFSRLADDDFPGEFYEPYDQLVELEWLSNYMGEGEETFAAEDLEKLKLISGGFSPAAVNVSAPAPVGVASAASATQSGMFLPVPAKARSKRSRAAPGNWSSRLVVLPPTPASPPAPAASMAISPSESGISAQQAFRAKKPPPSKKKDAAAPAPAPAEGRRCVHCDTDKTPQWRTGPMGPKTLCNACGVRYKSGRLVPEYRPAASPTFVMSKHSNSHRKVLELRRQKEVVVQQPPHVMGGAGGPAGGLMRMQSAMLLDGPVAAVSSSSPIVGGDEFLIHQHLGTADYRQRI

SEQ ID NO: 84067 - protein, 140 aa, Zea mays
  Coding DNA Sequence Number=SeqID_40692
MGKGTKRKREPTPPSEDFGDSEYSEEEFSSESEGYPAPVSPPASSDDSDDSQGIAAEVWTYIRAVERSGLEGSDESEFSSDEEDSDGGEDEDDDDDDGDDDDGGDGDGDGSGGKGSTRGGSSTGSTRGGGGKGSSSKAIG

SEQ ID NO: 84068 - protein, 38 aa, Zea mays
  Coding DNA Sequence Number=SeqID_40693
MARLTGGEGGPMKGWGCALDNLATFCYLLRMVLVPAQG

SEQ ID NO: 84069 - protein, 167 aa, Zea mays
  Coding DNA Sequence Number=SeqID_40694
MAQQNEILRQLAQRQPPPQHYGGEDPLDADVWLRVVESKFPLLNRDCSDVAKYAGYHADTDDKKRDRFRRGLSTKLRDRLNTVRANSYNELVNMAISQEDCITARQAEKKRKTPMAGPSAQPQRFRIVSNTQSRGPQQQQGRWVIRPQQQQAPNRSQPLVQRNNDQP

SEQ ID NO: 84070 - protein, 95 aa, Zea mays
  Coding DNA Sequence Number=SeqID_40695
  Subcellular localization annotation: CTP_CleavageSite=67; ConfidenceScore=5.12e-01
MAVGVSEALYAKAVSPDLLSGNRWGRLMCVGTECLATSSSAFGNQTPQPNSYMSRGRGVDSSHRDMVAGVTWPSILPPGWTVEWDPTSAEEEHEE

SEQ ID NO: 84071 - protein, 72 aa, Zea mays
  Coding DNA Sequence Number=SeqID_40696
MVSHSGYGGYRCGHCTTAVGVSEALYAKAPSLWHNFTGSLEDMVAGVTWPSILPPGWTVEWDPTSAEEEHEE

SEQ ID NO: 84072 - protein, 232 aa, Zea mays
  Coding DNA Sequence Number=SeqID_40697
PIPAITVDDLHLDVTARTSQISPSPSPDLPRRRYGGYKCGYCTTVVGVSEALYAKAVSPVLLTGNRWGRLICVGTECLATSFSGGYGCWSDLAVYLATGAEDTIESTTLHVLTTFCGFHPLELSTHPIVLFPAEKEDDPMWKDRVEHAKDVEARENTIEVLEDQLQTTQQQFEEVNQHLDLHHQEIQDMEAEGANEDVDIERGEELEPASSLDTAGSGRPPSPESSVASFAH

SEQ ID NO: 84073 - protein, 108 aa, Zea mays
  Coding DNA Sequence Number=SeqID_40698
MRAVGGARVGGSRCQGARSWKKPKSVGGGTVKVLGRAWEDTREKVSSRTGIRIRCNLLGKIHKKRFTNKWSRYKLVKTNLLNYFDIEQVPSVPSAQDAACEKLPVCPL

SEQ ID NO: 84074 - protein, 178 aa, Zea mays
  Coding DNA Sequence Number=SeqID_40699
MADEGFARPSAMENWERARAEERARRKVHGWGGRAERGATQIEGLEAWVPAEEAASGRELHKLGSDARNREKGRERSPGSGGTVKISGRAREDTREKRYCESESGRAATPLIPNMYQVPALSNTIDDFCLHTSKDMKPHRTPPRATYDAKNVPGIGCNPNGSNHHCIYLLLPEVRANL

SEQ ID NO: 84075 - protein, 136 aa, Zea mays
  Coding DNA Sequence Number=SeqID_40700
MGKNKRKREPTPPSEDFGDSEYSEEEFSSESKGSPTPIPLRESSDDSQGLAAEVWTYIRAVERSGLEGSDESEYSSDEEDSSEEGGGGDDEDDDDDEGGGGGDGDSGGRGGSNGSKGDGGGSSRGGNRGNSSRASG

SEQ ID NO: 84076 - protein, 300 aa, Zea mays
  Coding DNA Sequence Number=SeqID_40701
  Subcellular localization annotation: CTP_CleavageSite=68; ConfidenceScore=5.48e-01
MSPLGWAESGPTLSPTLPHAEFPARPTQPISRVPARARAVPPLPLTGQPHPSAATPRPLAPRSSSSKRAPLVSSLSLSPVIGYRRDHRRPPLRHIPSPLLANQPNWCLAPVPSHPVTTVCPEPSRRHHCEEGSDPPEIVAPEEGQEPDLSEIDLSCQENFDEGSLELVLGIVITFIRNSILFEMEGSFVIRTSYCSEVEGFPHLLRSCALRMGIRKKPEYVWKEYRENGIEKCSMAVYLGESGNYPNHPTFQITATGHRFPDTCQSAAPRALCQLCQNNSREVSETPLRYFPPSNKNTPA

SEQ ID NO: 84077 - protein, 274 aa, Zea mays
  Coding DNA Sequence Number=SeqID_40702
  Gene Ontology: Mol. function=nucleic acid binding; Cellular component= intracellular; Biological process=regulation of transcription, DNA -dependent
  Homolog annotation: Hit_ID=O24591; Match level="QueryCoverage=91%, HitCoverage=75%, E-value=3e-40, Identity=44%"; Hit description =Histone deacetylase HDT1
MAKGLDVKPGSTVKCEPGYRFMLHLSQKLAIGTLSVDKNPPIQFDLVFDKEFELSHTSKTTIVFFIGYKVEQPFKEDGYPFLFSIELVLFQVEVIRTFFVSLTSYLPSSTMDLDSEDEDEELNVPVVKENDIFNNDLGGPYAFLEKSQEKAVPAASKSSPASKKSKDDDDSDEDETDDSNEDETDDSDEGEGLSPKEGDDDDLSDEDDTSDDEEEDTSTPKKHEAGKKRAAESSMLKTPLSDKKAKVATPSAQKTVQVAFSTWPWGPSAIIFFL

SEQ ID NO: 84078 - protein, 64 aa, Zea mays
  Coding DNA Sequence Number=SeqID_40703
MALLLTHAKSAEGKDPTARSRVSAMERRRRPREQVADQYEGSGPECSEAAVEPFRGASLRTSDQ

SEQ ID NO: 84079 - protein, 120 aa, Zea mays
  Coding DNA Sequence Number=SeqID_40704
MELPLDAQSSGRCLDVDERVEQCRAVAGVLHVLAQFVQVLQMQHLRGHISNTCLEAKGGRLYWAVIEYIMMCFWSHDPAISLEPVIAGPVADTEDAAREGIQDVVELVAERFQQDPTDDE

SEQ ID NO: 84080 - protein, 141 aa, Zea mays
  Coding DNA Sequence Number=SeqID_40705
  Subcellular localization annotation: CTP_CleavageSite=57; ConfidenceScore=5.18e-01
MGRSFLVKWDTAPAWRRGPGPPTGSGMCSQPPFCDLHGCSASAFCGLRFYVLRLTISVSALSEGREASGAAKQWRRAQSYDRRGQNSGKKRQDTEVEGIEEEVEGYEHDFGIHMDVDGDVYDDDHGVPEMIGELFAAAEAD

SEQ ID NO: 84081 - protein, 87 aa, Zea mays
  Coding DNA Sequence Number=SeqID_40706
MAVRARARHGRERTAVVGEVVAGEVAAAVGRGAVGEGAAAARESESESESERVRKKALTVDGKFTAMLSEHGARSFRSAPEIGRNLC

SEQ ID NO: 84082 - protein, 271 aa, Zea mays
  Coding DNA Sequence Number=SeqID_40707
  Subcellular localization annotation: CTP_CleavageSite=43; ConfidenceScore=5.04e-01
MSGFGAASGATSHRGSRERFLRRRDSRSHPRTDLRLHGLGSLSSPPEWGRGRGPCRSSVYPEVIAAVVWPPGAEVIVAAAGAGVGEPPGVLSPRRPSNVGGCSYLRGWNRSSVCNGTLSAGVCSSWLSGPEHAYESLGSVGLAARGFSCLVKGTLGRSSMSRSQRQRCQHGQRQSWLEKKLRRSEPGRAVHWRDRRRSRVAEAMSRADVLGGQLAEATERPVEPSARAGFPEETLAAMAQAWCRQVPSRWRSSDRVVVRGRVGLRQRWSRC

SEQ ID NO: 84083 - protein, 136 aa, Zea mays
  Coding DNA Sequence Number=SeqID_40708
  Gene Ontology: Mol. function=oxidoreductase activity; Cellular component=integral to membrane; Biological process=electron transport
  Homolog annotation: Hit_ID=Q0MRQ8; Match level="QueryCoverage=51%, HitCoverage=12%, E-value=5e-15, Identity=44%"; Hit description =Respiratory burst oxidase protein A
PVCRRFQVLLSSHLLCVSVLITRSLLLPNPTLHCLPAAPATAALHSDSLHRRSKGPAAIASGSRSQRQRPKGQTWMHPIFPALFYACDRVIRKFHENDYHSSIVRRPFSITVAPGDNYLTVHIRTLGDRTSKLSIL

SEQ ID NO: 84084 - protein, 129 aa, Zea mays
  Coding DNA Sequence Number=SeqID_40709
  Subcellular localization annotation: CTP_CleavageSite=61; ConfidenceScore=5.11e-01
MAYCESTGLGWAGRSTWGDKGVTQVIASATRTFQPPPRTVGYRPPRPYPPRRRRRSKRAPPAAVRWAQAKQHAQPANAGAAIEVEACPPTPAHHNGRRYGRWPYDVSLGPFVWPFPGVPLHEAGLALGL

SEQ ID NO: 84085 - protein, 255 aa, Zea mays
  Coding DNA Sequence Number=SeqID_40710
  Gene Ontology: Mol. function=transcription factor activity; Cellular component=nucleus; Biological process=regulation of transcription, DNA-dependent
  Homolog annotation: Hit_ID=Q3T5P2; Match level="QueryCoverage=21%, HitCoverage=25%, E-value=3e-23, Identity=94%"; Hit description=HvCBF7
  Pfam annotation: Domain name=AP2; Domain location=74-126; Score=40.9; E_value=4.5e-09; Accession=PF00847.11; Description=AP2 domain
LPRQRLSAANQLHQHPPQQQEKKRDEPWPWTLPPPAPSPRPRPLLRLLRPQPRRPPNPPPRAARSGGAARTGTTRRTAACACGPGGKWVSEIREPRKKSRIWLGTFATAEMAARAHDVAALAIKGRAAHLNFPELANDLPRPATAAPKDVQAAAALAAAADFQAPANAAAATDPDDGPAAAADSASASPPPPPPQLDNPDDALFDLPDLLLDLRHGASSCQLSCAPSWYDDACFSGAGAGAGALFRLEEPLLWEY

SEQ ID NO: 84086 - protein, 138 aa, Zea mays
  Coding DNA Sequence Number=SeqID_40711
MGGPAEQQKTDERRVVTRSSSGDDDNFCSGGPNSGNDDLRADAAARRPPPMPKLVRQGRAEGRRVGGDSPYLRPQPSWAESSPTCSKVLPLRRGGWVPHVMQAGPEQKKPNRRARCMQPPSGYKRPSTFAQTSGRKGG

SEQ ID NO: 84087 - protein, 47 aa, Zea mays
  Coding DNA Sequence Number=SeqID_40712
MRRPPVHALRMSALLLLLCLCAFPAPARLCNIRQVRNLTIYVRLLMS

SEQ ID NO: 84088 - protein, 242 aa, Zea mays
  Coding DNA Sequence Number=SeqID_40713
  Gene Ontology: Mol. function=transcription factor activity; Cellular component=nucleus; Biological process=regulation of transcription, DNA-dependent
  Homolog annotation: Hit_ID=Q6H6G4; Match level="QueryCoverage=79%, HitCoverage=74%, E-value=2e-35, Identity=45%"; Hit description =Putative DRE binding factor 2
  Pfam annotation: Domain name=AP2; Domain location=58-109; Score=79.2; E_value=1.4e-20; Accession=PF00847.11; Description=AP2 domain
  Subcellular localization annotation: CTP_CleavageSite=66; ConfidenceScore=5.39e-01
MEEERALSPVSDASTTCSSSGGTGPNSPITSSQSVDDTCGGAGSSSSRKRPRRELKHPTYRGVRMRAWGKWVSEIREPRKKSRIWLGTFDTPEMAARAHDVAALAIKGRAAHLNFPGMSHELPRAASAAPEDVRAAAALAAAMEMESVAPPTPPGDSSHSARNDENEEPAASSSSGNDADNAQSEEQAAPSEHSVLADGHVLDLALFELPDVLLEFGFAPPPPLTSCAYDLSWDEPLLLWEH

SEQ ID NO: 84089 - protein, 320 aa, Zea mays
  Coding DNA Sequence Number=SeqID_40714
  Gene Ontology: Mol. function=sequence-specific DNA binding; Cellular component=nucleus; Biological process=regulation of transcription, DNA-dependent
  Homolog annotation: Hit_ID=P24345; Match level="QueryCoverage=20%, HitCoverage=18%, E-value=3e-14, Identity=64%"; Hit description =Homeotic protein knotted-1
MRLGVPFIAPRQLGAVESIPGRQFLPSVVWHTGQSGAPPDTVRCGFLSFCGAADRWRLGAVGAPDTVRCPLPIVGSATCLAQIAQPTVGLADRWLTGQSGAHRTVRLGPLYEGRGSGSLGASSREWVLVPWGGPELCSRLAWFRTLSLHAPPLCDRSRSQSRLPPRDRVSNSFLGMLVSSLDTSSLHPRGAKYELFDISGVTLEARGRRLHGVLYDLPGSVFSVGSRIGDHYHRPWASSPSSVVAQLPPQPPRAGLPPTLNTVAATGNSGASGHQVLQLANGGGLLDASVKTKESSSLEATSKPLKPKRWKRGGARRSAA

SEQ ID NO: 84090 - protein, 505 aa, Zea mays
  Coding DNA Sequence Number=SeqID_40715
MTPARVEIWERTGTPDPENRALHETTGLDGRGMLKQQLQQQRSRRIPCLSLAIGKDQPGRRFGSSAESVNHRRPNDAAQGGQGHAISFPGTHTRMPEPRHVGSGAKWKEVANVCNARAARLIRNKCGGRVAQRPYVRLRPLAYVTGSRPRGSIESPPERGAEAHTVWSGHVSAPDPRLVLIKVRVSFVPESRDPAVSGPDPTERGPGPVSGVRIVPVEVLDLARRSGPYMQGSSTFPWGYGPIVDTLEDIVFSGHVASLEPSMWVPTVAPVPTSGEDTSLQVGPKLDWRLARRFRALADKPTPKEYDSWARAPVSETGPLFSAEMKRRTTAGGGWLVAVCLLRTRRPAHQQRVFLEKGFTPRAAVTLSHSLPPLRPFASELSVPLCIRAPLLSVVAVAMASLVHPERFQSEETLNLVCNLLGWGAPAFAGRIRADASPLGDLAVGEFMSFVSYFSCGLTLPISPFFLVLLEDLGLQLQHLTPHPSSRRPSSPTSARCLWGWRFFC

SEQ ID NO: 84091 - protein, 117 aa, Zea mays
  Coding DNA Sequence Number=SeqID_40716
MGKSKKGGSSSHHSGDKQKREPTPSSEDFGNSEYLEEEFSSESEGITSPCLSPDELEVSSDEGDSSDSSEEGSDGDDGGEGDGGDGDGGGDGSKGDGKGDGGNVNGKGGSGGGKASG

SEQ ID NO: 84092 - protein, 278 aa, Zea mays
  Coding DNA Sequence Number=SeqID_40717
MQSFIRPPGKGIGPGTGTGKGDTPKRILPCEGTRLRATLLIRGSKAGPPEGFDSRLRSRGPYTHYWSEVRRSAPRKGSTAASGYSGSAPITDQGFEGWPPKGSQSPQTPSRGMTMEGGIEPSDPVTRGPGPADHPQRLGGCSRKPGSGRTVDSVNIPARELGTRPYTRATASSHEGTTRPAEALRKTLRPRRSKTTPPRPRGLHPAGALARTHRNKMQPRKAGPLAKKCDESLQASANTPFEARGLLSGTIIRGTLKAPNSQLVTPISIKLQRPDGCD

SEQ ID NO: 84093 - protein, 120 aa, Zea mays
  Coding DNA Sequence Number=SeqID_40718
  Homolog annotation: Hit_ID=A3AG28; Match level="QueryCoverage=41%, HitCoverage=11%, E-value=6e-07, Identity=60%"; Hit description =Putative uncharacterized protein
MDLPPGHRPRISLYNLALKQSRREFAACVEVVAAVACYHRGQRGGDDQRNDTDQRHAALVFVRNEETRAPIIDLARVQCVESRLKYIHHGGALGSRMVRADTAAMSLPCGSDPRIEPTPP

SEQ ID NO: 84094 - protein, 96 aa, Zea mays
  Coding DNA Sequence Number=SeqID_40719
MADIDQDEPLDPKALADPDNSFYEINGVRLLTQATKIRCHIHIYPTRKMSNRVANNTKEWCSAEAEPCVWTPSSITDNTDRSVNLNKSKFTEETNN

SEQ ID NO: 84095 - protein, 139 aa, Zea mays
  Coding DNA Sequence Number=SeqID_40720
  Gene Ontology: Mol. function=oxidoreductase activity; Cellular component=cellulose and pectin-containing cell wall; Biological process=electron transport
  Homolog annotation: Hit_ID=Q9ZPN0; Match level="QueryCoverage=76%, HitCoverage=32%, E-value=4e-41, Identity=78%"; Hit description =Cytochrome b5 reductase
  Pfam annotation: Domain name=NAD_binding_1; Domain location=25-124; Score=1.5; E_value=0.0014; Accession=PF00175.12; Description =Oxidoreductase NAD-binding domain
MLLPRLLHMLAPQHLGVALVMGRFPCNPMHRRNAHGEPKMLKDGLDDMAKTYPGRFKIYYVLNQVCVTFFRKFEVFLLVHPPENWNGGVGFVSKEMIQSHCPAPAEDIQILRCGPPPMNKAMAAHLDELNYTKEMQFQF

SEQ ID NO: 84096 - protein, 53 aa, Zea mays
  Coding DNA Sequence Number=SeqID_40721
MVSSGFASQAAKPTEKQVKFSFILQSLFDLAMEHNRNKDSQSHHNAFDSDFAF

SEQ ID NO: 84097 - protein, 306 aa, Zea mays
  Coding DNA Sequence Number=SeqID_40722
MGAPDSPVRHRTGTVSCPGGTDVRAEAATGLISLASSIPPPQHAAPASPTQLYWQSRRPSIGSHELEERMTCLQLLFEDAIDDRILAKEELGAAADEFLLCLTMRQRALTREYSRLTNLKRPSDLSGMTEADRAAEAERLREERLQKARQLQDQGDMSGARECEGLARIIDFDVKQGGRYLNCICYVDDIYTFDQTEECVHTHGSASAAATPCSRTRFRQSRSAAALPPLVRLDLDPVPRHRCLLSHATETRSRRFPVKLPSLSSPSFPPPPLPARSVWRLAPTLRSHHHSLIARLRQQTQQAAPG

SEQ ID NO: 84098 - protein, 147 aa, Zea mays
  Coding DNA Sequence Number=SeqID_40723
MEFGTTRIYSGHMHEIQCLGYFGNRVGWAPVAEDVPEPEDSLVDAKRYGGVGKKKKIGGLIAQFWSCTFTPRTGKTSVEVVEIVPCAKNKRATFVRKVESEAIKIVEGDSDDAGDDRGKQAKPRSEEGTSKGKAMVTATQKRKIDVK

SEQ ID NO: 84099 - protein, 160 aa, Zea mays
  Coding DNA Sequence Number=SeqID_40724
MNGSPWALCSSKGESRERERSGEERPGGWVTCPRGDVRDVLGERVVQAWRWRWTPAGSARVLGARPRGAAGLGRERLLGSAHVLGHGEGRAARWAGVAAAARVGCGGALARGAEWAAAGPGKEEELRKADTKATLTSARMTNWSLLLALLYITVGAEMTP

SEQ ID NO: 84100 - protein, 226 aa, Zea mays
  Coding DNA Sequence Number=SeqID_40725
  Gene Ontology: Mol. function=methyltransferase activity; Cellular component=mitochondrion; Biological process=tRNA processing
  Homolog annotation: Hit_ID=A1YKF0; Match level="QueryCoverage=100%, HitCoverage=63%, E-value=8e-89, Identity=72%"; Hit description =Leucine carboxyl methyl transferase
  Pfam annotation: Domain name=LCM; Domain location=1-221; Score=-21.8; E_value=1.2e-12; Accession=PF04072.5; Description=Leucine carboxyl methyltransferase
MAPHCYVELDFKEVTSKKAAIINHYSEMKEKLGSEASISIACAITYPSISEKGEVISTHYKLFSADIRDIPKLDSVIRMAEMDPSLPTFIIAECVLIYLDPTATGAIIHPDDAFGEQMIRNLESRGCPLLGINATPTLSHKEKLFLGNGWQRAVAWDMLKIYNDFIDSQERRSLCYAAPFHDVTADKAARNGCRIERLELFDEFEEWYMMQEHYCVAYGINDAEVI

SEQ ID NO: 84101 - protein, 363 aa, Zea mays
  Coding DNA Sequence Number=SeqID_40726
  Pfam annotation: Domain name=HR1; Domain location=199-269; Score=3.6; E_value=0.094; Accession=PF02185.7; Description=Hr1 repeat
  Subcellular localization annotation: CTP_CleavageSite=27; ConfidenceScore=5.24e-01
MDKDRQGAAQKRQAVVRLHESRPKRPRGATKAAAPGGSQPPLAAKSAVPASSRAPEAAKAAVAGGSKSVKAAPVSSRVSEAAKAARELPLPGKRVADFATDISVKDYLVGSDEGQLVVVLPAVATAAAAVVPRAKGSALSASVEIPALTATRGRRGALTAVVSTKVERLWTQHADAVREKSAANSKCRKLADKVAALEGERTDLRRQLAEERKEANEALAKAQTAQAEANLARAEGSLARQRAEELEGRLNALQTRVERAEASTRSEAERTRKQLMDSYHELGARTADFEVPDREPGLRCLEWIHEELLALPAIVEGFMSYASLVTCEGAMNALFAKGAGTMRSSTKLMRISSAIFTRLRTLW

SEQ ID NO: 84102 - protein, 453 aa, Zea mays
  Coding DNA Sequence Number=SeqID_40727
  Homolog annotation: Hit_ID=Q5GAU8; Match level="QueryCoverage=27%, HitCoverage=82%, E-value=3e-36, Identity=64%"; Hit description =Putative uncharacterized protein
  Pfam annotation: Domain name=zf-GRF; Domain location=34-78; Score =10.5; E_value=0.0017; Accession=PF06839.3; Description=GRF zinc finger
MYREALWQKRGRPRELYPDVSSKDAPVPPELPMPNCDCGRLAWVHQSQHPDTAARCYYLCGTLDGHQRCFFFQWIDGPDKFDPRYLLFVNWLSGKTSHERFKRWVPPPPNPPPMTDAEKEPYGWRKCRFREWLYGPLSHWPEAEVKEKRYMGWAAEEVKFDPVLCKCGIEAKYGLVPSELGVGYFCGHMVDYDEETRKCSWESYDDKGEVMRTIESKRIMGQKMRCGSRLVDSYINDRIRDMRREAKSAFYDSPKRAEYRRLKAADEKRAQDAREWEAAQAEKQMLDNLADRLKGKIGSGVNYLADEAHARYVQDKMATVELMEEEEDDTSRLSELIALAEAGLHEEEEDDTSRLSELIALAEAGLRAQEEEDEFMSQAAAEVEAAYYKKKSDEAEAEDELFSQAADEAEANYYKRTGDKSDAGQCSKWNEVVVEDCATDDSEDELLIDCDSD

SEQ ID NO: 84103 - protein, 389 aa, Zea mays
  Coding DNA Sequence Number=SeqID_40728
  Pfam annotation: Domain name=zf-CCHC; Domain location=294-311; Score =14.7; E_value=0.0092; Accession=PF00098.14; Description=Zinc knuckle
MGMIRKIILMGVPLQGRSKGKALTSVKTWDDSSSEDELPRTCSHWSSSRSSRKCLMARGKMSIPSSSDESSSDDEGEGKPSIDELAEAIKFFQDVCTKQKAQLKTLKNKLISSQNDYKSLLEKFEVFANLNCELSTKIEQLGSSAPSTAIDDGLIRKNEKHKAKLASSQEAIGNLLGKIDILSIHNNELTTKLENIGSTPEASLVKIPEIINKDASTSCFDLIDHSNPYNQVLLKNVVIETCSDEIALENEQLNQEVALLGKALYDKKGKAKQIQPPRDNTIIGVNKPVKGETMICRLCHKKGHKSFQCKAKTGDKKNPTSKVSNTYISKVDKKVATPYFINKKKNGNVIAIKANKQANKGKGAKRIWVPKEIISTIKSTKKVWIPKGK

SEQ ID NO: 84104 - protein, 35 aa, Zea mays
  Coding DNA Sequence Number=SeqID_40729
MAPSRRPAHHLPEAQPTTPFNCQNLKNIMTEKFFF

SEQ ID NO: 84105 - protein, 54 aa, Zea mays
  Coding DNA Sequence Number=SeqID_40730
MVSECVAEDLPEQQLVKAEWESWLLGKVCDLCRLLETDISVVLTVKSGLGILFD

SEQ ID NO: 84106 - protein, 76 aa, Zea mays
  Coding DNA Sequence Number=SeqID_40731
MASPPPVTTTDDPHLDVIARDPRTSPDPSPDLYRCWGHNLKDADKIKSRDPDAKSFSLNLYVYSFQMSRELGKFIT

SEQ ID NO: 84107 - protein, 141 aa, Zea mays
  Coding DNA Sequence Number=SeqID_40732
MASAWGALQRSTSLASRVLVVEAIDFRDVVVAEAVELGFLGVAGICCGFASGDGNAHCGIGASYIVGDVPGGMCRVFAMEKAIEPSLLWASASTPASSVSAEALLRRPEFDYGGLTHVLLDCRNTYVKTPDCIVNGYVVVD

SEQ ID NO: 84108 - protein, 211 aa, Zea mays
  Coding DNA Sequence Number=SeqID_40733
MAHIRCTAQRPLRLTVPGQFSHLERLYRRLHEEQERRRQEQEQQDSSPSPRREVESKRPPAPIPQLEMPPAPPQGIPAAGGDPTETEMMTPVAVRATIRSSRRSRSRRDGSPDPSLVTLLYCLLFSGVADGLDLKYYPRHSTGSAGGVIASPVGESNPRLNNMVNLAVVLNTELDHILDELGKVQAEVAELRAECVARHYMDGGSLAPVGL

SEQ ID NO: 84109 - protein, 340 aa, Zea mays
  Coding DNA Sequence Number=SeqID_40734
  Homolog annotation: Hit_ID=Q8H6I2; Match level="QueryCoverage=59%, HitCoverage=97%, E-value=3e-87, Identity=72%"; Hit description =Putative MURBZC
  Pfam annotation: Domain name=Zea_mays_MuDR; Domain location=135-340; Score=-29.8; E_value=0.0016; Accession=PF05928.2; Description=Zea mays MURB-like protein (MuDR)
  Subcellular localization annotation: CTP_CleavageSite=53; ConfidenceScore=5.15e-01
MALPRAGFRNMARPSRQLYSWHYNPRVFEHLASGSVPSRRFLPGRRYCPLSVVAVTPRGEGSLMFFDWPSSSSLLPPPGSVPLAVRCLPPIALPPSPGSEPALLWSIAAPTTLVRSITSLTLGFPELEAGMEAAAELCSQKLSAAVDAARDTMKASSTACMVAGDYCATFSLGNDVVSTLDVLESAVAAEKIAMSSYSQASAAVDCAKETIAKYSEVNHKLAQALRYSLSLMSDAAKKLQDTASLCYTDEDVVDGFKLTQVARSLDELAETLEVTAIDCQVSMMDPTTILEAGYGSEDSAVWEDVFRDREIMNQPLEAETLAEHCAKWGLNYNEIRDRSV

SEQ ID NO: 84110 - protein, 48 aa, Zea mays
  Coding DNA Sequence Number=SeqID_40735
MESHDLRAEWESRLVGGYEIDDSGYDYGTGEDEAVEEDFQEFQDYDEF

SEQ ID NO: 84111 - protein, 139 aa, Zea mays
  Coding DNA Sequence Number=SeqID_40736
MKRASPCKGTKRCQRFIYNYTNSTVRNTVDYSGQEKFFLEKQAKRGPSGPLRRTVRDTRMSLGQNQCKNPSLCCGPSRWKKQAPSETTRGPSGPFAADRPRHRVDFDQELQFWDSPTKPRPSSYNVRTSGYKISRQSRM

SEQ ID NO: 84112 - protein, 57 aa, Zea mays
  Coding DNA Sequence Number=SeqID_40737
MQVACNRTMGAHPFGFVAFSMEAQGPGKGIFQKGSFSAKEAGPDPSYISGVRRLAPR

SEQ ID NO: 84113 - protein, 403 aa, Zea mays
  Coding DNA Sequence Number=SeqID_40738
MHRALPPSESPNGERPRCLRLAAVGGARPCGGWHLSAIARLQGFSSCSPAAFPHQWSSRMMTTSSMVGRSKRGCGLCPALSFKDLHHPCCGGGRAEPGFYLSQGPAGRLFLQHSGERALTGLAEGANFDNAGPVGRKRRQLQRAWLVGSSGSVAASDAASCRLTRAWPSVHRTGGRCAVGTGGSSKTSHATRAAFMFLDCLVLTPTRRLHAEVAAVVGAEVVVARGGFSADETVGATRGQTSGSLALIACPRPSSGDVGEGLVTATSALRSSLLLFSRPKQRSLSLLVQWSPASHLEFVVPQALWCGGCSYPREWNRSSICNGTLSVGNLRPLCDEMEPEAAVSAWTEAESAQKEASSAQEQVASQAEEVQQRRLELGQVIRERDQPRSHAAEAVRRADVLGG

SEQ ID NO: 84114 - protein, 155 aa, Zea mays
  Coding DNA Sequence Number=SeqID_40739
MGKSKKGGGSSHHSGDKRKREPNPSSEDFGDSEYSEEEFASESEGSPAPASPPASSDDSDDSQGIAVEVWTYIRAVERAGLKGSDESEYSSVEENSSDSSEEGSGGDGGDDDDDGGDSDGGGDSGKGGDGSGKGDSSDGGGGSKGSSKGSNKASG

SEQ ID NO: 84115 - protein, 265 aa, Zea mays
  Coding DNA Sequence Number=SeqID_40740
  Homolog annotation: Hit_ID=A2YGC2; Match level="QueryCoverage=54%, HitCoverage=65%, E-value=3e-10, Identity=30%"; Hit description =Putative uncharacterized protein
MCDDVQLCNRCVREFLILMAHIRCTAHKSVIPFCLLTWRSVQCVARCKQEVESRRQPSPAPQPDMPPAPPQSILAAGGDPNGDDANADGSSSHDTELSEELEPEGWIARPITRDAARGCHFHDALDTLLRRSFDQHTWSIEYRCVVYQHRHGLYPDQWKATCLVRRPDDDLHGAEAFSEHYSITERDTAEAAMQDAARWALSQYCSLFSGVADGLDLKYYPRRSTDSAGGVIVSPVGEGNPRLNNMVHLAVVLNTELDHTLDELG

SEQ ID NO: 84116 - protein, 120 aa, Zea mays
  Coding DNA Sequence Number=SeqID_40741
  Gene Ontology: Mol. function=nucleic acid binding; Cellular component= nucleus; Biological process=abscisic acid mediated signaling
  Homolog annotation: Hit_ID=Q6YVY6; Match level="QueryCoverage=66%, HitCoverage=25%, E-value=1e-28, Identity=76%"; Hit description =Putative uncharacterized protein OSJNBb0018H10.21
  Pfam annotation: Domain name=DUF1675; Domain location=12-111; Score= -20.0; E_value=5.8e-06; Accession=PF07897.2; Description=Protein of unknown function (DUF1675)
  Subcellular localization annotation: CTP_CleavageSite=52; ConfidenceScore=5.12e-01
MASSPSSCFWPKQISCLFCYEPQPLRLRTLQSLMMLTTSTGDLRSAMADMPMASYKAEGPGGCKTDGFLYKYRKGEEVRIVCVCHGSFLTPAEFVEQAGGGEVPNPLRHIVVNPHQSVFL

SEQ ID NO: 84117 - protein, 322 aa, Zea mays
  Coding DNA Sequence Number=SeqID_40742
  Gene Ontology: Mol. function=carboxylesterase activity; Cellular component=integral to membrane; Biological process=medium-chain fatty acid metabolic process
  Homolog annotation: Hit_ID=A7QJ63; Match level="QueryCoverage=76%, HitCoverage=70%, E-value=6e-79, Identity=54%"; Hit description =Chromosome chr2 scaffold_105, whole genome shotgun sequence
  Subcellular localization annotation: CTP_CleavageSite=40; ConfidenceScore=5.75e-01
MNPIATAALTPSSFFASNRRFAPRLRSVLPAAAMSYAAVSASAPSPSSGTGEQVKAAPLPHSTLEIAGARRGLLSGFASLRAPYRAFPVLASNRHVETIFAALTRSLPAVKLRRECLRAPDDGAVALDWVSGDDRVLPNDAPVLILLFYSASFTGDLRQVIGHILGRYPQSNVYATGWSLGANILVRYLGEETDKCPLSGAVSLCNPFNLVIADEDFHKGFNNVYDKALARALTTIFKKHALLFEGLEGEYDIPKAANARTVRDFDEGLTRVSFGFKSVDDYYSNSSSSDSIKDADNDPIAPSRGIPRDDIKVSAIVHPFFT

SEQ ID NO: 84118 - protein, 129 aa, Zea mays
  Coding DNA Sequence Number=SeqID_40743
MSSVLRKWARPSPLLLVLLSCRSNIPLDRLTRWQGGRPSHTINHFLNGTCKNYATSKAEYTNTQLDLTVTALVPTIASMGDPVSGRMRDKVRARLHSEITTSEVYDLLELNKVNFTYVRPLGGILGKLG

SEQ ID NO: 84119 - protein, 427 aa, Zea mays
  Coding DNA Sequence Number=SeqID_40744
  Homolog annotation: Hit_ID=Q6J9V9; Match level="QueryCoverage=25%, HitCoverage=31%, E-value=3e-10, Identity=44%"; Hit description =Putative uncharacterized protein
  Subcellular localization annotation: CTP_CleavageSite=60; ConfidenceScore=5.50e-01
MVSFQGGHPPFKGNSPHLRPQPSRTESSPTRSKVLPLRHGGWVPRIVQAGPGQKEPKPSRAMRATAQWLRAFLHFRPDRRVKGWTAMQAVCNRTKGAHPFDFDASSVEAQAHTSCNRRAGYYVRETAPPLAPVPCLLDCGTSAATRGDPAHGSTAPTEHISHGSVSHGRRRDGRYGQKWAGSNGGGRRAEAAVKSTGDTFGRRSRRRFTSAIMTASKKVHHVIRFRILFHFLFLSLATGTGKGDTPKGILLREGSGPRAPLLIRGSKAGPSEGFNSRLRALGLHAHYWSEVRRPAPRKGSTAASGHSGSAPTTGQRLAPEGFDSHLRRRARDDPGYVRYITKARATIPRVRPTAAKSGLGHHRKLRLARPQGSDSDSAPEDDELRLARPQGSDSASAPEDDELRLARPQGSDSASAPEDDELRLARP

SEQ ID NO: 84120 - protein, 128 aa, Zea mays
  Coding DNA Sequence Number=SeqID_40745
MALEARLGCYQPHSVEWHNSRSGASDAVFLSGWIRCQAILALNAPAIRSVGVAIRPRLLLGEDWASGELKVGKQVGAHHPYKKHHDDPIGRLDLLHMDLFGTIAYISIAGRKITNPTDLKGILETGSK

SEQ ID NO: 84121 - protein, 253 aa, Zea mays
  Coding DNA Sequence Number=SeqID_40746
MAGHHRPTTRYGTFYLDQVEDAVIPAPTRGVSICALALSEGCTDQRPPGRTQPQACGRGCPGIFGKGARAPPKHRWSQPRSRFHGGCTADANGHPVPNGCPLSRCGLRGVVATQGGGRKKKRNKNHGHEKPWLAVSVAAAAGSRGKRSKHPRPQGSSGDTCPMHPNSRHCAADCREIIKLARRIRERREQSFKDGSPPYRRQSQIGADGKAAATEGQDLDYQSPEGCLKDVFIGDSDSRDDGDRRKKLYVMYG

SEQ ID NO: 84122 - protein, 149 aa, Zea mays
  Coding DNA Sequence Number=SeqID_40747
MATQMSLATGATVVAGNFSGDARRSEDERSTGAREFVSYAVAVTPAMDIGLQWFTVIRWRCQGFPYLGLVLPFRSLFRVYKTYAMPMLMMLCSSFSDSNTRGVTKRATDLTWQEEDLAFREEMWARRNKLLDELELEAEEKGKCLEGKE

SEQ ID NO: 84123 - protein, 196 aa, Zea mays
  Coding DNA Sequence Number=SeqID_40748
MSSVSRKWARPSPLLLVLLSCRSNIPLDRPTRWQGGRPSHTINHFLNGLTALAYNAPLTPAAAVKRRDGSGEVVEDVGEVSGITTDAREDMGARNWTETHRLALSTRGGERPKSSEVDLGPPVKSGLVRGLGKLHGPLAELAEALARLGGGWSGLATVAEALAAMAGGIELAGAKERGLAGEGERGVKWGAPGEAL

SEQ ID NO: 84124 - protein, 123 aa, Zea mays
  Coding DNA Sequence Number=SeqID_40749
MESHDLRAERESLLVGGNENDGFGIDSGNASPLQPNRTIVGYVDVYSPLLYTPNPPPQVVSIATTAQEKMKPWKETSRSSKITMSSRHGLAATPSRMSVKAACIYVSFPHFDYCKDYVDVSDI

SEQ ID NO: 84125 - protein, 121 aa, Zea mays
  Coding DNA Sequence Number=SeqID_40750
MAMTVNGEDWNPGPVIDLPFPVAHVRNRPHRVHSLAGGPTGGQIRSQRIAEDGGHVVGANSAPTLRMTARGSIPGHGGPPRAPFQNLPPPQTASSTIPAIVRLKDSATARDRRPRPHSFRG

SEQ ID NO: 84126 - protein, 181 aa, Zea mays
  Coding DNA Sequence Number=SeqID_40751
  Subcellular localization annotation: CTP_CleavageSite=79; ConfidenceScore=5.10e-01
MTSGPREAASVSAWATTGDWPMEPTRQRNAGAASCGWRTGSSWQDRAAQRPYVRLRPLAYVTGSRPRGSIGSPPERGAEAYTVWSGHVSAPDPRLALIKAWVFFVSESRDPAVSGPDPTRRGSETILGIRLAPVEVLDLTRRSGLHIQGSDTFPWGSKPTVDTLEYIVFSGHVAAPKPSTW

SEQ ID NO: 84127 - protein, 433 aa, Zea mays
  Coding DNA Sequence Number=SeqID_40752
MARLRHTARKSVIPFLPSHLAERPLRHPVTGQSSHLERLHHRLHEEQERRRQEQEQQGSSFLLQQEIESVRSCSPVLPLEAPHAPPLSAPAPGVAAGGDPDDGGGDSSSSHDTDFSTDQELEAGADPQGGPGGPWHTLSQTHQGPHPAIPVGQRDARSKFSTSRLLPTIGLDFCLWRAIPGGFSFSDRKSSAVSGRGTAGAARVPGRFDRIRHWLEGWVARPITRDAARGCHFHDVLNTLLRWALDRRTWSIEYRCVVFQHSRGVYPDRWEATYLVRRPENGLRGAEICSEHYSISKRDSAKAAMQDAARRALSHYCSVLGGLADGLNLKYYPHHPSGSTGGVIVSPVGEDNPRLSSTVNLVAVLNTELDHALDKLSRAHAEISQLRAERAEHRHLEDGSPAPVGTQHPYHSPRRGHQSYGNPDCRTKINLKP

SEQ ID NO: 84128 - protein, 86 aa, Zea mays
  Coding DNA Sequence Number=SeqID_40753
MESHDLQAERESLLVGGNENDGSGIDSGNASPLQPNRTLVEYVDVYSPLLYTPNPPSPGCQHCNHCSREDEAVEGDFQEFQDYDEF

SEQ ID NO: 84129 - protein, 394 aa, Zea mays
  Coding DNA Sequence Number=SeqID_40754
MPGKANCCCPARMQHSVLYPRFRGEDGSEDLPMRFGAAGAHRCGVGRQVDAAVGADVVAAGESFSAVKTVSATCGPSSGSLALMSGSRPLSGDANESLLVAAFVLGPWLLLQRSLASRPELVAPQALRNPRPLCDEPEPRAAVLAWTEAELARKEDFIGRSLAGPSTGGTSAGAGDPSPVLPSEARSDFTEGGVDAEGAAAPPPSTSEPAGSVRLYESYFSRKVMSEDSAIDIVKKARKIVSAEKFPSIKTCSVSGIAYPSVSYLSQKVMSETTHLELDRKLFVNTQQAPTWRANCRRFDPRGPWTDERKERVQAILALNAPAIWSVGVAIWPRLLLCEDWASGEPKLCADGGYQLRLGVLGVPLIMVPDRAAKHKEGGSTADRKTGIFESIHI

SEQ ID NO: 84130 - protein, 343 aa, Zea mays
  Coding DNA Sequence Number=SeqID_40755
MQAACNRTKGAHPFDFDTSSMEAQAHTSCNRCAGYYVQETAPPLAPVPRLLDCGTGATTRGDPAHDPTVPTEHIGHGSVSRGRRRDSRYSQKWAGSNGGGKRTEAAVKLSASSRPLLGQRKNPLPRCKDDAPVFRSSNGSRTHDGCPANHSSRRINSAAGQAAPLAGEAGTGKGDTPKGILLHEGSGPRAPLLIRGSKAGPSEGFNSRLRALGLRAHYWSEVRRLAPRKGSTAASGHSGSTPTTDQGFVGWPPKGSDSRLRARRARDDLGKATQGRMKKAESVLDRPLALCGGSGAALANPALAKPLTASTYQPENLGLDYAPGLRPVRMREQPDRPKNHETR

SEQ ID NO: 84131 - protein, 112 aa, Zea mays
  Coding DNA Sequence Number=SeqID_40756
  Subcellular localization annotation: CTP_CleavageSite=86; ConfidenceScore=5.81e-01
MDSASLDPRARTQPRPRTTDSTSPDPKARTQPRPRKTVSASPNPGLGHSLSLGRRSPPRPTQGSDSTSTSDDGLRLARPQGSDSASASEDGLDLGLGGASASPDLGLGPTTS

SEQ ID NO: 84132 - protein, 179 aa, Zea mays
  Coding DNA Sequence Number=SeqID_40757
MARKDNASQEAPSGPDLHRGTPDPCEYESRAPEGTYRTPRVGPRSPPREVQASARSRDGEDPGTGKEDAPPATTLTGDAPSQHLMRPVQSASIRRQGHPADGAPDQPVGEQYARAKRRTVLIIPSTRSFLCTPRIRRSRALGHKKIAPAANICGSKRYILCPWAHLSGPSTFVHAPLQL

SEQ ID NO: 84133 - protein, 401 aa, Zea mays
  Coding DNA Sequence Number=SeqID_40758
  Homolog annotation: Hit_ID=Q99PR6; Match level="QueryCoverage=33%, HitCoverage=59%, E-value=7e-07, Identity=27%"; Hit description =Enterophilin-2S
  Subcellular localization annotation: CTP_CleavageSite=37; ConfidenceScore=5.19e-01
MPTGRSGSHQHTSAGNVADDSSAATAASSVSAPGPPSAAAEEVPVAFAPTVQDDAGAEVAPLDPRIRLSPSRQRLWIPKFQAWGGASSSVPPPTPEGPKIILRRPLRSGVDPGATLTPLPQVLAHAHQALQETEVAIRQEWEALETEHQRLGDWCTQLEKRTKAASCQFASERAELEQEREDFKEDIQKVSDREEEVTRKERSLVKKKEHLDQKEEAVTPLHDKLKAYNTVLEKKRDKQVAGEAKLQQELANKASDIARAEVNLMAREASFAKRVTKPPKSYGPPTVVLVQRTLDNPVGAPESLDKFGICFSYLSQERFTRHADITNIRVMRMRKQLHKLTFILKGTPQTSISLPREDHDGERRGRAPASAWTGQTGQRLAPNFGRNRIHALTSVSPKSIA

SEQ ID NO: 84134 - protein, 117 aa, Zea mays
  Coding DNA Sequence Number=SeqID_40759
MGITSKMDIAKVILGCVARKQLIKPRTEARRASRYQVHGRRSRRLRNPKPRDVGAKKCQSRSSQANLMIYESNIKAQASRNSAQSGTPECPVVHRTVSRCARLTLGEKARFSGIRRR

SEQ ID NO: 84135 - protein, 151 aa, Zea mays
  Coding DNA Sequence Number=SeqID_40760
MARSWRMAWGGCRGARELLKGAACHGYWLTWAVWRIGLEAWWSWSGWPWPVANATRLAACYSRFLTAPNCRTRGERQSGCIGRHEMAFSAWNRTMFTIAKFLPAQCTTNLVEGARTFGERVSRQELALVARSITQCTVDNQRRSGAAIAGF

SEQ ID NO: 84136 - protein, 80 aa, Zea mays
  Coding DNA Sequence Number=SeqID_40761
MAAAYGYATPKPLQWPMGGGLCNGMDIQRKSLPRIAPVWRSDPVDLEEGAVTAACLHRSSPLRVAMDEGLYSSRSVLGYF

SEQ ID NO: 84137 - protein, 130 aa, Zea mays
  Coding DNA Sequence Number=SeqID_40762
  Homolog annotation: Hit_ID=Q75GU5; Match level="QueryCoverage=56%, HitCoverage=35%, E-value=4e-11, Identity=48%"; Hit description =Expressed protein
MDVLDHSDDDEEHRRQYATSSGRSGSRLGACRRKRRSGGSSHQHLLLMDRVGGRDRGDGALEDTVPLPDYERLSQSGGAGAGAGGCGAGSDGDSKNSEDGGYEGKNNEKKKKKRSSWLPDPDRRWPVQGF

SEQ ID NO: 84138 - protein, 154 aa, Zea mays
  Coding DNA Sequence Number=SeqID_40763
MTMEHAAVDQQRTESLHPAKREHRFLGLGWRKESLLGREAVAFVADDRVEVALAMDRDLRSGGGGHEWNRGATAWTRALENYLPTWFLGSLLKFLAVLKHLLAKCLGSLLSKIHSFLAVYSKLIFSTSCNYCTSSMAGSGPAEVYDHIRKTYET

SEQ ID NO: 84139 - protein, 1049 aa, Zea mays
  Coding DNA Sequence Number=SeqID_40764
  Gene Ontology: Mol. function=protein binding; Cellular component =nucleus; Biological process=regulation of transcription
  Homolog annotation: Hit_ID=A3AM78; Match level="QueryCoverage=54%, HitCoverage=99%, E-value=1e-154, Identity=66%"; Hit description =Putative uncharacterized protein
  Pfam annotation: Domain name=Extensin_2; Domain location=111-426; Score=-141.5; E_value=0.094; Accession=PF04554.4; Description =Extensin-like region
  Pfam annotation: Domain name=GRAS; Domain location=396-701; Score =334.9; E_value=1.4e-97; Accession=PF03514.5; Description=GRAS family transcription factor
  Pfam module annotation: Pfam domain module=Extensin_2::GRAS; Domain location=111-426::396-701
MASAARARQSARYPDALGARWPGRALPLHRVPLAGTRGAPSAEAKTWGEGSVGRRGRKQDATADARSAKLKGRRQKRAPGGGQWPVGTAADLGMWLAPKILSKPSGYHMFVDSCVLYIFVAQVTTKVEANPNLRQGSRGYCILGFCTPEDSPVIAPRAGPASVCATATIVHHSAHTTVLNPLPPLVPAVVPPFHHSPKTTPQNSPAAPIPTLHHSAILPPETAGSAMAYMCADSGNLMAIAQQVIQQQQQQQQQEHQRHHHHHLPMPLPLPPPPRQALPMPPATAPPHGQIPAASLPYGGGAWPQADHFFPDAFVGTSAADAVFSDLAAAADFDSDVWMNSLIGDAPVFADSDLERLIFTTPPPPPPVPAPAPAPASAVAPVDAAAQPEAATPASLPQPAAVAAPAACSSPSSLDAACSAPILQSLLACSRTAAAGTGLAAAELAEVRAAASDDGDPAERVALYFADALARRLACGGGAQAQPSLAVDSRFAPDELTLCYKTLNDACPYSKFAHLTANQAILEATGAATKIHIVDFGIVQGIQWAALLQALATRPGEKPSRVRISGVPSPYLGPKPAASLAATSARLRDFAKLLGVDFEFVPLLRPVHELDRSDFLVEPDETVAVNFMLQLYHLLGDSDEPVRRVLRLVKSLDPSVVTLGEYEVSLNRAGFVDRFANALLYYKPVFESLDVAMPRDSPERVRVERCMFGERIRRAIGPEEGAERTDRMAASREWQTLMEWCGFEPVKLSNYAMSQADLLLWNYDSKYKYSLVELPPAFLSLAWEKQPLLTITAFIPSWQSPIVRSARVPVRVRVRPPRGPRRHAAFGLQGAPQYVCPRARRHRDGGSPTAGAAAYKRLLARALGTHRRARASTSLLLMYPYTFRAAASSSSSSTALGFALGRIGGTTRSGGVAAPGLVVPAAGVARGRSVSSTPAGSAPVPGDQGVGMEQPKQQQQQPKVPPQDAAGGENKRDDMHKHTRDVMTHSFGEGYSTRSDEEGFGGVYGGNDPVEHPGAEIHPSHSEYDTSQGSEVKEKEKARHLKDEKHATA

SEQ ID NO: 84140 - protein, 200 aa, Zea mays
  Coding DNA Sequence Number=SeqID_40765
  Homolog annotation: Hit_ID=A3AM91; Match level="QueryCoverage=66%, HitCoverage=9%, E-value=9e-40, Identity=63%"; Hit description =Putative uncharacterized protein
MQAEISIGRAQGRAEVPSLLSMISTDRAKGGVKTMKAIAVGSFLGITPFENIVNFKNIIRLHKVETKEVNEQESSRGHAALSKKGQNPQPDNSLLNEVEEDAISDDENHEDSRRGRSKLERWTSHKEIEYSNIDDDSTQTFPTIKADVEADEVGKSQVSAAAGNSDINTNVDTGQTSDKMTEECERDRHLDTVERAQETK

SEQ ID NO: 84141 - protein, 160 aa, Zea mays
  Coding DNA Sequence Number=SeqID_40766
  Gene Ontology: Mol. function=protein binding; Biological process=RNA metabolic process
  Homolog annotation: Hit_ID=Q2QUQ9; Match level="QueryCoverage=66%, HitCoverage=13%, E-value=5e-11, Identity=45%"; Hit description=Pre -mRNA splicing factor cwc22, putative, expressed
AYNHASGDWRSVEPQIIKRKLGNYAIQQSCTDSTENSKPSVPVPVPANSVSPLRRRPNHHDDVSPRHRKRRASPSLCPPRSPFLGVDADRRRRSRASPPDFDIRGRRCDAKPSEEKENGHAKPGKDEDGDNRSPRRDRVSDREEGSERRRIRDMVSDDEK

SEQ ID NO: 84142 - protein, 48 aa, Zea mays
  Coding DNA Sequence Number=SeqID_40767
MEKCKPIKTPMPTNGHLDLDEGDIRSGCRTRRMRRRQRVAMMRILVAL

SEQ ID NO: 84143 - protein, 869 aa, Zea mays
  Coding DNA Sequence Number=SeqID_40768
  Gene Ontology: Mol. function=UTP-monosaccharide-1-phosphate uridylyltransferase activity; Biological process=metabolic process
  Homolog annotation: Hit_ID=Q6JAD6; Match level="QueryCoverage=47%, HitCoverage=56%, E-value=1e-159, Identity=90%"; Hit description =Putative uncharacterized protein
  Subcellular localization annotation: CTP_CleavageSite=42; ConfidenceScore=5.08e-01
MCGTGICWWWFLRSTTTPICLPRRPPASTTGGVKKLHHFSIRSSDAASSSREWGSWAECSVDRKCHDYHRCHKVRRLNSSYPGGLVSYIQNAKKLLADSKEGKNPYDGFTPSVALPRETTTGKCFLQLYIESILAFQEASCKMVDEGCQTKIPFVIMTSDDTNALTIKLLESNSYFGMEPSQVKILKQEKVACLADNDARLALDPSDKYKIQAIPSALGVSATKGYNVNSLAVPRKAKETIGGITKLTHVDGRTMVINVEYNQLDPLLRATGHPDGDSNCETGYSPYPGNINQIFGRRMLVHHSQRVRVWIWRGTDAIIFIVHILSNQLPQLHKSSSESSSSSSSESSSSDDESSRKSRSRSRSKRTRKRRAGQSPSAEAVKARRKARCFMLCWHKSPKRGRLKEKCVLGSFLSILVIECQHKCLNENLCSWMNKVQIKSKVFKLFRITYSPPSRCSHPFRQVKGKTVYLELQEGRKKRRTDREARAAAAAAAAAAQAALGDQPQTPSDQIAFRARRLTSRPRSSSHTSASTPPPTLPAPVTPIAPSTSTAIPTTSSTPASTASPAPAPASAPPVPPPRFRERDETEVRPLVSDPRLFDLQRATAARVRRFRYVPVESWLPAQRDPAAGDLFSTRIQESFFRAQMSAQIALRVHRLLDLPAFLLAAGADSKAHLTYLPGLQTLLTISGRYVEEWVRVFYASVWIDPDHHWMRFRFEREDVTITASQIRQLFGFPESPTRLHSLCYGTSDLPRRPHGGVAPGTAHVAALFCPPFTDGSRRSPADFTTTAKYLYELIRRTLLPRMGYREATTHIQLWLLGALVSHSEFDVVDFLICEIEDTVLDGIRARRQLPYAHYLCHIFAQLIQPPRF

SEQ ID NO: 84144 - protein, 50 aa, Zea mays
  Coding DNA Sequence Number=SeqID_40769
MTQLLEFYEAEDPEHLFDDDEDGYDHAYGNGKEGVEADLQEFQDFDEFED

SEQ ID NO: 84145 - protein, 126 aa, Zea mays
  Coding DNA Sequence Number=SeqID_40770
MEDQIPSLADLIKFGSLLDFQQQYRFSRCCHTPDAQIFFRPFVGEEYHKKIKSKMKELYLIGQIPISVNCRHYEVLADQMQPVLIRHLLIPAMPWNWMHLWDSLHVVDLGILVEHGLGKLGWHDSQ

SEQ ID NO: 84146 - protein, 101 aa, Zea mays
  Coding DNA Sequence Number=SeqID_40771
MARSSAVDSLLAAPWMKGDVEIGRRRGGTSGAVGSRGIVSGSETGRTVAAVEDPRNGAFHQRSVDGGDDSGVPQRRAGRGRMSEAGAGRGHGGRPHCDLKV

SEQ ID NO: 84147 - protein, 439 aa, Zea mays
  Coding DNA Sequence Number=SeqID_40772
  Homolog annotation: Hit_ID=Q6Z8F0; Match level="QueryCoverage=8%, HitCoverage=35%, E-value=3e-12, Identity=92%"; Hit description =Putative uncharacterized protein P0459B01.18
  Subcellular localization annotation: CTP_CleavageSite=39; ConfidenceScore=5.31e-01
MAHLELPIPWHGSPKQPRRPTYLKRAPTRTLHRRSGSASGAAREGLPLVSFLAHLRPLQRSAPRGAPEARGYRPRRRRLPGAPRAPGLWPPARATTVHAPSRSADQQEPFRIRPRTWARSVAEDASPDYNSGGEAARFSSWAAPGSLAVTRGILGRMAGRAPGRCTENNNLMSPTTCCARRGSPAAPASAHLAVRRGGPDATSLAPRGGVGSVFWRDAQADVPSARRLRAQLAFKNSMVRGILQFTPGIAFCYVLHRCESRDIRCRESCRLRCNRCPGSGRRADRSAGQEVVLVFLGARGAVGSFSRHPPSPREVRGGSVPGRSPAARVTRSRSVLFKGHGNDPSADKHMTTGRINQVARPRRRASAGLRAEASCRAGRRSFGRTDSWARDANASPAFSVSHIRDQKRQRGVLGAAGHRPTAARGKRRGRSRADEPHPG

SEQ ID NO: 84148 - protein, 65 aa, Zea mays
  Coding DNA Sequence Number=SeqID_40773
  Gene Ontology: Mol. function=aspartic-type endopeptidase activity; Biological process=DNA integration
  Homolog annotation: Hit_ID=Q8S474; Match level="QueryCoverage=50%, HitCoverage=4%, E-value=1e-08, Identity=84%"; Hit description =Putative pol protein
MTNGPSQGGRELVPPSGVLSQPKHQVAHLEVSGPDPSGVVASQGLLALVLGEPYSRSMGKMASAP

SEQ ID NO: 84149 - protein, 320 aa, Zea mays
  Coding DNA Sequence Number=SeqID_40774
MKILKAERWLKGTNSRGVAFPQRQGGKTAGIPHPGAWKPSWAESSPTRSKALLLQRGGWVPHVIQAGPEQKKPNRRARCVQPPSGYKRLSTFAQTSGRKGGQPCRRHATVPSGHTSPTPNTPSMEAQAHASCNRRAECFVHATAPPLAPPPCLLDCGTNTATRGDPAHDPAAPAWHDGQCGQKWAGSNGGGRRAGAAVTSGTGGASGRRSERRFAFAIMTASKKGPRKGDTPKRILPREGTRLRASLLIRGLKAGPSEGFNSRLRARGLHTHYWSGDRRPAPRKGSTAASGYSGSAPTTDQGFEGWPPKGSQPPQTQSEG

SEQ ID NO: 84150 - protein, 120 aa, Zea mays
  Coding DNA Sequence Number=SeqID_40775
MEARRALRYRVHGRRPRRPRNLKPGVKNKTCKVKVDRVEKRYVTSERSLVGFGDLDDNPIEILALKENTSFVRLGVHILETTDQAKDEDKKSFEQLTSWEKVKEAKEPKARGEEDFLSQG

SEQ ID NO: 84151 - protein, 305 aa, Zea mays
  Coding DNA Sequence Number=SeqID_40776
MNTLFIKYIKKVGAFVNSNDMTVYSYSPYLVINVVFGISEETKECVAPVSNSTFAGWDSTRNIPTATSGASWIASASKWFPFHGCSPGHGLLMLVVVLLVLMGCSRLAVAELLSSGNELPSGLVPHSGNIHDLLLVLGLSGCSGWLLGKEGEVSRYSTADTGFLLIGCVGGTTAAAEGTASGTAVGADVDAGAGVDVLEVFHLPALPLSHDSAIYQMLKCKEGSDQVLKLPESALGTSARLSLGVVVATAAGVSHPGVPTALAGHAFHLGACCQTSVESIHTSDLTLQSSSIRKRYIEVFITLNK

SEQ ID NO: 84152 - protein, 200 aa, Zea mays
  Coding DNA Sequence Number=SeqID_40777
MAVLIALCEATIYNRRGDARFDCNLRSSLAKALLRIRPLSQQSCLFLEVKFCLRCFRLLIGHLAQFFAFWGVLLGLGRLFFDRARALRVFVLGGKTMYVALAGDEVSLNVSGDLLVLVYGYYSLRTWDLHAHDVVYVHVIEGMHEYDVSLATIIDEDFVQTPPCASSIYHQRVCMGTLWRSTSLASKGTRLIVLGVCRKR

SEQ ID NO: 84153 - protein, 68 aa, Zea mays
  Coding DNA Sequence Number=SeqID_40778
  Homolog annotation: Hit_ID=A2WMD7; Match level="QueryCoverage=83%, HitCoverage=34%, E-value=3e-15, Identity=71%"; Hit description =Putative uncharacterized protein
MKGTPKCNEEDAKVKDEVEMDGRVVEQKVQMTAVAVEIRKKESGELVAIGRQWMTASRPKVAAAHSKI

SEQ ID NO: 84154 - protein, 52 aa, Zea mays
  Coding DNA Sequence Number=SeqID_40779
MGSFGCSDSTSLDGLLVSANWCTGAAGGSIQGVTLKVGWMNSEKSMRRGEKL

SEQ ID NO: 84155 - protein, 161 aa, Zea mays
  Coding DNA Sequence Number=SeqID_40780
MAKMRRCHCLYKASIVQGNACALLHLITSAVVALRQKRQQSMIVRRRQASCHGRRIGMTWRGRWGLRLRVRHGGVRLGLLLRVRVRLSGIVGLLLRSVEDLRCRCRPAAGGRRACGWSAPRASGPGPCRHARLPERDQTSYAEAIADCLEFIKSRSSPTVL

SEQ ID NO: 84156 - protein, 102 aa, Zea mays
  Coding DNA Sequence Number=SeqID_40781
  Gene Ontology: Mol. function=hydrolase activity; Biological process =lipid catabolic process
  Homolog annotation: Hit_ID=A2ZMM7; Match level="QueryCoverage=60%, HitCoverage=9%, E-value=7e-11, Identity=60%"; Hit description =Putative uncharacterized protein
MASPPPDVDLGKLSYEIFSLLESKFLFGGGSVPGTPARAAAPGPGEDRGRVRVLAIDGRGPGPGDALLAAAALARLEAALRVAADGSRGGLIGRLFGWGSLH

SEQ ID NO: 84157 - protein, 32 aa, Zea mays
  Coding DNA Sequence Number=SeqID_40782
MGSGHSTCSAKCSGGEAGNMEDFEEFQEYDEF

SEQ ID NO: 84158 - protein, 238 aa, Zea mays
  Coding DNA Sequence Number=SeqID_40783
MSASFRHIGLLLLGRHIEILDSPTSLHATRRCTASLAGVAPAHASCRVCACRALLVHAGAILPPRQAHPPSLDSTDFANYCCVSFRCSSHPKALCLETSHTASSPSEPWSPLPNSDVAKIVFASPLIVDVIEPASLDLVAIIIHESLRLVLCADEDMMMNLMDASLVIPSIIFLWKDVHVLLFRRSLTLKLRKEIDQRKIIRPLGTRSWVKEQFRLPDDMSLDDPYMREVFNIAAQRL

SEQ ID NO: 84159 - protein, 138 aa, Zea mays
  Coding DNA Sequence Number=SeqID_40784
MAVLRRRPSSGKESRGPRSAIPTRETRCAFYTPRRSPQIRQDKFPSGGKANSVVAAHALFYGNAATDFYTQAQGDSTLQLPSETRHQVVATDFRNLWSSSATQQWRPRRHSVSGEDGNAVNRGARRQWEKAYPGANFF

SEQ ID NO: 84160 - protein, 153 aa, Zea mays
  Coding DNA Sequence Number=SeqID_40785
  Homolog annotation: Hit_ID=O48967; Match level="QueryCoverage=83%, HitCoverage=27%, E-value=7e-36, Identity=59%"; Hit description =Putative uncharacterized protein
MVQIIEHRDLILEDFLMEEEAAFSMPRSSNRPATGAAVMHATQQHTHVQTSRAPSRATLGALSAAKELLRNPPSSTASPGAIRQWREDVDRLLGLAHSGSASPRPRPFRRQREVSASVHSPSVRGARTYGQSSTAGVRARMPESLWRGIRTYK

SEQ ID NO: 84161 - protein, 169 aa, Zea mays
  Coding DNA Sequence Number=SeqID_40786
MAPPVTWSVKPWVGRGGGSFEAEVESEPLGRARRRPSAEARAVFEPWGRAKRSSSSSRAEPESEPWVGAKPESEPWVGRGGVRRLPGLSPSPSPGVGRGGVRRFPGLSPSPSPGSGEAELPMALEARLGCCQPHSVEWHNSRSGAGGAVLLSGQSVERRSDYGHFGSVD

SEQ ID NO: 84162 - protein, 59 aa, Zea mays
  Coding DNA Sequence Number=SeqID_40787
MVQSPTQDEEHVPQDDDRPRASREDDDCSRASREDIDRPRVSRPFRVEALHDPNWVLTM

SEQ ID NO: 84163 - protein, 106 aa, Zea mays
  Coding DNA Sequence Number=SeqID_40788
MTPLARTSRLMHRRRYSHVEGRRLLVGLGSAAASGPGTSPLARTRVPLSLALWIGEPPPQTWAPPPLLRIEEPPPPRVEVREPQSPAGSPPPRTLSGNHRRRTRRH

SEQ ID NO: 84164 - protein, 409 aa, Zea mays
  Coding DNA Sequence Number=SeqID_40789
  Homolog annotation: Hit_ID=Q655R5; Match level="QueryCoverage=99%, HitCoverage=99%, E-value=6e-78, Identity=45%"; Hit description =Dentin sialophosphoprotein-like
MRRCAEAIARAVVEFLDAVILAFIRSCFGARPRRGSGPPSLVRDGRFHEDLADGCGIDEELRREASYLKLCGTISETPAELRNEQSYENNLETTNECDSKLTYGPPANCKLLFEANSSQGQRNPRCEERHSLRSILNSEDAGRHHGAEYVPRSASSEKRLFQNMQHKPLDSGGSPFPTPLVLRDDMQTPGTAYASHRGTSISGKRVRTRKQFIYPVLRSIENRLQQIELTEDSSPLASSDPLKERDLGADSTKDPTQASSTSVVKSGLSETPSYSAPDPNASYGVEESLSKSNSDEKNAALSLSRWLKSSSADAENQDDEDCSFLTEKPVFMVAPDLNLDTSNPTPRLPKAWDGNGIPNTTTRYREDQRVSWHTTPFEQRLLKVLSDEDRCPPRKVVRGKLFHLEETAE

SEQ ID NO: 84165 - protein, 122 aa, Zea mays
  Coding DNA Sequence Number=SeqID_40790
  Gene Ontology: Mol. function=pyridoxal phosphate binding; Biological process=Mo-molybdopterin cofactor biosynthetic process
  Homolog annotation: Hit_ID=Q655R6; Match level="QueryCoverage=83%, HitCoverage=12%, E-value=1e-43, Identity=78%"; Hit description =Molybdenum cofactor sulfurase
  Pfam annotation: Domain name=MOSC; Domain location=2-92; Score=28.9; E_value=1e-06; Accession=PF03473.8; Description=MOSC domain
MRFRPNIVVSGSTPYNEDNWKRLRIGEAYFTSMGGCNRCQMINQYQSSGQVIKSKEPLATLASYRRKKGKILFGVLLNYEDGMEGEDDAVVERWIKVGQEVHTYLNDDLCTYIPGSFTCTRG

SEQ ID NO: 84166 - protein, 122 aa, Zea mays
  Coding DNA Sequence Number=SeqID_40791
  Gene Ontology: Mol. function=nucleic acid binding; Cellular component= small nucleolar ribonucleoprotein complex; Biological process=rRNA processing
  Homolog annotation: Hit_ID=Q2R242; Match level="QueryCoverage=40%, HitCoverage=25%, E-value=9e-20, Identity=88%"; Hit description=H/ACA ribonucleoprotein complex subunit 1-like protein 1, putative, expressed
  Pfam annotation: Domain name=Gar1; Domain location=57-121; Score =36.8; E_value=1e-09; Accession=PF04410.5; Description=Gar1 protein RNA binding region
  Subcellular localization annotation: CTP_CleavageSite=47; ConfidenceScore=5.09e-01
MAWGEDEAIDPDVASMGLHVSERIGRDAVSSPPPRPSSASSSANSPRAQKHTARHVTTERARRWWPVSTFLHACEGEAMTKLTNEKVPYFNVPIYLQNKTQIGKVEEIFGPINESMSTSSPP

SEQ ID NO: 84167 - protein, 324 aa, Zea mays
  Coding DNA Sequence Number=SeqID_40792
  Gene Ontology: Mol. function=pyridoxal phosphate binding; Cellular component=cellular_component; Biological process=Mo-molybdopterin cofactor biosynthetic process
  Homolog annotation: Hit_ID=Q655R6; Match level="QueryCoverage=80%, HitCoverage=33%, E-value=1e-87, Identity=65%"; Hit description =Molybdenum cofactor sulfurase
MGQSKAEFLEQFGGDYGYPDAPRGIDDLRAAEFKRLEGMVYLDHAGATLYSEAQMTDVARDLMSNVYGNPRILKFGSYVTKIVRTIQAWLQVILLLLRGIRYALSKGATASAVDVQEVIDPSKSHESDSMFKVSKHLNQRRGDDVLLHKYQNGSLAPISGNSLNLFAFPSECNFSGHKFNLSLVKFIKEGKFMDLPSQQQGQWMVLIDAAKGCTTEPPNLTLYSADFVVCSFYKIFGYPTGLGALIVKNGMQQAVIISENYHYYSPFSTTLRHTITILPPFEICNSACPRRPWAQLQASLVTMCFRMVDSALTIKWKIVSRAGS

SEQ ID NO: 84168 - protein, 339 aa, Zea mays
  Coding DNA Sequence Number=SeqID_40793
  Gene Ontology: Mol. function=pyridoxal phosphate binding; Cellular component=cellular_component; Biological process=Mo-molybdopterin cofactor biosynthetic process
  Homolog annotation: Hit_ID=Q655R6; Match level="QueryCoverage=91%, HitCoverage=37%, E-value=1e-123, Identity=72%"; Hit description =Molybdenum cofactor sulfurase
  Pfam annotation: Domain name=MOSC_N; Domain location=269-337; Score= -12.3; E_value=0.0021; Accession=PF03476.7; Description=MOSC N -terminal beta barrel domain
MAYFKGRKNEAASLLNKTYFSGVFFCNSYGIGTVAASIADIDFVQKRKSIEQALEDGTISFLSISSLRHGFKIINMLTISAIARYLSEIYFGPDILSMAYFSFELFSCRHTASLATYVRNKMLELKHSNGKNVCMIYGQTSKVNHLKMGPTITFNLKREDDTWFGYRETGCFCNPGACAKYVGLSHSDLVSNFEAGHVCWDGNDVINGKPTGAVRISFGYMSTYEDAEEFLKFLRSSFVSKPVGLNNEYMVNMDTLNLVDDWSQQALSVIRLKSITIYPVKSCQGFSVQSWPLTTGGLKYDREWLLQGLGGEILTQKKATNATQHTYFRNTYLLNMTFL

SEQ ID NO: 84169 - protein, 129 aa, Zea mays
  Coding DNA Sequence Number=SeqID_40794
MAEDQMVVKAIREECPWESLPNRHHTPVRTIDSSCHHTIDLGHRRMEVYPGLHQDLTKLPEYALCYFTKEAKTKEVRVWAQEFTEQEGKSKGNTYGSSRDWRRGRSRATMTDGPFVGGWEFAWTLGYWR

SEQ ID NO: 84170 - protein, 223 aa, Zea mays
  Coding DNA Sequence Number=SeqID_40795
MVTSGLMVGESEPGRGLCPSLSLKDFHHQGWGGDCTVPGSRTRVASEQLAAPASAMAAGRGSPAGEIAKTGHGPTSNSTAFCPSLPHEFGHGRGPPGSSIHPEVSAAAARPPGAEVDVVAAAGVGDGAPFVGLLLLRRPTPIEWGYSTVGCLNRFTKHESPRVKVTSERLSGRDDDVVLQSGDPWTASPSEARSDLAEGVVDAEGVTAPFQRQDPSLQDQSVL

SEQ ID NO: 84171 - protein, 117 aa, Zea mays
  Coding DNA Sequence Number=SeqID_40796
  Gene Ontology: Mol. function=kinase activity; Cellular component =ornithine carbamoyltransferase complex; Biological process=amino acid metabolic process
  Homolog annotation: Hit_ID=Q6QP54; Match level="QueryCoverage=83%, HitCoverage=37%, E-value=3e-15, Identity=50%"; Hit description =Putative kinase
MALPVDVAGLCPRLGVVEAPPKPRSSLSSMAEAESEPLGRARQRSFGRGQGGVQALGSGEAEFVVFWGRGRVRALGSGEADPSPSPGSGGAEFAVFWGLARVRALGRAERSSPSSGA

SEQ ID NO: 84172 - protein, 131 aa, Zea mays
  Coding DNA Sequence Number=SeqID_40797
MEVEYDDEDLEREDETDGSLERIVLQERGIGSSSAPGPLVAPGGAGHKRPRLDVPHQRRAPSTIPSGLSLHANTKVDMDLREDVRGLRAVSLRGFKSKKATAAMSNMGLSEGEMSSDSNPHGGGLIIVGRV

SEQ ID NO: 84173 - protein, 154 aa, Zea mays
  Coding DNA Sequence Number=SeqID_40798
MADNGKGKGIVISNPRMSDISQKEIARKASDEKAKRRPSLEGVFRGLEQTRMLATTEKSISRPSHTEKQHTGCDLTLSIGLWAEDASSNDVDGSSSISEELMPAAPAAGARRAAAVKEESEAAALNLDLTISSSYWLALTSDDGARRRTAGWRR

SEQ ID NO: 84174 - protein, 285 aa, Zea mays
  Coding DNA Sequence Number=SeqID_40799
MGRRETEREGGRKPEGDRRKRGNPRPSCLSRAQGNDGASCDVVGPSPGLGEVEAPPRLRSSLSSEAEVESEPLGRARRRPSAEARAESEPWGRAMRSSSSSRAEPESEPWGRAKRSSSSSGAEPESEPWGQVKRSLSSSGAEPESEPWGQAKRSSSSSRAEPESEPWGRAKRSDAELPMAPEAGLGCCQPRSVKQHSSRSGAGGAVLLSGRSVERRSDCGHFGSIDRRARVRIRCQATFALNVCVKCSCDTVGRCGDLAKVASWRRLGLGRAKGLCSFVLMGVTS

SEQ ID NO: 84175 - protein, 381 aa, Zea mays
  Coding DNA Sequence Number=SeqID_40800
MNKTPALKVPLQTELRFQLRRYEQPPTIGGPVEQQKADGWLTAARSSSGDDDFCSERPNSISDDLRANATAIGPSPTSSLERQGRAEGRRVGGQSVGGTGYLVGGETSSGCRGERRRRKRFRSRSGQRAGHAAAASATNGERPSPRSLREGAGRCPRRDRPQLGALPSPALMMNILEVEGGTEVAARLASPHPGAGDQRVKGRTAMQSACNRAKWAHPLNSNAPSMEAQAHTSCNRRAGCYVRATAPPLAPLPCLLDCGTSTRLEATLHMAQQCQPRASVMGQSAAGEGATVDAAKNGPAVMAVAGGRKQRSRRQPSSRPLMGQRENPLPRREDGAPVIRPLNGSRTRNGCPANHSPRRINSAAGHAAPLAGEAGDASPSP

SEQ ID NO: 84176 - protein, 214 aa, Zea mays
  Coding DNA Sequence Number=SeqID_40801
MEAMEGDEKEASSSFKAEADNTTGKWRLLPRSSSLGKEKEKDTVLFRGLKVRPSAGYDLRYPKTYSRPSGAIRDGTLADSHRMELGPSLGLPDRPSGANSASPDTAFDLGYRVRLARAWPQLLARPRIPQEATLSTVTHVRRDSTITSGRLPPRRSSALTLTSATKGIPTSSKLGALMHPVNRLFPILKPCYNHYGMGNPSGGSDMKPNPQPQL

SEQ ID NO: 84177 - protein, 262 aa, Zea mays
  Coding DNA Sequence Number=SeqID_40802
MVESTTGPDTPAWGGDVGLHPHRLHDSPPRQGGGPLFHDPTSSVTMGTGAGSADARGWDRDAISPCGDMSAPLEGPTKCGADQSPASGLKPRPPTDTLPYRSHPPEPEVGRFESLATPAEGMKGVRQEDQKQGDKPKTLQGHIALIRAHRDNNGVVRLPHHPLHPLEELVGGEGSRGHPGALHRSLRRHLNEVESALGQRQHPPPVECGDNPDRDGCEDGRLSDGVRVEVVELHPIVMRKCPHEVARRHPNPRSMNDVKLTT

SEQ ID NO: 84178 - protein, 90 aa, Zea mays
  Coding DNA Sequence Number=SeqID_40803
MGSSGEGEGDDKDPPHPPKHDKGKAVYLEQHGGKKKPCLDRATRALKKAYGLALEAHITYLPGLSALLSLGGGDVGNMEDFEEFQDYDEF

SEQ ID NO: 84179 - protein, 39 aa, Zea mays
  Coding DNA Sequence Number=SeqID_40804
MNNWVSAFRTREDRQPTSEFVAACPCPDELMQDGTQAGG

SEQ ID NO: 84180 - protein, 123 aa, Zea mays
  Coding DNA Sequence Number=SeqID_40805
  Homolog annotation: Hit_ID=O48968; Match level="QueryCoverage=51%, HitCoverage=28%, E-value=9e-14, Identity=61%"; Hit description =Putative uncharacterized protein
MAAVGIYYGVGGGGVSLRRVQGWEDTHVTFEPRTAIKSQVLTDFIVDWTGPTWQQEESPEKHVDRAKKEEVDALAKAAAKGEALPSDVFYHVIGSPAVRNPEGLQITNDVEGHRIVNLIMAED

SEQ ID NO: 84181 - protein, 218 aa, Zea mays
  Coding DNA Sequence Number=SeqID_40806
  Subcellular localization annotation: CTP_CleavageSite=70; ConfidenceScore=5.50e-01
MAERRGLRRQKPRPVVVPRSGTKRRAHKPSFTTTKAVKRGARTSAGASSRPHVAQETTQEGAKVAQHTRRASTEPDITAAEAVAVGSMPLMEAIPISYGDETGAGDDAPTVASPTVFDLLRAIPDTPDATRSSGAGLSRSNPYFVLDDTEEREMWAEFRMMTRAMLRRVNEQLALKSAEVADLTSLCTELKDVAMAERGKVSLLEEEVRLLRARVALL

SEQ ID NO: 84182 - protein, 129 aa, Zea mays
  Coding DNA Sequence Number=SeqID_40807
MDPRWCLGLAWLPCFLDACGCLVIFPGHAELISFVEDPMVNVEALQPSELSESNSSHAYRNYSMDSGSRSSEKSRPKLGPSSSSESRHPEGKGRPTYNPVTELASKLGQKGMGLNTDGSPPPLIRPAKK

SEQ ID NO: 84183 - protein, 58 aa, Zea mays
  Coding DNA Sequence Number=SeqID_40808
MWLSKLLVTKGAKQLSKNVAKNMMSHPVLEGPYGEVLRKQPESPKVSQEPHWDNIIVS

SEQ ID NO: 84184 - protein, 399 aa, Zea mays
  Coding DNA Sequence Number=SeqID_40809
  Gene Ontology: Mol. function=1,3-beta-glucan synthase activity; Cellular component=1,3-beta-glucan synthase complex; Biological process=1,3-beta-glucan biosynthetic process
  Homolog annotation: Hit_ID=A3AD16; Match level="QueryCoverage=86%, HitCoverage=20%, E-value=1e-178, Identity=88%"; Hit description =Putative uncharacterized protein
  Pfam annotation: Domain name=DUF605; Domain location=52-283; Score= -124.3; E_value=0.0084; Accession=PF04652.7; Description=Protein of unknown function, DUF605
  Subcellular localization annotation: CTP_CleavageSite=20; ConfidenceScore=5.02e-01
MASSSGGGGGRRMTPGGDSSASAGGRRIYRTQTAGNLGDSIFDSEVVPSSLVDIAPILRVANEVEASNPRVAYLCRFYAFEKAHRLDPTSSGRGVRQFKTALLQRLERENDPTLKGRVKQSDAREMQSFYQLYYKKYIQALQKVADKADRAQLTKAYQTAAVLFEVLRAVNVSQKIEVDKSILETHNQVEEKKKLYLPYNILPLDPDSANQPIMLYPEIQAAFHALRNTRGLPWPKEHEKKRDAPKEHEKKRDADLLAWLQAMFGFQKDNVSNQREHLILLLANVHIRQIPKSDQQPKLDDRALDTVMKKLFKNYKRWCKYLGRKSSLWLPTIQQEVQQRKLLYMGLYLLIWGEAANLRFMPECLCYIYHHFLRMLMLGAILLRYKDNHAEELNKIVSL

SEQ ID NO: 84185 - protein, 147 aa, Zea mays
  Coding DNA Sequence Number=SeqID_40810
MELKSLTQRIKCVDSESGSLRMFLNSLVSSSMCLGVSFIAPRQLGAVRGQLGRCQRFIYNYTKSIVRNTVDYSGQEKLFGKTGQARTVRALAVDRPRHKDDPRTEPMQKSESALWTVRRISADRPASGADRPVGKDPKNPKVTGSEE

SEQ ID NO: 84186 - protein, 106 aa, Zea mays
  Coding DNA Sequence Number=SeqID_40811
  Gene Ontology: Mol. function=1,3-beta-glucan synthase activity; Cellular component=1,3-beta-glucan synthase complex; Biological process=1,3-beta-glucan biosynthetic process
  Homolog annotation: Hit_ID=A2XBD1; Match level="QueryCoverage=92%, HitCoverage=8%, E-value=6e-47, Identity=83%"; Hit description =Putative uncharacterized protein
MAFELYGMLAGNVSPTTGENVKPAYGGEEEAFLKRVVTPIYKVIEKEVERSKTMKSKHSHWRNYDDLNEYFWSRDCFRLGWPMRSDADFFKTPNVPLHHVDGVCTL

SEQ ID NO: 84187 - protein, 158 aa, Zea mays
  Coding DNA Sequence Number=SeqID_40812
MHSNTPAVDTLVTTDVETGANLREHRHRGTLGEDVSELRSHQDTKDMNNTNGNMLADEVEVDLNMLCPPVLNGVGENSIEDIWPNEGEVLESASKAPVHSGITDRGTSGGDLSLDGPLQDGNTGGRKNNVVDIQKGPDSVTTTTIDKERSVRLSLGKA

SEQ ID NO: 84188 - protein, 476 aa, Zea mays
  Coding DNA Sequence Number=SeqID_40813
MDICVDDYRVGGVMMFDARTGRGLVGSDAGKLAAVPAPVAAEAKGASQDPWSKFCASGEITLAAAAKDVAGSVAQQLKHATQQLKHATAFADHVASGALTSEFAAERQRLEGRIERLWTQHIEAVRDKSAAENKSRRLMEKLAVAEAEKEDLSRQLAVENKDANRACTEAQAARAEAKHARAEANLARQRAEEAETSHSSLRDCLDKAEASTRVEVDQAHAQLADAYRQLGAWTAPFDASGKEVGLRFHGWLQEELEVLPTIVTGLMSFASLITCEGAVNALSREGCRHFEVFDRSNEDFERGIFQVEDLVLKRSAEALYDRMWDPHDRDTVRERSDRAMEQMAHNEEVEDFGDLESMLPEASGVKEGTEGELAPPSDVGEGPVPTYGPAQATATDDTNFMADATAVPTNDNLSGSESGSFSSDGEFGSPFSWTEESSDEDLDYFVALDVATAESSPRVEVGEVSDLPSARTKCRR

SEQ ID NO: 84189 - protein, 266 aa, Zea mays
  Coding DNA Sequence Number=SeqID_40814
MPTLGEQLVRSPTFALDLRGWNPAAFVREVEDGAVRIVGRYVPRTEALRSWDIRGSNVRLNLVFELNRLPYGGYPRDDAATTVDHRGKKAATAVEEGPSRGAVPATKKRKLGTAAEGLGVSDRFVVDLMGTCATLGGKMSSPELRESSARMLEVTGGRWPRNVPIPLAAGEDMFMSRLAREMKFFPYGRNIAAVVSTMMDKDRQDATRKRRAFTRVGDPSREVKKGWGIAKSIAPSSSKPLPAAKPAAPGSSKPSSGARAVAPAFY

SEQ ID NO: 84190 - protein, 242 aa, Zea mays
  Coding DNA Sequence Number=SeqID_40815
  Homolog annotation: Hit_ID=Q10RP7; Match level="QueryCoverage=21%, HitCoverage=10%, E-value=5e-09, Identity=64%"; Hit description=Appr -1-p processing enzyme family protein, expressed
  Subcellular localization annotation: CTP_CleavageSite=17; ConfidenceScore=5.43e-01
MKNALNTTNSPSRSRISSAPGTRPTPSPKYPSCYIFCTRTEEILEVPNSTMWPGCTSIATKSLKVSSDDESADDALTADEEEDIATYRRRRRAVCLTRARSPNQKNKEGRRAGERFEKVRVFWRTQGLVQIFKYAPREQLIIPDFVFQYGLEMNGGKGIITDPSRREAIGIGMFKAESFASRRSHRVRRFVCKAILWYYYADTVHNFYFSMGRLLFIRLFIYLMFMGDLDKHEYILHVYILS

SEQ ID NO: 84191 - protein, 549 aa, Zea mays
  Coding DNA Sequence Number=SeqID_40816
  Gene Ontology: Mol. function=1,3-beta-glucan synthase activity; Cellular component=1,3-beta-glucan synthase complex; Biological process=1,3-beta-glucan biosynthetic process
  Homolog annotation: Hit_ID=A2YH74; Match level="QueryCoverage=92%, HitCoverage=44%, E-value=0.0, Identity=65%"; Hit description =Putative uncharacterized protein
MEKVVEDLGSPKMQVFPLVSNKEQVLDRWQAPKERIAVPANNNIGVVIALWAPIILVYFMDTQIWYAIFSTLIGGVYGACRRLGETSEDTREQEKIAARFAQIWNLIITSFREEDLIDDREKDLLLVPYCKDRDMDIIQWPPFLLASKIPIALDMAADSGGKDRDLKKRMKSDPYFTYAIKECYASFKNIIYELVIDSRERGYIQKIFDAVDEHIAEETLIKELNMSNLPTLSKKFIELLDLLESNNKEDHDQIIILFQDMLEVVTRDIMVDQLSERTAHHCIKKIKEEYQNTEYLKGRNKQKKKNRKRRKGIVVQNFLVSPITKKLGREGNTALPIKRLRLLLTVKESAMDVPTNLDARRRISFFANSLFMSMPDAPKVRQMLPFSVLTPYYKEDVLFSSQALAEQNEDGVSILFYLQKIYPDEWKNFLERVHCESEDQLHETEHSEEQLRLWASYRGQTLTRTVRGMMYYRQALVLQASLDMARDDDLMEGFRAADLLSESDESPLLTQCKAIADMKFTYVVSCQQYGIQKRSGDPHAQDILRLMTT

SEQ ID NO: 84192 - protein, 143 aa, Zea mays
  Coding DNA Sequence Number=SeqID_40817
MAETSMPCGGGGGGDQGRRWRHAGGGGLERVERPRAVTAGEKGPGGQILHRKTRGVKLNGTGVVSSESTNRKKIVGDVGSYENIVEAPESITQSEGGGVIAMVLKAAAREVLSQPPAGGDQGVEVWVPGGRSAGGAWGTTGTP

SEQ ID NO: 84193 - protein, 291 aa, Zea mays
  Coding DNA Sequence Number=SeqID_40818
MVDEGGVANRAGVDGAARGAGEVDGAARGAGGIAGAVRGAGRTDGAARGAGGVDGAARGADGVDGAARGAGGVDGATRGAVGVDGAARGAEEVVGAARGAGTAEHAKVVIGRGCAVKGEVGGRVAYRLRGKTVEEVGGSMQGLCPVAGRERRLEEETAEHVSGGADHAFGSAVLGRSVGARETQLDAMSEEEGARGVVIELAAIVTLQSTDRATKLSGYPGEEVCEGGECVRLQAKREGPEKMGKIIQNHQVIFITRKTEYRGGPKVTMNQIKSLLSPRRRSSKWETSMSA

SEQ ID NO: 84194 - protein, 101 aa, Zea mays
  Coding DNA Sequence Number=SeqID_40819
  Homolog annotation: Hit_ID=A3CF12; Match level="QueryCoverage=71%, HitCoverage=20%, E-value=5e-10, Identity=41%"; Hit description =Putative uncharacterized protein
MDLEHNIHTPLSPYAAQKYQTFHELVNNLQNSRADKDKWTHPWGNSTFSSSKFYSLTFQSIQPPAAFNWIWQSKAAQENCASFHLRKKYRLLKLCGFPLES

SEQ ID NO: 84195 - protein, 187 aa, Zea mays
  Coding DNA Sequence Number=SeqID_40820
MAEGSLVGEKNPRIESLVDVIFGASSLEEEEGERKGTECGKSSGSEMGFEEPSVSLEAYMVGPTRSYGEEMDEEENASKLIEQDKAMGYNSGAMLFGRRKDVLAYVPDAREAKIVKNVARSIVFPEIETTLSKLKKRKLSQILAYTSIKLRRRIKVKEQDGTIVELRANLKGKKKKLMQRAKKMQSY

SEQ ID NO: 84196 - protein, 152 aa, Zea mays
  Coding DNA Sequence Number=SeqID_40821
  Homolog annotation: Hit_ID=Q7XBD4; Match level="QueryCoverage=39%, HitCoverage=6%, E-value=4e-07, Identity=43%"; Hit description =Cinful1 polyprotein
MARIRTTARLATSTSLEAHQREENTLDTTLISEVMKAFVTMKSKSSSNATEEENEDQPTKPSYIEKGRSILKDKYFKAMKELGYFSDKVKTKEWFYAEVDSEKREDFKDMVMSPLKVSFRPKRPKRKMGGAAKDAYKAFNVVAKKIGSHDLI

SEQ ID NO: 84197 - protein, 118 aa, Zea mays
  Coding DNA Sequence Number=SeqID_40822
  Subcellular localization annotation: CTP_CleavageSite=54; ConfidenceScore=5.36e-01
MKLWKETSRSSKITTSSRSGLAATPSRLPVKAALSTFLFRTLIYCPQDEDTVCRQQERMSKLQRTCVGKPKGVQDLNQPIRSRTRKHREGYNMSECKDPSSSPNGLMYRSHFLKKTFS

SEQ ID NO: 84198 - protein, 144 aa, Zea mays
  Coding DNA Sequence Number=SeqID_40823
  Subcellular localization annotation: CTP_CleavageSite=52; ConfidenceScore=5.38e-01
MGTNPGRVTVYFVVKTRAILQECAKSPSKSRRRSQKPKPGKVNRSRSYTLLRVTHPTYQSMWVIILQLLLLRLVSHRLPGHSFHLRRHYNLPIHELRSCHNEIYLSYRLTKLKNCESSKVVPKERSWVEGLWGGDSSAAVEDTN

SEQ ID NO: 84199 - protein, 163 aa, Zea mays
  Coding DNA Sequence Number=SeqID_40824
  Subcellular localization annotation: CTP_CleavageSite=41; ConfidenceScore=5.14e-01
MWAFMLDEAAGTDDLVTGLHPATRGTKGKSTSRLASVGAARLAKASSEGWRLRLRPNSSAELYGLDTNMLPKWLQNTKLQAWKKGDGEAHRGERGRRGRTAGAAWTDGRQAPFFATAVTAVRRRGEGGRAHAAVRRGEGGQAAALGIETSESEKVRAEAEMDD

SEQ ID NO: 84200 - protein, 278 aa, Zea mays
  Coding DNA Sequence Number=SeqID_40825
  Subcellular localization annotation: CTP_CleavageSite=41; ConfidenceScore=5.25e-01
MVLPRLRIRPTSARSRITPATPPPARAPSLDPSIHRQPRILASLASSAGPTILASSFCLSLTPPIAEHRGEPRLPSSPLPPPPPHASSAAATVPLAPARSRSGVAAWLRVATRRNRRRAHTCPIQPPWSSSPSSPWQELDRRDITGQRPLDGLLLGASVRPPAAEQAEEAVAVVGLLVDQACEDGDEWSPWRRRTMESVPAPRSTLRSGSMRAATFSTKKSRTYAAPFQSIWWTAGFTVLAEVVYRLWQHHLFRSSQGEDMAIKNQMFPEEERTPNAR

SEQ ID NO: 84201 - protein, 389 aa, Zea mays
  Coding DNA Sequence Number=SeqID_40826
MKDFAIELSSPPDEATTTWHLMMKCDGNSGRQMLGTNTRGRAVRWTQALGKQVRSQVLGVSRRAYTLDRGRCHVGPLCRMYLLRIVRPEKGIARKQLASTTSAPTSRVYRVRVAHRSGILVMWAGEKPPPRPQFPPKLAVHGTRVPIPHFVASRWGQRGFVGFRSGVPQSARTLLRSIKPGYLVRPYSIGTLACARGLHGQKDAAVHSELLIGAVIPRLTVDRVLLAIIPVTDVRAWVLGVSRHAYTLDRGRCRVGPLCRMYLLRIVRPEKGIARKQLASTTSAPTSRVYRVRVAHRSGILVMWAGEKPPPRPQFPPKLAVHGTRVPIPHSVASRWGQRGFVGFHSGVLQSARTPLRSIKPGYLVRPSSIGTLVFDRAARAKRRHRRKP

SEQ ID NO: 84202 - protein, 174 aa, Zea mays
  Coding DNA Sequence Number=SeqID_40827
MGEVGFYYGKSEVVKAAVVVALRDAETSACRPSAGWYRFSNRTTPGGTDVGAVVRRWWWQRIRQADKTRRRWKEGRKRANKIVDPGSMVMKIQKSNFGQQNEIWIIPNKIVDPGSMMARTQKNKATAHHLGLLKALKMQMEVQKRLHEQLEDIESYDEDLDFEVDDGAEDEPKA

SEQ ID NO: 84203 - protein, 707 aa, Zea mays
  Coding DNA Sequence Number=SeqID_40828
  Gene Ontology: Mol. function=sequence-specific DNA binding; Cellular component=nucleus; Biological process=regulation of transcription, DNA-dependent
  Homolog annotation: Hit_ID=Q6EPF0; Match level="QueryCoverage=86%, HitCoverage=85%, E-value=2e-87, Identity=33%"; Hit description=GL2 -type homeobox genes
  Pfam annotation: Domain name=Homeobox; Domain location=71-113; Score =32.6; E_value=1.4e-06; Accession=PF00046.20; Description=Homeobox domain
  Pfam annotation: Domain name=START; Domain location=210-413; Score =96.2; E_value=1e-25; Accession=PF01852.10; Description=START domain
  Pfam module annotation: Pfam domain module=Homeobox::START; Domain location=71-113::210-413
MEKEGHQNNSSSNEQDHDGFTMDEIPDLSWSSHTEYDVDALLGAVDQVNTTQTDDDEDQSSHVSEQTPSNRTKRFTMDQIQQLEAQFRVCRHPNLDARQELAAKTGLEERQVKACGDENKGIRQELGKLKAENEELKQRMLNPICFRCRNPTLATQPTSEKRRLLNENARLRDEYVRAKAYLDRLIREGAERRASPSAHLHLGGSATLVSHAERAMEELVMLATKGEPMWLPAMDGETLNHQEYVLQTFPGLLGLCPPGFVEEATRESDTIRGTAMYLVSVLTDANQWCEMFPGTVAYMDAELWVQSPRLLNRSVKFLRFSKKLSNRRWAMADVSVVDGVCGVEPGGSSTGCRLLPSGCLLEDMSGGYCKVTWVVHAEYDETSVPSLFRPFLQSGQALGAYRWLRCLQRQCEYITVLRSSLVLPSSSSSFSAISTLGVGRRSVMELARRMTASFYAAVSGPVTVPATSSVDEWRVSSGSGAERVEAVVRLAVWNCADIMPGEPAVTVLSATTTVWLPGTPPMRVREYLFDLQRRGEWDAHADGGEVQELGSVATSSRLHGNAVSVLQSTSSVDTDGTDSKVLILQETTTDVSCSLVVYSLVEENLMRGIMDGRERSNVFVLPSGFAILPDGHGRAHAGDTAATNSSASAAIDDDHSSNAAGSLVTVAFQTPLPGNPDTGAFEDACLQLCHAIAKIKAAVGASDIIPV

SEQ ID NO: 84204 - protein, 64 aa, Zea mays
  Coding DNA Sequence Number=SeqID_40829
MARPTMVVCLFSFIYIITLDVLNCLFCLLLHDAPFRVKMWVILSQSDHDLDDALDGFGKKDVKT

SEQ ID NO: 84205 - protein, 149 aa, Zea mays
  Coding DNA Sequence Number=SeqID_40830
MRPGPSPRRSTDSRWGHCRESAIQGSGALIAKSWGFTSNWVVRESKEEEACACTPVRDYRAASTPRTPIVRVTPRRTLLYWLGSFHEARWTTRIKIVYGGDNTRTHRSSLGRAEDARRADVRRSSTEVAMVVAVVDENDADIVVPRGSG

SEQ ID NO: 84206 - protein, 68 aa, Zea mays
  Coding DNA Sequence Number=SeqID_40831
MADAYGGQAIPAGGALSSSAACLNAEHRFWFQIKLGHMEIRNGPPDSMASSVQYPSIMDASGRARVDT

SEQ ID NO: 84207 - protein, 141 aa, Zea mays
  Coding DNA Sequence Number=SeqID_40832
MQRRASPLLLVRGRRPAEEHMRRSSASTVQALLELGPEKVPACQVLGGGELVAATKKRPGREASYKKKGNTMVIQGTMGAPAPNRELGGGALGREEQGASTTTWERQPAAVCDRDGRESSNFGRKIGSTSSYKISCALFAK

SEQ ID NO: 84208 - protein, 98 aa, Zea mays
  Coding DNA Sequence Number=SeqID_40833
  Subcellular localization annotation: CTP_CleavageSite=47; ConfidenceScore=5.21e-01
MAKPGHATPPGPLLRKQQPTRPSISVAGMKAKSHQQPNHPRSTCKNYATSKADYTNTQLDLPGLTALAYNAPLTPAAAVQWPHLYPPYPEWETTSQDK

SEQ ID NO: 84209 - protein, 212 aa, Zea mays
  Coding DNA Sequence Number=SeqID_40834
  Homolog annotation: Hit_ID=A2Y331; Match level="QueryCoverage=43%, HitCoverage=18%, E-value=6e-08, Identity=37%"; Hit description =Putative uncharacterized protein
MSIVDRRWANQMDTPLYGVALYLNPGKFYNIKAGVDEGYVGELRGCFNDVLVKMVVDEDLREKIDAQDVLYENKREAFANPMAIKNAQTRNPQDFDWDNEWVDPLANSSHVSNALGDDFNLSWDQVDEAIGASAHLRGRNFPRRAAGGCVRRNEDLEEEETNLANEDDEDEEYILDDLDVEDEIEGSNSGNDGDDQGVDAHGLNFDEFDDGY

SEQ ID NO: 84210 - protein, 157 aa, Zea mays
  Coding DNA Sequence Number=SeqID_40835
  Homolog annotation: Hit_ID=Q7XBE0; Match level="QueryCoverage=20%, HitCoverage=3%, E-value=9e-07, Identity=81%"; Hit description =Putative gypsy-type retrotransposon
MDKVVRAGRILMRRPSVVVPEDIVADVLAVPDVGVALVVHMVVPGEILGRRRRNSSPWSAVAADPPSSMGNGFHYVIDLEEGRLAVGFPMSGGRDGHADVRIVSEDGRGARNWTMAYRFVVATCTGRENNSNEGGTASPVKQRLVSCSEELYGALGN

SEQ ID NO: 84211 - protein, 74 aa, Zea mays
  Coding DNA Sequence Number=SeqID_40836
  Subcellular localization annotation: CTP_CleavageSite=55; ConfidenceScore=5.31e-01
MLVPAQLRYARPSRGAAPQPSTLAMPCRCSWPLAAMRCCPSIAACLRGGVASQPAAAQLVALFGQQVAIVLGCS

SEQ ID NO: 84212 - protein, 114 aa, Zea mays
  Coding DNA Sequence Number=SeqID_40837
MARPSWEGEAAEEGAMDGQGEKPSWGPVIGGRRGRCERESRGATPWTPASSLLELEPEEMPRPGWSRGGVGEEGPLSQPLARRNREGATPWLALLPALCLLRVGEETRERRNGG

SEQ ID NO: 84213 - protein, 114 aa, Zea mays
  Coding DNA Sequence Number=SeqID_40838
MARPSWEGEAAEEGAMDGRGEKPSWGPVIGGRRGRCERESRGATPWTPASSLLELEPEEMSRPGWSRGGVGEEGPLSQPLARRNREGAMPWLALLPALCLLRVGEETRERRNGS

SEQ ID NO: 84214 - protein, 78 aa, Zea mays
  Coding DNA Sequence Number=SeqID_40839
MYFRQSLQGVKEEEATNGEVGDVLSPNKDGKEEALKGRFKVSSDLNQKGRSSKDTKVDTVPKLWSRKASACSQKGEPT

SEQ ID NO: 84215 - protein, 163 aa, Zea mays
  Coding DNA Sequence Number=SeqID_40840
  Subcellular localization annotation: CTP_CleavageSite=9; ConfidenceScore=5.27e-01
MPAGCLLFCAAPISSSFTPVLDLSFNAFDSAIPGALANLTCLVTLAVVLSLARCPLNVVLYLLLSISNNLDVSKKVSGSDGVSAKRSTRSRFSQDHAAKSKAKLKGAFSLLGLNNDTFKGPRTSKRFQLKDMSWRSKDYHAQNGEDAIELDEGDEDAIYQNKT

SEQ ID NO: 84216 - protein, 80 aa, Zea mays
  Coding DNA Sequence Number=SeqID_40841
MGSTSEKMYLCQVPNFGFEMIKLRPGSTFSKHFCKTESLIIEKPYLDSLITSIPLRVFSLVGWYRRKNTRTEVAGGKDPP

SEQ ID NO: 84217 - protein, 90 aa, Zea mays
  Coding DNA Sequence Number=SeqID_40842
MGAVKLMGKNRRPPSNLKTHVLNVKFDGTHVLNLKFDGTHVLKIKFDGAVELTSLSSSKNRRRLYSSVNPRSYGSCLRLENKRLIDVRDL

SEQ ID NO: 84218 - protein, 196 aa, Zea mays
  Coding DNA Sequence Number=SeqID_40843
  Homolog annotation: Hit_ID=A2YGC2; Match level="QueryCoverage=60%, HitCoverage=53%, E-value=2e-08, Identity=29%"; Hit description =Putative uncharacterized protein
MELLEKQELEGWIARPITRDAAHGCHFHDVVDTLLRRAFDRHTWSIEYRCVVYQHHHRLYPDQWEATCLVRHPDDDLRGAEDFSEHHSITERDTTEAAMQDAAWHALSLYCSLFSRVADGLGLKYYPHHSTGSAGGAIVSPFGEGNPRLSSMVNLVVVLNTELDHALDELHPYCSLYHGRFASGTPNCRTQIDLEP

SEQ ID NO: 84219 - protein, 30 aa, Zea mays
  Coding DNA Sequence Number=SeqID_40844
MAGVEEEDEVWIIDRVKLKPFDRYPMVEIE

SEQ ID NO: 84220 - protein, 239 aa, Zea mays
  Coding DNA Sequence Number=SeqID_40845
MTSHGSSDDGNALTHTDGLAREGFPRILWEVLQGAGYATPPQYAVQQFEKHQVPRCRVRMTLEPHPLQPGWRSLDSESFGYRGEDTIEAIALHGLTTFCGFHPLELATHPIGLFPTEREDNPNVEGSGGACQGHLGHLPRTDCALDRMVHECSVPSAELEELVGTRENTIEVLEDQLINTQQQLAEANEHLDMHHQEIQDLEVNEDVDIEGGDEPASSVDTAGSGRPPSPESSVASFAH

SEQ ID NO: 84221 - protein, 134 aa, Zea mays
  Coding DNA Sequence Number=SeqID_40846
  Pfam annotation: Domain name=DUF834; Domain location=24-93; Score= -1.0; E_value=0.079; Accession=PF05754.5; Description=Domain of unknown function (DUF834)
  Subcellular localization annotation: CTP_CleavageSite=15; ConfidenceScore=5.07e-01
MARSRSVHARRRGCSSAARRPAWSRRDSSIKRNRSETHWVARSTRGGGRPKSGEVDLGPPVKSGRVRGLGELHGLLAELAEALACPEDGWGGLATVAEALAAMAGGIKLAGAKGKWLAGEGECGAKWGAPEKAL

SEQ ID NO: 84222 - protein, 98 aa, Zea mays
  Coding DNA Sequence Number=SeqID_40847
MGGQPQGYWGRAATLGCVPNGPNLIHDPLGQNRVTQHHGQKRQEMSRGFINMGGRPQGYWGRAATLGCVSNGPNSIHDPLGQNRVTQHHGQKRQEMSR

SEQ ID NO: 84223 - protein, 495 aa, Zea mays
  Coding DNA Sequence Number=SeqID_40848
LIRELFYAADELLRREPPPSGAPAPTQTPPEHSPCPPQLSRPLRSPQRPAKRPRPSSPASPPPRGRAPPPQLAVGEAQAGHPIPTVRPRSGGPALIRPSPILDVRPRSSGPGPLPPHPVPLPLGPACQSARALALPVGPACQSARALALPAGPACQPARARAAVWALPVSGVLALPARPRPSASQAAARSHLERLHHRLREEQERRRQHREQQGSSSPPQREVESVRPRSSVAQLEAPPAPPRDAPAVGGATGGGSGGDPDDDDLDHSTESSEPQEAEGWVARPITRDAARGCHFHDALDTLLRQAFDRHTWSIEYRCVVYQHSRGRYPDRWEATCLVRRPEDDLRGAEAVSEHYSISERDTAEAAMQDAARRALSQYCSLFGGVSDGLNLRYYPRRPTGSTESVVVSPVGEGNPRLSSTVNLVAVLNTELDHSLDELSRARTEIAELRAELAERHHQEGGSPAPVGTQHPYRSPPRGHHTYGSPACKTRIDLDP

SEQ ID NO: 84224 - protein, 26 aa, Zea mays
  Coding DNA Sequence Number=SeqID_40849
MRLHTLRDDVVLYPQRCLLLIKGSGK

SEQ ID NO: 84225 - protein, 91 aa, Zea mays
  Coding DNA Sequence Number=SeqID_40850
  Subcellular localization annotation: CTP_CleavageSite=78; ConfidenceScore=5.28e-01
MYCLMSGAPVWACLTSARALNAPQGAVGAAGSRCSAGTPDSPVHTGQSGATGSSASPDLMLRPQEEVSALPDLRLQPREEVSASPDCHTRL

SEQ ID NO: 84226 - protein, 153 aa, Zea mays
  Coding DNA Sequence Number=SeqID_40851
  Homolog annotation: Hit_ID=Q6QP51; Match level="QueryCoverage=32%, HitCoverage=22%, E-value=3e-16, Identity=80%"; Hit description =Putative growth-regulating factor 1
MQPARRSLRARKLHRHLRQCHVFSTVEPVPRLEVASRVTQQCQLGAAVMGQSAAGGKRHRWWAKQATFHLCHKGRVKKVTKKGDISERILPREGNRPPSPLTDQGFEGLPLGRVRQPPQSTRVPRPSLIKGSKAGPSEGFDSRPRALGLRAHY

SEQ ID NO: 84227 - protein, 277 aa, Zea mays
  Coding DNA Sequence Number=SeqID_40852
MGRTHVAFFSLLFEKRDLVEIGALQPSLTSRIFVMQPRLHSLTNGQFGGEKQAGLRPLPRPQLQGSSSSGLRWRSAPSGGLPPRGSVTLFFPRRLGEKGILQPCRGVLQPCGGRRTVAPWPGCSFPSFIRVTGMPRAGRPRLGPPRTVSCTGGLLNTSFATRAVLVFWDGLGEDGSEDLLVRFGAAAVRRRGVGGFDPTDGTLRLFSLNGLSSPLVLGRGRGHFHSSVCPEVIVAAVQPPEVEVVVAAAAEVVGKPLGVRYPVGPLAGRTAEGPADV

SEQ ID NO: 84228 - protein, 50 aa, Zea mays
  Coding DNA Sequence Number=SeqID_40853
MKLSQSSDMEYEQKCTETCTNNIMNPNGNEVNDANDNIPTLTTMNEKNES

SEQ ID NO: 84229 - protein, 212 aa, Zea mays
  Coding DNA Sequence Number=SeqID_40854
MTSVVLKPPTEARRRQQDPYSTDSCTATGLKALLRRNTPLYSWASPYVYKRGCPGPHGEDEDGQGEGERDRGTSIRTYDGTQDVGQALYYPAAGMPLAVGVTSVSREGEREGSSTADNAARTLLMSPCCRKGLRAIGVMAHAGHHHYPSLSPSPGSVEAETSLVAEAGVGRGRDSSRDRSRGRARGSGEAETSSRGWSVRSGEAKLPVALRA

SEQ ID NO: 84230 - protein, 152 aa, Zea mays
  Coding DNA Sequence Number=SeqID_40855
MVENVECGLISGKCKGFARAVVETIDCGLILRECGSEPASQRPTRLCSNEPSLPNLHAAPALASAPDPDPGTLPFAAAEKQLSLSVLFLSPHSFSLAGWNRERPYTMADFSKSFGSFENSTHDLFDGISYVWSTVRSPHNISAAGQQQHSSF

SEQ ID NO: 84231 - protein, 309 aa, Zea mays
  Coding DNA Sequence Number=SeqID_40856
  Gene Ontology: Cellular component=membrane
  Homolog annotation: Hit_ID=A2Z269; Match level="QueryCoverage=80%, HitCoverage=96%, E-value=7e-58, Identity=50%"; Hit description =Putative uncharacterized protein
  Pfam annotation: Domain name=C4dic_mal_tran; Domain location=25-243; Score=-89.4; E_value=0.084; Accession=PF03595.8; Description=C4 -dicarboxylate transportermalic acid transport protein
  Pfam annotation: Domain name=DUF6; Domain location=32-166; Score =21.9; E_value=0.0024; Accession=PF00892.11; Description=Integral membrane protein DUF6
  Pfam annotation: Domain name=TPT; Domain location=184-297; Score= -35.6; E_value=0.071; Accession=PF03151.7; Description=Triose -phosphate Transporter family
  Pfam module annotation: Pfam domain module=C4dic_mal_tran::DUF6::TPT; Domain location=25-243::32-166::184-297
MDVEARKDSTPTTRGKVMRRLLVVLNCGMLALGTTAGPLLTRLYYDKGGQRQWLSAWLQSVGWPLLLLPVAASYAARRARDRAAPVLLTPPRVLLAAAGLGVATGADNFIYAYSLRYLPVSTSAILISTQLAFTVFFAFLIVRQRLTPATVNAVALLTAGAAVLGLHVSSDRPAGVTRGKYLLGFALALGAAALYGLILPLVELTYKRAAGGGRAVTYALVMEMQLVMGFFATVFCTVGMIIDKDFQMVSHFDEIDAIVITEGFAVGRWDEELDRIKDQSVSTKLSCNLVGMLCSRRVEPRKRKVRRSK

SEQ ID NO: 84232 - protein, 394 aa, Zea mays
  Coding DNA Sequence Number=SeqID_40857
  Gene Ontology: Cellular component=membrane
  Homolog annotation: Hit_ID=Q6K5E9; Match level="QueryCoverage=95%, HitCoverage=97%, E-value=1e-119, Identity=60%"; Hit description =Putative purine permease
  Pfam annotation: Domain name=DUF6; Domain location=32-166; Score =11.8; E_value=0.015; Accession=PF00892.11; Description=Integral membrane protein DUF6
  Pfam annotation: Domain name=TPT; Domain location=184-364; Score =118.1; E_value=2.6e-32; Accession=PF03151.7; Description=Triose -phosphate Transporter family
  Pfam module annotation: Pfam domain module=DUF6::TPT; Domain location= 32-166::184-364
MDVEARKSDAPPARGKAMHRFLVALNCGMLAVGAIGGPLLSRLYFSKGGHRQWLSAWLETGGWPLLVIPVAASFVARRARDRGAPVLLAPPRILLAAAGLGVATGADDFIYAFGLAYLPVSTSAILISTQLAFTVFFAFLVVRQRLTAASVNAVALLTVGAVVLGLHVSSDRPPGVTRGQYWLGFVLTLGAAALYGLVLPLVELAYRRAAGAGGRAVTYALVVEMQLVMGFFATAFCTVGMVVNKDFQGAHRLANWQQQCPRAEMPPDDGIIIGAAIPREARRYKLGEARYYAVLAWSAVLWQCFFLGAVGVIFCVHTLLAGILIAVFIPVTEVAAVIFLRERFSSEKGVALVLSLWGLASYSYGEWSEARAKKRKTRTEEGAAAAEALQQANP

SEQ ID NO: 84233 - protein, 111 aa, Zea mays
  Coding DNA Sequence Number=SeqID_40858
MGERRGEASPAADIHGSRNQCRCEETTDHQRGRTLGVTIFNETDRLNLRYLVRERLLVGHRFKGDGVWLGVVRKRSVSDVVDVPRLLAIMRPLTNFPRISSDVILVYLGFS

SEQ ID NO: 84234 - protein, 86 aa, Zea mays
  Coding DNA Sequence Number=SeqID_40859
MGTPHSQLAMLQGAAFKPTTPDIGGNMCLCTGAWRTSSIQGNTEGLKDDGGTSVRLGVSDGRPATLKVRLGCQHSTALWCVDPNWA

SEQ ID NO: 84235 - protein, 639 aa, Zea mays
  Coding DNA Sequence Number=SeqID_40860
  Subcellular localization annotation: CTP_CleavageSite=77; ConfidenceScore=5.01e-01
MNRHRHSRCHYKRNSSSAPAGMNNLHIREPARRQTLGDSLATSAAAAMVLGRTLLPEGSRSRPHLRGANQTLKPKSRSNSSPSPAWLEDASFAELEDGFHPQKLEEEVASRPVREVELWLASLSAPARMMKILEAEGGAQVAARLASPHHQVGGHRLGTEEAKPPRAERTTAQRLQAFLHYGPDQRVKGRTAMQAACNRTKGVHPFDFDASSMEAQAHMSCNRRAGYYVQETAPPLAPVPRLLDCGTGAATRGDPAHDPTVPTEHIGHGSVSRERRRDGRYDQKWAGSNGGGRRAEAAVKSSASSRPLLGQQESPLPRSEDDAPVFRSSNGSRTHNGCPANHSSRRINSAAGQAGKQATLHLRHNDRVKKGTGKGDTPKGILLREGSGPRAPLLIRGSKAGPSEGFNSRLRALGLRAHYWSEVRRLAPRKGSTAASSHSGSAPTTDQGFVGWPPKGSTAASEHAERGMTLGSGAALLNPAPAKPLTASTYQLENLGLDYAPGLRPLSPASGAIGSSASPDPRARAQPRRWTTDSASPDPRARTQPRPRETVSPSPDPGLGLNLDAGRRTPPRPTPGLGHNLGLGRRSPPRPTQGSDSTSTSKDELRLARSQGSDSASTSEEPPPRSTSGSDPPPSLPYP

SEQ ID NO: 84236 - protein, 131 aa, Zea mays
  Coding DNA Sequence Number=SeqID_40861
  Subcellular localization annotation: CTP_CleavageSite=52; ConfidenceScore=5.59e-01
MAGSAPSMDAPCCSLRLALSIQRPPFSSMENQQRAPFLAVRRGARRLFGKMRSNPRAAGSLFREAQWTARRQRSLWVAVFAQPPCRRHSPPERNPAFCEKKANHSTLVGCWSDAQIGITVILANTVWVCLW

SEQ ID NO: 84237 - protein, 111 aa, Zea mays
  Coding DNA Sequence Number=SeqID_40862
MGRGKRSLLLAPLGKLAWAPAMGELAAAPGKRSPRHGCWRPREHSEMGKKESSGVAPWAGKLLAMGGKSSCSPWTEKGREEGRWRTGKSAMAVGGAMGAWSSAPCVLAAAL

SEQ ID NO: 84238 - protein, 269 aa, Zea mays
  Coding DNA Sequence Number=SeqID_40863
  Subcellular localization annotation: CTP_CleavageSite=65; ConfidenceScore=5.58e-01
MQAACNRAKWTRFSDSRHAQHGGPGPRVTQPARRMLHASNCTATCATTVPPRLRNQYRDSRARTRAKPRKTANSAPPDPGLGLGLSPGRRRTPLRPTQGSDSGSAPEDDELRFARPQGSDSAQTSADDLRLARPRGSDSASAMEDRLDLGFGGASTSPNLGAQASHGPLREGWPRGDEDETGARSEPLASLTSVDACNPLLQAHPTWARDEHEGRGIPTSLTPVSGRLASPPFALALALDPSGLGHVATLTRRPKGPPGLETPTLFYPI

SEQ ID NO: 84239 - protein, 295 aa, Zea mays
  Coding DNA Sequence Number=SeqID_40864
MEKEKTGPTRISGYLPGSIDSVSDPNPKLHYPGITCIRPEYKNTRICIRKRVFALSVSGTWREVLNFIVFLVAEGFHGVSWTVQCDIVQQFMLGALPQDKEHVPPYPHNGHQLPVEFFGLGQPVPNFQFDLNIPPTGEIEEDVVSNNIADDGWDPWPAEQDPLVDAQSPVTSEAVNRKKRAALVDTEVRRSARLREKAKGFKPCFGIKNNCSCCAGASPPSLSHMTIKKLGTDFCNVDPHKLSLDALNNSRSSSAAIQRPRSSSCSRNEPSSSSEDQREASDMDDDTESHPSAGL

SEQ ID NO: 84240 - protein, 294 aa, Zea mays
  Coding DNA Sequence Number=SeqID_40865
  Subcellular localization annotation: CTP_CleavageSite=68; ConfidenceScore=5.15e-01
MSSRSLMHRVFPPSEPPDGGYPPSFRLIVGGTQLRGSWYLSAIVRLQGFSSCSPAAPLCRRSPKMVTSSLMVGESEPGCGLCPSLSLKDFHHQGWGGDCTMPGSRTRVASEPLAAPASATAAGRGSSADEIAGAAHGPTSNSTAFCPSLPHEFGHGRGPPGSSSRPEVSAAAIRPPGAEVVVVAAAGAGDGAPFVGLLLLRRPSPIEWGCSYLRRWNQSSVCNSTLNANSPVGCLNRFTKRESPRVKVTSESEDPRTVSPSEARSDLAEGVVDAEGAAAPFQRQGPSLQDQIVL

SEQ ID NO: 84241 - protein, 89 aa, Zea mays
  Coding DNA Sequence Number=SeqID_40866
MAKNIGFSKLEDGLSAMLLHDLPDYLAYKSLKKHDDDALAELVTTMFWVAPEDERTERNFSPELLLEFGRESNFDELFISAYGCELSLW

SEQ ID NO: 84242 - protein, 200 aa, Zea mays
  Coding DNA Sequence Number=SeqID_40867
  Gene Ontology: Mol. function=ATPase activity, coupled to transmembrane movement of ions, phosphorylative mechanism; Cellular component=membrane; Biological process=metabolic process
  Homolog annotation: Hit_ID=A7PVP2; Match level="QueryCoverage=59%, HitCoverage=58%, E-value=3e-39, Identity=55%"; Hit description =Chromosome chr9 scaffold_33, whole genome shotgun sequence
  Pfam annotation: Domain name=Cation_ATPase_C; Domain location=33-147; Score=-13.8; E_value=0.001; Accession=PF00689.12; Description=Cation transporting ATPase, C-terminus
ADIGLSMGISETEVAKESSDIIILDDDFTSVVKKSTWEPLVTNIMWRNLFVQALYQVAILLIFDFDGIFNEFNARKPEEKNVFKGATKNHLFMGIIGITTVFQILIIQFLGKFFKIVRLGWRLWLVSIAIGLVSWPLAYVGKFIPVPVRPLPDYFKPRCCRKPPRRGESLDVGFVPFLRQFRSRTQVLIGNADEEEGGQS

SEQ ID NO: 84243 - protein, 294 aa, Zea mays
  Coding DNA Sequence Number=SeqID_40868
MANFLADPRPFVPLELVLDDADIDRCSRAWVHVALGQEARRDDFVIATGLEGVVPLDVGIFEMGSLFQKDILLTSDIYNGEGTLLGNNNAIADLEDNIPPNRNPHPYQKMTMMRISYRQRDFMENLVNQNIWGIQEAHGEPVWDNVVLNMGLAHDWPMRPQQPQAATLHPMAPAAQDQLVLDTDDNAIDVDSISSSNNALVRRGNQNCLPFHQARESSLWGSFPISLNLQSSEMLEWVSFFISKEMDGSTLQKMVVDRCGVPPEEASLRVLLLRPTSWATEGTTADTTLDVPHD

SEQ ID NO: 84244 - protein, 66 aa, Zea mays
  Coding DNA Sequence Number=SeqID_40869
  Gene Ontology: Mol. function=DNA-directed DNA polymerase activity; Cellular component=DNA polymerase III complex; Biological process =DNA replication
  Homolog annotation: Hit_ID=Q6YPF5; Match level="QueryCoverage=98%, HitCoverage=9%, E-value=1e-08, Identity=45%"; Hit description =Putative DNA polymerase III like protein
  Subcellular localization annotation: CTP_CleavageSite=38; ConfidenceScore=5.04e-01
MHGVGKTSTATMFAATLNCHSPGRNQPCGRGDECMSILSESSNNIEEIDASTFLRNAREEIDTSRF

SEQ ID NO: 84245 - protein, 94 aa, Zea mays
  Coding DNA Sequence Number=SeqID_40870
MGPLRFELGIKVNTLDLWLKQLRETLGDTGVSQPSPLKGISSQDSGQSPPGVKRRIRRTGGGVGCDYVPVSLGRQSGKLDLKNSSVSQVASSSE

SEQ ID NO: 84246 - protein, 120 aa, Zea mays
  Coding DNA Sequence Number=SeqID_40871
MGKNNKRKREPTPPSEDFGDSEYSEEEFSSESEGYLSAQRLVLRTHVPSATQDEAARWEDLVAGLRLASYRAKGVPARFVFVGPAAPARASSGGWRLCLRPNICPPRDQFDKVTWCRRRR

SEQ ID NO: 84247 - protein, 420 aa, Zea mays
  Coding DNA Sequence Number=SeqID_40872
  Homolog annotation: Hit_ID=Q6YT01; Match level="QueryCoverage=88%, HitCoverage=93%, E-value=1e-106, Identity=57%"; Hit description =Putative uncharacterized protein OJ1112_E06.27
  Pfam annotation: Domain name=F-box; Domain location=19-66; Score =26.8; E_value=7.7e-05; Accession=PF00646.24; Description=F-box domain
MSSSFSPEVDGNHSDDEKDGVGVLPEDQVFEILTRVPLDDLATCRMVSTRWRRITYEPAFAPLHCSRTAAVSGYLVQSLTHNRYRADFVSMPCSPPAPAVAISLDFLPSAHVRVVAVAAHRGLVCCVDVDAMRPTCYYVCKPATRQWRALPNPRVRFDTVAVAMEARPSGATRAEFKIVRFSRSVVVKPGDRLRCEVFDSRQFAWSQAPHVPLGPFSLQAQAPAVRAHGAMHWLRWSDHNTGAQDVFAFDVEAVKWRLIALPQEVDQMDNPWARKKIGAVEGRLCLLVLTHAAGAVNEEVLEVWEMANYGEGRWTKKMTISLKDLHEHDRRAVIHGVLHSSDVAFFCSFYRVMWYDFRKGKMAEVQVKNIGIGLQQIFKYESDFNLCKIGPKRPIEGAAVAAVMGPQGRLDKIIRLVEII

SEQ ID NO: 84248 - protein, 202 aa, Zea mays
  Coding DNA Sequence Number=SeqID_40873
  Pfam annotation: Domain name=IQ; Domain location=48-68; Score=28.5; E_ value=2.4e-05; Accession=PF00612.18; Description=IQ calmodulin -binding motif
MGDLWTNIRADLANIQATLQKVEQGLLQIKIAVQHEQHQLALSARLQTSAAVGIQAAARGFLARRRVREMRRQMLEAALVTADLGTRGHILALSDGHQQRLRDAISKCEHGTCPASDELQLYGSGDKEGTPFVIGKGTLFSATTFRYRSPRGRLRWLLLRPIPGARSCAPLSSRWRPWDPGGCTRASPMRGGCPPYLMRSKN

SEQ ID NO: 84249 - protein, 58 aa, Zea mays
  Coding DNA Sequence Number=SeqID_40874
MGHREARAPRDHLTRELGQVRGLLFRTDWAWPVPGGLTAGHRVEFEYEMRMDKLLVIV

SEQ ID NO: 84250 - protein, 402 aa, Zea mays
  Coding DNA Sequence Number=SeqID_40875
  Gene Ontology: Mol. function=DNA-directed DNA polymerase activity; Cellular component=DNA polymerase III complex; Biological process =DNA replication
  Homolog annotation: Hit_ID=Q6YPF5; Match level="QueryCoverage=60%, HitCoverage=31%, E-value=1e-55, Identity=48%"; Hit description =Putative DNA polymerase III like protein
  Pfam annotation: Domain name=Aldedh; Domain location=54-396; Score= -250.9; E_value=0.00052; Accession=PF00171.13; Description=Aldehyde dehydrogenase family
MAQGHISLSDSTIFVMITSNIEKLPSNSIEWYFIVFVDIGAIDKAIEEAMFGIFANADCNLADGEYVLIPEQGTVQEEDQEQAPEAAIEDLPAAPAIEGKPRYGGYKCGHCTAAAGVSGALYAKAVRFRKWLMSISGAVLKGKLAPIYLFHGQHGVGKTSTATMFAAALNCRSPGGNQPCGRGDECMAILSESSNNIEEIDASTFLRNACEVPASSHFKVLIVDNCQHMDKEGWYAIYNSLEGIPDSTIFVMITSDIEKLPSNSIEWYFIVFVDIGAIDKAVEEAMFGIFANAGQVCSATSCLLLHEKIAKQFLDRLVGWAKIIKVSDPLEKGCRVDSVISDRQYEKIKKFISTTGSEGATNLYERISRALHSGIIWINCLHLQWDPGGIDVMYQLGGKPIF

SEQ ID NO: 84251 - protein, 121 aa, Zea mays
  Coding DNA Sequence Number=SeqID_40876
  Subcellular localization annotation: CTP_CleavageSite=52; ConfidenceScore=5.64e-01
MGRIVRGPPNRTRPHGGRTSSQAFVWRRTGRRVSCPFCLRRTSGTSEGFERRVAEYSSDEEDSSEEDGGGDGEDDDDDNDDDGGGGGGDGDGSGRGDSGGGGNSRGSNRGGSGGGSNRASG

SEQ ID NO: 84252 - protein, 143 aa, Zea mays
  Coding DNA Sequence Number=SeqID_40877
  Subcellular localization annotation: CTP_CleavageSite=70; ConfidenceScore=5.36e-01
MHPGYGQFAWGNNQTGRSITKRAKTSKESNHSFEASGATPGGMRLTAAKSGLGRHRKLRLARPQGSAPVSASEDDELRLARAQGSGSAFASDDGLGLARPGARTRPRPRKTDSTSTSEEPPPRPTQGTDRPRHRGGHHYPTPS

SEQ ID NO: 84253 - protein, 238 aa, Zea mays
  Coding DNA Sequence Number=SeqID_40878
  Subcellular localization annotation: CTP_CleavageSite=76; ConfidenceScore=5.03e-01
MAADNPLAGGGIDDIFPAWWKNNIRARPVLSPANGGGGEATKAKREAALRRLSSESTSPAPRRSATVAPSHRRAIAAAEESPEPALRVIPPPSRSAVNRPLRCPCPDPDPTRGLPVPSPTFPATQVAPETRQTPAPLVSGELSAAGTSAAAPASRRRSPGPLPPHPVSLPFGPRLSARPRARSARRPRLSARPRALCPPAPPVSLPAPRTARPVPPVSRPGRRALARPPAGSNPGRSL

SEQ ID NO: 84254 - protein, 287 aa, Zea mays
  Coding DNA Sequence Number=SeqID_40879
  Subcellular localization annotation: CTP_CleavageSite=30; ConfidenceScore=5.09e-01
MSSHSLMHRVFPPSKPPDGGYPPSFRLIVGGTQLRGSWYISAIVRLQGFSSHGPVAPLRWWSPKTVTSSSWMGRGKPGCDPDPALSIEGVRHPCWGGERGESGLYLLRGSAGHLFFQLLVVAIALQPYGGDVLQPCRGRRTIAAQLGCNIPPSPSHSRRGRQRGPAGALGSGPLFGFNSWFTSLERDREREPSGGRVHPGPWLLLQRSLAGPPTFVAPQARDSPVDYLNRFTKHESPRVKVTSESGDPWTASPSEARSDLAEGVIDAEGATAPFQHQDPSLQDQSVL

SEQ ID NO: 84255 - protein, 221 aa, Zea mays
  Coding DNA Sequence Number=SeqID_40880
  Subcellular localization annotation: CTP_CleavageSite=22; ConfidenceScore=5.35e-01
MGSTRVAFVLSSSGERNFAEVGSSAASPRRWSPKTVTTSLMVGRSKPGCDLCLALSFKDLHHPGWGGGRTEPELYLPRGFVGHLLPQHSGERALTGLAGGSDFDNAGLVGGERRLLQRVGLAGSAGSGSAPGAPSRRESGCRTARTGGPPKMSRAARAAFVFLGCPVFAPVRRLYAELVLAPSSGDVGEGLVAAASALRPSLLLFGHLERRSLSLLPERAA

SEQ ID NO: 84256 - protein, 199 aa, Zea mays
  Coding DNA Sequence Number=SeqID_40881
MQAACNRTKGAHPFDFDASSMEAQAHTSCNRLASYYVRETAPPLAPVPHLLDCGTGAATRGDPAHDPTVPTEHIGHGSVSRGRRRDGRYGQKWAGTGKGDTPKGILLRKGSGPRAPLLIRGSKAGPSEGFNSRLRALGLRAHYWSEVRRLTPQKGSTAASGHSGSAPTTDQGFVGWPPKGSTAASEHAERGMTLGTFDT

SEQ ID NO: 84257 - protein, 242 aa, Zea mays
  Coding DNA Sequence Number=SeqID_40882
  Subcellular localization annotation: CTP_CleavageSite=52; ConfidenceScore=5.25e-01
MAPCKPCDDGGSQLSYGSRGTSARTQPLRQLSLRQAPLLLRQPRHHTSRVPRALLEKVGRAGTRTGQALSWGRSLPSPAWTLVTPYCKRTRPGRGTNTKAAGFPPLSRPSPATSLPPFALAHALDPSRLGHAAHSLVGLGTPGLETPTKLHFVNSAQRYTLLLSYPNLTAVRLGRAARLLQERLNLDSSRFTAAAGRRPPLLAWTSRPPKPLPPSKESKKDNRRPPTMEACALALVTTSIAS

SEQ ID NO: 84258 - protein, 142 aa, Zea mays
  Coding DNA Sequence Number=SeqID_40883
MAGSKDHTEVSTSNIIKPTLEELFVNDQQRFEDIMKQNEKEVLQQLVNDVRRKRRSTYHNSRWIATRRSSAKGLALLYEEFTVPNFPSYEPNTEPVLPNTLAINGSSLTQPSYGMPMNTFTTQPPSPLPNTQPTGHDQTARA

SEQ ID NO: 84259 - protein, 398 aa, Zea mays
  Coding DNA Sequence Number=SeqID_40884
MPTGATAVPTLPESAPLPCVSDTRQRLFYTRHRMIGELYIGNSLFAEYYLSGTRQRKVTVMAPSDGDGSFAECLLWHSAKRPILPSVCSRGPRQRLIQWAPPPVPVPRALIGTRQRSLFCRVSGGLALGKEPSSGPLYQYLCRVPWQQHSTKMSLPVPRARTRAKPRKTANSAPPDPRLGLGLSFGRRRTPLRPTQGLGLRARPREDSELPLRSTQGSGLGLGPERRRTPLRQTQGSDSGSAPEDDELRFARPQGSDSALASTERPPPRPTQELGLGPDHGRQTRPRLRRSLHVARPRAQARHVNRKRHHHPTPSRLGPQRTRPWDVSKDSTTPTAVPPPGSVAPPTATTSHQQGAKKVGRAGDEDGTGALFGGRFASLTRVGRFVTPLNASAPDLGA

SEQ ID NO: 84260 - protein, 106 aa, Zea mays
  Coding DNA Sequence Number=SeqID_40885
MAERRRFWQEKRATLRLRRNNRVKKRNRAPSPPTDQRFEGWPSEGFNSRLRSRGPYTHYWSEVRRPAPPKGSTAASGYSGSAPITDQGFEGWPPKGSQSPQTPSEG

SEQ ID NO: 84261 - protein, 186 aa, Zea mays
  Coding DNA Sequence Number=SeqID_40886
MQPGCIPPSVVTQDGDLRLDGGGKRAGLRPLPLPQPQGFSSPGLGRGVCRVEVGPRMGGGPLLHSIIGGKGGRRSWRWQLHRAWLSDASGFGAARGAGVRHGSLKSIRPEVSAAAVRPPGAEVVVVAAAGAAGLSVSGTDAGVDQPRPRTGLAPLEDDLAEGVVEAEGATAPFQREDPSLQDQIVL

SEQ ID NO: 84262 - protein, 313 aa, Zea mays
  Coding DNA Sequence Number=SeqID_40887
  Subcellular localization annotation: CTP_CleavageSite=68; ConfidenceScore=5.20e-01
MTDQTKLRREADSAVSAHTGEESVTFCVVLRLMSSPTPSSPSQRTTVPPIGSRRMAGAWADHGGSAASSSAEEEFRAAWYIIWFATRDERRDAARYYNLGEREPSPSRRGSSAVKWAPQVGVPSHTAGQRDPHPVKGAASWASAVSEVRMGQMSGGAEFAVFRVLARVRALGSGGAEFAVFRVLARVRALGSGGAEFAVFRVLARVRALGRAERSFLWHLWQGLTACQTHSVEWHCSRSGAGGAVLLLDRSVVRRSDGGLLLSEAKASGEPEMRPPLKGGPRARRKSLELYADGGYQLRIRRLEGTPNYGPRQ

SEQ ID NO: 84263 - protein, 71 aa, Zea mays
  Coding DNA Sequence Number=SeqID_40888
MADPRRAAPPKRNSVRPGVTRAELGEGDNSVERGPRGSARFRCADAVALLLSGPHKSAFPPTRLGSGTRIQ

SEQ ID NO: 84264 - protein, 94 aa, Zea mays
  Coding DNA Sequence Number=SeqID_40889
MAIGRTCVSGHGRETRSIALTRGSCSYQKISAGGHESMAIPRRSMSAVADPPRAMNRAVVAIIRGRGGAAVLASRVEKMSEHRPIMHQWLRLEA

SEQ ID NO: 84265 - protein, 241 aa, Zea mays
  Coding DNA Sequence Number=SeqID_40890
  Gene Ontology: Mol. function=hydrolase activity; Cellular component =integral to membrane
  Homolog annotation: Hit_ID=Q67UY4; Match level="QueryCoverage=83%, HitCoverage=66%, E-value=1e-67, Identity=59%"; Hit description =Rhomboid-like protein
  Pfam annotation: Domain name=Rhomboid; Domain location=90-217; Score =58.8; E_value=1.8e-14; Accession=PF01694.13; Description=Rhomboid family
  Subcellular localization annotation: CTP_CleavageSite=42; ConfidenceScore=5.60e-01
MAAETAAIGGRPSSQPSQACKSAALSAAASPASSAHRSALFSGNGSGGRYISNGKLLSRRPRGIDSKKRLWTNVLLALNVLAYVAQVASQGKLLMWGAKFNCFSLNSIGPMVEMLSGPRRYLAVYFSSALAGSLMSYRFSASPAVGASGAIFGLTFVSYVHHIYVLSKNSPGLVLLKYKSLIQLGMGLLSRGIDNWGHLGGLLGGVAMAWFLGPAWQYQYVAKDGRAVFKDRAPVLRLIKG

SEQ ID NO: 84266 - protein, 68 aa, Zea mays
  Coding DNA Sequence Number=SeqID_40891
MADEHADPIPSRHPVELVAPNDLLNTEPRSDKQFEAVPHGFHKLGPLSLLQGTGAPSPSPRLGKIVLD

SEQ ID NO: 84267 - protein, 183 aa, Zea mays
  Coding DNA Sequence Number=SeqID_40892
MALPVDVAGLCPRSGDVGAPPKPGSSLSSLAEAEPEPPGRARRRSFGRGPGGVRALGSGEAEFVVFRVLARVRALGSSGAEFAVFRVLARVRALGSGGAEFAVFRVLARVRAPGSGGAELPMAPLARPDCLSDSLLLSGTAVRVAQAALSFCQTGQWCGGVTAVTSALPGGAHQDKGVRPPLR

SEQ ID NO: 84268 - protein, 150 aa, Zea mays
  Coding DNA Sequence Number=SeqID_40893
MGKSKKGKSSSHHSGEKRKRELSPPSDDFGDSKYSEEKFSSESKGSPIYASPPVSSDDSDDSQGITAEVWTYIRVVECSGLEGSDESEISSDEGDSSDSSEEGSGDDGNDEGDGGDKGDGDGGKGDVGSGKDDGGSGRASGKAPLAYILV

SEQ ID NO: 84269 - protein, 149 aa, Zea mays
  Coding DNA Sequence Number=SeqID_40894
  Homolog annotation: Hit_ID=A2Z1Z4; Match level="QueryCoverage=31%, HitCoverage=13%, E-value=3e-10, Identity=70%"; Hit description =Putative uncharacterized protein
MSGAPATSPVPLESDRWSSDFWARLDVRWRIGHELFSVRRGSVCDGHGGGGEEEEDLRSVGVSGANQMRSEWGSPSMWSSAAAREASRSPEPGGGGPWGGRVFGAIGRAVSFRCVFVLLLAAGVLIPVLFLLVPSRQQGYLSDDHDVLA

SEQ ID NO: 84270 - protein, 285 aa, Zea mays
  Coding DNA Sequence Number=SeqID_40895
  Homolog annotation: Hit_ID=A2Z1Z4; Match level="QueryCoverage=89%, HitCoverage=77%, E-value=1e-97, Identity=70%"; Hit description =Putative uncharacterized protein
MLVLQFNIVMAYMARRQREAEIKVGFTLEKPVSFLTSHIDKLGNDIFEDIGVPNSKVSIVSMHPLTSKYFTHIVFGVLPYPKDASISLPALSVLRSSLIEMMLQQVNLSLTPSLFGHPSSFELLRFPGGITVIPAQSGFTWVNTDPLFNFMLNNSIYQILGNLTELKDQLKLGLNLRSYEKIYFQFRNEIGSSVEAPATIVASVLDGSSNLLPDRLRQLAKLIREPDARNLGLNHSVFGKPISGSIAITITFSKHADILVTLPCIKSPWSSFSPFMEQTPLLSMF

SEQ ID NO: 84271 - protein, 60 aa, Zea mays
  Coding DNA Sequence Number=SeqID_40896
MGCVRFEQGDRADEDGPRASGWREPFFPVPIIVIASIIATPVIGHLNANISVLEALVMVP

SEQ ID NO: 84272 - protein, 151 aa, Zea mays
  Coding DNA Sequence Number=SeqID_40897
MRVPSTGLANHHAAIVEGRQRHHDRRPLALVITKLSDLLGEDQGLGDEDLPSNPLHQNSDEREGLAFYCLRSREGPLAWSLNGVLLLLRVLFQSETYRVSTTANNLMPATTVCSVLDCSCLRHRLFVYGLPERPTGDSRVFGRRQLEPGEH

SEQ ID NO: 84273 - protein, 96 aa, Zea mays
  Coding DNA Sequence Number=SeqID_40898
  Homolog annotation: Hit_ID=A2X247; Match level="QueryCoverage=100%, HitCoverage=42%, E-value=7e-32, Identity=64%"; Hit description =Putative uncharacterized protein
  Subcellular localization annotation: CTP_CleavageSite=48; ConfidenceScore=5.45e-01
MENSGIQSQRSMSSISTLAQSSDQHTAGSSSNPNEFMNQGLMLWNQTRQQWVGSKKRHSRSQQPREPKLSFLKLNLYSQEMVDLLVDAWEQEGLYD

SEQ ID NO: 84274 - protein, 95 aa, Zea mays
  Coding DNA Sequence Number=SeqID_40899
MAFTSPRRRFPDAMPQRLAKVYATDNGEVHALLALRACSSYWRPTTTPEKGLAGTLPPVVAGLCSLNGLYLHYNALSRSSFNSPPIRHLRTESPP

SEQ ID NO: 84275 - protein, 216 aa, Zea mays
  Coding DNA Sequence Number=SeqID_40900
  Pfam annotation: Domain name=Transposase_28; Domain location=1-109; Score=-61.5; E_value=0.048; Accession=PF04195.3; Description =Putative gypsy type transposon
MTISSFFLLLLEEFRLQLQHLMPHSILQMAIFVHLCEMFVGVGHYTSLFLHFFVLVKSGKSKDDIDAYYFQTRTRRRRSTPFRLHACGVKDWEQQPRFGKHVATASITTTAITTTSFCERQQQQLYFSRHYIVNSLKGNKRKASGSSMGAPIGQSSSLAQAAENKDANKLVVAGTSNTGTRAVASVDIASLDDDDEDIQEEMTGIGKREKRIGSMQ

SEQ ID NO: 84276 - protein, 141 aa, Zea mays
  Coding DNA Sequence Number=SeqID_40901
MAIQREWEALEAELHRLSDWHVRLEERTKATSHQVASERSKLEEDHKDYKRDLRRVYELRPGDGGILEGAEGGPKPEGGGRDLKRGPSCGVQAKLEAKDQILETQRVQQAESTEELRKWRLELQDMASNVTLVEENIKEEK

SEQ ID NO: 84277 - protein, 165 aa, Zea mays
  Coding DNA Sequence Number=SeqID_40902
  Gene Ontology: Mol. function=kinase activity
  Homolog annotation: Hit_ID=Q6QP54; Match level="QueryCoverage=47%, HitCoverage=27%, E-value=1e-27, Identity=80%"; Hit description =Putative kinase
MGRACGRAQRGERREAAGVRRESGGNPAAFVFVPRPGRLRAAVVTGLVGRHHCLSGGASQMGHRSCSLRPESARGRVMMALPVDVAGLCPRSGDVEAPPKPRSSLSSMAEAEPEPLGRARRRLFGRGQGGVRALGSGEAEFVVFRGLARVRALGRAERSLSSSGA

SEQ ID NO: 84278 - protein, 181 aa, Zea mays
  Coding DNA Sequence Number=SeqID_40903
MSSIPPPAGGLSAAIVVVARRWKEYHVVAAVEGHELKTPETEHRPGPERLLETAHLELDGKLFVSTQQAPTWRANCRRFETGGPSGRQVGRRGGSSEADVESVFHGRGRARAPGSGEAEVVRQRPERSPSPGVGRSGVRRLPGPSPSPSPGSGGAEFAVFRGLARVRALGRAERSSPSSGA

SEQ ID NO: 84279 - protein, 71 aa, Zea mays
  Coding DNA Sequence Number=SeqID_40904
MDIVYVDLDVLNLDTTGQAKDGGKKKFEIPSAREKVKETKAQETPTCGDSCEEIDFDIRKTMALKFDLWIT

SEQ ID NO: 84280 - protein, 195 aa, Zea mays
  Coding DNA Sequence Number=SeqID_40905
MKHDDGGTDAGTCGDITRLGNGTRHSPYPGTKLQKWEKLPTSEYTEKDIILAVVIADKLRNESGSKPSKIADGLPRTPDVEGYRRLLTRAANHLLTGRTGLKPSWRKEEEQLGEAATRDAREERASQGATRLGVRRELREREAGAMEKREEQGRALRLEQEHAGELARPTSRAGGSSGRTRQRKLGGHESRLEGG

SEQ ID NO: 84281 - protein, 199 aa, Zea mays
  Coding DNA Sequence Number=SeqID_40906
MEHRYDPTSINHDLVLMGQTPDDVDDVHDGLEDLFGSIAPTPNPTINLGDDNVAAEGEALPDTTASTTTSTGRKRKCTSDVWEDMDKIFATENDGISSSSGLGAGLGAFGASSSSGMVPELSRRTSASALLHAASTLALPFPAAPAACFPCFSFSSPMAVRAQAPTRPRSVELLPELRPAMALAASSMPVLCSAMEIAT

SEQ ID NO: 84282 - protein, 95 aa, Zea mays
  Coding DNA Sequence Number=SeqID_40907
  Subcellular localization annotation: CTP_CleavageSite=56; ConfidenceScore=5.23e-01
MAKEAGGVLRVPCGSRRRAAAPTPTGGKPGRSRRIAGVGVERLSVPLPAKGLFETVSEALDEYARVFSKQLSEVQIKALAALFGSTVPLELQGCS

SEQ ID NO: 84283 - protein, 54 aa, Zea mays
  Coding DNA Sequence Number=SeqID_40908
MVCGSASGSRSDLVSLSVLLSGYISVSLDLLSLDLLYRRRSWCSDLRLRSRSWP

SEQ ID NO: 84284 - protein, 107 aa, Zea mays
  Coding DNA Sequence Number=SeqID_40909
MEKTEERQIHRSSTPESIAEGGSAREWGYRILLPTTCRGWGIQEARRAMTDASTSTELGARRRTTGRGGEPVRRCLTNLKPRPNVLIAIKEHGKPERAAGEAVIMSR

SEQ ID NO: 84285 - protein, 343 aa, Zea mays
  Coding DNA Sequence Number=SeqID_40910
  Gene Ontology: Mol. function=DNA binding; Cellular component=nucleus; Biological process=regulation of transcription
  Homolog annotation: Hit_ID=A3BDE2; Match level="QueryCoverage=39%, HitCoverage=22%, E-value=6e-14, Identity=35%"; Hit description =Putative uncharacterized protein
MAMMMYMEGELLMVHLPGRTDNEIKNFWNTRIKKTEKQGLPIYPEHVLSQVKQPQQDMNCETPGLSHGKKRIREIEIHDLMDVKILFQHLDYHKDLVVPTKPLKRRASIGSLKISGETKETYCSTDLNYVLARSESVPTGSAIASGYPVELPSIQSSSSTLSNDWLLQCVSASVEQQIHSSIQSTETISSQTTGLLHTMSEISFETLIPMVYPMIHSFGYSEHESSPNTDIQAANLSLGSDDVSQYYQVASFFDPGVPDTELGASFFNDTPPETSFLNQQKQVGQATTQTSTTAAAAAAYQSRASGQGKCLVLRLEALVFRVDIDRTRYINSQHCFMTHLCYY

SEQ ID NO: 84286 - protein, 325 aa, Zea mays
  Coding DNA Sequence Number=SeqID_40911
  Homolog annotation: Hit_ID=A2ZKX3; Match level="QueryCoverage=22%, HitCoverage=29%, E-value=8e-07, Identity=36%"; Hit description =Putative uncharacterized protein
MWGTFRKIVIMDARWSLHTIKVWGDLLNKNALRWALANENYSIIIGTMFRRFRKQECLESTDHTTIHFKPFHHNTHYFEHQMGHNAGRKPFTDISSNIIRGDQNELLGPMVDAKERKRKRDRERYAAMSVEQKNEKNRKRREARQQNKGHNVMPNVSGGDQNEQLRLYNQTPRQKEGKLEYIRKRRALQASTLNQGSIAMEVPTYTSEVVHPTADVSEPDSSSDNTCDWVIPEYTSTPFMPASTKTEDVDSSDMSTGPLRRKHHVLPGERQAILARQNKKFEANIARNMTTLTEDTISDVGQMDDSTQPGSTIEINNTGNYSNQF

SEQ ID NO: 84287 - protein, 1117 aa, Zea mays
  Coding DNA Sequence Number=SeqID_40912
  Homolog annotation: Hit_ID=Q7XBD4; Match level="QueryCoverage=23%, HitCoverage=30%, E-value=7e-08, Identity=24%"; Hit description =Cinful1 polyprotein
  Subcellular localization annotation: CTP_CleavageSite=32; ConfidenceScore=5.12e-01
MPTSSSSAAATPPADASPPANASSEETLSSLMAEELRAGDFVDFGVSRMSSVHVQDMQRLGYFGGGVARVPGTEEVLEPEGELVVFEAFFAAGLRLPAHQFVGEVGGQPSVEVFAKYYCLHWQKRMIGDEVAQFGSCTFTPKTGKTTMQVVELVPCARNKWGNWNEFWFYVAEGTVEDHEGLPVSEMCSHFYSAYPPFEVAEEDADEGALRCAAGLSSGRDLVEEFVAYGVWPLAHGWALGEVCPRQMPFHGGRVVRSPAFALNLQNRDPAAFVREAEDGAVRLVGRYVQRREGQRSWEIRGSNDRLNRVFELNQLPYDGYPGQDDVDRRGKKPVVETRDDPAPAAAPSSKKRKLGTAMGGLGVSDGFARELMRTCAAPGGRMSSPELWESSARMLRVTGGCWPRNVPIPRAAGEDFSTSRMVREWRVFPYRRNIAAVVSAVMDKDRQGAAHKRQAVVRLHEARPKKQRGAPKATAPGGGKPPLAAKSGVPASSKAPEAMAGTRGSKSTKVVPPSSRVPEVAKAARALPSSGKRVVDFATDISVDDYLGGSDEGQLAIVAPAAATTTAAAVPKAKGGALSAGGEMSALAAVRDEAGAVSRRLKEVTEALSQVADFANRTTSGALTAVVSAEVERLRTQHADAVREKSAADSKCRKLADKVAALEREKTDLRRQLVGERRETNEALAQAQAAQAEANLARAEGNLARERAEQLHDRLTALESRVERAEAASRAEAERTRKQLMDSYHELGARTGDFEVPDREPGLRCLEWVQEELQALPTIVEGFMSYASLVTCEGAMNALSCKGCRHFEVFDQADEDFERDIYKVEDPIVKESAGAIYDQMWGPHGREVVRERAETARAQAARGERVDDFRALNSVLPDPEPTPAEAASGAALEPPPETAEGAPDAPASATAGGDLPPETAEGAPDAPAAAAPSAEDPATVAAEATAEATAEAPATAGSSQVQDFGPAHATATTKFLAASTVDGGNKCDGSASEFSDFADSGSSVEWTEESSEEDLDYFAALDVAAAEASPHAADTEDVPGPSTGRRRRRAVAKRRVSEAEGGRLRVSRAGRQELLSLPAAVSTGEGELQSLFAGEELRIMLFNYREMGIIPKVEPM

SEQ ID NO: 84288 - protein, 87 aa, Zea mays
  Coding DNA Sequence Number=SeqID_40913
MATHRAGGSRAMADRAERGAMAGPRQAGGSGTPHGEGQRLRRAGRGSPDRAGMPHGEGPRSWGGHAARGEAGAVEEGGEEGRELCIR

SEQ ID NO: 84289 - protein, 313 aa, Zea mays
  Coding DNA Sequence Number=SeqID_40914
MAERYQLPRSCVPPMTRRKDCGCPPSGGSESGKTRCIREREDMVAFQGGHPPFKGDSPYLCPQPSWAESSPTRSKVLPLRRGGWVPRVMQTGPGQKKPNHCARGGTGGASGRRSKRRFAFAIMTGSKKGPGEGDTPKRILLHEGNSRLRALGFHAHYWSEVRRSAPRKGSTAASGHSGSVPTTDQGGNDLVTESHQREASSPRTPSKGDRVRQITRSSPETPCSAPSEGNMALSPLLLAERRRRGVCKKVESVLDRPLALCRGSGAALANPAPAKPLTASTYQPENLGPDRAPGLRPARMREQPDQPKHCARH

SEQ ID NO: 84290 - protein, 17 aa, Zea mays
  Coding DNA Sequence Number=SeqID_40915
MPILLKIFLLSAKPMRE

SEQ ID NO: 84291 - protein, 1043 aa, Zea mays
  Coding DNA Sequence Number=SeqID_40916
  Gene Ontology: Mol. function=extracellular-glutamate-gated ion channel activity; Cellular component=integral to membrane; Biological process=ion transport
  Homolog annotation: Hit_ID=A2Z1I3; Match level="QueryCoverage=90%, HitCoverage=81%, E-value=0.0, Identity=69%"; Hit description =Putative uncharacterized protein
  Pfam annotation: Domain name=ANF_receptor; Domain location=8-352; Score=66.9; E_value=6.7e-17; Accession=PF01094.19; Description =Receptor family ligand binding region
  Pfam annotation: Domain name=Lig_chan; Domain location=521-952; Score= 152.2; E_value=1.5e-42; Accession=PF00060.17; Description=Ligand -gated ion channel
  Pfam module annotation: Pfam domain module=ANF_receptor::Lig_chan; Domain location=8-352::521-952
MAHPTKSPVEQVCEAERTTKSPTEQVYKVKRTTSTPVEQVCEAERTTESPEQVGEAERTTKSPTEQVCEAERMTKSPPSNPSRSSSQTPYFIRTAWNDSCQAEAIASLVQKYNWREVIPIIEDDDSNTRFIPDLVDALGHVDTRVPYRCKIHPSAGEDEIKHAISSLKEYWTSVFVVRMSYQLALKFFQLAKDEGMMGQGFVWITAYGLTDIFNVVGYPALDVMEGVVGIEPYVQETAKLNKFRQRWCEKYRSENPGTSINESITSGLYAYDTVWAIALAAEKAGYVNSDFVLSETNNGSTDFNKISTSRAAKKFHAAFLEVNFTGITGQFVIQDMQFQLVSTTYKIINVVGHERRAVGFWTPGLNISRILEKKDDISTIVWPGGSEKTPRGWLLPVNKVLKIGVPGKSGFSSFIRSEDGIPKGFCIDIFEEVISKLPYKVPKHYVEFGNGKGESNGTYDELVYKVYLKEFDAVVGDITILANRSLYVDYTLPYTESGVRMLVPVWDRRQKTAWTFLEPLTADLWLRTGAFIVFTGFVVWFIEHRTNQEFRGPPATQIGSLFYFSFSTFVFAHRERIVNNLSRITVVVWLFVVLILQQSYTASLSSILTVEQLQPTVTNLDEVIRRGDYVGYLSDSFMPELLKRLKINETKMIAFSSPEEYNDALSTRKVAVIVDEIPYLKVFLSKSRLRLLKGRGLASPEPSLGRELTNRPYRRCIQCKDRLAPYPDTRASIGKVEPQAPQEAPPRPTLGLGLRRSLRLARPQGTAPASASEGGLRLVRLQGSASTSTSEGGLRLARPQGPASTSTSEGIASSPDPGLGLRRSLRLARPWARTDHAAGGLKRSSDGHDTTYTGLERSSDSHVGMYIGFWLLSVGHAFPRGSPLTSEISRGILELASNGRMDELEKQLYGDTSCPDKDDSQTSSSLTSRSFLGLFIITGTSSLLALISHVIATLYDHRSHWINGGSQISWRELLAVLFKIFHERDSSNTPDKEEPGMEGIYPTAAETPCSMSTHVIKNADSGTDMVSTPDDQKKKLHAIESGS

SEQ ID NO: 84292 - protein, 232 aa, Zea mays
  Coding DNA Sequence Number=SeqID_40917
  Gene Ontology: Mol. function=nucleic acid binding; Cellular component= intracellular
  Homolog annotation: Hit_ID=A2X241; Match level="QueryCoverage=68%, HitCoverage=55%, E-value=8e-42, Identity=52%"; Hit description =Putative uncharacterized protein
  Pfam annotation: Domain name=CRAL_TRIO_N; Domain location=47-116; Score=37.0; E_value=7e-08; Accession=PF03765.6; Description=CRALTRIO, N-terminus
MEFMLTSPFSVSRNSQARYISTAISDGPGCLMLRCPDPSCAAAVGQDMINSLANVEDTEKYGRYLRRSYIEDNRKNMHQGYPKETLVRFLKAREWNVAKAHKMIVECLNWRIQNEIDSVLERPIAPVDLYRSICDSQLIGLSGYTKELTGHCLVIMVCRIIGLPIFGIGVGHSTYDKASATTTAKIIKVSGLKLSALSQIKDSGSHQVTPPHVDFADVSILVVELRNNNPMS

SEQ ID NO: 84293 - protein, 88 aa, Zea mays
  Coding DNA Sequence Number=SeqID_40918
MVNRNGIVRFDLLLLNVQTVMLDLFFMRLEVLVARKILGGSADKTGDGDDLASGIADNSKGFITIHEIELLAKSDCCGHLDVDGITPF

SEQ ID NO: 84294 - protein, 100 aa, Zea mays
  Coding DNA Sequence Number=SeqID_40919
MKLPEPGNELYLAGDTGSTSPDFTRSLAGTHAADEPDSLRTWPDQFRPSPTMSHYNLADGEYILVPEQGVAQEVAQDPAPESAIEDLPAPALEGKPRFYA

SEQ ID NO: 84295 - protein, 60 aa, Zea mays
  Coding DNA Sequence Number=SeqID_40920
MAVGVSEALYTKAVGLFLLPGNRGRWLMFSGGYGCCSDLAVYLATGLDSRVGPYLSWGGA

SEQ ID NO: 84296 - protein, 72 aa, Zea mays
  Coding DNA Sequence Number=SeqID_40921
MVSGEIARMMGSPGFYDVGEVQICSDLLNHACRDHDGDHGGDRGIRLRLLQSPRGEEGPDVGVPPVIDAVSD

SEQ ID NO: 84297 - protein, 269 aa, Zea mays
  Coding DNA Sequence Number=SeqID_40922
  Gene Ontology: Mol. function=nucleic acid binding; Cellular component= intracellular; Biological process=regulation of transcription
  Homolog annotation: Hit_ID=A2YTD2; Match level="QueryCoverage=92%, HitCoverage=88%, E-value=6e-23, Identity=35%"; Hit description =Putative uncharacterized protein
  Pfam annotation: Domain name=zf-C2H2; Domain location=82-104; Score =20.0; E_value=0.0091; Accession=PF00096.17; Description=Zinc finger, C2H2 type
MEVEGMGVQQVEDGEEEVQAPRKEEASPAKELDLLGALGSDQPPEVEAVAPRKEKEKAMVAEPEDDKSPATAPGGAEKKRTFKCNYCLRKFYTSQALGGHQNAHKRERSLAKQRGAAVAAAAGRGLYGGADPFPPPHHLRFQHAWPYSAGGSRPSSFPGFGRGSAAAPFYGMHHWWAAHAHAHTQPSMAGLTRRTGADDRTVYAPHGYGSSSKAPAPAVLDSGLSGLRWSGAAVDSGAAASGDPGVAQHEAPTQHEEAKSCKIDLDLRL

SEQ ID NO: 84298 - protein, 27 aa, Zea mays
  Coding DNA Sequence Number=SeqID_40923
MEVGAVGVGSSLGVVMCGQGRWSLNAD

SEQ ID NO: 84299 - protein, 91 aa, Zea mays
  Coding DNA Sequence Number=SeqID_40924
  Subcellular localization annotation: CTP_CleavageSite=30; ConfidenceScore=5.39e-01
MSVGNTPVSTNHVRSNDVAIVRLDRSSRTVSTTVAKWFVPIARGTVDKVYSQQAVSVWGTGLSGGAPDSVRCARLPRPEDAALRNLPTAYG

SEQ ID NO: 84300 - protein, 43 aa, Zea mays
  Coding DNA Sequence Number=SeqID_40925
MTTYRPLELLHMDLFGLIAYISIGGRKISNPRDFKEVLKTGSK

SEQ ID NO: 84301 - protein, 153 aa, Zea mays
  Coding DNA Sequence Number=SeqID_40926
MWTPSSDAGVPPRTHLEDENPSLRESTGGAKRRTHDGAGVTRGHQVVELKPTEPAGSAAINGREPASDPVFLSEAIPGVADGLPQGPTRGEGHGAGGTCAVEREGEAEASRFWDVYYWDSYWVISYLFTYRALGQRATKRGSDLTQAAAVARE

SEQ ID NO: 84302 - protein, 29 aa, Zea mays
  Coding DNA Sequence Number=SeqID_40927
MGDHVSGRVRGKVCGQVHSEIRQIQVLGL

SEQ ID NO: 84303 - protein, 57 aa, Zea mays; identical to SEQ ID NO: 65615
  Coding DNA Sequence Number=SeqID_40928

SEQ ID NO: 84304 - protein, 20 aa, Zea mays
  Coding DNA Sequence Number=SeqID_40929
MAAAAASLLLPAVCLGTTRQ

SEQ ID NO: 84305 - protein, 898 aa, Zea mays
  Coding DNA Sequence Number=SeqID_40930
  Homolog annotation: Hit_ID=A2X5M8; Match level="QueryCoverage=92%, HitCoverage=93%, E-value=1e-84, Identity=43%"; Hit description =Putative uncharacterized protein
MTMKQLVQLVAKPLTPPPPCCSSSSQDDEDDDVVRQLVMGRWRSSLSSGLRAALACTIVGLVSLYAPDALRRHITFPAFSYVVTVILVTDATLGTALRGAVSALHGTLMGAAPSVVALWLAHRTGAAESAVATSAVVALTAFAVALPESVGPVAKRIALGQAIIIYVARRFQPGERPSRGWVLLHPANVVACTALGVAAALLAVLLPWPRLATREAKDKSRTYKVVASERVRVLADAFVVAAAVGVEEADEGCSRQRRWQIAACMSEAKRLASASTTLLSRMNAIKEDLQWEQRAVAVAVEEKDNKGSIEMLLAGMQIALATMQQADGGHGRNINMVGLVMAMRDQIRLALLTPNNKQQSRSTCTPSYQLPATSFDYRNHEQHQRASFLFIFSLYQLHHCCCDGGPKTPSTAATMLPNAKQVAPAATTTTRQKLLLLEQPAADLLPDDEQEEEEEAGQHVEQDDGPSSQAGAATAGEEKATATAAAAATKDKHSRQTRSCRRLVAAAKCGFSLGLAVLLGLLFSNDHGFWSGLIVATTMTAGRESTWAVAVARAHGTALGSIYGVLGCLLMSQQQLVAMDLRFVALLPWMVLATFLKRSRAYGPAGGVAAALSVVIIMGRRYDEPPMAFTIARLVETFIGISCVVLADLVFQPGARPSVQAREQLARCIAALAACSRLVVADPAASSELLKRVQQELALLRKHAAEAGSEPTYLWLPPFPAACYETIQGSLGRMAQLLQLYHQARRYMSVSLSQQQVDVDDDINTIQHRRFSNLASTSLGHCLHMLTAAEGKEANKKPKAQVVVDLEAGTAAACGCCYRDDEVVGSFVAQARELLLNDDDDDDSVEQQQEEERFLAVCCLGSIVLCMEEILKEARRLEAHILDLNNNLQLKSALADIL

SEQ ID NO: 84306 - protein, 823 aa, Zea mays
  Coding DNA Sequence Number=SeqID_40931
  Gene Ontology: Mol. function=structural constituent of nuclear pore; Cellular component=nuclear pore; Biological process=transport
  Homolog annotation: Hit_ID=Q2QX83; Match level="QueryCoverage=98%, HitCoverage=98%, E-value=1e-140, Identity=54%"; Hit description =Nucleoporin autopeptidase family protein, expressed
  Pfam annotation: Domain name=Nucleoporin2; Domain location=655-821; Score=272.6; E_value=7.9e-79; Accession=PF04096.5; Description =Nucleoporin autopeptidase
  Subcellular localization annotation: CTP_CleavageSite=66; ConfidenceScore=5.37e-01
MDPYLGAVIIGAEVTHSGAKAFGQSSTSPFGNNNSFGTPQGFGQSSTAANNPFAPKPFGSPTTPFGAQTGSSLFATTSTGAFGQQQSAPAFGTTSTGAFGQQQSTPTFGTPSSSQFGSSTPAFGASPTPAFGATSSGSLFGQKPSFGGFGSSPSQSSPFGSTFQQTQPTFGTTPAFGTMTTPAFGTSTPAFGTTTAPAFGATTTPAFGSTSTSLFGASSTPVFGSTAFGTSATGFGTSGTTAFGVSSTTTGFGSSSTPSFGTSASVFGFGSSPSFGQTTVSSGSTPFGTTPSPFGAPVPAFGSQTAAPAFGQPQFANQAGGTRIKPYSQTPDVDSATSGTQPAAKLDSISAMPEYKDKSHEELRWEDYQRGDKGGPNTSGTQAVAPSFPSLIQQNAPNPFSTSNPFSTNNPFAPKPAPTITSPFNTSFNNASVTSSSPFTSSPSTTMFGQTANISTIGPCSNFELILLPTSNSTRTPTLSSMVMQPAPVSNPFGMLPAMPHMSIGNGGSSPSVQYGISSLPVVEKLLPSRSLSMAFPRHLAQRRIKLLPRKYNPISDGKVPFFADDEESPATPKADAFFVPRENPRNLVIRPIEQWPSRRETDRQLTVKNATDLNKYEDASIESERGKSASAMSPSSRPPAVENDNQHEARAMAQHGNGNATSVERLLPKLPRADYFTEPSIEELAAKERAEAGYCGRVRDFVVGRHGYGSIIFLGETDVRCLDLESIVEFNNREVVVYKDDSKKPPVGEGLNKAAEVTLLNIKCVNKKTGEEYCEGTRVERYREMLMKKAEEQGAEFVSFDAAKGEWKFRVKHFSAYGLPCC

SEQ ID NO: 84307 - protein, 428 aa, Zea mays
  Coding DNA Sequence Number=SeqID_40932
  Homolog annotation: Hit_ID=A7NW01; Match level="QueryCoverage=52%, HitCoverage=45%, E-value=3e-60, Identity=53%"; Hit description =Chromosome chr5 scaffold_2, whole genome shotgun sequence
  Subcellular localization annotation: CTP_CleavageSite=53; ConfidenceScore=5.58e-01
MARERESMKQRFPSSSTRSKSEAAVQTRASRAPSPKVNPATPGPGPGVKARPRSAAAAAAATTMAATRRQPAVPMPVWKSETAEEEVVRLRGEVDALQKEVQRLLRLNAELRTNHDAAASNRSQPPSKISASGVVVAPPPPPPPPPPPPPPHLKQRGVRFPSAPSTSPASKATALVDMYNSLQASNKPSKRTDKSSSHSSIVDELQNRSRHLLAIKADVETKAEFINYLIDRIHTSTYTGVEQVLTFVDWLDQQLSTLTDESAVLKHFNWPERKADALREAASEYRHINCLLTEISSSLRRDEDDGGSSSTLRKISSLLDKLEKSMSRLVDLRRSAMPSYKELRIPTNWMLDSGMASKMRLASVSLAKLYTKTVLKELDASGTTGNKAALVAQSVRFTYRVHQFAGGLDCEAMHAFEELRRRVQLLSQ

SEQ ID NO: 84308 - protein, 136 aa, Zea mays
  Coding DNA Sequence Number=SeqID_40933
MASFSLSQPGPTATTPETKLGFEGAPTAGSIANAWSWSIANAWSIGSRERYPKEAAAVGIKGALRNSEQRLTISPSVSGLPPSSGMWDEELLLPTPQRDELLPASAEHELGHPREEGEDLEAEEVVEELPLRVMWR

SEQ ID NO: 84309 - protein, 111 aa, Zea mays
  Coding DNA Sequence Number=SeqID_40934
  Subcellular localization annotation: CTP_CleavageSite=70; ConfidenceScore=5.04e-01
MPTRGSLSHPLSHPAHTHVLLSHLAPGRAAAAPPRAVAPLPRHREPRRHRDQVAPPRQGCATATGPASPRAGLAAARLASSPPTRPGRASATAPPPRASPPPCPTALAVRF

SEQ ID NO: 84310 - protein, 894 aa, Zea mays
  Coding DNA Sequence Number=SeqID_40935
  Gene Ontology: Mol. function=ribonuclease activity; Cellular component=nucleolar ribonuclease P complex; Biological process=tRNA processing
  Homolog annotation: Hit_ID=Q2QYZ6; Match level="QueryCoverage=71%, HitCoverage=87%, E-value=1e-113, Identity=41%"; Hit description =RNase P subunit p30 family protein
  Pfam annotation: Domain name=CCT; Domain location=779-823; Score =78.1; E_value=2.8e-20; Accession=PF06203.5; Description=CCT motif
  Pfam annotation: Domain name=RNase_P_p30; Domain location=99-259; Score=93.5; E_value=6.6e-25; Accession=PF01876.7; Description=RNase P subunit p30
  Pfam module annotation: Pfam domain module=CCT::RNase_P_p30; Domain location=779-823::99-259
MAAPLLFYDLGLIASSSSGDGRDGNSSSSRLQLLATTARALELGYAGVALDHHHRGLLADSHVCRTDTYAPLSSLPLPSSDALHRRRLASPASEAFRQYTRITLSLDSAAATASALAPSAARLLRTYELVAARPLTQAAFDHLCQTPLSAQHLDLISIDFSSHGKMPFRIKPPMLKLALQKGLHFEIAYSPLLSTDVNDKRNLIAQVKLLVDWTKGKNLIISSAAHTASQIRGPYDVINLSAYLLGIPIDRAKAAMSTSCRSLVLKAMRKKHFYKETIRVDRLLPNEELSSTKFKLADWIGWNSVSSEGVANQLEPSSNFDEVPGSPVCGIMEGSHEKTHSPDLSVVSKLPEQPSHQEQFPSQTQEDTLQVDRTVVVTDSGQSSIFPASFNYQNAILEKAENNEVFVNPFVQPGAGCSADPEIIVKHVEFVQDTMEVDTIESCRTKLMGDNIASTSDTSTKLACSSLLHGRELSGTSLEDQGPGHSSESLANEKYDMKYHTDCTYGVNDKTLLVQEILSGADIWPEDKDSDGSAGMQVDNEASRGTSESLECPPCGVDDKAPSDLSFYSSHKLCTDVAILPKVVEGKVEQSRDENIVQTVENEAESVDTKTRTSISVEPMSHGQEISSTIHTRNTGASCESDELKEQNSKNTDASLDKSVAKMHELLKFPYPSGKVEMSTIRPDGDAILPSQPDALLAHGGAFLPSRLFCSQQAPAIVPPPIASQLHAIITHSSSSSSSGIMAAAATSSSSFRRTSSTGDLTVLLEEQRGAARYSAEERRERVDKYRSKRNQRNFQKKITYACRKTLADNRPRVKGRFARDGGDYAETTEADATADHHVHAPALPAAAYQPVELEAESPAVRELPAGINVVAELCADDDEMLAAYLGVSSISLV

SEQ ID NO: 84311 - protein, 186 aa, Zea mays
  Coding DNA Sequence Number=SeqID_40936
  Gene Ontology: Mol. function=protein serine/threonine kinase activity; Cellular component=plasma membrane; Biological process=two- component signal transduction system (phosphorelay)
  Homolog annotation: Hit_ID=O48547; Match level="QueryCoverage=87%, HitCoverage=17%, E-value=4e-63, Identity=78%"; Hit description =Nonphototropic hypocotyl 1
MAFKGLPRDSRGSLEVFNPDAPVSDRATTSPFLLPPAAASHPSLLAAGDGGDADVGRATQRAAEWGLVLQTDEHTGRPQGVVARPSGSNRTSESGNSIDERAAAAGAGRALPRVSEELRAALSAFQQTFVVSDATRPDHPILYASAGFFNMTGYSSNEVVGRNWMQVEVSKYTEGFFKDLKLTVGQ

SEQ ID NO: 84312 - protein, 841 aa, Zea mays
  Coding DNA Sequence Number=SeqID_40937
  Gene Ontology: Mol. function=RNA-directed DNA polymerase activity; Biological process=RNA-dependent DNA replication
  Homolog annotation: Hit_ID=O48967; Match level="QueryCoverage=41%, HitCoverage=100%, E-value=3e-50, Identity=56%"; Hit description =Putative uncharacterized protein
MALPVDVAGLRPRLGDVEAPPKPKSSLSSMAEAESEPLGRARRRSSAEARAVSESEPWGRAKRSSSSSGPSPSPGSGEAEFAVFRVLAQVRALGRAERSSPSSGAWLPVSITLSSGAAVGVAQAALSFCQTGQWSGEVTALYADGGYQLRIRSLEGTPNYGPRHGGRNPPPGQGDFLSDKMDVKTAFINGELDEEIYMEQPTGFVANGQEGMNLRGRARTPGTGPGPPVQGSGHAQQGPRTEHAQDLGQDLGGGPVTTRVRTQSGADLSACAAAPRPGRDLTLPRVLLRVTRCAASAFNEPCPFRWQGCAASAFNVPCPLHWQAATRPSRRRKSSAARQCYTGRKYQGTRRWHWRSALVAPRITPIMFLDPHVGAQHPWRVHFATRPEISSSTFGVPGRGLGFEFLLVLLLDIMGHIVEHQDRVPEDFMLEEEAASSTPRATNLPAPGAAAAVHSAQQHTPTQTSRASRAATGALSAARELLRYPPSSTASPGAMKQWRDDVDCLLSMAHFGSTRAKPRSSWRQHEVSASVRSPSVRTAPTGDLWAELNCRRAGEDGPVSLERSNDLRTELNRRRAAPQTTTGALIQAGLPLAGVGCAALEDHLRTAIWPSKFRSHLPEKYDDSSIIIAFRQGVRDEKMLKLATHDVETITTLFALADKCARAAEGRAWHSTPQTGVTKTGGSGAVSQDGKKKKKKKRSHEKPQIAAPIVAAAAGGRSERNKRPRPQGGNSGTCPVHPNSHHSASECRKIIKLAKRVSERHEQSSKDGSPPRRRSGKEKVDDGEVAAGKRELGYQSPEGDLKDIFTGDSDSGDDDDRRKKLYVIYGGSWELTSHRNVKSLC

SEQ ID NO: 84313 - protein, 181 aa, Zea mays
  Coding DNA Sequence Number=SeqID_40938
  Gene Ontology: Mol. function=nucleoside transmembrane transporter activity; Cellular component=integral to membrane; Biological process=nucleoside transport
  Homolog annotation: Hit_ID=P0AFF4; Match level="QueryCoverage=85%, HitCoverage=36%, E-value=3e-77, Identity=95%"; Hit description =Nucleoside permease nupG
  Pfam annotation: Domain name=Nuc_H_symport; Domain location=1-179; Score=38.4; E_value=5.6e-12; Accession=PF03825.7; Description =Nucleoside H+ symporter
MPTVYSESLFVEVTAKFGDSSVLGAELQITNMFGNTFLHSFDKDPMFASSFIVQHASIIMSISQISETLFILTIPFFLSRYGIKNVMMISIVAWILRFALFAYGDPTPFGTVLLVLSMIVYGCAFDFFNISGSVFVEKEVSPAIRASAQGMFLMMTNGFGCILGGIVKVAAVKSTGLRRSS

SEQ ID NO: 84314 - protein, 55 aa, Zea mays
  Coding DNA Sequence Number=SeqID_40939
  Homolog annotation: Hit_ID=Q7XBD4; Match level="QueryCoverage=78%, HitCoverage=7%, E-value=5e-12, Identity=53%"; Hit description =Cinful1 polyprotein
MSEDKKTAAEMKLSLDEEKNLGGGEDSEDRPWRPSHSVYGKSTIKENPSCELERK

SEQ ID NO: 84315 - protein, 198 aa, Zea mays
  Coding DNA Sequence Number=SeqID_40940
RHSAIIHRTVRCTPDSVRCSKEERPPELASLEKMQRLLRYNSPDMSGAFNARQKRAEVRHAHTGAPDIEQYMSRCAPDIQAGPEDRSSNGRNPTALVTWLAHRTCPVCTGLSGAPYDRQPPPTVMFGGGCLSYGAPDSPVHTGHVRCASHVTNAVGFRPLELLSSGPAWMSGDCWREVAVALLVHRTVRCTPDMSGEL

SEQ ID NO: 84316 - protein, 115 aa, Zea mays
  Coding DNA Sequence Number=SeqID_40941
MESREIAAARRGAWRRPFPPPRSELRKLNRSSRDPFSPHLPSSHERLPQKPPPPLFRPRKNRVEISGTQGATRQRGIPRRKHFSAAGRTAPEVDYVKTPLKKSPLLRILVNSRLK

SEQ ID NO: 84317 - protein, 45 aa, Zea mays
  Coding DNA Sequence Number=SeqID_40942
MAHLPVSGRARACGSPARWAARVRFVRWAEFRLLAHPDSRISFRI

SEQ ID NO: 84318 - protein, 634 aa, Zea mays
  Coding DNA Sequence Number=SeqID_40943
  Gene Ontology: Mol. function=protein binding; Cellular component =integral to membrane; Biological process=multicellular organismal development
  Homolog annotation: Hit_ID=Q9FNN8; Match level="QueryCoverage=88%, HitCoverage=90%, E-value=0.0, Identity=69%"; Hit description=Cleft lip and palate associated transmembrane protein-like
  Pfam annotation: Domain name=CLPTM1; Domain location=30-607; Score =972.2; E_value=2e-289; Accession=PF05602.3; Description=Cleft lip and palate transmembrane protein 1 (CLPTM1)
MSQPTAAVAAEAQPQGRGLAGRQGGGGGLGQSISGIVRMAVFWYFAAKFFGPKRPPADPGMLMSNLFQKGEPMVRTPSVILVVSGRDFGSKRRLRSVDVCLSVGSGSAVRDMWMYLSESDKFNDFANDDALIWHETNIPYAVWGPTSTRTRSLTYYPSEALKHNGSLYAHVYFARSGYPVDPTDPEYEQKSAFGRTHPVVAFLPKSKAGKKKSLLGDSEEPEEQAPPKVVIFILCHSENKELEDKDEGPTEYLSYWKPNVTVNLVEDFTRLTDLNVDPATGDYYPTVFFNEFWLLRDKLIALNESVKELPLNLEVGPISMTKWQFFLQIEQSFQVHRSYGSMLEGEADELKRVFLEGNPYLLGLTMIVSLLHSLFDFLAFKNDIQFWNKNKSMEGLSAKSVVLNFVCQLIVFLYLLDNDTSWMILASSGIGVCIEFWKIGKAMHIEVDRSGKIPMLRFRDRESYAQNKTKEYDAIAMKYLTYVLFLLVIGFSIYSLKYEKHKSWYSWILSSMTSCVYMFGFIMMCPQLFINYKLKSVAHMPWRQMTYKFLNTIIDDLFAFVIKMPMLHRLSVFRDDVIFLIYVYQRWKYPVDKKRVNEFGFGGEEEPAAQETLEGSDPAAAAAAAEPTEDKKTK

SEQ ID NO: 84319 - protein, 19 aa, Zea mays
  Coding DNA Sequence Number=SeqID_40944
MADMAMGTSDSIFDGYLLH

SEQ ID NO: 84320 - protein, 74 aa, Zea mays
  Coding DNA Sequence Number=SeqID_40945
MGRPRHRSSSGDVWDEGDYGEGIERRVASSPSLQHLPSEGPVRLSHLVPKTSLDGGYAALARSGSAGVFDMTVD

SEQ ID NO: 84321 - protein, 813 aa, Zea mays
  Coding DNA Sequence Number=SeqID_40946
  Pfam annotation: Domain name=MAP7; Domain location=363-488; Score= -82.8; E_value=0.081; Accession=PF05672.2; Description=MAP7 (E-MAP -115) family
MPSRGGMLVRSPAFTLDLHSRDPAAFVREAEDGAVRVVGRYVPKTEGQRSWDIRGSNDRLNRVFELNRLPYGGYPGQDDVDRRGKKPAAEAGDDPAPAAAPSSKKRKLGTAMGGLGVSDGFARELMRTCAAPGGWWPKNVPIPRAAGEDFFTSRMVREWRVFPYGRNIAAVVSAVMDKDRQGAAQKRQAAVRLPEARPKRSRGTAKAAAPDGSQPTLAAKSAAPRSSRVPEAVKAAAAGGTKSVPAGVAKARELPPPGKRVADFATDISVEDYLVGSGEGQLVVVPPVVATAAAAVVPGARGSAVSAGGEIPALTAVKDEAGAVSRRLKEALSQAADFADRVASGALTAVVSAEVERLRAQHADAVREKSAADSKCRKLAEKVAALEGERTDLQRQLAEERREANEAFAKAQSARAEANLARVEGSLARQRAEEWEERFNALQTRVERAEASTRTEAERTHKQLMDSYHELGARTADFEVPDQEPGLRCLEWLQEELLALPAIVEGFMSYASLVTCEGAMNALSREGCRHYEVFDQADEDFEREIYKVEDPVVKESAGALFDRMWGPHGREVARNEKVEDFGALNSAPPDSESNPVAAVSEVAPAPPPETVEGAPDAPTAPAAGGGSSPTSAPRAEDPVKMAAESAAEDPTTAGSSQVQDFGPAHATATANFLAALTVDDGNESDESASKFSDFGDSGSSVEWTEESSDEDLDYFAALDVAAAETSPRAVDAKVVPGLSAGRRRRRAVAKRRVSEADGGRLRVGRAGRQELLSLPAVASVGEGELRSLFAGKEMRIMLFNYREMGIIPKVEPM

SEQ ID NO: 84322 - protein, 253 aa, Zea mays
  Coding DNA Sequence Number=SeqID_40947
MKLWKETSRSSKTTTSSRCGLAATPQSVACEGRVIYVSFPHFDLLGLPHPGGLGHRSPPHDEWAGTQAKDLQQPQQVRQAMYEGTPLGGLESKDDAKPSHGLHTVFSSLWGRGYLAHRLRIRLPEDEDIRRPKQPDQPRRLIGPAGRGSGHGLTTLGVVSVVPATLPRPRGSVPRPPGGRLGASATTRRPKAPQAHTSLGRAIHHRQDFEARNIQAGQQSSRGLQQRLEHPTATSLLPLRCFQVFIYLVYIHK

SEQ ID NO: 84323 - protein, 180 aa, Zea mays
  Coding DNA Sequence Number=SeqID_40948
MGPQVPVRVNPQVSFTNRRKDGGLRDGVGTEVVQLHPIDVQNRPHKSACRHSKSPLVKGNEAHHIPRRRGRGGSARKGHPLRLRVTGEGEANPQQQGPPGTGKGDTPKGILLREGSGPRAPLLIRGSKAGPSEGFNSRLRTLGLHAHYWSEVRRLAPRKGSTAASGHSGSAPTTDQGFVG

SEQ ID NO: 84324 - protein, 128 aa, Zea mays
  Coding DNA Sequence Number=SeqID_40949
MGVPDACALWRAFIAVAGDRWREVAVVPQLHRTVWRAPLRPALTLTGQPLSLSSGELNSARHCRQSFGHRGQSTPAILKPDSSPPSSIPTCARGPTDSGHLRRRPAHRCDPRDLPYVLDHFTGAISPL

SEQ ID NO: 84325 - protein, 342 aa, Zea mays
  Coding DNA Sequence Number=SeqID_40950
MGGARVAFVLLSLEERNFAEVGTFQPSLGFKDFHQVARLHPLADASRIFIILAGEEGEASRGLPSRGLASRFFLRLLGVETILQLCGGGALQPCRGRRTAAAQSRVQHSVLCPGDGGQPHQGVSQHVVHREGGTHVLGRSHSRFRDEDGSEDLPVRFGAAGARWCDVGGQVDAAAGAEVVAAGESFSADETVSATRGSTSGSLALMSGSRPSSGDTNESLSAVAFVLGPSLLLQRSLASHPEFVVPQALRCGGCLYPREWNWSSVCNGTLSAVKENPRLLCDEPEPEAAVSAWTEAESARKGNFIGPGAGGDPPTVSPSEAGSDSTEGGVDVEGAAAPPTDV

SEQ ID NO: 84326 - protein, 309 aa, Zea mays
  Coding DNA Sequence Number=SeqID_40951
MEARAHMSCNRRNGYYVQGNRTATRANAASTRLQNQCHDSRQPCADQERGYSEKDPSQRRKRAPSRPTDQGGSKASPSEGFDSRPKARRVSGNDFVTESHRREALSPQALSNGSGSGKSPAGLGLSVGLGRRSPPRPTPGLGLSLGLGRSHNLTRPQPRPQEKSPPRPTWASDRLHYRGYIITLLLASCLRLRMNKTGVPSKVTPTTGNDGSPCVPMTSDHSQPPTKTRKRQQDPCRTDNCASTGLKALLRRPLRPSTAGLSSSQSTRDTFEDVPHDDDDEHDDSSAGAAGQEEIGPSQLQDAPTTQPS

SEQ ID NO: 84327 - protein, 127 aa, Zea mays
  Coding DNA Sequence Number=SeqID_40952
  Subcellular localization annotation: CTP_CleavageSite=60; ConfidenceScore=5.23e-01
MEWSRTEDGVGLRRSWIRASPGGKASNPGSLSRRTRRRAAVADSFGAGRGKQGSGRGRLRRGERKAGQRSRTASGDGGRDTSLAGAGLQGRDGAGGGGIAERKTAQAGAGAGARASTTGRGYGPSTA

SEQ ID NO: 84328 - protein, 70 aa, Zea mays
  Coding DNA Sequence Number=SeqID_40953
MEDEHHMEKDHQTAERTKEEHHRIYMEKDHTDSGNEDGQENPPNDDGREKDHRKRSTHQQGFRDILEIAR

SEQ ID NO: 84329 - protein, 89 aa, Zea mays
  Coding DNA Sequence Number=SeqID_40954
MEHGPASEDDDDGGLVHGDLTTSNMMIKNSNNQLQTYVGNSTDLDDKPDGENPCGVQKGFEAMVFHPEQAGSRYGMVLLAPVAAHGLRC

SEQ ID NO: 84330 - protein, 49 aa, Zea mays
  Coding DNA Sequence Number=SeqID_40955
MMGDRYIEVVEAYQVDTVEGKGRGEHTCSLLEKDTMKTWASGGDIGSIR

SEQ ID NO: 84331 - protein, 139 aa, Zea mays
  Coding DNA Sequence Number=SeqID_40956
MEIEGFVRDYLCPRTKLHSSLRDRSKLMEQMLVNDSLQAKMRRRRYSGENGSTENSPKEQGKQSRARLRWLPPCDLEWSGGLEQSDAASRERVGVSDEQGAGRREQRAMPRAGSGVSGERCRERSGTANPSHFLTLSDG

SEQ ID NO: 84332 - protein, 194 aa, Zea mays
  Coding DNA Sequence Number=SeqID_40957
MDKNQNLAYAPYIMALIKAKTRFEGPCEIVHTPFRPFKNEIGFLTRPLTPFPDDEEDPGYNAGAAPDVEAAHMPPPPPPPQSQQYWQPGPGYFEPYFHNMHNWDALNSEFSDFSDHIQTTVTDPIMTRLNNMQHSFQDNMGALSSQFDNLSTNDSMHDISQRQQQLQQDFGQFSSLFDTFSSHYYNMHPPPSDQ

SEQ ID NO: 84333 - protein, 56 aa, Zea mays
  Coding DNA Sequence Number=SeqID_40958
MVVEGEEWGRRLRPGRGDDSDDGEGAGVERLGEGEGEGAAVGEGVAASGEGSGCGA

SEQ ID NO: 84334 - protein, 316 aa, Zea mays
  Coding DNA Sequence Number=SeqID_40959
MEEKHLHVFDTFCPRQSTLARALACTAPRPSQASAMARARAYKTLPDLDCTLPRTLKPHRSLARRRLLVRSESAAAQSLCHRRPASGAIPNSVQPPEKTVHTSVKLPEQGIGVCFAGEASPRSPEFSTPPEYVDRVNHSTILRFLVHTVAMLPREAHHALGLNQFAVVWPVYSPPTRTPACTRGPGDSGHPRRQAVPRRDRQSLPEPTPPFAGPPSPPTYPLTRPETRSPIPVMVGTSAVTARRPVGVSGALYAKAVSPDLLPGNQWGRLMCVGTECPYMSCSLEEMVAGITWPSTLPPGWTVEWDPASAEEEHEE

SEQ ID NO: 84335 - protein, 447 aa, Zea mays
  Coding DNA Sequence Number=SeqID_40960
MESHDLRAERESRLVGKVRNLCRVFETDISAVLAVMSGQGSSSGNEIDGSGYDYGAGKWYSFRLERVVSIATTAQAKMKLWKETSRSSKTTTSSRCGLAATPSRLPVKAAMARLRHTARKSVIPFLPSRLAERPLRRPVAGQSSHLERLHHRLHEEQERRRQEQQGSSFSLQQEIESVRSCSPVLPLEAPPAPPLGAPASGVAAGGDPDDGGGDDSSSHDTDFSANHEPEGWVARPITRDAARGCHFHDALDTLLRRALNRHTWSIEYRCVVYQHSRGVYPDRWEATCLVRRSENSLQGAEACSEHYSISERDSAETAMQDAARRALSHYCSVFGGVADGLDLKYYPRCPSGSTGGVIVSPVGEGNPRLSSTVNLAAVLNTELDHALDELSRARAEIALLRAERAERRHLDGGSPAPVGTQHPYRSPRRGHQSYGNPDCKTKITLEP

SEQ ID NO: 84336 - protein, 99 aa, Zea mays
  Coding DNA Sequence Number=SeqID_40961
MNVCELTLAVSHPHRSRTAILAIAICPQLGWQLQEEGQRRPTSSRKEKEINLDMEEYESNQDLEIIQDSPPKMKSFLIILILATTYTCHNRTSSDLIDG

SEQ ID NO: 84337 - protein, 130 aa, Zea mays
  Coding DNA Sequence Number=SeqID_40962
MGVRVGGVESLESSASTVPAESGGGRGASRDHVERVQIVLGSDYLLAWKELLTIDHGRPWNRRAPWAELESLDRSGKAGAPLQPVIDEMLSWLFLRGRCRQAGEETVAEDPGVQQIEVAEHELIEGKLCP

SEQ ID NO: 84338 - protein, 107 aa, Zea mays
  Coding DNA Sequence Number=SeqID_40963
MARTKTTQRKSTGPQGVPQHQLASRHEGSSSGSNDPIGELMARVDCLRSELRHMPSQTHAHDGTVTSCGGEDTPNLPPVPPTLVEAIAALVNATAANMRFLREMAGN

SEQ ID NO: 84339 - protein, 126 aa, Zea mays
  Coding DNA Sequence Number=SeqID_40964
MRRSHGVPWKEAGRGAEYRGRGAGRNDGWLGELGRRERLLPRVPMGGGACCRGRGKRSLLLVRALLAPHWPPWAAAIYWPAAAIGTEIGAQPLVGCWQRQTACATRWRCGVRARERKQMLMKFVRS

SEQ ID NO: 84340 - protein, 140 aa, Zea mays
  Coding DNA Sequence Number=SeqID_40965
  Homolog annotation: Hit_ID=A7PWT7; Match level="QueryCoverage=49%, HitCoverage=56%, E-value=6e-10, Identity=51%"; Hit description =Chromosome chr19 scaffold_35, whole genome shotgun sequence
  Pfam annotation: Domain name=Auxin_inducible; Domain location=27-119; Score=3.5; E_value=1.7e-05; Accession=PF02519.5; Description=Auxin responsive protein
  Subcellular localization annotation: CTP_CleavageSite=56; ConfidenceScore=5.52e-01
MNRFKNVVLRKCKSLSSRVGRPPSASPSYRYSSLRSMSMSTRRDAGAAAADADEATAAAVGGGAAAVIVGSSRRRYVISAEHLSHPLIAALIDDDERHKEPVAVNCEVVLFDHLLWMLDNAVDLHDDDDAMRELAQLYAC

SEQ ID NO: 84341 - protein, 207 aa, Zea mays
  Coding DNA Sequence Number=SeqID_40966
  Subcellular localization annotation: CTP_CleavageSite=46; ConfidenceScore=5.47e-01
MAQGDMLIQNDIQNTRGASKRISRTVSSRLPRGEAARRVCPSLTPRSSSTAATGCDKWYQSFWSSAKTVINDGVLESPPDLMNFLGSIDPCDERQSGLRELWNDMYCCVVEPTRWKKQDKGDNLLVALNRAWAELLKNNGWANPRSREGERWWGLDGQGDKGFDYPMFDEMSAEEMVWDAEVLLGCDSGGLCEREIGSHIFLNDFGG

SEQ ID NO: 84342 - protein, 478 aa, Zea mays
  Coding DNA Sequence Number=SeqID_40967
  Homolog annotation: Hit_ID=Q6BTJ4; Match level="QueryCoverage=39%, HitCoverage=25%, E-value=3e-07, Identity=31%"; Hit description =Similar to CA1621|CaIFF6 Candida albicans CaIFF6 unknown function
MAERYQLPRSCVPPTTRGKDCGCSPSGGSEGGKTRCIREREDMVAFQGGHPPFKGDSPYLRPQPSRAESSPTRSKVLLLRRGGWVPRVMQAGPEQKKPNRRARCMQLPSGYEHSSTFAQTSGSSGHVVSQAHVASWDSERTLSHGVKTTRPCSVPRTARARATAAPQTTRPIALTPRRDRRRLWQEKRATLRLRHNDRVKKGPGKGDTPKGILLREGNGPRAPLLIRGSKAGPSEGFNSRLRALRLRAHYWSEVRRPAPRKGSTAASGHSGSAPTTDQGAACAALTAVPLDRVRLTVAKSDLRRHRNLRFARPQGSDSGSALEDDELRIARPQGSDSGSAPEDYELRIARPQGSDSGSAPEDDELRFARPQGSDSGSAPEDDELRFARPQGSDSALASADGLRLARPRGSDSTSVSEDRLDLDLGGASTSPNLGLRPTTSQEAPSLPYPKLTQATGNKVGVPSGSLYQTCNDDAPHAL

SEQ ID NO: 84343 - protein, 172 aa, Zea mays
  Coding DNA Sequence Number=SeqID_40968
  Homolog annotation: Hit_ID=Q8W0Y2; Match level="QueryCoverage=15%, HitCoverage=1%, E-value=3e-07, Identity=100%"; Hit description =Putative gag-pol
MALLHSVRYQQSLRRYHARGVRSRDLQARILTVEGSSSTLGINYTFGEARPSLGRNPAQADGSGRSPRSLSQLSPEGIGSVCGLGNSTPTSVPPVDDPARLGRPNLLFEANFAFVRADTTTSGFGSSKSDRGFPLTKQEKPRTARPTEPRDSYASGIRIPHSSPSHEVTHAW

SEQ ID NO: 84344 - protein, 264 aa, Zea mays
  Coding DNA Sequence Number=SeqID_40969
  Gene Ontology: Mol. function=nucleoside-triphosphatase activity; Cellular component=endoplasmic reticulum; Biological process =carbohydrate metabolic process
  Homolog annotation: Hit_ID=Q8H6B2; Match level="QueryCoverage=77%, HitCoverage=38%, E-value=4e-37, Identity=51%"; Hit description =Bromodomain protein 103
MDEEMQTETHMHEGLLKQLAQGGEALKESANKDDVGDDVVALRGEEAPEESTMKDSDVEDEASRPHPPSEVMPNDSLLVDEPDEGPAMPWMHSGRGAMPWLMGCLDMHGPTAWGLSVGASGWGHQGGISTSLMPRVQTIVPSSKGGADIQPMQVDENDPPPKKLKMKLAVSCVGYCGADLKALCTEAAIRVFRKMYSHVYASDDKFSYENVKGSTPVLYILKDMNEPSIFNGPEVLITKDAMHYGDVEHREMHNIYGYYFHMAT

SEQ ID NO: 84345 - protein, 438 aa, Zea mays
  Coding DNA Sequence Number=SeqID_40970
  Homolog annotation: Hit_ID=Q2QMB7; Match level="QueryCoverage=59%, HitCoverage=73%, E-value=1e-26, Identity=35%"; Hit description =Putative uncharacterized protein
MRGGGGVGGRDAAAAAGGKAGPGAGAGADFEFLLGGCAAACSMLPADELFSGGKLVPLRIPASTDETAAGAEAEVAAQSTLPPPPPKQEQQQQPETPRAAAEPKVPARRWRDLLRLRKQQASPGAAADPRPLRRLLRRGPKPPEPEPSLSLPLLREPGPEEPNVTTKATEKTASSQHQSLLPPKIRLSAPQQQTSAPPPAPPPPPPSAVAADSPRLNAAGKVVFNGLGRSSSSPSSLAGGRRHRSGSAGAMERSYSAHVRVAPVLNVPVCSLRGSRKSAAALGIDRLFAPSSSGAASSSAGAAKKNRAAKKDVGPGAHRLSVRECGFVLRRRGELLIAGGSSPRAPAMGCFPCFGSTREEELKYYGTKGPDGGNGGGGRATASSSSSAAAGGGGGRVEEAVVAPPRAQRGPADLPPDKESLDWNTRMKIAAGAAGVPA

SEQ ID NO: 84346 - protein, 252 aa, Zea mays
  Coding DNA Sequence Number=SeqID_40971
  Homolog annotation: Hit_ID=Q6QP51; Match level="QueryCoverage=46%, HitCoverage=49%, E-value=1e-07, Identity=38%"; Hit description =Putative growth-regulating factor 1
MAAADERKRRSNRLQAHVPSWSSRGALSHDAKQASFHRRHDDRVKKRGWERGYFERDPSPRRKRALSPPTDQGLAPQKGSTAASEHSGSALTTDQGFEGWPLGRERFCNGIPPEGGIEPSDPIEQENSAARPSPTVVPPARVRLTTAKFSLRRNRKLRLARPWASASRGGLRLARPQGSAPASALEGGLRLARPQGSASASPDPRARPQPRPQEESRPRSTPASASGGVSASPDLGLGPTAPRRMHHYPTPS

SEQ ID NO: 84347 - protein, 249 aa, Zea mays
  Coding DNA Sequence Number=SeqID_40972
MPGGHGPALQSPNSPLYKPIHDKGTTANQQEAEKDELDTSHVEAGSSVKLNPGGLVDPSCRHQRRGRLTRPREVVSGPRTKEWAQAQAGSLPRPGGKTATTACGHRQHRPRHEGAGHPGHDMGWLASLGHAREPRWDTRPCVGNAASHIAGGLGQSNCCRRTVARDVVGGVARAWPGLLARLPRMAGASQPARAVARACRARAPRPVLACARAPWWWPSRVAATAYSRARVAVAAACSRHGSALLRPAS

SEQ ID NO: 84348 - protein, 352 aa, Zea mays
  Coding DNA Sequence Number=SeqID_40973
MAPPWVLSPLRFEFRKGGKLGSLGQCVWTVDSLDNGRDEDPLAEESGVQQVEVAEQELVEGKFAHPHATCLDYRNPSARAAPILHRARDCLAPPAAPCAQPGRTRPAARRDIDRSSDPSRGPTPRRGPQPRDPGRRVPRPIAPLHARSTHARTEQHSPEPRLQDRHPKPRRRDTAVSSPVRFLFASNGVYCRPFSHPPHYLHSSSMNAIHGSHEDRPPFHPPGAPLSPSPPSINWTPSSSFSSPTRALFLPKLPLSLSHSPTPSPEFVYVVIVRLAVRGTSPESTPSRTEFAHVVVVCLAVRGDSPELAVPHWRRAQTLTDDYVVPCPSNTLPRRRSSKTAVHPKVENNPKS

SEQ ID NO: 84349 - protein, 403 aa, Zea mays
  Coding DNA Sequence Number=SeqID_40974
MHRALPPSEPPDGEHPCCLCLAAVGGARPRRGWHPSAIARLQGFSSCSPAAFPHQWSSRMMTTSSMVGRSKPGCGLCPTLSFKDLHHPCCGGGQAEPEFYLPHGPVGRLFLQHSGERALTGLAEGANFDNAGPVGRKRRQLQRAWLAGSAGSVAASDAASCRLIRAWPSVHRTGGRCAGRTGGPSKTSHATRAAFVFLDCLVLTQARRLRTEAGAAARGGFSADETVGAARGQTSGSLALTACPRPSCGDVGEGLPTTAFALRSSLLLFSRPRRRSLSLLLQWLSASHLELVIPQALWRGSCSYLREWNRSSVCNGTLSVGASLAQFENLRLLCDELEPEAAVLAWTEAESAREEASSAQERVASQAEEVQQRRLEPGQVIRERDQPRSHAAEAVSRADVLGG

SEQ ID NO: 84350 - protein, 213 aa, Zea mays
  Coding DNA Sequence Number=SeqID_40975
MAVVVAAALRGKEYHVVAIVEGHELETPKTEQHPGLKRLLETTHLELNEKLFVNTQQAPTWRTNYRRFDPGGSLDRRVKLSLRVPAQMGWREMEHKGENAARVILRQGDALAVGVTSVRARERGREVPEPCVHANVAVREVLEPCVRGIVAVGGSLEPCRSTAVGAAGTLLTSPCFRRGLRTTVVMDARGEPSLLVTGASLDGMLVLFPRSLS

SEQ ID NO: 84351 - protein, 227 aa, Zea mays
  Coding DNA Sequence Number=SeqID_40976
MVGEHAAPDLALVLSLDVPESKAKNLAVATETTTSHAEAATDPYEGLDEDITDIDIEEDNIIICPTKPSHVDFRKSKIKEGHIEVLTRLCPRLWSYPSLRRLPRRRCKGQGYCCNNCSDQGYYATYCSFGDAKKPEGPNSAPTTIPLAVMMAKERTHSTKPAMVHDKGKEPIEIEEAKKAIEDDTPLGEGPFDQELGGRLLGTCSQMLRIKNKATQKMLSVKALRPP

SEQ ID NO: 84352 - protein, 84 aa, Zea mays
  Coding DNA Sequence Number=SeqID_40977
  Homolog annotation: Hit_ID=Q7XBD4; Match level="QueryCoverage=88%, HitCoverage=7%, E-value=9e-09, Identity=47%"; Hit description =Cinful1 polyprotein
MADNIGFPKLETILSTMPSKDFLDYLAYTQLKGPIMSKALKNRRNIESEAAKKEILKLRSEVYGLCFDCEEKEKSFKILEKDFI

SEQ ID NO: 84353 - protein, 125 aa, Zea mays
  Coding DNA Sequence Number=SeqID_40978
MESHDLRAERESRLVGGNEIDGSGYDYGAASPLQPNRILAEYVDVYSPLLYTPNPPIPRVVSIATTAQAKMKLWKETSRSSKTKTSSRCGLAATPSRLPVKAAVIYVSFPHFDLLCLLLIKGSGK

SEQ ID NO: 84354 - protein, 57 aa, Zea mays; identical to SEQ ID NO: 44635
  Coding DNA Sequence Number=SeqID_40979

SEQ ID NO: 84355 - protein, 322 aa, Zea mays
  Coding DNA Sequence Number=SeqID_40980
  Subcellular localization annotation: CTP_CleavageSite=54; ConfidenceScore=5.40e-01
MVAPPPPAAGKVTGQARMLLFRHGGKTSSIPPPSGGLTVVVVVVARRRKEHHVVATVEGHELETPKTEQRPGLERLLETTHLELNGKLFVNTQQAPTWRANYRRFDPGGPWTDEADALAVGGYKRSRGREREPVRQPVLPRGHLLARRRPSSEVEVESERWGRARRRPSSEVEAGAEPRGRARRSFLWRLRLDSAAVSLTLAGGTAVGAGQAALFSCQAILALNAPAIRSVGEAIWPRLLHCEACPSWASSESKAFAACADGDYQPSLGILGVGLPEPRQLLGSLLPDGVPPGSEIQAPPAIFRRPCARADRSALGSGLSGR

SEQ ID NO: 84356 - protein, 323 aa, Zea mays
  Coding DNA Sequence Number=SeqID_40981
  Gene Ontology: Mol. function=phosphodiesterase I activity
  Homolog annotation: Hit_ID=Q69L73; Match level="QueryCoverage=80%, HitCoverage=76%, E-value=3e-79, Identity=84%"; Hit description =Phosphodiesterase/alkaline phosphatase D-like protein
MAATFALLLLLILSSSVRAAPDAVVSRIAFGSCANQSEPQPIWNAVAGFDPQVFVWLGDNVYGDNKRPFRVFGRERTVGPWKNVPRFYPSTEEELRRRYQLARAQPGYARLRERAQVLGTWDDHDYGLNDAGKELSGKVIAQRLMLDFLDEPEDSKRRKQAGVYASYMFGPEGKRVKRPGVLFISGDVHFGEITRFDCGAEYPSYDVTSSGLTQSVENSVPEVFQPLMRLLAILTPTTMRVLSPNCQYKSCQPNFGAIEIDWNAVPPRIKLELRDVEELPWLTRYRLALMLFVIIAVFAVVVVMLAIACLSNFTKSSKKSKKE

SEQ ID NO: 84357 - protein, 138 aa, Zea mays
  Coding DNA Sequence Number=SeqID_40982
MGRRETEREGGKKPEGDRRTRGKPAAFVFVPRPGRVLSAFRDRGVPKPTSECSACPSPDGSSAWASAKGGEARRPEPSVREVEVPRPSCSSRAQVSRKERIQVYNGDVAECYVSSGGRASALGTCQCGSRRDLGTLLA

SEQ ID NO: 84358 - protein, 552 aa, Zea mays
  Coding DNA Sequence Number=SeqID_40983
  Gene Ontology: Mol. function=kinase activity
  Homolog annotation: Hit_ID=Q6QP54; Match level="QueryCoverage=12%, HitCoverage=24%, E-value=2e-19, Identity=72%"; Hit description =Putative kinase
MELGRRHHCLSGGAGQMGHRSCSLRPESARGRVVMALPVDVAGPRPRPGDVGAPPKLGSNLSSVAEAEPEPRGRSRRKSFGRGQGGVRALGSGEAEFRRLPGLSPSPSPGVGRSGVRRLPGLSPSPSPGVGRSGVRRLPGLSPSPSPGVGRSGVRRLPGLSPSPSPWGSGGAEFAVFRVLARVRALGSGRSGVRRLPGLSPSPSPGVGRSGTGQWSGGVTAVTLALPEARVRIELYADGGYQLRIRRLEGTPNYGPRQGNDGAACDVVGPSPRLGEVEAPPRSRSSLSSEAEVESEPLGRARRRPSAEARAESEPWGRAKQSSSSSGAEPESEPWGRAKRSSSSFGAEPESEPWGRAKRSSSSSGAEPESEPWGRAKRSSSSSGAEPESKPWGRAKRSSSSSGAEPESEPWGRVKRSSSSSRAEPESEPWGRAKRSSPSSGAEPESEPWGRAKRSFLWRLGPGLAAVSLTLSCGTAVGAAQAALSSCQAGQWSGEATFALNAPAIWSVGVAIWPRLLLGEDWASGEPKLCADGGYQLRFRSLEGTPNYGPRQ

SEQ ID NO: 84359 - protein, 304 aa, Zea mays
  Coding DNA Sequence Number=SeqID_40984
  Gene Ontology: Mol. function=molecular_function; Cellular component =nucleus; Biological process=ribosome biogenesis and assembly
  Homolog annotation: Hit_ID=Q69L77; Match level="QueryCoverage=100%, HitCoverage=99%, E-value=1e-130, Identity=71%"; Hit description =Putative brix domain-containing protein
  Pfam annotation: Domain name=Brix; Domain location=49-239; Score =120.7; E_value=4.3e-33; Accession=PF04427.9; Description=Brix domain
MAKKRKHTDAQAETAGAEKPDDSAPARPERTLFGFKDPAPDAVPDSAASRAAVAPFRNREKDVLSMLPHAKKDSKVESKQSKGNALNEMLELRSCSSCLFFECRKQKDLYLWMVKSPGGPSVKFLVNAVHTMEELKLTGNHLKGSRPLLTFSTNFDEQPHWKLVKEIITHIFATPKDHRKAKPFHDHVFVFSIVDGHVWFRNYQISVPHNEIDKVDKGGMDKMTLIEVGPRFCLNPIKIFGGSFGGPTWYENPYYISPNQIRALEKRQKAGKYAKKVKAKVRRKMHEMENTLEPDEFAELWKGE

SEQ ID NO: 84360 - protein, 106 aa, Zea mays
  Coding DNA Sequence Number=SeqID_40985
MAIVQPKPALSGCTGLSGGAPDSVRFSILLLMTPLDITFLYIDLVSREAIDARTPVIPQPNPVELPAISGNGANEILGHGLLEHGLRGCDCRDSRSDPRHQVKIRI

SEQ ID NO: 84361 - protein, 403 aa, Zea mays
  Coding DNA Sequence Number=SeqID_40986
  Gene Ontology: Mol. function=catalytic activity; Cellular component =mitochondrion; Biological process=metabolic process
  Homolog annotation: Hit_ID=A7P647; Match level="QueryCoverage=28%, HitCoverage=30%, E-value=1e-39, Identity=69%"; Hit description =Chromosome chr4 scaffold_6, whole genome shotgun sequence
  Pfam annotation: Domain name=ECH; Domain location=27-152; Score= -55.4; E_value=0.008; Accession=PF00378.11; Description=Enoyl-CoA hydrataseisomerase family
MPRLAAAAAVSRRAGEALRRGAFGGLRPLSSLQPLNAASSDEVLVEGKTSARAAVLNRPGYLNALTTTMVAILDGITMGGGGGVSIPGTFRVATDRTVFATPEVHIGFHPDAAASFYLSHLTGHVGEYVALTGEKLNGTDMIALGLATHYFMSGHLDLIDERLAKLVTDDPSVIDSSLAQYGDMPVGAVSPHPATTVLAYPSADSLLPTSVAHLLPAGLLPGAIAIDVALDLFPAASTTLSVGGFVPNPHTSELVCSRPVPLAPGFVPPPSVPCAAPTLTMAPLPLAAAFTSVGHLTASVVNSMPTDSLPTGAGASAPFATSTAAGTSALYFASTDLLSTAAATLQVDVSPATWTASSLTHASVLGPAPMAALGTSTEVPPPSVPLDPPKSATPAVHILLHDG

SEQ ID NO: 84362 - protein, 266 aa, Zea mays
  Coding DNA Sequence Number=SeqID_40987
MALRKLCDDGGPRLSYGSRTTTLLHPHCTPGSSPYDYKRKDQGLLRGGWPRGTEDGTGALLGRSLPSPAWTLVTPLLQAHLTWARDEHEGRGTYTSLTLDSGHLASPPFALAHALDPSGLGHAAHSLVGLGTPLSRNADRGGANFACGGLGRPVRGTVAGVRGGEAAGAREGERDGGDGELRRASMMAGMEQTATRRLGQAEDEGTARAQWRGCRGGWRALMARRRGEGCSAAIAPGEGWAREKELTGGVGLPVREVRARERGAGC

SEQ ID NO: 84363 - protein, 147 aa, Zea mays
  Coding DNA Sequence Number=SeqID_40988
MARKKDREDYANALWTRGSALRERKTGWWLQPPTANTARSWDVRDIPGRMKMSSTQVTHDDQWAPKRSVRTGSQRGCKSVYDAWVPRGSSSGGAHAEELADMWVPPRSGPAGTHASPTGADGQGPLGSADACSGLRWIRKGKWAKTW

SEQ ID NO: 84364 - protein, 77 aa, Zea mays
  Coding DNA Sequence Number=SeqID_40989
MRFVGIFDSVLLVFPTSFRQVNLLCVFRAPEGVRRGCKIYADEGQMEVLERYDNATSRVVNKLSVDEFIRDTPDPAL

SEQ ID NO: 84365 - protein, 367 aa, Zea mays
  Coding DNA Sequence Number=SeqID_40990
  Homolog annotation: Hit_ID=Q6J9V9; Match level="QueryCoverage=35%, HitCoverage=36%, E-value=7e-13, Identity=40%"; Hit description =Putative uncharacterized protein
  Subcellular localization annotation: CTP_CleavageSite=41; ConfidenceScore=5.58e-01
MAAAGGRRQQSNRLQAHAPSWSSRRALSHDVKTKRPCSVPRTAHATAAPRTTRPVALTPRQDRRHLWQAKRATLHLRHNDRVKKGTGKGDTPKGILLREGSGPRALLLIRGSKAGPSEWFDSRLRALGLHAHYWSEVRMLAPRKGSTTASGHSGSAPTTDQGFEGWPPEGFDNRLRTRRARDDSGYVRYMAEARATLPRGPGTALANPAPAKPLTASTYQPENSEPDHAPGLRPENSAACPAPTAAPLARVRLTATKSSLRRHRKLRLARPQGSDSTSASDDGLRLARPQGSDSTSTSDDGLRLARPQGSNSASTSEESPPRPTSGSDRPRRRGPLTEARRCQQGPDSSDSCAPTGLKRSSDGHDIT

SEQ ID NO: 84366 - protein, 210 aa, Zea mays
  Coding DNA Sequence Number=SeqID_40991
  Subcellular localization annotation: CTP_CleavageSite=56; ConfidenceScore=5.47e-01
MASSDEPDSRSKNPAMQPSSPLSSEYAFQGTSPAWPARSPSIQFVSNVVVGDGDAVAASLSACPSSTASSSRGSSSDIEIQVLFQGGDDDDGSTTTSPAAAWSRSTSFRGCSDGELDVEAGRSRLLRAHSSVRSVEEFIQRDCTGELRWSALEGGLQFASKSRSNAALLDVFTHETKKNSYSLSSRYALHSTHTVVRLSVTMTKLAKLLK

SEQ ID NO: 84367 - protein, 625 aa, Zea mays
  Coding DNA Sequence Number=SeqID_40992
  Gene Ontology: Mol. function=oxidoreductase activity; Cellular component=integral to membrane; Biological process=electron transport
  Homolog annotation: Hit_ID=A3BUB0; Match level="QueryCoverage=90%, HitCoverage=77%, E-value=1e-129, Identity=40%"; Hit description =Putative uncharacterized protein
  Pfam annotation: Domain name=FAD_binding_8; Domain location=396-498; Score=85.3; E_value=1.9e-22; Accession=PF08022.3; Description=FAD -binding domain
  Pfam annotation: Domain name=Ferric_reduct; Domain location=197-355; Score=135.3; E_value=1.7e-37; Accession=PF01794.10; Description =Ferric reductase like transmembrane component
  Pfam annotation: Domain name=NAD_binding_6; Domain location=470-608; Score=103.4; E_value=7e-28; Accession=PF08030.3; Description=Ferric reductase NAD binding domain
  Pfam module annotation: Pfam domain module=FAD_binding_8::Ferric _reduct::NAD_binding_6; Domain location=396-498::197-355::470-608
MRVRTSELWQAGSWHWENQATQLDRSKDEGENESYSSTIYPLPDNYADQPELFTQAYLCSCDRNSTSRITGKDIKQAIMFSASLNKLTLNQDEATEYTNLILEELQTGQGVLQMNVMSKGLSRDLQPTCGPIPVPMKCSRQRHILTATVVFFQAHWRRIFVVFLWLMACAALFTWKFMQYRQRLAFEVMGYCLSTAKGAAETLKLNMAIVLLPVCRNTVTWLRRSRVINSVIPFNDNINFHKLVAAGIVIGVILHGGIHLACDFPRITRTDKAFFGRTIAADFGYHQPSYLEIVVSTEGTTGIAMVVLMFVAFLLASSPSRRNPGMLPPLVRQLAGFNAFWYSHHVFIAVYVLLIVHSMFLFLAKDVAEKTTWMYVAIPVVIYIGERMFRMVRSMVFDVKILNATVYPGMVLALKVTKPPGFRYQSGMYVFVQCPEVSKFEWHPFSLTSAPDDDHLSIHIRSLGDWSYQMYDVFQQGHGNLNYHSDRLKKAYFYWVTREQGSFEWFRDIMKEVSVLDSKQGVIEMYNYLTSVYQEGDKRSMLISAIQALHFARHGIDIISKTPVHTHFSRPNWPRVLHGLARRHIGERIGVFYCGPDDLGRQLEKLCHKVNTKTFTRFVFHKEHF

SEQ ID NO: 84368 - protein, 435 aa, Zea mays
  Coding DNA Sequence Number=SeqID_40993
  Gene Ontology: Mol. function=flavin-containing monooxygenase activity; Cellular component=intrinsic to endoplasmic reticulum membrane; Biological process=electron transport
  Homolog annotation: Hit_ID=Q336T9; Match level="QueryCoverage=93%, HitCoverage=87%, E-value=1e-142, Identity=63%"; Hit description =Flavin-containing monooxygenase family protein, putative, expressed
  Pfam annotation: Domain name=DAO; Domain location=7-254; Score=-22.3; E_value=0.00032; Accession=PF01266.15; Description=FAD dependent oxidoreductase
  Pfam annotation: Domain name=FMO-like; Domain location=7-407; Score= -251.0; E_value=2.8e-14; Accession=PF00743.10; Description=Flavin -binding monooxygenase-like
  Pfam annotation: Domain name=HI0933_like; Domain location=6-257; Score=-268.4; E_value=0.032; Accession=PF03486.5; Description=HI0933- like protein
  Pfam annotation: Domain name=Pyr_redox_2; Domain location=7-286; Score=-24.5; E_value=0.0016; Accession=PF07992.5; Description =Pyridine nucleotide-disulphide oxidore
  Pfam module annotation: Pfam domain module=DAO::FMO-like::HI0933 _like::Pyr_redox_2; Domain location=7-254::7-407::6-257::7-286
MPSASLRLAVVGAGAAGLVAARELRREGHAPVVFERAAAVGGTWLYTPPATSSDPLGAAATHSSLYASLRTNLPRETMGFLDFPFAAGAAGSPRPPAGFPGHEEVLRYLEAFARRFDLLRLVRFETEVLSVRREDGGRWAVTSRKLGDKGSGEEEFYDAVVVCNGHYTEPRLAVIPVINSYTYRTSTGVDAWPGKQMHSHNYRVPEPFLDQVVIIIGASASAVDISRDIASMAEEIWKLLSTGGAATVSVVANLMLGLQIDHAQEDGTVVFQDGSSIKADVIMHCTGYSDLQYHLHPVSYKSMPFCVNLESDNVLLAFVIPFPLFELQSKWVARVLSGRINLPSEDRMMEDVKAFYLKLEAHGWPKRYTHNFANYQFEYDDWLAEQCGHPPVEEWRKQMYAVTSMNKAARPESYRDEWDDEHLVAEANEYFKKFL

SEQ ID NO: 84369 - protein, 125 aa, Zea mays
  Coding DNA Sequence Number=SeqID_40994
  Subcellular localization annotation: CTP_CleavageSite=61; ConfidenceScore=5.09e-01
MVQPCSWGILLAVLVTAAVVVPPATATVASIDLGSSPSRPYGSGRGTNGVVPLPRAPKLIAVSTGAGARKLPQPCRCFGSDRTPGVAPQGVFRSRTVSTTVAKWFVPGARGTVNNVYRFGPLRDA

SEQ ID NO: 84370 - protein, 654 aa, Zea mays
  Coding DNA Sequence Number=SeqID_40995
  Homolog annotation: Hit_ID=Q8S018; Match level="QueryCoverage=30%, HitCoverage=19%, E-value=7e-10, Identity=27%"; Hit description =Erythrocyte binding protein 3-like protein
MHVLGDFLKHRVMPLQGRPRLCCWFTGPNDIGRIQRGPGTDLTWEQLEIFLRGIIGEAFIPESLMPPQGISPLCDNPGLRSAVLARLPTLDESGVAVRQTGGQDPHRGIHIPGAPVGGPQPADVAPRVPSAGPSSSNKGKGPACSSSTPNTAGRSEGVRRHRLRRADGSFVSDLPLGSDSPQKRQKTAGGAKEADPRVQDGQRGVSPLPPPPSGSTPPPPTSDRPPSPRGQRQQGRQQQQQQRAPCFQGPLLQLLWTLIPLQLLCPPAGPGSQQQTSDGDVAGDPSAATVDSSASVPSPALAVAEEVLAASASTVQGDAGAEVAPSDPQDPPVTAEATPSGPQVPAGVRRWQHCQRLLQTQRRRYLQVHRRWKEVRLDQREEAVTTLHDKLKAYNTVLEKQRDKQAAVEVKLQKLQQELTDKARDIARAEESLKAREASLAKWATDLTWQEEDLAFREEMWARRNKLLDELELEAEERRERLEGKVWELEERVHQFQAAQAAQATQTGSDPQAVEVMRKTLDDLRAEQRIGAQRIAAWAGEASTTLVPLGVSPIPALVRPASISDALPVLDSAAERLRRLDRILGACLEAEGSRLCRSAVEYVLTCFRSHDSAASLGPVIAGPVADTEDAAREGVQDVVDAVVGRFQRDPTDDE

SEQ ID NO: 84371 - protein, 455 aa, Zea mays
  Coding DNA Sequence Number=SeqID_40996
MAERYQLPRSCVPPMTRRKDCGHPPSGGSEGGKTRRIREREDMVAFQGGHPPFKGDSPYLCPQPSRAESSPARSKVLPLRRGGWAPRVMQAGPGWKKPNRRARCMQPSSGYKRPSTFAQTSGQKGGQPCRRHATAPSGRTSPTSSAPSMEAQAHASCNQRAGCCVRATAPPPAPLPRLLDCGTSTATRGNPTHDPAMPAWRDGQCGQKWAGSNGGGRRAGAAVTSRSKRRFAFTITTASKEAPSLPTDQRFEGWPLEGFNSRLRAHGLYTHYWSEVRRPAPRKGSTTASGYSGSAPTTDQGGNDLVTESHQREASSPRTPSIGDQVRQITRRYFWARLWASSRPLANGARTSARITRQQLTGDTMFGALRGQHGGFPLLLAERRRRGVCKKVESIPDHPLALCRGSGAALANPAPAKPLTASTYQPENLGPDRAPGLRPARMRERPDQPKHCARR

SEQ ID NO: 84372 - protein, 144 aa, Zea mays
  Coding DNA Sequence Number=SeqID_40997
  Gene Ontology: Mol. function=kinase activity; Cellular component =ornithine carbamoyltransferase complex; Biological process=amino acid metabolic process
  Homolog annotation: Hit_ID=Q6QP54; Match level="QueryCoverage=67%, HitCoverage=38%, E-value=8e-13, Identity=42%"; Hit description =Putative kinase
MEHRPGLERLLETAHLELDGKLFVNTQQAPTWRANCQRFETGGSLGRRVNVVACPSPDGSSARASAKGGELGDEEAPPKPKTSLSSMAEVESEPLGRARRSSSSSRAEPKSEPWVGLSGVCRLLWLSPSPSPGSGGAEFIVFWG

SEQ ID NO: 84373 - protein, 246 aa, Zea mays
  Coding DNA Sequence Number=SeqID_40998
SDEGQLAIAAAGAAIVTAAIVPRAKGEALGAGGEVSALAVVRDEAGAATRRLKGVTEALSQATEALSQVADFTSRTASGAITAALSAEFERLWTQHADAVREKSASDSKCRKLDDRVAALEKEKADLRRQLAGERREANEAIAKEQAAQAEAKLARAEGNIAKELAGHLQERLTALESRTKGAEAAMRAEAERTRTQLMDTYRELGARTGDFEVPDREPGLRCLEWVQEELQELPAVVGGGGFVTP

SEQ ID NO: 84374 - protein, 108 aa, Zea mays
  Coding DNA Sequence Number=SeqID_40999
MRGGARHPNEQPWGTKEGKRQPWRCSALGKKGPARDELGVGVLPGSFCSCAHEEEKEENGRRLLSCREQAPWTEARLEQARAREKDRASARGCNGGVLGPGRAPREGA

SEQ ID NO: 84375 - protein, 100 aa, Zea mays
  Coding DNA Sequence Number=SeqID_41000
MRGKANCCCLVRVQLFVLHPSDGRAVHRWLLSPVLKWWWPPLVRLPTAAVVASVDGTVSAACAPDLRLFGFNGWFSSPMRGHEQGPFSSSVCPEAIAAAI

SEQ ID NO: 84376 - protein, 53 aa, Zea mays
  Coding DNA Sequence Number=SeqID_41001
MAPKRKTANSSAAVIPAIDPNSQLPFAEHSAAERQGLSGISVSRAGRFNPGYQ

SEQ ID NO: 84377 - protein, 240 aa, Zea mays
  Coding DNA Sequence Number=SeqID_41002
  Gene Ontology: Mol. function=transporter activity; Cellular component= intracellular; Biological process=transport
  Homolog annotation: Hit_ID=Q6Z8I8; Match level="QueryCoverage=18%, HitCoverage=11%, E-value=1e-11, Identity=72%"; Hit description =Putative polyphosphoinositide binding protein Ssh2
  Subcellular localization annotation: CTP_CleavageSite=65; ConfidenceScore=5.32e-01
MEDGAAAAVLIRAAASSAPYRHSAFLSALWAPSSQFPSPATTISDSVSIGRDFSSGELKPPHPLRTSTVVQPSLGGLADSTGCVDRAQDYWTGESCVPWMELLTGSGSPAAAPHHTMVGVVIAKSLVSATFPVLISLTRSIEPIELDDRSPEPLEFLVGVVDGRGAAVPRGQTASIASNLQNTKNVDDQLKYLVYCMENAILNLPHGQDQMVWHIDFAGFNLAGADGLGTSVTPWSLRSA

SEQ ID NO: 84378 - protein, 72 aa, Zea mays
  Coding DNA Sequence Number=SeqID_41003
  Subcellular localization annotation: CTP_CleavageSite=30; ConfidenceScore=5.34e-01
MVVGRLLSHGAPDSPLNFKFNQGPGQVQPVSREVQPGSMESSAGVFFLDLTGQNRLNRSEGRFNRCQGHLTV

SEQ ID NO: 84379 - protein, 113 aa, Zea mays
  Coding DNA Sequence Number=SeqID_41004
  Homolog annotation: Hit_ID=Q43704; Match level="QueryCoverage=29%, HitCoverage=4%, E-value=5e-07, Identity=81%"; Hit description=DNA replication licensing factor MCM3 homolog 1
MTEGERQCYLTCWGHGRPMWYASSTWTAQWTSCHCSTTRRSSRLPPSKAAISHCSRPGSPALGGGWMESQWSYPRHLRQQTVLIANNVSLLNIEAHAPTYTREDLKRMKEMTP

SEQ ID NO: 84380 - protein, 386 aa, Zea mays
  Coding DNA Sequence Number=SeqID_41005
  Gene Ontology: Mol. function=DNA binding
  Homolog annotation: Hit_ID=Q3S4H7; Match level="QueryCoverage=61%, HitCoverage=97%, E-value=1e-107, Identity=85%"; Hit description =Putative wound responsive protein
MAAVASSALHAVGAVASAKPRSVAPGHLVIPAQHYLDTDIYLFVPFFHGGRLMAMEVPVFCRPAMQVKLPAAALINNSLTKSGQLGTALFGAISKYRNISRFISLISQTSTKNIGPCCSFSSSSDGNGYMAGNSSESDEDYVNSTVLEAVEVRSGSEGYVIKMRDGKNLCCVHSNFQGRNIPESAPQPAIVLRIEDGSRTLLLIIVLEMPSVLLMPVIRNVHIARATIYQAVKEMIDKMGYEVKLVRVNKRIQEAYCADLYLTKVNDPTDNTTFDLRPSDAINTAVRCKGFRKCATPKSHHGRASTTLTSPQIDSANITPNPNSTDSANLAPNPDSADIADSTRPPNPAIAQTSPQIDYNLAAHNPVIPDHGPKPRPRSTQTYHRR

SEQ ID NO: 84381 - protein, 67 aa, Zea mays
  Coding DNA Sequence Number=SeqID_41006
  Gene Ontology: Mol. function=binding
  Homolog annotation: Hit_ID=Q71VM2; Match level="QueryCoverage=89%, HitCoverage=20%, E-value=1e-16, Identity=73%"; Hit description =Plakoglobin/armadillo/beta-catenin-like protein
MINKTKIVLLDLLQNSPYSRSKLQADTIENIVTNIASQKNGEDRSDKWKKMLVEIVKVNMEQSRRHV

SEQ ID NO: 84382 - protein, 148 aa, Zea mays
  Coding DNA Sequence Number=SeqID_41007
MKYYLRFVWYLKADEVLIEVLLTQGSDIQPIVVVRVNEMMTIISPPNVGTCSPGQVDPTGKWKECLQSLMWDGNSSIDLASQGHWTGTVITGKALVDNTPKRPSKMKMSAKDSAKSTPPPKAPYAPAAPEAYRKHHLQALLHQRAKTQ

SEQ ID NO: 84383 - protein, 630 aa, Zea mays
  Coding DNA Sequence Number=SeqID_41008
  Subcellular localization annotation: CTP_CleavageSite=66; ConfidenceScore=5.19e-01
MNKNTGIQSAITNGTSVPPPQQQQRPPLRVAELQQRGPHGGCCCNLALAHADARGARTSTKSRRPEARMVAVIPSATGTSRATSTSAPTTGAVDPPADPHSDPPGRVGHRPPRGGAVPVQRQDRPITRTPPWQCAISWAVLPCTRRDSRLPAGGGTGSQADEPDALRLTTPAVDLPRVVEVRPARRASEHPLPRTPKERPTHEPAWEVELRLSPASTPARMMNILEAEGWDQDRSPACLSPSRGWWSPSRVTAGGGKDDGYPPSGGLEGGKTRCIRECEDMVAFQGGHPPFKGDSPYLRPQPSWAKSSPTRSKVLPYGAGAGSHTSCKPSRAEEAKPPRAVHAIAQRLQVALHFCPDQRAKGRAAMQAACNRAKWAHFSDSQHAQHGGGPGKGDTPKRILPREGTRLRASLLIRGSKAGPLEGFDSRLRSRGLYTHYWSEVRRPAPRKGSTAASGYSGSAPTTDQGFEGWPPKRLGGCSRKPGSGRTVDSVNIPARELGTRPYTRATASSHEGTTRPAKALREALRPRRSQTTPPRPRGLHPAGALARTHRNKTQPRRAGPLAKKCDESLQASANTPFEARGLLSGTIIRGTLKAPNSQLSRSDRRHFAAPLTGLTERQRRLRRSDCGAT

SEQ ID NO: 84384 - protein, 656 aa, Zea mays
  Coding DNA Sequence Number=SeqID_41009
MPSSSSSADATPPAAASSEETLSSVMVEELRAGDSVEFGVSRMTSARIEDMQRLGYFGGGVARAPGTEEVPEPEGELVVFEAFFVAGLRLPAHRVFELNQLPYDGYPGQDEADRRGKKPVVETGGDPALAAAASSKKRKLVMDKDRQGAARKRQATVRVHEARPKRQRGTAKAEASGGGKPPLPAKVGASAPGKAPEVTVGAGGAKLTKVAPSVSGVEEAAKAARTLPPPGKRVADFGTEINVEDYLGGSDEGPLALVVPGAAIATAAPAPKAGGGGETLGAGGEVSALAQVRDEAGVATRRLKGATEALSRATEALSQLCLPRSRDFGRNMLTLSVRSRPPTASAANWRRKWPPWKRRRPDLRRQLAGERREANEAIAKEQAAQAEARLARAEGNIAKELAGELQRRLTALESRAEGAEAAMRAEADRTRTQLMTAYRELGVRTGDFEVPEREAGLRCLEWVQEELQELPTVLAGLMSFTSLVTCEAAMNALSREGCRHFEALDQADEDFGRDIFEVEDPVVKESAGALYDRMWGSYGREVVRARAEAARAQAERGERVDDFGALNSALPDPETTPAEAATGVAPGPTPETTEDAPGAPAPAASGEDLPPKVAEGAPDAPAADVPSAEDPAEVGAEAAAEASAEAPAAAGPSQVA

SEQ ID NO: 84385 - protein, 26 aa, Zea mays
  Coding DNA Sequence Number=SeqID_41010
MRLHTLRDDVVLYPQRCLLLIKGSGK

SEQ ID NO: 84386 - protein, 410 aa, Zea mays
  Coding DNA Sequence Number=SeqID_41011
  Subcellular localization annotation: CTP_CleavageSite=42; ConfidenceScore=5.27e-01
MPEARPKRARGTVKAAAPGGSQPTLAAKSAAPGSSKVPDVVKAAGAGGAKSASTGAAKAREFPSPGKRIADFGTDISVDDYLTGSDEGQLVVVPPAVATTVSATVPGAKGSALSAGGEISALTAVKDEAGTMSRRLREASQRLSQAADFADRVASGALTTVVSAEVERLRAQHADAVREKSAADSKCRKLTEKVAALEGERTDLRCQLAEERREANQALAKAQSAQAEANLARVEGSLASQRTEEWETWFNALQARMERAEASTRSEVERTRKQLMDSYRELGARTTDFEVPDRESGLRCLEWLQEELLALSTIMEGFVSFASLVTCEGVMNALSCEGCRHYEVFDRSDEDFEREIYKVEDPVVKESAGALFDRMWGPHGREVVRERSDRARDQAARDEKVEDFRALNSV

SEQ ID NO: 84387 - protein, 331 aa, Zea mays
  Coding DNA Sequence Number=SeqID_41012
  Gene Ontology: Mol. function=hydrogen ion transmembrane transporter activity; Cellular component=integral to membrane; Biological process=proton transport
  Homolog annotation: Hit_ID=A0MWC0; Match level="QueryCoverage=97%, HitCoverage=39%, E-value=1e-148, Identity=85%"; Hit description=H+ -translocating pyrophosphatase
  Pfam annotation: Domain name=7tm_1; Domain location=22-221; Score= -106.2; E_value=0.068; Accession=PF00001.12; Description=7 transmembrane receptor (rhodopsin family)
  Pfam annotation: Domain name=H_PPase; Domain location=35-330; Score= -82.6; E_value=6.7e-21; Accession=PF03030.7; Description=Inorganic H+ pyrophosphatase
  Pfam module annotation: Pfam domain module=7tm_1::H_PPase; Domain location=22-221::35-330
MVIQAFRLLMRVNPRAVIILSLLVFSGVLYVGASTSPILVFVFCICTLSLFFSVYLTKWVLAKDEGPPEMSEISDAIRDGAEGFFRTQYGTISKMAFILAFVILGIYIFRTTTPQQEASGLGRATLAYITVASFLLGALCSGIAGFVGMWVSVRANVRVSSAARRSARESLQIAVRAGGFSAIVVVCMAVFGVAILYSTFYVWLGVDSPGSMKVTDLPLLLVGYGFGASFVALFAQLGGGIYTKAADVGADLVGKVEQGIPEDDPRNPAVIADLVLMFSKTTQVGDNVGDCAARGADLFESIAAEIISAMILGGTMAQRCKIEGKSLLLTL

SEQ ID NO: 84388 - protein, 103 aa, Zea mays
  Coding DNA Sequence Number=SeqID_41013
MGRLEPRAEWESRLVGKVCDLCKVLETGISAVLTVKSGLVSSLIRRTLVMSHPGFRGPKPGREHNHQFIGSSNAWFLPDRHRSKINQGPPYTDHSPTALAPFG

SEQ ID NO: 84389 - protein, 146 aa, Zea mays
  Coding DNA Sequence Number=SeqID_41014
MGKNNKRKREPTPPSEDFGDSEYSEEEFSSESEGSLAPIPLRESSNDSDDSQGLAAEVWTYIRAVERSGLEGSDESEYSSDEEDSSEEDGGGDGEDDDDDDEGGGGGDGDDGGRGSSGGGKGDDGGSSRGGSGGGGSSKGSNKASG

SEQ ID NO: 84390 - protein, 190 aa, Zea mays
  Coding DNA Sequence Number=SeqID_41015
MTGNTSPLLPCSTSDTERAAHRGEDGKADGRSHSQIPGAEILSPRRVAALQRHCANRGFYPAPNHPSSTRKPLYHAMYTGEGRVRAEQQRDQRRSSRVLVVIAYGDFGFLFHARPTGKTILAAWVHQPERKTRGSERDRTSGPTRQSHRDDSHESGQWLAIGPHMSARRATSWATTGERLMGQKHMLPII

SEQ ID NO: 84391 - protein, 558 aa, Zea mays
  Coding DNA Sequence Number=SeqID_41016
  Gene Ontology: Mol. function=binding; Cellular component=nucleus; Biological process=translational initiation
  Homolog annotation: Hit_ID=Q337E1; Match level="QueryCoverage=98%, HitCoverage=85%, E-value=1e-168, Identity=51%"; Hit description=TPR Domain containing protein, expressed
  Pfam annotation: Domain name=SET; Domain location=138-421; Score= -17.3; E_value=0.073; Accession=PF00856.19; Description=SET domain
  Pfam annotation: Domain name=TPR_1; Domain location=27-60; Score =15.3; E_value=0.077; Accession=PF00515.19; Description =Tetratricopeptide repeat
  Pfam annotation: Domain name=TPR_1; Domain location=67-100; Score =11.8; E_value=0.21; Accession=PF00515.19; Description=Tetratricopepti de repeat
  Pfam annotation: Domain name=TPR_2; Domain location=27-60; Score =12.4; E_value=0.85; Accession=PF07719.8; Description=Tetratricopeptid e repeat
  Pfam annotation: Domain name=TPR_2; Domain location=67-100; Score =10.2; E_value=1.6; Accession=PF07719.8; Description=Tetratricopeptide repeat
  Pfam module annotation: Pfam domain module=SET::TPR_1::TPR_1::TPR _2::TPR_2; Domain location=138-421::27-60::67-100::27-60::67-100
MAVSDCKVMQELTDPELALCRKDKVKAVELKGHGNACFSRREFGKALRFYSQALRHVPINSGGMDVNLAWYRKGMVKTALKNYSSAIHDLEVALSQEVTSSGKSNIEQELKLILEKHESVNEAGTSNCDSKDRDLPLAGQPHKIVIESISTPNKGRGMISTDDIPPASLIHVEDPLAAFLHKHELKPMLYSVLHVQYQFIVQKGCQEQSAGHISRDEDTNLGYSTNVANLSITSSCKSPRSKLFAEHRHECGGAHWAAVLPADVVLAGRIIAHSIVKRMPSGKSFAFSGPNLPTGYTHGGQTRNQTSLELKLQSDMPKLVLLIFQIKVNSIAIVCMRSMDRGPEHTINRGFYVAEGAKMCSVEQVRVAQALYVSGSLFNHSCQPNVHAYFLSRAFVLRTTEFIKSGSPVELSYGPQVGEMHISERQKSLQENYYFSCQCSSCSELNLSDLVMNSFCCPQSNCLGAISESTYYRSKENFVNVSLGGSYVCKLSLPVRLKKHTFLDKTLITEALQSLKQLKKLRHPYSKALAQAEDTIAEAFAKVGDQELARKHCEASIQ

SEQ ID NO: 84392 - protein, 148 aa, Zea mays
  Coding DNA Sequence Number=SeqID_41017
MAERYQLPRSCVPPTMRRKDGGYPPSGGLEGGASGRRSGRRFAFAIMTASVKGPGKGDTPKRILPREGTMLRASLLIRGSKAGPPEGFDSRLRSRGPYTHYWSEVRRPAPRKGFTAASGYSGFAPITDQGFEGWPPKGSQPPQTPSEG

SEQ ID NO: 84393 - protein, 354 aa, Zea mays
  Coding DNA Sequence Number=SeqID_41018
  Gene Ontology: Mol. function=kinase activity; Cellular component =ornithine carbamoyltransferase complex; Biological process=amino acid metabolic process
  Homolog annotation: Hit_ID=Q6QP54; Match level="QueryCoverage=15%, HitCoverage=19%, E-value=4e-16, Identity=85%"; Hit description =Putative kinase
MALPVDVAGLRPRLGDVEAPPKPRSSLSFMAEAESEPLGRARWKSSAEARAVSEPLGVGRSGVRRLLGLSPSPSPGSGGADPSPSPGSGGAEFAVFRGFSPSPSPGSGGAEFAVFRGLARVRALGRAERSSPSSGAEPESEPWVGRSFLWCLWQGLASCQHHSVKWRCSRSGVGGAVLLSDRSVERRSDGGHFGSAGLLLSEGRASGELKMCPPLEGGLGRDGNPPGPLQHYADGGYQLRIRSLEEDINWQKTATRERHQKDTVQDAYRVELGPHGLDGPELLEGQLGPLVDAPLHAVKPNARASLRSSAVARGGASPGCSRQQRLLIVEAVKNLDNLPEFKLIDNTSNNNEAF

SEQ ID NO: 84394 - protein, 100 aa, Zea mays
  Coding DNA Sequence Number=SeqID_41019
  Gene Ontology: Mol. function=carboxyl- or carbamoyltransferase activity; Cellular component=ornithine carbamoyltransferase complex; Biological process=amino acid metabolic process
  Homolog annotation: Hit_ID=Q8SA97; Match level="QueryCoverage=89%, HitCoverage=21%, E-value=2e-10, Identity=39%"; Hit description =Ornithine carbamoyltransferase
MAPPVDVAGLRPRLGNVEAPPKPRSSLSSVAEAESEPLGRARRRSSAEARVESEPWGRAKRRLSPSPSPGPGGAEFAVFRDLAQVRALGRVKRSSPSSGT

SEQ ID NO: 84395 - protein, 1093 aa, Zea mays
  Coding DNA Sequence Number=SeqID_41020
  Gene Ontology: Mol. function=receptor activity; Cellular component=ER to Golgi transport vesicle membrane; Biological process=ER to Golgi vesicle-mediated transport
  Homolog annotation: Hit_ID=Q53RP7; Match level="QueryCoverage=81%, HitCoverage=82%, E-value=0.0, Identity=69%"; Hit description=Chorion family 2, putative
MMVVVTPQDAGRPTARSEPAEVTDGACRWAAPIMDATRLPAGKDKIYQFLVYETGSSKAALLGEATVNLADYADALKPSAVTLPLKGSPGTLLHVTIQRVVGGAGGYGDDASESGDASPVAKTPQRRTTLQNQLSRFEDEDGEKARAATDAMSPVQDGLLITKPPGMRFPSRRNVPMSVDPVGHLHNGSSFDAVSVSGSDASSGRYTPKISATMHNSYLQDSSNALSPFANNGTVRNPLTSSGDWSGSSAPDASTDGSTSNSGEAGLRGEDDDVEKLRSEIATLTRKLDVSDMELQTLRKQIVKESRRGQDLSKEMSSLREERDALRREYEGLRGAKKMIHDSNGSGKRLSDGYDPWSQVEELKQDLNHEKNLNADLRLQLQKMQESNSELLLAVKDLDEMLEQKNRDISILQEDTQEDPQEAEYEHALSNVHNSGRKIALSETSSYQEKEDELMLDALAKKRDDISTSELEKKILELSNEIELYKKDREDIEMQMEQLALDYEILKQENHDISSRLEQTQLREQLRMQYECSAHLAIISDLEANVESLDNELQTQAKKFEADIAEIMSAKVEQEQRAIKAEDSLRKIRWNNATTAERLQEEFKVLSSQVSSAFSANEQQLVQARKEVAELQLQKSQLEELLQKAQGDLGSVQDQHRVKVQQLITLVDFKSKEIDRLLMELKSKSDEFHNQKRCDEAKLNALSEEIDLLNSKIDKLSSERNELFEKNEQKEKELAGISEKDMQLQDKTAEITSLNKELVFLKDQVKMHLDELHSLKRLKNEREETIGKLQIDIGSLKLQCDNLKTSLSKKESEKDSLASQVLKLRRSLETRDRAKANGQISDVKDNQHANNKRTKHNTGSTGSIAALPGTNRQGEDGDCNGPDMRNTTDQSAKGAGLNEGEEQGHRGGAEGAARTVLGDQPEVRGGGRRAAAARDDRSVAEELLAVTDSCCFTHTVATKILDDTGGRCTEQKLVEELRYVQVQFYLIIDIVMLYSVGDSDAIFGRRTLVLRYLYLKLKQWQWPWHPRQERNWEYRKISPYMSSKKKEFRMKQAAHRHSPPEKRSSEVKQAVHRHTQPRGHIRNWSSEVNGIDQ

SEQ ID NO: 84396 - protein, 74 aa, Zea mays
  Coding DNA Sequence Number=SeqID_41021
MPGLAPVCTEHHRRLCPDVHRRSTEPSTAPTVVLSAFEHPAVKGCDRRTLPVRLAPAPVTMPLTSGPGRTVARY

SEQ ID NO: 84397 - protein, 209 aa, Zea mays
  Coding DNA Sequence Number=SeqID_41022
  Homolog annotation: Hit_ID=Q6J9V9; Match level="QueryCoverage=33%, HitCoverage=24%, E-value=2e-08, Identity=51%"; Hit description =Putative uncharacterized protein
MGPQIPVGVNPQKPFANRREDGCLRDGVGAEIVQLHPVEMQDRPHETTHRHSEPPLVERDETQHIPWRRGWGGSAWGSNPLRLRVTGEGTKQAIGNKGLQIIHRDGRERPRVARWNNGHPSAITKQRRWWRSGQGTGKGDTPKGILLREGNGPRTILLIRGSKAGPSEGFDSRLRALGLHALLLIRGSKAGPTEGFDSRLRPLGLRAHY

SEQ ID NO: 84398 - protein, 91 aa, Zea mays
  Coding DNA Sequence Number=SeqID_41023
MSNIYGIKCLMRIIFALLLLKFFSEGANFDVNLEDFFGMFSDSTEFFSNHQDLLKNPDIQKLMISYWKLIHNQRFYLNEKSIIPRTTSVKK

SEQ ID NO: 84399 - protein, 189 aa, Zea mays
  Coding DNA Sequence Number=SeqID_41024
  Homolog annotation: Hit_ID=Q6J9V9; Match level="QueryCoverage=49%, HitCoverage=32%, E-value=7e-30, Identity=73%"; Hit description =Putative uncharacterized protein
MQVACNRTMVAHPFGFVASGMEAQAHESCNRRVGYYMQETAPPLAPMPRLLDCGTGAATRGSPAHDPTVPIEHNDHKSVNRGRRRDGTGKGDISKGILLCEGSGPRALLLIRGSKAGPSEGFNSRPRAPRAPRPLLIRGSKAGPSEGFDSRPRTRRVRDDSGYVRYMVEARATLPRYPRTFPRPAGAIL

SEQ ID NO: 84400 - protein, 120 aa, Zea mays
  Coding DNA Sequence Number=SeqID_41025
  Subcellular localization annotation: CTP_CleavageSite=92; ConfidenceScore=5.14e-01
MPFPPPPLLSNWARWTAPLPSSVSCAWIPQSLAYGPTPTASTAGRSHHISPLWIPHAQPSTPAFYDMWGRLPRVTFYLALGLAGSNDIRRIRAGSTTLPGACANRPPPRGNINFGAPPGV

SEQ ID NO: 84401 - protein, 102 aa, Zea mays
  Coding DNA Sequence Number=SeqID_41026
MAHRGDGTAQASGVKGRLGHSAQGRMIPNRAGERVNGEATGRTVAGGECADNLVTSEGAKGLTGGARLPERANARGERAGVAGGWGRADNDVARARAQEVVF

SEQ ID NO: 84402 - protein, 59 aa, Zea mays
  Coding DNA Sequence Number=SeqID_41027
MQVACDRTTGTHPFDFDASSMEAQAHTSCNRRAGYYGPGKGIFRKGSFSMKEAGPEPSY

SEQ ID NO: 84403 - protein, 49 aa, Zea mays
  Coding DNA Sequence Number=SeqID_41028
MASANVGGTGGGFGVASLPLEIPNWIVATTTAIFMSWDKMMMGYTDWAG

SEQ ID NO: 84404 - protein, 432 aa, Zea mays
  Coding DNA Sequence Number=SeqID_41029
MHRSLPPSEPPDGEHLRCLRLAAVGGARPRGGWRPSAIARLQGFSSCSPAAFPHQWSSVGMIISLVVGRSKPSCGLCPALSFKDLHHPCWGGGRGESGPTPAWAGDPLLPPAFGGERHPPAVRRRRPLAMRGKANYCCLDRVQLSVLHPGRQSCCARVVAVTGLAERANFDSAGPIGHVCGPFRVADCTGGSSKTSYASRAAFVFLDCLVLTPARRLRAEAEKVSPPTRPSATCDRTPRSLALMACPRPSCGGVGEGLSTASFALRSSLLLFSRPKRRSLSLLVQWSPASHLEFVVPQALWCGGCSYPREWNRSPNLRPLCDELEPEAAVLAWTEAESARKYASSAQEQVASQAEEVQQWRLELGQVIRERDQPRSHAAEAVSRAEVPGGQLAEATERPTEILPPVSPSEAGPDSAEGGNDAEGAAAPSADV

SEQ ID NO: 84405 - protein, 546 aa, Zea mays
  Coding DNA Sequence Number=SeqID_41030
  Subcellular localization annotation: CTP_CleavageSite=2; ConfidenceScore=5.44e-01
MSSSSLMRRVFPSSKPPDGGYPLSFRLLAGGTQLRGSWYLSAIVRLQGFSSCSPAASPRWWSPKTVTASSRVGRSKPGCDLGPTLSFEDVHHPRWGGGRAEPALYLPRGFAGHPFPRCSRERALTGPAGGPDFDNVGLGRRRASSPPACQARRLGSRRPLLSEGGCRAVCTGGPPKMSRAARAAFVFWGGPAFAPGWRPHTEVDAPLAREGLSGDLSGSRWALPSVPRRRRLEKSPSPTGSPPPSAPLAPSSSHLSSPLERRCGRGQDCSSAHPEACAAAARPSEAGVVVVVVRTGGGEPLVLKVHSQPIKRSSFGFNQGAKGQPKAPLVWRTRLSGVPPDSVRCTTGHVRCTRGLQRKLATFGNFQRHSRYNSPDCPVYTGQCPRAQKPGVPILAHRTRNSRCPVCTGYPGGPTSQKFQRSESNGSDDVAGAPDMSGSSSLVKETPRPLFDEPRPGVAISARTEAELARKWEPGLGSGWRPWKMVGRGPRGNRPSRLLGPDSRRSPWTASPSEAGSDLAEGVVDAEGAVAPFQREDPILQDQITL

SEQ ID NO: 84406 - protein, 254 aa, Zea mays
  Coding DNA Sequence Number=SeqID_41031
  Gene Ontology: Mol. function=threonine endopeptidase activity; Cellular component=proteasome core complex; Biological process =ubiquitin-dependent protein catabolic process
  Homolog annotation: Hit_ID=A2X7K5; Match level="QueryCoverage=92%, HitCoverage=100%, E-value=1e-121, Identity=88%"; Hit description =Proteasome subunit alpha type
  Pfam annotation: Domain name=Proteasome; Domain location=29-213; Score=257.7; E_value=2.6e-74; Accession=PF00227.17; Description =Proteasome A-type and B-type
MGDSQYSFSLTTFSPSGKLVQIEHALTAVGSGQTSLGIKAANGVVIATEKKLPSILVDETSVQKIQALTPNIGVVYSGMGPDFRVLVRKSRKQAQQYYRLYKEHIPVTQLVRETAAVMQEFTQSGGVRPFGVSLLIAGYDDNGPQLYQVDPSGSYFSWKASAMGKNVSNAKTFLEKRYTEDMELDDAIHTAILTLKEGYEGQISSNNIEIGIIRADREFKVLSPSEIKDFLEEVEIAASLMSSQPEACLGFITL

SEQ ID NO: 84407 - protein, 247 aa, Zea mays
  Coding DNA Sequence Number=SeqID_41032
  Gene Ontology: Mol. function=small conjugating protein ligase activity; Cellular component=cytosol; Biological process=regulation of protein metabolic process
  Homolog annotation: Hit_ID=Q8LGF7; Match level="QueryCoverage=63%, HitCoverage=100%, E-value=2e-82, Identity=92%"; Hit description =Ubiquitin carrier protein
  Pfam annotation: Domain name=UQ_con; Domain location=7-148; Score =194.5; E_value=2.7e-55; Accession=PF00179.17; Description=Ubiquitin -conjugating enzyme
MQASRARLFKEYKEVQREKSADPDIQLICDDSNIFKWTALIKGPSETPYEGGVFQLAFAIPEQYPLLPPQVRFLTKTFHPNVHFKTGEICLDILKNAWSPIWTLQSVCRAIIALMAHPEPDSPLNCDSGNLLRSGDIRGYQSMARMYTRLAAMPKKGERRCGRLGACQEVAEERQRLPRRVQRHLVPGSADGDERQALVDDRPSTNLISGGERKTLARWSKTLLLLKISVARLPADGRTTASTPGRS

SEQ ID NO: 84408 - protein, 298 aa, Zea mays
  Coding DNA Sequence Number=SeqID_41033
  Gene Ontology: Mol. function=threonine endopeptidase activity; Cellular component=proteasome core complex; Biological process =ubiquitin-dependent protein catabolic process
  Homolog annotation: Hit_ID=A2X7K5; Match level="QueryCoverage=74%, HitCoverage=94%, E-value=1e-113, Identity=87%"; Hit description =Proteasome subunit alpha type
  Pfam annotation: Domain name=Proteasome; Domain location=73-257; Score=257.7; E_value=2.6e-74; Accession=PF00227.17; Description =Proteasome A-type and B-type
  Subcellular localization annotation: CTP_CleavageSite=39; ConfidenceScore=5.47e-01
MFLLEKHSALPFLLRFSISFPAAFRRSLPLLFLSHFAPSLAAKTSTNRRHSNPEEPTSPSGKLVQIEHALTAVGSGQTSLGIKAANGVVIATEKKLPSILVDETSVQKIQALTPNIGVVYSGMGPDFRVLVRKSRKQAQQYYRLYKEHIPVTQLVRETAAVMQEFTQSGGVRPFGVSLLIAGYDDNGPQLYQVDPSGSYFSWKASAMGKNVSNAKTFLEKRYTEDMELDDAIHTAILTLKEGYEGQISSNNIEIGIIRADREFKVLSPSEIKDFLEEVEIAASLMSSQPEACLGFITL

SEQ ID NO: 84409 - protein, 67 aa, Zea mays
  Coding DNA Sequence Number=SeqID_41034
MDHSEASKEKVTEEEVKLDNDLIRTNMTLSSVGSDSPIEAKGVTSVEFTIGTKTVAATFFIIEIEGN

SEQ ID NO: 84410 - protein, 347 aa, Zea mays
  Coding DNA Sequence Number=SeqID_41035
  Gene Ontology: Mol. function=binding
  Homolog annotation: Hit_ID=Q7F1U7; Match level="QueryCoverage=36%, HitCoverage=27%, E-value=2e-30, Identity=63%"; Hit description=Arm repeat containing protein homolog-like
MAARSGGGNPRRGGVCWDASARKCRGDADIKGPLVMVGVGITRCEEEPLRRWKVSAGIGKGFQGHGVDCGGGRRRGNESVDGGDESATTIRDRSGAKDVGGGTDVDAYALLLRSSRDMRIEGNEAASDGGVGARHAASTVPLGARFCHRAARLPSASAIARFIRHHPRSLPSMLPAAACSSIDGADPPRLPSPSALPRSPSALPAAVRSFDGAYPALRTDSVIYFHLRELAATAGPVHPAAVAKSSSAINAGTTELLDLSRDFSDYSNFNSDISGELERLASAAGAAPRSDAPDAVAVDLNDLESMDLSADAAPLERVESFVLACLLALGPDAGRTRDVRPRLGYAC

SEQ ID NO: 84411 - protein, 536 aa, Zea mays
  Coding DNA Sequence Number=SeqID_41036
  Gene Ontology: Mol. function=receptor activity; Cellular component =integral to membrane; Biological process=recognition or rejection of self pollen
  Homolog annotation: Hit_ID=Q6H6Q2; Match level="QueryCoverage=87%, HitCoverage=90%, E-value=1e-168, Identity=64%"; Hit description =Receptor protein kinase-like
  Pfam annotation: Domain name=B_lectin; Domain location=104-219; Score= 36.0; E_value=1.4e-07; Accession=PF01453.15; Description=D-mannose binding lectin
  Pfam annotation: Domain name=PAN_1; Domain location=378-451; Score =10.8; E_value=0.014; Accession=PF00024.17; Description=PAN domain
  Pfam annotation: Domain name=PAN_2; Domain location=367-432; Score= -3.2; E_value=0.003; Accession=PF08276.2; Description=PAN-like domain
  Pfam module annotation: Pfam domain module=B_lectin::PAN_1::PAN_2; Domain location=104-219::378-451::367-432
MMLLVVVIEENGCQFETIINREGRTRLLLRACSRIRWGYRPPIANMEAIARPWHRSCGKVSPSLTTSSYSQFQPVLADPTGVFALGFLRVNSTMLDLAIVHLPSTFPLWRAIPDRPAPWSTAASLSFDGGLVLTDRAADKVLWSTAATSASAGDRAVLLNTSNLQIQSTGGSSSPDVVWQSFDYPPKTIVQGQNFTSATKLYSFDRRFAMRLGSNYFGLHIEPPPSSGGVAAAMYFKHMAMEAKAQIVAGGGPTYARVEPDGFPAMYQREGPPADVLSFDTFNRGVRALRRMTLEPNRNLRAYYWNGARWALDYTAINDNDRCELPTTYGAYIVCAEPSGSCECLANATDGSGYAAAVPASFASNLCGTTGGEVGGLYWAVRRWGVEPVNKELLRSEQAASTTDCEARCEHNCSCWGAVYSNRTGVCYVMDYPAQLLVASDDRKMGYFKIMSLEEEGTRGRGDGRTSGVKAALLVVGVVSVVTAAAFGAYRVWDRRRRSAVDARRQMGAADDGLSPGPYKNLGSFSSVELTNSFRR

SEQ ID NO: 84412 - protein, 165 aa, Zea mays
  Coding DNA Sequence Number=SeqID_41037
MEKSVASLLSSFQIPNSGGTHYRTQFLCRASQTLGKGYFTLDKGFAECNTRQRTLGELYIGNGLFAEYFLSGTRQRKVTVTAPSDGDGSFAECLLWHLAKRPILPSVCYHGPRQRRLQWAPPPIPVPRALVGTRQRRLFCRVSSGLALGKESSSGPLCQSLCRVP

SEQ ID NO: 84413 - protein, 30 aa, Zea mays
  Coding DNA Sequence Number=SeqID_41038
MAPLRRARRRGGSGYGIGSQGHARGGGPMS

SEQ ID NO: 84414 - protein, 54 aa, Zea mays
  Coding DNA Sequence Number=SeqID_41039
MSTMMALDADEDDEVVDQKDYSEKGDIDLHHVDTHRQLVDNLTKSLDESSFAHL

SEQ ID NO: 84415 - protein, 73 aa, Zea mays
  Coding DNA Sequence Number=SeqID_41040
MEVGADGVALITIANPPVNALHPIIVETGNIAFLVLYYCSTPSPPCQLRWPLEKVFCLGRDRTQVVEARKQGR

SEQ ID NO: 84416 - protein, 78 aa, Zea mays
  Coding DNA Sequence Number=SeqID_41041
  Gene Ontology: Mol. function=calcium ion binding; Cellular component =oxygen evolving complex; Biological process=photosynthesis
  Homolog annotation: Hit_ID=A2X7H8; Match level="QueryCoverage=67%, HitCoverage=44%, E-value=5e-07, Identity=52%"; Hit description =Putative uncharacterized protein
MDVSVGSRARHLTDVDGDLWDLVRRDLQLKATFLYIDLNSLIACNECEERREEITLLANDFFYCKDEGQQKDTQIIQI

SEQ ID NO: 84417 - protein, 247 aa, Zea mays
  Coding DNA Sequence Number=SeqID_41042
  Gene Ontology: Mol. function=translation initiation factor activity; Cellular component=transcription factor complex; Biological process =regulation of transcription, DNA-dependent
  Homolog annotation: Hit_ID=Q93WQ2; Match level="QueryCoverage=54%, HitCoverage=28%, E-value=2e-54, Identity=86%"; Hit description=TFIIB- related protein
  Subcellular localization annotation: CTP_CleavageSite=25; ConfidenceScore=5.67e-01
MAAASANGGGFRGRGNGSSGLPLVPGSPSQSPPNPNPRPLRPQSPIRLAHHVVAVPLLPRVGAGAVRDDAAAALARCLRVLRLRPNCPRAPPPHAPLLPPPPLTPSAPPCHPPDLATAIDPAPSPSPGDEDDEDPFLPAGFVSAFSAFSLERHPVLARSASTFSGHLAELERALAVDFATAASNPDPAGPMVSVDSLRAYLQIVDVASILRLDGDIADHAFELFKDCSSATCLRNRSVEALATAALV

SEQ ID NO: 84418 - protein, 473 aa, Zea mays
  Coding DNA Sequence Number=SeqID_41043
  Gene Ontology: Mol. function=transcription regulator activity; Cellular component=nucleus; Biological process=regulation of transcription
  Homolog annotation: Hit_ID=Q10CH6; Match level="QueryCoverage=45%, HitCoverage=52%, E-value=4e-24, Identity=37%"; Hit description=Helix- loop-helix DNA-binding domain containing protein, expressed
  Pfam annotation: Domain name=Auxin_inducible; Domain location=97-161; Score=-23.3; E_value=0.013; Accession=PF02519.5; Description=Auxin responsive protein
MDYMVFEVAELDGAAMICHINSKMKCYLLVLNIEAPTRWLHQIQKTEVEKRSEPKQASFKNKVLDQQLLAYSILEFVLIRSSLPTQRCPIRFHFVFLCAAVGEGEEEEEAMRLPSDVPRGHFAVYVGEWRRRFVVHIALLDRLEFRPCCGAPRRSSGSRAPAVPSSSPARRSPSAPSPPRSPAPGERAPVSCRHMLGICMPGPRPLQRRLFIRFIGSARAPYLSIIREEEQERRRSPPGHRNPDEMDDNTRFAAESQKKPIVPDDDLVELLWHNGSVIAQPQAHHRPAPPSDRDRPGTSGLTTEETAAWFLNTLDDPLEKDLYTQLWYSTIADAAPQHEGTFPGPTSHPSSPPPPVGSSGVESSWAGDICSTFYGSNQVPRTPTGIRGKDTALQSEVPSDAGAHDGTSSSGGSESNYGGSGLPSDSVHGHKRKGMCRDESDSRTLLAAADVEKKGPDQRKDACVARVDPTLQQ

SEQ ID NO: 84419 - protein, 115 aa, Zea mays
  Coding DNA Sequence Number=SeqID_41044
  Gene Ontology: Mol. function=cysteine-type peptidase activity; Biological process=proteolysis
  Homolog annotation: Hit_ID=Q5NKQ2; Match level="QueryCoverage=98%, HitCoverage=12%, E-value=8e-37, Identity=63%"; Hit description =Putative uncharacterized protein 9C20.3a
MDLGGRKLWSKVIMSRLNKALQHFRPRSCFPKFGNFAIDLPPIYPTMEAGSNDCGFYVIRYIHYYDCIEGSFKSYIQPNNTRDLRSLALYYITFHRKNKAIPLLADIQRYKFSRM

SEQ ID NO: 84420 - protein, 214 aa, Zea mays
  Coding DNA Sequence Number=SeqID_41045
  Gene Ontology: Mol. function=nucleic acid binding
  Homolog annotation: Hit_ID=Q5NKP8; Match level="QueryCoverage=90%, HitCoverage=31%, E-value=2e-50, Identity=54%"; Hit description =Putative uncharacterized protein 9C20.4c
LLMRAELDIGTSESCGTSGGNDIQVEVYETEDVERDDLRNVDDGNEEIVVASNTNEGNTNDVQCNMSIRTLEQNTDMHLVASSAPDVEARTKLEFHREGVNLARPDKAKPKGRTIKSSEEQVLRLGTKGAKKMSRMCQKCGIADGHNSRTCLTVEDNRIRLASLAGRKRGRPPGSRNKIGGAAPQWNETSTSKNAQCMSKMMIHPVESRIPKEL

SEQ ID NO: 84421 - protein, 114 aa, Zea mays
  Coding DNA Sequence Number=SeqID_41046
  Homolog annotation: Hit_ID=Q5W6F7; Match level="QueryCoverage=24%, HitCoverage=5%, E-value=1e-07, Identity=89%"; Hit description =Putative uncharacterized protein OSJNBb0006B22.5
  Pfam annotation: Domain name=UIM; Domain location=29-46; Score=22.7; E_value=0.0014; Accession=PF02809.11; Description=Ubiquitin interaction motif
MPQLTDRTKLPNIVDPVIRDTMDPKHLYQDDDDLLQQALAMSMEGGASGSAAVTDSAMAEAASTVLAHTLFKCLSRMQTSVKDLLASLHSQGEEEKKEHKSDKTEDEKNCFKLE

SEQ ID NO: 84422 - protein, 490 aa, Zea mays
  Coding DNA Sequence Number=SeqID_41047
  Gene Ontology: Mol. function=cysteine-type peptidase activity; Biological process=proteolysis
  Homolog annotation: Hit_ID=Q5NKP7; Match level="QueryCoverage=94%, HitCoverage=56%, E-value=0.0, Identity=76%"; Hit description =Putative uncharacterized protein 9C20.3c
MKHVDHPPNNPKRITIQSSQECFSVDILCAEQSNPCPEVGNPPNVDSQTLINETIQLDSDEDDFIPAVKKRNVSESHTRVLRKVVTQRIKADDLPRQRLNVRCNPQDVIASIHILNERQRQAIRRKGFSNIIDMTVDALCSRSHLQWLMDKLDHKDMTIRPGPGKELKITKDIMHLILGVPNHGGGKPFGIDEAVAASNLRAELGLAKNEFNVTLLQDRLRKGDDDDLTIRCFVLILFNRLLFPTASWGITNHEVLLTEEMHRFHETDWCQLIFNDLCEAAKKWHNRSTTNVSTTIYGCSIVVLLYYLDHLHVAAAPQNKLSTPRIKFFDKNIIKALTKADKRKARHGAEPFGYCEPKCRTNIFDALRPAPTPRPTFNIQLPSIKEMMSKKLVAYDLEVDKACLAIKDSINKIIEKQYDIADNFIELIDEVLRVESDNLENETDEPQQLRNSTNSSVYAATFTTRRFTYNDLRLVAKTAFSDLRLVAKNF

SEQ ID NO: 84423 - protein, 145 aa, Zea mays
  Coding DNA Sequence Number=SeqID_41048
  Gene Ontology: Mol. function=metal ion binding; Cellular component =integral to membrane
  Homolog annotation: Hit_ID=A2Y0Q2; Match level="QueryCoverage=75%, HitCoverage=42%, E-value=9e-57, Identity=93%"; Hit description =Putative uncharacterized protein
MADAASGRGHVVYPPRSAEDIFKDYRARRSAILRALTHEVEDFYAQCDPDKENLCLYGYANEAWEVALPAEEVPTELPEPALGINFARDGMNRRDWLALVAVHSDSWLLSVAFYYAARLNRNDRYAASDRSPLPYFSHHSVSVRI

SEQ ID NO: 84424 - protein, 214 aa, Zea mays
  Coding DNA Sequence Number=SeqID_41049
MARARAYKTLPDLDCTLPRTLHTSPELARRRLPPSEKTVHTPGRLPEQGIGEYFAGEASPRSPELSTPPEYVDRVNHSTILRFLAHTVAAIPREAHHALGLNQFAVVWPVHSPPTSTPACARGPDDSGHPRRRAVPRRDRQSLPEPTPPFAGPPSPPNMLKDRENRKDCNLADGEYILVPEQGAAQEVALDPAPEPAPEDLPATALEGKPRFYA

SEQ ID NO: 84425 - protein, 266 aa, Zea mays
  Coding DNA Sequence Number=SeqID_41050
  Gene Ontology: Mol. function=transcription factor activity; Cellular component=nucleus; Biological process=regulation of transcription, DNA-dependent
  Homolog annotation: Hit_ID=Q7F803; Match level="QueryCoverage=98%, HitCoverage=42%, E-value=3e-98, Identity=59%"; Hit description =Similar to Arabidopsis thaliana chromosome V P1 MJJ3
MPQVPCGTEKNQKPPKCSKKCNIPRLCRHKLECRPHKCHYGACPPCKLICGEEFPCGHTCKERCHGPISPPNSEFTLKPTKKKMGKHIECTPGTPCPPCKEVVLVSCFGQHLGQERTVNTRCACSTLKQEWRCQDVLKEYRKSGRDPKEVPKSQFGVGLLACGEDCKKKLKAPDSELHLRKSQENKIPAVEVVNAPKRRKRRDRGQEVKISKFQEVKTFVLRALLIILLSIIVAAGLYLLWKGIFWLSDWMNEMEEQRASQRFIIV

SEQ ID NO: 84426 - protein, 136 aa, Zea mays
  Coding DNA Sequence Number=SeqID_41051
MGWYNSCSFSSLSGTSGGNKRRKELLMMIAVIQITLKSRMMIMKKVLLLVEAQEVLKTLSLMDSKVSLRKCKTFELVLMIIEVKDEHCLSETHVYNSETIGQAKDGGKKKSEVPSARDTVKEAEVPKARGEEVKGK

SEQ ID NO: 84427 - protein, 149 aa, Zea mays
  Coding DNA Sequence Number=SeqID_41052
MGKSNKRKREPTPPSEDFGDSKYSEEEFSSESEGSPTPVSPPASSDDSDDSQGIATEVWTYIRAVERSGLAGSDESEYSSDEEDSSDSSEEGGGGDDGDGGDGRGDDDDGDDDGDGGSEGGNSGSKGGNGGSGDSGRGSNGGGSSKASG

SEQ ID NO: 84428 - protein, 194 aa, Zea mays
  Coding DNA Sequence Number=SeqID_41053
MWAQGQMEGRKATRLIRNKCRGHAAQRPYVRLRPLAYVTGSGPRGSIGSPPKWGAEAYTVWPGHMSAPDPRLALTKVRVLFVPESWDPAVSGPNPSQKGMGPVSGVRRRGTIVSGGSTSLHQGTSAKEDDSWAQAPASETGPLVPAEVKRRATAGGSPLLLAVRLPRTRRPTPKEHDSWARAPCQRLGRCFRRR

SEQ ID NO: 84429 - protein, 155 aa, Zea mays
  Coding DNA Sequence Number=SeqID_41054
MALLDPLECFQSEVALNSVRNLLRRGVSAFARRIRVGATPLGDLAAEEFVLSVSNFSYGLALPISPFFVLLLEELGLQPQHFTLHFILQAAIFAYLYEMSLQLHEVGSELSCGSISLALMASTLLPTMTAGPVADTRDAAREVVQDAVETAAARF

SEQ ID NO: 84430 - protein, 514 aa, Zea mays
  Coding DNA Sequence Number=SeqID_41055
  Gene Ontology: Mol. function=metal ion binding; Cellular component =nucleus; Biological process=regulation of transcription, DNA -dependent
  Homolog annotation: Hit_ID=A2Y0Q4; Match level="QueryCoverage=97%, HitCoverage=93%, E-value=3e-89, Identity=43%"; Hit description =Putative uncharacterized protein
  Pfam annotation: Domain name=PHD; Domain location=468-512; Score=0.9; E_value=0.01; Accession=PF00628.20; Description=PHD-finger
  Pfam annotation: Domain name=zf-C3HC4; Domain location=469-509; Score= 44.7; E_value=3.4e-10; Accession=PF00097.16; Description=Zinc finger, C3HC4 type (RING finger)
  Pfam module annotation: Pfam domain module=PHD::zf-C3HC4; Domain location=468-512::469-509
MDHIQPKNTPHNEPLPLGQKLMLHHGSDAPLRIGHSSHENMRLRSNDLPPLSHTVQTQGYRVGNPGASHAPFVHCHAGSSSSHLPEPAVNYPHRSEEGFAPVGSHMDNRRAATKRKDPIVHPAGISATGYYVGSSSNTQLSNSVQPNPAPLSEPLLRQIPLSIDRSGWDGLHLIHQEGFQRNVRARQRHSHNISLEPRTASTYPLNSVHVPSFGSTTSASLSMSVERNQASVSVPTRNVPSGAPGITSRSLTRRAYYPVVGSSNSSVDVVPTICGSSGAAIFANGGYALNADAGTVSIYPNPAPATSSGSITMPMPMLHQMVIQSHPPATSAATSTSMWIAQPLPARTAAASRHARRVSAGLANNGRYRRARSSYYSLHPLMMVEAERFMMDQLVFYESRAAAADPHRDMRLDIDNMSYEDLLALGESMGNVNTGLADEKISKCVKEVVCCSSDQMQTDQDDQDDDGSCVICLEGYRDKDMLGILKCRHDFHAGCIKKWLQTKNSCPVCKAAAA

SEQ ID NO: 84431 - protein, 152 aa, Zea mays
  Coding DNA Sequence Number=SeqID_41056
MASPKSDLGENTPQTLTSLPQIQRIQYGNESVVYAMDLCRSYLGLRGSGSVDRIEEEDDDGDELLFLLPAALDEVGERRSRLPMATLRRRAGGTSLGTSVAVGRASSVRSAATSMPPDPPPHARFSPTCLDAGGEARRIEGSAPGDAVASAG

SEQ ID NO: 84432 - protein, 943 aa, Zea mays
  Coding DNA Sequence Number=SeqID_41057
  Pfam annotation: Domain name=Transposase_28; Domain location=26-179; Score=-45.1; E_value=0.0026; Accession=PF04195.3; Description =Putative gypsy type transposon
MSSSSSSAADTPPAGASSEETLSNVAAEELRTGDIVEFGVSRMSSVRVQDMQQLGYFGGGVARVPGVEEVLEPEGELVVFEAFFAAGLRLPTHRFVGEVLRIFDVQVHQLTPNAVKRKIGNKIAQFGSCTFTPKTGKISMEVVELVPCARNKWGNWWEFWFYVVEGTVEDHLGLPVAVMCSHYYSAYLQFEVAEEDEDEGALRCAARMSSGRDLVEEFVGYGALGEVCPRQMPSRGGMLVRSLAFALDLHGRDPAAFVREAEDGAVRIVGRYVPKTEAQRSWDIRGINDRLNRVFELNCLSYGVDEDMRGPWGRMSSPELRESSARMLEVTGGRWPKNVPIPRAAGEDFFTSRMARDLRVFPYGRNIAVVVSAVMNKDRQEAAQKRRAVIRIPEARPKRARGTAKATAPGGSQPTLAEKPVALGPTRELPSPGKRIADFGTNISVDDYLVGSGEGQLVVVPPAVATTVSVAVPRVKGSALSAGGEILAVAAVKDEAGTVSRRLREASQQLSQAADFTDRVASGALTADVSAEVEKLRAQHADAVREKSAADSKCRKLAEKVAALEGERTDLRRQLVEERREANQAIAKAQAAQAEAKLARVEGSLASQRVEEWEVRFNALQARMERAEASTRSEVERTRKQLVDSYRELGARTADFEVPDREAGLRFLEWPQEELLALPTIMERFMSFASLITCEGALNALSREGCSHYEVFNRSDEDFGREIYKVEDPVVKDSAGPSSTGCGAPTVGRWSGSGLTGLVASHCADGGESPEGGDGASSGDPMVAAGSSQDFGPAHATAIANFMAASNVVAGNESDESTFKFSDFDDSGSSVEWTEESSNEDLNYFAALDVAAAEASPHVTDAEVLPGSSAGRRRRRAVAKRRVSEVDGGRLRVGRAGKRELLSSPVGTSVGEGELRSLFEGEELRIMLFNYREMVIIPKVEPM

SEQ ID NO: 84433 - protein, 253 aa, Zea mays
  Coding DNA Sequence Number=SeqID_41058
  Gene Ontology: Mol. function=transcription factor activity; Cellular component=nucleus; Biological process=regulation of transcription, DNA-dependent
  Homolog annotation: Hit_ID=Q7F803; Match level="QueryCoverage=66%, HitCoverage=25%, E-value=3e-69, Identity=66%"; Hit description =Similar to Arabidopsis thaliana chromosome V P1 MJJ3
  Pfam annotation: Domain name=C1_3; Domain location=107-138; Score =7.6; E_value=0.068; Accession=PF07649.3; Description=C1-like domain
  Subcellular localization annotation: CTP_CleavageSite=74; ConfidenceScore=5.79e-01
MPSSYAAAAAGSSSRKPNRTSSAAAPTLRPPAPSPSPAPAPLAVNPSVISDSDPSSYSSSSADEADFAASDSATASVVSAYLSVAGEGADLSKVGIFLSSAARRRSPPCLICFDPIRPSDPVWSCSSSCFAILHLPCIQSWAHQSASGPAVPCPTWGCPKCRFAYPKSEIPSSYVCFCSKTIDPAPDPWILPHSCGDVCGRRLDANLDSGLLGSHKCECGEILEEKLCSERIFQCKRECGGMLDCDITWQSNK

SEQ ID NO: 84434 - protein, 68 aa, Zea mays
  Coding DNA Sequence Number=SeqID_41059
MGGGREFRARRAAVGGGEEHWRSEYVFNVVAAIPSYRSATGLSQQPWADSCWIIVEFMLKVVVIALSV

SEQ ID NO: 84435 - protein, 71 aa, Zea mays
  Coding DNA Sequence Number=SeqID_41060
MSGHRAWSGCGLGARCGGGGGGGTAAAVQSRSRKLDREPSSIPPAVACRALEWRVTEPTSMWMQAQVTAAD

SEQ ID NO: 84436 - protein, 168 aa, Zea mays
  Coding DNA Sequence Number=SeqID_41061
  Homolog annotation: Hit_ID=A2YX04; Match level="QueryCoverage=87%, HitCoverage=17%, E-value=3e-16, Identity=35%"; Hit description =Squamosa promoter-binding-like protein 15
MQREVGPQVQPMPPHAAAAVKKRGPPWPAAAGNWNPRLWDWDRRALTARPSADALRLAGGQPHQATEVHRQGAGGSGALKLQLGPRECSATPTDASPTSSPPASGQILVVRPSKQVRSGSPGSVGGGGAANGGAGYPMFQVDDCRGEGSTRRERAGAVYTNDLIVSRD

SEQ ID NO: 84437 - protein, 166 aa, Zea mays
  Coding DNA Sequence Number=SeqID_41062
  Gene Ontology: Mol. function=catalytic activity; Biological process =lipoate biosynthetic process
  Homolog annotation: Hit_ID=A3ARL4; Match level="QueryCoverage=64%, HitCoverage=27%, E-value=7e-38, Identity=60%"; Hit description =Putative uncharacterized protein
MELKVDDVGILVWRRTTTDEEDIGQRATTEHPWQPAKHGGAETGQRRTPVLIHATTNWGEELLVLLHPSNANHKKLPTPPPKRHLGINMVDGRTKLVEYMLPPKIEKKVVNEQMYVQTTPARTPLGVSKNLRICGDCHNSINIVSRIVGRELIVRDSERFHSFKNG

SEQ ID NO: 84438 - protein, 235 aa, Zea mays
  Coding DNA Sequence Number=SeqID_41063
  Homolog annotation: Hit_ID=Q6J9V9; Match level="QueryCoverage=27%, HitCoverage=33%, E-value=1e-08, Identity=46%"; Hit description =Putative uncharacterized protein
MAERYQLPRSCVPPTTRRKDCGCPPSGGSEGGKTRCIREHEDMVAFQGGHPPFKGDSPYLRPRPSWAESSPTRSKVLPLWCGGWVPRVMQAGPGQKKPNRRARCMQPPAVTGIPPLSPRPAGGASSGRSERRFAFAIMTASKKGPGKGDTPKRILPREGNRPRASLLIRGSKAGPSEGFNSRLRARGHHTHYWSEVRRPAPRKGSTAASGHSGSAPTTDQGFVGWPSKGSQPPQT

SEQ ID NO: 84439 - protein, 210 aa, Zea mays
  Coding DNA Sequence Number=SeqID_41064
  Gene Ontology: Mol. function=kinase activity; Cellular component =ornithine carbamoyltransferase complex; Biological process=amino acid metabolic process
  Homolog annotation: Hit_ID=Q6QP54; Match level="QueryCoverage=46%, HitCoverage=33%, E-value=1e-18, Identity=55%"; Hit description =Putative kinase
MVPPVDMVGPCPGLGDVKAPPRSRSRSSLYSEAEVESEPLGRARRRLSAEARAESEPWGRAKRSSSSSGTEPESEPWVERSGVRRLPGLSPRAEPESEPWVGRNGVRRLQGLSPSPSPGVRRSGVRRLQGLSLSPSPGSEWSFPWCIGPDLADATFALNAPAIWSVGVAIWPRLLLGEDWASGEPKLCADGGYQLRIRSLEGTPNYGPRQ

SEQ ID NO: 84440 - protein, 60 aa, Zea mays
  Coding DNA Sequence Number=SeqID_41065
MARVACTLRGKRLDGGASVLSHTLESLLFSRVTSHLIVIGVKRQWAQPSYKSKYFFYTSY

SEQ ID NO: 84441 - protein, 194 aa, Zea mays
  Coding DNA Sequence Number=SeqID_41066
  Gene Ontology: Mol. function=methyltransferase activity; Cellular component=Golgi apparatus; Biological process=metabolic process
  Homolog annotation: Hit_ID=A2Y920; Match level="QueryCoverage=99%, HitCoverage=50%, E-value=3e-78, Identity=73%"; Hit description =Putative uncharacterized protein
MGVDGRNWVRPRHGHEFLVDDVLRLAAGKIQTGLDVSGGAANFTAWMRERRVTIFTTVLNNAGKPMNEFVAARGLFPLLLSLVHRFLFYDGVFDLVHVRATALAEGGSPALGQAGTEEALEFFMFDVNRVLRAGGLLWIDSHMCHADERRKALARLIGRYGYKKLQWATGEKADTGSTKAAMYLSAVLQKPTRG

SEQ ID NO: 84442 - protein, 364 aa, Zea mays
  Coding DNA Sequence Number=SeqID_41067
  Gene Ontology: Mol. function=methyltransferase activity; Cellular component=Golgi apparatus; Biological process=metabolic process
  Homolog annotation: Hit_ID=A2Y920; Match level="QueryCoverage=69%, HitCoverage=67%, E-value=2e-99, Identity=69%"; Hit description =Putative uncharacterized protein
  Pfam annotation: Domain name=Methyltransf_11; Domain location=204 -309; Score=3.7; E_value=0.037; Accession=PF08241.3; Description =Methyltransferase domain
  Subcellular localization annotation: CTP_CleavageSite=85; ConfidenceScore=5.04e-01
MEYIVSSNHVAAPALPTWRGQAMFATWLEVAAWTPRLHTVERSTPDSGSFTFTLSPARSLARTPSSLPKPPLFFLVPNSPDSRARASKANADARTARARRAHGAHPHAASVAHACFHSPDPLHARAPRRVSHLRAPRRLPAHRLVSKACEPLPRRRCLSRGPRAAFLASNMGVDGRRWVRPRHGHEFLVDDVLRLAAGKIRTGLDVSGGAANFVARMRERGVTIFTTVLDNTGKPMNEFVAARGLLPLLLSPAHRFPFYDGVFDLVHVRATALAEGGSPALGQAGTEEALEFFMFDVDRVLRAGGLHWIDSHMCHADERRQTLAKLIGRYGYKKLQWATGEKVGTGSTKAAMYLCAVLQKPARV

SEQ ID NO: 84443 - protein, 96 aa, Zea mays
  Coding DNA Sequence Number=SeqID_41068
MHPGYGRAARANNQAGRGIMKSIKTSEESNHSSEASGATPGRCARAHPPEQNITEKGLKHFSNDHVIAYTGLKHFSDSHVGMYTGLRHSSARHVSA

SEQ ID NO: 84444 - protein, 245 aa, Zea mays
  Coding DNA Sequence Number=SeqID_41069
  Homolog annotation: Hit_ID=O48967; Match level="QueryCoverage=33%, HitCoverage=17%, E-value=3e-16, Identity=60%"; Hit description =Putative uncharacterized protein
MGSQPPSVGHCCCARCTTAYNCADIPDSIKGSSGGVVCGQGVSAPPSKLHGLTGSMKQWRDDVVRLLGMAHSGSTRSRSRSSRCQHEATASVRSPSVRGAQTDDLRAELNRRRAGEDARVSLERARVGVSDPRVPQPSRPVNLSLRAPAQMGWRKMEHKGEFGLYYLAPGGNDVSPVARSVRAWGRARRRLLLRPRPGSGGDAIPLEAEAEAEPWGRARRRPPEAEAEAEPWGRARRRPPSEAEA

SEQ ID NO: 84445 - protein, 111 aa, Zea mays
  Coding DNA Sequence Number=SeqID_41070
  Homolog annotation: Hit_ID=Q6QP51; Match level="QueryCoverage=44%, HitCoverage=22%, E-value=8e-15, Identity=75%"; Hit description =Putative growth-regulating factor 1
MQEACNCTKEAHPFDFDASSMEAQAHTSCNWRTGYYVDRERGYSERDPSPRRKRAPSPPTDQRFEGWPLGRVQQPPQSTRAPRPLLVRGSKAGPSEGFNGRLRPLGLRAHY

SEQ ID NO: 84446 - protein, 109 aa, Zea mays
  Coding DNA Sequence Number=SeqID_41071
  Subcellular localization annotation: CTP_CleavageSite=24; ConfidenceScore=5.64e-01
MGAIKVKAQSTQGTRSRLARAQPRAKAADPGGFTSRPRAPSSNGHTFGSPEAQSSQRSNLGQIATPTDPSGAIGSSASPDPRAQAQPRRWTTDSASPDPRAQPEGSYFS

SEQ ID NO: 84447 - protein, 46 aa, Zea mays
  Coding DNA Sequence Number=SeqID_41072
MWSIYLSGNSVPHGCVWVYRHGNIEKCNVLATTHLRSGTLTSKTYV

SEQ ID NO: 84448 - protein, 117 aa, Zea mays
  Coding DNA Sequence Number=SeqID_41073
MAVLEVELEKVLHWASQVVEYVKAHDIPDNGLEDMLEVFDKAASRVIARLSSDDVIRKAWVHRSAVVALCIAQLHFGGELHNAIGLPEGVMSEDIDNLTDDFDVATNIVLGRYPWRG

SEQ ID NO: 84449 - protein, 34 aa, Zea mays
  Coding DNA Sequence Number=SeqID_41074
MRLERHERVCLFVLWRVEEPVTEDHGAQQIEVAE

SEQ ID NO: 84450 - protein, 97 aa, Zea mays
  Coding DNA Sequence Number=SeqID_41075
MRARRRLHIDAKRENHSMKGRWNSGWARRQPNSEARARSQGQGMELKVDGVGVQRQGKVEHTERLAMALEQAEHAKRADGGDSVSWEVTMAHRGKET

SEQ ID NO: 84451 - protein, 123 aa, Zea mays
  Coding DNA Sequence Number=SeqID_41076
  Subcellular localization annotation: CTP_CleavageSite=59; ConfidenceScore=5.66e-01
MARSGPRWALLAGATPARPPAPRRVPGAAPAGSAAPGRFNRPGPSSPARSPVPAPRPTVSSLARARGGYEIDDSGYDYGAGQVGTSLFIYQRGDDLIYLLLYIDNIVLTTSTANLLQRTIVAL

SEQ ID NO: 84452 - protein, 93 aa, Zea mays
  Coding DNA Sequence Number=SeqID_41077
MQNGEWVAHRLRGEAIQGMCGGVQGLCPLAGRERRLEEKATNHFGGGANDAFGLAILRRGVGEQEMQPNAMGEEGARGVAVEIVAIIMLEGTD

SEQ ID NO: 84453 - protein, 20 aa, Zea mays
  Coding DNA Sequence Number=SeqID_41078
MGLLLGVCFVAEGPRRYLSS

SEQ ID NO: 84454 - protein, 195 aa, Zea mays
  Coding DNA Sequence Number=SeqID_41079
MVVTSEESRRGWQVKRVVVGEVDGKVAYGEPPGIELHRTMVVTSEVMNREKGMSQTKSNEDVVEVERSTDTPTEVTGRVESLPTMMEGGCVGCGGWEWNNELVLGVVWKEAPESTTQSLDAVSKDRAHGVIEGHEGAPDKLAIVEEDAHNDNAETGRSQRHQGWWNTVGSAGSGDIGLKSSGKGGQGRGGEAERQ

SEQ ID NO: 84455 - protein, 138 aa, Zea mays
  Coding DNA Sequence Number=SeqID_41080
  Homolog annotation: Hit_ID=A5C0D0; Match level="QueryCoverage=89%, HitCoverage=49%, E-value=4e-12, Identity=31%"; Hit description =Putative uncharacterized protein
MDTHRPPHFDDTNFPYYSARMACYLEAVDLGVWRVTRDGMKPPKNPENPPRDNELVRDMYSRLNLIINELNSIGTSKLGDVYIVRKIISLLPQQRYGSIITILHNMEDLSIMTSTIVIGKIAAFEISRKMCRGEEPTS

SEQ ID NO: 84456 - protein, 621 aa, Zea mays
  Coding DNA Sequence Number=SeqID_41081
  Gene Ontology: Mol. function=protein binding; Cellular component=GPI -anchor transamidase complex; Biological process=regulation of protein metabolic process
  Homolog annotation: Hit_ID=Q2R4C3; Match level="QueryCoverage=89%, HitCoverage=85%, E-value=0.0, Identity=76%"; Hit description=Gpi16 subunit, GPI transamidase component family protein, expressed
  Pfam annotation: Domain name=Gpi16; Domain location=15-596; Score =672.5; E_value=3.4e-199; Accession=PF04113.5; Description=Gpi16 subunit, GPI transamidase component
MAPPRPPTGPILFLPLVFLFLFTTAAASAAAPEDEKFTEELLLRPLPDRKALAHFHFRSSAPPAASVGRHHHLFPKAISQLVKKYHISELELSFTQGRWNYEQWGGFDPMSTNNAKPPGVELWAVFDLPLSEIDATWKNLTHTLSGLFCASINFLESSTAFSAPRWGFKLNEGNLRYGALPREAVCTENLTPWLKLLPCRDKAGIASLLYRPSIYKGYYHSQKLKLRSSQSLGIILDQTLTVVLQPNNVHGEQLHSNHGQLQPNWSMRHLFNRKLSGKCLVSKSSRVFIEVDKGIADEVNISGSVHSWSNEFFVLSNSPDKLIKGQNHLEMQSSFLYVYDASNYSEEQPLDLGITWKLPLIWTCTPSPFHASRFLMGSGNERGSIALSFMSTNLHKKISGSANDCSIKAVIFQVVPWYVKVYYHSLEIFIDGSRKTVSEVVDKIHVIPSEDKLLPGTLEMLLRFPCSMQSGTLTLDFDKGFLHIDEYPPDANQGFDIPSALVSFPEFSSARSYPEIDPVLGSPLLENFQEDSVVKSYTEVLLVPLTTPDFSMPYNVITFTCTVLALYFGSLLNALRRRIGEEERELKKRDITHVGAFGTGSASLFLPFIIVDVYGTTQLVL

SEQ ID NO: 84457 - protein, 127 aa, Zea mays
  Coding DNA Sequence Number=SeqID_41082
MKKFMYCIRNCIPMYLRILSGRKLDLLGQREKPSRQTIPDFYGKWRVNNYNNKAGGHIRKAPVKHATWISLRRALHCLSKKRTLWKRMNGSASLNRSSGSFGVQRFKSPYSPPNNYVALPARGGEIL

SEQ ID NO: 84458 - protein, 160 aa, Zea mays
  Coding DNA Sequence Number=SeqID_41083
MGKNKKGGSLSHHSGDKRKHEPSPPSEDFGDSEYSDEEFSSESEGSPVYASPPVSSDDSDDSQGIAAEVWTYIRAIERSGLEGSDESEISSDEENSSDSSEEGSGGDGDDEGDGGDGGDDGGGGDGDGKGTATAARATVAAARVTAATTRPVAKRHWLKY

SEQ ID NO: 84459 - protein, 81 aa, Zea mays
  Coding DNA Sequence Number=SeqID_41084
MKWPIMLEVEYQHGTCLNYCVLTQDEIEAARIAAINKEIKLVLTEVLSKRCKVISDWLASYPFSITYRISYLKAGPKAYNP

SEQ ID NO: 84460 - protein, 132 aa, Zea mays
  Coding DNA Sequence Number=SeqID_41085
MAPKRASLKAAPSIDEAAKEALLVEKKGKALANNTPQEDFKDEAISQRQRQDHSTPEGTLRTCSFGGVPQAPPPGFAPPEGEDVIEVGEVIGISAEDQLQLWALRIKNHNLQKQKEILKAKRQRVTMQAKVH

SEQ ID NO: 84461 - protein, 224 aa, Zea mays
  Coding DNA Sequence Number=SeqID_41086
  Gene Ontology: Mol. function=protein binding; Cellular component =cytoplasm; Biological process=apoptosis
  Homolog annotation: Hit_ID=A2WLH0; Match level="QueryCoverage=99%, HitCoverage=98%, E-value=9e-77, Identity=62%"; Hit description =Putative uncharacterized protein
  Pfam annotation: Domain name=Phosducin; Domain location=1-195; Score=- 124.0; E_value=0.064; Accession=PF02114.7; Description=Phosducin
MADYHFVYKDVEGASTEWDDIQRRLGNLPPKPEPFKPPPFAPKVDADEQPKSKEWLDVREPEELEELEDDLDDDRFLEKYRKMRLAELREAAKAARFGTILPITGSDFVRENCLEELATRYPATKFVKIISTDCIPNYPDRNVPTILVYNNSAVKGTYVGLQKFGGKRCTPESVALALCQSDPVLNDGHGGSDSSRGNVFEGVRRKFIEKVVAQHEEREEEDSD

SEQ ID NO: 84462 - protein, 334 aa, Zea mays
  Coding DNA Sequence Number=SeqID_41087
MDISVDDYLVGGVAIFDAHTGRGPVGPMFCASGEIASAAAAKDVAGSVAQQLKHGRIERLQTQHTEAVRDKSVAENKSHNLMEKLSTAEAEKEDLGRRLAAEKEDVDRACAEAQAARAEAKLARAEANLALQRAAEAEASHRSLCGYLDKAEASTRTEEELEMLPSIVTGLMSFASLITCEGATNALSHEGCRHFEVFDRSDKDFDRGIFQVEDTVLKRSAGVLYDRMWGPHGRDTVLERFDRAMEQMANDEEVEDFGGLESTAPLAEGTRVGIGQQPALPTGASEDPVAAAVPPGEDTSVVAALALPGEDSSMAAAPAAEDLAASVGPSQVVG

SEQ ID NO: 84463 - protein, 48 aa, Zea mays
  Coding DNA Sequence Number=SeqID_41088
MQIKDQGSTIHPPIGALKRPKCDMNEAIEACYKDFNTIAKQIGSQDLI

SEQ ID NO: 84464 - protein, 265 aa, Zea mays
  Coding DNA Sequence Number=SeqID_41089
MPKKGDLPVVKLLLPFVLLRPVSFEDNVDLPFNAWECSTPSSFLSLRLPWLARPSPWWGRWKRLEWSAIPNGMLEVSAVPQGVAHVLVIRTLGIEDVVQCPLTSTGCPSSTRDGWSGSMDLFTGPLLLMLVGLLVRVAPWCWWRRFCPSDEVLGPFVSGDVEVRFSKQLFEGGRRFLHYGSDEGRVIRSPVEVLNHCCLSDFGDAVSHGMKPLKVRPKCFIAPASDGFECRGKCRSHYNASYSRTMGKYVVITSSVAPAARAAVV

SEQ ID NO: 84465 - protein, 88 aa, Zea mays
  Coding DNA Sequence Number=SeqID_41090
MEVTEEPSALDVATAEDRAPEGGAGSYPTPEGVAGSNPALVGSARYNLAPEDVQAFVDGISAQLRSCGATIPEQAMSLMQWNPLLLQK

SEQ ID NO: 84466 - protein, 217 aa, Zea mays
  Coding DNA Sequence Number=SeqID_41091
  Subcellular localization annotation: CTP_CleavageSite=66; ConfidenceScore=5.30e-01
MWGVLRRSTSRASKVNGTWDHFVCTTGPVTATWLMLRVRAVFAVEQAVKYARLLRTSPAPTTSSVSAALGGILLSARGLTSGVLVGDVMYLLLTAAVPPGVCLRRPRPRTAGLRRVFGFPLRLDFALVELFGSGVFFEQLIQLLEVPGRISDAVAVKDASPKATDGVSESSAKEVGVWAVPLEVEQEFVPETSPGVDGQRGQPGVPGEGRAFEGDDE

SEQ ID NO: 84467 - protein, 127 aa, Zea mays
  Coding DNA Sequence Number=SeqID_41092
MGDMELLDDWMVKGTTGQGDTPGRCDKVEKGRAGRDPVESECGLAREKMRWPSINPGEDLTCGEKHRARTRQATRGRRARASWTMVLRAAMGRNSAWGSSRALELRPWRRWSSGRGRSTQWRWGSVH

SEQ ID NO: 84468 - protein, 27 aa, Zea mays
  Coding DNA Sequence Number=SeqID_41093
MDVYGYTDMGILRSVMYLQQRTYAQVH

SEQ ID NO: 84469 - protein, 517 aa, Zea mays
  Coding DNA Sequence Number=SeqID_41094
  Homolog annotation: Hit_ID=Q8SA86; Match level="QueryCoverage=14%, HitCoverage=8%, E-value=5e-08, Identity=41%"; Hit description =Putative retrotransposon protein
  Pfam annotation: Domain name=Transposase_28; Domain location=32-183; Score=-64.3; E_value=0.078; Accession=PF04195.3; Description =Putative gypsy type transposon
  Subcellular localization annotation: CTP_CleavageSite=19; ConfidenceScore=5.35e-01
MPSSSSSAAATPPVDSSPSAAASSEETLSSLMAEELRAGDSVAFGVSRMSSARMEDMQRLGYFGGGVARVPGTEKVPEPEGELVVFEAFFAAGLRLPAHRFVGEVLCRFNVQIHQLTPMSWWPCRRSDEGQLATVAPAAAIATAAIVPKARGEALGSGGEVSALAVVRDEAGAATRRLKEVTEALSQVADFASRTASGALTAAVSAEVERLQTQHADAVREKSASDSKCRKLTDKVAILEREKADLRRQLAAERREANEAIAKEQAAQAEAKLARAEGNLAKELAEHLQERLTALESRAKGAEAAMRAEAERTRTQLMDTYRELGGAAGTPRCRGGGVMSYASLVTCEGAMNALSREGCRHFEVFDQADEDFDRDVYKVEDLVVKDSAGALYDRMWGPHGREVVRERAETTMAQALRGERVDDLGALNSALPDPEPTPAEAVSGVAREPTPETAAIATAAPTSAAAGEDLPPKVAEGAPDAPAAAVPSAEDPAAEAAETTAEAAAEAPAASGPPQVA

SEQ ID NO: 84470 - protein, 795 aa, Zea mays
  Coding DNA Sequence Number=SeqID_41095
  Gene Ontology: Mol. function=transferase activity, transferring glycosyl groups; Cellular component=integral to membrane; Biological process=cell wall organization and biogenesis
  Homolog annotation: Hit_ID=Q7PC69; Match level="QueryCoverage=94%, HitCoverage=99%, E-value=0.0, Identity=74%"; Hit description =Probable xyloglucan glycosyltransferase 3
  Pfam annotation: Domain name=Glycos_transf_2; Domain location=271 -446; Score=8.2; E_value=0.011; Accession=PF00535.17; Description =Glycosyl transferase
MAPPSSWWGGEDQDGTPVVVKMDNPYSLVEIDGLGVPPADKARGKNAKQFTWVLLLRAHRAVGCVAWLAGGFWGVLGAVNRRVRRSRDADDEPDAEASGRGRAMLRFLRAFLLLSLAMLAFETVAHLKGWQFPQHLPGNLQELEEQLQHLPEHLRHLPENLRQLPDHLRMPERQEIQGWLHRAYVAWLEFRVDYIAWAIQKLSSFCILLFMVQSVDRIVQCLACFWIKIRGIKPRVPASGGKPRGTTGRKSADAENGFADGDADGYFPMVLVQMPMCNEKEVYETSISHVCQIDWPRDRLLIQVLDDSDDEVCRMLIKAEVTKWSQRGVNVIYRHRLSRTGYKAGNLKSAMACDYVKDYEFVAIFDADFQPNPDFLKLTVPHFKENPELGLVQARWSFVNKDENLLTRLQNINLCFHFEVEQQVNGVYLNFFGFNGTAGVWRIKALEDSGGWMERTTVEDMDIAVRAHLNGWKFIFLNDVKVLCELPESYQAYRKQQHRWHSGPMQLFRLCIPAVFRSKIPFWKKANLVMLFFLLRKLVLPFYSFTLFCVILPLTMFVPEAELPIWVICYIPVLMSLLNILPAPKSFPFVIPYLLFENTMSVTKFNAMVSGLFQLGSSYEWIVTKKAGRTSSASDILALAEADSHAPLPPPAKLVRRVSEGGLQEWSRLREQETAEWANKEEAAAALAAAAPATPKMTRKTKKPNRIFKKELALACLLLTAATRSLLSKQGLHFYFLLFQGVTFLAVGLDLIGEQNFDQQFIQREPKPRFHEASVNHHFVSFGKRNIILPSGPHD

SEQ ID NO: 84471 - protein, 26 aa, Zea mays
  Coding DNA Sequence Number=SeqID_41096
MRLHTLRDDVVLYSQRCLLLIKGSGK

SEQ ID NO: 84472 - protein, 141 aa, Zea mays
  Coding DNA Sequence Number=SeqID_41097
  Subcellular localization annotation: CTP_CleavageSite=70; ConfidenceScore=5.42e-01
MAWRRGLGRLWSLDHARATHIRTGLSANRFVTSTRSAQGAAHVGAAGTRRQTTSMRNSAQPAATLMHRCRAQSLRAPTEHSTTTGAKPKPHTSVGGASSKSRPMADLRLHERLQQKAKRVAHGGRSGGPPLSSREVRGLGA

SEQ ID NO: 84473 - protein, 63 aa, Zea mays
  Coding DNA Sequence Number=SeqID_41098
MQGRTSDGSANEVVRGAVDPWQKRSVRRAIASARVATHVRRHHESSHDSRRSSGSPIRGPFAK

SEQ ID NO: 84474 - protein, 133 aa, Zea mays
  Coding DNA Sequence Number=SeqID_41099
MQGRTSDGSANEVVRGAVDPWQKRSVRRAIASARVATHVRRHHESSHDSRRSSGSKIRGPFAKSRCTGQLSRCRDSCARCAARLFARRTEDSLHGFWRVDPARQREGDSQACPRATDLLAPHVGAITRARPRG

SEQ ID NO: 84475 - protein, 124 aa, Zea mays
  Coding DNA Sequence Number=SeqID_41100
MAVGKNPALELPINCSGLTLHELPPLVSSCHIIPHNLLSDERMNVDEQGGFGGQGTVRYKLWRGSTDSGDGVASKECEKERGSLGRKRARLGGARAGRGFYRGEGGRGRVGRGGKNGCQGLQGH

SEQ ID NO: 84476 - protein, 157 aa, Zea mays
  Coding DNA Sequence Number=SeqID_41101
MGKGKRGRGSPHRAGDKRKRDPSPPSEDFGDSEYSEEEVSSESEGSLALASPPASSDDSDDSQGIAVEVWTYIRSVERAGLERSDESKVSSDEEDSFSSSEERSGDDSDDEGGGGGGDSDNGDGRGGDDDGGRGGEGDDNGGSGSGGGKASRKAPLV

SEQ ID NO: 84477 - protein, 355 aa, Zea mays
  Coding DNA Sequence Number=SeqID_41102
MSRRLREASQQLSQHEDAFREKSAAESKNRRLAEKVAALEAEKTDLRCQLVEERREANQAIAEAQAAQAEANVARAEGSLASQRTEEWEVRFNALRGRVDKAEASTRSEVERTLAQLVDSYRELGARTADFEVPNREAGLRFLEWLQEELLVLPTIVEGFMSFASLVTWEGAMNALSCEGCRHYEVFDRSDESFEREIFKAKDPVVKQSAGALFDRMWGCMMERAEDVEDLGGLVGAPLEAAEVKPVLPSDAGEGPSAAPVPAMAGEDPVLAPAPTAEGVLEVVAEPAVEGPMAAAVPSQESSDEDLDYFAALDVAAAEASPRVMDAEVLPGLSAGRRRRRAVAKRRGDGYHPEG

SEQ ID NO: 84478 - protein, 57 aa, Zea mays
  Coding DNA Sequence Number=SeqID_41103
MGISYTSNGALGTPPMANTATSITSGLLNYCLYILRLIKLVVDILASLDIVQHITAC

SEQ ID NO: 84479 - protein, 174 aa, Zea mays
  Coding DNA Sequence Number=SeqID_41104
MPERGVAHEVAPDLAPEPAIEDLPAPALEGKPRAEDTIEAIALHGLTTFCGFHPLELSTHPIGLFPVEKEDDPMWKDQVEHANDIWAIYLCQTAHLTVRCMNALYRLQVMRGEAMSHLMALLEATKITLDNREELVVDLSTDMVEKDLQVEQMSNEIQELEELVGTRENTIEEI

SEQ ID NO: 84480 - protein, 81 aa, Zea mays
  Coding DNA Sequence Number=SeqID_41105
  Subcellular localization annotation: CTP_CleavageSite=41; ConfidenceScore=5.35e-01
MQKLVQNTVRIMYSAQMGSQMGPQFTRPSQSGQTPNTNETQGSETGQGNPQMDIQWLMPLEDRFFLLHNQDYSTTACTSGV

SEQ ID NO: 84481 - protein, 165 aa, Zea mays
  Coding DNA Sequence Number=SeqID_41106
MRNHFERGQRLHHLATPSAPDDFADLTEPTEAKRPAVSTLRPTRCKTKAYDERAQRPIVLRAPSEHPGNRRVVPAAARTLLSSLPHPPNHPFAAIASRAPAQRGLAAALLRALPGHFAQSLAPTSPMPSSEHLAIPAVVASGDKDDVYDYGNGKEEGVEADLQEF

SEQ ID NO: 84482 - protein, 193 aa, Zea mays
  Coding DNA Sequence Number=SeqID_41107
  Gene Ontology: Mol. function=protein binding; Cellular component =nucleus; Biological process=protein amino acid autophosphorylation
  Homolog annotation: Hit_ID=A2YRI5; Match level="QueryCoverage=85%, HitCoverage=70%, E-value=1e-67, Identity=73%"; Hit description =Putative uncharacterized protein
  Pfam annotation: Domain name=Mob1_phocein; Domain location=27-193; Score=252.1; E_value=1.2e-72; Accession=PF03637.8; Description =Mob1phocein family
MCNCSEGGSRLWELICGFLDIQGTQLRRHIDATLGSGNLREAVRLPVGEDLNEWLAVNTVDFFNHINVLYSTLAEFCTPHTCPVRVQVGRRRAKVKVPIKVSAPKYVDYLMDWIEIQLDDEAIFPQQLGAPFPTNFRDVVVKTIFRRLFRVYAHIYHSHFQMIVKLKEEAHLNTCFKHFALFTLFFKPDKRPG

SEQ ID NO: 84483 - protein, 419 aa, Zea mays
  Coding DNA Sequence Number=SeqID_41108
  Homolog annotation: Hit_ID=Q6J9V9; Match level="QueryCoverage=26%, HitCoverage=41%, E-value=2e-07, Identity=34%"; Hit description =Putative uncharacterized protein
MEAQAHASCNRHAECFVHATAPPLAPPPRLLDCGTNTATRGDPEHDPAAPAWRDGQCDQKWAGSNGGGRRAGAAVASSAKPTSHPGEKRATLRLRHNDRVRKGTGKGDTPKRILPREGTRLRASLLIRGSKAGPSDGFNSRLRARGLHTHYWSEVRRPAPRKGSTAASGYSGSAPTTDQGLRSRGTLGHFRDQRERSCNGIPSEGDIEPSDPVARGPGPADHPQRLGGCSRKPDSGQTVDSVNIPARELGTRPYTRATASSHEGTTRPAEALREALRPRRSQTTPPRPRGLYPAGALARTHRNKTQPRKAGPLAKKCDESLQASANTPFEARGLLSRTITRGTLKAPNSQLVTPISIKLQRPDGHHRKLRSARPRARTRAKPRKTVNSAPPDLGLGLGLGLSPGRRRTPLRPTQGLDSG

SEQ ID NO: 84484 - protein, 103 aa, Zea mays
  Coding DNA Sequence Number=SeqID_41109
  Homolog annotation: Hit_ID=Q7XHW3; Match level="QueryCoverage=68%, HitCoverage=5%, E-value=1e-26, Identity=78%"; Hit description =Putative uncharacterized protein OSJNBa0008J01.25-1
MADILSPSIFNSKARLSRDSRVLMIYKSLLYGKSAGNMLHLIIEACISRKLIDTSAYLWPGYVVPSGTLKDTALPQESPWLNFMKGSRHSGPLIDALVASPAS

SEQ ID NO: 84485 - protein, 247 aa, Zea mays
  Coding DNA Sequence Number=SeqID_41110
  Gene Ontology: Mol. function=protein binding; Cellular component =nucleus; Biological process=protein amino acid autophosphorylation
  Homolog annotation: Hit_ID=Q2WBN3; Match level="QueryCoverage=98%, HitCoverage=99%, E-value=1e-81, Identity=64%"; Hit description=Mob1 -like protein
  Pfam annotation: Domain name=Mob1_phocein; Domain location=30-237; Score=198.8; E_value=1.3e-56; Accession=PF03637.8; Description =Mob1phocein family
MSFFGRGSRNQRTFRPKKSAPSGNKGMQLKRHIDATLGSGNLREAVRLPIGEDLNEWLAVNSNLVSVQCLLVSSRRLLQPSEHSLRHPDGVLHASDMPDHVSRTKKVSRCKLSDENETIPPSYSYEYRWADGAKIKRPIEVSAPKYVEYLMDWVEAQLDEETIFPQKLGAPFPPNFRDVVKTIFKRLFRVYAHIYHSHFQVIVRLKEEAHLNTCFKHFTLFTLEFRLIDRAELAPLNELIEPIILGY

SEQ ID NO: 84486 - protein, 176 aa, Zea mays
  Coding DNA Sequence Number=SeqID_41111
MEPDDEAEMDEDEDKLALAVAGGRAATSSRATSPCSRVRSSSEFNNSFGETNYNLLTDICQLPDHLDGLQIPTKILQRRWRWGFLQHGRILLHFDSVFHKRLLGVKQVFIQGKCQQLISRPGFVGWADGLQEQQTEDLNAGLQRSSPDGPRRGERVRKPNVRVQGPRVEGVSVDIL

SEQ ID NO: 84487 - protein, 232 aa, Zea mays
  Coding DNA Sequence Number=SeqID_41112
  Homolog annotation: Hit_ID=Q6QP51; Match level="QueryCoverage=64%, HitCoverage=68%, E-value=9e-51, Identity=68%"; Hit description =Putative growth-regulating factor 1
MQEACNRTTVVHPFGFIASGTEKGDISKGILLREGSRPRALLLIRGSKAGPLEGFDSRPEHSGFKPITDQGFEGWPLGRVRQPPQSTRAPRPLLIRGSKAGPSKGFDSRPRARRVRDDSGYVRYMAEARATLPSHFTLSLTDLTGKQRRSPRSDCCATHQGEADNNQVQPRAQHEAPPRPTLGLCLARPQGSASGGIASSPDPGLNLRRSLRLAQPWARTDRATGDTSLPYP

SEQ ID NO: 84488 - protein, 130 aa, Zea mays
  Coding DNA Sequence Number=SeqID_41113
MSRAEVLEGQLAEATERLAGVSAQAGTLAENLVVRAQARCWRPPLKWRSFRPSRRPRLGQDLPRVETSPRVLLLPLLMSEPAGTVCLKTCLVAESLVRATPLSKQSKSAKDVLAKDFSEENFDAEGVPPF

SEQ ID NO: 84489 - protein, 526 aa, Zea mays
  Coding DNA Sequence Number=SeqID_41114
  Gene Ontology: Cellular component=nucleus; Biological process =regulation of transcription, DNA-dependent
  Homolog annotation: Hit_ID=A2XHV2; Match level="QueryCoverage=98%, HitCoverage=99%, E-value=1e-135, Identity=54%"; Hit description =Putative uncharacterized protein
  Pfam annotation: Domain name=GRAS; Domain location=121-439; Score =150.9; E_value=3.4e-42; Accession=PF03514.5; Description=GRAS family transcription factor
MKPMSCHEQEHPELAATTTNSGFDWLEDPISFLTADVDIAGGGYGWWSDPAAAQQDGIGSVVAQTLSPPAPLLAHTSPSIASPVVSEPSSKKRKSPAHRASASTGSNQRRRADQDRPGAGSSSGGSKRSGSKGGGAGSDRDTRWAEQLLNPCATAVEAGNLSRVQHLFYVLGELASFSGDANHRLAAHGLHALARMLPAAVGPAAAATVRVPPCECPTPGFAGAEPRLFRASLIKFHEVSPWFALPNALANAAIAQAAASGSGGRGGSEPRSLHVVDLGVSHGVQWPTLLESLTRLPGGRAPPSVRLTVAGAPPAPFSASPPGYDFSPHLLRYAKSIDLRLAISRAASLDSVHGLASSPSGEALVVCLQFRLGHAGADERTEILRKVRGLNPELVVVSELDGGGDGTAAGEFTARLELLWRFLESTSAAFKGRDGEERRLLEAEAGTSVASEAAGAGREAWRERMVVAGFEAAAFGDEAVESAKSLLRKYDGGWEMSASGTAGAVALRWKGQPVSFCSLWRPACSG

SEQ ID NO: 84490 - protein, 21 aa, Zea mays
  Coding DNA Sequence Number=SeqID_41115
MSEIFMCYIFTIEDEECHDVA

SEQ ID NO: 84491 - protein, 352 aa, Zea mays
  Coding DNA Sequence Number=SeqID_41116
  Gene Ontology: Mol. function=kinase activity; Cellular component =ornithine carbamoyltransferase complex; Biological process=amino acid metabolic process
  Homolog annotation: Hit_ID=Q6QP54; Match level="QueryCoverage=12%, HitCoverage=15%, E-value=5e-10, Identity=79%"; Hit description =Putative kinase
MALPVDVAGLCPRQGDVGAPPKPRLSLSSVAEAEPEPWGRARRKSFGRGQGGVRALGSGEAEFRRLPGLSPSPSPGVGRSGVRRLPGLSPSPSPGVGRSGVRRLPGLSPSPSPGVGRSGVRRLPGLSPSPSPGVGRSGVRRLLVSVRVRALGSGGAEFAVFRVLARVRALGSGGAEFAVAPLARPDCRSDSLCRVAPQSEWRRRRCPSVSPLYADGGYQLRIRRLEGTPNYGPRQMCMNSPKRWYPLPTSHVTHLPRDRDFPYTSTEEARQGFLPDRHRSKINQGPPYTDHSPTALAPFGYQDDLQVTRVLTAKRSNTDKQCIGKINITPNNRINYVIIFYAALRDRGNKNH

SEQ ID NO: 84492 - protein, 49 aa, Zea mays
  Coding DNA Sequence Number=SeqID_41117
MGQSADKVTPQNSERERGREARVTPTGRARLSETEGARAWARARGCFFF

SEQ ID NO: 84493 - protein, 96 aa, Zea mays
  Coding DNA Sequence Number=SeqID_41118
MECAKNLKNSFSKGGREITDETIKRNEKESHDASKEAKRAEKVVEQARLIAELSPPPEPYNPEADPSVKEELDIIKIANEAIDEVVDRLLNEAASP

SEQ ID NO: 84494 - protein, 153 aa, Zea mays
  Coding DNA Sequence Number=SeqID_41119
  Subcellular localization annotation: CTP_CleavageSite=34; ConfidenceScore=5.15e-01
MWKHSRVGSQPSSSRLWPSSEQPERQWSHADMKSCMAPGSRSPEKSQLTSGSSSSSEPAGPEVETAVSRSQVDHIWYPGRSGYALTKALTEAGSLGGSKLNLKGTGWKTEGTSWLVGGGEVASEVECVVISGARLMPDKSLARVLLGTCSQML

SEQ ID NO: 84495 - protein, 361 aa, Zea mays
  Coding DNA Sequence Number=SeqID_41120
MNALSREGCRHYEVFDQADEDFERDIYKVEDSVVKESAGALYDRMWGPHGREVVRERAETARARCLTRSRTRRRPCPRPPWSRPWRLPEGAPDAPAVAATGGGPPPETAGGAPDAHAAAAPRAEDPATVAAEATAEATAEATAGSSQVQDFGPAHATATSNFLAASTVDGGNKYDGSASEFSDFADSGSSVEWTEESSEEDLDYFAALDVAAAEASPRAADTEDVPGPSTGRRRRRAVAKRRVSGADGGRLRVSRPGPTGTVVLVGRREYGPAAPLGDFCAVSLRVRLRFFALIVLIRLHPLGDFCTVFAAWRCEPVSAGGSFRLDYEGALPPGLQLAPGLCPSCSDEYEGKDSVSIDEIL

SEQ ID NO: 84496 - protein, 169 aa, Zea mays
  Coding DNA Sequence Number=SeqID_41121
  Subcellular localization annotation: CTP_CleavageSite=37; ConfidenceScore=5.35e-01
MDLFVPFASIFLFRVTETITFPFEVSSSDRVFTLFPRSSPASAEPPSGSTIVAGSLTNWGEELYNMLPCIAIASPHRRYYVGALEEKKQQGVREQTGERPPMWWSVVLRAKGLLQVESGAKGVSGGTRANVANDRRGANEAVRPTLEFLCGWLFVSMQRSSGCSQFCWS

SEQ ID NO: 84497 - protein, 106 aa, Zea mays
  Coding DNA Sequence Number=SeqID_41122
MEKDHQESLRKKWKASLRLVDPQHDAERAAAASSAPPPRPSSLLAPPPQLVSPATDFLPPLAAPQPGDKAALDREPPGVQRHRDQLRRGVRPLQPGVSATGTQLQR

SEQ ID NO: 84498 - protein, 69 aa, Zea mays
  Coding DNA Sequence Number=SeqID_41123
MPSGGSLWHWVWVCSFLVALFSLNRIPVSWSTFWYYVGALEEKKQQGVREQTEKFRVFAVLLELAFEFR

SEQ ID NO: 84499 - protein, 129 aa, Zea mays
  Coding DNA Sequence Number=SeqID_41124
METDSLKHRAPLRNTRLLRRPRTRSLSREACNPYCKHPGSGTPQGRRLAARSLAARGAGAQAAQAQLGRSGQRRSGLKTGGGPALLAEANSGLAAGRGWGLATWEPGSGGWGRAGVGRWVGAWVLASWE

SEQ ID NO: 84500 - protein, 336 aa, Zea mays
  Coding DNA Sequence Number=SeqID_41125
  Homolog annotation: Hit_ID=Q6J9V9; Match level="QueryCoverage=22%, HitCoverage=26%, E-value=6e-26, Identity=76%"; Hit description =Putative uncharacterized protein
MGAGTHTSYELIRSTKKKPVVERVDCMRQASNCIATVRPFGSVHIRWTSAKEAGPHVMLALGRVSTAALEHSDFKPITDQGFEGWPLGRAGPSEGFDSRPRARRVRDDSGYIRYIAEAQATLPRYPRTFPRQAGTICIGIPLEGGIEPSDPVEGVWVRRITRRYFWSAPLGHQPTPNEWGTGVHSDHPLAAHRKHHVRRPPRATWRFPPPPCGKATQGRIIKVGKENSTARSAPTAVLATPATTNNKSRSTTEFSLGRNRKLRLARPQALASGGGLRLARPPDSASTPVSGGIVSSPDPGLGLKRSLRLDRPWARTDHANRGCIISLFLACSGYKE

SEQ ID NO: 84501 - protein, 170 aa, Zea mays
  Coding DNA Sequence Number=SeqID_41126
MTSEPTLLWRRPRPRLCSRGEDKPLKPKSRGSGSAGADGLVGGETFSGCHHLSTDDNGRLRADATPTNGGRPSLHRQIPTQVLVDGQAPNSARRRRAGVRTRQSKNMNATHAAYGVLDGPPPSCTTKILEAERWLKGADLHEAALLQRQQEQGDAGAPHSGAQKAEGRDA

SEQ ID NO: 84502 - protein, 230 aa, Zea mays
  Coding DNA Sequence Number=SeqID_41127
MGSGEAEVVRPRPGRSPSPEAEVVRPRPGRSPSPGVGRGGSRSAEARAESEPWGRAKRKSFGRGQGGVRALGSGEAELRRLSARVRALGSGGAEFAVFRVLARVRALGSGGAEFAVFRVLARVRALGSGGAEFAVFRVFARVRALGSGGAEFAVFRVLARVRALGSGGAEFAVFRVLARVRALGSGGAEFAVAPLARPDCLSDSLCRVALQSEWRRRRCPSVRLASGAVE

SEQ ID NO: 84503 - protein, 224 aa, Zea mays
  Coding DNA Sequence Number=SeqID_41128
  Gene Ontology: Mol. function=transferase activity; Cellular component= integral to membrane
  Homolog annotation: Hit_ID=A3AUY2; Match level="QueryCoverage=87%, HitCoverage=62%, E-value=7e-47, Identity=55%"; Hit description =Putative uncharacterized protein
  Subcellular localization annotation: CTP_CleavageSite=18; ConfidenceScore=5.28e-01
MATGDLRSLATVAAAVIACMGYARFAARRLRPVLSRLAAFLPVLAVLPFLPLAFRALHPRGISGFFLAWAAEFKLLLLACGQRPLDPSLPLPSFTAIATFPVTLRDPKSSASRPGLGLVESASMAALLAAIVSLYRYEERMNGYVLLTLYSVHVYLALELVLAAAAAASRALMGLELEPQFDRPYLSSSLRDFWGRSGTSPFRRCSASACSAPCARASAPPRVC

SEQ ID NO: 84504 - protein, 77 aa, Zea mays
  Coding DNA Sequence Number=SeqID_41129
  Subcellular localization annotation: CTP_CleavageSite=36; ConfidenceScore=5.69e-01
MASHSAMACLSAPGLVSGGKKSQKAVTPTNASVSGVAMARGGRGHPSCAAHHPSATAHAPCSVKNAAASPVGRSSVR

SEQ ID NO: 84505 - protein, 102 aa, Zea mays
  Coding DNA Sequence Number=SeqID_41130
MRGAFLHRQRARAPTPSTTRGLGIASNRSPITEDGGPSYLPCYPHPHALVRDATAARPPLKRRRKAVFMSHPVQMKWQEPFQIRMEAIIIYLEALFMFSEGL

SEQ ID NO: 84506 - protein, 168 aa, Zea mays
  Coding DNA Sequence Number=SeqID_41131
  Gene Ontology: Mol. function=protein-tyrosine kinase activity; Cellular component=chloroplast; Biological process=protein amino acid phosphorylation
  Homolog annotation: Hit_ID=A2Y9S8; Match level="QueryCoverage=87%, HitCoverage=35%, E-value=3e-56, Identity=70%"; Hit description =Putative uncharacterized protein
MVKALRKSMVHWFQEPTTFDCVACYCYVIILPEKTRYLNASNRELGDHFQTKRDGKNGVDASIEKRTLKLLQFTFQELKSATLNFRPDNILGEGGFDYVFKGWTEPNSTAPAKPGTGVTVAVKSLKPDALQGHREWVLHHKHLVKMIEYCIEDDQRLLVYEFHGTGKS

SEQ ID NO: 84507 - protein, 109 aa, Zea mays
  Coding DNA Sequence Number=SeqID_41132
MERGRGCTSVFIHSGEGPSGRNDPEIPSSPAIPAPESARFVHSGESDPRRETTDEVGPFVSWRREYECARGGAGQWAPGVGAAARIWAAREYTRKWAKMVKLLGMAELI

SEQ ID NO: 84508 - protein, 79 aa, Zea mays
  Coding DNA Sequence Number=SeqID_41133
MTALEEFGDEEPTSQRSTVPLPPRDVRGRRARAPQDDFFATVIDEHFDEEEGSEPEEEAKASCPYSSRRSRLPHSDDPC

SEQ ID NO: 84509 - protein, 113 aa, Zea mays
  Coding DNA Sequence Number=SeqID_41134
MHVSYSLHSLDCNLADGEYVLIPEQGPVHEEDQEQAPETAIEDLPAVPAIEGKPRYGGYKCGHCTAVAGVSGALYAKAVYLARFKNSIRIVCFSQLMRLLDPLYYIEYASGYG

SEQ ID NO: 84510 - protein, 52 aa, Zea mays
  Coding DNA Sequence Number=SeqID_41135
MARVACTLRGKRLDGGSTFSKHFCKTESLIIEKPYLDSLITSIPLRVFSLVG

SEQ ID NO: 84511 - protein, 83 aa, Zea mays
  Coding DNA Sequence Number=SeqID_41136
MVKNFGSKTVQIAMNAVVTSHLLVCLYSAAENEEEVEVEEKTSPPPPAEHQAGNWFYFDICGSESDSPINEGKHRCICQHLVF

SEQ ID NO: 84512 - protein, 71 aa, Zea mays
  Coding DNA Sequence Number=SeqID_41137
MASQPRRCSRTPRTDARALFCPDNTRGILYINNDRFVIAEGGKIDWLKSMMIRNKIRLREYLDGYKLQCEL

SEQ ID NO: 84513 - protein, 162 aa, Zea mays
  Coding DNA Sequence Number=SeqID_41138
  Gene Ontology: Mol. function=nucleic acid binding
  Homolog annotation: Hit_ID=Q5NKP8; Match level="QueryCoverage=97%, HitCoverage=24%, E-value=3e-12, Identity=33%"; Hit description =Putative uncharacterized protein 9C20.4c
MKFVHHASMSKAGHQKALDTLDDLVRVLSRIEPDIGVMTVTTEGDVFTGGMGSGSQTEQADQNIKSVLQVVGDENVGDKAGCEPGASNALVRVEHDGVRKSKMLGGEPLLRGGIGIEDWGGCETDKQSRKKLDFNIGGVSMDKPINEKPKGRMIRSDELNED

SEQ ID NO: 84514 - protein, 175 aa, Zea mays
  Coding DNA Sequence Number=SeqID_41139
  Homolog annotation: Hit_ID=Q8S456; Match level="QueryCoverage=59%, HitCoverage=12%, E-value=4e-07, Identity=30%"; Hit description =Putative uncharacterized protein 163K15.6
MDNMSEDISIKIDQTHLPPPPDSPIKPKEYPMKPDGDLVSTINKIVDLLGQDKFQETYKDGSPQFDATPKSMLSCLMARVSTTKVSVEVSPKDHPVFDKTPINEGLNDCVRTEHASYSPDPITDIVILDVNVGDLSLENRATLLHYLTFHSLNKIKPFPTDILRFRYERHNEASV

SEQ ID NO: 84515 - protein, 225 aa, Zea mays
  Coding DNA Sequence Number=SeqID_41140
MRVENLPTPVEATASQSESGVVNPSEDIDDIYIEEDNTTIHPMKPSHVNFDKSKIKGGHIEGAGYTTPPQYAVHLFEEHGVPRCRVRMTLEPHPLQSGWRSLDSESFGFRAEDTIESIALHGLTTFCGFHPLELSTHTIGLFPAEKEDDPMCKDRVEHAKDVWALYPGHTAHLTVRCMNALYRLQAVRAEAMSQLMGLVESTKITLDNREDLVVDLSTELVEKDL

SEQ ID NO: 84516 - protein, 113 aa, Zea mays
  Coding DNA Sequence Number=SeqID_41141
MKGWVRSGSLWRSRRGADRRRWWSEEVDPRAQAGELVSGEESGLTRDDRSIKWVWELHLRSWKMPLAKLTERPAQLGHGWSKLAAVAEAWAVMAGGGMACSRRSPVNYGLGKA

SEQ ID NO: 84517 - protein, 646 aa, Zea mays
  Coding DNA Sequence Number=SeqID_41142
  Gene Ontology: Mol. function=identical protein binding; Cellular component=extracellular region; Biological process=negative regulation of catalytic activity
  Homolog annotation: Hit_ID=Q6AUV9; Match level="QueryCoverage=93%, HitCoverage=78%, E-value=1e-168, Identity=53%"; Hit description =Subtilase family protein
  Pfam annotation: Domain name=PA; Domain location=353-467; Score=33.9; E_value=5.9e-07; Accession=PF02225.13; Description=PA domain
  Pfam annotation: Domain name=Peptidase_S8; Domain location=133-587; Score=67.2; E_value=5.5e-17; Accession=PF00082.13; Description =Subtilase family
  Pfam annotation: Domain name=Subtilisin_N; Domain location=45-126; Score=59.0; E_value=1.6e-14; Accession=PF05922.7; Description =Subtilisin N-terminal Region
  Pfam module annotation: Pfam domain module=PA::Peptidase _S8::Subtilisin_N; Domain location=353-467::133-587::45-126
MASSAHALLLTLLIATAVLSTAPALCYVSPGSNLHHDKHSAPGYRTHIVLVRPPSDAEAADESAHRLWHESFLPSSLTDSVEPRLVHSYTEAFSGFAARLTDAELDAVTKKPGFVRAFPDRTLQPMTTHTPEFLGLRQGSGFWRDVAGYGKGVIVGLLDVGIYGAHPSFSDHGVAPPPAKWKGSCAGSASRCNNKLVGVRSLVGDDARDDFGHGTHTSSTAAGNFVAGASRNGLAAGTAAGIAPGAHVAMYKVCTGAGCTDSAVLAGMDAAIRDGVDVISISIGGNATLPFDHDPVAIGAFSAVAKGITVVCAAGNNGPKLASVVNDAPWLVTVAASSVDRSFVAEVELGNGVTVAGEAINQVTNASVKPSCHPIPILYSEERRNCTYHGEDEHRVAGKIVVCEAVDNLLPYNTSEKSILRDIKDAGAAGVVVINTKADGYTTVLYDYGSDVVQVTAAAGAKITKYVTSSSSAASAVRFSHRTLLGVRPSPTVASFSSRGPSTVTPGVLKPDVLAPGLNILAAYPPKTPLGTGPFDVMSGTSMSTPHVSGVAALIKSVHPNWSPAAIKSAMMTTSDNVDRSGGPGLGRAAQGRPTRTPPAPGPCEPPRGPPTPGLVYDLGAAEYAQLHLRAPGATPRWPSSLATRA

SEQ ID NO: 84518 - protein, 190 aa, Zea mays
  Coding DNA Sequence Number=SeqID_41143
MSLAVRVSPGTLVFTKAGEKKTFSVTLHGNTDVLHGTSPCAVIDLSAPPRRHYAGCTLLSRALGHAHTLTEGSPWLARELHLESWRVSEVSPSVYGARGNWRFLAGVGDPHRVVAGCPCFAVVGKFLLCVITIIPSLRCTGWIGKLRSGAFGCGSDEPATTVARAPPPWALGVEDRASAVDPLVDGSGRL

SEQ ID NO: 84519 - protein, 73 aa, Zea mays
  Coding DNA Sequence Number=SeqID_41144
  Subcellular localization annotation: CTP_CleavageSite=37; ConfidenceScore=5.04e-01
MGLLMGSNKNPAVGMGNPLGTRNPHGYGFGQNFIPVMGMSFLAGVFFLRGYGFGQIILKGKCALGPFLSILVI

SEQ ID NO: 84520 - protein, 345 aa, Zea mays
  Coding DNA Sequence Number=SeqID_41145
  Gene Ontology: Mol. function=polynucleotide adenylyltransferase activity; Cellular component=nucleus; Biological process=RNA 3'-end processing
  Homolog annotation: Hit_ID=A3BNL8; Match level="QueryCoverage=64%, HitCoverage=90%, E-value=5e-50, Identity=67%"; Hit description =Putative uncharacterized protein
  Pfam annotation: Domain name=NTP_transf_2; Domain location=125-226; Score=7.3; E_value=0.037; Accession=PF01909.14; Description =Nucleotidyltransferase domain
  Pfam annotation: Domain name=PAP_RNA-bind; Domain location=211-324; Score=-0.6; E_value=8.2e-07; Accession=PF04926.6; Description =Poly(A) polymerase predicted RNA binding domain
  Pfam annotation: Domain name=PAP_central; Domain location=71-210; Score=-152.8; E_value=0.069; Accession=PF04928.8; Description =Poly(A) polymerase central domain
  Pfam module annotation: Pfam domain module=NTP_transf_2::PAP_RNA -bind::PAP_central; Domain location=125-226::211-324::71-210
MAYMTAVAPVPWWPPPPELAHAGLLVASSPAGYPEPQTLPFLFAPLPPPPPAGCPLLPPPAPIVIQLQPHPSLLAEVDHRRSSSLVQFLKDEGAVLSPEDENKREKVIRELKKIVMHWANAVAYEQSVPQGLATATVLTYGSYTLGAHGPESDIDLLCLGPCIATLQYHFFVVLRQILQGRPEVSEVHTVEKAKDPLRHDFQWSWLFEPFPYDQKYQQFLRIALRAPTIAELGDWAGWVKSRFRFLILKLERAGIECDPCPSEEVDHTDNDPNVVFYWGLIPKESFSCLRACAAGSIHRQYMQHCMMGYEGTDEGQIERRDSRYWTGYSFELGGVLVCARIWEDY

SEQ ID NO: 84521 - protein, 180 aa, Zea mays
  Coding DNA Sequence Number=SeqID_41146
MSEARIQVSWSIQSARAYWSCGPLLGVATFGSWLGLNLDAGRRTPPRPTPGLGLDLDAGRRTPPRPTQGSDSASASEDGLHLARFRARTQPRPRKMDSASSDPRARTQPRPRKTVSASPDLGLGLNLDLGRRTPPRPTPGVGLSLDLGRRTRPHPRRSLRLARPRARTDHVTGGPSLPYP

SEQ ID NO: 84522 - protein, 52 aa, Zea mays
  Coding DNA Sequence Number=SeqID_41147
MGGTTMLTDGPGLPEGERCERERVESLTGGAALLCLRKVQESELLTKELISA

SEQ ID NO: 84523 - protein, 549 aa, Zea mays
  Coding DNA Sequence Number=SeqID_41148
  Gene Ontology: Mol. function=binding; Cellular component=nuclear pore; Biological process=intracellular protein transport
  Homolog annotation: Hit_ID=Q94KB0; Match level="QueryCoverage=86%, HitCoverage=93%, E-value=1e-104, Identity=41%"; Hit description =Importin alpha 1
  Pfam annotation: Domain name=Arm; Domain location=133-174; Score =31.9; E_value=2.3e-06; Accession=PF00514.14; Description =Armadillobeta-catenin-like repeat
  Pfam annotation: Domain name=Arm; Domain location=175-214; Score =40.2; E_value=7.4e-09; Accession=PF00514.14; Description =Armadillobeta-catenin-like repeat
  Pfam annotation: Domain name=Arm; Domain location=216-257; Score =21.8; E_value=0.0026; Accession=PF00514.14; Description =Armadillobeta-catenin-like repeat
  Pfam annotation: Domain name=Arm; Domain location=258-297; Score =21.1; E_value=0.0041; Accession=PF00514.14; Description =Armadillobeta-catenin-like repeat
  Pfam annotation: Domain name=Arm; Domain location=299-339; Score =26.1; E_value=0.00013; Accession=PF00514.14; Description =Armadillobeta-catenin-like repeat
  Pfam annotation: Domain name=Arm; Domain location=341-381; Score =37.3; E_value=5.6e-08; Accession=PF00514.14; Description =Armadillobeta-catenin-like repeat
  Pfam annotation: Domain name=Arm; Domain location=384-424; Score =29.5; E_value=1.2e-05; Accession=PF00514.14; Description =Armadillobeta-catenin-like repeat
  Pfam annotation: Domain name=HEAT; Domain location=139-176; Score =2.3; E_value=12; Accession=PF02985.13; Description=HEAT repeat
  Pfam annotation: Domain name=HEAT; Domain location=179-216; Score =16.0; E_value=0.11; Accession=PF02985.13; Description=HEAT repeat
  Pfam annotation: Domain name=HEAT; Domain location=304-341; Score =5.7; E_value=3.7; Accession=PF02985.13; Description=HEAT repeat
  Pfam annotation: Domain name=HEAT; Domain location=347-383; Score =8.9; E_value=1.3; Accession=PF02985.13; Description=HEAT repeat
  Pfam annotation: Domain name=HEAT; Domain location=390-426; Score =4.7; E_value=5.3; Accession=PF02985.13; Description=HEAT repeat
  Pfam annotation: Domain name=IBB; Domain location=5-124; Score=1.8; E_ value=0.00026; Accession=PF01749.11; Description=Importin beta binding domain
  Pfam module annotation: Pfam domain module=Arm::Arm::Arm::Arm::Arm::Ar m::Arm::HEAT::HEAT::HEAT::HEAT::HEAT::IBB; Domain location=133 -174::175-214::216-257::258-297::299-339::341-381::384-424::139 -176::179-216::304-341::...
  Pfam module annotation: Domain location=347-383::390-426::5-124
MPRAPRRQSDEARRGAYKPRVDFSRSRRRREDGLLALRRLNRDTGLFKRRRDEPAPAVPASDLTPTRAEAAPFAGITRPAFTPSSPPDVAAPRDAAESELEGLSELVDKLCSDDTTSQLEATIQFRKLLSDEKNSTVIKIIRADVLPRFAEFLSRHGLPQLQMEAAWVLTNIAASDYTLLVAECGAVPRLVELLGSLNANIRHQAIWCLGNIAADLPSCRGILFDHGALTPLLSQFREGMKIPVLRTAMWALSNLCFGKLPAEVQVKPILEIISQLIHSADEKILADACWTVYYICGDKGDAVQDVLDAGVCPQLVNLLMHASANVLLPVIMALARISAGDDKQVEAVIDADIITSLIVLLRTSEPDVKKEAAWAISTAASGGSSDQIQYLVSRGCLEPLCSVLTHNDPDLVYTCLEGLENILHAGEAGKKGEESGTNPYAEFILECGGLEKLEDLQDVDSDRIYELAMKLLQSYWEEEVSESDDPNIPGSNDSSDTVEATSEDAAAAVQPPPVTVRRRSVAIAGTEAAAVNACECHASSAPLMETGYG

SEQ ID NO: 84524 - protein, 245 aa, Zea mays
  Coding DNA Sequence Number=SeqID_41149
MSGAPTALWLPTVDCAIYGKKSGTGHVRFNSRLRALELRAHYWSEVRRLAPRKGSTAASGHSGSAPTTDQGNDFVTESHQREASSPRTLSKGDQVRRITRSLGRHRKLHLARPQGSSSTSTLDDGLCLARPQGSGSTSTLDDGLRLADPELGLSLGLGRRSPPRPTQGSDSTSTSEDGLRLARPQGSDTASASEDGLRLARPRARTQPRPRKTDSASPDPRGRTQPRPRKTDSTSTSEEPLPRPT

SEQ ID NO: 84525 - protein, 301 aa, Zea mays
  Coding DNA Sequence Number=SeqID_41150
MSSHSMHRVLPPSEPPDGEHSRCFRLAIVGGTQLRGSWYLSAIAWLQGFSSGSPAASPRRWSPKTVTTSLMVGRSKPGYDLCPALSFKDLHHPGWGGGRTEPELYLPRGALGLLAQLALARLPVPPPAARAVVAPRSPEDHPRRRALLGQRSCSLAVLPLLRYGASAWRSVLARPRGSEWGSAGGQMASVVGAEVVAAEEVLVADGITATIRAPGFRLFGFDSLSSPLEWGRGNPRPLCGEPGPKAAVSAWREAELARKEDFVSRSLVRPSTGGTSAGVELRRPRAGLVSSEDSWLRLRGG

SEQ ID NO: 84526 - protein, 163 aa, Zea mays
  Coding DNA Sequence Number=SeqID_41151
MESRGYDGGAGTRRTTVGELRLRENHSGERGSAEPGREGAHRRMSRATNSEAELTVALDGARMRQWPQNRRWSAAGGGGALYTRGQSKREGERVWLRAQMGEGRWASRARGSKGARGLGRGRTTRGRGRVHGGRSWARGFLIQIQFKFQIQTKSNMCNNSKNI

SEQ ID NO: 84527 - protein, 222 aa, Zea mays
  Coding DNA Sequence Number=SeqID_41152
  Pfam annotation: Domain name=zf-CCHC; Domain location=138-155; Score =13.5; E_value=0.014; Accession=PF00098.14; Description=Zinc knuckle
MVVAQGRDGRRWRSSGCARITPVNAGRLNQGGKGHTERCSKKLTVRWRSPWHWTGRKCNSGRRTGKVFLLAPIHPIWLPDSIIQLVLEWVNDHFTLTGSLFKKVTKGHGVSKPPFFEETNHPYWKIQSHESAAWQAKDGCFNYGDSGHFNDNCAKMMGKAEASKLDHHSSWPRASASTPPASTSRSGGSTRRYLHKDKIKEHASLSDLDHNSDDTSASSSDD

SEQ ID NO: 84528 - protein, 125 aa, Zea mays
  Coding DNA Sequence Number=SeqID_41153
MTLGDDVVGSDDNDIGDDSTFKLSLSIDDLVTEVDELTVALASQDKLLTLPESVPLPSAEGFAECFLSGTRQSRICRVPPSAKFCARLLETWKTVHAKMIFMLLSTSYDRFQERTGNFEHHAHST

SEQ ID NO: 84529 - protein, 96 aa, Zea mays
  Coding DNA Sequence Number=SeqID_41154
MEELNVQGDLTYTEYPVEILDTLTRVTRNKVIKKRAAQQSGADTLTPRGSHLCSRAHAPDKRGLLGVRFVFNNIAGILLGPAVPRLLCAWRKSEPS

SEQ ID NO: 84530 - protein, 212 aa, Zea mays
  Coding DNA Sequence Number=SeqID_41155
MGKGNKRKREPTPPSEDFGDSEYSEEEFSSESEGSPAPVSPPASSDDSDDSQGIVAEVWTYIRAVERSGLEGSDESEFSSDEEDSNGGEDEDDDDDDGDDDDGSDGDGDGSNGSGAAAARAALEAAAVRAAPKAAAARAAPGAAAARAAAARPVAKHHWSLDISIISNAERLKVDISVLEVTLSNRTRGQRFRGDAESVKVDIGILEATPSD

SEQ ID NO: 84531 - protein, 125 aa, Zea mays
  Coding DNA Sequence Number=SeqID_41156
MGKNNKRKREPTPPSEEFGDLEYSEEEFSSESEGSSAPVPLRELSDDSDDSQGLAAEGSDEEDSDGGGEDEDDDDDGDGDGDGSGRGGGDGSKDGDGSCGGSNRGGSSRGSTRGGSGSGSNRASG

SEQ ID NO: 84532 - protein, 770 aa, Zea mays
  Coding DNA Sequence Number=SeqID_41157
  Subcellular localization annotation: CTP_CleavageSite=19; ConfidenceScore=5.22e-01
MPSSSSSAVATPPADSSPPAAASSEETLSSLMAEELRVGDSVDFGVSQMTSARFQDMQRLGYFGGGVARAPGTEEVPEPEEDGVVRLVGRYVPRTEGQRSFDIRGSNDRLNRVFELNQLSYDGYPGQDDVDRRGKKPVVETGDDPAPAAAPSSKKRKLGTSMGGLGVSDSFARELMRTCAAPGGRMSSPELRESSARMLRVTGGCWPRNVPIPRAAGEDCFTSRMVREWRVFPYGRNITAVVSAVMDKDHQGAAQKRQAAVRLHEARPKRQRGSAKAAGSGGGKPPLAAKSGASASSKAPEATAGVGGSKSMKVVPPVSGVAEVAKAARALPLSGKRVADFGTYINVDDYLGGSDEGQLAIVAPAAAIATAATVPKARCEALGAGGEVSALAVVRDEAGAATRRLKEVTEALSQVANFASRTASGALTAAVSAEVERLRTQHADAVREKSASDSKCRKLTDKVAALEREKAELRRQLAGERRETNEAVAKEQAAQAEAKLARAEGNLARERAEQLQERLTALESRVKGAEAAMRAEAERTRTQHMDTYRELGARTGDFEVPDRDLGLRCLEWVQEELQELPTVVGGFMSYASLVTCEGAMNALSREGCRHFEVFDQADDDFERDVYKVEDPVVKESAGALYDRMWGPHGREVVRERAEAARAQAARGERVDDFGALNSALPDPEPTPAEAVSGVALEPTPETAEDAPDAPTSAAAGEDLPPKVAEGAPDAPAAAAPSAEDAAVVAAKTTAEAAAEPTAEAPAASGPSQVA

SEQ ID NO: 84533 - protein, 59 aa, Zea mays
  Coding DNA Sequence Number=SeqID_41158
MEARMMAEREARLADHQRIAEMFQYMANLGRHPTTLMVRPAQRSTSPTAHLNESYVFSV

SEQ ID NO: 84534 - protein, 88 aa, Zea mays
  Coding DNA Sequence Number=SeqID_41159
MGATGILCDSTHDAVTKECVAPVSNKTFAEWYSTENEDGLPGCSDAGIDFLLAGCSDGTAAAEETASGTTAAGSDADAGAGAGVGDLA

SEQ ID NO: 84535 - protein, 150 aa, Zea mays
  Coding DNA Sequence Number=SeqID_41160
MQSLQVTGLTWHRATQGTLRQARRQKGDHRITCSAPNMSHLQKTSCCTLYPQVVIPFQPGLYRPDLHYQGEWPGIHYVAFTKTPLVHSCSLGFASRTNAVHLPKLLTERYSGKRPEPPKDIIGQRTLAFTRLLLREVSNNTLRNLGLLVV

SEQ ID NO: 84536 - protein, 112 aa, Zea mays
  Coding DNA Sequence Number=SeqID_41161
  Subcellular localization annotation: CTP_CleavageSite=53; ConfidenceScore=5.16e-01
MAHWSCSDPPEAFSPSFPPLCPWIHGPFPAIEFAVAPSSSLPNSGDPRATLARASLNSGDLTATERSSAARNRSPLPDNEQSEVPECVVGDLYEQQPGEGKCPLTYYVLHTL

SEQ ID NO: 84537 - protein, 58 aa, Zea mays
  Coding DNA Sequence Number=SeqID_41162
MLPSEGAEHGVSGELLAGDLPDPVPCRRGPRARCLPLMGFHYKIVPAGLGNVLGYPGA

SEQ ID NO: 84538 - protein, 216 aa, Zea mays
  Coding DNA Sequence Number=SeqID_41163
  Subcellular localization annotation: CTP_CleavageSite=83; ConfidenceScore=5.19e-01
MAMPHGSSGMKILQVSDTYNACCLDMPNKTRLPIFKRRPGRLPLQPGSTQRADSTRLLGSRLRRPENRRLYSGSRNCRHRTSRSGSRGHHSHWPGSHGLFLTTGSPDQLQEAPVGRGGVGGGGAVHGACGRGAAGRRGCPCGGGAAAAPRVVRGGAGGLAVLCAYPFRVPARGVLPLAYVARAQGAPLGDAGSAAMEAALHDGVVPFWVDGEARTR

SEQ ID NO: 84539 - protein, 178 aa, Zea mays
  Coding DNA Sequence Number=SeqID_41164
  Homolog annotation: Hit_ID=O48967; Match level="QueryCoverage=100%, HitCoverage=38%, E-value=9e-48, Identity=57%"; Hit description =Putative uncharacterized protein
MVQIIEHRGLSPEDFLMEEEVASSMPRGSNRPAPGAAAVRAVQQHMPTQTSRAPSRAAPGALSAARELLHHPPSSTASLGVMKQWHEDVDRLLGMAHSSSARPRPRSFRHQHEASASMRSPSVKAARTNDLRSELNRRHAGEDARVSLERARERRQNFEGHNLNQDFASLAPQTPRGT

SEQ ID NO: 84540 - protein, 274 aa, Zea mays
  Coding DNA Sequence Number=SeqID_41165
  Subcellular localization annotation: CTP_CleavageSite=94; ConfidenceScore=5.14e-01
MSSRSLMHRVFPPSEPPDGGHPQSFRLVVGGTQLHGSWYLSAIVRLQGFSSVSPAASPRRWSPKTVTTSPWVGRSKPGCDLGPALNFKDVHHPRWGRGGAKPELYLPRRFVGQPLLQHSRERALTGPVSGADFDNAGLADGGCRQLQRVGLAGLAPGAPSCREGGCRAVRTGGPPKTSRAARAAFVFWGGPAFAPVRRPCAEGGAPLVREDLSGDLPEGRTAPVVGAEVGAAREVPVGDGITATIRASGLRALCTVLAPRASAWARARLQQRPP

SEQ ID NO: 84541 - protein, 183 aa, Zea mays
  Coding DNA Sequence Number=SeqID_41166
MGAHAHASRNRHAGRYVQATAPPLAPLPRILDCGTSTATRGDPAYDPAVPARRDGQYGQKWAGSNGGGRRAGAAVTSSAKLTSHPGAGPGKGDTPKRILLREGNRLRASLLIRGSKAGPSKGFNSRLRARGFYAHYWSEVQRPAPRKGSTAASGYSGSAPTTDQGFVGWPSNGSQPPQTQSEG

SEQ ID NO: 84542 - protein, 141 aa, Zea mays
  Coding DNA Sequence Number=SeqID_41167
  Homolog annotation: Hit_ID=O48967; Match level="QueryCoverage=61%, HitCoverage=25%, E-value=3e-19, Identity=46%"; Hit description =Putative uncharacterized protein
MHDVETVTTLFALADKYDRAAEGRAWHSAPQTGAAQTAATRGRNEHNKRPRPQRGNSDSCPVHPNSHHSATECREIIELVKRVSEWREQTSRDGSSPRRRPNKERVDSGEVAAGERDLGYRSPEGVLKDVFTGGSDSGDNN

SEQ ID NO: 84543 - protein, 171 aa, Zea mays
  Coding DNA Sequence Number=SeqID_41168
  Gene Ontology: Mol. function=structural constituent of ribosome; Cellular component=ribonucleoprotein complex; Biological process =translation
  Homolog annotation: Hit_ID=Q8HCN6; Match level="QueryCoverage=52%, HitCoverage=95%, E-value=1e-33, Identity=75%"; Hit description =Ribosomal protein S19
  Pfam annotation: Domain name=Ribosomal_S19; Domain location=80-157; Score=135.9; E_value=1.1e-37; Accession=PF00203.12; Description =Ribosomal protein S19
  Subcellular localization annotation: CTP_CleavageSite=50; ConfidenceScore=5.04e-01
MAHVSWTEHAACQWNGQAHVLSVMNAKACVAQRRHARFRPLAYAARNMPRGSIGSPPERGAGVYAGRFGSHQTRTGHSSRALWKGAFVDAFLARIKKNKENMNGKKIWPRRSSILPEFVGSTVLIYNGKSHVRCKITEGKVGHKFGEFAFTRRRRPHRTIIGKGNQGKDRK

SEQ ID NO: 84544 - protein, 228 aa, Zea mays
  Coding DNA Sequence Number=SeqID_41169
METGRVDSLLTMLKEGKVGLQGWGKERCEEAPYSNIGRGAGASNDKHVDGEHGWWRWQGLKPHGDNLNTSEHKYHSSVAALSRVNGGWRVVEHEAVTKIRVHDLIKGYEHVREKLNGVKGDTYMVGSQVEHAMAKDMHQGSRRWSNMLLPWRCHAPVSWVGSLARGWVMRPAPRSGDMLVNFWRHQEKGGPSQHWRGHEQGGALEETHRKLVPLCCWVRRGCWGERLH

SEQ ID NO: 84545 - protein, 79 aa, Zea mays
  Coding DNA Sequence Number=SeqID_41170
MRVVWDALGQVIREVLCWVLVLAIGTEAYVMALIFSLRDLDDDGSINDVSHYGSWYFLYEEVTFGAIYAQVKKKKKAST

SEQ ID NO: 84546 - protein, 151 aa, Zea mays
  Coding DNA Sequence Number=SeqID_41171
MEYFGSAVLMVAVSSFLVVLADSPKIIGPSCDGTSQVIRPTYSCPCLTDIRHPVDVPKSLDKFGIFPYLSRNVSPVLQTLQNIEGREMRKRLHNLHLFKRATDNLQKRPPVSVSSQWEVPDGVARRMNSGEHADRPEGTKTGASLRSKPNP

SEQ ID NO: 84547 - protein, 40 aa, Zea mays
  Coding DNA Sequence Number=SeqID_41172
MSKQLGVAGLTSGVHGEETLVWSSKNKANVAVASQLNVSR

SEQ ID NO: 84548 - protein, 155 aa, Zea mays
  Coding DNA Sequence Number=SeqID_41173
  Gene Ontology: Cellular component=integral to membrane
  Homolog annotation: Hit_ID=Q2QLQ4; Match level="QueryCoverage=67%, HitCoverage=75%, E-value=1e-30, Identity=57%"; Hit description=Erg28 like protein, expressed
  Pfam annotation: Domain name=Erg28; Domain location=13-121; Score =88.6; E_value=2e-23; Accession=PF03694.4; Description=Erg28 like protein
  Subcellular localization annotation: CTP_CleavageSite=42; ConfidenceScore=5.29e-01
MAHVPLKLKKRGMPALGWWLMAVGSLRSAFTWSCFFGSASLCSATYSEIQVTGVHGRTVAVWTLLSCTLCFLCAFNLSSKPLYAATFLSIVYAIGHLSVECVVYHTISAASLAPFTFITDVLSKSPGFLPHSLVIVAYSGLGVEASLLRLGMYIV

SEQ ID NO: 84549 - protein, 118 aa, Zea mays
  Coding DNA Sequence Number=SeqID_41174
MGTKNIALLKWRQGHSHFWYGRMKVKRDFLRFSSFKAMKYVGSSAPFSIPPCVDIKYSVASLAFYCHEQVIFAAIHWVRSWAILQRADLQELAMEASLHLTSYSLFGSHLSRNRLKRT

SEQ ID NO: 84550 - protein, 328 aa, Zea mays
  Coding DNA Sequence Number=SeqID_41175
MHCALPPSEPPDGERPRCFRLAVVGGAQLRGSWYLSAIARLQGFSSGSPAASPHQWSPEKVTTSSMVGRSKPGCGLRPALSFKDLHHPCWGGGRGEPGPAFTWAGVPLLPPASRGGNHPPTLRRRRPPAMPGKANCCCPARVQHSVLCPGDGGQPHRGASQHVVRREGGTRVLGRSHSRFRGEDGSEDLPVRFGAAGARWCDVGGQVDAAAGAEVVATGESFSTDETISATRGPTSCSLALMSGSRPSSGDANESLPAVASALGPSLLLQRSPASHPEFVVPQAPRCGGCSYPREWNRSSVCNGTLSVGENLDCSAMSRSRRQRCERG

SEQ ID NO: 84551 - protein, 317 aa, Zea mays
  Coding DNA Sequence Number=SeqID_41176
  Homolog annotation: Hit_ID=Q6J9V9; Match level="QueryCoverage=29%, HitCoverage=32%, E-value=1e-13, Identity=47%"; Hit description =Putative uncharacterized protein
MGAGSHTPCKLTGTKEAKPPRAERVTAQRLQALLHLRLNQWVKGQTAMQAACNCTTEMHPFDFDASSMGGPGPHVMDRERRYSERDPSPRRKRAPSPPTDQRFEGWPLGRVRQPPQSTRAPSPPTDQRFEGWPLGRVRQPPQATRVPRPLLIRGSKAGPPKGSTAASEHAERGMTLGTFDTWPRLGLRSRGTLGHFRDQQERFCNGIPSEGGIEPSDPIKRDRVQQITCRSKLRPLKGHDLASPEPSLGQEQQTQVDSRLARGPARAGFAEKQPWPDRLANRSYRRSIQCKDRLTPYPDARSSVDKAEVTAVTLPLH

SEQ ID NO: 84552 - protein, 150 aa, Zea mays
  Coding DNA Sequence Number=SeqID_41177
MSRADVLGGQLAEATERLTKRSARAGFLEETLAAMAKARIAYPSESCLSREVMSEVSVSRRRRSPSAQSASPLTCTLTRPQDSVIDIVLKARKIVSAEKFSSVKTCSVSGIAYPSVSYLSQKVMSEDPTIEVVEKRERRSDRKTFSEEKF

SEQ ID NO: 84553 - protein, 104 aa, Zea mays
  Coding DNA Sequence Number=SeqID_41178
MTVHQGSTSTEPSPQHTADRTEAPPLIAAGVSPEGGIATLDVLRTLIQSTQDEEQAMVNIGKGFLPTIVLRGVLTTEEPAPWPKPRSGERLPERKDFNGGFDGC

SEQ ID NO: 84554 - protein, 63 aa, Zea mays
  Coding DNA Sequence Number=SeqID_41179
MKGYVAICPYGPLDHRWTLQIRSILQSIDNEQSKVPECVVGDLPEQQPGEGKCPLTDYVLHTL

SEQ ID NO: 84555 - protein, 60 aa, Zea mays
  Coding DNA Sequence Number=SeqID_41180
MNWYHTAQEKPKQFTPEEERMFDGADNLFRGIVIAALGNNSELYIMEQLFDYKMVENRPI

SEQ ID NO: 84556 - protein, 453 aa, Zea mays
  Coding DNA Sequence Number=SeqID_41181
MARSVRAKALPGWLAQQSERGSEFLGWFVDAVNGLAIARLREQPPSLCAEQEDDQGLSRLLLYAPSSPFRKEEGGKAPCCPRRAPNMVSPGCLESRHRFRSGEGVALAQVAVQFLARGNRRASYMSPAAFPHQWSSRMMTTSSVVGRSKPGCSLSPALSFKDLHHPCYGGGRAEPGFYLPHGPAGRLFLHHSGERALTGLAEGVNFYNAGPVGRKRRQFQRAWLAGSAGFVATFDAASCRLIRAWPSIHRTGDCCAVRTGGSSKTSYPAGRMGGIRVLGLSCPHSDTMPPRGGWCLSIREDLSRDLPVQAGVATIRWRSAGAQVADVVGAMVVIARGGFSADETVGATRGQTSGSLALMASPRPSSGDVGEGLLTAVFALRSSLLLFSRPRQRSLSLLLRWSPASHLEFVVPQALWCGGCSYPREWKQSPVCNGTLSMGVCSLWLSRPEHLGI

SEQ ID NO: 84557 - protein, 85 aa, Zea mays
  Coding DNA Sequence Number=SeqID_41182
MTQTEITDALLHSHNEILAKLHQRLLQAQQLSKNCRRMLDYMTSSMWGLLKRQRATPCRAGDPTSSTLWPAPVHSSDGLAGSTTS

SEQ ID NO: 84558 - protein, 189 aa, Zea mays
  Coding DNA Sequence Number=SeqID_41183
  Gene Ontology: Mol. function=hydrolase activity, hydrolyzing O -glycosyl compounds; Cellular component=extracellular region; Biological process=carbohydrate metabolic process
  Homolog annotation: Hit_ID=Q53K23; Match level="QueryCoverage=59%, HitCoverage=25%, E-value=7e-41, Identity=74%"; Hit description =Glycosyl hydrolases family 17, putative
MFDTQVDVVRAELDGKGYKDVDIVVVKTGWPHKGDPDEADATVENARAFVSGLVSHLRSLSGMLRAPGKSVETYIFTMYDEDLKLDKASERYFGLFQTSLAETYPTGLLRNGTARLTPATAPAPTTSAAALKPTLGQQPQVGLQYDTGCCSCFSLPEFGSLPSAIFFAECFFGHSAKKLFAECHTKNSR

SEQ ID NO: 84559 - protein, 303 aa, Zea mays
  Coding DNA Sequence Number=SeqID_41184
MAAPPTTRPIALTPRRDRRRLWQEKRATLRLRHNDRVKKGTGKGGYPERILPPEGTRLRASLLIRGSKAGPPEGFDSRLRSRGPYTHYWSEVRRPAPRKGSTAASGYSGSAPITDQGFEGWPPKGHFRDQRERSCNGIPSEGGIESSDPVARGPDPADHPQRLGGCSRKPGSGRTVDSVNIPARELGTRPYTRATASSHEGTTRPAEALCEALRPRRSETTPPRPRGLHPAGALARTHRNKTQPRKAGPLAKKCDKSLQASANTPFEARGLLSGTIIRGTLKAPNSQLVTPISIKLQRPDGSD

SEQ ID NO: 84560 - protein, 102 aa, Zea mays
  Coding DNA Sequence Number=SeqID_41185
MGFAPIPAVTEPPKSLGPPTVVLVQRTSDNPVGAPESLDKFGIYFSYLSQERFTRHADITSIRVTKMRKQLHELTLFKTLLLVFFLQYHLRTEATKVGCFLS

SEQ ID NO: 84561 - protein, 465 aa, Zea mays
  Coding DNA Sequence Number=SeqID_41186
  Homolog annotation: Hit_ID=Q6QP51; Match level="QueryCoverage=53%, HitCoverage=85%, E-value=4e-14, Identity=32%"; Hit description =Putative growth-regulating factor 1
  Subcellular localization annotation: CTP_CleavageSite=51; ConfidenceScore=5.07e-01
MHEGSAKTWLPFKGVTLLGNSPHLRPQPLQAESSPTRSKVLPLRHGGWAPRVMQIGPGQKEPKPPRAVRATAQRLRAFLRFRPGQRVKGRTAMQAACNRTKGAHPFDFDASSMEAQARTGYYVRETAPPLAPVPRLLDCGTGTATRGDPARDPTVPTGTSVTGQSAAGEGATVDTARNGPAVMAVAGGRKQRDQERGYPERDPSPRRKRAPSPPTDQRSEGWPLGRVQQPPQSTRAPRPLLVKGSKAGPSKGFNSRLRPLGLRAHYWSEVRRPAPRKGSTAASGHSGSAPTTDQGFVGWPSKGSTAAKDAERGMTLGSEAALANPAPAKPLTTSTYQPDNLGLDCSALEDDELCLARPQCSDSALAPEDDELRLARPQGSDSGSAPERTPPRPTQGSDSALAPADDELRLARPQGSDSASAPEDDELRLARPQGSDSTSTSEDRLDLDLGGATVSPDPGLGPTTS

SEQ ID NO: 84562 - protein, 318 aa, Zea mays
  Coding DNA Sequence Number=SeqID_41187
  Subcellular localization annotation: CTP_CleavageSite=53; ConfidenceScore=5.12e-01
MGGARGSSALSSLEERNFAEVGNFQPSFDFKGFSSGSPAASPRWWSPKTVTTSSMVGRSEPGCDLGPALSFKDLHHPGWGGGRTEPELYLPRGFVGHLLPQHSRERALTVLAGGSDFDNAGLVGAGGSGVSVNRGRVGLKRRLHRSEPGRAVHWRDQRRSRVAEAMSRADVLRGQLAEASGWPAKSSARAGFLEETLTAMARARCWCRPSEQRSSDRVVVRGSVGLRRRIVCPSESYFSWKVMSEDSANDVVEKARKIISAERFPSIKTCSVSGIAYPSVSYLSQKVTSEENFDAEGVPPLLAPEGASGFAEARLTLP

SEQ ID NO: 84563 - protein, 59 aa, Zea mays
  Coding DNA Sequence Number=SeqID_41188
MTFEVEEDDAHPKWRSNASVTDEQGDCHRKGKCAIGGASSGVAGMSTMPENTVEVVTQN

SEQ ID NO: 84564 - protein, 253 aa, Zea mays
  Coding DNA Sequence Number=SeqID_41189
MARLRHTTRKSVIPFLPSRLAERPLHRTVSGQSSHLERLHHRLREEQERRRQHREQQGSSSPPQREVESVRPRSSVAQLEAPPAPPRDAPAVGRATGGGPGGDPDDDDSDHSTESSEPQEAEGWVARPITRDAARGCHFHDALDTLLRQAFDRHTWSIDTESVVVSPVGEANPRLSSTVNLVAVLNTELDHSLDELSRARTEIAELRAELAERHHQEGGSPAPVGTQHPYRSPPRGHHTYGSPVCKTRIDLDP

SEQ ID NO: 84565 - protein, 104 aa, Zea mays
  Coding DNA Sequence Number=SeqID_41190
MESHDLRAERESRLVGGNEIDGFGYDYGTGKWYSFRLERVVSIATPAQEKMKLWKETTRSSKIMMSSRRGLAATPSRLPVKAAFIYVSFSHFDYCKDYVDVSDV

SEQ ID NO: 84566 - protein, 72 aa, Zea mays
  Coding DNA Sequence Number=SeqID_41191
MEGSGFIPMGRAKSVQARITQPRNQGTACKLAADLAAVRCGREDSEPQVPHAVTRAIHPGENGSDRLGPLRS

SEQ ID NO: 84567 - protein, 144 aa, Zea mays
  Coding DNA Sequence Number=SeqID_41192
MEGARCGASSRLDGDGTQARLGKRRRGGDDQGVQAWGAMADDGGWPLCQMDGGDLSTPETVLRTAHQEGHLPTVRVDPATVLEDHTTILDGPSTSVKCPTKQGVERIVEVTPAGSVASDGSSNPSFLSWSAEKSVSWLKLNESS

SEQ ID NO: 84568 - protein, 163 aa, Zea mays
  Coding DNA Sequence Number=SeqID_41193
MQESLAGPPSQQNPPEGLPTLTTPLLPLPLSEHEWVKEVIKGTTCLGLEIPDLFCTTGSRIHGRSSIRRRGMLDLIGTVRQQSDGERSAPQLGRHARRRRPAPTVADRRSNAIPRPTTPFRPPIGARRRGDKSGQREKVLYRGRLVTKPVCGLKRLRGDNVLR

SEQ ID NO: 84569 - protein, 59 aa, Zea mays
  Coding DNA Sequence Number=SeqID_41194
MGKPVPSLLMLLLCRVTALVPTITGMGDHVSGRVRGKVCEQVHSGLCVKNHRKNDLLYI

SEQ ID NO: 84570 - protein, 112 aa, Zea mays
  Coding DNA Sequence Number=SeqID_41195
MEAEAVKIVGKYCRKTKMSRSWDIHGSNVRLNCVFELNGLRYGLYPKEGSTDVGDAGERKKKGGLRHDGVDEGCSKGKVVVPPTRKMRKVDAKAKGPARATRVAEASDIFAE

SEQ ID NO: 84571 - protein, 343 aa, Zea mays
  Coding DNA Sequence Number=SeqID_41196
MARLRHTARKSVIPFLPSRLAERPLHRTVSGQSSHLERLHHRLREEQERRRQHGEQQGSSSSPQQEVETVRPRSSVAQLEAPLVPPRDVPAVGGAVGGAVGGATGGDPDDDDSAHSTESSEPQEAEGWVARPITRDAARGCHFHDALDTLLRQAFDRHTWSIEYRCVVYQHSRGRYPDRWEATCLVRRPEDDLRGAEAVSEHYSISERDTAEAAMQDAARRALSQYCSLFGGVADGLNLRYYPRRPTGSTESVVVSPVGEANPRLSSTVNLVAVLNTELDHSLDELSRARTEIAELRAELAERHHQEGGSPAPVGTQHPYRSPPRGHHTYGSPVCKTRIDLDP

SEQ ID NO: 84572 - protein, 170 aa, Zea mays
  Coding DNA Sequence Number=SeqID_41197
  Gene Ontology: Mol. function=structural molecule activity; Cellular component=cytoskeleton; Biological process=multicellular organismal development
  Homolog annotation: Hit_ID=A2X6S3; Match level="QueryCoverage=41%, HitCoverage=16%, E-value=7e-25, Identity=80%"; Hit description=Actin- related protein 3
MADLDFYIGVYQGYHVLKTFNVPNLYITVQPVLALAAGYTTTKCKMIDVVVDVGDGATHIVPVTDGYVIGSSIRSIPIKGKKHGHQGHRVNYQILFSRQYNAASLSTQMSTQSVRNGIKTDMLLYSFPHESPIRALDHYCPHGQQLLPVEDHVLGARQESQEACGPEPNG

SEQ ID NO: 84573 - protein, 72 aa, Zea mays
  Coding DNA Sequence Number=SeqID_41198
MDSARSWLQKLQPRDKDREQGAKTPAAPREWPRYLHWKKEATLVISLQVWNHHFLWESMQPEGGGLPEGGVL

SEQ ID NO: 84574 - protein, 207 aa, Zea mays
  Coding DNA Sequence Number=SeqID_41199
MKFVDRAREEGARRAVFPHHRCERVVSPDVRNTRVKRKRRLLQQLPLLISRPPAIVLHATLDADALALGGGGPSTGSLMADHPQARQVGRLTPREEPPTFAAGVYRACSRDATAAVIYLCGAAERTKTTKRWRERTKRTCSAGRKGGKEGESTGKKVRGASRTKEVRDAPKEYRVVVLWPLIGNPTPEKFSADVDTQEQPFWTGFHI

SEQ ID NO: 84575 - protein, 161 aa, Zea mays
  Coding DNA Sequence Number=SeqID_41200
  Homolog annotation: Hit_ID=Q6J9V9; Match level="QueryCoverage=50%, HitCoverage=30%, E-value=2e-14, Identity=53%"; Hit description =Putative uncharacterized protein
MQVACNRTTRAHPLGFVASSMEAQAHTSWTGKGDISKGILLHEGSGPRALLLIRDSKAGPSEGFDSRPKALRGSKAGPSEGFDSRPRARRARDDSGYVRYMAEAQATLPRSDFVTESHQREASSPQALSNGSGSGKSPAEARVLLLQPGYGQTVDSVNKPA

SEQ ID NO: 84576 - protein, 282 aa, Zea mays
  Coding DNA Sequence Number=SeqID_41201
MPPRGGLCLPVHEDLSGDLSVQAGATTIHWRSAGAQVAAVVSAEVVVARGGFSADETVGATRRQTSGSLTLTACPRPSCGDVGEGLPTTAFALRSPSARSALPLKASLAQFENLRPLCDELEPEAAVSAWTEAESAQKEASSAREHVASQAEEVQKRRLELGQVIRERDQPRSHAAEAVSQADVLGGQLAEATERPAEVEILLPVSPSEAGPDPAEGGNDAEGAAAPSVDDLFVGSRIAYLSESYFLRKVMSEESLGLVGLAAYVYSRRFQDPAIEAVEKRE

SEQ ID NO: 84577 - protein, 37 aa, Zea mays
  Coding DNA Sequence Number=SeqID_41202
MGIRCLHLYHQRKKACQEWTKSQNGKTILKRHQCISE

SEQ ID NO: 84578 - protein, 828 aa, Zea mays
  Coding DNA Sequence Number=SeqID_41203
  Gene Ontology: Mol. function=sugar binding; Cellular component =cytoskeleton; Biological process=fatty acid metabolic process
  Homolog annotation: Hit_ID=Q7XBE1; Match level="QueryCoverage=11%, HitCoverage=11%, E-value=9e-35, Identity=72%"; Hit description =Putative uncharacterized protein Z013I05_4
MSLDFKLILDELNRRFDELEVRWDRRFSPSAYLDLPPTLLSVHQSSDTSASMPPTPTAAVGAVVIADNWGGCFDDGKEYYAAPSVVADNWGGLFEGCDADGDISSNLRDSDPDEAFVTSHSDKALLDNHHAGELIATGIEYGSYNSVHGSGGAALSQLAHSNTNFAMPTTCSTWGLTEHAMAEAVHRRALWLPRREPLPRLLRAFLTLERLDLSACASLDDASLAASVGDGPAAATTWWWCASASATGDMESTLKGIRGSDAPFVMDLNDAATVAGGIEDTYGEDRAIEEQLATPLDTLLCARLDPVKSHIGCLLLQYLKLSPTLIGAKVAFGRFDGHFFHDFTIIKLKTDSSSSPLECSTKCLSHDIGHDSRNYAHKLQNAVTHGITAAGHDILQVGLASTPAMFNIILIEDERSHLPVDAICSPDELIKTSRLCALEMVHCRKPWMRSLGNTDRLGLFSEARAVLNAARQQAMKIALNMPQHQTCIDVMGEGILYGGRPGVLKEAIVCSIPGVMVFTWTVRNFSGVTHLYSQHDRGVVWLIVAPDCYFIQHNERMHMIFYGFDLLSLQHFHGHFIEADMFAPWDGQELTQFLFSELPIYWQQSHGEFFSASIIRQFQFISQLILLAITGMNSLLFFRKLKYSSSVEIFCGAQFSFPNILLPKSWSQELATNIERHLLSEMLEVANGYNFHELHLMLASIGVTQMISCGKYLIWIIGLLTPWDPGRMVFDLNSCFLPPIPVSDLSPLSAANILPDQLVGEQRGEVAGIQRLVCLRVQRWRWLHRQVGDEVIPLLRDAHTGARIRAGPSGESQASPAGSNSVLRCAQQ

SEQ ID NO: 84579 - protein, 355 aa, Zea mays
  Coding DNA Sequence Number=SeqID_41204
  Gene Ontology: Mol. function=carboxyl- or carbamoyltransferase activity; Cellular component=ornithine carbamoyltransferase complex; Biological process=amino acid metabolic process
  Homolog annotation: Hit_ID=Q8SA97; Match level="QueryCoverage=42%, HitCoverage=25%, E-value=2e-14, Identity=37%"; Hit description =Ornithine carbamoyltransferase
MAPPVDVAGPRPRLGDVEAPPKPRSSLSSMAEAESEPLGRARRRSSAEARAESEPWGRAKRIGVAQAALSFCQAGQWSGEVTAVTSALPEGARQDKGPRASRKYVRRWRGASGETEILRPLQLYADGGYQLRIRSLEGDGDFTNHADVLLVQCSKTKTLLLLNCLDTNLLQGRPNHGTKSMIGSCSRKRGEGSNPLRLLTKALEEPILRLTDPQAGCHRLLASWAGEGTGVDVQSMTVTSHPLCFLPKLRNLLSPLTFACLGDLAAPEDLLPGGVLGADALFSAHFFRTRAVSSSSSRSVDWSRELHNARALGTDNLANREDSSELSLAGASSVFVVATSAEAAVVASASGGFRV

SEQ ID NO: 84580 - protein, 103 aa, Zea mays
  Coding DNA Sequence Number=SeqID_41205
  Homolog annotation: Hit_ID=Q5VRS4; Match level="QueryCoverage=34%, HitCoverage=11%, E-value=3e-08, Identity=86%"; Hit description=Basic helix-loop-helix protein SPATULA-like
  Pfam annotation: Domain name=HLH; Domain location=52-99; Score=22.9; E_value=0.00057; Accession=PF00010.17; Description=Helix-loop-helix DNA-binding domain
  Subcellular localization annotation: CTP_CleavageSite=44; ConfidenceScore=5.42e-01
MAPRILYDDGGSQSPYGSKRTSARTQPHRQLSLRQAPSLLRRPRHHTSWAPRSLRLPHRHRRSKIKEKMKALQSLIPNSNKIDKASMLHEAIEYPKTLQYISF

SEQ ID NO: 84581 - protein, 191 aa, Zea mays
  Coding DNA Sequence Number=SeqID_41206
MFEHKHKYPTLKNISLKYLTKHYQHLTSLDRVISQSMNNTVGTLNQGYPLLQYEGAVSMRLSLVAWQTAPDPTTRTAPGPSRGRRRRYPPRCQQWVRTPMGKCRTPVYADQTSGRCAASTFNVPCPLRWQAATRLSHRWRACPFRWQAGSFRCTPMLRRPLISGRKKIALATSISCPKHCIRYVPGPACWG

SEQ ID NO: 84582 - protein, 61 aa, Zea mays
  Coding DNA Sequence Number=SeqID_41207
  Pfam annotation: Domain name=RRM_1; Domain location=2-47; Score=2.1; E_value=0.095; Accession=PF00076.13; Description=RNA recognition motif. (a.k.a. RRM, RBD,
MASCISFQTIDDNRKGFCYVEFVSAEAAAKAYKEKQSKELQGREVRLDFAKGRSTQTPRSG

SEQ ID NO: 84583 - protein, 150 aa, Zea mays
  Coding DNA Sequence Number=SeqID_41208
MDQFLHEFWHRSRDLTPQGYDTLLRKSAGNGLPDFISWFKQKISSHGKLPVPNDELYNLDPDIYDREFFLEDGLKGRFEIDLTKAFRMEVYIEMVDDEDDDEEQNENDLEMLEGNDNGELAPSDGVNYEMVYSDDGTYGPANPDTYKDYF

SEQ ID NO: 84584 - protein, 156 aa, Zea mays
  Coding DNA Sequence Number=SeqID_41209
  Subcellular localization annotation: CTP_CleavageSite=86; ConfidenceScore=5.22e-01
LDSFKRFAAPNSAASGILLGCSAIIHRTCPVYTGLSGVTTGQRLLRRQRLPAGAINARQSAQKAGTRVVAHRTLYSTCPVCHRTSRRAQETELQRSEPNGLVTWLSHRTCPVCIGLSGAPCDRQPSSTASFWMVAINTTPTGHFKVRGAQATFQVI

SEQ ID NO: 84585 - protein, 136 aa, Zea mays
  Coding DNA Sequence Number=SeqID_41210
  Homolog annotation: Hit_ID=Q6JAD6; Match level="QueryCoverage=58%, HitCoverage=10%, E-value=1e-26, Identity=75%"; Hit description =Putative uncharacterized protein
MPRTKNASASGGGDDEDPRRPFRQVKGKTVYLEQQEGRKKRRTDREARAAAAAAAAAAQAALGDQPHVPSDQIAFHARRLTSASTPPPTLPAPVTPIAPSTSTAIPTTSTTPASTASPAPAPASAPPVPPSSLSGA

SEQ ID NO: 84586 - protein, 186 aa, Zea mays
  Coding DNA Sequence Number=SeqID_41211
  Gene Ontology: Mol. function=identical protein binding; Cellular component=cytoplasm; Biological process=electron transport
  Homolog annotation: Hit_ID=Q6Z5K5; Match level="QueryCoverage=87%, HitCoverage=40%, E-value=1e-81, Identity=86%"; Hit description =Sucrase-like protein
  Pfam annotation: Domain name=Suc_Fer-like; Domain location=1-185; Score=208.3; E_value=1.9e-59; Accession=PF06999.3; Description =Sucraseferredoxin-like
MLAYKKMTCLTPTFWKEMLPKKVIKLTICEGEDGTESSNGDVLIFPDMIRYKGLTHFDVDNFVEEVLVKDIDWLPRSPEPMSGSYIFVCSHGSRDKRCGVCGPALIKRFKEEINELGLDDQVAVSACSHVGGHKYAGNVIIFSSDAKGEVTGHWYGYVVPDDVPVLLHKHIGQGEVVDHLWRYPPC

SEQ ID NO: 84587 - protein, 32 aa, Zea mays
  Coding DNA Sequence Number=SeqID_41212
MADPPAASQGEPRKVRMAGAPGQRGPHVSEKF

SEQ ID NO: 84588 - protein, 313 aa, Zea mays
  Coding DNA Sequence Number=SeqID_41213
  Gene Ontology: Mol. function=DNA binding; Cellular component=nucleus; Biological process=regulation of transcription
  Homolog annotation: Hit_ID=A2Y8A7; Match level="QueryCoverage=93%, HitCoverage=89%, E-value=1e-100, Identity=61%"; Hit description =Putative uncharacterized protein
  Pfam annotation: Domain name=NAM; Domain location=20-157; Score =279.2; E_value=8.5e-81; Accession=PF02365.6; Description=No apical meristem (NAM) protein
MGMSSTQAAAQTQQQQQQLVPPGFRFHPTDEELVDYYLRKKVASRRIDLNVIKDVDLYKIEPWDLQDKCRLGGPGEEEQNEWYFFSHKDKKYPTGTRTNRATAAGFWKATGRDKPIYANKQRQLVGMRKTLVYYKGRAPNGHKSDWIMHEVFKKRLPTTRRESDHDAPCWYVDEDGTFMHDLNSPMGGLPPHHSIAQLHEQHLQMLNNSYKRRELKLQFQMPSHHILNAAAAIPHELEPPSFHSLLVSPDHHQAAKAHHRAVQLMDEHAADQVTDWRVLDKFVASQLSHDDAAKGVDYTDEGDILQINEKQAT

SEQ ID NO: 84589 - protein, 61 aa, Zea mays
  Coding DNA Sequence Number=SeqID_41214
MAESPWCLHDSLFLASSSTVGKLCFNGSKMQAPGSRREDAPEREPIIEVPRDGEQSPVNGD

SEQ ID NO: 84590 - protein, 71 aa, Zea mays
  Coding DNA Sequence Number=SeqID_41215
MAKLTTPLVPLINQLRASHSTLMVALLSRDVTPQIGPYGEDIIGQRTYAFTRLLLRKIFGNTLRNHGLLVV

SEQ ID NO: 84591 - protein, 144 aa, Zea mays
  Coding DNA Sequence Number=SeqID_41216
MGKGKRGRGSPHRAGDKRKRDPSPPSKDFGDSKYSEEEVSSESEGSLALASPPTSSDDLDDSQGLAAEVWMYIRSVEHAGLEDRMIRMSPRMRRAPLAHPRSRAMTTATTTAKTTTMAARVAKATTAVVAAATARPVARRHWFK

SEQ ID NO: 84592 - protein, 66 aa, Zea mays
  Coding DNA Sequence Number=SeqID_41217
MAGGNELAGAKEGWLAGAGFELGIKVNMLDLWLKGYHPYHHLSGMIRDSLVWEGLKVIESCLEGGG

SEQ ID NO: 84593 - protein, 270 aa, Zea mays
  Coding DNA Sequence Number=SeqID_41218
MNVCELTLAVSHPPQVKNRYHRMRRMEDAAMCRESTPGDYVRARVLVPLKPGCDNRVPRCRVWLTLEAHPLQPGWRSLDSETIGLRTDDTVEAAAMKTLTTFCGYHPLEMVMHPLGLFPAEKKDDPMWCNRVSHVKDVWAMYPDLVGRVTVQCMSALYRLQALQSDAMALLANTAQTAKLTLDSREDFVVDLSTELVEKDLQVERLSQCITTLEQQVEIRDNTIDVLENQLHDVQRELEEANTSTIWLYTSGPPVVLYPFHKRTLRKNRL

SEQ ID NO: 84594 - protein, 123 aa, Zea mays
  Coding DNA Sequence Number=SeqID_41219
MAEELQRAEEGGGTVERACRAATEQRRWGLGELGHGAPARGEEKAPCCRRSRGGRMALLLGGHGWSRETRAHGAGRASLVAVAAVKKKRQGRKKVAAGKNGGVGVLYCQGQGKGSIFIENESS

SEQ ID NO: 84595 - protein, 209 aa, Zea mays
  Coding DNA Sequence Number=SeqID_41220
  Pfam annotation: Domain name=Phage_GP20; Domain location=101-200; Score=-50.8; E_value=0.061; Accession=PF06810.2; Description=Phage minor structural protein GP20
MTSPTPISGGDIRFSSDYLSHEGFPSILWEVLTSVGYPTPPMYTVQMYEGHRPGWSSLDFETIVFKADDTTEAAAMKTLTTFYGYHPLEMTTKLTLDSREDFVVDLSLELMEKDLQVEQLSQRIATLEQQVEIQDNTIDILEIQLHDVQEELEEANDHLEMHHQDMEANDAGSEGEEAPEKLEPTPGPNATPTGMPPSPASSVASTTQG

SEQ ID NO: 84596 - protein, 110 aa, Zea mays
  Coding DNA Sequence Number=SeqID_41221
MAPKRASSKAAPSIDEAAKAALLAEKKGKALVDTTHQEACEDDTLSKRQRNEQPTPEGSLRTCSSGGQPQPPLGFAPWEGADATEDGEVIGVSAEEQLQLRALRIKNRNL

SEQ ID NO: 84597 - protein, 123 aa, Zea mays
  Coding DNA Sequence Number=SeqID_41222
MLTNGLLQQEMEQQRMTKTRIMPSQARAHDSAGTSRGREDTPNLPPVPPTLAEAIAALVNATADNTRFLREMAGSPEPLLRRRGRGSQLAKKQKGWGLDANIWEIHKKLQKNDKNMKPILLDF

SEQ ID NO: 84598 - protein, 223 aa, Zea mays
  Coding DNA Sequence Number=SeqID_41223
VLETVIAGFGPRGELPLPLSSPSPPLPSPLRAFPARPLWPHGPRIPCPRGPGAPRPRPCPGGSSPRGPAASRPRPGVPGGPAPRVAPRRRLGPAASRPRLCAPHAPTAASAPRCPRPGGPAILRPRAPAPTAPATPCPGVASHNDQLAEFEGVAGEDLEQQLVGEGKNWGVVRFAVMPLMGLGVCDSLCQGGDEDDDFGYDYGNGEDEVVEEDFQEFQEYDEF

SEQ ID NO: 84599 - protein, 203 aa, Zea mays
  Coding DNA Sequence Number=SeqID_41224
MEAMSAMGAGKWAPTCLSSQGGAGWRPTQGAWGQAPWEKVRVGEALASSWQGLARPRQEQGRGGAHPGVGELERESTVMARPLESTQDKGLAGGEVSPATTPTAASKKSEVEDARAGEKMVGWEFWAHTPALDRKVLGKRELDGRVARERKPGIDAARSACSRGARQWRELEMELPWGTREEDGVGEKWRWLGEKERVAARGR

SEQ ID NO: 84600 - protein, 288 aa, Zea mays
  Coding DNA Sequence Number=SeqID_41225
MGRGRRGRGLPHHAGSKRKRAPSPPLDEFSDSEYSEEASSESKRLSAPASPPATSDDSDDSMRLSTAVQAYWRAIERAGLGGSDESGVSSDEVDSSNSSEEWSSSDGDSKGDDSSGYDDRGDGSGGDDDRGDDSSGDDDGGGDRGKGDDSKGGDGDKGDSGDGDGRSGDGRGGSGSVTHSTIYPSGKDEGKVTPSTKSRSIMDQAVSLAARRRRFESSFNLARTHRLGVQCSTDPGYRRAVTALVPTISRMGDYVSGQTIIIPLSKRIQPIPDLARVLEKSLDFYRDP

SEQ ID NO: 84601 - protein, 181 aa, Zea mays
  Coding DNA Sequence Number=SeqID_41226
MEAVSAMGAGKWAPTCLSLHQRRSLTMAEGAWSRELAGGSRLETDAESAGPSAMGEGPSGESAGELLAGVSSAMKRAGKRGERLGVESWRGSRRSRLGHQRARRRRALLEGRKVLGKRELDGRVARERKPGITAAGSACSRGARPWRELEMDLPWGTREEDGVGEKKWSLLGEKERVAARG

SEQ ID NO: 84602 - protein, 121 aa, Zea mays
  Coding DNA Sequence Number=SeqID_41227
MAHRSYSSPPETFSPLFSLLCPWIHGLFPAIEFVVAFYPTLPISGDPEATLDRASLNSGDPTAVERNSTARSRLSSLVWSPPSDSDRTAQTTGYHFVHARPDVVARLSAPKPRGARPARSQ

SEQ ID NO: 84603 - protein, 259 aa, Zea mays
  Coding DNA Sequence Number=SeqID_41228
  Homolog annotation: Hit_ID=A2YGC2; Match level="QueryCoverage=60%, HitCoverage=70%, E-value=5e-13, Identity=31%"; Hit description =Putative uncharacterized protein
MPPTPPQGIPAAGGDHNGDGDDNDTGGSSSHGTELSEELELEGWIARPITRDAARGCHFHDALDTLLRRAFDRNTWSIEYRFVVYHHRRGLYPDQWEATFLVRRPDDDLRGAEAFSEHYSITERDTAEAAMQDAARWALSQYCSLFSGVADGLDLKYYPRRSAGSVGGVIASPVGEGNPRLNSMVNLAAVLNTELDHALDELGKVRAEVAELRVECATRHYLDGGSLAPVGIQHPYRSPPRGRFDYGTPDCRTRIDLDP

SEQ ID NO: 84604 - protein, 197 aa, Zea mays
  Coding DNA Sequence Number=SeqID_41229
  Gene Ontology: Mol. function=aspartic-type endopeptidase activity; Cellular component=chromatin; Biological process=chromatin assembly or disassembly
  Homolog annotation: Hit_ID=Q8W1D1; Match level="QueryCoverage=29%, HitCoverage=6%, E-value=5e-18, Identity=58%"; Hit description=Gag-pol
MDLGTHMMVRTLQTTRVNTSYAPPPRQIPVYPVVVEEVPVDLPHIQVENVVILEDSSEEHLPTPTLLAESLAFAARSSTSAPPTPAVQAPAPGGDDPDDSGDNDDEDDDDDEGGDENINEEADYASRTTSWVDPLDANDWLKVIGKKLDITQCNDREKEFQENFRTHHIPSEIIKLKKKEFLSLTQGNMTSHTFPNF

SEQ ID NO: 84605 - protein, 148 aa, Zea mays
  Coding DNA Sequence Number=SeqID_41230
MVKGFTRSTCAGGFLNSGERDLASPVTRALGSSLSKAHGLTRKLSGGLNRTEGDWRGVGHGGGSWSALAGCGEVAGGNGWLGRVRRGPTRSEAAVEPFRGPAFEPLISREARSLVPSRGRILFGAVIMAKAKRCLLLLPEALPVPPRS

SEQ ID NO: 84606 - protein, 53 aa, Zea mays
  Coding DNA Sequence Number=SeqID_41231
MVALSPLTEARGRQQGLNSSDGCPSARLQHSSDSHDITPAGCQNLSGCHNGMF

SEQ ID NO: 84607 - protein, 56 aa, Zea mays
  Coding DNA Sequence Number=SeqID_41232
  Homolog annotation: Hit_ID=Q8SA97; Match level="QueryCoverage=67%, HitCoverage=7%, E-value=6e-07, Identity=73%"; Hit description =Ornithine carbamoyltransferase
MEPGGGTAVGAVESLLMSSCFRKGAESRRRHRLYADGGYQLRIRSLEGTPNYGPRQ

SEQ ID NO: 84608 - protein, 230 aa, Zea mays
  Coding DNA Sequence Number=SeqID_41233
MGFLQESSQLLCYSASWPNLAKSHIAAADKQNQNMKKVLRWDLKWDPSSPVRHNPDRPQTPTKHRVLRPDKETHRWTYSGRCPLEDRFFLLHNQCVSASTRRLSVLLRLIWVKNVGTHVLKVKNVGTVELIVQSSQTHAGSTGLPKFVQKSSSAIFVGKPTFLTEEALEAKFQAFLENVKYEGDDINVEPSTPSTPPTMSNNYDENGYYCPDVSDYFYLTNSDRSTRTSY

SEQ ID NO: 84609 - protein, 43 aa, Zea mays
  Coding DNA Sequence Number=SeqID_41234
MALHVWHLLGEVLQVGDEGLGLGEGLGVGVVGDDHELRVAWPP

SEQ ID NO: 84610 - protein, 90 aa, Zea mays
  Coding DNA Sequence Number=SeqID_41235
MAHEIIKKSEKDTYDAREATKAAEKAAELERRIAELSPPPEPFESLAGPEAKERLLNFFAFYFGNIRVDFSRFALYFGGIWLCIPLWNDF

SEQ ID NO: 84611 - protein, 54 aa, Zea mays
  Coding DNA Sequence Number=SeqID_41236
MRVATLFIWRYLRTRIREGEAQKIRRLTQRRSCEAGKLRHVRRKGNRLEDEKAI

SEQ ID NO: 84612 - protein, 682 aa, Zea mays
  Coding DNA Sequence Number=SeqID_41237
MQVVELVPCARNKWGNWNEFWFYVAEGTVEGHEGLPMSEMCSHFYSAYPPFEVAEDDVDEGALRCAAGQSSGRDLVEEFVAYGVWPLAHGWALGEVCPRQMPFRGGEVVRSPAFALNLRNRDPAAFVREAEDGAVRLVGRYVPRTEGQRSWEIRGSNDRLNRVFELNQLPYDGYPGQDDADRRGKKPVVETKDDPAPVAAPSSKKRKLGTAMGGLGVSDGFARELMRTCAAPGERMSSPELRESSARMLKVTGGCWPRNVPIPRAASGDVFTSRMVRKWRVFPYGRNIAAVVSAVMDKDRQGAAQKRQAAVRLVEARPKRQRGSAKAAAPGGGKPPLAAKSGVPASSKAPETAAGAGGSKPAKVVPPPSRVAEAAKAARALPSAGKRVADFATDICVEDYLGGSDEGQLVIVAPAAPKAKGGALSAGGEVAALAAVRDEAGAASCRLKEVVESLSQVADFANRTASGAFTAVVSAEVERLRTQHADAVREKSAADSKCRKLADKVAALEGEKADLRRQLAGERRETNEALVKAQASQAEAKLARAEGNIARERAEQLQERLIALESRVERAEAAMRAEAERTRTQLVNTYRELGRTAGTPHCRGGFMSYASLVTCEGAMNALSREGCRHFEVFDQADEDFDRDVYKVEDLVVKESAGALYDRMWGPHGREVVRERAVSFYGS

SEQ ID NO: 84613 - protein, 433 aa, Zea mays
  Coding DNA Sequence Number=SeqID_41238
  Subcellular localization annotation: CTP_CleavageSite=26; ConfidenceScore=5.30e-01
MSSRSLMHRVFPPSEPPDGGHPQSFRVVVGGTQLRGSWYLSAIVRLQGFSSVSPAASPRRWSPKTVTTSPWVGRSKPGCDLGPTLSFKDVHHPRWGGGRAELELYLPRGFVGQPLLQRSRERALTGPARGADFDNVGLVDGGRRQLQRVGLAGLAPGAPSCREGGCRAARMGGPPKTSRAARVAFVFWGGLPLHRRRRLEKSSSPTGSPPPSALRASGSLYLSSPLERRRGRGQGCSGVRPEAIAAAVRPPGAGVVVVAAGASDDEPPVGLLLLRRPPNHSPVGYLNRFTKRESPRAKATSEVSVFRRGSGVSTDRVGSKEGLVGQSLAGSSTGGTDVGIELPRPRAGLMSSGDSWPRPRGDRPSRLLEPDSWRRPWRRRPGRGDGVVLQSGDPRTASPSEARSDLAEGVVDAEGAAAPFSCQDPSLQDRIIL

SEQ ID NO: 84614 - protein, 447 aa, Zea mays
  Coding DNA Sequence Number=SeqID_41239
MVSPVSCKRVIRVDVRAPFVGGRLGAQRHAQKYLRHLARRLRDAWAWASMLARCESEKRVRLARLHAACMTARPFRLLVWAKGELPLKGGRPLSEGDHVFFLPYASRLSAFQAPGWGEPAVFSPHRWRNATPWELVPFSHRSASRIFIMQPGCTPPPAVTQDGDLQLDGGGKRAGLWPLPLPRPRGFSSSRPRWRMRRVGGLPPRGSAALFFPWRLGKNGILQFRGDFLQPCRGRRTVAAQLGCNIPPPPSHSRRGRQRGPAGALRSGLLFGFNSWFASLEREREREPSGGHVHPGPWLLLQRSLAGLPTLVAPQARGCSYPRGRNQSSVCNGTLNANSPVDYLNRFTKHESPRVKVTSEPGCPSAGPMPELISRGLGPGWRPWKMVGRGPWGNRPSRLLGPDSRRSPWTASPSEAGSDLAEGIVDAEGATASFQREDPSLQDQIVL

SEQ ID NO: 84615 - protein, 25 aa, Zea mays
  Coding DNA Sequence Number=SeqID_41240
MAVGVSEALYTKAIAIKGYGIIVRE

SEQ ID NO: 84616 - protein, 79 aa, Zea mays
  Coding DNA Sequence Number=SeqID_41241
MEEAHRGRRPSPEPIGNLSIAEDSGVQSTNRMRPDEALDKTNAGVPSDSVDDARIGSNCLPELSLELEPLRTSASNTGS

SEQ ID NO: 84617 - protein, 207 aa, Zea mays
  Coding DNA Sequence Number=SeqID_41242
  Homolog annotation: Hit_ID=A2WY58; Match level="QueryCoverage=87%, HitCoverage=28%, E-value=2e-37, Identity=50%"; Hit description =Putative uncharacterized protein
  Subcellular localization annotation: CTP_CleavageSite=29; ConfidenceScore=5.12e-01
MAPAANCSVIVLAKLIFRAKGDGQATVPVVNMSRSRMARCRQAAWLLYHVGVDASALLFADEVDTDGLIMDQRVNLLVVGQDILKSKAEVGSVCTTLTHTYCEDAYSLLQNLDIKKLLLAGILLDTNNLSKKCSNRDSDAVQLLLFGTSEHMRHELFQQLMLDHNDHSFVEYLKNTYRYSTINGMRTVLQAKTFQLHQSRSPKMLKI

SEQ ID NO: 84618 - protein, 62 aa, Zea mays
  Coding DNA Sequence Number=SeqID_41243
  Subcellular localization annotation: CTP_CleavageSite=4; ConfidenceScore=5.03e-01
MAATAFAGAPRLCVGHGARASTPPLPPRFAHRPLKYLGINLQSWLLESESLDNLRSSPWSFC

SEQ ID NO: 84619 - protein, 96 aa, Zea mays
  Coding DNA Sequence Number=SeqID_41244
MQSSNETPSKGGKSPKSFLRECRARMKHLAKISFNNVVKCLFNNIIYRPMNYFKFNQKILQLGVSFSEMYGSSNVGRETVKKRSCHKSTNDYPKHR

SEQ ID NO: 84620 - protein, 319 aa, Zea mays
  Coding DNA Sequence Number=SeqID_41245
  Gene Ontology: Mol. function=nucleic acid binding; Cellular component= small subunit processome; Biological process=rRNA processing
  Homolog annotation: Hit_ID=Q5N7Y0; Match level="QueryCoverage=90%, HitCoverage=78%, E-value=2e-85, Identity=58%"; Hit description =Leucine zipper factor-like
  Pfam annotation: Domain name=Sas10_Utp3; Domain location=2-71; Score =63.2; E_value=8.9e-16; Accession=PF04000.6; Description=Sas10Utp3 family
MAAASAAKANSVKANQLPAGNGIGYLEAKNHMLLGYCQDIVYYLLRKTKGLSVDGHPVVRSLVEIRLFLEKIRPIDKKAEYQIQKLTNAADNATAREKAGNAEVKGKDGHSDEEDLLMYRPNPEMMDTKPGPDGQNFAYSVQVLNAKILINTCHSNSPFPEVDTDGVYRPPKFMPTSMDDEEKRHKKDSRRDKAIARVATENPYIKEIIDDAADRPEEWKETVGDESREFGRYMRQREEQEKQEEELFTRAPVTKRDKQMEKRIRRQLHGLGGLTDGFDLGMNMLLGGDKEDDGGSSKPHGKSGNRKKHLKSSKKRKRH

SEQ ID NO: 84621 - protein, 112 aa, Zea mays
  Coding DNA Sequence Number=SeqID_41246
MGIPVGDLSLRGTEMGKKCSPQAFVGIPVGKKFRRGDGDGELFSGGEFPVAIPTCRLQLPPSMTVCIHELHKASKRSFYAGSKGKKRESASKSPRGTLKQTRVKLWEKRPKS

SEQ ID NO: 84622 - protein, 85 aa, Zea mays
  Coding DNA Sequence Number=SeqID_41247
MAAGFIRAVRCLRAIPITEDKERRLEDENEAEDALQFLVGGAGATDARTATGSTPTSPTVEASSGSGSCPSPATRSRRRGPNSKV

SEQ ID NO: 84623 - protein, 224 aa, Zea mays
  Coding DNA Sequence Number=SeqID_41248
  Subcellular localization annotation: CTP_CleavageSite=27; ConfidenceScore=5.07e-01
MADSPCQQHPEVVFAAPTPTSRQRRPRVSIVAAKPPHTLTTISPIFDSGYGMLCWDISLRLEKSRQGGPLVNGLRQAQLRASTRVRVRLSARDTMAGRQGWRRSQERGSESAAAHSLCHRRPASGAIPNSVQPSEKIVHTSVRLPERGIGVYFAGEASPRSPELSTPPEYVDRVNHSTILRFLVHTVAMLPREAHHALGIEPVRRGLAESPRANPTLRRTSLAA

SEQ ID NO: 84624 - protein, 62 aa, Zea mays
  Coding DNA Sequence Number=SeqID_41249
  Subcellular localization annotation: CTP_CleavageSite=4; ConfidenceScore=5.05e-01
MAATAFAGAPRLCVGHGARASTPPLPPRFAHRPLKYLGINPQSWLLESESLDNLRSSPWSFC

SEQ ID NO: 84625 - protein, 327 aa, Zea mays
  Coding DNA Sequence Number=SeqID_41250
  Homolog annotation: Hit_ID=A5BKB8; Match level="QueryCoverage=19%, HitCoverage=16%, E-value=6e-13, Identity=66%"; Hit description =Putative uncharacterized protein
MANGPKTDFRPRPRKRARGRARDPPVVPPRETWKFGCTREGKRNSPKSWEGVSSAEPRTPSRPSRGRSAPYRAQLRLALLAAWPAVRLRWRMSCLGPVTAWRTPAAVRPTPGARVPSLVRASCACCVEKCLRAATRPTGSRARYTLPSSSSPPGVRLVGSRAPAAFASCRRRPMAGGTEDTSLALLVSDVAHAEGRRRVGVTRPRIGPPERTTSSPARRLRAEVGAGPSARTCYLVDPASSHMLVSKIKPCMCNVTARGRTFGPKDPSSDRACPRTATPEASSATDRAQVLWKGTPGRVRAPSGPDPVAPRGAVNESGCLGMQPKSG

SEQ ID NO: 84626 - protein, 196 aa, Zea mays
  Coding DNA Sequence Number=SeqID_41251
  Homolog annotation: Hit_ID=Q0WWS3; Match level="QueryCoverage=20%, HitCoverage=51%, E-value=5e-17, Identity=95%"; Hit description =Putative uncharacterized protein
MKNVAKCDTWCELQNPANHRVFERKLRPKPSGGGHVCLGVTPKDTPNTPPRGEGRGVWPPAPHDEVGRSRGCRRTAPGAAREASSATDRAQVLWKGTPGRVRAPSGPDPVAPRGAVNESGCLGMQPKSGGFELEHACRDPKDGELCLSGAKPEETLVEARSDTDDSWSPHEFYRVKPMIRGIGGATPSTYSQTLNR

SEQ ID NO: 84627 - protein, 163 aa, Zea mays
  Coding DNA Sequence Number=SeqID_41252
  Homolog annotation: Hit_ID=A2WY58; Match level="QueryCoverage=98%, HitCoverage=33%, E-value=8e-35, Identity=51%"; Hit description =Putative uncharacterized protein
MEVDEAPDLTDFMNDWFFGTVGARHSGGGGGGGGGGGYDLTGESSKRPAASPAAGNKKQGKGKGGGGSSSASKQTQDWLEEARRMVGPGSPGRKGVGSPSRQLPRFAGGSGTEPTPTLDRRDPMSRSARRFSTQSDSPHSQILRKVSQKKAEPNKPYEALPNG

SEQ ID NO: 84628 - protein, 57 aa, Zea mays
  Coding DNA Sequence Number=SeqID_41253
  Homolog annotation: Hit_ID=Q8SA86; Match level="QueryCoverage=100%, HitCoverage=6%, E-value=6e-07, Identity=55%"; Hit description =Putative retrotransposon protein
MARVRSTARVTCDREEAEAAETAPISKVMKRSGLVAPEDVSDEGAPAAEAEQVGAEE

SEQ ID NO: 84629 - protein, 167 aa, Zea mays
  Coding DNA Sequence Number=SeqID_41254
  Homolog annotation: Hit_ID=O48967; Match level="QueryCoverage=99%, HitCoverage=38%, E-value=2e-19, Identity=36%"; Hit description =Putative uncharacterized protein
MVHIVKHHDFMSEDFPVEEEAVSSTPRATNRPVSGAAALHGLAGSHEAVRDDVDRLLDMAHSGSARPRPRSSRHQHEASASVHSPSVRAAPTKDLRAELNHRRAGEDAPVSLERSSDLRAELNCRHAGEDARVSLERTREHWLNVEGRNRDYDFIAVAPQTPTGAQI

SEQ ID NO: 84630 - protein, 424 aa, Zea mays
  Coding DNA Sequence Number=SeqID_41255
MCSHCYVAFPPFEVAEDDEDEGALRCAARMSSERDLVEEFIGYGVWPLAHGWVLGEVCPRQMPTLGQQLVRNPAFALDLRGRDPATFVREVEDGAVRIVGRYASRIESLRSWDIHGCNVLLNRVFELNRLPYDGYPGDDTAAAVDRRGKKAVAVAEEGPSREAAPAVKKRKIGTTVGGLGVSDRFAVELMGTCVALGGRMSSPELRESSVRMLKVTGGRWPRNIPIPRAAGEDIFTSRLAREMKIFPYGRNIVVVVSAVMDKDRQDAARKRRAFARVGDPSREVKRARGGAKSTAPSSGKPPPAAKPTVLGPSKYSAGARAIAYGAGKPPLAKPTKERRLPSPVRTDEAAAGGADFDMDICVDDYLVGSDAGQLAVVPGSVVATSLMVAVGAKGTSQDPWSKFCASGEISSAAAAKDVAGSVSQ

SEQ ID NO: 84631 - protein, 152 aa, Zea mays
  Coding DNA Sequence Number=SeqID_41256
MAPSEAVELGGWHNNSLAADSALGAALDALDVCVGVCYRVECTAAAPDTGRLVARAQGGTYKGVEPRHVGPGAKRKEITNACNTWAISEHHNVRSAYSIDIPRYFLVNARVMMSVVHATTWAYCLPMEWTGTPPAGWPGRRPSAEWTGLIKC

SEQ ID NO: 84632 - protein, 126 aa, Zea mays
  Coding DNA Sequence Number=SeqID_41257
MALPIVMTTCVILPPLELGEGPSLPLQSTGAARLDHDNASSTSIFSSLVTSTSAMLSKVNLGTPNIRSKSKNSELVKLDPRSVMMLFGIPNLNIMSCMNSIVLAEVKEAMGLYSIHFVNLSMATNT

SEQ ID NO: 84633 - protein, 582 aa, Zea mays
  Coding DNA Sequence Number=SeqID_41258
  Pfam annotation: Domain name=Transposase_28; Domain location=290-461; Score=-16.6; E_value=1.6e-05; Accession=PF04195.3; Description =Putative gypsy type transposon
MRIRLKTIKMKIKRMSHLKRRTMIKGEMKLIKTRKMIKRYRVKDHHTQESTKQFKEITPVEDALRDLDWVLAMQEELNNFTRNERPYVRLRALAYVTGSRSRGSIGSPPERGAEAYTVWPEHVSAPDPRLALMKAWVFFVLESRDPAVSGSDPTQRDPTVDTLEYSIFSGHVAASEPSTWVPTVAPEPTSGEDTSLQVGPKLDWRLARCFRVLADVISANPSSVTSSAMSVPVADRPAAPTPDGFAGPRARRLDTAALVLKFTFSVFCGGPEEAQYWRERRFTLSALRNRRSRIAMASLAHPERFQSEGALNLVRNLLRWGAPAFAGRIHAGASPLGDLAAGEFVLFVSYLSCGLALPILPSFLLLLEELGPQLQHLTPHSILQAAIFAHLCEMFLGVALFRQCPDESELSYDSTLRMNSIASCSGLVSSSLNFTSISWYATMNWSSSGSVAAARPPSIACCRASTSCAISISLADTSGGAPTLLHSRLDVSRLGTSIPKKELATAPRRSQLQILGHPLQSGEGASLGIGVPNNKPGLLNSDVIIPARVGSVWVDQQAGLMRVDLTGLAYTDWEEALLHLLP

SEQ ID NO: 84634 - protein, 92 aa, Zea mays
  Coding DNA Sequence Number=SeqID_41259
MWFAINRLIQVEDEEQQESLEPGLQSEIPITLVRRDDQHINQQCMSSRYRSVRAVSWRPDPQVYARRWSQKPVPRAPLPPSPNKHGKLTGSL

SEQ ID NO: 84635 - protein, 284 aa, Zea mays
  Coding DNA Sequence Number=SeqID_41260
MEVRCQTSFCQNEDGFLKLLRACTVCLGIRSQPECDGREFVKHGTEKCVVTVYIGSSPHHVEWSVTTTGHRFRDTYQVVARKALRALCQIYEEEVADTPLRFFPPFQRNRPVWMARMRALEEQQLLEDDPTIVMISLARHHRQMIARVEDAEKLNRKLHVDLTSAQARVAALESREAIAVEALKQAKDEHVQNLMEAYLVTHNQRRALQIQEPASSNPVQSVRAEDPQILEGHPVSIRGEKKAWELPEGTIVLEGISVFPQAMNKQEHPSPPKIPRQSCLGPSP

SEQ ID NO: 84636 - protein, 727 aa, Zea mays
  Coding DNA Sequence Number=SeqID_41261
  Gene Ontology: Mol. function=transferase activity, transferring glycosyl groups; Cellular component=integral to membrane; Biological process=protein amino acid glycosylation
  Homolog annotation: Hit_ID=Q10BV5; Match level="QueryCoverage=63%, HitCoverage=67%, E-value=0.0, Identity=71%"; Hit description =Galactosyltransferase family protein, putative, expressed
  Pfam annotation: Domain name=Gal-bind_lectin; Domain location=150 -354; Score=149.7; E_value=8.3e-42; Accession=PF00337.13; Description= Galactoside-binding lectin
  Pfam annotation: Domain name=Galactosyl_T; Domain location=400-596; Score=53.3; E_value=8.5e-13; Accession=PF01762.12; Description =Galactosyltransferase
  Pfam module annotation: Pfam domain module=Gal-bind_lectin::Galactosyl _T; Domain location=150-354::400-596
  Subcellular localization annotation: CTP_CleavageSite=12; ConfidenceScore=5.37e-01
MPPKRACRLALLAAAAAYLLFLLLFELPSFSVSTASPRLAQAATRRELLRASSARSPLRPRTSAPLAVSSVRVHRRATSSSSSASAAAAISSIDASAAAAFAAAAPHLARLLSAPAPPSSAPSPSPTAAASASCPATVSAPRDQLASGAGVAVDLPCGMAVGSRLTVVARPRAARPEVAGAGDGAAPPVMVSQFMLELLGTKAVQGEEPPRILHFNPRIRGDFSARPVIELNTCYRMQWAQPQRCEGWQSRPDDDTVDGELKCDEWIRDGNNETQESRMKRWLNRLIGRPKVNRPYPFAEGKRFVLVITAGLEGYHVNVDGRHVTSFPYRTGYNLEDATQLSLKGDIDVESVLAGSLPTSPPTSATRSYLEMSKQWKASPLPTEPVELFIGILSSANHFAERMAVRKSWMISTRRSSDFDSNFVLKSNGKENNSQNGRNEVNEELKKEADYFGDIVIVPFMDNYDLVILKTIAIVEYGVMVVPAKHIMKCDDDTFVRIESVLDQVNKVPRGKSIYMGNINYYHRPLRSGKWSVTYEEWPDEVYPPYANGPGYVISSDIAQYILSEFDNKTLRLFKMEDVSMGTWVEKFHTTRQPVEYLHDVRFYQPGCFDELNARASCSSWEVENLDAMNGGVEANQIALFGDDQRVDFDQRQVALHDNGRQAHEDFGELLNQFTFQTQFERHLASLIRHRASQRIKRNFMDQVRSFFRHFFDFHAAFGGGHKDHTT

SEQ ID NO: 84637 - protein, 80 aa, Zea mays
  Coding DNA Sequence Number=SeqID_41262
MHDDCGLEPLATTRPQLASSGVWLAGDGDSTVNPYIDASSGSRPTTSAALALLPIVVCILGGERRQANLSVGVEIWLGLV

SEQ ID NO: 84638 - protein, 656 aa, Zea mays
  Coding DNA Sequence Number=SeqID_41263
  Gene Ontology: Mol. function=transferase activity, transferring glycosyl groups; Cellular component=integral to membrane; Biological process=protein amino acid glycosylation
  Homolog annotation: Hit_ID=Q10BV0; Match level="QueryCoverage=100%, HitCoverage=100%, E-value=0.0, Identity=80%"; Hit description =Galactosyltransferase family protein, putative, expressed
  Pfam annotation: Domain name=Gal-bind_lectin; Domain location=168 -378; Score=154.8; E_value=2.3e-43; Accession=PF00337.13; Description= Galactoside-binding lectin
  Pfam annotation: Domain name=Galactosyl_T; Domain location=424-616; Score=54.4; E_value=4e-13; Accession=PF01762.12; Description =Galactosyltransferase
  Pfam module annotation: Pfam domain module=Gal-bind_lectin::Galactosyl _T; Domain location=168-378::424-616
MRRPSGAGAPCRSRAIQVLVAVSFAYALAVLLLESPFVSTSLLGAGASAAASRKLHLAGAWEGVRRAVPARPAKHPHRETLSSDAGRGRARRLAGIVSGLELCHLNSTRSGSLRKVAAEAAESGARVFSDLEALATALASSRDSSGEEEKSKCPHSIVLSGDEFRERGRAVELPCGLTLGSYITVVATPHEAHPERDPKITLLREGEEPIMVSQFMMELQGLKTVDGEDPPRILHFNPRLRGDWSGKPVIEQNTCYRMQWGTPLRCEGWRSRADEETVDGLVKCEKWIRDDEGRSEESKTSWWLNRLIGRTKTVSVDWSYPFVEDRLFVLTLTAGFEGYHVNVDGRHVTSFPYRTGFVLEDATGLSLDGDLDVQSVFAGTLPTTHPSFSPQKHLEMLPSWQAPPLPDEPVEIFIGILSAGNHFAERMAVRKTWMSAAQKLPNVVARFFVALHGRNEINAELKKEAEFFGDIVIVPFMDSYDLVVLKTIAICEYGVHVVYARYIMKCDDDTFVRLDSVIAEVKKIQNGESLYIGNMNYRHKPLRDGKWAVTYEEWPEEDYPIYANGPGYVISSDIADSILSEFLNLKLRLFKMEDVSMGMWVERFNSTRLVKYVHSVKFCQFGCIDDYYTAHYQSPRQMLCLWDKLQAGKAQCCNMR

SEQ ID NO: 84639 - protein, 183 aa, Zea mays
  Coding DNA Sequence Number=SeqID_41264
MEGHATPHSSPAAASFAHTLAGSEYSEDGLGGEPSATVGPPEKQRRNCLRIGFKMSSHDAKVLQHLVLNLADSVETGALNIRSFLEEAFRHLGDKHYLLNALLAIRKEVDLMEQDALESKARPDPEKVRMEEEIKVVEHVDPVGRQFPFTPLPHQNCMRPVTMTLMTRTCPLGIAFRTCKCGT

SEQ ID NO: 84640 - protein, 200 aa, Zea mays
  Coding DNA Sequence Number=SeqID_41265
  Gene Ontology: Mol. function=nucleic acid binding
  Homolog annotation: Hit_ID=Q2QUK2; Match level="QueryCoverage=63%, HitCoverage=31%, E-value=5e-25, Identity=36%"; Hit description =Putative uncharacterized protein
MPILTRWKDYKDDQKYYNSFVSQLNGRLSVNTEDKATKEACTDMLRSAEISAKNKQNRSQVKFHQATGSRCYVAHLHAYKQKRNREEPSLDQTEELDAVDAFKTCHTSSKRGLSEPAREALSHMEALRAEPVAEAEATAAVQGELDQLRKKCEEVEEQQARTQRELEEYKKITEKNSKEMEETNVLIKKLLSLHGNSSST

SEQ ID NO: 84641 - protein, 289 aa, Zea mays
  Coding DNA Sequence Number=SeqID_41266
  Subcellular localization annotation: CTP_CleavageSite=51; ConfidenceScore=5.33e-01
MSSSSLMRRVFPSSKPPDGGYPPPFCLLVGGTQLHGSWYPSAIVRLQGFSSAGPAAPLRRRSPRMVTTSFWVGKSKPGCDLGPTLSFKDVHHPRWGGGHAEPALYLPRGSAGHPFPRRSGVEALAGPAGGADLDNVGLIDGGRRHLQRVGVVGRAPGGPSCRRAAAAPGRCPTRLGGFEWGSAGGLASPAIGAEAEAAREVLVADGITATIRAPGHCAGVLVLAPRASAWARARLQQRPPTVAVVRTGGGEPLKSLGSIGLVVWGSSSLVKETPRLLFDEPRPGVAISV

SEQ ID NO: 84642 - protein, 185 aa, Zea mays
  Coding DNA Sequence Number=SeqID_41267
MAVLQQGVSDGAPERWRLTGGAPARPGPLVSGAGQARMHADGRGLPVSDIERRGRGPTLRVVLTRGTSGPQVSGRAREKKVEGGIAAAWWATIIKVIFNPETDAQPSMPDDEGAFSRACGLRPQRWSHQATQPRRREEERRSKKGGVGSPLMTPASLMARCFGSANVDGRRATAMTKARTTTWGG

SEQ ID NO: 84643 - protein, 207 aa, Zea mays
  Coding DNA Sequence Number=SeqID_41268
MTQEPHPLQPGWRSLDSESFGYRAEDTIEAIALHGLTTFCGFHPLELSTHPIGLFPAEKEDDPMWKDRVEHAKDIWAIYPCQTAHLTVRCMNALYHLQVMRGEVMSHLMALLEATKITLDNREELMLEELVGTRENTIEVLEDQLINTQQQLAEANQHLDMHHQEIQDMEANEDVDIEGGEEPASSLDTAGSGRPPSPESSVASFAH

SEQ ID NO: 84644 - protein, 126 aa, Zea mays
  Coding DNA Sequence Number=SeqID_41269
MRRRAVRVLSPNRGGGTILLMAALHALNTQFRNLRPSLAQLVKGVVQLGVEQSDQKAPLAEAQGRATSQTPPLAEARVKSAPTLAHGVGANVLVQATVQSLQVARLSYHHAAQWRFCMARGKERDH

SEQ ID NO: 84645 - protein, 113 aa, Zea mays
  Coding DNA Sequence Number=SeqID_41270
MAALGFPRGAMEGSGFIPMGRMESVQARIMRPRNQGGHDRGSRVERQPPRATRTILLRKGHQTAWARTTIWCSHEMINMSNTYRYRAINFLILDSAYKISVVTSVGVNMLIRM

SEQ ID NO: 84646 - protein, 144 aa, Zea mays
  Coding DNA Sequence Number=SeqID_41271
MVFLASSSDDDVVHIRKYVSADLALEHHFGELRECGPSVLKSLRHSDEAIRAKGCYETGACLVFLLHIYLVVMELPLDAQSSGRRLDVDERVEQCRAVAGVLHVLARFVQVLQMQHLRGIHTYREEAPRTELLGSRRRLGEGER

SEQ ID NO: 84647 - protein, 179 aa, Zea mays
  Coding DNA Sequence Number=SeqID_41272
MANPIDLYRGGEAGAGIPRLTAIAAKSTQGPPYIDHSPTALAPFRFEATSVTQPRVDDSDFHGPRRQSGRGIEARPHFRCENTARIAAPRCARSPATRAKLNGGGNKNSAAAPFLTLLEWRSGKRDLGKLRWHGIARKGIRRRGRGLGFSEDEPSHSVSEVSADPGEPVKEFAPARKFR

SEQ ID NO: 84648 - protein, 150 aa, Zea mays
  Coding DNA Sequence Number=SeqID_41273
MAGKTKQSLPEAPPPRFEATSVTQPRVDGSGFHGPRRQSGRGIEARPHFRCENKARIAAPRCASSPATRAKLNGGGNKNTTAAPFLTLLEWCSGKRDLGKLRWHGIARKGIRRRGRGLGFSEDEPSHSVSEVSADPGEPVKEFAPARKFR

SEQ ID NO: 84649 - protein, 217 aa, Zea mays
  Coding DNA Sequence Number=SeqID_41274
  Subcellular localization annotation: CTP_CleavageSite=27; ConfidenceScore=5.00e-01
MRSSSSSGAEPESEPWGRAMRSSSSSRAEPKSELWGWAMRSSSSSRAEPESEPLGRAMRSSSCSGAEPESETWGRAKRSSSSSGAEPESEPWGRAKRIFLWRLRPDLAVFSLTLSSGTAVGAAQAALSSCQATFALNAPAIRSVGVVTWPRLLLGEDWASGELKHQTQRFLCGPFRRDLPQRSDLANSLVFLAWSTFPSGSQRDPRRTVPLPLLNRS

SEQ ID NO: 84650 - protein, 148 aa, Zea mays
  Coding DNA Sequence Number=SeqID_41275
  Homolog annotation: Hit_ID=O48967; Match level="QueryCoverage=35%, HitCoverage=11%, E-value=2e-16, Identity=71%"; Hit description =Putative uncharacterized protein
EDQGKPSGKFISRFTKVRAATGGQGDHNKCPRPQKGSSGSCPVHPHGRHSAAECHEIIDLAKRVSERRKQSSKDGSPHRRRPSKEKVDDGEVAAAERDLGYQSPEGDLKDIFTRGSYSDGNPRLGLAPRQVPFQEGLCNSPPAGKDPS

SEQ ID NO: 84651 - protein, 137 aa, Zea mays
  Coding DNA Sequence Number=SeqID_41276
MGGGRWRGSLHVWAERERGRASLAEGANGRGEVGERGAGLKRGEGARTWLENVRSWAHPRRGDRGREVGDEMTGGDGGTERGRAGAREGNRTDSSDPRCSERERGGRECERSGLRRQAGPACQAEGVRGRGCAHGLG

SEQ ID NO: 84652 - protein, 229 aa, Zea mays
  Coding DNA Sequence Number=SeqID_41277
  Subcellular localization annotation: CTP_CleavageSite=28; ConfidenceScore=5.20e-01
MNGIPGGMRFIKHLNKGRNKPPRVRRALASPKQAPAPDPARTAPRQAQPVPAPAPAPIKIAKASIVRPRSLSTSPKRQITGVCSAHGVPAATRDPTTVYRPIEPFPAPSDVRPSIESPCVSVKLPKPGIELYLAGDTDSTSPDFTRSPAYVDRAPRPEHTPPTSPTAYARGPTDSGHHRRRAVPRRDCKDFPELTLSLAGPPSPPEPAPESGIEDLSAPALEGKPRFYA

SEQ ID NO: 84653 - protein, 143 aa, Zea mays
  Coding DNA Sequence Number=SeqID_41278
MSVDLWCPGHTLVRGHGGVDRVAGVVEDWRDTCLIVEDVHEVRCSRQVWWFGPQNHPALRMAGFAEFGPQNFVVAVPEGTGGGTRHDRRGCVKAKQLRVKDVAIGSKTYELAHFAPGGVDRLYVNRGSLRSENNPVQIEGRAG

SEQ ID NO: 84654 - protein, 55 aa, Zea mays
  Coding DNA Sequence Number=SeqID_41279
MDPKGKGIVINDKDETLNIDDPKGDKIIDSGSNNKRKAEGYREFEAVGSTSSGLD

SEQ ID NO: 84655 - protein, 37 aa, Zea mays
  Coding DNA Sequence Number=SeqID_41280
MATVAYTLRGKRLDGGESVLSVGVNSPYLDSLKPAYP

SEQ ID NO: 84656 - protein, 156 aa, Zea mays
  Coding DNA Sequence Number=SeqID_41281
  Subcellular localization annotation: CTP_CleavageSite=36; ConfidenceScore=5.20e-01
MDAMKTLHALVFELALAMALGFSSRAWHALPASVVFCSAVGTTSSVVASWCNVAVLRRHAFEPIIILEGDLVLKPKPTAPLFFIVDPSRFPDVPVDPDDLSSNCAPLALSSEALCRARPWRPPTRRHPLRRRKIPRVWIKQQIPCGVCRVLGKRHE

SEQ ID NO: 84657 - protein, 66 aa, Zea mays
  Coding DNA Sequence Number=SeqID_41282
  Gene Ontology: Mol. function=structural constituent of ribosome; Cellular component=ribonucleoprotein complex; Biological process =translation
  Homolog annotation: Hit_ID=Q949H0; Match level="QueryCoverage=96%, HitCoverage=33%, E-value=2e-22, Identity=73%"; Hit description=40S ribosomal protein S7
MQDVVFPVEIMGKRIRYRLDGAKVIEIFVDLKERNNTEYKLMTYTTVYRRLCGKDVVFEYPMTDIS

SEQ ID NO: 84658 - protein, 101 aa, Zea mays
  Coding DNA Sequence Number=SeqID_41283
MPRLAGPAQSAGRRAVPGREMRPTDFGPSGSMTGRPFDHLYAEGCGLGRGGCLQFLGQSLWAQHLPLFVLSQLAKPFSLDRQAKDCILQRVYKEPYLSSMK

SEQ ID NO: 84659 - protein, 525 aa, Zea mays
  Coding DNA Sequence Number=SeqID_41284
  Gene Ontology: Mol. function=kinase activity
  Homolog annotation: Hit_ID=Q6QP54; Match level="QueryCoverage=13%, HitCoverage=24%, E-value=3e-09, Identity=54%"; Hit description =Putative kinase
MDSMVFEVAELDGAAMSVFRPRGVPGPTSKLSLRVPAQMGRHETEHKRETVRGNHGLVLSCAQGGCACSRGLQAFAWERERARALCTSPFSRAATFSYESPGPSFYRCKERTQVYNGGCSNVLTCLAKGSQSPMYMPSWLSERFWRPVHVMSWPSEERLSPVEPELARGRVMMPPCDVVGPSPRSGEAKAPPRSRLSPGPERPSFEVEAESELRGWARRCPSSEVEVQSEFWGRARRRPSSEVEVESEPRGLTLMGGTTVGAAQAALFSCQAILALNAPAIRSVGVAIRPRLLLRETCPSWASGESKLCADGGYQLRLGVLGLGSKFSGWYVDAVNGLAGAGFARAAPEPPHRGAEHGVSQHVVRRESGTRVLGRSHSRFRDEDGSEDLPVRFGAAGARWCGVGGQVDAAAGAEVVAAGESFSADETVRATRGPTSGSLALISGSHPPRGDANESLPAVASVLGPSLLLQRSPASRPEFVVPQALRCGGCSYPWEWNRSSVCNGTLSAPVCSLWLSGPEHHCIWA

SEQ ID NO: 84660 - protein, 246 aa, Zea mays
  Coding DNA Sequence Number=SeqID_41285
MTTSLVVERSEPGCSLPLPSASRMFIIRAGEEGEKGVRQPCEGGKLRLRGVDRLSRRQLPRVWLLGLGGFGAASGAASCRLDGACLSVHRTGDGRAVRRSATPTASPASPATSGGSYKTSYAVGGGGSVLGWSCPHSRSEDGSEDLFARALEWPPFAGTALVRRWSLSSVLRWSPPLVRLPTTEVVASAGETVSATCRRTSGSLALMASLLPPIGRRGEDLFAVALTLRGGRCPKPASSATPAGAA

SEQ ID NO: 84661 - protein, 152 aa, Zea mays
  Coding DNA Sequence Number=SeqID_41286
MMIKGVSSKGHRTPHRLRGNSKAPSDQNKGHTTRMCHVTIQKQKEIAKAAAQQASAPNTTTATRPAAQKGANMSNVKGTSENNPKLSLQRKVNADSAESKRRRSSKDVPKGMQSLQRKVNADSAEVKGEEAPKTFLRECRAYSEKSTLIPLK

SEQ ID NO: 84662 - protein, 41 aa, Zea mays
  Coding DNA Sequence Number=SeqID_41287
MKDEKPIKTPMGTNGHLNLDAGERLDRVKIARKGLRGTKRR

SEQ ID NO: 84663 - protein, 53 aa, Zea mays
  Coding DNA Sequence Number=SeqID_41288
MSKTPAEPLRARAASPPSSDVFGTSRWFDEDKTGRDTLRFIQHQTKACGDVSP

SEQ ID NO: 84664 - protein, 129 aa, Zea mays
  Coding DNA Sequence Number=SeqID_41289
MAYCALEMKEFMVEMLTWRVTHGVDEAKPKAEDVMVMLQNFKCRIELPLHPFVQRMIWVRMRRTEFIQGTSNPMQMIIDELLGKEVWLHVAVVINGNKQGIMVSPPSPLTKETPANMAYSDGWMKPAFS

SEQ ID NO: 84665 - protein, 57 aa, Zea mays
  Coding DNA Sequence Number=SeqID_41290
MESHDLRAEWESRLVGGYETVESGYDYGAGCQHCNHCSGEDEAVEGDFQEFQDYDEF

SEQ ID NO: 84666 - protein, 112 aa, Zea mays
  Coding DNA Sequence Number=SeqID_41291
MTANATELRRAHRPAEHGNDWRCRAAVTQLNPPWSFSPTKFHGWRSAKLYPRGQRWPWSFVRVPGDWYLRTQNYEHEVRSGRSLNQTKDGLITKLHEGWCTAEAVRREASSR

SEQ ID NO: 84667 - protein, 150 aa, Zea mays
  Coding DNA Sequence Number=SeqID_41292
MDNIGFSKLELGISATSKDQLADSLAYNSLKPKSAQSGCTELSGGAPDSVRCARLALANRLLSELRRRVRCANGSQSATVDFAKQGNKSAPVRQSTEGKICLPGMFSTAPSCLWAIKGTPRRMEENTKHTQSIPKHQDFDSTHLFLRDSI

SEQ ID NO: 84668 - protein, 166 aa, Zea mays
  Coding DNA Sequence Number=SeqID_41293
MQPGCSPPPVVIQKDDHQPRGGEKQAGLWPPTLNFKDVHHPRWGGGRAESGPCPPHGLVTRFFLQHSEEKDVHQPCGGGEPRLRGAGLLQAVSCRGLGRGPLRNGTHPEVVAAAGKPLGAEVVVAAGAEVVAIAGEPSVQRWSSPPGLVWGSQVVRPDPLDGGSRY

SEQ ID NO: 84669 - protein, 158 aa, Zea mays
  Coding DNA Sequence Number=SeqID_41294
MDERELGYQSPEQVLKDLLIGDSDFGDNDRLKKLYQMYDGSWDIASQRDIKSLRLEVLSSTLGTPNLVPHQRLALYRFMAIAHYGYLVLKMLSPASFLIVRCDQTDVLVAIENLHALMIEVTGPDGKGQDPSTARTKARTKVPKVQPSRANDVLVKTI

SEQ ID NO: 84670 - protein, 73 aa, Zea mays
  Coding DNA Sequence Number=SeqID_41295
  Homolog annotation: Hit_ID=A2YTU7; Match level="QueryCoverage=72%, HitCoverage=23%, E-value=9e-09, Identity=60%"; Hit description =Putative uncharacterized protein
  Subcellular localization annotation: CTP_CleavageSite=27; ConfidenceScore=5.15e-01
MGLSKVRWTRTTIGGPNNLGGSVSVPRGAVPAGATLGGGAEAPLPVSGLSLMQWMGMKLDTFDGSGTPVEAAD

SEQ ID NO: 84671 - protein, 100 aa, Zea mays
  Coding DNA Sequence Number=SeqID_41296
MELLSKSYPTKEKTLKGMLVIRESRISRKIIKFKEGFFYNFLRISKVLLKRKKERLQQYWAESSTDGPTTQGIGGRPCWRLYRKTLGVLANWKQVRLLFF

SEQ ID NO: 84672 - protein, 155 aa, Zea mays
  Coding DNA Sequence Number=SeqID_41297
MGLDASTRPTRSKRGIRGALAEKRRRGRKKQGGAPWRGSWARRYEQGGGRCHGWEERSARGNKEHRSGARRRGAPRAGAIQERGRHGELVREGAPAMDGAEQEQGEGGAMSRHREDGQAEERRAGSSGRQRELESAVWKKTMCGQKIRSCCVEIS

SEQ ID NO: 84673 - protein, 52 aa, Zea mays
  Coding DNA Sequence Number=SeqID_41298
MARVACTLHGKRLDGGVSVLSVRKQQIFVAFVPRWCQRKKIRTEASGGSVLL

SEQ ID NO: 84674 - protein, 161 aa, Zea mays
  Coding DNA Sequence Number=SeqID_41299
MESHDLRAERESRLVGGNETDGSGYEYGAGKRYSFRLKRVVSIATTAQEKMKMWKETSRSSKTTTSSRRGLVATPSRLPVKAAVIYVSFSHFDLLWLDLETLHESPSSPSYPPALLSVCFAVPWPDSPATWRDCTTACMRSRNVDDRSRSSRVLLSRSNRR

SEQ ID NO: 84675 - protein, 139 aa, Zea mays
  Coding DNA Sequence Number=SeqID_41300
MVKDGCFNYKHPHFITNYSKMKGMLKVSKCYHHSSWCKGKQEYTSNKHKSRWRFHKEPLKQNYLHESKIKEHAFLASHSDLTMTLMRLLLSSDDELERWVEDKLNGLCSFTDTMGALSTMALGEDTVGCNNKDTRDDST

SEQ ID NO: 84676 - protein, 163 aa, Zea mays
  Coding DNA Sequence Number=SeqID_41301
MNSGEHGFAIPVTRVLGSSLSKLHGLTRKLSEGLDRTEEDGKGAGYGGCSRAALAGRGEVAGAKGGLGEVRRGTEEATGKAAEHWDGLYSRGVGVVTGDRGRVGVMKYTTTFIFGPSHDHKGFALGLWENLPLDVHDKPGHDIQDGWHLLRTLNPKFEMLYSN

SEQ ID NO: 84677 - protein, 169 aa, Zea mays
  Coding DNA Sequence Number=SeqID_41302
MGKSNERKREPTPPSEDFGDSEYSEEEFSSESEGSPAPVSPPASSDDSDDSQGVAAEVWTYIRTVERSGLEGSDESEFSSEEEDSDGGEGEDDDDDDDDDDDDDGGDGDGDGRGGGGGDGSKGSTRGGSSTGSTRGGSSKGSTRGGGGGSSSKGSTRGGGGGSSSKASG

SEQ ID NO: 84678 - protein, 143 aa, Zea mays
  Coding DNA Sequence Number=SeqID_41303
  Homolog annotation: Hit_ID=Q9FVG4; Match level="QueryCoverage=34%, HitCoverage=7%, E-value=3e-08, Identity=53%"; Hit description =Transposase DOPA
MFGGDDMLRKAKRMEATSGQKPSDIEVYQEGHKGPDPNNPNQLCSQTTMDRLRTGSSSRSSCSRRPNEQELEIMRMREEMRQQREFMEACNAHTQAMYQVTPEAGGSGSDPAAGTRFVDSLFAFPPPGGGSGQSSNHPSGGYL

SEQ ID NO: 84679 - protein, 60 aa, Zea mays
  Coding DNA Sequence Number=SeqID_41304
MAVGVSGALYAKAVGLFLLPGNRWGRLMFSRGYGCWSDLANHLATRLDSQVGPYLSRRGA

SEQ ID NO: 84680 - protein, 117 aa, Zea mays
  Coding DNA Sequence Number=SeqID_41305
  Homolog annotation: Hit_ID=Q7XBD4; Match level="QueryCoverage=41%, HitCoverage=5%, E-value=9e-09, Identity=53%"; Hit description =Cinful1 polyprotein
MAQAEVAFSVDDTKDPSAEATLMDGKFYNDVWVNGGREMAHEVIKRVKKTPMTPEQKQNELKRLQNAKGVAVVAAVGAEAKKLVNGLPKQQKLQVDCPHILNSDLARSCSVALVLTI

SEQ ID NO: 84681 - protein, 814 aa, Zea mays
  Coding DNA Sequence Number=SeqID_41306
MPFHGGRVVRSPAFALNLQNRDPAAFVREAEDGAVRLVGRYVPRTEGQRSWDICGSNDRLNRVFELNQLPYDDYPGQDDVDHRGKKPAVETGDDPASAAAPSSKKRKLGTAMGGLGVSDGFARELMRTCAAPGERMSSPELRESSARMLRVTGGCWPRNVPIPRAAGRDFFTSRMVREWRVFPYGRNIAAVVSAVMDKDRQGAAQKRRAAVRLVEARPKRQRGAAKAAALGGGRPLAAKSGVPASSKAPEATEGAGGSKSAKAVPPSGGVAEVAKAARALPLSGKRVADFATDISVEDYLGAPKAKGGALSAGGEVSSLAIVMDEAGAASRRLREVTEALSQVANFASRHCVGAPSRAAVAAEVERLQTQHAEAVREKSAADSKCRKLADKVAMLEGEKADLRRQLAGERRETNEALVKAQAAQAEANLARAEGNLARERAEQLQERLTALESHVEGAEAISRAEAERTRQLLVDTYRGLGAGTGDFEVPDREPGLRCLEWVQEELQALPTVVEGFMAYASLVTCEGAMNALSREGCRHFEVFDQADEYFERDIFKVEDPVVKESAGALYDRMWGLHGREVVRERAETARAQAARGERVDDFGALNSMLSDPEPTPAEAVSGVALEPTPETTKDAPGALAAAAAGEDLPPEVAEGAPDALAAAAPSAEDPAAVQDFGPAHTTATTKFLAASTAEDGNECGGSASEIFDCADSGSSVEWTEESSEEDLDYFAASDVAAAEASPHVAGAGDVAGPSTGRRRRRAIAKRRVSGVEGARLRATSVWIVFAIDFDFFALVVLVWLHPWATSARIVFAID

SEQ ID NO: 84682 - protein, 112 aa, Zea mays
  Coding DNA Sequence Number=SeqID_41307
MEIVEHAKATLLASETIPVVTVEASASPVEETEAKSLKAEEHPKLLSPPTTTGLPKLTTATTMTPRKMRMANVLDVVLKSSKVPTLASTEASKGPILSKALKAQKDAEDEST

SEQ ID NO: 84683 - protein, 154 aa, Zea mays
  Coding DNA Sequence Number=SeqID_41308
MASQWGALRRSTSRASKVNSMWDHFVCTTGARDGDMVDAAVVVPLLPLGVEVSAGPPSYHVDDSAIWLIGEVFLLWGMGDVLMLLVWWWGWRRYRFVLPDGVVFAMEEAVESGAAAAHALGPYHECHFRGPGGIFLAARGSAAGCWLAMLCTCC

SEQ ID NO: 84684 - protein, 122 aa, Zea mays
  Coding DNA Sequence Number=SeqID_41309
MNSGRARFRYSGDAGPSGSSLSKLHGLTRKLSEGLDRTEEDGKGAGHGGCSRMALAGRGEVAGAKGGLGEVRRGFLLSKKGFALGLWENLPLDVHDKPGHDIQDGWHLLRTLNPKFEMLYSN

SEQ ID NO: 84685 - protein, 219 aa, Zea mays
  Coding DNA Sequence Number=SeqID_41310
MSKVTCSLRALGATPKERGSFFADRKGALAAEAIQWVVRRFEQAVADAHAVEGVEENDIRLAVVVDVSGVEGQWHMGPLCLHDWTSDDDVVDAAVVVLLLSLCVEVDAGPPSDHVNDSAIRLIGEVFLFWGLGVVSTRALPFFSANSAAFAASSTDGAAFELALLGAITAAISNDSSTTDANSSFICIILAIESECSPHRVSTVVVIAAMEPLSIYTSL

SEQ ID NO: 84686 - protein, 213 aa, Zea mays
  Coding DNA Sequence Number=SeqID_41311
  Gene Ontology: Mol. function=transferase activity, transferring nitrogenous groups; Cellular component=endoplasmic reticulum; Biological process=biosynthetic process
  Homolog annotation: Hit_ID=Q10P02; Match level="QueryCoverage=28%, HitCoverage=12%, E-value=1e-23, Identity=88%"; Hit description =Aminotransferase, classes I and II family protein, expressed
MPARERPLPSLLLSIDAQADAELPAPPDGVVKHLELKSPCLSKEVIKGVRSCDARQVSEFLDSKSETDVDVDYNSLYSKLDFLQGEKTGRDENEVLKAIDYVHELSMRCPGQSECSTLPKNFRNPSYEKASYCQGCYNGLSDEGVHWAVQNGLHLSRSTVVYFKHNDVASLASTLEKLARGNKRAKKIRRYIVVESIYKIIPVFWFDLEYTYV

SEQ ID NO: 84687 - protein, 57 aa, Zea mays
  Coding DNA Sequence Number=SeqID_41312
MGKRGSGSGVTSRYHGDVFLAKRVMKKTLMEISMNTESNDAPVIFLWEITHVISTLL

SEQ ID NO: 84688 - protein, 107 aa, Zea mays
  Coding DNA Sequence Number=SeqID_41313
MALPFLGINGERNGGGERETGFGFRFGVEGAGSRVSAVGHGVAVAVGRGAAVASGAERVARRWLHAWAYAYGAWRRRVSEGRGGKERRAWVGPAWRRLGREGRGGWA

SEQ ID NO: 84689 - protein, 189 aa, Zea mays
  Coding DNA Sequence Number=SeqID_41314
MTSNGSSDDGNALSHTDGLAREGFPRILWEVLQGAGYTTPPQYVVQQFEKHRDTIEAIALHGLTTFCGFHPLELSTHPIGLFPAEREDDPMWKDRVEHAKDIWAIYPCQTAHLTVRCMNALYRLQVMRGEAMSHLMALLEATKITLDNREELVVDLSTEMAEKDLQVEQLSNEIQELEELVGTRENTIE

SEQ ID NO: 84690 - protein, 192 aa, Zea mays
  Coding DNA Sequence Number=SeqID_41315
  Homolog annotation: Hit_ID=Q6J9V9; Match level="QueryCoverage=69%, HitCoverage=46%, E-value=2e-58, Identity=84%"; Hit description =Putative uncharacterized protein
MAGTGKGDISKRILLSEGNRPRAILLIRGSKVAPSGVQQPPQSTRAPSPLLIRGSKAGPSEGFDSRPRARRVRDDPGYVRYMAEARATLLRYPRTFPRPAGTICNGIPPEGGAEPSDPIEWVRVQQITRRVNLSHALPRVQPRAQQGAPPRSTLGLGLSLGLGRSHVLARPQASASGEVSASPNLGLGPTTL

SEQ ID NO: 84691 - protein, 270 aa, Zea mays
  Coding DNA Sequence Number=SeqID_41316
  Subcellular localization annotation: CTP_CleavageSite=4; ConfidenceScore=5.32e-01
MSSRSLMRRVFPPSKPPDGGYPPSFLLIVGGTQLRGSWYLSAIVRLQGFSSCSPAVSPRRWSPKTVTTSFWVGRSKPGCDLGPTLSFKDVHHPRWGGGQAEPALYLPRGFVGHPLPRRSGERALTGPTGGPDFDNAGPVDGGRRHLQRVGLVGLAPGGPSRRRAAAAPYSPVDYLNRFTKHESPRVKVTSEHEQRRSWLENENLVGRSLAGLSVSGTDAGVDQPRPRTGLAPSEDGWPRPLGYPVEPPAWAGFPEKSLDRVTVRGWVGPR

SEQ ID NO: 84692 - protein, 24 aa, Zea mays
  Coding DNA Sequence Number=SeqID_41317
MGTSGNGAAVVLRGAPPLGGVEDR

SEQ ID NO: 84693 - protein, 37 aa, Zea mays
  Coding DNA Sequence Number=SeqID_41318
MVLGQWSRRLAMAKVSAGVRTVGMYSLRTRTPGECDS

SEQ ID NO: 84694 - protein, 59 aa, Zea mays
  Coding DNA Sequence Number=SeqID_41319
  Subcellular localization annotation: CTP_CleavageSite=48; ConfidenceScore=5.01e-01
MALGLAGFAIPAASPSHGSSAAVPNVGWLGKGDPLSVVDLGIEGLSVSAAVVVSSQSKP

SEQ ID NO: 84695 - protein, 226 aa, Zea mays
  Coding DNA Sequence Number=SeqID_41320
MPPRTRLTARKSTGPIGVPRHQLAPRHESSSSGSNDPIGDLEACVSRLQTTLQHRTDAWVADGDRINELRRDIRHLQDQLADRDLALDWAVQSRLLMCAKEAWAQAQIKELSSTVDNLQVYCNTLHEEVHVLYSQLHPSEPTHPAEAEAGPSHVAGRALGGELDLFEPPPSLRLVDVWTPTPDDEAAKSNGKAVSTALSVEAKYTNSGKNKGFGGERPNQGQANKQ

SEQ ID NO: 84696 - protein, 98 aa, Zea mays
  Coding DNA Sequence Number=SeqID_41321
  Subcellular localization annotation: CTP_CleavageSite=66; ConfidenceScore=5.68e-01
MQAACNRAKWAHLSGFQHAQHGGPRPRVTQPACRSLRASNCTATRTTATPPRLRNQYRDSRQPCVRPSSASQARRDRERGIPRKGSFSVKETGSEPPY

SEQ ID NO: 84697 - protein, 187 aa, Zea mays
  Coding DNA Sequence Number=SeqID_41322
  Homolog annotation: Hit_ID=Q7XBD9; Match level="QueryCoverage=26%, HitCoverage=2%, E-value=3e-07, Identity=58%"; Hit description =Putative gag-pol
MRNHIPEVVEAAVIEDFYRGSNDSAFVRAILQNALTTSEQLFREADLYITTDERAQDLIGGAKPAPPAPRRDVTNNPTSVGRRSLAKKSTPPDHPPLVPEEHPSEANWLNFDHPGKYPLLVDPVIRESRMPGPQGIITVRADFKAPQNASEWPFRRPSPPNHRRLLSRRRSQSLRRTSQYLQMKLMP

SEQ ID NO: 84698 - protein, 155 aa, Zea mays
  Coding DNA Sequence Number=SeqID_41323
MIQVPPQTEVRKNSEVSQIQIIKVKETAKERRNGKSKAADEKRDVNNGLVGILYWDSNPTANPPGTKFFRRKNSNIDKVEKIRLQNNRHMVTCERQLAVGVDRRDDHNSRILVLPLGRHRNLVGGLNRGEIKGKQRMFGGKKVRLGLRAQRRATT

SEQ ID NO: 84699 - protein, 163 aa, Zea mays
  Coding DNA Sequence Number=SeqID_41324
MGGVDCIGGQVLGRGQPRMRGGVFGSGIHRQGLVVPRSQPAAAHVVLTSPHLTLAKYIDPETINAAARSTVCLATNRRKKLLMQCMLKAHPIADFVSPAADRDSGISGSSLALGLSVEVEVEVEVETYEVIFDECLVQPLSLSVHVTRIWVRAFLWRRSKKMG

SEQ ID NO: 84700 - protein, 124 aa, Zea mays
  Coding DNA Sequence Number=SeqID_41325
  Homolog annotation: Hit_ID=Q5GAU8; Match level="QueryCoverage=39%, HitCoverage=35%, E-value=2e-11, Identity=65%"; Hit description =Putative uncharacterized protein
MYRETLRQKRGHSRELYPDVSSKDALVPPDLPVPNCDCGRPVWESRNEAGNSATPGAPSKGYLLQVRREKFIHSKNPVVHLIHRRVDMSYEKKRSKDPSDCPSGASAFKGEQKEACRHDNSVLP

SEQ ID NO: 84701 - protein, 246 aa, Zea mays
  Coding DNA Sequence Number=SeqID_41326
  Gene Ontology: Mol. function=kinase activity; Cellular component =ornithine carbamoyltransferase complex; Biological process=amino acid metabolic process
  Homolog annotation: Hit_ID=Q6QP54; Match level="QueryCoverage=40%, HitCoverage=36%, E-value=5e-18, Identity=47%"; Hit description =Putative kinase
MVLPVDVAGLRPRLGDVEAPAKPRSKARAESEPWGRARRSSSSSGAEPEFEPWVGQSGVRRLPGLSPSPSPGSGGAEFAVFRDLAPSPSPGSGGAEFAVFPGLSPSPSPGSGGAEFAVFRDLARVRALGRAERIGVAQAALSFCQAGQWSGEVTAVASALPGGARQDKGLYADGGYQLRIRRLKGKPAHEYPSPVFFSETFGNPISGHRAPEPPLSISPPLDPDVGAPHSWGCCRHHSPPISPHRL

SEQ ID NO: 84702 - protein, 185 aa, Zea mays
  Coding DNA Sequence Number=SeqID_41327
MTVHPKIYVADLMKLDFLWIARSPSHGSDLSFEEVSPLLITTVNPKKDGAGGFFFLRRPDSTAAANPQRMSPEPAPPSIYGRKLMGSRRRRVLETCSPDRRCTSAVGMKRTGRWLSYEESVSAETVKLNFRLELQATPTHNLDNGLYLELQVLREWVSLEVMTSTWLPVVPFSGGAYTSYSKVSS

SEQ ID NO: 84703 - protein, 506 aa, Zea mays
  Coding DNA Sequence Number=SeqID_41328
  Gene Ontology: Mol. function=transferase activity, transferring glycosyl groups; Cellular component=cellular_component; Biological process=multicellular organismal development
  Homolog annotation: Hit_ID=A2X4Z0; Match level="QueryCoverage=21%, HitCoverage=42%, E-value=3e-41, Identity=44%"; Hit description =Putative uncharacterized protein
  Pfam annotation: Domain name=TPR_1; Domain location=130-163; Score =29.0; E_value=1.8e-05; Accession=PF00515.19; Description =Tetratricopeptide repeat
  Pfam annotation: Domain name=TPR_1; Domain location=164-197; Score =31.9; E_value=2.4e-06; Accession=PF00515.19; Description =Tetratricopeptide repeat
  Pfam annotation: Domain name=TPR_2; Domain location=130-163; Score =20.1; E_value=0.0082; Accession=PF07719.8; Description =Tetratricopeptide repeat
  Pfam annotation: Domain name=TPR_2; Domain location=164-197; Score =32.0; E_value=2.1e-06; Accession=PF07719.8; Description =Tetratricopeptide repeat
  Pfam module annotation: Pfam domain module=TPR_1::TPR_1::TPR_2::TPR _2; Domain location=130-163::164-197::130-163::164-197
  Subcellular localization annotation: CTP_CleavageSite=62; ConfidenceScore=5.58e-01
MAPRSRRRNGSSQQAPAPPSARSLPPLSWIFSRDPSGERGNTRSSKHLGSVGSSALLSDEVVSEQLSPASTWALLVAQLFSLMKWSLNSLQVSCHFILTLCNQIIPHFVGNYPDAITCYTEVHRIDPTAADALVNRGNTFKEIDRVNEAIQDYVQAATIRPNMPEAHANLASAYKDSGHVETAIISYKQALRLSPDFPEATSCILYREQSYEFIVQAYLGGPENVSLQETGPFWNQFLESLTQHQDPKNYLIRLPTLVTEDSDGNVQSAAHLLDRLVKDIVTESDQFSIEEFISLLRERMNVLNLYVRQFLVGWITVLDSVPDIDMLGFLPDFLDAYNQHPIAHLLMLLNIPWVQLPYILPHMLPSKKAFSAAVSALGIYNKDMIVVYDGKGLFSAARVWKVKNVGTHVLKVKNVGTVKLIVQSAQTSAGHISSTATLPRRTYFSKFVQKLSSAIFVGKPTFLRPIPERPTRNGSGEMSRVECTHRGKRMDGGVSVLSVGVNPVWP

SEQ ID NO: 84704 - protein, 58 aa, Zea mays
  Coding DNA Sequence Number=SeqID_41329
MAVMGSTPEKMYLCQTNTRKANTQWEWRDVESIACTHRGKRLDGGVFMLSVGVNLVYS

SEQ ID NO: 84705 - protein, 342 aa, Zea mays
  Coding DNA Sequence Number=SeqID_41330
  Homolog annotation: Hit_ID=Q6QP54; Match level="QueryCoverage=14%, HitCoverage=16%, E-value=6e-08, Identity=66%"; Hit description =Putative kinase
MGRRETEREGGRQPEGDVRERWKSRGLRVCPTPRRKERIQPESAWGRVMVAPPVDVVGLCPGLGDVEAPLRSRSSLSSEAEVKSEPLGRARRRPSAVARAESEPWVGQSGSSSSSGAEPESEPWGRAERSSSSSGAEPESEPWGRAERSSSSSGAEPESEPWGRAQRSSSSSEAEPESEPWGRAEQSSSSSGAEPESEPWGRAKRSFPWRLGPDLAAVSLTLSSGSAVGAAQAATFALNAPAIWSVGVAIWPRLLLGEDWALGEPKGERTVKDRLDFFTYTPASPFRKEEGGEAPCCPRRAPNMVSPVSCWRSPIGLRRQLNPSEGPAFEPLTSSGCGAHAL

SEQ ID NO: 84706 - protein, 226 aa, Zea mays
  Coding DNA Sequence Number=SeqID_41331
  Pfam annotation: Domain name=zf-CCHC; Domain location=99-116; Score =17.2; E_value=0.0039; Accession=PF00098.14; Description=Zinc knuckle
MTPTIVIRKIATFEMLGKMGRQEEPTSSRPYAFACDERKGKKKAPTPSSSSEEEDKEESDDDEDNQPSTSSSEDEETIRRVEKVENLLFNIDRKKQRKRGCFACGEKGHFRDNYPNMAELTKGRSKGKALTSVKTWDDSSSEDEPPRTRSHRSSSHSSRSSHKCLRERVLVKNVVIETCSDEIAMENEQLKQEVAHLGKALYDKKDKSKQIQPPQDNITVGMNKPV

SEQ ID NO: 84707 - protein, 479 aa, Zea mays
  Coding DNA Sequence Number=SeqID_41332
  Gene Ontology: Mol. function=RNA-directed DNA polymerase activity; Biological process=RNA-dependent DNA replication
  Homolog annotation: Hit_ID=Q6AUQ9; Match level="QueryCoverage=20%, HitCoverage=13%, E-value=4e-10, Identity=37%"; Hit description =Putative uncharacterized protein OSJNBa0077L08.9
MRRHIACQRDGQAARLIRNECRGHVTRRPYVWPRPPTYVTHSRPRGSIGSPPGRGQWRKRTGLHQTGFGHVSSPEPRLGPVQGSCMFCPRTLQCVAWTLHRGGPGTPVSVLDLTRRSGLYVQGSGTSRWGSGPTVDTLEYIIFPGHVATRELTTWVPTVAPGPTSGEDVSLQTEEALDVVRRLLGWSTLAFAGRIWAGTTPLGDLVVGEFMLFVSYLSCGSGKGKDHLGAYYFQTRLDPTVAYIATLGGARWENWRNDWVIVSAEANDRLALPNDGPRLDRKQWRAKPSLTPEFELVLDMIKELATGGLTSMHVVGDFLMRRVMPLQGGHVCVAGSPASVTLVGSSAGRGTTCPGRSWRAAVLAWLPTLDESGVAIRQTGGQDPHWGSIFLVYRPEVPSPPMRAPELPPQPPAPRTRAKGLRAALPLRVAQGGRKERGDTDCIVPTGLSSRTRPLIQTPQKRQRTAGGAEEAGYQTQGA

SEQ ID NO: 84708 - protein, 202 aa, Zea mays
  Coding DNA Sequence Number=SeqID_41333
MNKTSAFKVPLQTEPRFHLRRYEQPHTIGGPAEQQKTDERLAVARSSSGDDDDFCSGGPNSSSDDLMADAAAMRPSPMPSLERQGRAEGRRVRGQSVGGTGYLVGGRTSSSCRGGRRRRERLRSHSGQRARHAAAVSATNGERPSPRSLRAGVGRHPRWGRPQLGTLPSPAPMMKILEAEGGAEAAARLAFPRHRTGGHRLG

SEQ ID NO: 84709 - protein, 146 aa, Zea mays
  Coding DNA Sequence Number=SeqID_41334
MEVLDLTRRSGLYVQGSGTSRWGSGPTVDTLEYIVFPGRVATWESTTWWGRALFTTELNGGERVTSAEGPGKRRGAAGTGQRRRRGSAVFDAAGALCGRGYGRRSQHDATVGERLGWHECQRGGSAGAGAPHARREKGASVGPAYK

SEQ ID NO: 84710 - protein, 175 aa, Zea mays
  Coding DNA Sequence Number=SeqID_41335
MRLISARRSSVGAALTKGERNDADASFWRRDDRCLGLVEVECAMPCRRSTSSRHYFMAPGEALELGGWRNNSLVADSAPGAALDVLEVCAEMCCRAECTAVAAPGVGRLMARGVEEAAASSTTKSSGKKSWCSTMWTMALSRRTSKNLKPIPYLGRQMSERKFFNRVAERTRPKS

SEQ ID NO: 84711 - protein, 196 aa, Zea mays
  Coding DNA Sequence Number=SeqID_41336
  Gene Ontology: Mol. function=kinase activity; Cellular component =ornithine carbamoyltransferase complex; Biological process=amino acid metabolic process
  Homolog annotation: Hit_ID=Q6QP54; Match level="QueryCoverage=27%, HitCoverage=19%, E-value=6e-14, Identity=77%"; Hit description =Putative kinase
MAPPVDVVGPCPGLGDVEAPQRSRSSLSFEAEVESDPLGRARWRPSTEARAESEPWGRAKRSSSSSGAEPESEPWGQAKRSSSSSEAEPESEPWGRAERSSSSSGAEPESEPWGRAKRSSSSSGAEPESEPWGRAKRSSSSSGAEPESGIIIPDPKLYPRLLQISIPTKPIGRETIPVPMPIGYPPGIGYPVDMLL

SEQ ID NO: 84712 - protein, 120 aa, Zea mays
  Coding DNA Sequence Number=SeqID_41337
MENGGIEETDDVLPDLALLNGQRYWLVGSNDRAMIQMTSMEPGSSPVTIDVVMTSSRQGDAKFIHICKLHEQFVVSIQCQQISYVLNSEVTAVWIATSPKCVAIVKPRSTDNTPLEVVPS

SEQ ID NO: 84713 - protein, 87 aa, Zea mays
  Coding DNA Sequence Number=SeqID_41338
MAADNPPAGGGIDDVFPTWWKNNIRACPVPSPADGGGGGATKAKQEAAPRRLSSESTVSAPVGVLGPTAHPGLPLKVLLGVGRCRRL

SEQ ID NO: 84714 - protein, 33 aa, Zea mays
  Coding DNA Sequence Number=SeqID_41339
ADEQQDVNVGRPTDDNPRAQSKKASYSCARGST

SEQ ID NO: 84715 - protein, 443 aa, Zea mays
  Coding DNA Sequence Number=SeqID_41340
  Gene Ontology: Mol. function=transporter activity; Cellular component= integral to membrane; Biological process=transport
  Homolog annotation: Hit_ID=Q9ASA0; Match level="QueryCoverage=99%, HitCoverage=98%, E-value=1e-175, Identity=72%"; Hit description =Sulfate transporter protein-like
  Pfam annotation: Domain name=Sulfate_transp; Domain location=113-417; Score=-167.6; E_value=0.073; Accession=PF00916.11; Description =Sulfate transporter family
MASAAADPLLPGEGSGRRLGFLPSSIRLKTSVWSELGGAVGDLGTYIPIVLALSLASHLDLGTTLIFTALYNFATGLLFGIPMPVQPMKSCPRGSRVAAVLLFLGATGLMTCIYRLLPLPVVRGVQLSQGLSFAFTAVKYVRYVQDFSRSSSASTAVARPLLGLDGLVLALAALLFIILATGSGDDEDVSSDGMARRRRSCSRVPAALIVFALGLVLCFVRDPSILQGLRFGPSPLRLVGITWDDFKIGFWEGAVPQLPLSVLNSVIAVCKLSSDLFPERAELSPARVSVSVDIIKLVGCWFGAMPKKHGAGGLAGQYRFGGRSGASVVFLAIGKLALGLVFGNSFVTILGQFPIGILGVMLLFSGIELAMASRDMGTKEESFVMLICAGVSLTGSSAALGFISGIVLYLLLRLRDVDYQALAGRWGSDRRRTGNKVGDDEDA

SEQ ID NO: 84716 - protein, 141 aa, Zea mays
  Coding DNA Sequence Number=SeqID_41341
MIVSAPFLPSVFTFRHLTKGLVTAGRIGDAWDRAFELFNELAERLRFQRAPIPIPPPCPTTILHLLFTHPTDPLRWEDIMCPLVLFHDYPVLLATVTRFRGPCHYLLLYRLARCRAGTVGSLLCCLFVLHDMLPLLYYDDD

SEQ ID NO: 84717 - protein, 398 aa, Zea mays
  Coding DNA Sequence Number=SeqID_41342
  Gene Ontology: Mol. function=transcription factor activity; Cellular component=nucleus; Biological process=regulation of transcription, DNA-dependent
  Homolog annotation: Hit_ID=Q6S5L6; Match level="QueryCoverage=74%, HitCoverage=60%, E-value=1e-130, Identity=78%"; Hit description=GAI protein
  Pfam annotation: Domain name=GRAS; Domain location=13-285; Score =286.5; E_value=5.2e-83; Accession=PF03514.5; Description=GRAS family transcription factor
MAMGGAFPFQWPEGPADPVLDDVTLPPLPTAAPDAGVAAYYADAADVHAMHMALPRFRGGAGGDAAGGGGGRGHPPAFLYHRFYEAGPYLKFAHFTDKQAILEAVQGCKHVHIIDFSIMQGLQWPALIQALALRPGGPPSLRLTGIGPPSPPGRDDLRDVGVRLADLARSVRVHFSFRGVAANRLDEVRPWMLQVSQGEAVAVNSVLQLHRLLADAPSSGDARAPIDAVLECVASVRPRVFTVVEQEADHNKPGFLDRFTEALFYYSAVFDSLDAASGGAGDAAAEAYLEREICDIVCGEGAGRRERHEPLWRWRDRLGRTGLAAVPLGANALRQARMLVGLFSGEGHCVEEAEGCLTLGWHGRPLFSASAWRAEENNQSDSRSRSSGSEESNISCSS

SEQ ID NO: 84718 - protein, 172 aa, Zea mays
  Coding DNA Sequence Number=SeqID_41343
TVVTVVLGLTLVLGGLFGESLHGCRFPVGGVAFMCRIKVCLGHGFAFGGCFRLSGSGMRVKVGLCNVKSKLLHQGMWLGNNDRCRDPLLRLDCFGDFGICRGQDRGSSLLVKNRSCLVWVIGIVGVGRGGAGQPVRIHQAQTDIELLTRMGARARVRYFKGSGGVGGGEGAE

SEQ ID NO: 84719 - protein, 320 aa, Zea mays
  Coding DNA Sequence Number=SeqID_41344
MSTGKRHLDQIELLSVRRLLLNHLIISCGGGEKTGANLQKFQRLRANPAEDGGLIHLFLRVSYAKCAGRRDPRIIDQWLTFYCAQLAGGAIRARQHSHRSSSIRVIPPLLTAILGAMQSLRHDNSFGRELTRNDAAMKPVHTAWRIRGGALSPVSNSGTQRRHTLSKAARFAQAWPDEAPRPDPHVQMTAKRMFHGEGDPPALVSAASSTGGVFFPPTTRWEPRTAQYLTQARNTSVDRNAMVPISHESTEFSPAISSTESMAPGRIAPTATHWITFYPVVSLSPTTAQLKHQGDGGEFAWFSRWQPHTMGKRGMADRAA

SEQ ID NO: 84720 - protein, 316 aa, Zea mays
  Coding DNA Sequence Number=SeqID_41345
  Homolog annotation: Hit_ID=Q10JQ2; Match level="QueryCoverage=37%, HitCoverage=90%, E-value=4e-36, Identity=64%"; Hit description =Expressed protein
MKAAERGDVVGTGADAGEKDTGMEGRVIDGGCVGNTVAGDGTTCMRLASNQVPKLMESRNRNVVLGVGPSRGANGDDEELLPLSIQGWGAAPRPAGDESPTGEEAPCEGEGGGGGLRRAGRLPRDCQGERRLGGKAPWRRKASCSPYSAPKASASCATAPVRLLQGRDGAAARWLRCDCSSGAAAPAQEGEVEKQAEGESGERDTDNDDFVIPSFSVEESDIGDWEASRATDPQPPPKPSKDTENIYLGPHGAPPSRAKKAEDTWATAGYREKNNKAREAEQKAFGTGRNSKGGNTGEFHRHNGGSHGKDPYKRSA

SEQ ID NO: 84721 - protein, 346 aa, Zea mays
  Coding DNA Sequence Number=SeqID_41346
MDEILAAACGLGEVGAMLTRPLINNAYHRFTTDWLRRRPWPSAGTTRAAAAALLLSLSAVLLFLLLQTPPRGLADHVAAALDSLLDWRGLLELATRRNMILLCHAILLVILRDAGVLGTPAGRRSQSHSRSPPAAVAQQTASSVAPARSHATGSAVVVWRRRPRNRAAGAAAPRHDAVAARRRLVECQCQPAVETWAAPLLTTGPQARATEEAAAVATEQQIVLAQPPRNEAGPLEHHRGRDAVVGPPAEHPTAIAVGGDDRRIATDDEKRMDDGNGDGDGMEMIAASPHARRREQQTAGMETGMEMELADDRTFEEFIKSQRRQMRQESLKLLISSGYHYHAIAA

SEQ ID NO: 84722 - protein, 125 aa, Zea mays
  Coding DNA Sequence Number=SeqID_41347
MAARRAVRLRAAAGDPYRRFIGIARSRALASLLGVLSDDQEPFRVDCSHNRGFLAVELLAGASILPSGRTTSWAGLFTTRPPHRSGWLSGYWAVNGCSPVSTPWSSAPGRSDDRGENTVFGPLDP

SEQ ID NO: 84723 - protein, 107 aa, Zea mays
  Coding DNA Sequence Number=SeqID_41348
MEVAYLVLAAVDAWPKLALSVPATFVAGARGEEIRSASTLTRELSKMRCSGASFGWCRRDTSLGLMCWCAFALNSTALGKGNAGPTSPTPSIPQSQKTLSTSNTPLP

SEQ ID NO: 84724 - protein, 78 aa, Zea mays
  Coding DNA Sequence Number=SeqID_41349
MGDRAWQRTRRANDTRRLMHRPHISAPLAKPGWREVSVTSGGGGGVYADTIVDNTPQPIILNQRSKSDKYHKNKHSSA

SEQ ID NO: 84725 - protein, 112 aa, Zea mays
  Coding DNA Sequence Number=SeqID_41350
MAARRAVRLGAAAGDPYRRFIGIARSRALASLLGVLSDDQEPFRVDCSHNRGFLAVELLADASILPSGRTTSWAGLFTTRPPHRSGWLSGYWAVNGVLAGEHAVELCSWPFG

SEQ ID NO: 84726 - protein, 280 aa, Zea mays
  Coding DNA Sequence Number=SeqID_41351
  Subcellular localization annotation: CTP_CleavageSite=86; ConfidenceScore=5.56e-01
MWRLIRGRGRVCLPRPRSSPSPQVGRGGDRRLRPGLSPSPRVGRSGVRRLPGLSPSPSPGVGRSGVRRLPGLSLSPSPWGRAERSSSSSGAEPESEPWGRAERSSSSSGTEPESEPWGRAKRSSSSSGAEPESEPWGRAKRSFPWHLGPDLAAVSLTLSSGSAVGAAQAVLSSCQTGQWSGEATFALNAPAIWSVGMAIWPRLLLGEDWASGEPKLCADGGYQLRFRSLEGTPNYGPRQDTGAISHMTNNSALLPRRLFWHTLHPLMFGIIVSDIPINIP

SEQ ID NO: 84727 - protein, 199 aa, Zea mays
  Coding DNA Sequence Number=SeqID_41352
  Subcellular localization annotation: CTP_CleavageSite=59; ConfidenceScore=5.11e-01
MAGPSKGSTAASGHSGSAPIADQGAACAAPTAEPPDRVRLTAAKAGLGRHRKLRLARPRAQTRAQPRKTANSAPPDLGLGLGLSPGRRRTPLRPTQGSDSGSTRKTANSAPPDPGLGLGLSTGRRQTPPRPTPGLGHGLSPGRRRTPPRPTQGLDLDLDLGGASTSPSLGHGPTTSTGSAIITLPRADSGYGEPDRRPI

SEQ ID NO: 84728 - protein, 72 aa, Zea mays
  Coding DNA Sequence Number=SeqID_41353
MAFLTNVPVHTQSLVDKEGSALPQQSPTLPQGLKGGNPLCVKIFNQKGFCAPPAMSVAGPQEANMGACKWQG

SEQ ID NO: 84729 - protein, 234 aa, Zea mays
  Coding DNA Sequence Number=SeqID_41354
  Gene Ontology: Mol. function=glucose-6-phosphate dehydrogenase activity; Cellular component=chloroplast; Biological process =carbohydrate metabolic process
  Homolog annotation: Hit_ID=A3AJ22; Match level="QueryCoverage=82%, HitCoverage=34%, E-value=1e-56, Identity=62%"; Hit description =Glucose-6-phosphate 1-dehydrogenase
  Pfam annotation: Domain name=G6PD_N; Domain location=118-221; Score =56.1; E_value=1.2e-13; Accession=PF00479.13; Description=Glucose-6 -phosphate dehydrogenase, NAD bindi
MSIRPFLTTHIPINLPPLRPFHTDRMAALTFHPAACFFPRPREAAATTKQPLHHYCSPLRTLVPRTTRPCLLRARSSNGLPQTGGASFGSSNEVLDGTPTGDGAPGQGQRGGSTVSITVVGASGDLAKKKIFPALFALFYEGWLPEHFTVFGYARSEMNDQELRNMISMTLTCRIDKSENCGDKMEQFLKRCFYQSGQYNSEEGFAELDRKLKEKEILITPFVCIIFGVMPQDF

SEQ ID NO: 84730 - protein, 103 aa, Zea mays
  Coding DNA Sequence Number=SeqID_41355
MRISEALYSLSVMKNSVFPFLMLKGCKINADAPMQQACSAGAARPTGGTSEAASPTSPDVSGADVLDADSGSAGHWADSGSHAAGSTATPTPIASADALDATG

SEQ ID NO: 84731 - protein, 360 aa, Zea mays
  Coding DNA Sequence Number=SeqID_41356
MGDGEVEVVAGVRGRGWREQRQWTRRQFRVGERTWDSAASLLAGLVGARPQIPPSTVEVDEEREYRADESELVKREQQGSSSPPQQEVESVRPRSSVAQLEAPPAPPRDVPAVGGAIGGATGGDPDDDDSDHSTESSEPQEAEGWVARPITRDAARGCHFHDALDTLLRQAFDRHTWSIEYRCVVYQHSRGRYPDRWEATCLVRRPEDDLRGAEAVSEHYSISERDTAEAAMQDAARRALSQYCSLFGGVADGLNLRYYPRRPTGSTESVVVSPVGEGNPRLSSTVNLVAVLNTELDHSLDELSRARTEIAELRAELAERHHQEGGSPAPVGTQHPYRSPPRGHHTYGSPACKTRIDLDP

SEQ ID NO: 84732 - protein, 145 aa, Zea mays
  Coding DNA Sequence Number=SeqID_41357
  Gene Ontology: Cellular component=membrane
  Homolog annotation: Hit_ID=Q9M585; Match level="QueryCoverage=59%, HitCoverage=19%, E-value=7e-12, Identity=50%"; Hit description =Stomatin-like protein
MEKDDRLQHQAMELKSRVGTDKSCSSPHSALNNFVLLIFPFCPQQRSRQEEKKEAQRLFELIKSLFNQAKREWVGFLGPIHIWQETWRTHVGDITPPTRIRQAMEMQAEVERRKCAQVLESEGKKQAQILESEAQSGASQCQVFI

SEQ ID NO: 84733 - protein, 260 aa, Zea mays
  Coding DNA Sequence Number=SeqID_41358
MGQRTLAFTKLLIRDFLCNFLGKHRLLIVYVKGGGARSRGGELAGDEGRGGFVVPGATGVAWEVGEGAGSLLVGARSGQGHRRGRSTAKRLGGGAKGLRRAIKRDRRQYKGREGAGEVPYLKAGSGDSSVAAMARRRPGSTVADPRGCTEDGGGAPTATGKRARDGGGSMAAVLWRVCGVGEVREGSAGAQMREGVRASGVLGSSGRGRGGCELHARRGRGVRGSAQLGRRLRGDDGADSRDPRAERAGKRARVRGKRPR

SEQ ID NO: 84734 - protein, 55 aa, Zea mays
  Coding DNA Sequence Number=SeqID_41359
MALCGSWRGFDLFGGNENDGFGIDYGNGCPHCNHCSGEDEAVEGDFQEFQDYNEF

SEQ ID NO: 84735 - protein, 565 aa, Zea mays
  Coding DNA Sequence Number=SeqID_41360
  Gene Ontology: Mol. function=glucose-6-phosphate dehydrogenase activity; Cellular component=chloroplast; Biological process =carbohydrate metabolic process
  Homolog annotation: Hit_ID=A7Q309; Match level="QueryCoverage=66%, HitCoverage=74%, E-value=0.0, Identity=84%"; Hit description=Glucose- 6-phosphate 1-dehydrogenase
  Pfam annotation: Domain name=G6PD_C; Domain location=260-557; Score =527.5; E_value=1.5e-155; Accession=PF02781.7; Description=Glucose-6 -phosphate dehydrogenase, C-terminal domain
  Pfam annotation: Domain name=G6PD_N; Domain location=144-257; Score= -10.1; E_value=3.1e-08; Accession=PF00479.13; Description=Glucose-6 -phosphate dehydrogenase, NAD bindi
  Pfam module annotation: Pfam domain module=G6PD_C::G6PD_N; Domain location=260-557::144-257
MKPVHTAWRIRGGALSPVSNSGTQRRHTLSKAARFAQAWPDEAPRPDPHVQMTAKRMFHGEGDPPALVSAASSTGGVFFPPTTRWEPRTAQYLTQARNTSVDRNAMVPISHESTEFSPAISSTESMAPGRIAPTATHWITFYPVVSLSPTTAQLKHQGDGVRGTSTIEGCERLTEWGPLVRPMTRPGRLPNRLFYLSIPPNIFVDVVRSASRTASSSSGWTRFIVEKPFGRDSESSGELTRSLKKIDHYLGKELVENLSVLRFSNLVFEPLWSRNYIRNVQLIFSEDFGTEGRGGYFDNYGIIRDIMQNHLLQILALFAMETPVSLDAEDIRNEKVKVLRSMRQLKLEDVVVGQYKGHSKGGKSYPGYADDPTVPKGSVTPTFAAAALFIDNARWDGVPFLMKAGKALHTRRAEIRVQFRRVPGNLYRRNIGADLDKATNELVLRVQPDEAIYLKVNNKVPGLGMRLDRSNLNLLYSERYRREIPDAYERLLLDAMEGERRLFIRSDELDAAWAIFTPALRELEDRKVAPELYPYGSRGPVGAHYLAANYNVRWGDITSDDDGAF

SEQ ID NO: 84736 - protein, 277 aa, Zea mays
  Coding DNA Sequence Number=SeqID_41361
MSTGKRHLDQIELLSVRRLLLNHLIISCGGGEKTGANLQKFQRLRANPAEDGGLIHLFLRVSYAKCAGRRDPRIIDQWLTFYCAQLAGGAIRARQHSHRSSSIRVIPPLLTAILGAMQSLRHDNSFGRELTRNDAAMKPVHTAWRIRGGALSPVSNSGTQRRHTLSKAARFAQAWPDEAPRPDPHVQMTAKRMFHGEGDPPALVSAASSTGGVFFPPTTRWEPRTAQYLTQARNTSVDRNAMVPISHESTEFSPAISSSESMAPGRIAPTATHWTNL

SEQ ID NO: 84737 - protein, 76 aa, Zea mays
  Coding DNA Sequence Number=SeqID_41362
MEEQGRHHTLGGEREWNLERWIRDGELGRSWRACVVCCLDEGGAPTGKKNRERRWSAAVGRKAREEYENDHIEILD

SEQ ID NO: 84738 - protein, 179 aa, Zea mays
  Coding DNA Sequence Number=SeqID_41363
MEEQGRHHTLGGEREWNLERWIRDGELGRSWRACVVCCLDEGGAPTGKKNRERRWKLLALDWPPRAASPTGRLQLLASRRNAWLSQRLEGGTGLSGVHRTVSGAPTAPRSQRSASPNKERDPHRTVSGGAPDCPVRQSTEGKKCLPGMHSTAPSCLGAIKGTPRRMEEYTKHSQSIPKH

SEQ ID NO: 84739 - protein, 613 aa, Zea mays
  Coding DNA Sequence Number=SeqID_41364
  Gene Ontology: Mol. function=actin binding; Biological process=actin cytoskeleton organization and biogenesis
  Homolog annotation: Hit_ID=Q7XWS7; Match level="QueryCoverage=97%, HitCoverage=35%, E-value=0.0, Identity=62%"; Hit description=Formin -like protein 12
MDQYRYKNYLDSIILQLREQFADSSLMVLNFRDEGKSLISGIFSKYNITVKDYPCKYLGCPLLPLDIILHFLGLSERWLMLEGQQNILLMHCEKDGWPVLAFMLAGLLLYRKQYNGEQRTLDMVYKQAPKELLQMLTTLNPQPSHLRYLGYICRMDDDIGWPTQPIPFTLDCVILREIPNVDGVGGCRPIVRVYGQDIPTTDRNHGVVSPPSKAKKNIRRYRQADNAPLKLNVGSFVQGDVVLECLHVDDGRGNERLMFRVMFNTFFIQSHILLLNFEDIDVPWDADHQFTKNFKAEVLFSELDAESDASTEVAPDYDYDDDDDMDVASADEFFEAEELFSNADSQEGNKDADTLSIASTDYTSTPSAERWRNSPFSNFEPNIGIDGSRDNKVDNLGLLETVNDGKTCTSTEANTMLNNETAVVKSTLAATIDGDADSGISKSTYKVDDYMFEKGSSKQDTRMGSNQDLGQIDNVLVKEVIILETNSPKDIQMIKEVIISEVTTLKQVVDGSMMETELDETVHDSESIALAETEDTKQLNIFCKQDEGHSVQDEYAAYDNGIVIEQEESSNEENLTIRDTNSEVTEPTDENNGYNRFISIGAKEKTFSTIVDI

SEQ ID NO: 84740 - protein, 379 aa, Zea mays
  Coding DNA Sequence Number=SeqID_41365
  Homolog annotation: Hit_ID=Q5KMI7; Match level="QueryCoverage=66%, HitCoverage=28%, E-value=1e-11, Identity=22%"; Hit description =Tubulin binding protein, putative
MINVHRKIRYYSQGTHATDVEQAFLFHLEEEEGHQAFQEALEEMEEEVADLHDLQEEEEVLELHLETLLEVEAVEFLLVLQRVVEEEEHLQFLHMEAVVELLCILQEVAVAMELLHILREVAVVVEPLHLLWDVAELMHIPLEVAVAVELLHILREVAVVVEPLHLLWDVAELMHIPLEVEVAVETLHVLQEEAVVVEPLHLLWDVAELMHIPLEVAVAVETLHVLQEEAVVVEPLHLLWDVAELMHIPLEVAVVVETLHVLQEEAVVVEPLHLLWDVAELMHIPLEVAVVVETLHVLQEEAVVVEPLHLLWDVAELMHIPLEVAVETLHVLQEMVAVVVEPLCILFEGGGGGMAPDPLGVDSGTSPCPPGSGGGGGGG

SEQ ID NO: 84741 - protein, 100 aa, Zea mays
  Coding DNA Sequence Number=SeqID_41366
  Subcellular localization annotation: CTP_CleavageSite=36; ConfidenceScore=5.11e-01
MAFMTHILQHTGVLIPPVQSAPPLALQSKLGTGLSSAPYDSGASQPRGQRLFPKKPESDEFAKLNFNGHTGLSGVHRTVIVHCSLFTVRCTGRPTTICQN

SEQ ID NO: 84742 - protein, 80 aa, Zea mays
  Coding DNA Sequence Number=SeqID_41367
MTMANPTQQRELGHGALPPQRAQPRPAMASTEEGTEERGVGDGLLLTVMNHRGSANFGGVSAQRLNGGLGWFDRTSATAS

SEQ ID NO: 84743 - protein, 188 aa, Zea mays
  Coding DNA Sequence Number=SeqID_41368
MRTAEVDSGLDKEDPPVSLPLSFPTLGHCLEGLALAVSPLLVRVADPWAPPTRERPHSRPAPRIPGPLTRGTRRREQARMSDHTRQSLGRTHGHTCSTLVGTPELAQPARALAPASGQVRRAPTPSAVPARAYKASPGAPLFAPHSPSSGQPPFLSSGERISARHCRQSYGRRGQPTPAALQPNLCFG

SEQ ID NO: 84744 - protein, 140 aa, Zea mays
  Coding DNA Sequence Number=SeqID_41369
MARPARHDKHQICRERRETGRLTAGNDDDVDGRHGVDERRPWTNGVDGGHGVDEYAPMNGVDERRATRGGAERRGRARGPRAATRGERAGAGGSAVREGGRAGGCGRRRDDGGRGRDYGGRRGRAGVRSGVDGGAALRVE

SEQ ID NO: 84745 - protein, 143 aa, Zea mays
  Coding DNA Sequence Number=SeqID_41370
  Subcellular localization annotation: CTP_CleavageSite=59; ConfidenceScore=5.34e-01
MAFIDHIPLLLCCQQGAPPRPTSGLGLSLGLGRRSPPRPTSGLDLSLGLGRRSPPRPTRASDRLRYMGYIITLLLASCLRLRRNKTSVPSKVTQIALNPLRKQDNVSRIHAAPTAVLLQGSRHFFNGHVSSCTGLKALLRQPR

SEQ ID NO: 84746 - protein, 176 aa, Zea mays
  Coding DNA Sequence Number=SeqID_41371
MAQGHISLSGSDTRCCLRCEDNTRHVPRRGAGVVDSLWPDSRRGAASCTATVAPSPPPPARRVAGQTRVFLFCHGGKSLSSSSPSGEPTTVVAVALRGEEYHVVAAIKGHELETPEAEHRPRLKRLLEATHLELNGKVFVNTQQAPTWHANCRRFGPARTVNRPVNLLLRVPAQMG

SEQ ID NO: 84747 - protein, 87 aa, Zea mays
  Coding DNA Sequence Number=SeqID_41372
MTRMIKGEMQMIKTRRMKNKDRHTQEFTKQSNEITPSTPSSVTFIRGVEEALQDSDRVVAMQEELNNFTRNEEPNGSSATSKMSMVW

SEQ ID NO: 84748 - protein, 75 aa, Zea mays
  Coding DNA Sequence Number=SeqID_41373
MSGDHAKLEIMTGDKSSSSGRTLSRESGNKHKEESSSSIKSHRKGDKKKKMKKGRLLRDRFFVTIHIELRVIRRF

SEQ ID NO: 84749 - protein, 425 aa, Zea mays
  Coding DNA Sequence Number=SeqID_41374
  Homolog annotation: Hit_ID=A2ERL6; Match level="QueryCoverage=42%, HitCoverage=6%, E-value=7e-07, Identity=23%"; Hit description=Viral A-type inclusion protein, putative
  Pfam annotation: Domain name=zf-CCHC; Domain location=324-341; Score =13.0; E_value=0.016; Accession=PF00098.14; Description=Zinc knuckle
  Subcellular localization annotation: CTP_CleavageSite=37; ConfidenceScore=5.22e-01
MAQPTVADVGAVGAPDMSGAHRTVRCPLPTVGSATCPAQIARPTVGPADRWLTGQSGAHRTVRFTFNHLCWHSITKILRNGPRAHFPFSNKSIPSSSDESSSDDEGEGKPSLDELAEAVEFFQDVCTKQKAQLKTLKNKLVSSQNDYKGLLEKFETFANLNSELSTKIELLESSAPSTATDDNLIKKNEKLKPKLASSQEAIENLLEKMEILSIHNNELTTKLENIGSTPAASLVEIPEIIKKDASTSCFDLIDDSNPCNQVVVENIVVETCSDEVAKENEQLKQEVARLGKALYDKKGKAKQIRPPQDNTTAGVNKPVEGETVICRLCHMEGHKSFQCKAMTGDKQRQKLKQNPSSKISNTYIKKVNKKDATPYLIKKKKNGKVIAIKANKQANKGKGAKRIWVPKEIISTMKSTKKVWIPKGK

SEQ ID NO: 84750 - protein, 295 aa, Zea mays
  Coding DNA Sequence Number=SeqID_41375
  Gene Ontology: Mol. function=transcription regulator activity; Cellular component=nucleus; Biological process=regulation of transcription
  Homolog annotation: Hit_ID=Q9C707; Match level="QueryCoverage=49%, HitCoverage=46%, E-value=5e-39, Identity=62%"; Hit description =Putative uncharacterized protein F28G11.9
  Pfam annotation: Domain name=HLH; Domain location=203-250; Score =33.1; E_value=9.9e-07; Accession=PF00010.17; Description=Helix-loop -helix DNA-binding domain
MALVREHGGYYGGFDSVEAAAFDTLGYGHGASLGFDASSALFGEGGYAAGGGDAWAGAGASTVLAFNRTTAAAAVGVEEEEEECDAWIDAMDEDDQSSGPAAAAPEARHALTASVGFDASTGCFTLTERASSSSGGAGRPFGLLFPSTSSSGGTPERTAPVRVPQKRTYLSAEPQAVSPNKKHCGAGRKASKAKLASTAPTKDPQSLAAKNRRERISERLRALQELVPNGTKVDLVTMLEKAISYVKFLQLQVKVLATDEFWPAQGGKAPEISQVREALDAILSSASQSQRGQLN

SEQ ID NO: 84751 - protein, 792 aa, Zea mays
  Coding DNA Sequence Number=SeqID_41376
  Gene Ontology: Mol. function=solute:hydrogen antiporter activity; Cellular component=integral to membrane; Biological process =regulation of pH
  Homolog annotation: Hit_ID=A2XBD9; Match level="QueryCoverage=94%, HitCoverage=97%, E-value=0.0, Identity=59%"; Hit description =Putative uncharacterized protein
  Pfam annotation: Domain name=CitMHS; Domain location=30-385; Score= -132.0; E_value=0.095; Accession=PF03600.7; Description=Citrate transporter
  Pfam annotation: Domain name=Na_H_Exchanger; Domain location=25-431; Score=98.7; E_value=1.8e-26; Accession=PF00999.12; Description =Sodiumhydrogen exchanger family
  Pfam module annotation: Pfam domain module=CitMHS::Na_H_Exchanger; Domain location=30-385::25-431
MGDEAKCSVDVAEGAYIMASIMAVSGIMVTVLVLSALFHFVLRRLGQPSVISHILAGIVVGPTVLGRAMDLRQLGMRDAGDALGGTIYFVRMVFMFFIGLELDLRYLRRNLRRSLVVACGGSGFCFVLAVLTGPFTYGFLHPGQGHFQPSNIYASTALFAIVITSTASPVLIRIVTELKLSGSETGQIAIGAAFANDMASLTALSVIVVTHTLYGTMPNEKESSPPAKVAVVAWMALTVWMAVNLAAWVARMLNRLKRGRQYISKYELCGMLLLIVGLSLLEQIMGYSASMTAFLIGLAMPREGPTARTLMDRLAYPVHQLFMPLCFAAIGARLDFAKIGKFTVVQLVVAVTFTTLLSTAGKVAGTLLAGRALGIATREAVVLGALLNVKGYSDILAINFGNKINVWGETMQVVLLVSSIINTFMAGPASAAIVRQQRRAYHYRSRCLEDLSLAHELRMLLATSRKYAITQQLYHARDGGEDEDEWGYAREIEHVASAVATFTYDNAILVRQMTAISSLGSMDTDVRNCVEDARASLVIMPFHKEQRYDGRMVCRHEGRRQLNQRILHRPPCTVGILVERCFAHEVTGEHHQVVALFLGGADDREAVSFAIRLAVEPLVIVTVCRLLLPSGRGLVGNPEMMEENMEDEEFMADLCARFVAPGQVSYMEKYVSNGAETVNTLRSMVGTCSLFVVGKGDRAHGNRGVMTSDMGGWDEECEELGPIGELLSSDDLVGCGSVLVLQQHNKYKMKTWDKDNQQQCHHASVVDGDAVVDIIGSSSVTSSSTSHSRRPN

SEQ ID NO: 84752 - protein, 120 aa, Zea mays
  Coding DNA Sequence Number=SeqID_41377
MEESEPSSDGDARQEEWTPKQRRTGRVRGIGNRPIEPAPRGYRKVRKGMNLPRGGEGRKGDESPSAGYGWMMPPAWGFLARDGTPAEGVNPGGRGRESWWPFEPASRRYVEREGVAGGDV

SEQ ID NO: 84753 - protein, 127 aa, Zea mays
  Coding DNA Sequence Number=SeqID_41378
MELLMELVLGYSKVLRVKRLRTGQLRENPGPARYNPPDCPVYTGQCPVLQRNAASGTRQPRDFTETAPLYFTGHVRCAPDCPVQPRSNGYFAPTVDSDSEQYTRQKSEQRIREAPDCPVCTGLSGAT

SEQ ID NO: 84754 - protein, 126 aa, Zea mays
  Coding DNA Sequence Number=SeqID_41379
  Subcellular localization annotation: CTP_CleavageSite=48; ConfidenceScore=5.29e-01
MAQRVWPAARGWQCAGAVARGPAAWGRRAGLAKRGGGTRGRRAQGRRRAGRRRGGSTWAGGGAVLRFELGDGILRTSVRETPEMLISGCRLGSLIPGNSREHKDIGVGAIQPPSRRLSFGIKIVAS

SEQ ID NO: 84755 - protein, 85 aa, Zea mays
  Coding DNA Sequence Number=SeqID_41380
MKLPKPSDQVVLHPEARDRPHRTSVFHRRAWTGLTGRTPRRRRASPPAHVDRPTPAIPDGDPHIVVIPETSSTSSTTSPEPSRRR

SEQ ID NO: 84756 - protein, 406 aa, Zea mays
  Coding DNA Sequence Number=SeqID_41381
MEVVELVPCARNKWGNWYEFWFYVAEGTVEDHPGLPVAEMCSHYYSAYPQFEVAEEDADEGALRCAAGLSSRRDLVEEFVAYGVWPLAHGWALSEVCPRQMPSRGGMLVRSPAFALDLHSRDPAAFVREADDGAVRIVGRYVPKTEGQRSWDIRGSNDRLNRVFELNRLPYGGYPGQDDVDRRGKKPAAEAGDDPAPAAAPSSKKRKLGTATGGLGFSDGFARELMRTCAAPGGRMSSPELRESSARMLKVQDFGPAHATATANFLAASTVDDGNESDESVSKFSDFGDSGSSVEWTEESSDEDLDYFAALDVAAAEASPRAVDAEVFPGPSAGRRRRRAVVKRRVSEADGSRLRVGRAGRQELLSLPAVESVGEGELRSLFAGEELRIMLFNYREMGIIPKVEPM

SEQ ID NO: 84757 - protein, 683 aa, Zea mays
  Coding DNA Sequence Number=SeqID_41382
  Gene Ontology: Mol. function=DNA-directed RNA polymerase activity; Cellular component=membrane; Biological process=transcription
  Homolog annotation: Hit_ID=Q84R88; Match level="QueryCoverage=95%, HitCoverage=50%, E-value=0.0, Identity=60%"; Hit description=DNA -directed RNA polymerase
  Pfam annotation: Domain name=RNA_pol_Rpb2_3; Domain location=147-212; Score=91.3; E_value=3.2e-24; Accession=PF04565.7; Description=RNA polymerase Rpb2, domain 3
  Pfam annotation: Domain name=RNA_pol_Rpb2_4; Domain location=248-293; Score=6.9; E_value=0.00023; Accession=PF04566.4; Description=RNA polymerase Rpb2, domain 4
  Pfam annotation: Domain name=RNA_pol_Rpb2_5; Domain location=401-441; Score=25.0; E_value=0.00015; Accession=PF04567.8; Description=RNA polymerase Rpb2, domain 5
  Pfam annotation: Domain name=RNA_pol_Rpb2_6; Domain location=406-683; Score=-23.8; E_value=2.1e-12; Accession=PF00562.19; Description=RNA polymerase Rpb2, domain 6
  Pfam module annotation: Pfam domain module=RNA_pol_Rpb2_3::RNA_pol _Rpb2_4::RNA_pol_Rpb2_5::RNA_pol_Rpb2_6; Domain location=147-212::248- 293::401-441::406-683
MKRASYTAFAEYIPLAAKRKKCVFYLVLNRSNQVPQTKKFRDNSKRARSNILCPCNHQSDQNKDYVGNKRFELSGQLISLLFEDLFKTMNSQAVERMNKNSDKTHSSPLDFSQLIMQDSITFGLERAISTGNWDIKRFRMHRKGVSQVLSRLSYMASLGYMTRITPQFEKTRKTSGPRALQPSQWGMLCPCDTPEGEACGLTKNLALLSHVTTDQEEGPLIYLCYSLGVEDLLSLSSEEIHTPGSFLVMFNGLILGKHKDPQRLVIDLRNLRRSNVIGEFVSIFINEKQVVFWQAKPLHLQCPSKGFKIMKYQVFKIMKYQEAPMRSAILRYHSNEKRDRGRPKLTWKEIVKGDLHCVHIASDGGRVCRPLIIADMGISRIDETHMEKLRLVCHQHGTCGFDDFLRDGLIEYLDVNEENNALCAMGKQAMGNIAYNQNLFNFTRQQIRQQHNKFLAVVEEGNMWCLAGASALQDLLLRRLPVGYDKLGAGQNATVAVMGYSGYDIEDAIVMNKSSLDRGFGRCIALKKYTVLKDNYGDGVSDMIVEPQRDNGVLIKQNMRALDEDGIAGPGQIIRNHDIYVNKRTPKNTSKGIGRALRESDYKDSPALYKGVDGETTVVDRVMLCSDTNDKLSIKCIIRHTRRPEVGDKFSSRHGQKGVCVHSTWHETMGVLKDVPSSGYDII

SEQ ID NO: 84758 - protein, 367 aa, Zea mays
  Coding DNA Sequence Number=SeqID_41383
MDGNDHPHSGKPPVSQLLQGLQKGLEILLFLVRSPIAPVAAGGSHHSLRKRREPPIVISEVKPPALPPLVRRHKDGGDVLLHVRLPQLEDAATSPHRHADPPFPRRQGKRLRGEEMGPQIPVGVNPQKSLANRREDGRLRDGVGVEIVQLHPIVMQERPHETACSHSEPLLMEGDETQHIPRRRGRGGPARRDHPLWLRVTREGTEQAIGNKGLKIVHRDGGERPRVARRNDGYPVYHRQAKGVAAERTRPGQDPFNTSPEPAMEFKLEGETPVPRTARATAAPQTTRPVALTLRQGMRHLWQAKRATLHLRHDDRVKKGTGKGDTPKGILLREGSGPRALLLIRGSKAGPSEGFDSHPRAPGLRAH

SEQ ID NO: 84759 - protein, 102 aa, Zea mays
  Coding DNA Sequence Number=SeqID_41384
  Subcellular localization annotation: CTP_CleavageSite=79; ConfidenceScore=5.29e-01
MVEVQRTVGRDSGVPGGHVEVRIADGGDRRRAGRVRRRSSSSVVRAPACSRRSVHVRRRSAGVRRWQSGVSGEVVFGLRAQEALQGSREASQGARLDGGGPE

SEQ ID NO: 84760 - protein, 202 aa, Zea mays
  Coding DNA Sequence Number=SeqID_41385
MARVACTLYGKRLDGGVSVPSVGVNPVPPASQLGALTARVAAGGDLDDGDGDDSSSSHSTDLTEKQKLEGWVARPITRDTARGCDFHDALDTLLHRAFDMHTWPIEYRCVVYQHSRRVYPNHWEATCLVRHLEDGLRGAEYCSLFSGVADVLNMRNYPRRPTGTIGGVVVSPISEGNPRLSSTVGRPTGCHRAQHRAGPRLE

SEQ ID NO: 84761 - protein, 357 aa, Zea mays
  Coding DNA Sequence Number=SeqID_41386
  Homolog annotation: Hit_ID=Q6JAD6; Match level="QueryCoverage=98%, HitCoverage=73%, E-value=3e-48, Identity=59%"; Hit description =Putative uncharacterized protein
MVWMKNVSSSRGGDDEDPPHPFRQDKGKTVYLEQQEGRKKRRMDRAAHAALAAAAAAEQVERGGQLQISSDQIAYRVHRLASRPCSTAPSTPSATVSTPPSSSPASVALEPSTTSSIPTISTTPASTIPPPTPISASPIPPPRFRERDKTEMRPLAADPHLLNLQCATPARMRQTLLPRMEDIAATTHIQLWLLGALVSHSEFDVVDFLICEIEDTILDGLHARRQLLYAHYLYHIFAWLIRPPQFQGTLEASCLQFGFYRLALKDPVLVPDPVSDVWAEDETFRQFETQGVVADTSSDDDEGLGIPPPPPMPYCSHDHEAGSSSAASAALLAIDPALVAILQSLTQQQAHLAAEQA

SEQ ID NO: 84762 - protein, 60 aa, Zea mays
  Coding DNA Sequence Number=SeqID_41387
MAEDANTEGRTTEDASTRSRDQGALMAGRVDGEARRWRIEAHEFEIGLYDNFGKWWNVTF

SEQ ID NO: 84763 - protein, 308 aa, Zea mays
  Coding DNA Sequence Number=SeqID_41388
  Gene Ontology: Mol. function=phosphatidylinositol phosphate kinase activity; Cellular component=mitochondrion; Biological process =phosphatidylinositol metabolic process
  Homolog annotation: Hit_ID=A3AYY4; Match level="QueryCoverage=31%, HitCoverage=12%, E-value=1e-21, Identity=79%"; Hit description =Putative uncharacterized protein
MARPTRRSAHSCYRGNLKCSSCGEPPEAHMYSYTHRNGNLIVLVRHLLPKYRLPGESEGKIWMWTRCLRLGSKVAMFQYSSVEIYNGCKPQPTLEIHNPDMHEWYGQEIRNVCIVHSRRSWTSMLGTLAWSTFTAVVDVHAVHNRVAREFHPNFAAKRGGEGQSSKTLENSEHNIKPQIFDVAKVDEILKPLAGKTLSYKMFAHDTHASRSVITKEAWWSCVVTYHCFRQEVNSNKYMQHAMDFGNVEGQCISIVNNNLLLYSGVQGCFCSISMYYVNQELTVEDFLYDYDYKIDLSRSNLNALFRVH

SEQ ID NO: 84764 - protein, 224 aa, Zea mays
  Coding DNA Sequence Number=SeqID_41389
  Gene Ontology: Mol. function=structural constituent of ribosome; Cellular component=ribonucleoprotein complex; Biological process =translation
  Homolog annotation: Hit_ID=Q6RJY1; Match level="QueryCoverage=60%, HitCoverage=97%, E-value=9e-58, Identity=74%"; Hit description=60S ribosomal protein L12
  Pfam annotation: Domain name=RED_C; Domain location=108-221; Score =131.1; E_value=3.2e-36; Accession=PF07807.2; Description=RED-like protein C-terminal region
  Pfam annotation: Domain name=Ribosomal_L11; Domain location=49-117; Score=88.4; E_value=2.3e-23; Accession=PF00298.10; Description =Ribosomal protein L11, RNA binding domain
  Pfam module annotation: Pfam domain module=RED_C::Ribosomal_L11; Domain location=108-221::49-117
MPPKLEASQVVEVFVRVTGGEETAKDWKGLRVTVKLTVQNRQAKVSVIPSAAALVIKALKEPERDRKKVKNIKHSGNISLDDVIEIAKTMRHRSMAKELAGTVKEILGTCVSVGCTVDGKDPKDLQQEIDDGEAKGRLHRWDFETEEEWAKYNDQKEAMLKAAFQFGVKMQDGRKTRKQNKDQKLTNDLHKINKILARKKGEKDGVEDGGHYDDDLPSSKKQRG

SEQ ID NO: 84765 - protein, 90 aa, Zea mays
  Coding DNA Sequence Number=SeqID_41390
  Gene Ontology: Mol. function=protein binding; Cellular component =cytoskeleton
  Homolog annotation: Hit_ID=A2WSR6; Match level="QueryCoverage=47%, HitCoverage=16%, E-value=1e-11, Identity=79%"; Hit description =Putative uncharacterized protein
NRQSSFDDQEIEVFEFYEAEDPEHMSGEGKSDADAKYSLDWVQYKTGDKAEPTTVDEAFMERSKSFIKALQELKNLRPQLYTAFEYCDKF

SEQ ID NO: 84766 - protein, 137 aa, Zea mays
  Coding DNA Sequence Number=SeqID_41391
  Subcellular localization annotation: CTP_CleavageSite=22; ConfidenceScore=5.33e-01
MQAAYNRSKWTHFSDSRHARMEAQAHASRNRRAGCCMQATTSPAPPPSNGRRFAFTETTAPKKGPEKGDTPKGILPREGTRLRASLLIRGSKAGPPKGSTTASDRVGPTPTTGQRFEGRPPEGFHGRLRLLRLRAHY

SEQ ID NO: 84767 - protein, 46 aa, Zea mays
  Coding DNA Sequence Number=SeqID_41392
MPPYPGDLALLGGAAGLKRREVRDQLAPLDPEWAHEMKCDYTVLVH

SEQ ID NO: 84768 - protein, 63 aa, Zea mays
  Coding DNA Sequence Number=SeqID_41393
MRGSIRQDDPTRQRDKDEELGWVRQTVRAYMSVPARAHNWAGWAARTRRMGRAGRSWPNESFI

SEQ ID NO: 84769 - protein, 156 aa, Zea mays
  Coding DNA Sequence Number=SeqID_41394
MALPVDVAGLCPRLGDVEAPSKPGSSLSSMAEAESEPLGRARRRSSAEAESEPLGRARRRSFAEAESEPLGSGKAEVVSRGRVRAPWSGEAKVVSRGRVRAPGSGEAEVVRRGRVRAPGSGEAEVVRRGRVRALGSGEAEFVVFRGLARVRRLPGA

SEQ ID NO: 84770 - protein, 216 aa, Zea mays
  Coding DNA Sequence Number=SeqID_41395
  Gene Ontology: Mol. function=helicase activity; Biological process =RNA-dependent DNA replication
  Homolog annotation: Hit_ID=Q6YTQ5; Match level="QueryCoverage=94%, HitCoverage=47%, E-value=8e-21, Identity=30%"; Hit description=DNA binding protein-like
MLFTPIEELDPRSTNVAIRVCIIRKWEFRGAINDGPLCHVNLILADKQGTTIHTEIQVALVADKGSLIQLDKVYELKHFRVASSRNYYKPVDNSMMIQFTLYTQAKVLKDPPPTFPRYAYKLTSFENIGNNVDNKTYLIDVLGILTEIGSLHHVGYNNSNIIRDIFLKDINYTIYIYKYNNKCVTPNVGEAYLSATVACTWYFNPDIPEVYMYYNK

SEQ ID NO: 84771 - protein, 64 aa, Zea mays
  Coding DNA Sequence Number=SeqID_41396
MTWQGAPDCPKSYHECLQTEKGKFYIDLLPGTSIAKRLYHMAPTKLAELKTQITELQIERLHLS

SEQ ID NO: 84772 - protein, 184 aa, Zea mays
  Coding DNA Sequence Number=SeqID_41397
MARHRRRPSAAVADRRVGALMDGGVVGPARWAPTSAVGRLGGAPMDGVYEADENKVIPIGQSTGPTGIRFLVRTSMSRVWLASTWALVAFLKLQAFYLGVLVGVVGEKVVEVGVKGVEVSDHVNYGRVILIMVSPVQSLESFPPSGAIFVCGWEVAKGRFDNLFCHSFGKVVWRAFRAVFWQVP

SEQ ID NO: 84773 - protein, 142 aa, Zea mays
  Coding DNA Sequence Number=SeqID_41398
MTKSHNQKNKGNKGRDQRENKDVAYRAKRRSSGKKKWNLNFDLIERKKTELVDGGASGSGTVTAALRLGDGGHSGSVKGTAALGLGLGDGVARALGGGGARARGRGQQGSSSMKGTAALGLAQRGGVARALGNGGICFLTGT

SEQ ID NO: 84774 - protein, 173 aa, Zea mays
  Coding DNA Sequence Number=SeqID_41399
  Homolog annotation: Hit_ID=A2WYW1; Match level="QueryCoverage=23%, HitCoverage=8%, E-value=5e-08, Identity=68%"; Hit description =Putative uncharacterized protein
  Subcellular localization annotation: CTP_CleavageSite=23; ConfidenceScore=5.47e-01
MDSPSGLWWRPAPSSCPPFPSTPSMSPRDADACGRARQDLSLTDAPPRSRRRGRRDTYCRGSPGDADACGGAWLDLSLTDERLRPTHRVPVVHLGLLLGATSPPSPRCCTCLYRGDMPKHVTEANLLVLFCEVATVEEVTIIKDKATKVSRGVDLPGPRSGLAALPSPRLLPL

SEQ ID NO: 84775 - protein, 100 aa, Zea mays
  Coding DNA Sequence Number=SeqID_41400
MTKEAGQGSGSSERIGGLPHEHQRHYILLLYHREGLNMSEAPKDSMEVDLLQKTEKVKVTGELSSEEVETARQTSQVEAADSTFVSEVDRLEKAGNIDAE

SEQ ID NO: 84776 - protein, 346 aa, Zea mays
  Coding DNA Sequence Number=SeqID_41401
  Homolog annotation: Hit_ID=Q6J9V9; Match level="QueryCoverage=34%, HitCoverage=33%, E-value=8e-11, Identity=43%"; Hit description =Putative uncharacterized protein
  Subcellular localization annotation: CTP_CleavageSite=56; ConfidenceScore=5.25e-01
MQAACNCTTGTHPFDFDASSVAAQAHTSCNRRVGYYMRKTAPSLAPVPRLLDYGTGVATRGNPAHSPTVPTERNGHGSVSRGRRRDGRYGQKWADSNGGGKRAEAAVKSAGDTFGRRSGRRFTSAMMTASKKGPGKGILRKGSFSAKEAGLEPPLLIRGSKDGPSEGFDSRLRALGLRAHYWSEVRRLAPRKGSTAASGHSGSAPTTDQGFEGWPPEGFDSRLRTCRARDDSRYVRYMAEARATLPRTGFGKSPAGAIGSSASPDPRARPPPGPRKTISASPDPGLGPRLDLGRRSPPRPTPGLGLRLDLGRRSPPRQTPGLGLSLDLGGITALPDLGLGPTTLQG

SEQ ID NO: 84777 - protein, 306 aa, Zea mays
  Coding DNA Sequence Number=SeqID_41402
MKKTWLPSERGRPPFKGNSPYVRPQTPRAESSPTHSKALPCGAGGWVPHVMQAGSEQKKPNRRAWRAQPPSGYKRPPILAQTNGRKEWAAMQAACNRAKWTRFSDSQRASMEAQAHASRNRRAGCCMQATAPPLAPPSRLFGCGTNAATRGDPAHDPAAPAWRDDGAPVIRPSNGSRTHNGRPANHSPRRINSAAGQAALLAGEAGDASPSPDRERGIPRKGSFPVKEPGSEPPLLIRGSKAGPPRGSTVASDRVGPTPTTGQRLAPEAFTVASDAERGMTRGLGLGLSPGRRRTPLRPTQGSDSG

SEQ ID NO: 84778 - protein, 139 aa, Zea mays
  Coding DNA Sequence Number=SeqID_41403
  Gene Ontology: Mol. function=RNA polymerase II transcription factor activity; Cellular component=nucleus; Biological process=regulation of transcription
  Homolog annotation: Hit_ID=A7QK63; Match level="QueryCoverage=46%, HitCoverage=32%, E-value=3e-21, Identity=78%"; Hit description =Chromosome chr19 scaffold_111, whole genome shotgun sequence
  Pfam annotation: Domain name=TAFII28; Domain location=39-138; Score =85.1; E_value=2.2e-22; Accession=PF04719.5; Description=hTAFII28 -like protein conserved region
  Subcellular localization annotation: CTP_CleavageSite=71; ConfidenceScore=5.02e-01
MWTEEVVYSRIPSVGSDLLKKAPDPCTHSSDLRVRSGTPNAILSQFTQQQMNRYESFRRSGFQKSNMKRLLASITGSQKISIPTSIVVSGIAKIFVGELIETGKFRIVVLFTLFLWNRICYSVAEFKSGHEREEGFRTH

SEQ ID NO: 84779 - protein, 181 aa, Zea mays
  Coding DNA Sequence Number=SeqID_41404
MLRRRLPHWNSCAPLAFLLPFNPQAFPGSIAQLGDVRRYLHIGNDRFRFSGDAWSGSRINQNKCEISVKFERLLNFQIRPLPQHFLGFREGNCIFAQIFVVSNVHICSVCSCEILNETKELQQITNDKQKNQVVRIQHFTFIFAEDVNKQNRQAVRYELTERYDPPARPAARYGRCLIVYD

SEQ ID NO: 84780 - protein, 682 aa, Zea mays
  Coding DNA Sequence Number=SeqID_41405
  Gene Ontology: Cellular component=integral to membrane
  Homolog annotation: Hit_ID=Q5QLF2; Match level="QueryCoverage=54%, HitCoverage=93%, E-value=4e-73, Identity=48%"; Hit description =Purine permease-like protein
  Pfam annotation: Domain name=DUF6; Domain location=344-482; Score =6.8; E_value=0.028; Accession=PF00892.11; Description=Integral membrane protein DUF6
  Pfam annotation: Domain name=TPT; Domain location=501-647; Score =78.5; E_value=2.1e-20; Accession=PF03151.7; Description=Triose -phosphate Transporter family
  Pfam module annotation: Pfam domain module=DUF6::TPT; Domain location= 344-482::501-647
  Subcellular localization annotation: CTP_CleavageSite=34; ConfidenceScore=5.03e-01
MAPRMLCDDGGSQPPYGSKRTAGSAGRTGGSGVAALERRGEGELRRGGATAARPCRQRGSEGAAGVEAREQPAWEPPRRGSGSGRRAASEQPARERRGSRLGVAAREQPARECSGRGAARQRRRGSGGDNGGGEKTETVGRKPRCHAVCHIGFATSLLGATLYGAGMCYLGAISYDAELRLQSCTCWPQCLSLLSGAPQFPSRIDVLAPDAALAQKPRQLLGVGELVSADRVVSVRATRASGLQTGTTSPLTLASAASWVLALLLALLLPRPSLRSGLLPTALSSPHLTAHSPHLTSPMLSTTSPVPLLDTPAPSTDADAKNGTASRRRARLLLLCANYAALLGGSVASSLLSRYYFAHGGCDRWVATLVQSVGFPVLLVPVYAGRPASHSQSQSQPRPFAWLTRRPLLVAACVVIGVLMGVNNLLFSYSSSYLPVSTSSLLLSTQLAFTLVLAAAIVRHPLTFSSLNAVVLLTLSSVLLALRSSSAERPDGGSRASYLAGLAVTLGAAGLFAAYLPVMELVYRRAVSGGFRMAVEVQVVMQAAATALAVAGLAAAGGGWRGELARWDLSPAAYWAVVAALVVTWQACFMGTAGMVYLTSSLHSGVCMTAVLTANVIGGVAVFRDPFGWEKAVATVLCVWGFSSYLYGEYSTTQQAQEEGDRKVAAASDGGGAGHKSVASDV

SEQ ID NO: 84781 - protein, 595 aa, Zea mays
  Coding DNA Sequence Number=SeqID_41406
  Gene Ontology: Mol. function=binding; Cellular component=cytoplasm; Biological process=humoral immune response
  Homolog annotation: Hit_ID=Q5QM96; Match level="QueryCoverage=97%, HitCoverage=97%, E-value=0.0, Identity=66%"; Hit description=Rubisco subunit binding-protein beta subunit-like
  Pfam annotation: Domain name=YTH; Domain location=412-502; Score =205.0; E_value=1.8e-58; Accession=PF04146.6; Description=YT521-B -like family
MVRAEPTPIYLTAIEEAIDSLKTDASMKANNVNLPAKKDASSSDAVSCISSGDAASTVKDREMNQETSFGDQGMHYYGYYYPGAYGGWDENGYFVGYNGLEVHPAVVQADNGSYLCYPLGYENGYASYIPVVPGGIASVDGQYVSKEPYYSSALPIQDPSTPGIFAQPIAYGTELVPAYSWDPFVLLDGVQGHPVGVHHTNYAPRPKYSSNKHVVPSLKASHSAKSTADTVKGSSSALETAPGASITKGYLPSSKFVMHSNNQAKSSVYQSKGINLKESGRSWHSSEKLKARSKLNGHGDSESNENNHTDNSKYSLSSQSDVVGLSSVGDANASIPSPVVIRKTAYNLSDFVTKYEQALFFVIKSYSEDDIHKSIKYNVWASTPNGNKRLDNAYRLAQERMAEKGTKCPVFLFFSVNASGQFCGVAEMVGPVDFNRNMNFWQQDKWNGFFSVKWHIIKDVPNPQFRHIILENNENKPVTNSRDTQEVKFSQGTEMLNIFKNFTCKASILDDFDFYENRQKVMQDRRGKPLTSFGHPLPKAEKTAEVKRQTQLISATEVGRADTTKENEEKSSSVPEILNAACSNKEKPNKIATDG

SEQ ID NO: 84782 - protein, 183 aa, Zea mays
  Coding DNA Sequence Number=SeqID_41407
  Gene Ontology: Mol. function=carboxyl- or carbamoyltransferase activity; Cellular component=ornithine carbamoyltransferase complex; Biological process=amino acid metabolic process
  Homolog annotation: Hit_ID=Q8SA97; Match level="QueryCoverage=68%, HitCoverage=24%, E-value=2e-15, Identity=43%"; Hit description =Ornithine carbamoyltransferase
MALPVDVAGLCPRSGDVEAPPKPRSSLSSMAEAEPEPLGRARRRLFGRGQGGVRALGSGEAEFVVFWGLARVRALGPDCVSVSLCQVALQSEWRRRRCPSVRPLYADGGYQLRIRRLEGTPNYGPRHLGSGEAETVFRGQGGVRDLGSGEAEIVFRGRGGGRALGSGEAEIVFRGRGGASYGA

SEQ ID NO: 84783 - protein, 285 aa, Zea mays
  Coding DNA Sequence Number=SeqID_41408
MAERYQLPRSCVPPTKRRKDGGYPPSGGLEGGKTRCIREREDMVAFQGGHPPFKGDDPYSRPQPSRAESSPTRSKALPCGAGAGSHMSCKPAQSRRSQTAARGAHDRPAVTSDPPLLPRPTGERGGQPCRRHATAPSGRASSTPNTPSLEAQAHASCSRCADCFVHATAPPLAPPPRLLDCGTNTATRGDPAHDPAAPAWRGDQCGQKWADRTGKGDTPKRVLPREGTRLRASLLIRGLKAGPPKGSTAASDRVGPTPTTGQRFEGRPPEGFHGRLRLLGLRAHY

SEQ ID NO: 84784 - protein, 131 aa, Zea mays
  Coding DNA Sequence Number=SeqID_41409
MRSKDLRSKGRRHRHTRAIAARVFSGNLARAGSLWGLGQPSSKGAGPTRGLGWSTPASVPLTDDPAGLRPTRFPFRANSAPVHADIATPGLGSSKSGQGVPLTKLEKPQTTRPTEPRDSYASGIQIPHSSP

SEQ ID NO: 84785 - protein, 252 aa, Zea mays
  Coding DNA Sequence Number=SeqID_41410
  Subcellular localization annotation: CTP_CleavageSite=61; ConfidenceScore=5.03e-01
MNKNTGIQSAITNRTLVPPPQVRTTPLDGGGPAEQQKTDGRLAAARSDSNNNDPRSGGRTAAAQTSGWALLQSCPRPRRGPRGEDKYKEPEARGADGGGDPVGDGDFSSRLHPGTDDRGRQPSGRSPLRSSRTSGAPTSARRRHTGAKAGPPQNTNAALAARDISGGSPVHTARQPPSGRRGHRGPSRRARRAGADDARRRPAPRCRSPTRPQGQRAPSPSNTAGEGDPRTRAGGRAPAQPGLHPSKDDEHP

SEQ ID NO: 84786 - protein, 233 aa, Zea mays
  Coding DNA Sequence Number=SeqID_41411
  Gene Ontology: Mol. function=kinase activity; Cellular component =ornithine carbamoyltransferase complex; Biological process=amino acid metabolic process
  Homolog annotation: Hit_ID=Q6QP54; Match level="QueryCoverage=51%, HitCoverage=44%, E-value=7e-16, Identity=43%"; Hit description =Putative kinase
  Subcellular localization annotation: CTP_CleavageSite=39; ConfidenceScore=5.25e-01
MEPGGGTAVGAVGSLLTSSCFRKGAESRRRHRPESARGRVMMAPPVDVAGLRPRLGDVEAPSKPRSSLSSVAEAESEPLGRVRRRSSAEARAESEPWGWAKRSSSSSGAEPKSEPWVGRSGVRRLLGLSPSPSPGSGGAEFAVFRDLARVRALGRVERSFAVFRDLARVRALGRAERSFLWCLRQGLTACQSHSVKWHFSRCGAGGAVLLSGRSVERRSDGGHFGSAGGRASG

SEQ ID NO: 84787 - protein, 578 aa, Zea mays
  Coding DNA Sequence Number=SeqID_41412
  Gene Ontology: Mol. function=protein binding
  Homolog annotation: Hit_ID=Q8S9Z7; Match level="QueryCoverage=78%, HitCoverage=64%, E-value=2e-99, Identity=47%"; Hit description=F-box protein-like
MSVPLDFIIEVWYFAEEHGEFFCYSVLTFPGVTFVQDICQKFLAQNFVENMKACEQSNPNSVDGHLFILSKQVKICLLPLGFAAGTMRHWFDFGNKIICTILDLLKDSLKTLLDAVDDGNLDRYCIRITEYSKNIVLSGCPQVTTAFLYISVLPNDLSVSLKRRILCVLLLPYQASDFIVSACADMDLLEISVLKNSLCYINIRNCFLLTDDGISNLLMKCTKIHSMVLSYTSFGNRSIQMLCAANPSGHNSGHAHVMASYMQELHLDGCKGIDSVALSQLVSIISITKFLSLRETSLTDGALCKFVGSSLEYLDVSETVISMVSLAPVIQRNCKLNCLKTAGCCSLLLQCANVEHINGNKYGDFLQELGTTYCLEDVEMGWGFCPIRIEDLVPSFSKVRKMKIGLGTSLAENVLCALPMICPFLESLILRFQVISDRVVRRLLESATNLQRIAIWLNFHFLVANFLTPECGKVTVEGVSSFFNCKALEDVLLRHTLPLLRKLALDLCDACEDGYDSPNDAEGKMIRSVRMSRCKKMAGSCLEVPRQGSSTSRPVHKDTVVLEWSSRMFTTTIVKERV

SEQ ID NO: 84788 - protein, 45 aa, Zea mays
  Coding DNA Sequence Number=SeqID_41413
MAHGLLLLPRGKDHRVVLGSVGHHRMDLDDIESNMGGGGYAEGYN

SEQ ID NO: 84789 - protein, 203 aa, Zea mays
  Coding DNA Sequence Number=SeqID_41414
  Homolog annotation: Hit_ID=A3AJE1; Match level="QueryCoverage=43%, HitCoverage=58%, E-value=1e-11, Identity=38%"; Hit description =Putative uncharacterized protein
  Subcellular localization annotation: CTP_CleavageSite=37; ConfidenceScore=5.22e-01
MSGAQAGDSSNSLPLGIAGDAAAKIHCTARMSRRGKSAKQRKGPLTGTAFDPLPLPTSVPVSMCFCGDPCKVDKSEDHDTYRQRYWMCPNFAFGPTIVQRRLNLMTPPPLCDFEQWIDIEISEKDKKWLENLKKWDAEDKERMEKRREELAAEQQREDEQEMRHVAECREEKEKKFERARRAKEAMEENPDAFRKGKWPRCTQ

SEQ ID NO: 84790 - protein, 143 aa, Zea mays
  Coding DNA Sequence Number=SeqID_41415
MDDFLSLYHGGNVEQDPYGNAVDLVIIHALVVGRLTRMAQFHLLDPFYDESHRGRLLSEGQDLATLRSRTHNGFLDMVFDERIFDLEREVSNRNDKEERDNINGGSSKYAQIHIVAALVTARMLVLQRLHRTHSRQQQWEDTM

SEQ ID NO: 84791 - protein, 120 aa, Zea mays
  Coding DNA Sequence Number=SeqID_41416
MQETPSDRHYSRINPGTSLHAYSPTALAPIGVEVRAVPDTVDNGCANPSHTDEELSRRRAVARVSIVHQGSYPHDAADSAQLFHKSRMVADISAMAVAEGLARGVRESVMDSGSVAQRIR

SEQ ID NO: 84792 - protein, 67 aa, Zea mays
  Coding DNA Sequence Number=SeqID_41417
MKVFVAATAIRPILTVGTLVGVRVSLLGAEDHTGGRGHAHNCSAMTRFLVDQSKHRTFAALNLNRRP

SEQ ID NO: 84793 - protein, 467 aa, Zea mays
  Coding DNA Sequence Number=SeqID_41418
  Gene Ontology: Mol. function=tRNA isopentenyltransferase activity; Cellular component=intracellular; Biological process=tRNA processing
  Homolog annotation: Hit_ID=Q33CD2; Match level="QueryCoverage=82%, HitCoverage=85%, E-value=1e-162, Identity=72%"; Hit description =Eukaryotic tRNA isopentenyltransferase
  Pfam annotation: Domain name=IPPT; Domain location=79-361; Score =163.4; E_value=6.2e-46; Accession=PF01715.8; Description=IPP transferase
  Subcellular localization annotation: CTP_CleavageSite=50; ConfidenceScore=5.69e-01
MAHPSAAAAAVSSTAPAANPSSGAREEGGARSPPSPSPSQRGRAKVVIVMGATGAGKSRLAVDLAAHFAGVEVVSADSMQLYRGLDVLTNKAPLHEQNGVPHHLLSVIDPSVEFTCRDFRDRAVPIIQEIVDRGGLPVVVGGTNFYIQALVSPFLLDDMAEEMQGCTLRDHIDDGLTDEDEGNGFERLKEIDPVAAQRIHPNDHRKIKRYLELYATTGALPSDLFQGEAAKKWGRPSNSRLDCCFLWVDADLQVLDSYVNKRVDCMMDGGLLDEVCSIYDADAVYTQGLRQAIGVREFDEFFRAYLPRKESGEGSCASLLGMHDDQLKSLLDEAVSQLKANTRRLVRRQRRRLHRLSKDFGWNLHRVDATEAFFCATDDSWQKKVVKPCVDVVRRFLSDNSTVLPSTSASDPSSRELWTQYVCEEGKADIRKACMRMYRPAATGCCEVRTSGSSTGKGEATGSECSA

SEQ ID NO: 84794 - protein, 245 aa, Zea mays
  Coding DNA Sequence Number=SeqID_41419
  Gene Ontology: Mol. function=transcription factor activity; Cellular component=nucleus; Biological process=regulation of transcription, DNA-dependent
  Homolog annotation: Hit_ID=A2WZI4; Match level="QueryCoverage=89%, HitCoverage=88%, E-value=1e-50, Identity=80%"; Hit description =Dehydration-responsive element-binding protein 1F
  Pfam annotation: Domain name=AP2; Domain location=43-95; Score=58.7; E_value=2e-14; Accession=PF00847.11; Description=AP2 domain
  Subcellular localization annotation: CTP_CleavageSite=49; ConfidenceScore=5.57e-01
MDADDSSYASSSSFSPPPSPADHLRLPPKRRAGRKKFRETRHPVYRGVRARAGGTRWVCEVREPQAQARIWLGTYPTPEMAARAHDVAAIALRGATAADLNFPDSAHALPRARTAAPDDIRRAAAQAAELYRPSPSSSSASGLLLHHGRRTIAAPPPPLSLPPPEASSTCCWTTSTGTRGAGTTPTCCDGFLDEDSIFDMPGLIHDMAWGMLLTPPAMGRGLDWGALDDDDDHSHVDCTLWTLDG

SEQ ID NO: 84795 - protein, 65 aa, Zea mays
  Coding DNA Sequence Number=SeqID_41420
MYHHKMVNTRKEVRIDLPTNPFNRRVHRQQQAEMDPPNPPPAGTSPVVAAQMQMLQQMTNMMQDM

SEQ ID NO: 84796 - protein, 136 aa, Zea mays
  Coding DNA Sequence Number=SeqID_41421
  Subcellular localization annotation: CTP_CleavageSite=15; ConfidenceScore=5.04e-01
MGRITRGPPCWTRPRDGTTSSQAFVQRCVGRRSLNLNLYGPNPRVMKAGEHREDKERECFVRFGHGGGLTPSGVKGSHLANKKIKYWIQQRRKRATESTSGLGAPDSPVHHRTVSGAPEDSNSNLPPSGISRGTPL

SEQ ID NO: 84797 - protein, 56 aa, Zea mays
  Coding DNA Sequence Number=SeqID_41422
MSKPDKTFPLLILPVLPSLHNPRVGPLRVVVEKSQGIYLECASSELGVEGAGGGVL

SEQ ID NO: 84798 - protein, 68 aa, Zea mays
  Coding DNA Sequence Number=SeqID_41423
  Gene Ontology: Mol. function=cysteine-type peptidase activity; Biological process=proteolysis
  Homolog annotation: Hit_ID=Q5NKQ2; Match level="QueryCoverage=100%, HitCoverage=7%, E-value=4e-14, Identity=51%"; Hit description =Putative uncharacterized protein 9C20.3a
MKAESNDCGFFVMRYMQHYDFMDGAINAAFESDNSEDIRSLVLHYIIFHRLNKNISVLSDLERFKFSQ

SEQ ID NO: 84799 - protein, 45 aa, Zea mays
  Coding DNA Sequence Number=SeqID_41424
MSTAATASIVQDSGLPSTAHTGMQDQSRKEAVPSVIPFQLPYQFR

SEQ ID NO: 84800 - protein, 70 aa, Zea mays
  Coding DNA Sequence Number=SeqID_41425
  Subcellular localization annotation: CTP_CleavageSite=34; ConfidenceScore=5.17e-01
MDGSDSVSGLGTLPSARPLKLCTTDSDEKASGTRAAISSALPRLSSLELFFGRQRTTLSPGFVTHRLPAR

SEQ ID NO: 84801 - protein, 297 aa, Zea mays
  Coding DNA Sequence Number=SeqID_41426
  Gene Ontology: Mol. function=cysteine-type peptidase activity; Biological process=proteolysis
  Homolog annotation: Hit_ID=Q5NKQ2; Match level="QueryCoverage=99%, HitCoverage=53%, E-value=4e-38, Identity=43%"; Hit description =Putative uncharacterized protein 9C20.3a
MRKVDRPPINPKRLMIESSQECFGVDIPRSTDTREPTNTRCDGDPPQHRKRGVAADAKKIPMPSVDDDDDFEPPKKKCNIKMDAPNKTHKLDPRDMTLRIGPDKELKITKQFVHLILGLPNSGGGKPLNIDELYYLDHLHHAAAPNNKSGTPHIKYFNKNIIRALSMADKRKPREGGEPFGFCPFRGSSETCYVSKSASIGQLESTMRPETVKADPNERGRLPNINIQLPLMQDLMSTKIQLLPIHQRSKFQAKLIAYDLEVGKIVATMKQCLDNIGRKQSKLADTFGELIDEVLRG

SEQ ID NO: 84802 - protein, 442 aa, Zea mays
  Coding DNA Sequence Number=SeqID_41427
  Gene Ontology: Cellular component=nucleus; Biological process=cell division
  Homolog annotation: Hit_ID=Q10PQ9; Match level="QueryCoverage=86%, HitCoverage=92%, E-value=1e-98, Identity=51%"; Hit description =Cyclin-SDS-like
  Pfam annotation: Domain name=Cyclin_C; Domain location=324-438; Score= 25.8; E_value=0.00015; Accession=PF02984.10; Description=Cyclin, C -terminal domain
  Pfam annotation: Domain name=Cyclin_N; Domain location=219-327; Score= -16.1; E_value=0.0032; Accession=PF00134.14; Description=Cyclin, N -terminal domain
  Pfam module annotation: Pfam domain module=Cyclin_C::Cyclin_N; Domain location=324-438::219-327
  Subcellular localization annotation: CTP_CleavageSite=29; ConfidenceScore=5.36e-01
MLAPVPTRPRSNPFRRRRGAAPLLLDQTSAKRPAESSTSASSCFYSEVISNSSTSLAPYQRLEKRHRRQDTDAGEARPAGSECSEVIGGARVRPAEVEVSESSCPVSVLESDLACPKQLADDAEAIEKSSACDELTPSSEPDEEEVLSDPSHSGYSPSPLISSPLTEDDSDDAPSATFSLFLDFAKQFVPCLHPKPCTVTSSTLDLLTGRRFEDLDDEESYERFRRRERREAVARDFTEVCSSTSIPDSYRPLVVEQRVIMVNWIIQHSRLMKLQPVTMFMGIGLMDRFLTQGVLRKTFQVGINIYSQSEVVAMEWLVQEVLNFKFYLKAANADDRVADLANYLAFISLRNHEQLSFWPSTVAAAVVVLACLATNKESSCHLVTETHIRTQDDDLPECLMKMVTYQVSVVSGKQNTILRPVMLPAKVSFQLTADPSGAIITT

SEQ ID NO: 84803 - protein, 111 aa, Zea mays
  Coding DNA Sequence Number=SeqID_41428
MGIAHCGYLKIKTRALNTCARRPDPRKWPQPSWRATRTSSLRGVSCCHVLHNAGGDGTSPEHHPNPKQGRSGAVMRKGDTSHYSPRKVRPGAATCSMTRDVSHLGKLDVNL

SEQ ID NO: 84804 - protein, 389 aa, Zea mays
  Coding DNA Sequence Number=SeqID_41429
  Homolog annotation: Hit_ID=A2ZBC8; Match level="QueryCoverage=100%, HitCoverage=95%, E-value=1e-138, Identity=58%"; Hit description =Putative uncharacterized protein
  Pfam annotation: Domain name=DUF1668; Domain location=78-386; Score =66.9; E_value=6.7e-17; Accession=PF07893.4; Description=Protein of unknown function (DUF1668)
MGHRKRKTGDRHGRVKPSVELEGSEDPDQIQMGDLEIVCGGDGDPLMQETEHLDPTRIVSDELYEGQMGVATSFPSRVKRKSLHRVTRLTTVAGGMTFTSLRSVHRAWIIRVGGDPGDTVIFDTKTKKVIHGPTLNSTKWCPVLTTMGDKVYALCKTLCWFTDPDFPPWFEVLDLSKAKVVIVDDRSHLEGCSWIELPHPPCFPWKITPFVYTMLPVVLITSYVVVDTYILVSFNQLWGTYAFDTNSVEWHKIDTKGLPFVGRATPHGSLFLGLSEGNGSINAYCISVTTTDNDRAPNLSITMLPVKYMDNEIDAGPCFFSLEDGCFCSFSFSLDKCSWTLHPKKLELFPKETHLNLRTYQTENLSSLEVPEETLLAVKPKIAVHSHWE

SEQ ID NO: 84805 - protein, 311 aa, Zea mays
  Coding DNA Sequence Number=SeqID_41430
  Homolog annotation: Hit_ID=A2ZBC8; Match level="QueryCoverage=100%, HitCoverage=90%, E-value=1e-72, Identity=53%"; Hit description =Putative uncharacterized protein
  Pfam annotation: Domain name=DUF1668; Domain location=35-310; Score= -12.2; E_value=2.8e-09; Accession=PF07893.4; Description=Protein of unknown function (DUF1668)
MGRRKRKTGDRHGRVKPSVELEGSEDPDQIQMGDLEIVCGGDGDPLMQETEHLDPTRIVGDELDEGQVRSAYLVACHWDCAPRVDHWGRGDSGDTVIFDTKTKKVIHGPTLNSTKWCPVLTTVEDKVYALCKTPCWFTDPDFPPWFEVLDLSKVKVVTVDDRSDLEGCSWIELPHLPCFPWKITPFGYTMLPVVLITSYVVVDTYILVSFNQLWGIYAFDTNLVEWHKVDTKELSFVGRATPHDSLFLGLSEGNGSINAYCISSLLLTMIVLLTYPSLCSRWTLHPKKVELFPKEAHLNLRTYQTENLSSL

SEQ ID NO: 84806 - protein, 976 aa, Zea mays
  Coding DNA Sequence Number=SeqID_41431
  Gene Ontology: Mol. function=galactosylgalactosylxylosylprotein 3 -beta-glucuronosyltransferase activity; Cellular component=membrane; Biological process=regulation of transcription, DNA-dependent
  Homolog annotation: Hit_ID=Q4VYU4; Match level="QueryCoverage=27%, HitCoverage=59%, E-value=1e-112, Identity=78%"; Hit description =Glycosyltransferase
  Pfam annotation: Domain name=Glyco_transf_43; Domain location=176 -466; Score=-1.8; E_value=2.1e-09; Accession=PF03360.7; Description =Glycosyltransferase family 43
  Subcellular localization annotation: CTP_CleavageSite=34; ConfidenceScore=5.40e-01
MRGLLASVISLDFFLLSSKLKSVCAAMTSQRHSRSQERSKSKGLTCRRVAVHLLFFFMVGIFIGFMPLFSVDVYKKIVSENERLPFHDGVIEVEMMGTKVKELETVVVEKEVELIDEPQVQESPPVPAMLDDEADFAESSPALPAIEESDIPVKKLLIIVTITSVRPQQAYYLNRLAHVLKAVQAPLLWLVVEWPEQSYETAEILRSSGVMYRHLICRKNTTSVRKIAVCQRNNAIYHVKRHHLDGIMHFADEERSYSADVFEEMQKISQSTPSIYMRQIITVRPSPPLQASDTVVAPGSPSSSPHSPWTHATVSLPRSRCIPRNPRPSAMRSRLLLPPSWRSRAPPPRQRHRRDRPLPPRAPHAQPPPRERCPTPRPSTTRSSSPPISVTAFSAVASASTPSPRSTSTISSPRTSPPSSTSTVTTPMGSSSPVRSRRSQQQDQPRTLASRSLMLPGKDHDVRADAHLYNALMKANVAADDPGAVLRVFRQVSVTGTFLVNKEHVESHRWSCMFGDVEVPAEVLTDGTLRCYAPAHQSGRVPFYVTCSNMVACSEVREFEYRDSEAHYMETSRSQANGVNEMHLHIRLEKLLTLGPDDHQMLAINSLMLDGKWSNQESSVKEVVSTARVQSLKKLVKEKLHQWLICKVNDDGKGPNVLCKEGQGVIHLVAALGYDWAIRPIIIAGVNVNFRDAHGWTTLHWVASLGRERTVSVLIANGHKIPMRQWRTATGAQRHRASCEPMVEHLQTRTTGYGSSNPLFGGASSNKNNREVQGCEFSTSYVSPKTVGSCVMDDALTTGSIKTSDAEKRRLAKASLAYNCESKNCPHFRKLFPEYVEKYNQQLQLENTAAEPVPQENPAPAPSPAAQQAPTVANRAQPLAEARRDKNQKKAVPFWMVLVIDSVGPLDYLPPRSRIDEPVMSAKTNLNVEQVFFSIARDIKQRLSETDSKPEDRTIKIKAEGEADAAEAQKSACCDS

SEQ ID NO: 84807 - protein, 313 aa, Zea mays
  Coding DNA Sequence Number=SeqID_41432
  Gene Ontology: Mol. function=catalytic activity; Biological process =metabolic process
  Homolog annotation: Hit_ID=Q75LI3; Match level="QueryCoverage=48%, HitCoverage=63%, E-value=8e-42, Identity=54%"; Hit description =Expressed protein
MCLDLYKEYGTTMAGLKALGYEFDNDEFHATVHDDMLEKMVTETIFYQPKTWLPQVFTNSDKAHAEEALCRLGLQGCFDGVICFETLNPCNGPSAFGMLFPDETFPDLADLNESDGFRPISPILCKSASPPLKPCKLTRNIASGKAAGFHTVINSNLDLPFKFIENGSSSCEEANYCEGSQRHLSNNEETIPPSESHAVLDEGSLGIQVEDKDVSSSQALGGTQDLSSKKPQEDNVNIVPIEPVYVNDGLMMPNDLIRLLITAEKDELRDEKQKLKLEKESLEHQMKLMTSTPTYMPHPTLMPTPFPQAPLAH

SEQ ID NO: 84808 - protein, 432 aa, Zea mays
  Coding DNA Sequence Number=SeqID_41433
  Homolog annotation: Hit_ID=Q6JAD6; Match level="QueryCoverage=87%, HitCoverage=54%, E-value=1e-156, Identity=73%"; Hit description =Putative uncharacterized protein
AALSFCQAGQWSGEVTALYADGGYQLRIRSLEAQMSAQIALRVHRLLDLPAFLLATDADSEAHLTYLPGLLTLLTTSGRYVEEWVRVFYASVWIDPDHHWMRFRFEREDVTITASQIRQLFGFPESTTRLHSLCYDTSDPPRRPHGGVAPGTAHVAALFRPPFSDGSRRSLADFTTAAKYLYELIRQTLLSRMGYREATTHIQLWLLGALVSHSEFDVVDFLICEIEDTVLDGIRARRQLPYAHYLCHIFAQLIQPPRFQGTLEASRLVFGSYRPAPETPVPASAPVFDSQAEDAAFHQFDTQATAVDDDDDDFGVPLPPPMPPRSHDHEAGSSSAAPTAPPAMDPALASIPQSITQQQAHLAAEQARLSERMLSMFQNMQDRQDALQQQLLQDRAESRAFMALMLQYSGVSVPPVQSAPPPPLQAPVVPAI

SEQ ID NO: 84809 - protein, 240 aa, Zea mays
  Coding DNA Sequence Number=SeqID_41434
  Subcellular localization annotation: CTP_CleavageSite=35; ConfidenceScore=5.11e-01
MSFLESGLSVGRASLSTGQCQVHAGQSSAPEAGLRQMAIDRCCSRGLVERPSWRVSRRVPMRGQASQPRLALFGQALHRASLPPSALVSLSLALASSLLPPDADRHGRRELARVRAPTDCHCPKIEPVTALSSHALVLAPLLEHKEDPSIAVDVTIPRFHRRAWTERLRPRPAEPRAPSRSPPSTAPFHHLALPSPPANRRKKHEWELSRSCQEFSWKRVNQKLKLRSVLITAPIPSRKV

SEQ ID NO: 84810 - protein, 272 aa, Zea mays
  Coding DNA Sequence Number=SeqID_41435
MPKPDKTFPLLILPVLPSLLNPGVGPHEFGLSDCPHSLEWLYDKGVQGGGKENDKGLPPISGLGARILAHPGRENTRGGAFGPAAAHERGNGAAVGGGDGVAQGPLASERGGGGNGVTVDGGVNRPSAGRTGRRRARRRFAAGGPVLGQCAGVLARGGDGGPSGGLNLARGGREGAARGEVAELRGGVAAGELWASRRGGGGVYCFCGKVRKLLGLTQLLAGAYPRREREEGEWTHRRRGKMAALRGLGSCEGRRVVVEAGAKKKELGASIL

SEQ ID NO: 84811 - protein, 948 aa, Zea mays
  Coding DNA Sequence Number=SeqID_41436
  Gene Ontology: Mol. function=nucleic acid binding; Cellular component= nucleus; Biological process=response to DNA damage stimulus
  Homolog annotation: Hit_ID=A2YRU9; Match level="QueryCoverage=75%, HitCoverage=59%, E-value=0.0, Identity=59%"; Hit description =Putative uncharacterized protein
  Pfam annotation: Domain name=DEAD; Domain location=206-507; Score= -29.2; E_value=0.0064; Accession=PF00270.20; Description=DEADDEAH box helicase
  Pfam annotation: Domain name=Helicase_C; Domain location=812-890; Score=78.1; E_value=2.9e-20; Accession=PF00271.22; Description =Helicase conserved C-terminal domain
  Pfam annotation: Domain name=SNF2_N; Domain location=227-633; Score =134.5; E_value=3e-37; Accession=PF00176.14; Description=SNF2 family N-terminal domain
  Pfam annotation: Domain name=zf-C3HC4; Domain location=671-711; Score= 30.9; E_value=4.7e-06; Accession=PF00097.16; Description=Zinc finger, C3HC4 type (RING finger)
  Pfam module annotation: Pfam domain module=DEAD::Helicase_C::SNF2 _N::zf-C3HC4; Domain location=206-507::812-890::227-633::671-711
MSDKADPAHMLPSNMDIIDLSSDGEQEIIDLSSDSEDNNTLFRSYREDYVDYDDPGSPFHLPFFPHNTAPDWNIMEELDDWRVLAKKEYDDWLSSKASSSYSPVDDILTTEMNSKQLPQSFTYGGFIPQSCAPGHSSLGDNRTKEEPSMTFSGFQGCTASGNGMPSSTVPIGPRPHRIFPPPMPSSVNDIKVEYDVEQRLFSSDERAVYEEALKHITQETKEEDLPKGVMSVLLLKHQGLGKTISTIALIQKEMVKQSRFMTAGSYSTKFVPNSDYDNDSDVVIDMDKKEPKDEPLNELDGSARLHVASSLKLCDSKPNTATDKAEPKKKARVRYSASNLRSKTRPAAGTLVVCPASVLRQWANELSVKVMEDNKLSVLVYHGSSRTRDPNELATYDVVVTTYMTVANEVPKENSNDERKKCEMDGICPEISIGSKRKKQSKPKKKNKPSNSEGGPLARVRWFRVVLDEAQTIKNYRTQVSRACCGLRAQRRWCLSGTPIQNKIDDLYSYFCFLKYEPYSKFSNFKYMIKHQITRDSVRGYKKLQAILRIILLRRTKETLIDGEPILKLPPKTIQLNKIDFTQKERAFYLTLEEGSRQKFKAYDAAGTIRENYANILVLLLRLRQACDHPLLLNGHESDLVDSSSIERAKQLPKETVTNLIEKLERGPAICSICNDPPEDAVVTTCGHVFCYQCVHERLTSDGHVCPYALCGNKLSFRSVFTPAVLKLCTSPKPEFGEETSCSTAADKPSSICESSYISSKIRSAVEILNSIIKTPALTAGDTTESIPSMAPPVKAIVFSQWTGMLDLLELSLNRNGIQFRRLDGAMSLDLREKEVNGFKTDPEVRVMLMSLKAGNLGLNMVAACHVIMLDPWWNPYAEDQAVDRAHRIGQTRPVTVSRFTVKDTVEDRILALQEKKREMVESAFGEDGSRGTATKLTVEDLRYLFMV

SEQ ID NO: 84812 - protein, 72 aa, Zea mays
  Coding DNA Sequence Number=SeqID_41437
MKLWKETSRSSKITTSSRCGLAATPSRLPVKAAVTYVSFPHFDLLREHCPELRKCPAQTFPVDSDTQSPNKP

SEQ ID NO: 84813 - protein, 139 aa, Zea mays
  Coding DNA Sequence Number=SeqID_41438
MEGRISCLALGKISGFAAVSTQPSACAGPAERAEAATILRPALGGKNKIDGLHPARGLRVASRQPRQPNGKARPLHLHVRAPSTTSLKDLPDEDITMSTTTPAAPPHQAPLPSLAGPITRARARDLNFVMLLKNEGPEE

SEQ ID NO: 84814 - protein, 204 aa, Zea mays
  Coding DNA Sequence Number=SeqID_41439
  Gene Ontology: Biological process=cell redox homeostasis
  Homolog annotation: Hit_ID=Q4ACU9; Match level="QueryCoverage=30%, HitCoverage=50%, E-value=1e-07, Identity=46%"; Hit description =Thioredoxin h
  Pfam annotation: Domain name=Thioredoxin; Domain location=4-67; Score= 2.7; E_value=0.00012; Accession=PF00085.11; Description=Thioredoxin
MNYKFEELAQTHPEVLFLYVDVDDVQSVSSRYGVKAMPTFFLIKSKEVVGKIVGANPDEVKKLEEEHERGAAKKKKKSSRQLPMCCYVGKATKIFLCLVAALLVAGLVLGFGLARHTWGAERTRQQPDCRWPDCQQQHQGGDPPLVPDAVTTQPNPLTQPAVAAFPGATATPSPSAAVAAPPTGVPYFGPPGPFVVGLGPAAHA

SEQ ID NO: 84815 - protein, 214 aa, Zea mays
  Coding DNA Sequence Number=SeqID_41440
VDPRAIDLAMKIAERMFLKMKEDEAKNKIEEEENDRWRPNDESTSSQGSSFKSTSHMCFIANGSDSESESEDEEEQESDSEDEDDLQQFFAQLSKKHRMSLLKLMKRAEEQKEMLHKQEDFLIRKIEDLEKLTKEHEKLKCSHDDLVQRQVQPGSRASSTGVQRGSTGVQEKFSRSDLQSASLTGRLTVSLPQAVEPVLGAVQPVLHSQNQPNG

SEQ ID NO: 84816 - protein, 57 aa, Zea mays
  Coding DNA Sequence Number=SeqID_41441
MESHDLRAEWESRLVGGYEIVDSGYDYGAGCQHCNHCSGEDEAVEGDFQEFQDYDEF

SEQ ID NO: 84817 - protein, 171 aa, Zea mays
  Coding DNA Sequence Number=SeqID_41442
MAGGGLPSRVCLLGHGKGAAGFVGFRGSAVKRPRLYAQPRRGGGYATGEIGPVVGVSWIRGGDVMTAIPIRTEVEDAQMDGIRCSVERRVHVVGAGEAESIRSCGFAAEESRRPRSTTWRAELRNVGEKAVERLRRGPRWQETERAGRLPGGGWAVQQKTGVGRIQVLKPI

SEQ ID NO: 84818 - protein, 78 aa, Zea mays
  Coding DNA Sequence Number=SeqID_41443
MGNIFLIVSLVFVMVIQSTSFPTRDVHLTIAISNYVECGMEKDNSNLLFARGLLLFLTSVAAKCVANHQTPMSKSLEA

SEQ ID NO: 84819 - protein, 63 aa, Zea mays
  Coding DNA Sequence Number=SeqID_41444
MTAEDGTSPWAGISTQSSMDPQSSVEDPMLKIAYRFDEVLIVSEIHNSISVAPNLVVLVSTIS

SEQ ID NO: 84820 - protein, 148 aa, Zea mays
  Coding DNA Sequence Number=SeqID_41445
MARSVQAQGRTRRRLLLRLRPGSGEDAIPPEAEVEAEPWGRARRRPPSEVEVGAEPWGRARRSFLLRLRLNLAVVSLTLAILALNAPAIRSVGEAIWPRLLLDEACPSWASGVPRAKRDRVPWVDESLDLERAHQSLQLVLMMVTSRV

SEQ ID NO: 84821 - protein, 149 aa, Zea mays
  Coding DNA Sequence Number=SeqID_41446
MVAGQTRMLLFRHGGKKSSSSPPLGELTTVVVTVALRGEEYHVVAAVEGHELETPKAEHHPGLKRLLKTAHLELNGKLFVNTQQAPTWRANYRRFDLGGSLDRRVNLSLRVPAQMGWREIEHKGENTARVILRQGDALVVGVTSVRKRE

SEQ ID NO: 84822 - protein, 404 aa, Zea mays
  Coding DNA Sequence Number=SeqID_41447
  Homolog annotation: Hit_ID=Q6QP51; Match level="QueryCoverage=25%, HitCoverage=46%, E-value=1e-33, Identity=73%"; Hit description =Putative growth-regulating factor 1
MHEGSAKTLPPPGGLTPFEKATLPTRILKRHGQSLHQRAPGSSPYDTAAPEHSGFKLITDQGFEGWPLRRVRQPPQSTRAPRLLLIRGSKAGPSKGFDSRPRACRARDDSGYVHYMVEARAMLPRLRGCSRNPAKPLTASTNQPKNSEPDHTPGLQSGRMRETTRPAKAPRKALRPQRSQTTPPRPRGLHPAGVPPTLLNTAGNHHQHKLQRLMGTIQVKAFVYPRDAISPRPSPASGGNCSPGRSYVSPEGLLRQWAHPRHARGPTQAGFVEKQPWPNRLSNRPYRRRIQCEDRLTPYPDTRASVGKVEPQAQQEAPPRSTPRARPQHRPRKEVSASPDPRARSQPRPRKGGLRLARPQGSASTSASGGIASSPDPGLRRSLCLARPWARTDRAMGDTSLPYP

SEQ ID NO: 84823 - protein, 186 aa, Zea mays
  Coding DNA Sequence Number=SeqID_41448
  Subcellular localization annotation: CTP_CleavageSite=57; ConfidenceScore=5.09e-01
MFGALRGQHGAFAPSSLRKGDAGARQSRSDHSHFAAPLTGLTEGQSCLRRSDCCATRQSEADGQSGLASGTIGNSAPPDPGLGLGLSPGRRRTPLRPTQGSDSGKPRKTANSAPPDPGLGLGLSPGRRPGLRRRSPPRPTQGLGLDLGHGRQTRPRPRRSLHIAQPRARTDHATGDKTGVPSGSLR

SEQ ID NO: 84824 - protein, 70 aa, Zea mays
  Coding DNA Sequence Number=SeqID_41449
MSRAFDDYYIEDCGVILAPEVTRRRINNSDQFVILATVRVRKQPTFVASVQRWYQRKRTKTKATGGKALC

SEQ ID NO: 84825 - protein, 155 aa, Zea mays
  Coding DNA Sequence Number=SeqID_41450
MACPGLGRLLWASDSTRPLHVDGSGATTWPEKMIYSKVSTVSPDPYGKVPDPCIYRPGLRVRSRTPTGANRTPRMGSGPLYVGSEPLTAGSRDSRKKNTQALIKARRGFGADTCPDLIVYASVPRLGGAPMLPRGMGHVTQCAASAFNETCPFRW

SEQ ID NO: 84826 - protein, 137 aa, Zea mays
  Coding DNA Sequence Number=SeqID_41451
MARPGLGRLLRASDSTRPLHVDGSGAATWPEKMIYSKVSTVSPDPHGKVSDPYIYRPGLRVRRYAASAFNETYPFRWQAATSPFYRRRACPFHWQTARPYYCMHYAHHYSRVTKEATAAYQYCVDCGHQGARRLHRR

SEQ ID NO: 84827 - protein, 171 aa, Zea mays
  Coding DNA Sequence Number=SeqID_41452
MAGGGLPSRVCLLGHGKGAAGFVGFWGSAVKRPRLYAQPRRGGGYATGEIGPVVGVSWIRGGDVMTAIPIRTEVEDAQMDGIRCSVERRVHVVGAGEAESIRSCGFAAEESRRPRSTAWRAELRNVGEKAVERLRRGPRWQETERAGRLPGGGWAVQQKTGVGRIQVPKPI

SEQ ID NO: 84828 - protein, 385 aa, Zea mays
  Coding DNA Sequence Number=SeqID_41453
  Subcellular localization annotation: CTP_CleavageSite=61; ConfidenceScore=5.33e-01
MKPWKETSRSSKTTTSSRCGLAATPSWLPVKAVFIYASFFALCFIVKTMWMSQTYDMARLRHTARKSVIPFLPSCLAERPLRRPVAGQSSHLERLHHRLHEEQDSSFSLQQEIESVRSCSPVLPLEAPPAPPLGALASGVAAGGDPDDGGGDDSSSHDTDFSADHEPEGWVARPVTRDAACGCHFHDALDTLLRRALDRRTWSIEYRCVVYQHSRGVYPDRWEATCLVRHPENSLWGAEVCSEHYSISERDSAEAAMQDAARRALSHYCLVLDGAADGLNLKYYPRRPSGSTGGVIVSPVGEDNPRLSSTVNLAAVLNRELDHALDELSRARAEIAQLRAERAERRHLDDGSPAPVGTQHPYRSPRRGHQSYGNPDCKTKINLEP

SEQ ID NO: 84829 - protein, 425 aa, Zea mays
  Coding DNA Sequence Number=SeqID_41454
  Subcellular localization annotation: CTP_CleavageSite=31; ConfidenceScore=5.28e-01
MRVVHIATTAQEKMKSWKETSKNSKTMTSFRCGLAMARLRHTACKSVIPFLPSRLAERPLPRTVSGQSSHLERLHHRLREEQEHRRQHREQQGSSSPPQQEVESVRRRSSAPQLEAPPAPPRDAPAVGGGPGGDPDDDSDHSTESSEPQEAEGWVARPITRDAARGCHFHDALDTLLHQAFDRHTWSIEYRCVVYQHSRGRYPDRWEATCLVRRPEDDLRAAEAVSEHYSISERDTAEAAMQDAARRALSQYYSLFGGVVDGLNLRYYPRRPTGSTESVVVSPVGEGNPRLSSTVNLVAVLNTELDHSLDELSRARTEIAELRAELAERRHQEGGSPAPVGTQHPYRSPPRGHHTYGSPACADATGVLSKSNVPSRRNIRGSLPPPPPDDSGADVLDANSGSAGYWADSAAMQRAQQQPQPQLQV

SEQ ID NO: 84830 - protein, 52 aa, Zea mays
  Coding DNA Sequence Number=SeqID_41455
MARVACTLRGKRLDDGVSVLSVRKRQTFVASVPRWYPKKKIKTEAVGGRVLR

SEQ ID NO: 84831 - protein, 126 aa, Zea mays
  Coding DNA Sequence Number=SeqID_41456
MGKDKKGQGSPRRSSDKQKHEPSPPSEDFSDSEYSEEEFSFEYEGSPKYPPPQRRSTTQTTPRENSSDSSEEGSDDDGKGDVIGGDSSGGGDGGNDDGGKGGNGDGDGGGKDSGGGGKVNGKAPLA

SEQ ID NO: 84832 - protein, 90 aa, Zea mays
  Coding DNA Sequence Number=SeqID_41457
  Gene Ontology: Mol. function=NAD-dependent histone deacetylase activity; Cellular component=chromatin silencing complex; Biological process=regulation of transcription, DNA-dependent
  Homolog annotation: Hit_ID=Q2QWW9; Match level="QueryCoverage=55%, HitCoverage=13%, E-value=3e-11, Identity=63%"; Hit description =Transcriptional regulator, Sir2 family protein, expressed
MSTESGIPDYRCGPKLSIVWKLDNQVLEVGDRSFGMQQQPDGDVDIDEKFWEQAFEIPSYHQCGLLKRDELRDWSDMTWCVLAKHSCVWR

SEQ ID NO: 84833 - protein, 97 aa, Zea mays
  Coding DNA Sequence Number=SeqID_41458
MWRSALRRRWSDLGSEANSNSWEASPGCGGSARSVNWERGGAMIAELLVDVAISMCSSSAAVTTFHAAIQDEQVTEDPEVQLVETTEQELIEGKLCP

SEQ ID NO: 84834 - protein, 151 aa, Zea mays
  Coding DNA Sequence Number=SeqID_41459
MASLGLQTLKDIGGCSLGWLIIFYPSLIPRAIYGTASIVGGTCGAPLMLHVNGDMRMRYGAERSTIGTMAFEHEVRPLELSQQRLQLVALPGDGRYSTSATPLPGTDTTIVDRKIRVEYLRLLHVSGPFNGPPNFKVSNVDKYKPKQDPGG

SEQ ID NO: 84835 - protein, 167 aa, Zea mays
  Coding DNA Sequence Number=SeqID_41460
MATAECECYLLSMNHGTELGHVDVASVRRYQRRTHLGTKICGADPCYLGVTTFSGKQRVSPHDKLPVPNNEDCNLDPDTYDGEFFQEDGLEGLFEIDLTEAIRMEVDIEMVVDEEDDEVQNENDLVILEGNDINDELAPSYGVDYEMIDSDDESYDPANPDTYEDYF

SEQ ID NO: 84836 - protein, 385 aa, Zea mays
  Coding DNA Sequence Number=SeqID_41461
  Gene Ontology: Mol. function=protein dimerization activity
  Homolog annotation: Hit_ID=A5C5V8; Match level="QueryCoverage=65%, HitCoverage=34%, E-value=4e-28, Identity=33%"; Hit description =Putative uncharacterized protein
  Pfam annotation: Domain name=zf-C2HC_plant; Domain location=26-81; Score=37.6; E_value=4.3e-08; Accession=PF07567.3; Description =Protein of unknown function, DUF1544
MTEGEGQSESASAPEGVSGLRRNSDDVGWEYGVLVDINNKDKVKCILCDKQMCGGVYRLKQHIAQEGNNAKKCQSMKTTKEKLLEAQEKCKKALDEAKRKREEKTIHELELREEVHVSRVGGSEEVTCVGSSEPHKLGPMDKWTKAIDPTATKSESLTQQRLNKELWKERLHDVHKYIARWAFNHAISFNACDNDEFKQMCEAIGQFGPGIEPPTMFDLRGRLLEEEYARTKSLLQEREAEKMKNGCSIMTDAWCTLRRENRLTTNRLNKLVYIQFNNRLINKRAKIKSKKITDVLLSSGTTEAQGFLQENGDHCALVSFRDDEDEEEVMEGTGIPWSVLGDAVGAEEQLELCRSARVRELNEEEFESEEEEFDEDEDEYEMDET

SEQ ID NO: 84837 - protein, 141 aa, Zea mays
  Coding DNA Sequence Number=SeqID_41462
MPKPHHLHRRWEGEHCVQAVQAHLHRAVVHAVASAGQQDPKLGGLLQGRLHLQGSRAARESRQRRTARTETVKDGDNKDDEVMRCLPKEVNVDALLSGDVTGLKGLESALLLRLQHDLANRARDDVLTTAIDICLAIAFDL

SEQ ID NO: 84838 - protein, 54 aa, Zea mays
  Coding DNA Sequence Number=SeqID_41463
MAMMGSTSEKMYLCQNKITRNGSGEMARVACTLHGKRLDGGVSVLSVGVNLIWS

SEQ ID NO: 84839 - protein, 128 aa, Zea mays
  Coding DNA Sequence Number=SeqID_41464
MGCSKSGVPRMRTRLGGRWRAVKSGAGEDSSPRADQQFLGHEAAGAAREIWGRTLATNRVQLGPGRRVRLWRQTSMRRATARVLRLVGNSGGDAWRSRVWVAYLSAPRGARVGRGIGQVDRRDCRCIW

SEQ ID NO: 84840 - protein, 120 aa, Zea mays
  Coding DNA Sequence Number=SeqID_41465
MAGSRDSSEVSPSNIIEPTWETLPADEQLQFEEHKEQMIQEAKAKFLANFKVDRNNKVVRHRAMDPASLRPTPDIPNEMQVHTEPFPMNMIDFEGKKVLESGGREDSRWRGDSEGDHHSL

SEQ ID NO: 84841 - protein, 42 aa, Zea mays
  Coding DNA Sequence Number=SeqID_41466
MRLILRYLFLTCGGESESVVEHVLWSSDRERPPWISTTPAQV

SEQ ID NO: 84842 - protein, 210 aa, Zea mays
  Coding DNA Sequence Number=SeqID_41467
  Subcellular localization annotation: CTP_CleavageSite=27; ConfidenceScore=5.03e-01
MANSMDGSLPIVAQQSWLPTGACGSAAAMELRRAIPNHTACRRPADANSNPGRPLPPTQSSREEIGDAVARATDLVHARGPRRLKKRLCQRVAGEDRGVEAVVPCPNFMAPSVNLARIPAARSGLRGEEDDPRPEGPTCQRERATQLRGFVLQSTFPLIPLLSHPGFGAPRPGHEHNHQVGAHVKCKAYQRGWLELSIAFKVGQNFISNY

SEQ ID NO: 84843 - protein, 152 aa, Zea mays
  Coding DNA Sequence Number=SeqID_41468
  Gene Ontology: Biological process=DNA replication initiation
  Homolog annotation: Hit_ID=A3C861; Match level="QueryCoverage=100%, HitCoverage=30%, E-value=2e-53, Identity=70%"; Hit description =Putative uncharacterized protein
MGFPLVDCQKNFQYISMEVKRKMRDEFDRFLSEHGLTEFYYRSFLKVYGYRSKVSVVDVVYGVIALLESLDAESKDAKESSAAEQFWVAYSALSLGNAGQLRKGMQSSIAIQRVILRQGSSVITKTWFIRSAKKFRWVRLNDPMDTIKLCHP

SEQ ID NO: 84844 - protein, 300 aa, Zea mays
  Coding DNA Sequence Number=SeqID_41469
  Gene Ontology: Mol. function=protein binding; Cellular component =nucleus; Biological process=DNA replication initiation
  Homolog annotation: Hit_ID=Q2QYC3; Match level="QueryCoverage=93%, HitCoverage=53%, E-value=5e-73, Identity=49%"; Hit description=CDC45- like protein, expressed
MVRELRVESFYARLRSTTATAAVSSSPLLILPSVADVDSLCAVRVLAHVLSVDSIRFSIHPVSSAASTRALLASFFGTASSSPLCLILHTTDLSYDFDLSTLVDAYDISVDANSDDHLSGASNPDASGSDDSDADEDGADAAGDDRRKRCRLFDDPDLVRFFGRLRREYYHLSTFHGKPSGCLMYDLAHAMRKNTNKLLWLACVALADQFIHDRITKERYQATVIELEQHINGSGNLDLSSAGNVVTLKYDTKIRAPEASRITYEDDPRLMLLWEWSLFDSYNTPSTPRPTVLTPGISIG

SEQ ID NO: 84845 - protein, 87 aa, Zea mays
  Coding DNA Sequence Number=SeqID_41470
MPDFDVTDDEATRGKIRVPAMLLGQAEESKEMERATRNKYYRCESGLDVTTDTMCKGEVMMKKESLNMVIEMRYPIKIDLGRVDKPW

SEQ ID NO: 84846 - protein, 114 aa, Zea mays
  Coding DNA Sequence Number=SeqID_41471
MWETGGGAPGGTTGGGEALGGAEHGGGVRGVEGGGCRSLRSCRCGCLNSGNLIFVLLLYSTGRTKLRKKTQLKTWNAGFGSCLPGFEECELVPCQIYGPDDGQSTSTTEVKFVY

SEQ ID NO: 84847 - protein, 114 aa, Zea mays
  Coding DNA Sequence Number=SeqID_41472
MAPKTRLGCCQPHSVEWHSSRSDAGDAVFLSGRARVRIRCQAILALNAPAIRSVGVAIRPRLLLDEDWASSEPKLCADGGYQLRLGVLGVPLIMVPDKYHLEIVTIYLNRCLFE

SEQ ID NO: 84848 - protein, 83 aa, Zea mays
  Coding DNA Sequence Number=SeqID_41473
  Subcellular localization annotation: CTP_CleavageSite=43; ConfidenceScore=5.10e-01
MTPNIPPPPQWIQFASTPAPGLGTQQFNTPPTHILAPGDRVTPDEAGGSGSDPTAGTGFVESLFVFPPPAGGSDQSSNHVGDV

SEQ ID NO: 84849 - protein, 114 aa, Zea mays
  Coding DNA Sequence Number=SeqID_41474
MASPSVAVVDRRVGAPTDDRVVGTADDGGLGWQRAGDSGGWLGVVACWGRRLVGGSSGWGGRLGTVGWWRRLGATALGGGGGGILRAGGGVWKGRNEMSPRVRGGWLIKEYEYK

SEQ ID NO: 84850 - protein, 259 aa, Zea mays
  Coding DNA Sequence Number=SeqID_41475
  Gene Ontology: Mol. function=hydrolase activity; Cellular component =vacuole; Biological process=lipid catabolic process
  Homolog annotation: Hit_ID=Q9XE77; Match level="QueryCoverage=97%, HitCoverage=59%, E-value=1e-130, Identity=92%"; Hit description =Patatin-like protein
  Pfam annotation: Domain name=Patatin; Domain location=2-85; Score= -32.4; E_value=0.0053; Accession=PF01734.13; Description=Patatin-like phospholipase
PGFLTPVGEPAGPGEGSQPIIFSTYEAKNDTLKNAHLSDICISTSAAPTYFPAHFFKTEATDGRSREFHLVDGGVAANNPTMVAMSMLTKEVLRRNPDFNAGRPTEYTNYLIISVGTGSAKQAEKYTAPQCAKWGLFQWLYNGGFTPIIDIFSHASSDMVDIHAAVLFQALHCEKNYLRIQDDTLIGNTSSVDIATKENMESLIGIGQDLLKKPVARVNIDTGVYEPCSGEGTNAEALAHFAKKLSDERKLRKRNLDSY

SEQ ID NO: 84851 - protein, 174 aa, Zea mays
  Coding DNA Sequence Number=SeqID_41476
  Pfam annotation: Domain name=C1_1; Domain location=24-78; Score=0.6; E_value=0.023; Accession=PF00130.13; Description=Phorbol estersdiacylglycerol binding
  Pfam annotation: Domain name=C1_1; Domain location=87-132; Score=0.5; E_value=0.024; Accession=PF00130.13; Description=Phorbol estersdiacylglycerol binding
  Pfam annotation: Domain name=C1_2; Domain location=42-69; Score=10.7; E_value=0.2; Accession=PF03107.7; Description=C1 domain
  Pfam annotation: Domain name=C1_2; Domain location=95-122; Score =13.4; E_value=0.099; Accession=PF03107.7; Description=C1 domain
  Pfam annotation: Domain name=C1_3; Domain location=41-69; Score=16.8; E_value=0.0056; Accession=PF07649.3; Description=C1-like domain
  Pfam annotation: Domain name=C1_3; Domain location=94-122; Score =10.3; E_value=0.033; Accession=PF07649.3; Description=C1-like domain
  Pfam annotation: Domain name=PHD; Domain location=42-116; Score=-4.0; E_value=0.039; Accession=PF00628.20; Description=PHD-finger
  Pfam module annotation: Pfam domain module=C1_1::C1_1::C1_2::C1_2::C1_ 3::C1_3::PHD; Domain location=24-78::87-132::42-69::95-122::41-69::94- 122::42-116
MPHLVEDLFCDDPDLLFSAVHPLHRLRRREAAGADGSGGGGGCEVCSEAVERACYACVACGVAVHPLCARMPGSARGPAHPDDGDGKQKQKQAAGCGSCGRALGAWRYRCVTCAAELHPRCLVPAVDQCRGAGEGEAGRAGSAASSCCLGLVHDLTRCLATLGTALHYRGYYNG

SEQ ID NO: 84852 - protein, 313 aa, Zea mays
  Coding DNA Sequence Number=SeqID_41477
  Gene Ontology: Mol. function=hydrolase activity; Cellular component =vacuole; Biological process=lipid catabolic process
  Homolog annotation: Hit_ID=Q9XE77; Match level="QueryCoverage=93%, HitCoverage=69%, E-value=1e-161, Identity=95%"; Hit description =Patatin-like protein
  Pfam annotation: Domain name=Patatin; Domain location=4-139; Score =66.4; E_value=9.8e-17; Accession=PF01734.13; Description=Patatin -like phospholipase
LPNGSSKFILWFVVVHRAGFLTPVANLLGLVRGPKYDGVFLHDKIKSLTHDVRVADTVTNVIVPAFDVKYLQPIIFSTYEAKNDTLKNAHLSDICISTSAAPTYFPAHFFKTEATDGRSREFHLVDGGVAANNPTMVAMSMLTKEVLRRNPDFNAGRPTEYTNYLIISVGTGSAKQAEKYTAPQCAKWGLFQWLYNGGFTPIIDIFSHASSDMVDIHAAVLFQALHCEKNYLRIQDDTLIGNTSSVDIATKENMESLIGIGQDLLKKPVARVNIDTGVYEPCSGEGTNAEALAHFAKKLSDERKLRKRNLDSY

SEQ ID NO: 84853 - protein, 121 aa, Zea mays
  Coding DNA Sequence Number=SeqID_41478
MEPCGRTAVGAVESLLTSPCFRKGLRAVVVMEHAGRHHYLFTGASHMGRRIRCQAILALNASAIRSIGVAIRPRLLLGEDWASDEPEGWRGVETGQAGLVKWCMGRLGLGWSDGVGGRLGN

SEQ ID NO: 84854 - protein, 103 aa, Zea mays
  Coding DNA Sequence Number=SeqID_41479
MEVGHDGARWDDATGPHLLFRSAYTRCRAKIERLRGIITGCGDKETAAHGDRQIGDDVQHRWLCQRAVNGGRCIVLALLRVKKKEKGVEAYLQEFYDFDEFED

SEQ ID NO: 84855 - protein, 43 aa, Zea mays
  Coding DNA Sequence Number=SeqID_41480
MEFGKKLPRLSKSQSYRVSKFGAPFREKGIRATSRSEGIFMSK

SEQ ID NO: 84856 - protein, 282 aa, Zea mays
  Coding DNA Sequence Number=SeqID_41481
  Gene Ontology: Mol. function=zinc ion binding; Biological process =intracellular signaling cascade
  Homolog annotation: Hit_ID=A5B3C2; Match level="QueryCoverage=64%, HitCoverage=27%, E-value=2e-14, Identity=29%"; Hit description =Putative uncharacterized protein
  Pfam annotation: Domain name=C1_1; Domain location=117-171; Score =3.0; E_value=0.012; Accession=PF00130.13; Description=Phorbol estersdiacylglycerol binding
  Pfam annotation: Domain name=C1_1; Domain location=195-240; Score =0.5; E_value=0.024; Accession=PF00130.13; Description=Phorbol estersdiacylglycerol binding
  Pfam annotation: Domain name=C1_2; Domain location=135-162; Score =14.5; E_value=0.075; Accession=PF03107.7; Description=C1 domain
  Pfam annotation: Domain name=C1_2; Domain location=203-230; Score =13.4; E_value=0.099; Accession=PF03107.7; Description=C1 domain
  Pfam annotation: Domain name=C1_2; Domain location=73-102; Score =12.4; E_value=0.13; Accession=PF03107.7; Description=C1 domain
  Pfam annotation: Domain name=C1_3; Domain location=134-162; Score =21.3; E_value=0.0016; Accession=PF07649.3; Description=C1-like domain
  Pfam annotation: Domain name=C1_3; Domain location=202-230; Score =10.3; E_value=0.033; Accession=PF07649.3; Description=C1-like domain
  Pfam annotation: Domain name=C1_3; Domain location=72-102; Score =24.3; E_value=0.00045; Accession=PF07649.3; Description=C1-like domain
  Pfam module annotation: Pfam domain module=C1_1::C1_1::C1_2::C1_2::C1_ 2::C1_3::C1_3::C1_3; Domain location=117-171::195-240::135-162::203 -230::73-102::134-162::202-230::72-102
MEAAGVAGGNTTRPRAEVARRRERRGGTHRQRRRRGKAQLPIASMCGSKKSVAYFAHDRAHRLLPIAGGDDFTCGGCLVAGAGPRYRCAHPGCSFTVHEACARRSPRTLRSAVHPLHRLRRREAAGADGSGGGGGCEVCGEAVERACYACVACGVAVHPLCARMPGSARGPAHPDDGHEAWLVRVASPPDDGDGKQKQKQAAGCGSCGRALGAWRYRCVTCAAELHPRCLVPAVDQCRGAGEGEAGRAGSAASSCCLGLVHDLTRCLATLGTALHYRGYYNG

SEQ ID NO: 84857 - protein, 93 aa, Zea mays
  Coding DNA Sequence Number=SeqID_41482
  Gene Ontology: Mol. function=hydrolase activity; Biological process =lipid catabolic process
  Homolog annotation: Hit_ID=Q9XE77; Match level="QueryCoverage=89%, HitCoverage=21%, E-value=8e-32, Identity=79%"; Hit description =Patatin-like protein
MSTSLLPVFFQAFHWEKNYLRIQVQLDIATKENMESMIGIGQDLLKKPVARVNIDTGVYEPCSGEGTNAEALAHFAKKLSDERKLRKRNLDSY

SEQ ID NO: 84858 - protein, 317 aa, Zea mays
  Coding DNA Sequence Number=SeqID_41483
  Gene Ontology: Mol. function=hydrolase activity; Cellular component =vacuole; Biological process=lipid catabolic process
  Homolog annotation: Hit_ID=Q9XE77; Match level="QueryCoverage=99%, HitCoverage=78%, E-value=1e-165, Identity=88%"; Hit description =Patatin-like protein
  Pfam annotation: Domain name=Patatin; Domain location=26-233; Score =274.6; E_value=2e-79; Accession=PF01734.13; Description=Patatin-like phospholipase
MESNASSNCATVPQPPPSTGKLITILSIDGGGIRGLIPATIIAHLEAKLQELDGPDARIADYFDVIAGTSTGALLTSMLAAPDQNNRPLFAAKDLNTFYLENGPKIFPQKKAGFLTPVANLLGLVRGPKYDGVFLHDKIKSLTHDVRVADTVTNVIVPAFDVKYLQPIIFSTYEAKNDTLKNAHLSDICISTSAAPTYFPAHFFKMEATDGRSREFHLVDGGVAANNPTMVAMSMLTKEVLRRNPDFNAGRPTEYTNYLIISVGTGSAKQAEKYTAPQCAKWGLFQCLYNGGFTRSSTFFSHASSEMVDIHAAVLFQ

SEQ ID NO: 84859 - protein, 201 aa, Zea mays
  Coding DNA Sequence Number=SeqID_41484
MAKGVSVSSGRWILHKGPRLNLVIGKPHEEQSSPGGVPAGEEPCRTPRTPDAPQFYPRTPVAEAPGPRHRAPRASVASPMVRCRLHGEGAERGRALEMVPNAASCRRTVGGHRAEVMVDRDFDTDDMPSSHTYTQRTWRHRKGWFEIMCWLDGRRGLGRGAYMHGRVAGGAKDPGIRYSTKRPGISSVHLGKELLTNGTHA

SEQ ID NO: 84860 - protein, 308 aa, Zea mays
  Coding DNA Sequence Number=SeqID_41485
MQARVLTLEGGSNTFGIDDTFGEARPSLGRRRGPRVSAPKDDVITTPGQSLPGTSPGIRPERAARPVRTTPLHGGRPAEQQKADERLTAACSDYNGDGPHSGWPNCSSAGLRGSSALRQIPTQILPGEWGTGLRVKAPSRVVHPCTRRGTRPLAGGAAGSQADEPDTLEVTTPAVDQPRVVEVRAARGASERPLPRMPWERVTHEPAREVERRLSPAPTPARMMNILEAEGGTKIAARIAPPHPRSWWSPSWVTTSGGKQPGCMMKILEVERWLKGTNSCGVAFLQQRGEKTAVSPHPGSRKVGRHGA

SEQ ID NO: 84861 - protein, 365 aa, Zea mays
  Coding DNA Sequence Number=SeqID_41486
  Subcellular localization annotation: CTP_CleavageSite=32; ConfidenceScore=5.40e-01
MFQGPPLRRGGWVPHVMQTGSKRKKPNRRAWRAQPPSGYKRPSTFAQTNGRKEASSHAGGMQPRQVDTLLRLPTRQHGGPGPRVTQPARRMLHAGNCTATCDTITPLRLRNQCRDSRRPSGASLARRSMRPKRLPRQLLAPSHYLRGWTGGASGRRSGRRFAFAETTAPKKRPGKGDTPKGILPREGTRLRAPPTDQRFEGWPSAGFNSRLRSRGPYTHYWSEAPEGFTVASDAERGMTRGDQVRQITRRYFWACLWAPSQPPTNGARTSTRITRLQLTGGTMFNAHRGGSGAALANPAPAKPLTASTYQPENLDPDRAPGLRAQTRAKPRKMANSAPPDPGLGLGLSPGRRRTPLRPTQGSDSG

SEQ ID NO: 84862 - protein, 421 aa, Zea mays
  Coding DNA Sequence Number=SeqID_41487
MQAACNCTKGMHPFDFDASSMGPRHTRHVTGAPVTTCEKLHRHLRQYRAFSAVEPVPRLEATLRMAQQCQPSTSITGQSAAGEGATVDMAKSGPAIMAAAGGWKQQSNRLDRERGYSERDPSPRRKRAPSPPTDQRLAPRKGSIAASGHSGSAPTTDQGFEGWPPEGFDSRLRARRARDDSWYVRYMAEARATLPRSRLRPLKGHDLASPEPSLGKDDRPRRIHASPEGPLKQWAHLRLARSPARAGFVEKQPWPDRLASRPDRRSIQCKDHLTPCLDARSSVDKAEENNAACPAPTAVPPTRVRLTAAKSSLGRHRKLRLARPQGSDSTSTPEDGFRLARPQGSDSSLDLGRRSPPRPTPGLGLSLDLGRRSPPRPTPGLGLSLDLGRRSPPRPTPGLGLSLDLGGIIASPDLGLGPTTL

SEQ ID NO: 84863 - protein, 344 aa, Zea mays
  Coding DNA Sequence Number=SeqID_41488
MHCALPPSEPPDEGHPRCFRLAAVGGAQLRGSWYLSAIARLQGFSSGSPAASPRRWSPKTVTTSLMVGRSKPGCGLCPALSFKDLHRPCWGGGQAEPELYLPYGPAGHLLLQHSGERAPTGLAGGGGADFDNVGPIGHKRHQLQHARFAGSAGSGAASGATSHRWAECGYLPAVRAVVAPCAPGGPPKTSRTARAAFVFLGCPAFLRYDASARRSVLAHPGGPEWGSAGGQMATVIGAEVVAAEEVLVADEIAATICAPGLRLFGFDSLSSPLEWGHGRGPYRSSVCPEVIAAAVWPPGAEVVVAAAGVGGVEPPGILSSCRPSNVGVVRTYGGGTGVPSVMAP

SEQ ID NO: 84864 - protein, 233 aa, Zea mays
  Coding DNA Sequence Number=SeqID_41489
  Subcellular localization annotation: CTP_CleavageSite=61; ConfidenceScore=5.90e-01
MSPAHAPSSFLNPARTRSPSLTSFCPLSVSVVLSHRRTSSPEKRPAMPSTQSSRRGIEPPRAPSRGEEPFPVLWLPRFCLTVVNPRSSELCLAGLPHLYDVRSIQPRPMLAFWLWVFPLPHQSWCQPQRTLFPLLVAGIARQSDPDPPRAPPLSFTRFQPRSQSRNPAIEFANPLSPVLANSSDPRPPGARACPISGDFTAADEATLAAVPLTPLVPDPNRPQIQWPGSLDTC

SEQ ID NO: 84865 - protein, 179 aa, Zea mays
  Coding DNA Sequence Number=SeqID_41490
MAHRHVRVPGGSKAPVGGKDDEEPRTPRDEAVTIDQPARAHGRGGVAGSFWPWDPRDGRRPDLEKTNPPAAAALPGCLRAPPSGSGRLVFLAEAEARWMGRADAIGIRRRRLAGPLDLLAAGSRSVGLAATATASESPFPFGSERQAQKSEGARSSHADASICHAMRLIARCLCFLYQL

SEQ ID NO: 84866 - protein, 109 aa, Zea mays
  Coding DNA Sequence Number=SeqID_41491
MEQRITRSTLAGGRVESGDRELASPAKQTSIPRSGSFTEVCAVFSEGWTGLGKALLAGLRWQGDRTAADTPCTGKRGGFGLRLLSVLQLLYLAQAMIIRLSCPFGHTFI

SEQ ID NO: 84867 - protein, 56 aa, Zea mays
  Coding DNA Sequence Number=SeqID_41492
MSCAFDDYYIKDYDVILAPEVTQRSTNSNDHSSSSGIALAHLKKWLHLVSQSQSRF

SEQ ID NO: 84868 - protein, 212 aa, Zea mays
  Coding DNA Sequence Number=SeqID_41493
MEHSLDIPGRYSPFSLKFRELEWVFRGARTRAENNDHVFDALWARQSTPDARPACPASRQSPAGAMARASAYKAPRDLDRTPPHALDLTGAQNHRRLPVHGVPAAARSPCHRRPANRTLPNPVQPSEKTEHTSVKLPERGIGVWFAGEASPRSPDSTRPPASVDRRTCRRREHPPAHVDRTIPATPAIKSYIVVTARTSRSQPRPLPDLSHR

SEQ ID NO: 84869 - protein, 72 aa, Zea mays
  Coding DNA Sequence Number=SeqID_41494
MARVASTLRGKRLDGESLIFDKPYLDSLKASISLRVFLLCRVRKQPTFVASVQRWYQRKRTKTKATGGKALR

SEQ ID NO: 84870 - protein, 92 aa, Zea mays
  Coding DNA Sequence Number=SeqID_41495
MARMARSDVAGAPRHGQRGLVQQARRGCYIKGFGKNVSKLTVGIYIAQINVAFLTMITKKVKVNINVLGLRMQHGILGNTYGTRANAEQGGT

SEQ ID NO: 84871 - protein, 79 aa, Zea mays
  Coding DNA Sequence Number=SeqID_41496
MAVEVSEALYAKAVSPDLLMGNRWGRLMAAPGTVAFFGSMSKVDALPKDLWKRKAPTSYILEEQLKDDQMKLELIKGEC

SEQ ID NO: 84872 - protein, 176 aa, Zea mays
  Coding DNA Sequence Number=SeqID_41497
MVAGTGVPNCTRRRWRARVRNSLSEGIWEYTAATNPPLLIVTEAREIVGQSASSGSLAARVARVVDADAECDDRRALGGSRTQGGSVAAARWVHGNSDWRSGCACRWMTGRARVSVLCWAERVERKSECAEEKILGPGAVERNWGVVCFAVVPSMGLIVCGSLCRGWIAPWGVKVA

SEQ ID NO: 84873 - protein, 296 aa, Zea mays
  Coding DNA Sequence Number=SeqID_41498
  Homolog annotation: Hit_ID=Q6YT10; Match level="QueryCoverage=85%, HitCoverage=81%, E-value=4e-66, Identity=54%"; Hit description =Putative lateral root primordia
  Pfam annotation: Domain name=DUF702; Domain location=88-238; Score =283.7; E_value=3.7e-82; Accession=PF05142.3; Description=Domain of unknown function (DUF702)
MAGFPLGGGGHGRGDHHHPHVNPSSGSGSDSAAAAYLYTAAAAPRGGFQLWPPHPAQEHHHHFYAPNIIRFADDPAAGSSRGGRGSASGAGAGTISCQDCGNQAKKDCVHMRCRTCCKSRGFDCPTHVKSTWVPAAKRRERQQQQATGAAEPSKRHRDAATGAQPSSTTATTTSSGEQQQMAVVAERFPREVSSEALFRCVRLGPVDEPDAEVAYQTSVSIAGHVFKGILHDVGPEPSTVAAGGGFRHATEGSSPSTAAAGEGSVVGPVSSSAVVMDPYPTPGPYGAAHFFHGHPR

SEQ ID NO: 84874 - protein, 140 aa, Zea mays
  Coding DNA Sequence Number=SeqID_41499
MGKSKKGSGSSPRSGDKRKRELTPPSEDFGDSEYSEEEFSSESEGSPAPISPPASSDDSDDSQGLTAEVWTYIRAVERAGLEGSNESEYSSDEEDSSDSSEEGSGGDGGDGGDDGGDGDGGGDSGMGGDGGSKGSNKTSG

SEQ ID NO: 84875 - protein, 86 aa, Zea mays
  Coding DNA Sequence Number=SeqID_41500
MHISYALHSLDCNLADREYVLIPEQGTVQEEDQEQAPEAAIEDLPAALAIEGVIQDMVDGVTWPTTLPPGWTVEWDAAPAGEEHEE

SEQ ID NO: 84876 - protein, 247 aa, Zea mays
  Coding DNA Sequence Number=SeqID_41501
  Gene Ontology: Mol. function=cysteine-type endopeptidase activity; Cellular component=lysosome; Biological process=proteolysis
  Homolog annotation: Hit_ID=UPI0000D57335; Match level="QueryCoverage =48%, HitCoverage=35%, E-value=4e-22, Identity=45%"; Hit description =PREDICTED: similar to Cathepsin L precursor (Cysteine proteinase 1)
  Pfam annotation: Domain name=Peptidase_C1; Domain location=50-204; Score=-8.2; E_value=4.8e-11; Accession=PF00112.14; Description =Papain family cysteine protease
  Subcellular localization annotation: CTP_CleavageSite=18; ConfidenceScore=5.05e-01
MGIGGNTQDLCEQKTGVRKNSQRRPSTPFRGGGAPFGTDVPFGPPGPDMLPTFVNWSTYGAVTPIQDQGDCGSYWAFGVTGLIEAAHFIRNKELIKLSEQHLIDGNNLRNFGCKHGSCSEALDYIMRNGGIINAESYPYKEAQGPVRSITVRQQVILAYLEIRCALIWALFGIALALGNLVEQLGRGHGDEEVVPKDTMVVVAKVWMTSGEGRDHGRAHLRLKSVVTTLVEDGLLFVLKSNTTLFGL

SEQ ID NO: 84877 - protein, 707 aa, Zea mays
  Coding DNA Sequence Number=SeqID_41502
  Gene Ontology: Mol. function=cysteine-type peptidase activity; Biological process=proteolysis
  Homolog annotation: Hit_ID=Q8S456; Match level="QueryCoverage=99%, HitCoverage=98%, E-value=1e-127, Identity=36%"; Hit description =Putative uncharacterized protein 163K15.6
MRKVDRPPTNPKRLIIESSQECFSVDIPCSTDMADPTNTSSDGDPPQHRKTGVAAAAENITMPNVDDDDDFEPPKKKCNISMDAPNKTQKLNIRCNPGDVLASIQILNERQRQAIVRKGFSSILDMTIDAIGCRTLLCWLMQKLDPRDMTLRIGPDKELKNTKQTVHQILGLPNLGGGKPLNINEANAAATLRASLNISKDEFVISKLQDRLRLGQDDDISIRCFFLILFNRLLFPTASWSISFNEVVLTEEMERFPQIDWCHLIFSDLCEAAQRWHNRSINNVSATIYGCSIIVLLYYLDHLHHAAAPNNKNGTPRIKYFNKNIIRALSMADKRKPRQGGEPFGVCPFPMRPETFDEDPNQHDRLPNIIIQLPLMQDLMANKIQMLPVHQRQKFQATLIDYDLEVGKIFASIKQCLNTIGTKQSNLAATFGELIDEVLRADESVTPNTQGQTVVGGTVENDSGPVFDKTPIGSVSAPGLFLSELECARALRAYLCSRFIELDRNIIDFGEHRANCCDIQQSFADGACLDNVFMQCFIECVRDDWSKHIPPLNAHQLILDVNVGIGRIHVLDSNPYGPEMGGTIWKNYHCIPMDLGDRKVSWARLMMSRLNLAIQNARPRSALPAFLKYPIELMNNCPTMKLGSNDCGFFVMRYMQNYDYMVGAMNAVIDPDYSEDIRSLVLHYLIFHRLNRNSFVVSHLDRFKFSQ

SEQ ID NO: 84878 - protein, 91 aa, Zea mays
  Coding DNA Sequence Number=SeqID_41503
MKMKINRMSHLKKRTRIKGEMKLIKTRKMIKKFRVKDHHTQESTKQFKEITPVEDALRDPDWVLAMQEELNNFTRNERQICQRSATVVFAV

SEQ ID NO: 84879 - protein, 176 aa, Zea mays
  Coding DNA Sequence Number=SeqID_41504
  Gene Ontology: Mol. function=transferase activity
  Homolog annotation: Hit_ID=Q6QP44; Match level="QueryCoverage=33%, HitCoverage=7%, E-value=1e-16, Identity=72%"; Hit description =Putative aminoalcoholphosphotransferase
MSCAFDDYYIKDYGVILALEGMSSKMDALAKEPPLVPARESIQSSVPALDTSNVIYGTSRIRLRHLLSSTHDLAQRLNRVWNGLLDAIRKMQVSADNLRRLSRRNHVPEYVEHVHKNSLVNAMRAVNEIAEGLDTVSTVLEEVLIGPQPLLEDYEALGLYDDFQCDGDVDGDYNED

SEQ ID NO: 84880 - protein, 117 aa, Zea mays
  Coding DNA Sequence Number=SeqID_41505
MYNVIGLQIVQQGWMVRVYFASFLQFEVLINDDFILLFFSFGAICSRTRSHQVLEQEKQLRTMRAAFGLEGENVHKKVGVETDVEKLLHGSRERWAYSDADYGHTQGDKDVEEFYPN

SEQ ID NO: 84881 - protein, 112 aa, Zea mays
  Coding DNA Sequence Number=SeqID_41506
  Subcellular localization annotation: CTP_CleavageSite=9; ConfidenceScore=5.01e-01
MGRIPRSPKADLKKVSKVKVLSKVKLLSKIMVLSKLKLLFKLVQVEVSLPVQSPIIRTRESILQDNLIRFQMFSICGPSVCAAVQLELNQCPRLPAGPRLTDGPLELDLAWS

SEQ ID NO: 84882 - protein, 409 aa, Zea mays
  Coding DNA Sequence Number=SeqID_41507
MVTRDGERALTGLAEGADFDNAGPIGRKRRQLQHAWFAVSAGSGTASGATSHHWAECGYLPAVRAAVAPRAPGGRPRRRALLGRRSCSWAVLPSLRHDAFTRRSMLARPGGLEWGSTGGQVAAVVGAEVVAAEEVLVADEIAAATCAPGLRLFGFDSLSSPLEWGRGRGPCRSSVYPEVIAAIVWPPGAEVVVAAAGESLGSVGLATQGFSRSVKENPRPLCDEPEPEAAVLASSGDSWLRLRSGRSSRLLGPGSYRRSWRRWLRRSVDIFLRGGDPPTVLLSEAGSDSAEGGVDAEGAAAPSLTSEPAGTVYLYRIAHPSETYFSRKVMSEDSVIDIVEKAQKIVSAEKFSSVKTCSVSEIAYPSVSYLSQKVMSEDPTIEVVEKRERRSDRKTFFEENFDAEGVPPF

SEQ ID NO: 84883 - protein, 182 aa, Zea mays
  Coding DNA Sequence Number=SeqID_41508
MEGFLHYKILAVSLLHCNHQYHADFDICHDLHGLIIEEHVSHLPIEVHSYIVSHQNNPRVAGVGDDHEVPLFKDGQSGATALDRVQAAAAPELAEHSDTCGHVVLLPEVELVVAKLLFVDDERRQPRRVMHVGMGFAGRGRMRKTVRGGGNGNGRTTQNGSREDSVGMGMAEHGMAAYPLPP

SEQ ID NO: 84884 - protein, 71 aa, Zea mays
  Coding DNA Sequence Number=SeqID_41509
MNTINDIELHLYLRLDRRVRSIARVSREGEETEATETTPISEVIERSGLVVTKGVVDEGVPDAKAEQIVAE

SEQ ID NO: 84885 - protein, 340 aa, Zea mays
  Coding DNA Sequence Number=SeqID_41510
  Subcellular localization annotation: CTP_CleavageSite=61; ConfidenceScore=5.85e-01
MASSPMLAVSSIPLPPPSAYKSTRPDPVLTTPAPAISTAFPRAIRASVVVLPSSLRGRGIRSSGTYSFGRRARTRPLGDKPLVPGKLRRRQVHFSLDALFTYFSLPLPKPGMWDGNRIAWVMKAGEHREDKEGESFVRFGHGGGLTPFGITAKPRDLRDPLRYLPPSNKNTPTWRKRIQALSGGDPTEDDPTIVYMVGYLHTLDNHYDDLSSQCTHLNSRVESLEQQVKELKKEKASLQECLDIAEGEEANTHEAYRTLKMDYDKKLRKLAPKKKIQKKTTNQGCQTEKKKKTPPAPPPPRIDDWSDAEDISLASLDDLLKEFGDTLEKEFGSTSGNALV

SEQ ID NO: 84886 - protein, 449 aa, Zea mays
  Coding DNA Sequence Number=SeqID_41511
  Homolog annotation: Hit_ID=Q5ZBN9; Match level="QueryCoverage=67%, HitCoverage=61%, E-value=2e-83, Identity=56%"; Hit description =Putative uncharacterized protein P0704D04.8
MAKTGKTNGTSDNGENDDSNHNIHTSVPTTEISPLFSTYRLAKAAPTATLGEEVHTVRILFLSVTIMLFVSVFVAIYVGEQHLLPSRSVSREQPFGEQQQVSACSRYPGGFKVHLEHEQWDIPLPMAFHPATLFLLLVLAAVAPIPSNARHIITFAPSRAVNPASLAWDPTAQHFVVAGGGDAVLSVSDAGVTESIVSSGASCVAVDDRRRRLLVASPGSVSAFDLRSPRPHRLILSTPVADPAPPGGIAVDPHTGNAFLTVGARIYKLSVEGELATLASAPALGSVPLASLTAHVSRGFLLVGQPSSGSVLRVDMEDGATRTVSCALTPTAVAVRTDGAVAVGGAAGLRLVVSNDGWASCGVRDEAAPAPDGPVAAVAVRERRRVYALVGAAAMDGGNKWRIEEASWKSESEGEMVVVLVFVGVALTIFMFWRFQMRQLAGNMNKKIR

SEQ ID NO: 84887 - protein, 199 aa, Zea mays
  Coding DNA Sequence Number=SeqID_41512
MGVAKGRLVTVVGDERLPPTSINSLPASLVSSHISRPFVAYSPLFSSLPINYGKEQEGQKFVAPLWRQAEARAKSPSEDFGDSKYSEEEFSSESKGSPIYASPSGIAVEVWTYIQAIERSGLEGSDESEISSYEENSSYSSEEGSGGDGDNEGDGGDGGDDGGGGDGDDKGDDDDGKGDGGSGKGDSGSSKASGKAPLA

SEQ ID NO: 84888 - protein, 194 aa, Zea mays
  Coding DNA Sequence Number=SeqID_41513
  Subcellular localization annotation: CTP_CleavageSite=43; ConfidenceScore=5.60e-01
MILDNSFTLDNTFTLDTFFKFTRRRNNLAYSPTRSDFSTQPPRDMLRRAATTATLNGRAAAWFRHLTRRPMTLPPAHLGRHHLQAQLRPPRVVWVPPLPHLCGARGYSYTRMARRIPIARPDGYSSSDGEAEDPDAGEAGEITEPVGEGAEGDNSEGSETEVEGFMLDLSSDNLFGDSDGDGDGDEEGTEEGGK

SEQ ID NO: 84889 - protein, 814 aa, Zea mays
  Coding DNA Sequence Number=SeqID_41514
  Gene Ontology: Mol. function=calcium ion binding; Cellular component =nucleus; Biological process=regulation of transcription, DNA -dependent
  Homolog annotation: Hit_ID=A2XDE8; Match level="QueryCoverage=98%, HitCoverage=81%, E-value=0.0, Identity=70%"; Hit description =Putative uncharacterized protein
  Pfam annotation: Domain name=Ank; Domain location=472-504; Score=9.0; E_value=1.7; Accession=PF00023.21; Description=Ankyrin repeat
  Pfam annotation: Domain name=Ank; Domain location=505-537; Score =35.4; E_value=2e-07; Accession=PF00023.21; Description=Ankyrin repeat
  Pfam annotation: Domain name=IQ; Domain location=663-683; Score=24.8; E_value=0.00031; Accession=PF00612.18; Description=IQ calmodulin -binding motif
  Pfam annotation: Domain name=IQ; Domain location=686-706; Score=29.0; E_value=1.7e-05; Accession=PF00612.18; Description=IQ calmodulin -binding motif
  Pfam annotation: Domain name=TIG; Domain location=271-356; Score =15.6; E_value=0.027; Accession=PF01833.15; Description=IPTTIG domain
  Pfam module annotation: Pfam domain module=Ank::Ank::IQ::IQ::TIG; Domain location=472-504::505-537::663-683::686-706::271-356
MFGYHNQGGKSTSRIRGHDDMLQAARTDSPLSQLPSQTTEGGNSLSGQASEYEETESGNLQGFPATVTNTDIYSRQDALPVTLNEPGLAIEFNGADNQLDPSSLNGLVKPFLQMSTPQSTVPSELFPFTEEHGNESFTFHEVYSNGLSIKDAEIVGTNEESVWKLPGAISSIPSEDSFQQNDRSLEETISYPLLKTRSSNLSEMLKDSFKKSDSFTRWMSKALGEVDSQIKSSSGVYWNSEETNNIIETSSCDQLDQCTIDPVLAQEQLFSIVDFSPSWTYAGSKTRVLINGKFLNSAELKRCKWSCMFGEVEVPAEISADGILRCYSPSHKPGRVPFYVTCTNRLACSEIREFEFRPSVTQYMDAPSPHGATNKTYLQMRLDNLLSLGHNEYQATVSNPTKEMVDLSKKISSLMTDNDSWSQLLKLASDNEPVTDDDQDEFFEKHLKEKLHIWLVHKASDGGKGPNVLDDEGQGVLHLAAALGYDWVIRPAVSAGVNINFRDAHGWTALHWAAFCGRERTVVALIALGAAPGALTDPTPIFPTGSTPADLASANGYKGISGFLAESSLTSHLQTLDLKEGKGSNPPEISGEGLQAGSMGDSLGAIRNAAQAAARIYQVFRVQSFQRKQAVQYEDDNGAVSDDRAISLLSVKPSKPVQLDPLHAAATRIQNKYRGWKGRKEFLLIRQRIVKIQAHVRGHQVRKHYRKIIWSVGIVEKIILRWRRKGAGLRGFRSTEGATVGSSSNLIQNKPEDDYDFLQQGRKQTEERLQKALARVKSMAQYPDARDQYQRILTVVTKNPRIEGIEVFFFCFLA

SEQ ID NO: 84890 - protein, 123 aa, Zea mays
  Coding DNA Sequence Number=SeqID_41515
MAEARRHAVAPQLVLGFGLELIACNTSDWVANPELLKSLARGFLCSKQYLSGKVHLKEILRLQTKNLEDLNTFDGDALANEVEINLDMLHMLVLDGVNGEVDRPDLVAVDKGTPGERTLELMQ

SEQ ID NO: 84891 - protein, 301 aa, Zea mays
  Coding DNA Sequence Number=SeqID_41516
MAAGRLAHEATAAGAGRGRGEARPWPARGGLDEVGGDGRRSGAKEGWRGLAGDCWSSRPWTRGPSAGGGRWIPTGAREEGMGRSVPQEGTTNLPGTTAPEGPGAKGSQKANEKDQERGSTKRAGDNRRHPEALHYNSPDCPVYTGQCPVLQGEATLNSPASRIRSAIIHRTCPVYTGLSGEPAEQRLLRRQRSHAAAFNARQSAQKSGTRVTAHRTVYSTCPVHHRTARRPHQSELQRSNPNGRVTWLAHRTVSGVHRTIRCAMRQQASSTASLVVGAINTPNHPSFKSSKFSYFYTLQEL

SEQ ID NO: 84892 - protein, 361 aa, Zea mays
  Coding DNA Sequence Number=SeqID_41517
MRRKDGGYPSSGGLEGGKTRCIREREDMVAFRRGPTRHATGAPNASCMQLHRHSRHYRASSTAEPIPRLEATQRTTQQRQPGATINAAKNGPAVMAVAGGQEQQSRRQPSSRPIRGQRENPLSRREDNAPVFCSSNGSRTRNGRPANHSPRRINSAGPGKGDTPKRILPREGTRLRASLLIRGSKAGPPEGFDSRLRSRGPYTHYWSEVRRPAPQKGTTTASGYSGSVPITDQGGNDLVTESHRRKASSPRTPSLGDRVRQITRSSPETPCSTPIEGNMALPPLLLAERRRRGVCKKAESVPDRPLALCGGSGAALANLAPAEPLTASTYQPENLGPDRTPGLRPARMREQPDQPKHYARH

SEQ ID NO: 84893 - protein, 96 aa, Zea mays
  Coding DNA Sequence Number=SeqID_41518
MDESCTQLLSSDPMINLNTTVFDTPSPGGGWPRPNKLGLPGGQQFIKHTQLGERPNRPKRLVQWGRVALPFKVASSSQVKRGGIILRLTRSSSDYN

SEQ ID NO: 84894 - protein, 516 aa, Zea mays
  Coding DNA Sequence Number=SeqID_41519
  Gene Ontology: Mol. function=acyl-CoA binding
  Homolog annotation: Hit_ID=A2XDE7; Match level="QueryCoverage=88%, HitCoverage=98%, E-value=0.0, Identity=75%"; Hit description =Putative uncharacterized protein
  Subcellular localization annotation: CTP_CleavageSite=46; ConfidenceScore=5.20e-01
MTNTVRSGHLAPKAIPEPTGCLQKKQNSFPFLTVVAWWGGSAPPPSLASSWRPPPPEDLQCAVNVKCAAPPALAAGDGELRWLRRCVEAAAKGFAIGAGLKGGLALFSVLVRIRSRRSPRSRKAGAMTNEEAVVLAVKETVRYGLFLGTFAGSYVSVDEYIAAVWGRKRTARWRSFLAGLIAGPSMLLTGPGTQHTSLAIYILMRAAVLASRCGIKSKRFGKICKPLTWSHGDVFLMCLSSAQILSAYILKQDSLPSSYKSFLNKHGGKDLTILQGVKDVVNHTAFSNLVGIEKYYKSVGVDIKLDPNMKVPCSIVHGNQSCTGHVFSFLLQAYGRAVPVYVPVYLVPALVVHRQHLMKRPYSIIGKSFLGVARSSLFLSVYCASAWAWTCLLFRIFRRANTPLVILGTFPTGLALLIEKKSRRIEISLYCLARAIESFFTWMTDAGLCPPILQIKRADVVVFSIATSIIMHCYAQEREVFRSKYLNVLDWVFGVPPPPDSEDKNCYLPDEAKKCQ

SEQ ID NO: 84895 - protein, 88 aa, Zea mays
  Coding DNA Sequence Number=SeqID_41520
MAMVNTRRGGGIDLPPNRHTRRIYRQPQPQPAEMNPPNPPPGGVDPLVAAQMAVMQQMADTMADMRAQMQQERQEMRQEREYIRQELR

SEQ ID NO: 84896 - protein, 212 aa, Zea mays
  Coding DNA Sequence Number=SeqID_41521
  Gene Ontology: Cellular component=integral to membrane; Biological process=protein processing
  Homolog annotation: Hit_ID=Q6Z743; Match level="QueryCoverage=52%, HitCoverage=16%, E-value=1e-29, Identity=62%"; Hit description =Putative nicastrin
MEPSVDAKNTENNSSEFAVNGHPDQNDSSDSDLSNIDDGDNSKDEDGSTDTISSYHVNDFQRLALACDDGSVRLYNVPESGALTYYRSLPRVSGDGATLESVPDLVKAMYLNVESFPCVRLLNLSGEIGCSNPGSEKVIAPIVRLRKGSDQLVQPSTILLSLDQMLDFFLSVKNVGTHVLNVKNVGTVELNGQPSPTHVGPISSTATCPRRT

SEQ ID NO: 84897 - protein, 215 aa, Zea mays
  Coding DNA Sequence Number=SeqID_41522
MEEEDSSLCLWADSLECVLPELADLSPVPISLMADAPDITSSDSNSPPSGISRGDSAKIHRTVRCTPDSVRCSKGGCPQELASLGFSLQPLRYNSPDCPVCTGLSGASAEQRLLQAPTATCSAFIARQRAQRSGTPMLAHRTVNSACPVRHRTSSGAQKSELQLSESNGSDDVAGGTGLSGVHRTVRCAIDRQLPPTVKFGGSWVTITPNPPDHS

SEQ ID NO: 84898 - protein, 92 aa, Zea mays
  Coding DNA Sequence Number=SeqID_41523
MNNAWSGGALGLGQQLVHRRTILAQRLAYMAWTGGALDWSSDHPGRKTAIKISSMGYKTWSGNLGRGHENSLHPWVLKTHLKINILWYLFLT

SEQ ID NO: 84899 - protein, 131 aa, Zea mays
  Coding DNA Sequence Number=SeqID_41524
MPRRRATSSRHCLMASGEAVELGGWRSNSLAANNAPGVALDGALDICAGVCCCAACIAAALGAGRLEPLWHGRCSLFLHQEILGRQVAVLDDLNHRVEQEKQAKNPKPSPLPGAPNVEEKILRPGGGMHPP

SEQ ID NO: 84900 - protein, 508 aa, Zea mays
  Coding DNA Sequence Number=SeqID_41525
  Gene Ontology: Mol. function=aspartic-type endopeptidase activity; Cellular component=chromatin; Biological process=proteolysis
  Homolog annotation: Hit_ID=Q8SA85; Match level="QueryCoverage=85%, HitCoverage=57%, E-value=1e-139, Identity=77%"; Hit description=Prpol
MGIRRAVLKSDSQVITGQVDKSTDSTHLAIAKVGTRLIGTTSTSPREFEICRAFENKSPTLVPTSGELTSTFELMASFNNQVVAPSATKLVLPITGGSSLESANKKQKKEAQRRVQHVGVQGPFIKSKWSHIPITFSQEDLQLKDYPHNDAMVISCVIKGFLVHNVLVDTGSAADIIFAKAFRQMQDPEDKIHDATHPLYGFGGRQFVVLGKITMSVTFSYVHNTRTEQVIFDIVDMEYLYNAIIGRGTLNAFEAILHPAYLCMKIPSEQGPIAVHGSQEAARRAEGNWTDSKEIHNIDGAKASNDLCGVNRDVIEHSLNVDPSFRPRKQRLRKMSEDKVEGARNKVKRLLSAGVIGEVKYPEWLANTVMVKKANALVQEKLDGQIKKQAPVYFVSEVLSLSKKNYIELDKVVYAVLMASRKLRHYFQAYHIIVPSSRPLKDIMRNREATGRIGKWAAELNEFSIDYVHRSSIQSQALANFIANWTPGAQEEETNKDAEAWTVFCDGS

SEQ ID NO: 84901 - protein, 311 aa, Zea mays
  Coding DNA Sequence Number=SeqID_41526
  Gene Ontology: Mol. function=binding; Cellular component=nucleus; Biological process=regulation of transcription
  Homolog annotation: Hit_ID=Q6ATG2; Match level="QueryCoverage=92%, HitCoverage=58%, E-value=3e-69, Identity=51%"; Hit description =Putative uncharacterized protein OSJNBb0061M13.9
  Pfam annotation: Domain name=PPR; Domain location=155-188; Score =19.3; E_value=0.015; Accession=PF01535.11; Description=PPR repeat
MRRSSPYSYAFFERLLQEHFPFPRRLFQVHALLLTSGVLLLDSQCSAAAFPYNCLAHAHRRVPAASSSRPPSAPLRLFCAMLARGARPNCHSFPSLLMSASASAAAALHAQCLRRGLAADCFVACSLVSVYGRTGHPSCDARKVFDEMEGPPDLASCNALLDALCHAGDLDGAGDFFERMAVRDPVSWTTLVSGLSRGGRHRCALEVFRGFLLGNVGRRLEEATLVSVFSACANVDGGEGLAAGMAVHAYLIRHEIELTAFLGTALVDMYGKHGRIGFCKSAFAVVCTKEDWWRLGYTGSTQWLLNTRWYR

SEQ ID NO: 84902 - protein, 149 aa, Zea mays
  Coding DNA Sequence Number=SeqID_41527
  Homolog annotation: Hit_ID=Q2QM66; Match level="QueryCoverage=84%, HitCoverage=17%, E-value=1e-40, Identity=69%"; Hit description =Pentatricopeptide, putative
MPPHVPSQPALYHRHILGGRRLLELRDSWSAKLEAQLRHFLRALTPSQVRAVLRAQAQRDARAAFEFFRWADRQWKYRHAPEVFDEMLALLSRTRLHDPARRVVRLMIRRGIRRGTRQFAHLMLSYSRAGKLRSAMRVLQLMQKDGKER

SEQ ID NO: 84903 - protein, 150 aa, Zea mays
  Coding DNA Sequence Number=SeqID_41528
  Subcellular localization annotation: CTP_CleavageSite=79; ConfidenceScore=5.05e-01
MDRKGEAHLARVPPISAARLQCRGDKGPNVRRFRKHMAAFFAQFPVATASCCADVSSFVQKVFTGCWHRYGRQSMRCVPAAALSAIARMIRGLGPDGQSARAQGGNVRQQHLDLALGIDPVGRRDSRVCLGIDRPLKTPLDDVELKRGED

SEQ ID NO: 84904 - protein, 111 aa, Zea mays
  Coding DNA Sequence Number=SeqID_41529
MGHAACHLRHVVLGTDVPISMGYVACHLHHVILSTGVTISMDSTACQFCHHILDAVPISRDSAKLRHIIFTNGVSIPMDDGSRGSHGSAITRCIDGRDSNGYPKPYGFSPH

SEQ ID NO: 84905 - protein, 108 aa, Zea mays
  Coding DNA Sequence Number=SeqID_41530
  Gene Ontology: Mol. function=transferase activity, transferring glycosyl groups; Biological process=metabolic process
  Homolog annotation: Hit_ID=Q7XI34; Match level="QueryCoverage=87%, HitCoverage=22%, E-value=2e-30, Identity=68%"; Hit description =Putative UDP-glucosyltransferase
MEASELAKIQRELSRPAFAVGPLHLLSQAPAEQSLHAPDRGCLAWLDDHPPRSVLYVSLGSVACVDRGAFVEMAWGLARSGVSFLWVVRPGLVDGVARAGESRLEGGE

SEQ ID NO: 84906 - protein, 161 aa, Zea mays
  Coding DNA Sequence Number=SeqID_41531
  Gene Ontology: Mol. function=transferase activity, transferring glycosyl groups; Biological process=metabolic process
  Homolog annotation: Hit_ID=Q7XI34; Match level="QueryCoverage=98%, HitCoverage=34%, E-value=2e-55, Identity=71%"; Hit description =Putative UDP-glucosyltransferase
MAGQEHHYWRIVLFPLPLQGHIRPTLQLAALLHARGLAVTVLHTGLNAPDASRHTELTFVPIHEPSFPDEVTSPGTDIVTQLLALNAACEAPFREALASLLRGGQDVACAVVDGQCYSALRATHWLGVPALPLRTDSAATFRSMLAYPRLRDAGFIPVKGK

SEQ ID NO: 84907 - protein, 103 aa, Zea mays
  Coding DNA Sequence Number=SeqID_41532
MDMGQLQHATSSSSGSGSHGRGTRGPKMQKAEDMIRQVHGVRHSGLRRGFWPRGDRDDDEVRGFEELVRRRGDRTEAAACILFAATDVRGNQTIDEAAAGLLE

SEQ ID NO: 84908 - protein, 29 aa, Zea mays
  Coding DNA Sequence Number=SeqID_41533
MAAANLSTVGFFADAGDKLKLWVLCFLKG

SEQ ID NO: 84909 - protein, 108 aa, Zea mays
  Coding DNA Sequence Number=SeqID_41534
MWLVCLYTTVTISNISVLWVIRDCMSSQQLVDFIREHIDTVVFVEATEAQYAFKKPLYTRYKYDVKPGNAILAEDKHLPILSSTENGKQILDVVTLSTHETGRNIVDS

SEQ ID NO: 84910 - protein, 192 aa, Zea mays
  Coding DNA Sequence Number=SeqID_41535
MSTEKRHLDQIELLSVRRLHFDHLLFSCGGVLVDRHRSKIKQGPPYTDHSPTALAPFGRGGAPTLTAEPHRRTPTKRNRDLRYATTGAIRRVDSSRGDEVPQTGDAVVEPSDHGTAAKKNSGEKFLAAPHFFDRRETTISTTTRPRCTTARSRDQIGKGTSFSLRGRGQVLDLSLSLYGGGARVVGQVRQSA

SEQ ID NO: 84911 - protein, 291 aa, Zea mays
  Coding DNA Sequence Number=SeqID_41536
MWWAWCIPDYPTGKFIRLDVIGFTYIGDLKRRPPKTPLVVVEPKRGEDSRRARPPQAPHYRSLPHSLQPLPTSSSGSTPKSLSHFPRESFAGNLQLCGDPLPPCSSPFFPPVPSPGGPGPAPGSSKKRKLSGATIAGIVVGAVVVGLLLLIAIVLCVVSKRRGAGARDIHRGQGAAPPTSGVGGVLTSSSKEDLGGDAFGSAAAVAAAGEQSRLVFVGKGAGYSFDLEDLEDFEVDFEEFGVANRAMSRSTLRPWTGASLCGFVPFSRMCSLVSSACDAIQRKCRRLMNDL

SEQ ID NO: 84912 - protein, 89 aa, Zea mays
  Coding DNA Sequence Number=SeqID_41537
MAGHGESAAYQPKQSETTPRERGEGGKIARAVIPAFRRKDESDDATARLPGPVRLRRAIQCSWDEDKPGAASWSSSMLLVFSDFKGSRR

SEQ ID NO: 84913 - protein, 212 aa, Zea mays
  Coding DNA Sequence Number=SeqID_41538
  Gene Ontology: Mol. function=structural constituent of ribosome; Cellular component=ribonucleoprotein complex; Biological process =translation
  Homolog annotation: Hit_ID=Q08069; Match level="QueryCoverage=51%, HitCoverage=51%, E-value=2e-48, Identity=85%"; Hit description=40S ribosomal protein S8
  Pfam annotation: Domain name=Ribosomal_S8e; Domain location=1-136; Score=127.0; E_value=5.5e-35; Accession=PF01201.13; Description =Ribosomal protein S8e
MRKQLHEAREQLVRQRYELGRQPANTKLSSNKTVRRVCVRGGNTKWRALRLDTGNYSWGSEALTRKTRILDVVYNASRTQTLVKSAIVQVDAAPFKQWYLTHYGVDIGRKKKVHVAKRDDTENAPFFVSKLAIKILPCVILFKKGIVVDRLVGIQDLKSKDDFLTRALEHILILKTKGIIDEKKKDDDDDDEESEAKNRRVRSSAAEDSDTD

SEQ ID NO: 84914 - protein, 131 aa, Zea mays
  Coding DNA Sequence Number=SeqID_41539
  Subcellular localization annotation: CTP_CleavageSite=44; ConfidenceScore=5.32e-01
MWAQTAPATVSRGPRRSRGSRGRAAQRPYVRLRPLAYVTGSGPRGSIESPPERGAETYAIWSGHVSALDLRLALIKAWVFFGPESRNPAVSGSDPTKRGLGPVPGVRFAPVEVLDLTQRSGSYIQGSGIFP

SEQ ID NO: 84915 - protein, 157 aa, Zea mays
  Coding DNA Sequence Number=SeqID_41540
MAGEIPITDRSPDFLLLVQDTWNRGPSESSKDIFLVSWVHVELTYGTERPHGGGRTAARNCQPQSPLTPSKLRVRNLPRQQKAWGYIAHDRPWRSSGGDTSTTHDDGARHGIQGFNKEVAATRPGWELVARPAVTRLEGGRVKFTAKARCGKGMEGK

SEQ ID NO: 84916 - protein, 534 aa, Zea mays
  Coding DNA Sequence Number=SeqID_41541
  Gene Ontology: Mol. function=histone acetyltransferase activity; Cellular component=nucleus; Biological process=regulation of transcription, DNA-dependent
  Homolog annotation: Hit_ID=A2WXV3; Match level="QueryCoverage=66%, HitCoverage=32%, E-value=1e-130, Identity=65%"; Hit description =Putative uncharacterized protein
  Pfam annotation: Domain name=BTB; Domain location=196-306; Score =24.1; E_value=2.2e-05; Accession=PF00651.22; Description=BTBPOZ domain
  Pfam annotation: Domain name=zf-TAZ; Domain location=382-476; Score =0.4; E_value=0.0085; Accession=PF02135.7; Description=TAZ zinc finger
  Pfam module annotation: Pfam domain module=BTB::zf-TAZ; Domain location=196-306::382-476
MTKSLLILRSASNSKHPFHSQANHSKDTIILTGRFSEKFVTQKLKQVDGLMDDIGSAARCCSAVVTERSGRGQESNLAAAFKEQCSNQHTAQSRRQLMECVELLDSPDLFFLDGGDAHATDFSLENHLESSSSAGAKNKAAPGHSHIHSHSHSRRAQLHRSNAPVPPPLPGTSYYGARRKAKAACRRVPEGVLDSWDRLFLEGYQSDLRVSTDGGAEISSHSCVLGVKSPVLRAMLEEARLRDGFRCIRVSGAPSEAVRVFIRFLYSSRFEQEQMKEHALHLLVLSHVFSVPSLKTVCVDQLERGFLATDNVVDMLQLARLCDAPRLALACARMVIGDFKTISLTDGWKVMRRTNPSMEQELLESLVEADTRRQERAKRMEEKKVYLQLYEAMEALVHICRDGCRTIGPRDQALKGSLAAACKFRACKGIELLVRHFSACGVRVPGGCANCRRMWQLLELHSRMCFLPDTCKVPLCRHFKEKMRNLGRKEETKWNLLVCKVLERGGTMGFMPGRRKNFINPKASWVLPRGSSCI

SEQ ID NO: 84917 - protein, 150 aa, Zea mays
  Coding DNA Sequence Number=SeqID_41542
MAHRTVRCTPDSPVPLPRHHCRWILTVGASDFWALLGVRCTPDMYCLMSGAPQDVQPPICAVGPSTAGLSSSRSTRDTFENVAQDDDDDDDDAGAGAGAAGQVEIGPSQLQDAPTTQPSQLTPRIRRPRDPYTPGTDALGAKGKGKTRRK

SEQ ID NO: 84918 - protein, 55 aa, Zea mays
  Coding DNA Sequence Number=SeqID_41543
MELAAKHLNGILGNTDGMKCRLHHSPDCKGERLQFVDIPRKREKTAKEENSGTQS

SEQ ID NO: 84919 - protein, 134 aa, Zea mays
  Coding DNA Sequence Number=SeqID_41544
  Gene Ontology: Mol. function=identical protein binding; Cellular component=spliceosome; Biological process=mRNA processing
  Homolog annotation: Hit_ID=A3B8B4; Match level="QueryCoverage=65%, HitCoverage=20%, E-value=7e-41, Identity=89%"; Hit description =Putative uncharacterized protein
  Subcellular localization annotation: CTP_CleavageSite=65; ConfidenceScore=5.28e-01
MAPSSWRSGNYREPSASPLGPSPTEPSQSKAIPPSRRDGVSPGSRSIEIQSSGRSIEGLMEKVLSVNILSSDYFKELFKYKTYHEVVDEIYNQVDHVEPWMTGNCRGPSSAFCLLYKLFTMKLTVKQMHGLLKH

SEQ ID NO: 84920 - protein, 239 aa, Zea mays
  Coding DNA Sequence Number=SeqID_41545
  Gene Ontology: Mol. function=UTP:glucose-1-phosphate uridylyltransfera se activity; Cellular component=cytoplasm; Biological process =metabolic process
  Homolog annotation: Hit_ID=A2X051; Match level="QueryCoverage=52%, HitCoverage=32%, E-value=2e-55, Identity=88%"; Hit description =Putative uncharacterized protein
  Pfam annotation: Domain name=UDPGP; Domain location=3-180; Score= -162.5; E_value=5.2e-07; Accession=PF01704.9; Description=UTP- -glucose-1-phosphate uridylyltransferase
MSLYEGHATNAASIATTPDSIPVRAMPPLRGAKRHRKAALEKKAAAVAMSSAAAGDPPGDWWEAFCIRMSVSETSVSADWLKLQFFDHAICINVPRSRFLPVKATSDLQLVQSDLYTLVDGFVTRNSARTNPSNPSIELGPEFKKVGSFLGRFKSIPSIFELDSLKVSGDVWFGSGIVLKGKVTITAKPVVKLEIPEGAVIGNKLWNGGIVYSTCVWTLDTGFQLHYEVRNCDHQLDKC

SEQ ID NO: 84921 - protein, 238 aa, Zea mays
  Coding DNA Sequence Number=SeqID_41546
  Gene Ontology: Mol. function=triose-phosphate isomerase activity; Cellular component=cytoplasm; Biological process=fatty acid biosynthetic process
  Homolog annotation: Hit_ID=A2WWV4; Match level="QueryCoverage=41%, HitCoverage=38%, E-value=7e-46, Identity=92%"; Hit description =Triosephosphate isomerase
  Pfam annotation: Domain name=TIM; Domain location=1-100; Score=-14.6; E_value=7.4e-10; Accession=PF00121.9; Description=Triosephosphate isomerase
MDVVAAQTKAIAEKISDWTNIVLAYEPVWAIGTGKVATPAQAQEVHDGLRKWLHSNVSPAVAELTRIIYGGSVNGANCKELAAQPDVDGFLVGGGSLKVNRDRYNDGSIKHSLFKQSSLDLLTIETLGLKKNDNFSRWMSKELEEVVDLGIKSTFDAFWSSIETVKVPDGSNVLTNEQLDAYVVNPSLSQDQLFSILDVSPSCAYIGTNTKVCAQFSQGNLCKRFVTGAGITTRDMLI

SEQ ID NO: 84922 - protein, 94 aa, Zea mays
  Coding DNA Sequence Number=SeqID_41547
  Gene Ontology: Mol. function=2 iron, 2 sulfur cluster binding; Cellular component=mitochondrial inner membrane; Biological process =tricarboxylic acid cycle
  Homolog annotation: Hit_ID=Q9XGC8; Match level="QueryCoverage=58%, HitCoverage=19%, E-value=4e-16, Identity=76%"; Hit description=Iron sulfur subunit of succinate dehydrogenase precursor
MEDEDQYEKDMQPDDTVANEDMRYESDENRELKPKEKPDSSDQFTKERLDAIHDDLKLYRCHTIKNYTHASTKALNLAKQINTIKRQQLGASSG

SEQ ID NO: 84923 - protein, 75 aa, Zea mays
  Coding DNA Sequence Number=SeqID_41548
MSKPDKTFPLLILPVLPSLHNPGVGPKITVDMDWLAGDKDVTVARLSQASIGSFAPPVGRNTSIHMTIRPVTVDR

SEQ ID NO: 84924 - protein, 113 aa, Zea mays
  Coding DNA Sequence Number=SeqID_41549
MDEQSANQELRNRKKKKRGELAVYSQEAVSVWGTGLSGGAPDSVRCSHPRKGIAPPWSSQEPSAHYEMILCHSGAVDPSRPLTNLSRVINKIFTVITELPTPSSRLGDADHQE

SEQ ID NO: 84925 - protein, 395 aa, Zea mays
  Coding DNA Sequence Number=SeqID_41550
  Homolog annotation: Hit_ID=Q6JAD6; Match level="QueryCoverage=81%, HitCoverage=70%, E-value=7e-28, Identity=65%"; Hit description =Putative uncharacterized protein
MPVREPSPVLSGFPPVVHQVRMPRTKNVSAPGGGDDEDPRRPFRQVKGKIVYLEQQEGRKKRRMDRAARAAAAATAEQAELGDQPQTPSDQIAYRVRRLASWPRSSTTTTASASTPPPTLLAPVTPFVPSTTSTTPASTAPPPAPVSAPPIPPARFRERDETEVRPLAADPRLFDLQRATAARFGLPLSSLLFSTRIQESFFRAQMSAQIALRVHRLLDLPAFLLAVGADSEVHLSYLPGLLTLLTTSGRSRTPYWMLIRPPQFQGTIEAARLVFGSYCPAPEDPVPASAPVFDTQAEDVALHQFEAQDAAVDDDDNDDFGIPPPPPPPMPPRSHDHEAGSCSATPAAPPAIDPALASILQTLTQQQAHLAAEQTHQAAAHQQLSERMLSMFQTI

SEQ ID NO: 84926 - protein, 304 aa, Zea mays
  Coding DNA Sequence Number=SeqID_41551
  Gene Ontology: Mol. function=ATPase activity, coupled to transmembrane movement of substances; Cellular component=integral to membrane; Biological process=transport
  Homolog annotation: Hit_ID=Q8GU57; Match level="QueryCoverage=68%, HitCoverage=55%, E-value=2e-58, Identity=50%"; Hit description =Peroxisomal membrane protein ABC transporter homologue
  Pfam annotation: Domain name=ENT; Domain location=250-304; Score=7.1; E_value=0.075; Accession=PF03735.5; Description=ENT domain
MYLELIGLSDARLGDYRQLHSWLRTHAESVAFYGAENREASHIMQRFEALVEHLNLVRHENWWFGMIQDFFLKYFGATVAVILIIEPFFSGNLRPDSSTLGRAEMLSNLRYHTSVIISLFQSLGILSISTRRLNILSISWIPSFQIIELNKPIRFADCSSHHSKFVMEQDHQAYEEVDHYAKRKAANICASTGARAVKRKIEASRIPPNGLVRRTGKEQKISTHEFCQLTKNELPPKETEDAYGSGLFLNIHELELRAYRSTVRALHAAGLLTWEQESLLTNLRLSLNISNEEHLLQLRHLLSL

SEQ ID NO: 84927 - protein, 151 aa, Zea mays
  Coding DNA Sequence Number=SeqID_41552
MVGAGANGKIGQNAEEIRPSDKMESEKIQDMEIQKMKNWSKAEPSELRASISTGVFLQDGVFLQGAGEDIDTELTRGVRTTCQLFTVAELSASAPPPGEDIFLLGEGQSVPQSACNLGDFLQQTTFCLRKKSTLRASPPIYKHAVPDPLEN

SEQ ID NO: 84928 - protein, 114 aa, Zea mays
  Coding DNA Sequence Number=SeqID_41553
MAAPARPGRLARPCARLAHVGNCTQRWRSLRAHDGWNGRAPVAASGGAYALLASLWRRWWCATRLAHDSLHDRVLAAFWTIASVTVTLMCITFLIEGVTLLCLSWAKARSILDM

SEQ ID NO: 84929 - protein, 52 aa, Zea mays
  Coding DNA Sequence Number=SeqID_41554
MARGTAGAARSEGTTAVGEGAAGEVAAAVGRGAVGDGAAATAQRHGEQWRRR

SEQ ID NO: 84930 - protein, 299 aa, Zea mays
  Coding DNA Sequence Number=SeqID_41555
  Gene Ontology: Mol. function=binding
  Homolog annotation: Hit_ID=A2ZYZ0; Match level="QueryCoverage=63%, HitCoverage=11%, E-value=2e-67, Identity=61%"; Hit description =Putative uncharacterized protein
  Subcellular localization annotation: CTP_CleavageSite=79; ConfidenceScore=5.02e-01
MASSAGGASSSLVKNEPYMRAVKIYLKSLDIQMEKQLAKTWRSTTGRSTNCTSGVSRSSLRIMFANNSIKECRGCRFVEAQVLDGAGTSIAALETIWNALGFNVSGPELFSALRGRLYDSNKNLVMATLSTIGGLVSAMGPSVEKSSKGILADVLKCLGDNKKHMRECTLTALDSLVAAAQLEKMDKSSKVRKAAESLMNEILRICGQEMVGRNLKDLPSPTLAIVSERLKLSTLKDLPSPTLAIVSERLKLSTAHEGFSESVKVVSTSMSLPSKAGLKNNKHGPNDRGSNVGKPVSQV

SEQ ID NO: 84931 - protein, 380 aa, Zea mays
  Coding DNA Sequence Number=SeqID_41556
  Gene Ontology: Mol. function=mannosyl-oligosaccharide 1,2-alpha -mannosidase activity; Cellular component=membrane; Biological process=metabolic process
  Homolog annotation: Hit_ID=A2XX97; Match level="QueryCoverage=50%, HitCoverage=41%, E-value=2e-88, Identity=74%"; Hit description =Putative uncharacterized protein
  Pfam annotation: Domain name=Glyco_hydro_47; Domain location=21-356; Score=-17.5; E_value=3.4e-14; Accession=PF01532.11; Description =Glycosyl hydrolase family 47
MSRACWLCTKEGTCLIKQPGDTYDDFASSKPDNECHYVVFDLDLNNFYDCGSSGVSLSAFAFLFSELVQYNQTKVDNITELERSHARTIDAHTNRNTIASVVAHFGASWCVMSLSMNYKFEEMAQTHLEVLFLYMDADDVQEMVLFILFAVSISFIHSTLYQSKASMNICSRSGSRGIKLTIQMWETSMEGQLSLTKKTTPSNYYYICEKNGGSLSDKMDELACFAPDMLALGASGYGPEKSEQIMNMAKEDMSVGTSWNILRPETVESLMYLWRLTGNTTYQDWGWDIFQAFEKNFRVEFGYVGLRDVNTGEKDNMMQSFFLAETLKYLYLLFFPPSVISFEDWVFNTEAHPLRIAPVNGNKGIGTPVRPFGRKQGKPE

SEQ ID NO: 84932 - protein, 89 aa, Zea mays
  Coding DNA Sequence Number=SeqID_41557
MTPAKYSHILLEDLLTINIEKAMDLDVPILLNILHFQKMTIVCSVEIAAVDVSIAIFNQVSKEHHNQCEPMPAHGYEMVWLSLLYLEVF

SEQ ID NO: 84933 - protein, 189 aa, Zea mays
  Coding DNA Sequence Number=SeqID_41558
  Homolog annotation: Hit_ID=Q5Z9D5; Match level="QueryCoverage=59%, HitCoverage=60%, E-value=4e-18, Identity=42%"; Hit description =Protodermal factor-like
  Pfam annotation: Domain name=GRP; Domain location=1-75; Score=-7.1; E_ value=0.00038; Accession=PF07172.2; Description=Glycine rich protein family
MSGKALLVVAVVLLVGVASRCSGSRGLHQQGDHVAEQKFQTDGTGNGYGGGGGGYGGDGGGGGGGGYTPGYSGTGTCDYWKSHPDAIVSCVGSLGSVLGSLGDACSAFFGGKLQTLQDALCNARADGYGDLLREGAAAYLNSVAAAAAGKYAYTTQQVKDCIAAALSSEAAAAAQAAMFNKANYACHYY

SEQ ID NO: 84934 - protein, 95 aa, Zea mays
  Coding DNA Sequence Number=SeqID_41559
  Gene Ontology: Mol. function=metal ion binding
  Homolog annotation: Hit_ID=Q2QXQ1; Match level="QueryCoverage=74%, HitCoverage=28%, E-value=4e-17, Identity=53%"; Hit description=Zinc finger, C3HC4 type family protein
  Pfam annotation: Domain name=zf-C3HC4; Domain location=49-91; Score =42.1; E_value=1.9e-09; Accession=PF00097.16; Description=Zinc finger, C3HC4 type (RING finger)
MDVFMEDFLVQPTLETARFLMDVGVAGLEKRVFHPTAEPGCDGDDIRACSICLEDYEDGVEVVVTPCPGRHEFHHRCIANWLRRSNTCPLCRHAL

SEQ ID NO: 84935 - protein, 112 aa, Zea mays
  Coding DNA Sequence Number=SeqID_41560
  Subcellular localization annotation: CTP_CleavageSite=7; ConfidenceScore=5.44e-01
MTVRSASASSHATAATGIGCAPATRTVCDFKNNSSIPNFPALYGNLRTHHGSQSSSFALEKWRQFFEEMGVTDFVQVGESVLTKLLWNLPVTSPYSFLGQYEPDVEILYLIV

SEQ ID NO: 84936 - protein, 230 aa, Zea mays
  Coding DNA Sequence Number=SeqID_41561
MVWRVSARWRRWKGEVCGGGDVCGVCGRGPMMEGGGVQWRRRARGLRQRGSGGWAPQPIPNGIAPRSSITGSVASANTTVSSGHPSLRSDSATHSLNPDALMESPAAARATPRAAAAVQQPSASSATRFRVSRSGASRSVDSASTPPPIAAAAHGVLRTMAPALESRGTGEARRRERAPAGAVREAAGSPVDVTRREEEPTSTTSAGARQPVRRDEPRPPWASGSRSWVG

SEQ ID NO: 84937 - protein, 454 aa, Zea mays
  Coding DNA Sequence Number=SeqID_41562
  Homolog annotation: Hit_ID=Q851R4; Match level="QueryCoverage=9%, HitCoverage=13%, E-value=2e-11, Identity=82%"; Hit description =Putative uncharacterized protein OSJNBa0052F07.9
MQESLAGPPSQQNPPEGLPTLTTPLLPLPLSDFASRARREDFGREHIHTVDPVNAGELRAVEAAASGQRRSRPMGSVVFVLGVRDLGESGATREFCGRLKKTRSWVAHATMLRDEELARHGNDWRPHSSGGARFCLPQRPRSSPTPQSSPTRGSPTILPTTAATIIAHARIPHDPPYRRRNQRPRGSSPRSPPRTPPPFHRRPESIDPKLPLELELYPTHERDPDAHGGLGSSRRTGCLAPADVVEVGSSSRRVTSTGEPAASRTAPAGARSLLRASPVPRDSSAGAIVRRTPCAAAAIGGGVEAESTEREAPDRDTLKRVALLALGCCTAAAALGVARAAAGDSIKASGFRLWVAESLRRLGWPDDTVVFALATLPVIELRGAIPLGIGCGAHPPLPLCRKPRARRLHCTPPPSIIGPLPQTPHTSPPPHTSPFHRRHRALTLHTILAPNRSA

SEQ ID NO: 84938 - protein, 43 aa, Zea mays
  Coding DNA Sequence Number=SeqID_41563
MDGDLSCLQQLVVDVVLRASSVRRKSQVHGQHIHNSNPIGQVV

SEQ ID NO: 84939 - protein, 488 aa, Zea mays
  Coding DNA Sequence Number=SeqID_41564
MEVGVHVDGRLAQRVGKTSAAASGSAAPWMEVGAEGALMAGPSAAASGSTAPWMEVGAEGALMAGSRGRVDGGELSGRRVGDPWSDACRGGGGCGACAMNGRRAQRVGKTSAAGGMRNGRTVGNVDAYSRGLRDSRDFEHCVMMSILCNCCMARLRHTARKSVIPFLPSRLAERPLRRPVAGQSSHLERLHHRLHEEQERRRQEQQGSSFSLHQEIESVRSCSPVLPLEAPPAPPLGAPASGVAAGGDPDDGDGDDSSSHDTDFSANPEPEGWVARPITRDAARGCHFHDALDTLLRRAFDRHTWSVEYRCVVYQHSRGVYPDRWEATCLVRCPEDSLQGAEACSEHYSISERDSAEAAMQDAARRALSHYCSVFGGAADGLDLKYYPRRPSGSTGGVIVSPVGEGNPRLSSTVNLAAVLNTELDHALDELSRARAEIALLRAERAERRHLDGGSPAPVGTQHPYRSPQRGHQPYGNPDCKTKINLEP

SEQ ID NO: 84940 - protein, 249 aa, Zea mays
  Coding DNA Sequence Number=SeqID_41565
MEHEGGKRGDGRKGETPRPSCLSYAQVGPTGNAPSASAAAAQLPRQPSAALGSLPRARTRLHPLGPPRPSQIPARARARRPAQLAPAQLAARASPQLAQAAAQAARSAAHSAPCCARSRGGRPPPPPSSAPTSRAYRAWVVPRRSLFIFQKPEPSVSVAQFLGHQRFSSSRLYSLRPCTVGVSPSLAALAAQRISPSHRRRALVPLRSSAEPFAVEPRPCASQLCCCVLAAAQLAPAVRLPSPCLATVT

SEQ ID NO: 84941 - protein, 161 aa, Zea mays
  Coding DNA Sequence Number=SeqID_41566
MAGVRLTAAKSDLGRHRKLRLARPQGSGSGLAPEDDELRLARPQGSDSGSVPEDDELRLARPQGSDSGSALEDDELRLARPQGSDSASALEDDELRLAQPQGSDSASAPKDDGLRLARPQGSNSTSTSEDRLDPNLGGATVSPDPGLGPTTSQGEPSLPYP

SEQ ID NO: 84942 - protein, 211 aa, Zea mays
  Coding DNA Sequence Number=SeqID_41567
  Gene Ontology: Mol. function=transferase activity
  Homolog annotation: Hit_ID=Q5QPY7; Match level="QueryCoverage=81%, HitCoverage=33%, E-value=4e-58, Identity=63%"; Hit description =Glycosyltransferase
SSRLCREAAALMADSRGPARDLRAPARLAASRDREQPHKKPRLLLIHRGHYRRITNEPEVARAAEAAGFEAVVAELRGDATEAEQARVVNSFDVVLGVHGAGLTNAVFLPPGGVLIQVVPYGKMEYIARAEFSEPATDMGLKYLDYSVSAEESSLMETLGPEHPAVKDPDSVHRSGWDQVFELYLAKQNVRINVTRFAPTLAQALDHLRQQ

SEQ ID NO: 84943 - protein, 95 aa, Zea mays
  Coding DNA Sequence Number=SeqID_41568
  Gene Ontology: Mol. function=nucleic acid binding
  Homolog annotation: Hit_ID=Q7XBV6; Match level="QueryCoverage=89%, HitCoverage=23%, E-value=9e-09, Identity=37%"; Hit description =Retrotransposon protein, putative, Ty1-copia subclass
MGSTMPSERCGSQQHWSRTCITKKYLIDIYQEWKKRQNSEAHFIQAPVDATTGEHLKLPQPAAQFEHAAINVDATAKNGTPLGKVDFDFDTDDLS

SEQ ID NO: 84944 - protein, 163 aa, Zea mays
  Coding DNA Sequence Number=SeqID_41569
MGKKTGLTCGLTKQRADRERGCDIALMTSGPTESVVMVGHLHGRNTDASKTSASQYSGQRVGRVVALRPMFWAKGFTESPFSKLSYSHWYPSLPEFGSLPSAGGFAECFLSGTRQSPTLGKDLYLPSAGHSAQSSTRQRLLCRESKHSAKRALGKGPLAAVYS

SEQ ID NO: 84945 - protein, 111 aa, Zea mays
  Coding DNA Sequence Number=SeqID_41570
  Subcellular localization annotation: CTP_CleavageSite=56; ConfidenceScore=5.73e-01
MTTDSVGPLVIKAMPHPRSRSALCFVSPQVRPVFFPMTVFSLLESNSSRLPPNSPSGAHQPTGGHQLFALRVLVLLPGKDGGQGGDNLSPLIRCRRGAAPSRVQQRLGRGW

SEQ ID NO: 84946 - protein, 134 aa, Zea mays
  Coding DNA Sequence Number=SeqID_41571
  Gene Ontology: Mol. function=kinase activity; Cellular component =ornithine carbamoyltransferase complex; Biological process=amino acid metabolic process
  Homolog annotation: Hit_ID=Q6QP54; Match level="QueryCoverage=92%, HitCoverage=40%, E-value=4e-23, Identity=54%"; Hit description =Putative kinase
  Subcellular localization annotation: CTP_CleavageSite=25; ConfidenceScore=5.02e-01
MAVGGALEPGGRTAVGVVESLLTSSCFRKGAESRRRHRAVMMAPPVDVVGPRPRLGDVEAPPRSRSSLSSMAEVESEPLGRARWRPLAEARAESEPWGRAKRSSSSSGAEPESEPWGRADRSSPSSGAEPKSEP

SEQ ID NO: 84947 - protein, 58 aa, Zea mays
  Coding DNA Sequence Number=SeqID_41572
MASTEQEVAVDAAAVVEEVTRQQGKGCGVAGGGDTVVSSRNIDIAWSKADEADSVTIF

SEQ ID NO: 84948 - protein, 214 aa, Zea mays
  Coding DNA Sequence Number=SeqID_41573
  Gene Ontology: Mol. function=carboxyl- or carbamoyltransferase activity; Cellular component=ornithine carbamoyltransferase complex; Biological process=amino acid metabolic process
  Homolog annotation: Hit_ID=Q8SA97; Match level="QueryCoverage=52%, HitCoverage=21%, E-value=4e-09, Identity=42%"; Hit description =Ornithine carbamoyltransferase
MALPVDVAGLCPRQGDVGAPPKPRLSLSSVAEAESEPWGRARRRSFGRGQGGVRALGSGEAEFRRLAGLSPSPSPGVGQSGVRRLPARVRALGSGGAEFAVFRVLARVRALGSGGVEFAVFWVLARVQALGSGGAEFAVFRVLARVRALGSGGAEFAVAPLARPDCLSDSLCRVAPQSEWRRRRCPSVRLLYADGGYQLRIRRLEGTPNYGPRQ

SEQ ID NO: 84949 - protein, 196 aa, Zea mays
  Coding DNA Sequence Number=SeqID_41574
MALPVDVAGLCPRQGDVGAPPKPRLSLSSVAEAESEPWGRARRRSFGRGQGGVRALGSSEAEFRRFAGLSPSPSPGVGRSGVRRLPARVRALGSGGAEFVVFRVLARVRALGSGGAEFAVFRVLARVRALGSGGAEFPVFRVLARVRALGSGGAEFTVAPLARPDCLSDSLCRVAPQSEWRRRRCLSVRLVSGAVE

SEQ ID NO: 84950 - protein, 325 aa, Zea mays
  Coding DNA Sequence Number=SeqID_41575
MEVRCQTNFCQNEDGFPKLLRACTVRLGIRSQPEYDGREFVEHGTEKCVVTVYIGSSPHHVEWSVTTAGHRFKDTCQVVARKALRAMCQIYEEEVADTPLRFFPFFQRDRPAWMARMRALEEQQLLEDDPTVVYLTTYLLTLDAQYDFLARHHRQMIARAEDAEKLNQVDGGHLVTHNQRRALRIQEPAPSNPVQPIRAEDPQILEGHPVSIRGEKKAWEPTEGAIVLEGILVSPKAMDKQEHPESSQDPPPELLEPLTMKKIPAPSLEVKEEAASTPPAPPPSEELQEPVPLEEEFDPVLPSQSLPEEVINISSLLTHPGDVSD

SEQ ID NO: 84951 - protein, 128 aa, Zea mays
  Coding DNA Sequence Number=SeqID_41576
  Gene Ontology: Cellular component=endoplasmic reticulum
  Homolog annotation: Hit_ID=Q5N7A0; Match level="QueryCoverage=70%, HitCoverage=44%, E-value=6e-23, Identity=60%"; Hit description=24 kDa seed maturation protein-like
MVGSFINKVLKDFENIALGKDNSLFYKVAFVLLLASIVGRLTDLITLVYTSAIIALTVPALLEKSEEHIARFFKKTSIYVQAFGRACKEYKWGKSQKPKVKPNTPLSYGKGSVQRYSLAQTLVAAPKK

SEQ ID NO: 84952 - protein, 521 aa, Zea mays
  Coding DNA Sequence Number=SeqID_41577
  Gene Ontology: Mol. function=kinase activity; Cellular component =cytoplasm; Biological process=carbohydrate metabolic process
  Homolog annotation: Hit_ID=A2ZZL6; Match level="QueryCoverage=98%, HitCoverage=40%, E-value=0.0, Identity=76%"; Hit description =Putative uncharacterized protein
  Pfam annotation: Domain name=PfkB; Domain location=158-505; Score =70.2; E_value=6.9e-18; Accession=PF00294.15; Description=pfkB family carbohydrate kinase
  Subcellular localization annotation: CTP_CleavageSite=67; ConfidenceScore=5.73e-01
MAMAAPAFLLPSLFPKPTLLAASLHSSFPRGLSLRCSPNGAAVPEFPEPASRRGRKKSPSPSAPKPRATRRRTKKADRDPDSEGEEEPVKRTNRRTRKSKGEAKQEEVAQAANHGTGDTIQKANEEEDAVEVGSDDDDFANEWPPLVCCFGAPRWEFVPTVRVSDRQMHPDMYSTWRHLQWEPPEFARAPGSAASNVAIALTRLGGRAAVLGKVGDDDFGRELVYRMNCERVQTRAIKFDDKAVTATARMKVSFRDREDGKGGTKLVAETVKSAAEDSLRRTEINVDVLKEARMFHFNSEVLLNPSMHDTLFRAIELSKKFGSKVFFDLNLPLPLWTSKDKTKEVINRAWKEAEIIEVSRDELEFLLDHEYYEYKRNTPPQYYLEGFHFTRNWPQYYHYSPEEIAPIWHDGIKILLVTYGTLRIHYYTPKFHGCVVGTEDALITPYTTDRTGSGDAIVAAAIRKLTTCPEMYEDQDTLERQLRFAVAAGIISQWTIGAVRGFPTESATQNLKEEVYVPSMW

SEQ ID NO: 84953 - protein, 366 aa, Zea mays
  Coding DNA Sequence Number=SeqID_41578
  Gene Ontology: Mol. function=carboxyl- or carbamoyltransferase activity; Cellular component=ornithine carbamoyltransferase complex; Biological process=amino acid metabolic process
  Homolog annotation: Hit_ID=Q8SA97; Match level="QueryCoverage=48%, HitCoverage=23%, E-value=1e-14, Identity=37%"; Hit description =Ornithine carbamoyltransferase
MSPPVDVVGPRPRLGDVEAPPRSRSSLSSVAVVESEPLGRARRRPSAEAKAESEPWGQAKRSSSSSGAEPKSEPWVGRSGSSSSSGAEPESEPWVGRSGASYGRSVERQSDCGHFGSVDWRTRVRIKVSGHLCIKCSCDLVGWRGDLVRVASWRRQASGEPELYADGGYQLRIRRLEGYWAAEQGAGRFLAAAPRMVSTDSLSRQRRYQDDLQVTRDLTASRSNTTNMGADGGPPNLPSTSAALATSSLRRRHFNPCPERSFQGMIVLGVGAGESLHPWPSRPIRAEPRDAVIWWTPVPKQRKQGRLLRSWVGDGSEREGPPAGDHRGNARNRENGQRGHQVGPSRQRLSAQAEQWGFSWAAQPVM

SEQ ID NO: 84954 - protein, 71 aa, Zea mays
  Coding DNA Sequence Number=SeqID_41579
MGGKKKAQAWRVTGRGAPQWHRYLVSNAVVWGGRSEDKAGSLYLSAQARLCLWYDGCSAKANSYCSKRSNR

SEQ ID NO: 84955 - protein, 93 aa, Zea mays
  Coding DNA Sequence Number=SeqID_41580
  Gene Ontology: Cellular component=endoplasmic reticulum
  Homolog annotation: Hit_ID=Q5N7A0; Match level="QueryCoverage=84%, HitCoverage=38%, E-value=6e-29, Identity=78%"; Hit description=24 kDa seed maturation protein-like
MDSPSCRLFGAQRSPHDLLGGGAVADVVLWRKKEVATGTLAAVVASWALFYCVPGYTLLSFLAQVLMILLTVLFVWAKAAQLLNSSYHFDNVA

SEQ ID NO: 84956 - protein, 225 aa, Zea mays
  Coding DNA Sequence Number=SeqID_41581
  Homolog annotation: Hit_ID=A2YGC2; Match level="QueryCoverage=51%, HitCoverage=50%, E-value=9e-10, Identity=33%"; Hit description =Putative uncharacterized protein
MPPAPQQGIPAAGGDPDRDGDDDDAGGSLSHDTERSEEPEPEGWIARPITRDVARGLYPDQWEATCLVRRPDDDLRGAETFSEHYSIPERDTVEASMQDAAQRALSQYCSLFSGVADGLDLKYYPRRSTGSAGGVIASPVGEGNPRLSSMVNLAAVLNTELDHVLNELGKVRAEVAELCAECAAHHYLDGGSPAPVGIQHPYRSPPRGCFDYGTPYCRTRIDLDP

SEQ ID NO: 84957 - protein, 40 aa, Zea mays
  Coding DNA Sequence Number=SeqID_41582
MVRCHEPILEENPEEPGDEERDVANAQLNKEDPDFVLEEF

SEQ ID NO: 84958 - protein, 201 aa, Zea mays
  Coding DNA Sequence Number=SeqID_41583
  Gene Ontology: Mol. function=oxidoreductase activity; Cellular component=mitochondrion; Biological process=metabolic process
  Homolog annotation: Hit_ID=Q53CF4; Match level="QueryCoverage=95%, HitCoverage=40%, E-value=1e-105, Identity=92%"; Hit description =Betaine aldehyde dehydrogenase
  Pfam annotation: Domain name=Aldedh; Domain location=2-183; Score= -134.5; E_value=2.4e-08; Accession=PF00171.13; Description=Aldehyde dehydrogenase family
MFRFAAQHLRLLVHTKIAKEFNEKMVAWAKNIKVSDPLEEGCRLGPVVSEGQYEKIKKFILNAKSEGATILTGGVRPAHLEKGFFIEPTIITDITTSMEIWREEVFGPVLCVKEFSTEDEAIELANDTQYGLAGAVISGDRERCQRLSEEIDAGIIWVNCSQPCFCQAPWGRGIDNYLSVKQVTEYISDEPWGWYRSPSKL

SEQ ID NO: 84959 - protein, 60 aa, Zea mays
  Coding DNA Sequence Number=SeqID_41584
  Gene Ontology: Mol. function=oxidoreductase activity; Biological process=metabolic process
  Homolog annotation: Hit_ID=Q53CF4; Match level="QueryCoverage=88%, HitCoverage=10%, E-value=1e-08, Identity=60%"; Hit description =Betaine aldehyde dehydrogenase
MASQAMVSRARAGEIPAGTAEDVDAAVAAARAALKRNRGRDWARAPGAVRAKYLRAIAAK

SEQ ID NO: 84960 - protein, 265 aa, Zea mays
  Coding DNA Sequence Number=SeqID_41585
  Gene Ontology: Mol. function=nutrient reservoir activity; Biological process=RNA-dependent DNA replication
  Homolog annotation: Hit_ID=Q651V3; Match level="QueryCoverage=82%, HitCoverage=60%, E-value=2e-15, Identity=25%"; Hit description=NAM -like protein
MGTDWNQVMAQYGTYLSEDDATQFQNTAFAPSPEIPAQGSPAPPPVKKAPQRTKLANFTSEEDMRVCQAWLAVSCDPIVNTGQKRQGFWNRITEAYNSRRGSMPERSTKYLMSRWDSIKTQCSTFAGYMMVVLRQNPSGMTDADKPRKRQRSQRSGNTSSTDSEYLTRMGELSLERISVYKSVASTEEKKLEFMKKQERQKLILERKKLNLEKMKMERQKVKEETEQEVLILSMDLTKCNPLLRQYYEAKQQEILARVTGSSSSS

SEQ ID NO: 84961 - protein, 229 aa, Zea mays
  Coding DNA Sequence Number=SeqID_41586
  Gene Ontology: Mol. function=protein binding; Cellular component =membrane coat; Biological process=intracellular protein transport
  Homolog annotation: Hit_ID=O81742; Match level="QueryCoverage=40%, HitCoverage=12%, E-value=5e-41, Identity=96%"; Hit description=Beta adaptin-like protein
  Subcellular localization annotation: CTP_CleavageSite=41; ConfidenceScore=5.02e-01
MEPAPATDLVHNRAGTRMDPAPAAVPADRGCTQSPSCPCPRRRARGPRMHPVPVVPLPPPTDLAHNRACTRMNPAPAVVPADIASLNRAWIQPPMHAHGALALRDAGSPRALSSVDRASCRCSWNSRSMPQRLMLIFVPKAVRAIGRCAIKLERAAERCISVLLELIKIKVNYVVQEAIIVIKDIFRRYPNTYESIIATLCESLDTLDEPEAKASMMIIGEYAERIDNG

SEQ ID NO: 84962 - protein, 572 aa, Zea mays
  Coding DNA Sequence Number=SeqID_41587
  Gene Ontology: Mol. function=nucleotide binding; Cellular component =microtubule
  Homolog annotation: Hit_ID=A2YVD5; Match level="QueryCoverage=100%, HitCoverage=33%, E-value=1e-67, Identity=66%"; Hit description =Putative uncharacterized protein
  Pfam annotation: Domain name=Dynamin_N; Domain location=38-469; Score= 68.8; E_value=1.8e-17; Accession=PF00350.14; Description=Dynamin family
  Pfam annotation: Domain name=zf-CCHC; Domain location=349-366; Score =14.4; E_value=0.01; Accession=PF00098.14; Description=Zinc knuckle
  Pfam module annotation: Pfam domain module=Dynamin_N::zf-CCHC; Domain location=38-469::349-366
MEELAELADTILQGTALLADDDPSEDRPSRRGSSFLTVVAIGNVGAGKSAVLNGLIGHPVLVSTVLPLSFFSQLSVLPTGENGATRAPICVELQRDASLSSKAIVLQIDSKSQQVSASSIRHSLQDRLSKVSGKGRPDEITVKLCTSTAISRSVSILCARPGMYLCIVYYIYINDKNRKGSDISAASILSLVSSVCVSTIRACSPRRSPFVVGDSDQTRAVPGSNNWYQNLCMHYGVPSANHESRTRKKHMIPHKSLVAAAIMPESSGDKEAMREATTDNLMWPMLTHTNYQDWSALVQCNLEGMLTESSLSGNKSGGQSRKKERSGACSIAHDPGVKLTSMGTPRRKGKCRKYGIYGHWAMECKKAAKEEIPKIFYEHHTLILKQTKLSYRSLFLNNQAPPLKLIDIPGVDQRSTDESISNYAARNDAILLVIIPALQAPDVASSRALRIARELDSEGTRTIGVLSKIDQASGEQKALGAVQALLVNQGPRTAADIQWVATIGHSVPTASAQSEAGSETPPEAYWQAEVKTLVSTLGGAPESKLGRVALVDSLSKQIKARIKARLPNLLNG

SEQ ID NO: 84963 - protein, 286 aa, Zea mays
  Coding DNA Sequence Number=SeqID_41588
MRLIVLVMTKVLMARLRHTARKSVIPFLPSRLAECLLRRTVAGQSSHLERLHHRLHEEQECRRQEQQGSSFSLHQEIESVRSCSPVLPLEAPPAPPLGAPASGVAAGGDPDDGGGDDSSSHDTEFSADQEPEGWVARPITRDAARGCHFHDALDTLLRRALNRRTWSIEYRCVVYQHSRGVYPDRWEATCLVRRPENNLQGGEMSENRRRGGRRAQQERAAQQDEVPQQQHLPAPPPMSIEQMFLMQTQAVQAIGQTLAAIQQQQQQQQQQHHLSLRCPETSVLNS

SEQ ID NO: 84964 - protein, 288 aa, Zea mays
  Coding DNA Sequence Number=SeqID_41589
  Homolog annotation: Hit_ID=A3BPB8; Match level="QueryCoverage=42%, HitCoverage=38%, E-value=4e-14, Identity=47%"; Hit description =Putative uncharacterized protein
  Subcellular localization annotation: CTP_CleavageSite=42; ConfidenceScore=5.19e-01
MPASAIRVLAAALRPGMPPRSPRHLRPRPALHGRKGVIPGITSATAPTILALTPLSIEGRVPFQGLPLRQPPPFSPSSALRHPHPHPPPPSSSYAQVFGALLLPLPSPHIWIRGSLRLPRKGPTTRGQGSMVGASPTSVVVGSFAHHLMLAFYSAPSPDNGVAAPSSIRNKLKRPRLMSWSAVQIVGNFAPVGEQSPTSSSTTLAKAGGSKARVTEIFVVTVSGSKVPCLAFGTRKASFLLEVPLSVVASLFDEGHSGGHAVDIGIVIEEHLNPVVHACKGEPESCRD

SEQ ID NO: 84965 - protein, 158 aa, Zea mays
  Coding DNA Sequence Number=SeqID_41590
MPVLAVFKYYVVSWLRVSHHHWCEVLSQVSDLVINHDREKDHDREKDHGFSMEDEEEAGFSTAALQRKPRWWWRMKKEAGLEDEEEATVTLSMEKDALECDICCLPFLCEVFMASQITMHVYIQYILIGRLQHDALLCVKSVQERAFWMCKVLHPHGR

SEQ ID NO: 84966 - protein, 351 aa, Zea mays
  Coding DNA Sequence Number=SeqID_41591
  Homolog annotation: Hit_ID=Q56PB6; Match level="QueryCoverage=77%, HitCoverage=47%, E-value=1e-07, Identity=25%"; Hit description=RPGR
MSTELLSKTYPTKEKTLKVRDCLFMYGIAGFKLTHDEGNSELWPARRKQSARMELGAGRTEVELSELRGSELKGAEEDGRHGKRKKQLGTLQLGIDLRNGDWHGWEEFADKEFANEPELRARARKSLGRERTDRELQAPNCSRNQRHCEQVDMGGTSLAERAGREKQGEGTGKEEALGAGSWAPEQEAAGCGVGTRAGDGACTEKRPRHGRSRADELRSLRELGELHGRSTQGGTPAREQEREGSGCARRGSSRELPWELSREETQGMGDALAWEETGGRGMGDLEQASRGARSERRAPGGVEGVTQGERRLEEEQRALEITTAGWWDFSSHVERHGQEDQRSAVGDKLHG

SEQ ID NO: 84967 - protein, 154 aa, Zea mays
  Coding DNA Sequence Number=SeqID_41592
  Subcellular localization annotation: CTP_CleavageSite=34; ConfidenceScore=5.31e-01
MSPDSPVNYSGAASNFPKGSEFSVKFPGAPDTVRWHTGQSAGASSLAPPVPIAQAPAPRGDDPDDSGDDGDDDDEAEEEENNNEEVNDDQEDNLVGMWHITEHYTSMFETGHFPNLLQNVLHALGTYVRPLYDTRHTSISPHPAWPFRERINPF

SEQ ID NO: 84968 - protein, 258 aa, Zea mays
  Coding DNA Sequence Number=SeqID_41593
MVTSGLMVGESEPGCGLCPSLSLKDFHHQGWGEDCSVPGFRTRVASEPLVAPASATAAGRGSSAGVIAKAGHGPTSNSTAFCPSLPYEFWHGRRPPGSSIRPEVSAAVVRPPGAEVVVVAAAGAGDGAPFVGLPLLRRPSPMEWDSPVDYLNRFTKHESPRVKVTSEPGCPSAGPMPELISRGLRGNRPSRLLGPDSRRSPWQRLPGRGDDVVLRSGDPRTASPSEARSGLAEGIVDAEGATAPFQREDPSLQDQIVL

SEQ ID NO: 84969 - protein, 600 aa, Zea mays
  Coding DNA Sequence Number=SeqID_41594
MGKNNKRKREPTPPSEEFGDLEYSEEEFSSESEGSPAPIPLRESSDDSDDSQGLAAEVWTYIWAVERSGLEGSDESEYSSDEEDSDDGSEDEEDDDDDDDGGDGDGDDSGRGGGSGSKDGDGGGSRGSNRGGSSRGSTRGGSGGGGPTSRAPASLPSPFRPRRPKPRATPAADSPTPLVSAPPLSLARTSHWQPTPLVSSISLAHASPARSPPSAARPVASPLKLAPTSATDPPLCPSRPLILSLPESSRRRLLHARHHGSSSVLAVPSIPLPLPGAYKRDSRARALHTSHGHLLHSSPSSIELAAPAVLPSTAPMENPWVIRTSYCSEEEGFPHLLRSCALRLGIRKKPEYVWKEYRENGMEKCSMAVYLGESRNYPNHPPFQITIIGHRFPDTCQSVARKALKQLCQNYSRETFETPLRYFPPSNKNTPTWKKRLQALSGGDPIEDDPTIVYMAGYLHTLDNHYDELSSHCTHLNSRVECLEQQVKELTQEKVSLQKSLSIAEGEEANTREAYRTLKSDFDKKLKALAPKKKIQKKTTNQGCQTEKKKKKAPLALPPPRIDDWSDEEDVSLASLDDLLKAFGDTLDKELASTSKNALV

SEQ ID NO: 84970 - protein, 198 aa, Zea mays
  Coding DNA Sequence Number=SeqID_41595
MRKKHGSVPKLHTCSGLDSQDEQKTLAFKVPLQTELRFPLRRYEQTPLHGGRPAEQRKTDERRAVTCSSSGDDDDFCPGGPNNGSTDLRADAAARRPPPMPKLGLGKGNTPKRILPCEGTGLRAPLLIRGSKAGPPRGSTVASDRVGPTPTTGQRFEGRPPKGSTAASGYSGSAPITDQGFEGWPPKGSQSPQTPSEG

SEQ ID NO: 84971 - protein, 99 aa, Zea mays
  Coding DNA Sequence Number=SeqID_41596
MKGIHPHHLVSGMIRDSLVYGRAKGDGSAGVGVKSIEQHVKELKKEKASLQECLDIAEGEEANTREAYRTLKMDYDKKLKKLTPHEENPKEDQEPRRPG

SEQ ID NO: 84972 - protein, 81 aa, Zea mays
  Coding DNA Sequence Number=SeqID_41597
  Subcellular localization annotation: CTP_CleavageSite=39; ConfidenceScore=5.24e-01
MTLGTGRHSTKTALPSVKDSVNGSGGGRTKTKVERTVPLANHSDPNNANSCHAGLPGPGPRYGQKAERWCTTERGGQERST

SEQ ID NO: 84973 - protein, 1067 aa, Zea mays
  Coding DNA Sequence Number=SeqID_41598
  Gene Ontology: Mol. function=metal ion binding; Cellular component =intrinsic to membrane; Biological process=innate immune response
  Homolog annotation: Hit_ID=A5B4Z5; Match level="QueryCoverage=98%, HitCoverage=91%, E-value=0.0, Identity=40%"; Hit description =Putative uncharacterized protein
  Pfam annotation: Domain name=DZC; Domain location=1024-1059; Score =67.7; E_value=3.9e-17; Accession=PF08381.2; Description=Disease resistancezinc fingerchromo
  Pfam annotation: Domain name=FYVE; Domain location=644-712; Score =30.2; E_value=3.1e-07; Accession=PF01363.12; Description=FYVE zinc finger
  Pfam annotation: Domain name=RCC1; Domain location=317-366; Score =18.0; E_value=0.0084; Accession=PF00415.9; Description=Regulator of chromosome condensation (RCC1)
  Pfam annotation: Domain name=RCC1; Domain location=424-473; Score =22.5; E_value=0.0016; Accession=PF00415.9; Description=Regulator of chromosome condensation (RCC1)
  Pfam annotation: Domain name=RCC1; Domain location=486-535; Score =15.6; E_value=0.015; Accession=PF00415.9; Description=Regulator of chromosome condensation (RCC1)
  Pfam annotation: Domain name=RCC1; Domain location=538-589; Score =10.6; E_value=0.052; Accession=PF00415.9; Description=Regulator of chromosome condensation (RCC1)
  Pfam annotation: Domain name=RCC1; Domain location=592-641; Score =30.0; E_value=8.7e-06; Accession=PF00415.9; Description=Regulator of chromosome condensation (RCC1)
  Pfam module annotation: Pfam domain module=DZC::FYVE::RCC1::RCC1::RCC1 ::RCC1::RCC1; Domain location=1024-1059::644-712::317-366::424 -473::486-535::538-589::592-641
MAGGFEWSSSASTTRGVELQQSIVALKKGAHLLKCGKRGKPKFCTVRLSYDERALIWYSKERGKRLSLNSVSSVVLGQKTTKLLRLHWPEKESHSLSIIYKNGESSLDLVCKDRDQAECWYLGLTAVISAPCTPLLLIDSTNSRRINSCTNSPPSYIQQRSRLFAVHDGRNFPKVNSLYGSPRLIQNKYLRNNLDCSEPFFSPRQRAWSELDFYLEKISPELVDRVKNNLRDIKSAEIINDQRIMQIPKLKQSEGSNAAADSLKDIFVWGDALGRMSDHGHVSASNISLPRLLKSSEILDVQSIACGEKHAAIVTKQGQVFSWGEENGGRLGHKTSDSVSDPKIIDSLSSTPVKTIAFGAKFTCAVSVSGELYEWGEGIDSLGFGTNQCQRSPWFPHKLIRTSDGISVAKIACGQWHTAIVSSTGKLFTYGHGAFGVLGHGDTRSFVQPKEVESLRGLRVKSVACGPWHTAAIVETSGTLKSNAPGGKLFTWGDAGGEKLGHTDKKSKLVPTRVESLVDCDFTQVSCGISLTAVLTITGVVFTIGSKDHGQLGNPRSDTDSACICMVEGPLKTEFVKDISCGSSHVAVLAMNGKVFTWGKGTEGQLGLGDYVDRSSPTLVEALEDKQVDSIVCSSNSTAAICVHGEISSKDQSVCSSCRLAFRFTRKKHNCYNCGSMVCNSCSSNKVHRAALAPDKSKRCRVCDACFNELNKTAEHGKMSCGSKIQKEPSYLAETRTYTPKLSRMLKEANFIMEKMGSSAQSPGQRNQEPATPNQMQKERWGQVECPDRFKCARDNIPHRLTPKKQTIDDYPMRRMADPVSQKTAAPLTQTTSDRRKEQDLIEKILLEEVKQLQAQVTTLAEECRHRSLKVRLYKRKLEETWLIVRDEATKCEAAEEIIKVLTNQRNALSNKLLDGLELDGSSIVPNPPDKALATCKTPPLNSIRDQHNAEAEEVLDTRSTASSNTVAVDDSAAHQNGRSRASSSSRGYYDDGGTDSTAAPTDSNGVIEQIERGVYITVVTSPSGKKGIKRIRFSRKHFGEAEAQKWWERNESRVFAKYDSVEYLAA

SEQ ID NO: 84974 - protein, 118 aa, Zea mays
  Coding DNA Sequence Number=SeqID_41599
MEQKMAVKCDGKSAATARKEWKRAGGSVAVGGCKQSPKKNRKKFRSLQVQPKRRGRGAEEADGDRSRQHVRSAGRQALPRPARTTQLPADDAVSLARRRLWCPDAVSPWTTVECGRWP

SEQ ID NO: 84975 - protein, 357 aa, Zea mays
  Coding DNA Sequence Number=SeqID_41600
  Gene Ontology: Mol. function=DNA binding; Cellular component=nucleus; Biological process=response to salicylic acid stimulus
  Homolog annotation: Hit_ID=Q6ZHD2; Match level="QueryCoverage=65%, HitCoverage=44%, E-value=1e-34, Identity=43%"; Hit description =Putative late elongated hypocoty
  Pfam annotation: Domain name=Myb_DNA-binding; Domain location=153 -200; Score=32.5; E_value=1.6e-06; Accession=PF00249.22; Description =Myb-like DNA-binding domain
  Subcellular localization annotation: CTP_CleavageSite=7; ConfidenceScore=5.07e-01
MDDRGFRLSARSGAPRVACRLKRTCNSGNPTPVQICPYVKRSPPLLALLAQVEARGVVQGGDLSAAWVGLFSGSLVSSDPSTGDALFGGNIYDLALLVLFSWPGWEKDRIEQIPMATGETAVDRREDPRDMDLSGEEHVRPKARKPYTITKRRERWTEEEHGRFLEALQLHGRAWRRIQEHIGTKTAVQIQITRRILHQGPLARRSAYTTPFLMSESRRVLKVVRESSPGSNASAGAAPAIQIPPPRPKRKPAHPYPRKADGAAKKPAPELKRLEKTSLRDRVRDEGSPTSVLASARTALRAEVSGSVVANSSSASRSPALSDAGSNERGDGGGSLASSVDREDGCASPRTRAPCTK

SEQ ID NO: 84976 - protein, 242 aa, Zea mays
  Coding DNA Sequence Number=SeqID_41601
  Gene Ontology: Mol. function=metal ion binding; Biological process =metal ion transport
  Homolog annotation: Hit_ID=A2X8D2; Match level="QueryCoverage=46%, HitCoverage=64%, E-value=3e-41, Identity=67%"; Hit description =Putative uncharacterized protein
MSRPFPANRYLFPENNICSWRIYPRPWPRVLGDAVLLWNGRTAIGVALVQLTVNVGLLSLAAVFIRFVPAALLHRRPSIQAGGRLGRWLENASLLEDAEEHHLVERVVASWLCISVAMLGRGDERAHGLRRLREARVSSVEIDMDRQKVTVTGYVDRREALRAARRTGRAAEFWPWPYDGEYYPFAIQYLEDNTYMATNKYYRHGYNDPTIGSYPCHAFTHVLDDDALAVFHDDNVHACAVM

SEQ ID NO: 84977 - protein, 63 aa, Zea mays
  Coding DNA Sequence Number=SeqID_41602
MARGMSLAALPFRSNLEPRDVSDGVCEQAELICVTSSGHPSARGLAETGNHVHVAEDPSQKTN

SEQ ID NO: 84978 - protein, 315 aa, Zea mays
  Coding DNA Sequence Number=SeqID_41603
  Homolog annotation: Hit_ID=A2X8D7; Match level="QueryCoverage=90%, HitCoverage=57%, E-value=1e-129, Identity=78%"; Hit description =Putative uncharacterized protein
  Subcellular localization annotation: CTP_CleavageSite=55; ConfidenceScore=5.19e-01
MGADRIRRPCGRNLPDTPARSLFFVFQVFSLWSLANLIVLVVHTRRCSFAPPQSTAAADTNPTEFILESLEQSDPRSLIQYLAYQDLCVASECNLEPWRRAAFFEESGETYKRIVTTCLKPLEEFTSKIAESLEDFSSDKPELMLQQSKLFSAFDDFQICAWCARTLTGLTACSRQEDRYGVAQLTGCNAAVMTTLLSALVAIETCLGKKTNPQPVHSLGPENIRWVNFSTGRKGTGVAIACTQKGGLHKKAYTMADVLRTSVYQIVSAFIDDLRANAKPSSLEKNWISEGRKPVYGSQAVLVQKLILFIEYRAV

SEQ ID NO: 84979 - protein, 110 aa, Zea mays
  Coding DNA Sequence Number=SeqID_41604
MEEGCEGCGGWEWSNELVVGVVWKETPESTTQSVVGGGGGGGEGTRLMASEEEAATGSARGREKGGWGPAVDGSEGRRLAGRRPTEKGEKRAGMDPAALARKETDPAVQA

SEQ ID NO: 84980 - protein, 187 aa, Zea mays
  Coding DNA Sequence Number=SeqID_41605
MGRWRSTGGPRHDGVTPSSVLTGDCYFGKFMKKKGYGARIRCYKCDIQDYIIIDCPQNGINKEDKGENKKDKKDKKMTFKKKGHAYCVEEVKKKALASITINNKPSPFDTPSTCFMAKVPKKKREESKELDKKHKVLEQSFEKHLATQEVLIETREKIKEAYFTLFGQKEESIEMANIGNTCDIGLF

SEQ ID NO: 84981 - protein, 275 aa, Zea mays
  Coding DNA Sequence Number=SeqID_41606
MGDACNPSALSLEGRNSVGVDTFQPSFGFKDFHQAARLHPLAGASRIFIISAGEGSVPSWGRSLRGRRPAPSLSDRGKGVRRSWHGQLPRARLSEPSGFGAAPGAAFRHGSWKRFRRRRASRRHPRTDLQLYGLLPVLASRVGGMGEGLMAAASALRSSLPLFGPPEQNTETHLVDYLNRFTERELPRAKVTSESWLRKGGVVGQSLAGLSTGGADAGVELPRPQAELMSLGSGGPPTASPSEARSDPAEGVVDAEGAAAPFGCQRPSLQDQVVL

SEQ ID NO: 84982 - protein, 220 aa, Zea mays
  Coding DNA Sequence Number=SeqID_41607
  Subcellular localization annotation: CTP_CleavageSite=58; ConfidenceScore=5.42e-01
MAGPSKGSTAASGHSGSAPITDQGFVGWPSKGSQLPQTQSEDSAARTAPTTEPPDRVRLTAAKAGLEHHRKLRLARPQGSDSGSAPEDGELRSARPRARTRAQPRKTANSAPPDPGLGLGLSPGRRRTPLRPTQGSNSGSAPEDGELHSAPTQGSDMGSTPEDGELRSPPPRLGLGLSPRRRQTPLRPTPGLGLSPGLSRRSPPRPTQGLRLDHSHGRQT

SEQ ID NO: 84983 - protein, 423 aa, Zea mays
  Coding DNA Sequence Number=SeqID_41608
  Gene Ontology: Mol. function=transferase activity, transferring glycosyl groups; Biological process=metabolic process
  Homolog annotation: Hit_ID=Q2R1N0; Match level="QueryCoverage=29%, HitCoverage=25%, E-value=6e-28, Identity=56%"; Hit description=UDP -glucoronosyl and UDP-glucosyl transferase family protein, expressed
  Subcellular localization annotation: CTP_CleavageSite=25; ConfidenceScore=5.34e-01
MVRETTFLLGISPSNYSTISRRLVLATTSFATARDIVVSARCLFMPMNLHMLSLVVHLSELAASLPGEFGDLAEPVRLPGCVPILGLDIVSSLQDRFDPSYVVMLHLVVHCREAAEAILVNSFDAIKPEAVEVLRHPAKSGGPPVRGMGDLVVTCKWSYRERECESESDEMVDDEDNNDVLHSRLGLLDLEEHCSSLESTQVPPPRPPHEHAPSQLEREGAVPLSAREWGRTGGGTVDAHETPPRPTPGLGLGLSPRRRRTPLRPTQGSDSGSAPEDGELRSARPRARTRAQPRKTANSAPPDPGLGHGLNPGRRRTPLRPTQGSDLGLAPGDDRLRFARPQGSDSALASADGLCLARPRGSDSTTATEDRLDLDLGGASTSPNLGRGPTTSTGGAIITLPRADSGYGEQDRRPIWLAPLDRQ

SEQ ID NO: 84984 - protein, 160 aa, Zea mays
  Coding DNA Sequence Number=SeqID_41609
MPSSSSSSDTTPPAAASSEETLSSVMVEELRAGDSVDFGVSWMTPARVEDMQRLGYFGGGVARAPGTEEVPEPEVAEEDADEGALRCAAGQSSGRDLVEEFVAYGVWPLAHGWALGERVNEDVCGPGGKDVFARAPGVFGSDAEGYRGLLAEKCSYPLRG

SEQ ID NO: 84985 - protein, 369 aa, Zea mays
  Coding DNA Sequence Number=SeqID_41610
MNALSREGCRHYEALDQVDEDFGRDIFEVEDPVVKESAGALYDRMWGSYGREVVRARAEAARAQAERGERVDDFGALNSALPEPGTTPAEAATGVAPGLTPETAEDAPGAPASAAAGEDLPPKVAEGAPDAPAAAVPSAEDPAEVGAEAATEAAAEAPAAAGPSQVQDFGPAHATATTEFLAASTAEDGNECGGSVSEFFDFTDSGSSVEWTEESSEEDLDYFAALDVAAAEAAPHAADAPGVPGPSTGHRRRRAIAKRRISAEEGARLRVSRVGRQELLSLPAASGVGEGELRSLFAGVLQVLAVWRCEPVSAGGSFCFDYEGALPLGLQLALGLRPSCSDEYEVPRAELLWDDCAVAPCFGLGLVFV

SEQ ID NO: 84986 - protein, 149 aa, Zea mays
  Coding DNA Sequence Number=SeqID_41611
MEKAMNGMLSHQGFGPFYTEKARDLRIQVRHSAKAILHSAKALPSVTLGKERSANCTSAAVSLPSTFCRALGKEFAECHLTLGKEKSPSRRQVTVTDPLPSVFFGTRQRGQFCRVPAIMALGKDGSSGPHRQSLCRELSSAKEDSLPSV

SEQ ID NO: 84987 - protein, 216 aa, Zea mays
  Coding DNA Sequence Number=SeqID_41612
  Homolog annotation: Hit_ID=Q2R3Z2; Match level="QueryCoverage=31%, HitCoverage=8%, E-value=1e-07, Identity=41%"; Hit description =Transposon protein, putative, CACTA, En/Spm sub-class
MYILDANYDSTLHIFILLPCTTTGIAGFAECLLSGTRQRRLCRVLHSVKLGTWQSALYRVLNTRHRTTLGNDNFAECQTLGKGGSRQTAVSGRPKADGRQSLPNFTTTYYGDKLPSVHNPPPRYNDGDNESNLSIFRGQLGSASGSTTKTLRHEEWHHIMLYVLTNLEEQKQIKKGHPGHFAECNTRQRVALPTAMTMALGKEGNLGTGKAIFAEC

SEQ ID NO: 84988 - protein, 145 aa, Zea mays
  Coding DNA Sequence Number=SeqID_41613
MVMNVKASVHNIQILRGIKLQREVAVKAIHWQATKDVMNIKERKHILLSNHHGRCPQNPLVVKEERSTWVVVVVAKSVQRTMRRVKKAGSQGSMQQDTGRGEARTGAHTHTLTHAAGRKLTALHKHKVLAYYGTALQIDERGRVV

SEQ ID NO: 84989 - protein, 115 aa, Zea mays
  Coding DNA Sequence Number=SeqID_41614
  Homolog annotation: Hit_ID=Q8SA86; Match level="QueryCoverage=65%, HitCoverage=8%, E-value=3e-08, Identity=43%"; Hit description =Putative retrotransposon protein
MMRRSGLVVPEEAVAKGDIAEAEKTVAEDGSDDEFEEDNNILSPLKPSQIEFGKSTMSVEDLVMMKKLGYFGEAERHQSPGDRLKWPTGWTNEWFYVKADEKKREKLMTMVMSPM

SEQ ID NO: 84990 - protein, 412 aa, Zea mays
  Coding DNA Sequence Number=SeqID_41615
  Gene Ontology: Mol. function=DNA binding; Cellular component=nucleus; Biological process=regulation of transcription
  Homolog annotation: Hit_ID=Q84NK2; Match level="QueryCoverage=79%, HitCoverage=76%, E-value=9e-50, Identity=40%"; Hit description=Myb family transcription factor-like
  Pfam annotation: Domain name=Myb_DNA-binding; Domain location=269 -320; Score=41.8; E_value=2.5e-09; Accession=PF00249.22; Description =Myb-like DNA-binding domain
  Subcellular localization annotation: CTP_CleavageSite=30; ConfidenceScore=5.45e-01
MEASSAASPDLSLHISLPSSAAGSGPSGRRAAVGGGTGGGGGAGGDPWRRLNGSTASTELSLSPPVEQEHADALPWRHRPSAAAASSAGHHPLDGGGGLGAGAGAGGGASVALPIRGIPIYNGPGGFPFLPPASGADGAPLHHHQQQQKLGFYGSYHPSTWPSSLGSTSPSPSPLAPGTPPSPLLDPASAAFLSPAAHHHHRMLSASGRLNGMLTDTLRGYGAGGVGGLGGIVGGHHHHHHHLHGAQPFGLGSRFMPKLPAKRSMRAPRMRWTSTLHARFVHAVELLGGHERATPKSVLELMDVKDLTLAHVKSHLQMYRTVKSTDKPAASSGANDGGSGDEDFAGGGQAGSGGENMCARPFGEHRSTSEGAASSVGGGGGGDMDQSSAGNGSTRWSNSSRYSILHKRDYPY

SEQ ID NO: 84991 - protein, 84 aa, Zea mays
  Coding DNA Sequence Number=SeqID_41616
  Subcellular localization annotation: CTP_CleavageSite=73; ConfidenceScore=5.49e-01
MLVPSFSPLSDVPFVFPAFALFFLPSLLLTVAAASRPTLIDAGTGQVGHASGLSPCVPSRRTWWRLPLLGYLSDEESKSEILDN

SEQ ID NO: 84992 - protein, 154 aa, Zea mays
  Coding DNA Sequence Number=SeqID_41617
MQEANPTDGPHEPVKAKARACGLESWLACSREGGVGRGSGAATLPEETIYSKVSTVGLDPYGKCRTPRYTDRTSWRGSRPQQHLICPVHSADGRRPSHPAGGVPVRSGGRQYAHAAAYTVLIITRTLPLKLPLHVDTTQAADIRAQGECTGDQH

SEQ ID NO: 84993 - protein, 52 aa, Zea mays
  Coding DNA Sequence Number=SeqID_41618
MALLDPPERLHPEVALNLCRRLLKTSPRRSYKTLYAMEMAAARFQCDPTDVE

SEQ ID NO: 84994 - protein, 224 aa, Zea mays
  Coding DNA Sequence Number=SeqID_41619
MHHLTVVRSSQAFVYPTAPTEAKRPASSTLRLLHYKTKAYDDTRPGGPRGIRPIESKFQHLEPTVRATKKPPATAPKRASSKAAPSVDEEVKAALLAEKKGKALADTTHQEACEDDALSKRQRNDQPTPKGTLRTCSSVGQPQAPPGFAPLEGEDTTEDGEVIGVSAEEQLQPRALRIKNRNLQRQKEILEAKRQRVSAQAKVRQMIRDEEQRAQELEQEITLM

SEQ ID NO: 84995 - protein, 163 aa, Zea mays
  Coding DNA Sequence Number=SeqID_41620
MCGDPAPRAGGWEPLELVGGDFARDALECEWGEPPLKRDRSPGQWTCLRTPLMHCALPPSESPDGVHPCCLRLAAVGGARPRGGWRSSDIARLQGFSSRSPAAVSRRRSPRMMTVGLMVGTSKPGCGLYPALSFKDVHHPRCGGGRAEPGSYLPHGSASRLFL

SEQ ID NO: 84996 - protein, 217 aa, Zea mays
  Coding DNA Sequence Number=SeqID_41621
  Homolog annotation: Hit_ID=Q6QP51; Match level="QueryCoverage=68%, HitCoverage=75%, E-value=3e-21, Identity=43%"; Hit description =Putative growth-regulating factor 1
MAEARATLPRSRPRLPRDAISLRPSPALGRNSSPRRIHALPEGLLRQWAHPRLARGPARAGFVEKQPWPNRLTNRPYRRRIQCEDRLTPYPDTRASVGKVEVTAVTSPFFTDRSDRKTAPPHPASDCCAQPPGARADSSKFSLGRNRKLRLAPTSGLGLGRRSPASPDPKTRPQPRPREELRPRPTPASASGEVSASPDLGLGPTAPQGIHHHPTSS

SEQ ID NO: 84997 - protein, 66 aa, Zea mays
  Coding DNA Sequence Number=SeqID_41622
MVKHQKIEFDFLDEVDPFFSSLGLIDSRCFFLYVYADVIVDITPQLITLNQKSKSDMYHKNKHSGI

SEQ ID NO: 84998 - protein, 209 aa, Zea mays
  Coding DNA Sequence Number=SeqID_41623
  Pfam annotation: Domain name=SWIB; Domain location=136-193; Score =4.4; E_value=0.0075; Accession=PF02201.9; Description=SWIBMDM2 domain
MNSTYCFSRCVERHVYSSYDEFLRLHEVYQFVLVFLFVGMPDSNELMFNTEQPTYNFGAYKISKLKKERRAQLDSIHVKSKAAAKFAHANSITEQPFAPVAAVSHWLTPARSCITSFTDYVFSVYLHSVGKLQPHCNKVYKRFAIRKNKFMGSNKNQAKKTDINCDATLKSLFGGRDKVGMLEISKLLSRGFPKISKLLWSMEPGMALW

SEQ ID NO: 84999 - protein, 272 aa, Zea mays
  Coding DNA Sequence Number=SeqID_41624
  Gene Ontology: Mol. function=protein kinase activity; Biological process=protein amino acid phosphorylation
  Homolog annotation: Hit_ID=A2X6D5; Match level="QueryCoverage=44%, HitCoverage=15%, E-value=3e-52, Identity=87%"; Hit description =Putative uncharacterized protein
MSAISRQQGKLGGGSLRHGVQAYSRHQQQPMANDLLETGWGWKRLVPYRPGYVEWHVFKKYLGDYFDHNREAFLCAEQKPDPFGWIIAEKSALIAAAKLLPINLHHCKNNQNAFQCLKMEKALLRYCASFLTPDDKRLILGIKDQAKQMIQSEVLQAMVQMGVLVPTGDMTVVRRTAQFFLNSFQECLTAQRKEREMATAELGFKKQLTKEEKFEKRKQRLATIGEDLLAIAADQPFRFPATFTFVVRAFSVLDGTGKGLHPRFHITEIAKP

SEQ ID NO: 85000 - protein, 250 aa, Zea mays
  Coding DNA Sequence Number=SeqID_41625
  Subcellular localization annotation: CTP_CleavageSite=46; ConfidenceScore=5.20e-01
MAMLLAAPPRLQEGRAALAVAVAWPSGGRSPRSMACGRRGPPVARRCAPAVGDLLRQFSWPPVYHALTGSPTVPSTAPPAARARARGRLGRSAPAPGSMRSANRGRHQGGADPSAPSMLGPLRARSGSRRVGFDIALGTDGAIVPFQPWDVVSAVPMQVPNLQPPFVRSMEISHRRLQPDCHDQSKGVDNVLESYENETRENDRMKSLLSLLQRVHCLYISTKQCLPRGVSLGKELTRVDHIMDYLIQII

SEQ ID NO: 85001 - protein, 176 aa, Zea mays
  Coding DNA Sequence Number=SeqID_41626
  Homolog annotation: Hit_ID=Q2QM56; Match level="QueryCoverage=89%, HitCoverage=80%, E-value=1e-15, Identity=62%"; Hit description =Expressed protein
MSLPVLYVSFLHVPPAALARDTTFWFLMSNSIIIVIAADSGMLFFRSSSSSSPDDDGDGDGGLHAPPPTKDQQASLSSQALVPVVVQDKSVVLSEEKPRRQLRRAATTTTTDRRPPPETTADEKEKLESEYSRLSDEELNRRVEEFIARFNREMRLQLEEEEDEEEQARRSGSESD

SEQ ID NO: 85002 - protein, 89 aa, Zea mays
  Coding DNA Sequence Number=SeqID_41627
MEVPSLRGPENAVACPHKGTVVARPLDRGAAAADLGTATSTPDRGTAATARRGRGAAATAATGRGSTAARAIGQPSSSHAPSLMNLDGA

SEQ ID NO: 85003 - protein, 272 aa, Zea mays
  Coding DNA Sequence Number=SeqID_41628
MVTAGFWVGESKPGCDLGPTLSFKDVHHPRWGGSHAEPALYLPRGFAGRPFPRRSGVEALAGPADGADLDNVGLIDGGRRYLQRVGVVGRASGGPSCRRVTAASGRRPTRPGGFEWGSAGGLVSPAIGTEAEAAREVLVTDGITATTRAPGHRTGVLVLAPRASAGARARSQQHRPTVAVVRMGGGEPTVGLLLLRRPSPWSGVVRTCGGGNRSSVRNGTSNASAFCSLWLSGPEHESLGPFGLVVWGSSSLVKETPRLPFGGPRPGVAISV

SEQ ID NO: 85004 - protein, 116 aa, Zea mays
  Coding DNA Sequence Number=SeqID_41629
MGRGRFNLGHQERDAEDLMATDAGELSSYWGGAATTEELRCGKGFLAPSSLGRDRTLTRPQIDSDGCCQVDRHQMRMRIQYFIGQAVESSSHSQRTTVSPSSSSSSSAPAEDPLPA

SEQ ID NO: 85005 - protein, 113 aa, Zea mays
  Coding DNA Sequence Number=SeqID_41630
  Subcellular localization annotation: CTP_CleavageSite=27; ConfidenceScore=5.22e-01
MRPPATEHSSLQDAAASRRAGCPRDVTAFTRRKWISDSSRSCTVDAVNPFPASRSVIRLDSDDYTFPWIHNFYSASLSLVTPLGSILDPSLDVMDYGVTTNLSADDECMHQQD

SEQ ID NO: 85006 - protein, 789 aa, Zea mays
  Coding DNA Sequence Number=SeqID_41631
  Gene Ontology: Mol. function=translation initiation factor activity; Cellular component=eukaryotic translation initiation factor 2B complex; Biological process=cellular metabolic process
  Homolog annotation: Hit_ID=Q2QM52; Match level="QueryCoverage=60%, HitCoverage=79%, E-value=0.0, Identity=74%"; Hit description =Initiation factor 2 subunit family protein, expressed
  Pfam annotation: Domain name=IF-2B; Domain location=288-581; Score =316.5; E_value=4.9e-92; Accession=PF01008.8; Description=Initiation factor 2 subunit family
  Subcellular localization annotation: CTP_CleavageSite=67; ConfidenceScore=5.04e-01
MDIRRGPPPPRTASGGVEPRFRQVGFVTAAEPARGAATPAPASPAASDGLSPVMIPPPLIPVPVPVPVAPASESLAPSSPPPDSSSRPDAVSDLDDDDDIDVSWARPPPPAFPEPNKRHLTERKNEHAPPTPVSQKPKLSKAERRAIQESQRAAKAAAKEAGLKSTAMASDANTKQPKTAKISLKKDVNQVNSPVASDKKTGERPPDKDRKKDAPQPRMQFDDTHRVVKAKKRSVVRQSEAQNRVELFRHLPQYAHGTQLPDLESKFFQPDLMHPSVYKVGLQYLSGDISGGNARCIAMLLAFREAINDYSMPSEKILNRDLTAKISSYVSFLIECRPLSISMGNAIRFLKNRITKLPLAFSESEAKVSLQSDIDRFINEKIIVADKVIVSHAVTKIRDGDVLLTFGSASVVEMIFDNAHELGKKFRVVVVDSRPNHEGQGLLRRLVAKGISCTYTHINAVSYIMHEVTRVFLGASSVLSNGTVYSRVGTALVAMVAHAFGVPVLVCCEAYKFHERVQLDSICFNELGDPDAISRVPRDESLSNLKNWAENENLHLLNLKYDITPSDYVSMLITDYGMATVGRPCPGLDWSVAWLLARPGASGPRLTLAAQAGRGSSAGADDDDEDDGDTVVLWLVLSLPKLLGARTAATAAASPCVINLYYSIKLVRSASTLPMPPPARPLLSTCAASALDAPRHDPRPRPPLLPGRDPRPRPMRAPAVTPAQCPSHPPPHNPGGRSAATPPLPRPRCDRRGDNSVIPSPRPPPLRDGSAPPRLLLLSLTSSFSTIQW

SEQ ID NO: 85007 - protein, 178 aa, Zea mays
  Coding DNA Sequence Number=SeqID_41632
  Gene Ontology: Mol. function=nucleic acid binding; Cellular component= ribonucleoprotein complex
  Homolog annotation: Hit_ID=Q6J9V9; Match level="QueryCoverage=35%, HitCoverage=22%, E-value=6e-22, Identity=79%"; Hit description =Putative uncharacterized protein
MAAESSAAKSLLSGTKLTAYSYNSPDCPVLMPWKFNECYTLFVIDHVKKHVTFIDFTPTEDWYKHMPYKRFAKAIIMVSKKYKIAYSKKCSGWAEDIFKWEHTIQTGIPIDLRGLNTSYLVLKAMTMWGNDRQMEFIRDAKILRSNSVIDLLSYEDNLCRYTIPSNIQQRLIDITKKD

SEQ ID NO: 85008 - protein, 337 aa, Zea mays
  Coding DNA Sequence Number=SeqID_41633
  Homolog annotation: Hit_ID=Q949D3; Match level="QueryCoverage=89%, HitCoverage=66%, E-value=1e-85, Identity=57%"; Hit description =Putative uncharacterized protein C650ERIPDK
  Subcellular localization annotation: CTP_CleavageSite=61; ConfidenceScore=5.01e-01
MDRWTGVVYVPLSRGGPLFRVAASLLLSPAKTLAVPRVNAILFTGDRVRGTGDPVIERLSDAAHLAGVLAGKLPGEANAWVVDAARFAGPFAVYRELVPTVDAAGDPKGYDPTGFPAAAGVANILARSIGEIQNQVPGLSAKDSAGNQHPPSYHPPARTIILGFSKGGVVVNQLVTELSRWGASGSTNQAAAADVPRPAAAGPGPPPHPTQNDLLLLGAPTRSSDDLLSSISELHYVDAGLNRAGAYVADRAVIGRIREHVVRAGDKSLRFALHGTPRQWCDPSRPWIREEKDAMVQVLADEARRSEGRLVLSEKLYFEGRPRSLLMHFEVLEAMDI

SEQ ID NO: 85009 - protein, 328 aa, Zea mays
  Coding DNA Sequence Number=SeqID_41634
  Gene Ontology: Mol. function=transcription factor activity; Cellular component=nucleus; Biological process=regulation of transcription, DNA-dependent
  Homolog annotation: Hit_ID=Q7XAD6; Match level="QueryCoverage=100%, HitCoverage=100%, E-value=4e-39, Identity=53%"; Hit description=Ap25
  Pfam annotation: Domain name=AP2; Domain location=130-182; Score =81.6; E_value=2.6e-21; Accession=PF00847.11; Description=AP2 domain
MDFSGELDDFSLQLISDQLLGGEACLPVVPNAAAYTASSVHYHHPTQAAFLQQPAQQVAYVDLTNEYAADATACDCEAAFRAAEPVMIRRRPLLLTVSLPPPASHAWGPAAAVPLPLEAAAAALDANDFRKYRGVRQRPWGKFAAEIRDPKRRGSRVWLGTYDTAVDAARAYDRAAFRMRGAKAILNFPNEVGSRGADFLAPPPPPVAAAATSSSSQNKRKLRDAEATAGGAAEPAAASKSVKAAEASGSPAPPSLSPATTTTTTTTTAASTVTTCCSPSSGSAAAAHEVFPMTPSSWTWEQLEGVFGSLSPLSTTHPQLGFPEVTVN

SEQ ID NO: 85010 - protein, 175 aa, Zea mays
  Coding DNA Sequence Number=SeqID_41635
MSGELQQSEFPKLASSESHLLGAPDTVRRIGRNGPDTLLNRRLHGRDLRYDLVTHIAAEGFDLTVFQLGLQHCDVVRICTDHLLQATPAVVLGLKPVTKLLEQLGLRRQGPRLRVERLGLRFQGRRDTRIWSTRHPSASGEVRWRRSPKTGVSDTKCQTLVFPAATIAGTARKIR

SEQ ID NO: 85011 - protein, 166 aa, Zea mays
  Coding DNA Sequence Number=SeqID_41636
  Gene Ontology: Mol. function=protein dimerization activity
  Pfam annotation: Domain name=hATC; Domain location=42-111; Score=0.7; E_value=0.028; Accession=PF05699.5; Description=hAT family dimerisation domain
  Subcellular localization annotation: CTP_CleavageSite=36; ConfidenceScore=5.44e-01
MSKCMSTRKLVPAAKKMSAAASTTPSSSTSHCGVVSVSIEKQLDVVMEEGQGESWNWRLCCRNQMTRFLAVPASSVSSKSTFSTGGMILDDYRSSLKPAIVQDLGEGDDGDIESVEFPKCVVASNYVVMFVEKHGVVPDLCVADFLMTCRGTWSHTHMEEMEERES

SEQ ID NO: 85012 - protein, 80 aa, Zea mays
  Coding DNA Sequence Number=SeqID_41637
MTFVPIRARALSRKTMKIEQSNKARALDGWSAGLLESRLERSAGVSGTRRTRTPERRRLQPALLHAATDRGSARVSVLGR

SEQ ID NO: 85013 - protein, 361 aa, Zea mays
  Coding DNA Sequence Number=SeqID_41638
  Gene Ontology: Mol. function=protein binding
  Homolog annotation: Hit_ID=Q0WPS4; Match level="QueryCoverage=99%, HitCoverage=68%, E-value=2e-65, Identity=42%"; Hit description =Putative uncharacterized protein At2g20210
  Pfam annotation: Domain name=LRR_1; Domain location=114-140; Score =8.6; E_value=7.7; Accession=PF00560.24; Description=Leucine Rich Repeat
  Pfam annotation: Domain name=LRR_1; Domain location=142-164; Score =6.4; E_value=20; Accession=PF00560.24; Description=Leucine Rich Repeat
  Pfam annotation: Domain name=LRR_1; Domain location=174-194; Score =0.1; E_value=2.9e+02; Accession=PF00560.24; Description=Leucine Rich Repeat
  Pfam annotation: Domain name=LRR_1; Domain location=203-225; Score =4.3; E_value=49; Accession=PF00560.24; Description=Leucine Rich Repeat
  Pfam annotation: Domain name=LRR_1; Domain location=314-337; Score =7.0; E_value=16; Accession=PF00560.24; Description=Leucine Rich Repeat
  Pfam annotation: Domain name=LRR_1; Domain location=78-99; Score=5.2; E_value=34; Accession=PF00560.24; Description=Leucine Rich Repeat
  Pfam module annotation: Pfam domain module=LRR_1::LRR_1::LRR_1::LRR _1::LRR_1::LRR_1; Domain location=114-140::142-164::174-194::203 -225::314-337::78-99
MDKICMSVYLKGSQSHGIQQFSIKSSQICETKPLTISSGLFKILSSGKSLHLLSLRDIKMQSPFARMIIHTLLESSCDLHTLEISENNIAGWLSELNKCSTNLLALKSDIFMNSLSVLNLRENNLQKDDVVDLHKILIKMPNLRDLDISGNPVMDEGIRSLIPFISWSIQKENPLLRLTVENCELSSIGVIILLECLTNAKQLLDVLSIADNHLGSSVAAALARFLGSHVRALNATDIGLGTVGFQILEETLPTEVALSHINISKNRGGIRAAYFVSRLICRAPDLVSVNAAGNLLPPESLEVICNSLKQGTCNLERVDLTGNMHLSSNIFPAFLEFKKHGKPILVVPPNLSTSAPYDDDP

SEQ ID NO: 85014 - protein, 257 aa, Zea mays
  Coding DNA Sequence Number=SeqID_41639
  Homolog annotation: Hit_ID=Q6J9V9; Match level="QueryCoverage=25%, HitCoverage=33%, E-value=7e-07, Identity=44%"; Hit description =Putative uncharacterized protein
  Subcellular localization annotation: CTP_CleavageSite=53; ConfidenceScore=5.57e-01
MHKGAPTPLTCVPSRRGLSLLQNAPRSSSYGAGAGSHTSCKPAQSRRSQTAVRGAYNRLAVTSDPPLLPRPAGRKGGQAMQAACNRAKLAHFSDSNTPGMGAQAHASCNRRAECFVHATALPLAPPPRLLDCGTNTATRGGASGRRSGRRFAFAIMTASKKGPGKGDTPKRILPREGTRLRASLLIRGSKAGPPEGFDSRLRSRGPYTHYWSEVRRPAPRKGSTAASGYSGSTPITDQGFEGWPPKGSQPPQTPSEG

SEQ ID NO: 85015 - protein, 82 aa, Zea mays
  Coding DNA Sequence Number=SeqID_41640
MEGERATAGKWWLGHGKNREGEAGRRPWVRPGKMELLLGAMYNREREEWRHGKLELGQGKEERGSASKLLEPKERVLAAVRK

SEQ ID NO: 85016 - protein, 21 aa, Zea mays
  Coding DNA Sequence Number=SeqID_41641
MARRGHWAAPPRSVDQVDRTA

SEQ ID NO: 85017 - protein, 112 aa, Zea mays
  Coding DNA Sequence Number=SeqID_41642
MEGERATAGKWWLGHGKNREGEAGRRPWVRPGKMELLLGAMYNREREEWRHGKLELGQGKEERGSASKLLEPKERVLAAVRKGRGGRLEHRAGRSAMEPLHGICCCALGEKQ

SEQ ID NO: 85018 - protein, 81 aa, Zea mays
  Coding DNA Sequence Number=SeqID_41643
MGKKGGGCCKNEGRRGRLLLPPTRGGTMTKAPLRNLRTRNEAVHNIKSMVGTKVEPVPKLHARKLRLSSRKRNRLKEEKAI

SEQ ID NO: 85019 - protein, 112 aa, Zea mays
  Coding DNA Sequence Number=SeqID_41644
MDGEEVASGTDCTVISAQGRVRRRLLQRLRPGSGEDVIPPEDVLRPSPGVGRDRGLRSGEAELPVTPKAELGRCQPYPGGWHSSRSGASDAVFLSDRSVKGRSDCGHFDLAD

SEQ ID NO: 85020 - protein, 283 aa, Zea mays
  Coding DNA Sequence Number=SeqID_41645
MARDPLRGLYKVPLASENPLQFIGRSSTGFLADSHRSKINQGPPRTDLSPTALAPFGKREGSGANVTKTQKTHQVDCGLISREMRVSLEKLTREGDCSRTPRRSWPSGDSRLPLPIYNEIRIKKKHWDTLDMLTDVEGYEGSWPRQMTAPRRRAPAGVKFTARWSAPPRTASPGRFPCSRGLPSACTGDQPLANRSFPPPAEDPLLSLPLHGDSEVAPFSCRIARMMVKESCLPSLSPKRNPLVLWSSRNFRIGSKPVEVVARLARQQGRWPPLIRLEEDPGK

SEQ ID NO: 85021 - protein, 124 aa, Zea mays
  Coding DNA Sequence Number=SeqID_41646
MATIGRAATTKVRDGRGGCGWEPTRMAVITATSTCNANMLNYMVFMLDCMVFTQACMAPKLLEKWTRDIVISSLVIVGRVMDMPEVGGLDALVEASGRDCDWEEEDGREAGGASGGELTVAEGS

SEQ ID NO: 85022 - protein, 63 aa, Zea mays
  Coding DNA Sequence Number=SeqID_41647
MSNVKGPVSTFSRGCLRWYATFLVYNIGGFGVIYKVSSESGYEYTRVWSGRSLSETKGDYDEG

SEQ ID NO: 85023 - protein, 255 aa, Zea mays
  Coding DNA Sequence Number=SeqID_41648
MGRIRVAFVLLLRVCRRPASSPAWLEDASSAQLEDAPLPRIALLVQRSPNLRPLCDELKSEAAVSAWTEASSARKEASSAREHVASLAEEVRQRRLELGQVIRQRDRPRSHATKAVSRAEVLGGQLAETTEQPAEAFARAGTLAENLTMRAQSRCWRPPSGWRSLGSCRRPRLGQVPPRVETSPRDLFGSRIPLPSVSYFSWKVMSEDPAIEAVETVRKTFWQKTFSRKNLTQRGFPLLAPKGGSGFAEARLILP

SEQ ID NO: 85024 - protein, 137 aa, Zea mays
  Coding DNA Sequence Number=SeqID_41649
MAEAWATLPRYPRTFPRPAGAIFVTESHQREASSPRTLSNGTGSGKSPAAQTAKTDGHDSRQDLVYQGTQSRLARAWPRAGTVVPDEFTPCPRASSGSGRTLGSPEAQLGQASSRSNFGQLALPTDHIAGAFNAKIT

SEQ ID NO: 85025 - protein, 278 aa, Zea mays
  Coding DNA Sequence Number=SeqID_41650
MLLEEAVQQGLLLKGCHQGRGRLRPARDLRSQDIVPYDVPCATLEGDRHGHQVPSDGAQSSKEIDTDDKIEVAQVDADTSDVILVTGNGDGHVASNPSATKAINIGHREPELLTTKRCQTETSHRSPLQEIVGGAGVEQGQEARLLEHHGHDHHVVHPNAHKCMDGDHQRAYHSGVLWRLVYICGVICHGVLRDFVCRLEVTRLQVEELHALMATDEWLIVVEAQPLVVALLLLCRSEATEMLDRRQGSHDRLCSASKCDRGLERQRARLLLCQSLGA

SEQ ID NO: 85026 - protein, 174 aa, Zea mays
  Coding DNA Sequence Number=SeqID_41651
  Gene Ontology: Mol. function=binding
  Homolog annotation: Hit_ID=A7PY00; Match level="QueryCoverage=68%, HitCoverage=21%, E-value=3e-19, Identity=41%"; Hit description =Chromosome chr15 scaffold_37, whole genome shotgun sequence
MSSRGPDLAAPGEEQETAEEMLEHVRGMVPAAVTRAAGRFPSRWKAITVKLDALPACLSDLSSHPCFARNSLCRELLQWVAATLADSAELAARCWEPPTDEKLMAQSAVDALSRRLDLGLRDYALLIKTGIMSDAASLSPPPEEAPSCQRRVDAAIAAAKNEGSRGTDDVVCWG

SEQ ID NO: 85027 - protein, 175 aa, Zea mays
  Coding DNA Sequence Number=SeqID_41652
MLSQSLDLRSRAWILNHPDHLKSIRSKFYGSDLPHEEEALVTRYDHPICLKRRQGLDTHAVARDVQPAVVMARNTVTGSVHCVGEGKGAFYSGDRKEREHATEGLDSGVHVSVAAPGRESGYAMGREARVWAQLGSDRRGGGRSYKSYPLNRNLVPEICKKNDIEGLVCNSAFNL

SEQ ID NO: 85028 - protein, 180 aa, Zea mays
  Coding DNA Sequence Number=SeqID_41653
  Homolog annotation: Hit_ID=Q8H684; Match level="QueryCoverage=38%, HitCoverage=23%, E-value=9e-19, Identity=70%"; Hit description=OSEYA1
MMLVYRTDGILGAKDQRTVTSKARPRLLLQGDVQSYVQRVPDKLQIWHLISCSRNNMLYINSIFYRQKRMEEVVHALATGQASTDAMTKQPVKVYKWDMDGTLILLKSLLVGSYARDFEGLKDCEKSTQTRKRWENLILELCDEHFFYEERSAGPREIHQAFSVMPGASCTPSRRRRLTW

SEQ ID NO: 85029 - protein, 64 aa, Zea mays
  Coding DNA Sequence Number=SeqID_41654
MGKGERGWGREERGRGELTGEGRDGEGRSAAGAAEGGGWAGGGGGLGQGLLGFQTKQNCSDLYL

SEQ ID NO: 85030 - protein, 94 aa, Zea mays
  Coding DNA Sequence Number=SeqID_41655
  Subcellular localization annotation: CTP_CleavageSite=30; ConfidenceScore=5.41e-01
MAGSAAPPPCLARLGRPTAGSAAPCAAPCPAGSAAPALRRFGRPALASPAARSPARAPPRAGGYEIDGSGYAYGAGEDEAVEGDFQEFQDYDEF

SEQ ID NO: 85031 - protein, 273 aa, Zea mays
  Coding DNA Sequence Number=SeqID_41656
MPLEIRPVTQRRPRRARYNGPDHTWASELDKAAPRDDVAAGLRLVPNGAKGVPAHFVSVRPATAAKASSEGWRLCLRPNNKIILLTRTWRTTRENNATTRVEWDALGQVVRKARERLPYPGWGKWGGVAAEYREVLMSNCLQSFSDEGFLCFLIPESIAGFLELVELWKGLVACNTQRQRRARYNGSDRTWASELGEAARWDDLVAGLRLMSYRAKGVPARFVSVGPTTAAKASSEGWRLCLRPNIVLPCLASLVEVYGVSTTLWKMGNTTYG

SEQ ID NO: 85032 - protein, 116 aa, Zea mays
  Coding DNA Sequence Number=SeqID_41657
MDIEGLGNYPTISNSFWDRIQESYSNQYEDWRLKNLSNIIRKKTQLKKSSTSTQKLYSGGSKPIYTGVFQYRQCYGPVEISISTGGYFGTASEKCIFTGGFLKETACEKCIPLAAE

SEQ ID NO: 85033 - protein, 525 aa, Zea mays
  Coding DNA Sequence Number=SeqID_41658
  Subcellular localization annotation: CTP_CleavageSite=45; ConfidenceScore=5.31e-01
MTRGPHMEVSQKKRKRKVLQASGGGKPPLAAKSGASAPSKAPEATAGAGGSKSSKVVPPTSGVAEASKATRALPLSGKRVADFGTDITVDDYLGGSDEGQLAIVAPGAAIATAAIVPKARGEALGTGGEVSALAVVRDEAGAATRRLKGVTEALSQVADFANRTASGALTAAVSAEVERLRTQHADAVREKSASDSKCSKLTDKVAALEREKADLRRQLAAKRREANEDIAKEQAAQAEAKLAREEGNLAKELAEHLQERLTALENRTKGAEAAMRAEAERTRAQLMDTYRELGARTGDFEVPDREPGLRCLQWVQEELQELPTVVGGFMSYASLVTCEGAMNALSREGCRHFEVFDQADEDFERDVYKVEDPVVKESAGALYDRMWGPHGRKVVRERAETARAQATRGERVDDFGALNSALPDPKSTPAEAASGVALEPTPETAAIVTAAPTSAATGEDLPPKVAEGAPDAPAAAASSAEDPAAEAAETTAEAAAEATTELPQRQGLRRWRSSRFWACARNRYH

SEQ ID NO: 85034 - protein, 79 aa, Zea mays
  Coding DNA Sequence Number=SeqID_41659
  Gene Ontology: Mol. function=oxidoreductase activity
  Homolog annotation: Hit_ID=A3AJL2; Match level="QueryCoverage=55%, HitCoverage=13%, E-value=5e-12, Identity=75%"; Hit description =Putative uncharacterized protein
MDFIGFHATPTLVIQATRLAEDLFERASNGSGKCLTSRVTHAALPVFRRGRRPRGVWGRRGEGTRCELLIVTLTTVDNE

SEQ ID NO: 85035 - protein, 104 aa, Zea mays
  Coding DNA Sequence Number=SeqID_41660
  Subcellular localization annotation: CTP_CleavageSite=56; ConfidenceScore=5.04e-01
MADLARISGRCNTLTASVSVILYPPGISTSATTIPLVISSPSLESAFDERKTKPLRLQLVANTGGDLELGWGAGAWNSGVLPVGCSGRGAVLGCQGQMSSRPLI

SEQ ID NO: 85036 - protein, 294 aa, Zea mays
  Coding DNA Sequence Number=SeqID_41661
MNALSHEGCRHFEVFDQADEDFERDIYKVEDPIVKESAGAIYDRMWGPHGREVVRERAETARAQAARGERVDDFGALNSALPDPEPIPAKAVSGAALEPPPEIAEGAPDALAAAAAGGDPPPETAEGAPDAPAAAAPRAEDPATVAAEATTEATVEAPATAGSSQVQDFGPAHATATTNFLAASTVDGGNKYDGSASEFSDFADSGSSVEWTEESSEEDLDYFAALDVAAAEASPHAADAEDVPGPSIGRRRRRAVAKRRACMIRFCAPAHMAMLAKALCTWSGVFCYVVLVHI

SEQ ID NO: 85037 - protein, 73 aa, Zea mays
  Coding DNA Sequence Number=SeqID_41662
MYGLQVVMRRMVMIMLMVMVAFGAIYAQVKKKASRMTKPKNTESKLSRQSEAQQMMMKLEYLAVGKILRKLLY

SEQ ID NO: 85038 - protein, 79 aa, Zea mays
  Coding DNA Sequence Number=SeqID_41663
  Subcellular localization annotation: CTP_CleavageSite=18; ConfidenceScore=5.10e-01
MKLWKETSRSSKTTTSSRCGLAATPSRLPVKAAFIYVSFLHFDLFSGGIIGSMGMLCDSTQDAETKECVAPVSNSTFDG

SEQ ID NO: 85039 - protein, 234 aa, Zea mays
  Coding DNA Sequence Number=SeqID_41664
MPPAPPQGIPAAGGDPDGDGDDDACGNSSHGMEHSEEPEPEGWIARPITHDAARGCHFHDALDTLLRRAFDRHTWSIKYCCVVYQHRRGLYPDQWEDTCLVRLLDDDLRGAEAFSEHYSITERDTVEATMQDAARQALSQYYSLFSGVADGLDLKLSSMVNLVAVLNIELDHALDELGKVQAEVAELRAECAARHYIVGGSPAPIGIQHPYCSPPHGRFDYGTPDCRTRIDFDP

SEQ ID NO: 85040 - protein, 153 aa, Zea mays
  Coding DNA Sequence Number=SeqID_41665
  Subcellular localization annotation: CTP_CleavageSite=33; ConfidenceScore=5.65e-01
MGPSAQSLSPALAPPSLSLVRGVRMSGSSSTARCNKRARTPKLAGDVVTFVLLFNWVGIYLYLVTANKILTNFKSNAQLNPSSLHTLVELASGPVVLGVFSPKLSGQDQLNWSAGSVQPVSDSSALTVQQSAIQTGRQADRSDQGRFNRSLTV

SEQ ID NO: 85041 - protein, 50 aa, Zea mays
  Coding DNA Sequence Number=SeqID_41666
MGSHDPRAKRESRLMGGDEEDGYDYAYGNGKEEGVEADLQEFQDFDEFED

SEQ ID NO: 85042 - protein, 93 aa, Zea mays
  Coding DNA Sequence Number=SeqID_41667
MNGDSDEASSDMKKRTRHSKEKVELGDRAGSTEPRPWQMVVTPRTTRGEGEGMEREREGELDGGCYRFRLSLAYTLAGAILVRRVVNGWTRLG

SEQ ID NO: 85043 - protein, 86 aa, Zea mays
  Coding DNA Sequence Number=SeqID_41668
  Subcellular localization annotation: CTP_CleavageSite=76; ConfidenceScore=5.37e-01
MEEAVESARRLRTPPTPTASSISAALGGGVSFSSCLQSESSAKASVSGRYPWKLSRNLSRRLLQESCSQLQGDPTRVNKGVNRILT

SEQ ID NO: 85044 - protein, 62 aa, Zea mays
  Coding DNA Sequence Number=SeqID_41669
MAVGVSEALYSKAVSPDPLTGNQWGRLMSLEDMVAGVTWPSILPPGWTVEWDPASAEEEHEE

SEQ ID NO: 85045 - protein, 170 aa, Zea mays
  Coding DNA Sequence Number=SeqID_41670
  Subcellular localization annotation: CTP_CleavageSite=78; ConfidenceScore=5.05e-01
MARASAYKAPRDLDRTPPHALNLTGAQTHQRLPVHGVSAAAQSPCHRRPANRTLPNPVQPSEKTEHTSVKLPERGIAVCFAGEASPRSPDSTRPPASVDRPLRHPVKLPVPLDLTRSLWFGQRTRRRREHPPAHVDRTIPATPAVKPYTVVTARTSRSQLRPSPDLSHRR

SEQ ID NO: 85046 - protein, 135 aa, Zea mays
  Coding DNA Sequence Number=SeqID_41671
MGRAELGTEAEKGERRQARWLGDLGRGEQRASHAANKQLARRDFTALGVARTHAQGRSTGSREPSRNAARKRRSSWKKRAGSRPWKKSEQGGKDVRAEQGAVGEKPWHRSLPERGAVEQEAGWKTPGREEEWLCA

SEQ ID NO: 85047 - protein, 81 aa, Zea mays
  Coding DNA Sequence Number=SeqID_41672
MLTEIDIEPTGFWWVDTRAIPVVSSLRSVQAKTVKIKRTPSRGVVEVVTGHTRRFDQWNTACLEYGLGDAVLLIEAAHYGS

SEQ ID NO: 85048 - protein, 984 aa, Zea mays
  Coding DNA Sequence Number=SeqID_41673
  Gene Ontology: Mol. function=phospholipase C activity; Cellular component=anchored to membrane; Biological process=intracellular signaling cascade
  Homolog annotation: Hit_ID=A7PLB4; Match level="QueryCoverage=47%, HitCoverage=77%, E-value=3e-94, Identity=57%"; Hit description =Chromosome chr7 scaffold_20, whole genome shotgun sequence
  Pfam annotation: Domain name=Extensin_2; Domain location=729-983; Score=-142.2; E_value=0.1; Accession=PF04554.4; Description=Extensin- like region
MAGGGRDGPAARLLRRVPAAVSVLLMLTLCSPGPPGAVVVVSARKVGETCALDRNCDAGLHCETCVADGNVRPRCTRVAPVDPQTKARDLPFNRYAWLTTHNSFARLGQRSQTGVAIATPWNQQDTVTEQLNDVQLRRTARCRLVPSAPSNPGAEFASSSCFHAGRRGRGVPPSGRDATANSEAHTTRRACCCGCVCLKRDRGTHGTALRSMSHTLISLLRHDVTSTKTDWGAGEGATSPSNIALLLNGVRGLMLDMYDFRNDVWLCHSYGGICQNFTAFQPAVNVLREVERFLSRNPAEVVTIFVEDYVESPMGLTRVLNASGLARYVLPAWRMPKSGGDWPLLSDMVRDNHRLLVFTSKAAKEAAEGVAYEWRYVVENQYGTKGMVKGTCHNRAESAAMNDLSRSLVLVNYFRDLPNLPAACKDNSAQLLDMVTACHDKSGDRWPNFIAVDFYKRSDRGGAAEATDKANGGLVCGCGSISACNANGTCTPRHGRTPRGIFNASSDAAAWRPPPPVLQWQRLILLPSLLALLLGLKAARSGVRTEQPVQRQRLQQPLRRPSLEISRRLRQIRSPTVFVVSPPGLAPPLTPPLPLRHPLCLLPSLLLPHPPPQPYPLPPLRQLPLFLLLPLPPQLLLSLHLDSGSAMRLRFDPWLRILDCLTFSVLQRHGAQISAQIALRVHRLLDLPAFLLAAGADSEAHLTYLPGLQTLLTTSGSRRLVFTVSATTLLTLLVALTAVWLRAEDAALRQFDTQGTTADDDDDDDDDFGVPPPPPMPPRSHDHEAGSSSAAPPPPQAMDPALASILAHLAAEQARLSERMLSMFQNMQDRQDALQQQLLQDWAESRAFMALMLQHSGISVPLVQSAPPPPLHAPVVPSILSGPPVGTSPLRPVTLVFTSLVLSSVCPQPPVPPVSAVTTTAVAVSVTASAPVAPAARPQSESVPAPASTADPGSETDSDPPPAFALLPRPRPDVPPPPPPASDV

SEQ ID NO: 85049 - protein, 91 aa, Zea mays
  Coding DNA Sequence Number=SeqID_41674
  Subcellular localization annotation: CTP_CleavageSite=44; ConfidenceScore=5.04e-01
MARPRPWRADDARPLGGNTTMRASTATLDLVARRCLGAVLLVALAARGRAGQTRTRFSENLAVGRIWLWEESEYHYDYVWRKIKLSIMLRI

SEQ ID NO: 85050 - protein, 71 aa, Zea mays
  Coding DNA Sequence Number=SeqID_41675
  Subcellular localization annotation: CTP_CleavageSite=32; ConfidenceScore=5.31e-01
MAAVADGDAHAPAPHARAHPSPGAVAAPLAPRAAAPTSGRPNLVLPCAAPSPSSPLYSMDERKKTMAVSGY

SEQ ID NO: 85051 - protein, 424 aa, Zea mays
  Coding DNA Sequence Number=SeqID_41676
MVTTSSMVGRSKPGYSLFPALSFKDLHHPCWGGGRGEPGFYLPHGPAGRLFLRHLGERALTGLAEGANFDNAGPVDRKRRQLQHAWLVGSAGSIAAPDAASCRLIRAWPSAHRTGGCCAVRTRGPSKTSHTARAAFMFLDSLVLTPAGAAAIRWRSTGAQVAAVVGVEVVVARGGFSADETVGATRGQTSGSLALIACPRPSSGDVGEGLVTAASALRSSLLLFSRPERRSLSLLVQWSAASHLEFVVPQALWCGGSSYPREWNRSSVCNGTLSTDNLQPLCDELEPEAAVSVWTKASSAREEASSAWEHVASLVEENPCGDPGCDGPSAVLASSFEVEILLPVSPSEARPDSTEGGNNAEGAAAPSVDDLFVDSRIAYPSESYFSQKVMSEDPATEAVEKRERRSSRKTFSEENFDAEGVPPF

SEQ ID NO: 85052 - protein, 395 aa, Zea mays
  Coding DNA Sequence Number=SeqID_41677
MQSVAVWVRGEKTKSVRLFGEEGRNGMPGCPPDANPIPSLSFARRRFFALRVPGAAAQAAGPPFSSRLQEWSWSWTHGWVGLTGAQWDRGIRALPPVGKWVSHVAWTGPYIQIPTVPAADARGAALEDSAIAQPSRRRWGISCLVKGSRAADPTALSGDGLLLLRGLQASSWEGARGLYAPSRPPRATNPLYECPGPSFYRRKERAQGNDGPSCDVVGPSPRSGEAEAPPRSRSSLSSEVEVESEPLGRARRRPSAEARAESEPWGRARRSSSSSGAEAESEPWGRARRSSSSSGAEAEAEPWGRARRSSSSSGAEAESEPWGRAEFVVFQGRGRGRALGSGEAELPMAPDAGLGCCQPHSVERHSSRSDAGGVVLLSGRSVERRSDCGHFGSVD

SEQ ID NO: 85053 - protein, 408 aa, Zea mays
  Coding DNA Sequence Number=SeqID_41678
  Subcellular localization annotation: CTP_CleavageSite=28; ConfidenceScore=5.09e-01
MQSACNRAKWAHPFDSNAPSMEAQAHTSCNRRAGCYVRATAPPLAPLPRLLDCGTSTATRGNPAYDPTVPARRIGHGPASECSGRVVSQAHVPSWDSERTLSHSVKTAHPCSVPRTARARATAAPRTTRPVALTTRWDRRHLWQEKRATLRLRHNDRVKKGTGKGDTPKGILLREGNEPRAPLLIRGSKAGPSEGFKSRLRALELRAHYWSEVRGPAPRKGSMAASGHSGSAPTTDQGFVGWPSKGSAPEDDELRFARPQGLDSGSALEDDELRIARPQGSDSGSAPEDDELRFARPQGSDSGSAMEDDELRFARPQGLGLDLGLGRQTRPRPRRSLHLAQPRARTDHVTGGAIITLPQANSGYGEQDQRPIWLAPGMAARVPRLYCHFLASTCACPWRSGHGRQAAI

SEQ ID NO: 85054 - protein, 279 aa, Zea mays
  Coding DNA Sequence Number=SeqID_41679
  Gene Ontology: Mol. function=drug transporter activity; Cellular component=membrane; Biological process=multidrug transport
  Homolog annotation: Hit_ID=Q5GAV3; Match level="QueryCoverage=31%, HitCoverage=7%, E-value=8e-13, Identity=48%"; Hit description =Putative integral membrane protein
MVSSSPIDAHLTRALQQQTREILSELDKRFATIDSKWARRVGAPESQAVESAQHCDEFSSALYAGVEAHLSAATLQSTGTRVAALQSALHVFDARRPRAQWRSSVEVRHVFADRDISEQPAGVHGRLDNSTTITMGSNINPDGVAAGGAADRPVRAAAAGWSCVPNAGPVPHKTDDAAPARGYTGVATPAPGRHGRCLPQQAARHDQEGKYCSGNPYFWQRASTDPLVSKTGARKLFDEMPTSDRRSPDRVLDVTIRQVLFPVGQQSDNEPPSAGLRLM

SEQ ID NO: 85055 - protein, 218 aa, Zea mays
  Coding DNA Sequence Number=SeqID_41680
  Gene Ontology: Mol. function=hydrolase activity; Cellular component =cytoplasm; Biological process=regulation of transcription, DNA -dependent
  Homolog annotation: Hit_ID=Q7XAX9; Match level="QueryCoverage=81%, HitCoverage=28%, E-value=6e-88, Identity=85%"; Hit description=HDA1
  Pfam annotation: Domain name=Hist_deacetyl; Domain location=14-218; Score=48.7; E_value=5.6e-13; Accession=PF00850.10; Description =Histone deacetylase family
MAEPAPAPPVTAPLVGLLYDERMCAHATPNGEEHPENPERLRSIWRKLNAAGVASSKRHIKLMKEISSTIYDASRNKIARKFNSIYLNKGSSESAVLAAGSVIEVAEKVAAGELSSAIALVRPPGHHAEHDEAMGFCLFNNVAVAANYLLNERPDLGIKKILIVDWDVHHGNGTQKMFYDDPRVLFFSVHRIIVLGTSISSISWFTFLGNTGNLQLIE

SEQ ID NO: 85056 - protein, 220 aa, Zea mays
  Coding DNA Sequence Number=SeqID_41681
  Gene Ontology: Mol. function=hydrolase activity; Cellular component =anchored to membrane; Biological process=carbohydrate metabolic process
  Homolog annotation: Hit_ID=A3BLW7; Match level="QueryCoverage=34%, HitCoverage=45%, E-value=8e-32, Identity=81%"; Hit description =Putative uncharacterized protein
  Pfam annotation: Domain name=X8; Domain location=41-126; Score=131.4; E_value=2.6e-36; Accession=PF07983.4; Description=X8 domain
MSFGLSTTLKVDPETTEVHARILTVEGSSSTLGVNYTFGEVRPSLGRRHGRRTALQKTIDYACGSGADCNSIHETGACYNPNTVPAHCSWAANSYYQNNKAKGATCDFAGTATLTTSDPSSSGCSYPTTSASAAGTVTPTTGGTMGGAGGPGTLTPAGTGAGTAGTTGMGTAGTTGTGFGGLGPAGMDTAAAAAGGLLLLPEAGLCAALVALLLSAIVLA

SEQ ID NO: 85057 - protein, 102 aa, Zea mays
  Coding DNA Sequence Number=SeqID_41682
  Gene Ontology: Mol. function=nucleic acid binding
  Homolog annotation: Hit_ID=Q6YPC4; Match level="QueryCoverage=60%, HitCoverage=26%, E-value=3e-27, Identity=93%"; Hit description =Putative RNA recognition motif (RRM)-containing protein
  Pfam annotation: Domain name=RRM_1; Domain location=1-43; Score=12.9; E_value=0.0095; Accession=PF00076.13; Description=RNA recognition motif. (a.k.a. RRM, RBD,
VVRDKRTGKTKGYGFVSFSNPTDLAAAIKEMNGKYVGNRPIKLRKSNWKERTDVEALQRQKDALLPWDDATSGMSSLSALLGGGNHARAVVSCKLQRATAAI

SEQ ID NO: 85058 - protein, 263 aa, Zea mays
  Coding DNA Sequence Number=SeqID_41683
  Gene Ontology: Mol. function=acetyl-CoA C-acyltransferase activity; Cellular component=peroxisome; Biological process=fatty acid biosynthetic process
  Homolog annotation: Hit_ID=Q84P96; Match level="QueryCoverage=28%, HitCoverage=16%, E-value=7e-34, Identity=93%"; Hit description=3 -ketoacyl-CoA thiolase-like protein
  Pfam annotation: Domain name=Thiolase_C; Domain location=132-240; Score=88.4; E_value=2.3e-23; Accession=PF02803.9; Description =Thiolase, C-terminal domain
MERLGHAAGTEMARRRRAALSTAVSKRERGTAAESTESRRPPVCQTYAMPMLMMSCSSFSYSNTRGVTLVLTKIHSSIRSTLPSINSLARWFGEPIRVAILQTEAFLTNAKGYPCLSKHHQSLLTRFFKHSVQSLIKLEGWESLVTVISSDKRCWDAPQKADVLAFASQFVYCCNKLGLDRSKVNVNGGVIALGHPLGATGARCVATLLNEMKRWSRDCRFGVVTMCIGSGMGATTVFELCSAWLEVSEREIGLHLFLFDFGG

SEQ ID NO: 85059 - protein, 122 aa, Zea mays
  Coding DNA Sequence Number=SeqID_41684
  Subcellular localization annotation: CTP_CleavageSite=55; ConfidenceScore=5.12e-01
MEKAIDRQRVLLAHLLPSPSPSATSSQPQLAASSCAAGDSAAYQRSSSFEDDVVVVATLQEENEEIGAMASEGKACVLPAPRRSFCGNYARVVNQILQGLTNVHLQSEIRLMGIMEFIQIAM

SEQ ID NO: 85060 - protein, 137 aa, Zea mays
  Coding DNA Sequence Number=SeqID_41685
VEYHQSVLREQLEYQRQQAEYKRQQAEYQKKDEYYANLQAHNQALLLQLAQQAGVPMPTYGMSPPDFALPMPMLSPPPPPPSQFPMGFQTPPASVAAPGDGSGQDDTSHSWVNNLFNTQSLDGGSGYNSNQPGDGYE

SEQ ID NO: 85061 - protein, 222 aa, Zea mays
  Coding DNA Sequence Number=SeqID_41686
MAPNPYPTESRSGYGGAERVWFPAMLRKTWVVSVAAFPLKCCPWAKTPVAQINSTVFNLVSGSAARRIGSPCQRLGHGFAPTDCSFGSRADRDSNAGLNLVSGSVFNLVSGSAARRIGSPCQRLGHGFRSDGLQLGLEGGPRQQRRAQPRLRLRLQPCLRLGGPAVWISVSSAPRQRVSFRRIQASPRLRTSTAATLRRILAPRRLRLGRAYTPAPQSPFSP

SEQ ID NO: 85062 - protein, 68 aa, Zea mays
  Coding DNA Sequence Number=SeqID_41687
MQMTKTSHGTTNDEKHTMYAACLRSGPRGAAALLQRHEQLLEEAPKDEHPAPAMPELPEPELELAYDV

SEQ ID NO: 85063 - protein, 530 aa, Zea mays
  Coding DNA Sequence Number=SeqID_41688
  Gene Ontology: Mol. function=metal ion binding; Cellular component =intrinsic to membrane; Biological process=innate immune response
  Homolog annotation: Hit_ID=A2WZF1; Match level="QueryCoverage=67%, HitCoverage=58%, E-value=1e-145, Identity=57%"; Hit description =Putative uncharacterized protein
  Pfam annotation: Domain name=FYVE; Domain location=162-230; Score =44.4; E_value=3.9e-10; Accession=PF01363.12; Description=FYVE zinc finger
  Pfam annotation: Domain name=RCC1; Domain location=112-159; Score =25.4; E_value=0.00021; Accession=PF00415.9; Description=Regulator of chromosome condensation (RCC1)
  Pfam annotation: Domain name=RCC1; Domain location=36-107; Score =14.3; E_value=0.021; Accession=PF00415.9; Description=Regulator of chromosome condensation (RCC1)
  Pfam module annotation: Pfam domain module=FYVE::RCC1::RCC1; Domain location=162-230::112-159::36-107
MEEGINRILKNTIKGSIPSTTAREVIVTQSSSSMSSGKLFTWGDGDKHRLGHGDKEPKLKPTIACGHSLTVGLTTSRQVLSMGNIVYDIMGEHVVQVACGSYHVAVLTNKSEVFTWGKGANGRLGHGDVEDRKIPTVVESLRDRAIRHIACGSNFTSAICQHKWVSGAEQSQYASCRQPFGFTRKRHNCHNCGLVHCNVCTSHKVLRAALAPNPAKPYRVCDSCFMKLNSATYSSTINKKKEVVPRHSGESNHDAKLARAIVPSNLDMIRSLDSKAAKQGKKTDALSFLRTPQMSSLLQLRDITLSGVIDLNKSVPRAVRTSVRSLNSSRVVSPFSRKPSPPRSTTPVPTTHGLSIAKTAADSLAKTNEMLSQEVERLRAQSEIVKKSKKREHLPPVYAPASPVEFCQSPKQCNYTGIKERYIYNKILQENVMLGAPRKTKMKEELTMEEIYDRWVQNHVEIRFGRRVRSFSKNPPHPPLLPHAAGRALPILSADELGEENDGKTKPTRVRGQQIWRRHDWIHTWTHENT

SEQ ID NO: 85064 - protein, 537 aa, Zea mays
  Coding DNA Sequence Number=SeqID_41689
MEGESTHRGKVRVVLEGPTPLSSLMSLSPAICAKNRRHLRAPLCNPPPSMAALSAPTNRAQIHGSPALLSSLQSATIFWRPHLCSLPRSALLSAIHRHPWQLCPRPQIARRFMAAAFPLEHSRNHHRRHSWQLCPCPQIARRFMLPAITFSPTAPVALPSPAAIRKGGKKATEFSSPGHNLAPQSRPNQQAAFPLEHPRNHHRRLPVALLFPFHSSAPCPRERRMPSAQGAACSRIPVLHSSVFAATAVAASEGVHSITVPPLASSSPARAPPALPSPPALPSPAAIAPANAALPRQPAPANAALPSPTYAALPSPAARPRQLRALHQTGRQDQGRVPRSAHQPREPPPGTKPEGEIRGEFRASIVAITVMPCEGEEGTPRESPPRKPPGITVRIAMVKTRRSTAAAKRPSPSPSSSSVPPPKWPKARPPSPSGSNNIASRPADLTCRRTDLNCGHDQAESPGSPMASALARAEEDSVAGAAPARSDGSVDDAAAVAQKDQGADKPSSAVAESSKRRKEPEQQQPAAPRAKLLSQCS

SEQ ID NO: 85065 - protein, 138 aa, Zea mays
  Coding DNA Sequence Number=SeqID_41690
MSTAADAFAHAPAPQMGAPFFDLGDKPPKLGQCEAGSLEEQSRSGVPRKEGKQTCPEQADNTYTDRFSPLTAAQEDSAAERRRACLLSDLEGALVYHLPEWESGRHNLWSEACDLFTAERERHQPALTAELVHRAELQ

SEQ ID NO: 85066 - protein, 189 aa, Zea mays
  Coding DNA Sequence Number=SeqID_41691
MDLPRGHRPRISQHNLALKQSRREFAACVEVVATVAQIDLCFTPSSPLPSAPFRSQISASPGLTSILLSSRADASWRQRTGSGRSLGPSAVRRPRERMRGQRDAQPAEQVIITQDKIDGLGKNKSISNHDQDVDYDECICRPADIFEEADKPAKKPTVLSKKPVIAVVMVQNMLSLIAAALKVAHMRMK

SEQ ID NO: 85067 - protein, 201 aa, Zea mays
  Coding DNA Sequence Number=SeqID_41692
  Gene Ontology: Mol. function=hydrolase activity; Cellular component =anchored to membrane; Biological process=carbohydrate metabolic process
  Homolog annotation: Hit_ID=A3BLW7; Match level="QueryCoverage=37%, HitCoverage=45%, E-value=7e-32, Identity=81%"; Hit description =Putative uncharacterized protein
  Pfam annotation: Domain name=X8; Domain location=22-107; Score=131.4; E_value=2.6e-36; Accession=PF07983.4; Description=X8 domain
ARILTVEGSSSTLGVNYTFGEVRPSLGRRHGRRTALQKTIDYACGSGADCNSIHETGACYNPNTVPAHCSWAANSYYQNNKAKGATCDFAGTATLTTSDPSSSGCSYPTTSASAAGTVTPTTGGTMGGAGGPGTLTPAGTGAGTAGTTGMGTAGTTGTGFGGLGPAGMDTAAAAAGGLLLLPEAGLCAALVALLLSAIVLA

SEQ ID NO: 85068 - protein, 370 aa, Zea mays
  Coding DNA Sequence Number=SeqID_41693
  Gene Ontology: Mol. function=hydrolase activity; Biological process =aromatic compound catabolic process
  Homolog annotation: Hit_ID=A3BLX4; Match level="QueryCoverage=96%, HitCoverage=51%, E-value=5e-99, Identity=55%"; Hit description =Putative uncharacterized protein
  Pfam annotation: Domain name=Abhydrolase_1; Domain location=157-338; Score=-3.1; E_value=0.0093; Accession=PF00561.11; Description =alphabeta hydrolase fold
  Subcellular localization annotation: CTP_CleavageSite=26; ConfidenceScore=5.42e-01
MPPLLTSSSVPALPLAAWSRYRLRVAASNAASAPDGAGATARCTSTGGFPSFLPGAVERIRDGAAIRLAKRIERVPVQASRFLPIYCAVVRSNAQWLSLNLSYLHLQTSFSGSAISSSCVRPLKQQQDGDPVVLLHGFDSSVLEWRYTYPLLEEAGLEAWAVDILGWGFSDLETRPPCDVASKREHFYQFWKSYIKRPMVLVGPSLGAAVAIDFSVNYPEAVSKLIFIGASVYSEGPKDMTRMPKFVSYAGVFILKSLPLRFLATRLAFKKTPNEFFDWVQVKHKCLILWGEDDGIISSKLAYRLHQELPDAILRQVRQCGHIPHVEKPREAAKHVLEFLARNTSDKSDQSPSEPSDKSDQSPSEPSVVV

SEQ ID NO: 85069 - protein, 65 aa, Zea mays
  Coding DNA Sequence Number=SeqID_41694
MDFYGDKSYSFPLKKPFARLFLWNLQSDILETPWMSYSFSLKKPFAKTVLVEFAKRYLEADEGLW

SEQ ID NO: 85070 - protein, 136 aa, Zea mays
  Coding DNA Sequence Number=SeqID_41695
  Subcellular localization annotation: CTP_CleavageSite=33; ConfidenceScore=5.20e-01
MATNSRMKVATTYDAPSTSRSKSTTTRFFPRVGVAMEGKLEDEKYPFNTRSYHRQHFPWQQPQKLVGVDVQSNEYNKHKRKILVSPLVNVIINCYHGIYKTNIPLMSCIVCLGTTMFEKYFVSYIPNIPYINDKCI

SEQ ID NO: 85071 - protein, 125 aa, Zea mays
  Coding DNA Sequence Number=SeqID_41696
  Gene Ontology: Mol. function=catalytic activity; Biological process =metabolic process
  Homolog annotation: Hit_ID=A2ZDG3; Match level="QueryCoverage=36%, HitCoverage=63%, E-value=3e-16, Identity=82%"; Hit description =Putative uncharacterized protein
MASLGREVWEFDPAAGTPEERAEVDRLRQEYTRNRFTRRQCSDLLMRMQENIPVDDVGGSSSFDDEIVSSRVRTLFNNLIHALSRCRISKATGFEYLLSRSQMHVDGQVEENYDGALHRTVTANR

SEQ ID NO: 85072 - protein, 391 aa, Zea mays
  Coding DNA Sequence Number=SeqID_41697
MTTSLVVERSEPGYGLPLPSASRMFIIHAGEEGEPSGNFAFRVGWRSTSSSSIRGRRAFAGLAEEANSGYAGPVVCGAVSYRVSGSPAWAALVLPPALPPAARAECGCLSTAQATVASCAGWPHPRLLPRHRSHREVVQDIPPPIGAEVVAATSGADVVASAEVVAVVGGAVRSQLPTRLLLVQGSSFLQKWSWGPACPRYETRLSGYMVSGPPRRQVLVLQSQTSRATVRDQAERLHGLRTTLGDQYPFSSSGPEDLAERLHGLRTTLWNEVPFSRAGPQAVRPPYFRVRGPKLQAWLFNSDVAMSDRWESYGWGPSQLRESCGALLGMEPVVGLGPDLGFPSAFDTGALVSGCDHFYMYMSAARTRGGPEGPPKEGVLHLRRPRNTGSL

SEQ ID NO: 85073 - protein, 131 aa, Zea mays
  Coding DNA Sequence Number=SeqID_41698
  Homolog annotation: Hit_ID=Q10T70; Match level="QueryCoverage=100%, HitCoverage=53%, E-value=8e-34, Identity=48%"; Hit description =Expressed protein
EHEVSNAIDELLSKIPAGLTEDGLQLVKTRVLESAGGFFDTTFTSSKVKVYKCPELVAELHMAMGGRVRQRMFRNTASLAIFGILVCEILEDNAVNAEIDNSNSEVWVVTSWLRDHLLVPQERKNAFLWKK

SEQ ID NO: 85074 - protein, 182 aa, Zea mays
  Coding DNA Sequence Number=SeqID_41699
  Subcellular localization annotation: CTP_CleavageSite=35; ConfidenceScore=5.12e-01
MARARAYKTLPDLDCTLPRTLKPHRSLARRRLPVRSESAAAQSLCHRRPASGAIPNSVQPPEKTVHTSVKLPEQGIGVCFAGEVSPRSPELSTPPEYVDRVNHSTILRFLVHTVAMLPREAHHALRLNQFAVVWPDCNLADGEYILVPEQGAAQEVAPDPAPEPAPEDLPATALEGKPRFYA

SEQ ID NO: 85075 - protein, 92 aa, Zea mays
  Coding DNA Sequence Number=SeqID_41700
  Subcellular localization annotation: CTP_CleavageSite=53; ConfidenceScore=5.24e-01
MVGTSAVTARRPVGVSGALYAKAMSPDLLPGNQWGRLINSASAFGNQTPQPNSCMSRGSLEEMVAGITWPSTLPPGWTVKWDPASVEEEHEE

SEQ ID NO: 85076 - protein, 293 aa, Zea mays
  Coding DNA Sequence Number=SeqID_41701
  Gene Ontology: Mol. function=ribose phosphate diphosphokinase activity; Cellular component=chloroplast; Biological process =ribonucleoside monophosphate biosynthetic process
  Homolog annotation: Hit_ID=O64888; Match level="QueryCoverage=27%, HitCoverage=20%, E-value=2e-31, Identity=81%"; Hit description =Ribose-phosphate pyrophosphokinase 5
MAPPVDVVGPCPRLGEVEAPSRSRSSLSSEDEVESEPLGRARRRPSAEARAESEPWGWAKRSSSSSGAEPESEPWGRAKRSSSSSGAEPESEPWDRVKRSSSSSGAEPKSEPWGRAKRSSSSSGGSARVRAPGVGRSGVRRLPGLSPSPRPGVGSRSGAGGTVLLSDRSVERRSDYGHFGSVDWRACVRIKLCADGGYQLRFRSLEAPTSRRLGIFSSNANPILVQEISCYLGLELRQIKIERFVDGGIYVQLEESVHGCDVFQVQPTCPPSNENLMELLIMIDACRRASAKT

SEQ ID NO: 85077 - protein, 89 aa, Zea mays
  Coding DNA Sequence Number=SeqID_41702
  Homolog annotation: Hit_ID=Q10T70; Match level="QueryCoverage=43%, HitCoverage=13%, E-value=6e-07, Identity=64%"; Hit description =Expressed protein
SARPPLPTAAEPPPGLFPAREDLVRLLAVIFIAAAAAAACSVLNRRPEPFCDSPQWPDDYADGELLVISLRGENKNKRRDWKDNAVYKA

SEQ ID NO: 85078 - protein, 124 aa, Zea mays
  Coding DNA Sequence Number=SeqID_41703
MAPRTLYDYGGSQPPYGSKRTVIPEGDIDFPNVPHGLHVYYEEPRGLFSNLSRPKGFDDAHHAITLNHLIRPINCQRSRSTLVNRYLHAGECKRERKECGTTYRIVGDEVTPCAPGFVVYFCHG

SEQ ID NO: 85079 - protein, 58 aa, Zea mays
  Coding DNA Sequence Number=SeqID_41704
MSGAPEDSNANSPPSGISRGDSAIIHRTVRYTPDSVRCAKGGSTVSKAFLQTESLILE

SEQ ID NO: 85080 - protein, 134 aa, Zea mays
  Coding DNA Sequence Number=SeqID_41705
  Homolog annotation: Hit_ID=Q6QP51; Match level="QueryCoverage=36%, HitCoverage=22%, E-value=3e-17, Identity=83%"; Hit description =Putative growth-regulating factor 1
MDGGNHPRGGEPSVSQLLQGLQKGLEILLSLARGPIAPVAAGGSHHSLRKRWEPPIVVPEDRERGYSERDPSPRRKQAPSPPTDQGFEGWPLGRVRQPPQSTRAPRPLLVRGSKAGPSEGFDSRLRPLGLRAHY

SEQ ID NO: 85081 - protein, 209 aa, Zea mays
  Coding DNA Sequence Number=SeqID_41706
MEHRPGLERLLETTHLEPDGKLFVNTQQAPTWRANCWCFDPEGPWTDEADALEVGGYKCSRGRERESLFVSPSSRAATFSYEGPGPSFYRRKERAQRPSSEVEVESEPWGRARQSFLWRLRPDLVAVSLTLAGGTVVGAAQAALFSCQAILALNAPAMRSVGAAIWPRLLHCEACPSWASGESKLCADGVYQPSFSSLGGTPNYGPRQN

SEQ ID NO: 85082 - protein, 47 aa, Zea mays
  Coding DNA Sequence Number=SeqID_41707
MGKPVPSLLTLLLSRVTTLVPTITGMGDHVSGRVRGKVYCQVQSGWV

SEQ ID NO: 85083 - protein, 60 aa, Zea mays
  Coding DNA Sequence Number=SeqID_41708
MSVLSKCRPQCVVVGSSASTTASEVVSAPVHVEPVGPVIILSDDEDGEIDWTALRDDDDE

SEQ ID NO: 85084 - protein, 63 aa, Zea mays
  Coding DNA Sequence Number=SeqID_41709
MQQSTMLAGRHIIALACPAIIIAIIVATVVAVLVTATIVTAVVVILVIFVVRGDDAHPMARIS

SEQ ID NO: 85085 - protein, 67 aa, Zea mays
  Coding DNA Sequence Number=SeqID_41710
MEEALQMREIHLPPKAQTRGHRRSSMNVTIDAFFKILKFPDCNCNICQFSIQRRKTKWISKLKEAFT

SEQ ID NO: 85086 - protein, 49 aa, Zea mays
  Coding DNA Sequence Number=SeqID_41711
MASDSELELGCQNCRVAMPWKMEKGCQLLITAEDMFLDVYATNLVQDLR

SEQ ID NO: 85087 - protein, 51 aa, Zea mays
  Coding DNA Sequence Number=SeqID_41712
MASLVPLVGVTTRVGKGILGRAEGKVGRRLNGANGPAEERGPTAQAQMFEI

SEQ ID NO: 85088 - protein, 65 aa, Zea mays
  Coding DNA Sequence Number=SeqID_41713
MARTKTTQRKATGPREVAAMGAGPSGASNGRPYGELDLFGAPPSMNLEDERSPEAGSGAAKDEDN

SEQ ID NO: 85089 - protein, 64 aa, Zea mays
  Coding DNA Sequence Number=SeqID_41714
MAMMGSTSEKMYLCEVSFASVGPISERPPRNGSGEMARVACTLRGKRLDGGVFVLLVGVNPFWS

SEQ ID NO: 85090 - protein, 312 aa, Zea mays
  Coding DNA Sequence Number=SeqID_41715
  Gene Ontology: Mol. function=helicase activity; Biological process =viral genome replication
  Homolog annotation: Hit_ID=Q1EPC6; Match level="QueryCoverage=92%, HitCoverage=18%, E-value=3e-98, Identity=60%"; Hit description=DNA helicase homolog, putative
MHMVTFHERQMVERVVNRPGADRSMITAYFEANKLHEEARGILYREFPEWYTWQQGKVWQRRKQNTCGQVGRIIFALPSKGEHFYRQLLLNHVTRATSYADLRTIDGDTLPSFREAAQRRGLLEADNTIDECLNEAALYQMPSALRRLFATILVYCEPNDVAKLWQRHLDTMSEDYHHITQSKTHLQQMVLIDIRNMLQSMGKDIKTFPLSAIIDRYDNSQGIDREIYEEESIEATTEDVALQETLNEEQKSTYEKILSVVDTSNGGVFFVDGPGGTGKTYMYKALLENILLCVGGGTEEVNNDGDVRLPDK

SEQ ID NO: 85091 - protein, 132 aa, Zea mays
  Coding DNA Sequence Number=SeqID_41716
MTVTGLILGEPSSYLLLAIFFSLTFSFSLLFPLEDSIKEYYHHTEEETKDYEPCTTVFNPRITKHCDLRGEGVENGVACNLTEGIYLELRTKNTLHHDASKVRRSISTKHDIFISSNITRVIIVTLTVEALM

SEQ ID NO: 85092 - protein, 102 aa, Zea mays
  Coding DNA Sequence Number=SeqID_41717
MARARKGREMLLLGADHGARSSLEVVAAASREDEGASCGEEAAGVAPWGGRAEAPLGKKGAMEGSAQSRCSAGKNTGRGVVAAGKKMEGWECKTAQVRKEDS

SEQ ID NO: 85093 - protein, 147 aa, Zea mays
  Coding DNA Sequence Number=SeqID_41718
MGKSNKRKREPTPPSEDFGDSKYSEEEFSSESEGSPAPVSLPASSDDSDDSQGIAAEVWTYIRAVERSGLEGSDESEYSSDEEDSDDGEDDDDDDDDDDGGDGDGDGSSSSGGGSGGGDESKGSTRGGSSKGSTRVGGSGSSSKASG

SEQ ID NO: 85094 - protein, 133 aa, Zea mays
  Coding DNA Sequence Number=SeqID_41719
  Homolog annotation: Hit_ID=Q6J9V9; Match level="QueryCoverage=47%, HitCoverage=22%, E-value=6e-21, Identity=79%"; Hit description =Putative uncharacterized protein
MRFWRMVGFGKLPKYHQDPTAEELAKTLECWPSLNYYITGCKYVLMPWKFNGCYALFVIDHVGQILFYTVNTSYFVLQAMVMWGSARQMEFDRDAMILRRNFVIDLLSYEDNSCRYAIPANIQQRLINIAKKD

SEQ ID NO: 85095 - protein, 84 aa, Zea mays
  Coding DNA Sequence Number=SeqID_41720
MDPRVTPPRTGSTVANSGEAIWTGREASGYGGQPLVSSMVKIFSPRCVIRAPMGTNRIAGANQGAGVTGGKVHCTCNLIQFTVP

SEQ ID NO: 85096 - protein, 121 aa, Zea mays
  Coding DNA Sequence Number=SeqID_41721
MYGSTAGMAGIARSTCAGGYPCRRRVCRPNQGDLVQSNGTKESENGSVDYPVHALRWGCELRRPWTGLSGKADFDSSLGELHRGVLTRLRGLDGVGKGWAGWSTAAGARVAADTPHTGKRR

SEQ ID NO: 85097 - protein, 73 aa, Zea mays
  Coding DNA Sequence Number=SeqID_41722
MKVPSSSEEEEDDDDDDDDDDDDDQLSTSPFEDEETVRRVGKGDKEWAMKLKAKDLRPNILTKLRNMMMTERG

SEQ ID NO: 85098 - protein, 246 aa, Zea mays
  Coding DNA Sequence Number=SeqID_41723
DTSPTPQHDVESGRQSSPSPQPEMPPAPPQGIPAARGDPDGDRDDDDAGGSSSHGKELSEEQEPEGWIARPIKHDAAHGCHFHEALDTVLHWAFDRHTWSIEYRYVVYQHRRGLYPDQWEATCLVHRPNNDLRGRYLLRAIFYHFEGYCRGSHARMHHDVHFRSNPRLNNMVNMAAMLNTELDHALDELGKVRAEVAELHAECAARHYLDGGSPVLIEILHPYRSPPLGRFDYSTPDCRTHIDLDP

SEQ ID NO: 85099 - protein, 357 aa, Zea mays
  Coding DNA Sequence Number=SeqID_41724
  Gene Ontology: Mol. function=helicase activity
  Homolog annotation: Hit_ID=Q851V4; Match level="QueryCoverage=86%, HitCoverage=19%, E-value=3e-55, Identity=38%"; Hit description =Putative helicase
MEVPTYTSEVVHPTTDVSEPDSSSDNACDWVIPEYTSTPFMPASTQTEDVGSPDMSTEPLRRKHHVLRGERQAILAHQNKKFEANIARNVATLVDDTISDVGKMDDSTQPGFNYRDQQHWNTRQSAIVATNGSANMVEQGIDDDDEGVIFGEDNDENEGYLFADEETNEDFDIDGTQDQSVASNVPDPYDKVYSNIPEETHMLKHVPDCGYCTAKKFEYEPPGFCCRGGKVELAPLETPPQLRRLWDSADSDARHFRDNIRFLMAIFLSLPCTVASIIVGILRGNPYSEHLRSMSHVENLADYHIALNLDQTLNKKTYNKPLTSKVAAVWVEGSAWRGQFSKSVMLHVKDRSSHGIR

SEQ ID NO: 85100 - protein, 54 aa, Zea mays
  Coding DNA Sequence Number=SeqID_41725
MAMMGSTSENMYLCQVPNFGFEKVKKRQTFAASIQRWYQKKRTKTKAAGGKVLR

SEQ ID NO: 85101 - protein, 56 aa, Zea mays
  Coding DNA Sequence Number=SeqID_41726
MGSKRAGYEQRCAMAGEKNAEGAHGCWEKEDGGSQEIKPTLEKSAYGKKNRNSQIF

SEQ ID NO: 85102 - protein, 132 aa, Zea mays
  Coding DNA Sequence Number=SeqID_41727
MGRRGEGARTGEARGASSGCGIHGSRGASYGWSRSTPARRRREREGEAGRERRGEEPLGWGGAAAMELGEREPASSGEERAAELPNAWQGEDPSALSHGKRIEGAPCVGEEEGRGIRLTAEKSGKGERAAGI

SEQ ID NO: 85103 - protein, 77 aa, Zea mays
  Coding DNA Sequence Number=SeqID_41728
CNLADGEYILVLEQGATQEVARIQHPSLPQRICLPQLWKASPGSLEDMVVGVTWPSISPPGWTVEWDPASAEEEHEE

SEQ ID NO: 85104 - protein, 180 aa, Zea mays
  Coding DNA Sequence Number=SeqID_41729
MVEKDLQVEQLSNEIQELEELVGTRENTIEVLEDQLINTQQQLAEANQHLDMHHQEIQDMEAVSIQPDREHRDYSTAAIHLHWELRCWAGDGRSPILPILEADSAPYFTRAAKMAGASDPGVSTALATQSKQIESQSKHLAAQSKMLQQLCDRLEAQDLQWSSLKQSVANNAEDISSIHL

SEQ ID NO: 85105 - protein, 102 aa, Zea mays
  Coding DNA Sequence Number=SeqID_41730
MEVGTGRGAHRENTKGARPWEREKGQSSGQGETGGARMAKTARIRAEARHENEEETVVEEEVVPQAENPPAENNFYFDICGVDPEPPATQGKPQCISPFLAL

SEQ ID NO: 85106 - protein, 406 aa, Zea mays
  Coding DNA Sequence Number=SeqID_41731
MAGSRDSSDISPSNIIEPTWETLPADEQLQFEEHKERMIQEAKAKFLANFKVDRNNKVVRHRATDPASLQPTPDIPNPRCAQRCMYDVRPPHVIFIPVTLATTCPPPHPPAGFTGSTPRIPFGTPGYKGGRIERTQPCCRDTVASSPRSPLPAANKEAGWVKGSRRGGISDSIVVRTVEGAWGLPRARGKAAVAASPRIGRLWCRNCSPELGIRRSPWAELLVLGCRIGATPASIHRRVGGAAVGVVGWEKIASGPSDLPRCAQRCMYDVRPPHVIFIPVTLATTCPPPHPPAGFTGSTPRIPFGTPGYKGGRIERTQPCCRDTVASSPRSPLPAANKEAGWVKGSRRGGISDSIVVCTVEGAWGLPRARGKAAVAASPRIGRLWCRNCSPELGIRRSPWAELLCD

SEQ ID NO: 85107 - protein, 570 aa, Zea mays
  Coding DNA Sequence Number=SeqID_41732
MSSSSSSVANASLADSSSEDTLSNLAAVELQPGHTVEFGVSRISSIRVQDMQQLGYFGDEVLQRFEVQVHQLTPNAVVALAKYVWTVTSYGEDDEDEGALRCTARMSSLRDLVEEFIGYGVWPLAHGWVLGEVSPRQMPTLGQQLVRSPTFSLDLRGRDLAAFIREVEDGAVRIVGRYALRTESLRSWDIRGSNVRLNRVFELNRLLYGGYPGDDATAVVDRREKKTAVMDKDRQDAAQKHWAITRAGDPMREVKRARGGTKSAAPRGSKPPLAVKPAVLGPSKSWRHMDAVRDKLAAENKSRRLAERLAAAEAEKEDLRRQLAEERRDTNKACAEVQSAQAEGKVVRAEEASLARQRAEEMETRLSSLRDRLDKTEASTHAEVEQTHTQLVDVYWELGAWTATFEAPGQEEELEALPTIVTGLMSFASLVTCEGAVNALSREGCGHFEAFDQSDEGFEREIFQVEDPVMKRSAGALFDRMWGPHGRETVWERSDRAMDQDLGDLDSTLPEASGVEMVPPSDAGKGPSATPAPTGAGEDPVPATALMGADAKQVVAEPAAEDLGPSQVAE

SEQ ID NO: 85108 - protein, 887 aa, Zea mays
  Coding DNA Sequence Number=SeqID_41733
  Gene Ontology: Mol. function=hydrolase activity, hydrolyzing O -glycosyl compounds; Cellular component=cellulose and pectin -containing cell wall; Biological process=carbohydrate metabolic process
  Homolog annotation: Hit_ID=A7P375; Match level="QueryCoverage=98%, HitCoverage=94%, E-value=0.0, Identity=69%"; Hit description =Chromosome chr1 scaffold_5, whole genome shotgun sequence
  Pfam annotation: Domain name=Glyco_hydro_31; Domain location=229-721; Score=886.4; E_value=1.4e-263; Accession=PF01055.17; Description =Glycosyl hydrolases family 31
MNVCELTLAVSHPPTGQEQVKQRTSTYGPDIPRLRLFVKHETRERVRVQITDADKQRWEVPYNLLPREPAPPVTGGKVTGAPFTGAEYPGEELVFTYGRDPFWFAVHRRSTRQPLFNTSAGALVFKDQYLEVSTALPKNAALYGLGENTQPGGIRLRPNDPYTIYTTDISAINLNTDLYGSHPVYMDLRSLGGRGVAHAVLLLNSNGMDVFYRGTSLTYKVIGGLLDFYFFSGPTPLAIVDQYTSMIGRPAPMPYWAFGFHQCRWGYKNLSVVEGVVEGYRNAQIPLDVIWNDDDHMDAAKDFTLDPVNYPRPKLLAFLDKIHAQGMKYIVLIDPGIAVNSSYGVYQRGMERDIFIKLDGQPYLAQVWPGPVYFPDFLNPNGVSWWIDEVRRFHDLVPVDGLWIDMNEASNFCTGKCTIPKTHQCPIPDTKTPWLCCLDCKNLTNTRWDEPPYKINASGQTARLGFNTIATSATHYNGILEYNAHSLYGFSQAIATHTALQGLQGKRPFILTRSTFVGSGAYAAHWTGDNKGTWENLRYSISTMLNFGIFGMPMVGSDICGFYPSPTEELCNRWIELGAFYPFSRDHANFASPRQELYVWDSVAKSARNALGMRYKLLPYLYTLNYQAHLTGAPVARPVFFSFPDFTPCYGLSTQFLLGPGVMVSPVLEQGATSVSAMFPPGTWYNLFDMSKVVVSRSGAPVKLDAPLNEINVHVYQNTILPMQRGGFVSKDARATPFTLVVAFPFGATQADAEGAVYVDDDERPEMVLAEGQASYVRFHASVRGKAVTVRSEVLMGSYSLHKGLVVEKLSVLGLEGTGKDLAIQVDGTDATAVATSSPYFAAGGNAKLQGEEGVEDSKNGVMVEIGGLALPLGKSFTMTWNMRIEA

SEQ ID NO: 85109 - protein, 58 aa, Zea mays
  Coding DNA Sequence Number=SeqID_41734
MEQFEHGVCTHQGSTLLPSENTNASSMENGEPGCRGICSTIAGTVEHSLAARAARPSL

SEQ ID NO: 85110 - protein, 54 aa, Zea mays
  Coding DNA Sequence Number=SeqID_41735
MGGSRPGFIPEDRGKVRAEKEAVTDGIVDITPQLITLNQKSKSDKYHKNKHSSA

SEQ ID NO: 85111 - protein, 108 aa, Zea mays
  Coding DNA Sequence Number=SeqID_41736
MAPKRASSKAAPSVDEAAKAALLAEKKGKALIDNTPQEACEDEALSKRQRHEHPTPEGTVRTCSSGGQQQAPPLGFAPPEGEDATEDGEVISISAEEQLQLRSLLKVA

SEQ ID NO: 85112 - protein, 665 aa, Zea mays
  Coding DNA Sequence Number=SeqID_41737
MASGRTLLQPCPRPRRRSRGEDKYKEPEARSSRGGDPVGDGNFSSRLRLGTDDRGPSARRQIPTRILPDEQGTNLPAEAPYRRLPAGRGTGGQADEPDALGQTTPAVDRPRVVEVRPAHRAGERPLPRTSRERVTHEPAREVELRLIPASTPARMMNILEAEGGTKIAARLASPHPGAGGHRLGKTRCIREREDMVAFQGGHPPFKGGSPYLRPQPSRAESSPTHSKVLPCGAGAGSHTSCKPTQSRRSQTAARGAYNRPAVTSDPPLWPRPAGERVGSRAGGMQPRQVGALLQLPTRPAEAQAHASCNRRTECFVHAAAPPLAPPPRLLDCGTNAATRGDPARDPAAPAWRDGQCGQKWAGSNGGGRRAGAAATSRSERRFAFAIMTVSKEGPRKGDTPKRILPREGTRLRAPLLIRGSKAGPPEGFDSRLRSRGPYTHYWSEVRRPAPQKGSTAALGYSGSAPITDQGFEGFTAASDTERGMTMESHQREASSPRTPSPGDRVWQITRSSSETPCSAPIEGNMALFPPSSLRKGDAGAVNIPARELGTRPYTRAMASSHEGTTRPAKALRETLRPRRSETTPPRPRGLHPAGALARTPRNKTQPRKAGPLAKKCDESLQASANTPFKARGLLSGTIIRGTLKAPNSQLVTPISTKLQRPDGCD

SEQ ID NO: 85113 - protein, 309 aa, Zea mays
  Coding DNA Sequence Number=SeqID_41738
MVTSSSMAVESKPGRGLCPSLSLKDFHHQGWGGDCRVPGSQTRAASEPLSAPASATAAGRGSSTDEIARAAHGPTSNSTALCPSLPHEFGHGRGPPGSSIRPEVIAAAVRPPGAEVVVVAAAGAGDGTPFVGLLLLRSPPPIEWGCSYLRRWNRSSVCNGTLNASVFVHRGCRGLNILVVRGFSCLVKGTPRPLFDEPRPGVVVSARTEAELARKEDLVGRSLAGSSVSGTDAGIDMPRPRAGLMSLEDGWPRPRGDRPIRLPEPDSRRRPWRRWPGCGDDVVLQSGDPRTASPSEARSDLAEGVVDTE

SEQ ID NO: 85114 - protein, 112 aa, Zea mays
  Coding DNA Sequence Number=SeqID_41739
MRRVRTVWRFTSQESSGPPFSECGRPATEAKQADIEEGDTGEEEIDYNTVMPSKPSHLDFGKSTMSEADMPMMTKLGVGTMLRHRRSCRKKHLRQNLFIRDTETTAHEASIL

SEQ ID NO: 85115 - protein, 49 aa, Zea mays
  Coding DNA Sequence Number=SeqID_41740
MAVGVSEALYAKAIGSLEDMVAGVTWPSILPPGWTIEWDPASAEEEHEE

SEQ ID NO: 85116 - protein, 115 aa, Zea mays
  Coding DNA Sequence Number=SeqID_41741
MCHRSPDFIRALVNMDNANQCTIARFLAPVAPPTSPKAPQLVELNSSIAVDWNSEPPSIIATSAWRPGSSDHHWPQPDHQRVRRSLPDLTDHPAGALPPPKFKFKSRRELEKGIT

SEQ ID NO: 85117 - protein, 90 aa, Zea mays
  Coding DNA Sequence Number=SeqID_41742
MKFFLKKTKIAPEPKATISKKLKLDTVPSKEPKIDVKAEAEGATEAKDAGEAKTTMSEIDRIVSDIVADVTTETNVAVEEIMATVLDEGK

SEQ ID NO: 85118 - protein, 117 aa, Zea mays
  Coding DNA Sequence Number=SeqID_41743
MADIDQDEPLNPKALADPDNNFYKINGVRLHHKRGRRLGRILGNLGKHGVVAEREQWKGMEGALMVGGGPRQPSMTGGVSYALGKRDVVAERQQWKGMEEGVDGGDPRPPSIDGGGR

SEQ ID NO: 85119 - protein, 183 aa, Zea mays
  Coding DNA Sequence Number=SeqID_41744
MTQPLPFSPLSPLEPTLTQFMPTSKDSDEGGKSSKGHEILSEEKGLMLSKALRIQQENEEKELTTLQDEVAKLQKSLEEKEAEITSLKEKVNKVENKNEEAIKVHNADMTKIKKQDKSISSHGTALVLEKARCDLVKAVGEASFSMAVDDIKAPSKNVLNPAKRFFSELWDKGGQQLSVLEAE

SEQ ID NO: 85120 - protein, 126 aa, Zea mays
  Coding DNA Sequence Number=SeqID_41745
MGSRSTSSWAPVAPPPELPIMENALRERTKRTVKRKKRIVKRMIMKKTLTRPTGTKSRVIDAWAIKFASPKPPIMHSMVSKLASARSEADSSHRPSSASGLSLAAGRTGGTALLEHKATTDVVDCP

SEQ ID NO: 85121 - protein, 83 aa, Zea mays
  Coding DNA Sequence Number=SeqID_41746
MGGPATDPTLVVVAPTVEVVALGGMAQAAPLSRAVRKVMRRERVGHGLSRHGGDGSSGYVAIFDSFGGCPREGSTQMHSSPYV

SEQ ID NO: 85122 - protein, 150 aa, Zea mays
  Coding DNA Sequence Number=SeqID_41747
MGKSNKRKREPTPPSEDFGDSEYSEEKFSSESEGSPAPVSPPVSSDDLDDSQGIAAEVWTYIRAVECSGLEGSNESEYSSDEEDSSDSSEEGGGGDGGDDDDDGGDGDGGDDGGDGGSRGGNSGSKGGKVGSGRGSNGSGSSKGSNKASG

SEQ ID NO: 85123 - protein, 158 aa, Zea mays
  Coding DNA Sequence Number=SeqID_41748
MSPARARAYKAPLDIDRTPRTLDLTGARDHRRLPCKRRARSHPIPCHRRPACRALPSHARPSEETVHASVKLPEQGIGLCLAGEASPRSPDFTRPLVNVDRHTYSYSLHSIDCNLADGEYVLVPEQGVAQEVAPDPAPERAPEDLPAPALEDKPRFYA

SEQ ID NO: 85124 - protein, 165 aa, Zea mays
  Coding DNA Sequence Number=SeqID_41749
MDYLVSREGEGEDDPNGGELEDRVEGLVVVHSWALGETSKNSTGLVAVEQAIRSQLVPEDPLVVNRIGVCGDPRGQRGWRRELGRHPKPSCSGRGVRTREIQLNVVGEKEGARDGVVELAFIVTLEGTNRSTELGRDLGEELGEVDKRVGLQPKHKSPKKTREII

SEQ ID NO: 85125 - protein, 88 aa, Zea mays
  Coding DNA Sequence Number=SeqID_41750
MQYNGSSSLISCEKQTIRIEFSSLQVTALVPTITGMGDHVSGRVRGKVYGQILWGTLWCWIRGYLLSNSLLRHEDVLSVSEVAIYRMQ

SEQ ID NO: 85126 - protein, 305 aa, Zea mays
  Coding DNA Sequence Number=SeqID_41751
MPIGSHGCLDGCWHFEVFDQADEDFERDVYKVEDPVVKESVGALYDRMWGPHGREVVRERAEIARAQAERGERVDDFGALNSALPDPEPTPAEAVTGAALEPTPETAAVATAAPASAAPGEDLPPKVAEGAPDAPAAAAPSVEDPAAEAVKTTAEVAAEPTAEAPAASGPSQVQDFGPAHATATTEFLAASTAEGGNECGGSISEFFDFTDSGSSVEWTEESSEEDLDYFAAFDVAAAEASPHAADAPDVPGPSTGRRRRRAVAKRRVSAEEGARLRVSRAGRQELLSLPAAASTGEGELRSLFA

SEQ ID NO: 85127 - protein, 301 aa, Zea mays
  Coding DNA Sequence Number=SeqID_41752
  Gene Ontology: Mol. function=RNA-directed DNA polymerase activity; Biological process=RNA-dependent DNA replication
  Homolog annotation: Hit_ID=UPI00005A975E; Match level="QueryCoverage =24%, HitCoverage=4%, E-value=1e-10, Identity=43%"; Hit description =PREDICTED: similar to Retrovirus-related Pol polyprotein from transposon 297
  Subcellular localization annotation: CTP_CleavageSite=68; ConfidenceScore=5.44e-01
MTVGAPGRGTLVCQVTLSALMAQSSAFAGGETFAPGSRITFSTLDFFSTATSELSLTTPNVPDTVGTQSAHSTRSKVEKQRRKRCAAALKQYLNRHIIRKADGASSSTLVDVIDHQLTFVLDLLEDDSSHNSTEANSDIEEASERAYFVAPPSPNDNGRGDKEAPNQEEDDSEQYFINPAAALMLRSNPESGALEAKVMYWNLHNFVDRDIVQQGEEVEQPHKSRRERNPNPLGPGSRAFGHEIRIAHFPLKVHAPANISKYDESTNPNVWLKDYCLTCRMAAIKDDYLIIQFLPYTTWKG

SEQ ID NO: 85128 - protein, 160 aa, Zea mays
  Coding DNA Sequence Number=SeqID_41753
MVPFMPIRMLPTLPIFAAWLIGVTRALSLAENCPYRILPISELGRYVEEVDSHLWSPLPELVGEVLTDVVIGEGIQHVRSSWDTCRCPKVPDKGLPKGEMRNPDLMPEGTRSWSKRVGVALAPTFVRLLDFFLLPTPIVDDVSDIADASKAVLHGNMCPS

SEQ ID NO: 85129 - protein, 92 aa, Zea mays
  Coding DNA Sequence Number=SeqID_41754
MENFPETMGCLMIFGGAEAYGDKRRLKVAQVEVFVFEVVDFLGYYNAILGSPCYTKFMRSIPKDIANTTMVDPGATWPIDGEGGAKVTLSAA

SEQ ID NO: 85130 - protein, 98 aa, Zea mays
  Coding DNA Sequence Number=SeqID_41755
  Homolog annotation: Hit_ID=Q7XDG5; Match level="QueryCoverage=41%, HitCoverage=2%, E-value=5e-07, Identity=65%"; Hit description=NB-ARC domain containing protein, expressed
MAAVLSAFVPDTAVRWRGLVTGEVARRMGVATEAKALLARLERVGAAVRDAEARAACGDDGAARWLANVRAAAYEADGAVDRCRVAARRRRAHDQQKQ

SEQ ID NO: 85131 - protein, 139 aa, Zea mays
  Coding DNA Sequence Number=SeqID_41756
MGKSKKGGGSSHHFGDKRKREPTPPSEDFGDSEYSEEEFSSESEGSPAPATPPASSDDSDDSQGIAAEVWTYIRAVERAGLEGSDESEYSSDEENSSDSSEEGSGGDSGKGGDGSGKGGSGDGGDGSKGSSKGSNKASG

SEQ ID NO: 85132 - protein, 959 aa, Zea mays
  Coding DNA Sequence Number=SeqID_41757
  Gene Ontology: Mol. function=catalytic activity; Cellular component =integral to membrane; Biological process=sphingolipid metabolic process
  Homolog annotation: Hit_ID=Q7XDG7; Match level="QueryCoverage=97%, HitCoverage=98%, E-value=0.0, Identity=84%"; Hit description =Expressed protein
  Pfam annotation: Domain name=DUF608; Domain location=531-894; Score =828.4; E_value=3.9e-246; Accession=PF04685.4; Description=Protein of unknown function, DUF608
MVSGHIFHCRKNSWPAEEYVGRTALQLLDFDGGAPPEQAWRRRLNSHANILKEFSVTFMEAMRMMSLGLRLWSYVREEASHGRKAPIDPFTKERCKPSASQGVPLGGMGWHNTAFSEWLHATKVMMSGKIFVSRDGGNKKYSSVLAPGHHEGLKKNSDSGISSWDWNLSGQHSTYHALFPRAWTVYDGEPDPDLKISCRQISPFIPHDYKDSSLPTSVFVYTLVNTGRDRAKVSLLMTWANSIGGFSHNSGGHYNEPFITAKDNPPVTFAVAACETQNVNVTVLPVFGLSGENHVSAKEMWNTMLQNGHFDRENFSAGPSMPSSPGQKLCAAVSASTWVEPHGRCTVVFALAWSSPKVKFQKGCTYNRRYTQFYGTSEKSAVNLVHDALTKYKLWEEEIEKWQNPILKDERLPEWYKFTLFNELYFLVAGGTVWTDGQPPAIDEKKSPGFNHQKSSKRGTKDTNQGSVKDRHVNLAVEQVPHGGYMANGDDHSVSKFAAVHGSEMQEQINGLKSEEPIPYLISKDGPEHVGKFLYLEGVEYIMWNTYDVHFYASFALLDLFPKIELSIQRDFANAVLYEDRRKVKFLADGTSGIRKVKGAVPHDLGTHDPWHEMNAYNIHDTSKWKDLNPKFVLQIYRDFAATGDMQFGRDVWPAVCAAMDYMDQFDRDGDGLIENDGFPDQTYDAWTVHGISAYCGCLWLAALQAAATMAHRLGDRHFAEKYKLKFIKAKAVYEAKLWNGSYFNYDSGTSSNSRSIQADQLAGQWYAASSGLPPLFDEHKIRTALQKIFEFNVMKVKGGRMGAVNGMTPKGKVDETCMQSREIWTGVTYAVAANMLLHGMEHQGFTTAEGIFTAGWSEEGYGYWFQTPEGWTTDGHYRSLVYMRPLAIWAIQYAVSPPKAILEAPKVNLMDRIHISPHMVRAISEISIRKFCAVHLNRARNKRTGKLVSTANRRAVGS

SEQ ID NO: 85133 - protein, 211 aa, Zea mays
  Coding DNA Sequence Number=SeqID_41758
MGDTRRLFASSLEERNSVGVGTFQPSFGFKDFRHAARLHPSTGGHPRCCSVPGFRTRVASEPLAAPASATAAGRGSYADEIARAAHGPTSDSTAFCPSLPHKFGHGRGPPSSSARPEVSAAAVRPPGAEVVVVAAAGAGDGAPFVGLLLLRRPSPMEWGYSPVDYLNRFTKHESPRVKVTSESLAGLSVSGTNAGVDKPRPRVELAPLEDD

SEQ ID NO: 85134 - protein, 91 aa, Zea mays
  Coding DNA Sequence Number=SeqID_41759
  Subcellular localization annotation: CTP_CleavageSite=79; ConfidenceScore=5.52e-01
MAVMRGIPALELPINCSGVFLKASGTFVKGSVMVTPTFASLGRRLNGKVARSLGQMGYMTCGVRCRNSHRDCKTGYTSRASPVMEQLRTLP

SEQ ID NO: 85135 - protein, 62 aa, Zea mays
  Coding DNA Sequence Number=SeqID_41760
MTSSTGVYPNTSAIESAVPPVEDEGTKLFGDLEYSRRGTQQRKKDLANGAHATEEARAVARM

SEQ ID NO: 85136 - protein, 156 aa, Zea mays
  Coding DNA Sequence Number=SeqID_41761
MLNHIQQSSTQESPSIVILGAREWKNGVACDLAEGIYLECAFALSEMGVEGAGGGFIRCDGGEGGPGVAGDDGGGGCAAKVAWAAVVRCKGGHGVVVVRMEAGTRGGARGQCFDSHGRSFGLSGWTGFFCSLFQASRGSSQSEEKLHYPMHAEDWV

SEQ ID NO: 85137 - protein, 223 aa, Zea mays
  Coding DNA Sequence Number=SeqID_41762
NKVATIHRQSPKTVTSSPWMGRGKPGCDLGPTLSFKDVHHPRWGGGRVEPELYLPRGFVGRPLLRRSRERALTGPASGSNFDNVGLVDGGRRQPQRVGLVGLAPGAPSCRKAAAAPCAREDRPRYRALPGRRSCSGAVLPLHRYGASTQRGNPRPLFDEPRPGVAVPGRTEAELARKEDKSGDPWTASPFEARSDLAEGVVDAEGAAAPFSRQDPSLQDRIIL

SEQ ID NO: 85138 - protein, 90 aa, Zea mays
  Coding DNA Sequence Number=SeqID_41763
MTGKKTTASSNGGTPKKAKVVVEDEEDVGLEDEEEATVTLSVEKDALEKNYMLRFVGAFLLIVRNDLFSIEDLCSMISKDPWVIFVTYLT

SEQ ID NO: 85139 - protein, 60 aa, Zea mays
  Coding DNA Sequence Number=SeqID_41764
MGSWAPKWAGWAVWPRLLHNEACPSQASGEQRGRPPSEEALGRDVNSSGTTVPTRGWVRV

SEQ ID NO: 85140 - protein, 337 aa, Zea mays
  Coding DNA Sequence Number=SeqID_41765
  Homolog annotation: Hit_ID=A2XFR6; Match level="QueryCoverage=53%, HitCoverage=53%, E-value=2e-29, Identity=41%"; Hit description =Putative uncharacterized protein
MDPSTHMMVHTLQTTRVNTSYAPQPRQIPVYPVVVEEVPANLPPVRVENVINLEDNSEEQLPTPTPLAESLAFVAGSSTSASSAPAFQAPAPGGDDPDDSGDGDDEDDDDEDDGEDGHINEEADHAQQDNFMGFGPVVEHYTSMFETGHFPNLLQEVLHALGAYVRPLYETRRVSEPPRACYYITRIHVRVMDAGDRGFRTLSAHESLIPLSTYAARRTLWSLSHTYRQQLQNTRFRHLPQRLRGGSQTNIVPGEPGEDRLNTLAGVVAGLNTDLDSATLDLYSVHLELENAHARIAALEAQLQGLDPPEAQVPVVALSPPRKRLRYGEPGSVTRLL

SEQ ID NO: 85141 - protein, 94 aa, Zea mays
  Coding DNA Sequence Number=SeqID_41766
MAVSASPELVSGEKDKTWDMTHPKSAGDNRIQCEYLPHSGLREGIPSIVTSASSEPGSDLGIHDGGRPNVIICSGADAPLKKPFPILSTMSTTT

SEQ ID NO: 85142 - protein, 170 aa, Zea mays
  Coding DNA Sequence Number=SeqID_41767
MTQMYSMGRQRGPLWDRDMGLQGTSGGFHFGSLSCIVDQKGTLHSVADTGMGAPRSHATVLAQKKSASRPKMTPTTTVGKPRLVVIRAASVRAQVQGHRLIRVPHQTIVAPTRRGATPSPPPRASIVAVTTRWTPLSTSLTQIWTWINQNKKGTKGPIILKSNGLMIPII

SEQ ID NO: 85143 - protein, 100 aa, Zea mays
  Coding DNA Sequence Number=SeqID_41768
MGVREVEISRPSCSSRAQVGLGRCGGSSEVEVESEPLGRARRRQLAEARAEFESKRSSSSSGAEPKSEPWVGQSGVRRLPGLSPSPNPGSGGAEFAVFRC

SEQ ID NO: 85144 - protein, 185 aa, Zea mays
  Coding DNA Sequence Number=SeqID_41769
  Homolog annotation: Hit_ID=O48967; Match level="QueryCoverage=82%, HitCoverage=32%, E-value=8e-47, Identity=63%"; Hit description =Putative uncharacterized protein
MEARRASRYRVHGRRSWRLRNPKPGVKRKTCKVKIIEHRAETLEDFAMEQEVASSAPRVPDRPDSGTAAVHAVQQHTPAQASWTPSRAAPTALSAARELLRHPPSSTASPGAMRQWRDDIDRLLGMTHSTSTRSRPQSSRRQREATTSVRSPSVRGAQTDDLRAELNRRHTREDTRISLERARER

SEQ ID NO: 85145 - protein, 74 aa, Zea mays
  Coding DNA Sequence Number=SeqID_41770
  Subcellular localization annotation: CTP_CleavageSite=5; ConfidenceScore=5.05e-01
MARVACTLRGKTLDGGVSVLSVRKQQTFVAFSLRWCQRKKLKSEVPEDVVTSTHRLYSGGSRAVCTGVFQCRQC

SEQ ID NO: 85146 - protein, 61 aa, Zea mays
  Coding DNA Sequence Number=SeqID_41771
MRASQLVIVATHSRDHPHAPLSSRWRISDPCGCTRADPMRKGFVSSGVIVRLQLEVELHVQ

SEQ ID NO: 85147 - protein, 26 aa, Zea mays
  Coding DNA Sequence Number=SeqID_41772
MSAGGLCPRSGKKKKRREKQPIPVTR

SEQ ID NO: 85148 - protein, 145 aa, Zea mays
  Coding DNA Sequence Number=SeqID_41773
MEYSTKTSLPLYTIGIIYPLSAQLRYNSPDCPVYHRTVRYTNGAMTICAQRSTLTDEQCSTVTRQKSEQKVRGAPDCPMPHEDKASNGRPAPSPNDMVTWRCTGHCPVRPSLAAFSNGYNLVGGYNYHPNRPLKEGGAQATFQVI

SEQ ID NO: 85149 - protein, 515 aa, Zea mays
  Coding DNA Sequence Number=SeqID_41774
  Gene Ontology: Mol. function=DNA binding; Cellular component=nucleus; Biological process=regulation of transcription
  Homolog annotation: Hit_ID=Q5QMP4; Match level="QueryCoverage=60%, HitCoverage=96%, E-value=1e-135, Identity=79%"; Hit description=No apical meristem (NAM) protein-like
  Pfam annotation: Domain name=NAM; Domain location=70-212; Score =194.7; E_value=2.3e-55; Accession=PF02365.6; Description=No apical meristem (NAM) protein
MTWCNSFNDVRAVENNLATAAAVAAAAAKKQQQQQASSHVNLIRTCPSCGHRAQYEQVQAAATIQDLPGLPAGVKFDPTDQELLEHLEGKARPDARKLHHPLIDEFIPTIEGENGICYTHPERLPGVGKDGLIRHFFHRPSKAYTTGTRKRRKVHTDEQGGETRWHKTGKTRPVFTGGKLKGYKKILVLYTNYGKQRKPEKTNWVMHQYHLGSDEEEKDGELVVSKVFYQTQPRQCGSGSATAKDAIPLAANAATDHHHHHHHDGGNGGGNNMLKEAGIVDFYSPAALISYNQAASNSRVAASAHLVPNFEDGGRAGLEGAQPRSAGRRVVLPPLRAGRTPGAQRMAGGRGTPRVRRTWDAAQGAKEEPGRMLELAISRKKANRAPCVKDACALSYLGYPQNIPTKQGYRLARYNGPDRAWASEPDEAALWDAFVVGLCLVPIKRRVPLPALSLSEQRLSSGDFERRVAFLPSLQHLPSKGPVRQSHLVPKTSLDGGDAALARSGSAGVFDVTVD

SEQ ID NO: 85150 - protein, 217 aa, Zea mays
  Coding DNA Sequence Number=SeqID_41775
MAERYRLPRSCVPPTTRRKDCGHPHPGARKPSWAESSPTRFKVLPLRRGGWVPHVMQAGLEQKKPNRRAWCMQPPSDYKQFSNFARTSGRKGGQPCRRHATAPSGRTSPTSNAPSMEAHAHASCNRRAGRYVQATAPPLAPLPRLLDCGTSTATRGNPAYDPAVPARRDDDALVFRSSNGSRTCNGRPANHSPHRINSAAGQAASLAGEASDASPSP

SEQ ID NO: 85151 - protein, 244 aa, Zea mays
  Coding DNA Sequence Number=SeqID_41776
RAQQSELQRSEPNGLVMWLAHRTVSGDRWREVAVAPLAHRTVRCTPDMSGEEFNVKSPGTPDTVRWHTGQSGTPNTPKHGWKTSSKQTVKTDGFTPRPRASSDSGRTPGSPEAKLGQTLSYNNLGQIALPPTGNNTIHPVSTTVPTTRVKLMTVSHDLPRVQPRAQQGAPPRPTPCLDLSLSLGRRSPPRPTPGLDINLGLGRRSPPRPTLGLGLSLGLGRSHRLARPQPRTDYATGDTSLPYP

SEQ ID NO: 85152 - protein, 142 aa, Zea mays
  Coding DNA Sequence Number=SeqID_41777
  Gene Ontology: Mol. function=RNA binding; Cellular component =spliceosome; Biological process=nuclear mRNA splicing, via spliceosome
  Homolog annotation: Hit_ID=A2Y8C3; Match level="QueryCoverage=50%, HitCoverage=38%, E-value=1e-24, Identity=77%"; Hit description =Putative uncharacterized protein
  Pfam annotation: Domain name=Cwf_Cwc_15; Domain location=1-142; Score= -36.8; E_value=4.7e-05; Accession=PF04889.3; Description=Cwf15Cwc15 cell cycle control protein
LFEEIELQQNLAFEGHPVADRDGNFTRGFGRLPAQPQAAAGRQKGQTAEPSALRPASLPSRSGCRGAGEPKRQQAEEEAKMKEAELMRGNPLININNVGSFSVKRRWDDDVVFKNQARGETKTLKRFINDAIRSDFHRKFLQ

SEQ ID NO: 85153 - protein, 236 aa, Zea mays
  Coding DNA Sequence Number=SeqID_41778
  Gene Ontology: Mol. function=protein serine/threonine kinase activity; Biological process=protein amino acid phosphorylation
  Homolog annotation: Hit_ID=A2Z261; Match level="QueryCoverage=87%, HitCoverage=46%, E-value=4e-28, Identity=38%"; Hit description =Putative uncharacterized protein
  Subcellular localization annotation: CTP_CleavageSite=14; ConfidenceScore=5.07e-01
MEPVSRKRKGAPPVCSATRSLQDLASRKRACRGSEPQQSHCTDAPVPAVVMTAPVASGASAPARVLPGGGLKRKVGCIDNATRIGWRKRLESEYDLRDEIGHGKFGSVRVCRPKAGSPGPMARRSSPARPYQRTAHLSGHPGVVTLRAVFEDTDAFYLVVSPPSPQWEIPILRARARAMEPVSRKRKGAPPVSATRSLQDLASRKRACRGSGPWFRPGWFLAFDLMGVSFRCHHSG

SEQ ID NO: 85154 - protein, 320 aa, Zea mays
  Coding DNA Sequence Number=SeqID_41779
  Gene Ontology: Mol. function=DNA binding; Cellular component=nucleus; Biological process=regulation of transcription, DNA-dependent
  Homolog annotation: Hit_ID=Q0JKI9; Match level="QueryCoverage=93%, HitCoverage=42%, E-value=1e-106, Identity=65%"; Hit description =Auxin response factor 2
MAGMSRITTLSYLMFPWPHDGSVSSDFAGSARFHKVLQGQELLGFKTHDGPAISASQATEARNLQYSDERSNNNLGIPRLGVRSPTGIPGFPYHCSGFGESQRFQKVLQGQEVFHPFRGGCLADGHIRTAGMYQPDGRHVSGAAYKWSAPQGYDFPQPAKPVFLLQESSPSSVMMFPQTRSKITHLEYEYSRHEDGRLDRTVPTQDMGRSNQTLSLWPHLVSGEAIEECTGTVNMHSPVSGAEHESNNESTVENGCKIFGISLAEKIRSCDEADSCSAKCNSRLQPLKSQMPKSLGSCWATVHEQRPVVGRVVDVSATDM

SEQ ID NO: 85155 - protein, 407 aa, Zea mays
  Coding DNA Sequence Number=SeqID_41780
  Gene Ontology: Mol. function=peptidyl-prolyl cis-trans isomerase activity; Cellular component=Golgi apparatus; Biological process =protein folding
  Homolog annotation: Hit_ID=Q69JF7; Match level="QueryCoverage=47%, HitCoverage=77%, E-value=6e-53, Identity=56%"; Hit description =Peptidyl-prolyl cis-trans isomerase
  Pfam annotation: Domain name=Pro_isomerase; Domain location=192-382; Score=129.0; E_value=1.4e-35; Accession=PF00160.12; Description =Cyclophilin type peptidyl-prolyl cis-tr
MWSRKKRYRSNLSYFYAYICNADNLSHIRFISSSEIGLNNVDSRPKLVAGSPEGFPGHIDGKLDNMVDPAAAFGMLFGSDYFEDYVGQLGLASIASVEVEENSNSQEARAKVQEKIKELQREREQKLTQSLKDRLQSYVDGRNDEFVSYASAEARRLSEAVHIFLPFKWTKYHLLLYLIELNLFFRGGFQYDYSGYGASTGKIIVHVLNFFVLHSAENFRALCTGEKGVGSNGKPLHYKGIPFHRIIPGFMIQGGDIVRGDSKGSESIYGGIFPDENFTVKHTHPATPDFKKALYRDLLSCLSATSPNILGLLLWRILDLILMDLSLHNYYQDKLLCRLDGEHVVFGRVIQGMDTVYAIEGGAGTYNGKPRKKAVITDAGEIPKEKWGDQEAQGVFYFLSPCHFQIR

SEQ ID NO: 85156 - protein, 72 aa, Zea mays
  Coding DNA Sequence Number=SeqID_41781
MQSSLLRSGRWEKVPWHHGVRAIRPPISPKSFPDPARFTGDSADSVLVAASALFGFSGGERADALVLPNSGW

SEQ ID NO: 85157 - protein, 25 aa, Zea mays
  Coding DNA Sequence Number=SeqID_41782
MASATAGTARVRSVLEEGDGATDLT

SEQ ID NO: 85158 - protein, 49 aa, Zea mays
  Coding DNA Sequence Number=SeqID_41783
MGGGLLAAASALRSVLPLFGPPEQKSSSSPLLEQGCLCGRELLLAEGDE

SEQ ID NO: 85159 - protein, 127 aa, Zea mays
  Coding DNA Sequence Number=SeqID_41784
MAPKRASSKVAPSIDEAAKAAPLVEKKGKALADNTHQEASKDEAVSKRQRQEHPTPKGTLRTCSSGGLPQAPPPGFAPPEGEDSIEDGEVIGISAEEQLQLQALRIKNHNLQKQKDIIKAKRQRAIA

SEQ ID NO: 85160 - protein, 68 aa, Zea mays
  Coding DNA Sequence Number=SeqID_41785
MGSKTLSTECTFASLTRQRKKNSQGYAGLWDSRLWVYPTDVKIEVVLSRGILSLRGNFFFDYNFFSVF

SEQ ID NO: 85161 - protein, 118 aa, Zea mays
  Coding DNA Sequence Number=SeqID_41786
MDRLELAIISEMAVHHGQPLPGMRGMHRGFPLEVRGPWLEARSGSSEPRGQTLSLLDHRAFQKPPKFTVDATSLGGGGLRNCSMDLGSLSPEKSRAKFGPSSSSESKHPEGNGSPTYI

SEQ ID NO: 85162 - protein, 48 aa, Zea mays
  Coding DNA Sequence Number=SeqID_41787
MTKDEGLNRESFDKEVQPTMMDGMMTFIMKSFGITAGRGNRLKDEKPN

SEQ ID NO: 85163 - protein, 303 aa, Zea mays
  Coding DNA Sequence Number=SeqID_41788
MAPMWCNRVSHVKDVWAMYPDLVERVTVQCMSALYRLQALQSDAMAHVANIAQTTKLTLDSQEDFVVDLSSELVEKDLLVERLSQRITTLEQQVEIRDNTIDVLENQLHDVHRELEEANDHLDMHHLEMEANEARSEGEEAPEELGPAPGADGSAKRDSATALAALAPPSAAWWRPASATSGSGNLPGVLEYAATLVHQGRGSVGRRRYHADSDEKKRDRFRRDLNTKLRERLNTVRAGSFNELVNLAISQADCIVAHRAEKKRKAPMAAPSAQAQRFRIVSHNQSRGFQQQTGRWVIRPPQL

SEQ ID NO: 85164 - protein, 60 aa, Zea mays
  Coding DNA Sequence Number=SeqID_41789
MGFGVCGSLCQGWFAPWGGDDEDDGHDYAYGNGCPCCNHCSGEDEVVEEDFQEFQEYDEF

SEQ ID NO: 85165 - protein, 72 aa, Zea mays
  Coding DNA Sequence Number=SeqID_41790
MVIPKPYKAIENYPSDSGVNKSGLRAKSQNVQGLTQKIHQTQGLFSKWARRRGICASEPSDPIPAAMIRSYR

SEQ ID NO: 85166 - protein, 56 aa, Zea mays
  Coding DNA Sequence Number=SeqID_41791
MRSKPAGDAAEGEEWESISGKRHRRSSAPRESTPVDQGARGTTNSTSTAELGSGTA

SEQ ID NO: 85167 - protein, 78 aa, Zea mays
  Coding DNA Sequence Number=SeqID_41792
  Subcellular localization annotation: CTP_CleavageSite=22; ConfidenceScore=5.05e-01
MDSHSSPSAASLAVLLLIAGTRAMLGAPAGRSTSGLCGARLAPGKDIWRMKKPFGRGMDSDLDPMALKRRYPFAVPIC

SEQ ID NO: 85168 - protein, 688 aa, Zea mays
  Coding DNA Sequence Number=SeqID_41793
  Homolog annotation: Hit_ID=Q6JAD6; Match level="QueryCoverage=89%, HitCoverage=96%, E-value=1e-164, Identity=64%"; Hit description =Putative uncharacterized protein
MEKCKPIKTPMPTNGHLDLDEGVTLIARVPSPVLPGSSPLVHQFRMPRTKNVSAPGGGDDEDPRRPFRQVKGKTVYFEQQEGRKKRRTDRAARAAAAAAVAAAQAELGDQPQTPSDQIAYRVRRLASRPRSSSHTSASTPPPTLPAPVTPIAPSTTTAIPATSTTPASIAPPPPAPASAPPVPPPRFQECDETERDPAAGDLFSTRIQESFFRAQMSAQIALRTLLTTSSRYVEEWVRVFYASVWIDPDHHWMRFRFEREDVTITASQIRQRFGFPESTTRLHSLCYGTSDPPRRPHGGVAPGIAHVAALFRPPFTDGPRRSPADFTTTTKYLYELIRRTLLPRMGYREATTHIQLWLLGALVSHSEFDVVDFLICEIEDIVLDGIRARRQLPYAHYLCHIFAQLIQPPRFQGTLEASRLVFGSYRHVPETPVPASAPVFDTQAEDAALHQFETQATTVDDDDDFGVPPPPPMPPHSHDHEAGSSSAAPATPQAMDPALASILQSITQQQAHLAAEQARLSERMLSMFQNMQDRQDALQQQLLQDRAESRAFMALMLQQSGVSVPPVQSAPPPPLHAPVVPSILSGPPVGTSPLRPVTLAFTSPVLSSVCPQPPVPPASAVTTTAVAVSVTTSVLAAPAARPQSESVPAPASTADPGSETDSDPPPAFALLPRPRPDAPLPPPPASDV

SEQ ID NO: 85169 - protein, 59 aa, Zea mays
  Coding DNA Sequence Number=SeqID_41794
MTKVLKTLALQHNQMSFRELKSSDQHWYGHQPTIPPSEREMCPWAISKYFGDLVSNTSA

SEQ ID NO: 85170 - protein, 203 aa, Zea mays
  Coding DNA Sequence Number=SeqID_41795
  Gene Ontology: Mol. function=sequence-specific DNA binding; Cellular component=nucleus; Biological process=regulation of transcription, DNA-dependent
  Homolog annotation: Hit_ID=Q338B0; Match level="QueryCoverage=76%, HitCoverage=44%, E-value=3e-47, Identity=63%"; Hit description=HSF -type DNA-binding domain containing protein, expressed
MEERLRVAEQKQVQMMGFLARAMRNPEFFQQLAQQQDKRKELEDTISKKRRRPIDNTPFYSDGESEQLDSQLKMFESGVLNGLNEPELENLAVNIQELGKGSIDDGNLTQVSDQSELNDDFWAELLVEDFGDKAGQPELEGRTEDVNDLAQQLGWELRVGCWLNVSSGVFWQNDLVDGDWQRCLGANVGRPQYAFCMCTVTVG

SEQ ID NO: 85171 - protein, 253 aa, Zea mays
  Coding DNA Sequence Number=SeqID_41796
  Gene Ontology: Mol. function=nucleic acid binding; Cellular component= intracellular; Biological process=regulation of transcription
  Homolog annotation: Hit_ID=O65215; Match level="QueryCoverage=75%, HitCoverage=43%, E-value=2e-94, Identity=86%"; Hit description=Zinc finger protein ID1
  Pfam annotation: Domain name=zf-C2H2; Domain location=198-220; Score =18.7; E_value=0.021; Accession=PF00096.17; Description=Zinc finger, C2H2 type
  Pfam annotation: Domain name=zf-C2H2; Domain location=225-247; Score =4.4; E_value=3.8; Accession=PF00096.17; Description=Zinc finger, C2H2 type
  Pfam annotation: Domain name=zf-C2H2; Domain location=97-119; Score =26.4; E_value=0.0001; Accession=PF00096.17; Description=Zinc finger, C2H2 type
  Pfam module annotation: Pfam domain module=zf-C2H2::zf-C2H2::zf-C2H2; Domain location=198-220::225-247::97-119
MQMMMLSDLSSDDHEGHWIQLLWRGTLASYALSPLFLAPAASATAPLPPPPQPPAEELTNKQAAGGGKRKRSQPGNPDPGAEVIALSPRTLVATNRFVCEICNKGFQRDQNLQLHRRGHNLPWKLRQRSSLVVPSSSAAAGSGGRQQQQQGEAAPTPPRKRVYVCPEPTCVHHDPARALGDLTGIKKHFSRKHGEKRWCCERCGKRYAVQSDWKAHVKGCGTREYRCDCGILFSRYISSHDHRAYMHGRRALL

SEQ ID NO: 85172 - protein, 198 aa, Zea mays
  Coding DNA Sequence Number=SeqID_41797
MAPPVDVAGPRPRLGDVEAPPRSRSSPSSVTEVESEPLGRARRRPLAEPRAEFESWGRAKRSSSSSRAEPKSEPWVGWSGIRRLLGLSPSSEPWVGRNGPESEPWVGRSGVRRLPGLSPSPSPGSGGAEFAVFRGLARVRALGRAKRSFLWCLRPGLTACQPHSVKWHHSRSGAGGAVFLSDRSVERRSDGGHFGSVG

SEQ ID NO: 85173 - protein, 214 aa, Zea mays
  Coding DNA Sequence Number=SeqID_41798
  Homolog annotation: Hit_ID=Q6J9V9; Match level="QueryCoverage=30%, HitCoverage=33%, E-value=4e-07, Identity=44%"; Hit description =Putative uncharacterized protein
MPERYQLPRSCVPPTTRQKDGGYPPSGGLEGGKTRCIREREDMVAFQEGHPPFKGDSPYLRPQPSWAESSPTRSKVLPYGGGWVPHVMQAGPEQKKPNRRARRSERRFAFAIMTASKKGPGKGDTPKRILPREGTRLRASLLIRGSKAGPSEGFNSRLRARGLHTHYWSEVRRPAPRKGSTTASGYSGSAPTTDQGFEGWPPKGSQPPQTQSEG

SEQ ID NO: 85174 - protein, 236 aa, Zea mays
  Coding DNA Sequence Number=SeqID_41799
MRERVEARIPCSKAREGVKRGYRGGLLHAGAAAHRKVAEAESRRGTAAEKGAGRRGWGWRRAVEGADDESGRFPRQDRRGRARARATRTRATMDGRRGRKPAARFTAMAAAVRPRVSAALMATPAVAYAPSPAFAPTPAAGPAPWAAPAGWIWRPPSLDVVALGRAWPEAASLCWRLRVRGCEATARARTPVPGGGHSARSRRLRPSERRWGGPREPPAGGWRRPAGEKGRPGRDG

SEQ ID NO: 85175 - protein, 325 aa, Zea mays
  Coding DNA Sequence Number=SeqID_41800
  Gene Ontology: Mol. function=sequence-specific DNA binding; Cellular component=nucleus; Biological process=regulation of transcription, DNA-dependent
  Homolog annotation: Hit_ID=A3RL35; Match level="QueryCoverage=59%, HitCoverage=100%, E-value=3e-64, Identity=65%"; Hit description=GATA- type zinc finger protein
  Pfam annotation: Domain name=CCT; Domain location=150-194; Score =77.9; E_value=3.3e-20; Accession=PF06203.5; Description=CCT motif
  Pfam annotation: Domain name=CCT_2; Domain location=147-174; Score =31.2; E_value=3.8e-06; Accession=PF09425.1; Description=Divergent CCT motif
  Pfam annotation: Domain name=GATA; Domain location=221-258; Score =50.0; E_value=8.4e-12; Accession=PF00320.18; Description=GATA zinc finger
  Pfam annotation: Domain name=tify; Domain location=41-70; Score=13.4; E_value=0.0056; Accession=PF06200.5; Description=tify domain
  Pfam module annotation: Pfam domain module=CCT::CCT_2::GATA::tify; Domain location=150-194::147-174::221-258::41-70
MAAEPAAADHDLRPPLADGAAAAGVGAASLAAAAGAAEALMSATSEQLTLVYQGDVYVFDPVPPQKLPNKVPIEACFQGDHMPMSLLICLSAYGDEIVSLTRVSQGHMRASVSVQAVLLVLGGYEVPPGLVNMAVSSANDEKNTTVAARRVASLMRFREKRKERCFDKRIRYSVRKEVAQKMKRRKGQFAGRSDFGDGACSSAACGSPANGEDDHFRETHCQNCGISSRLTPAMRRGPAGPRSLCNACGLMWANKGAIRSPLKAPKMSQQPKDNSCNMVDTDDKNSNVLPVEHNQATPKTDSMMPKEEQKLDIRLPTEEDTKAVS

SEQ ID NO: 85176 - protein, 366 aa, Zea mays
  Coding DNA Sequence Number=SeqID_41801
  Gene Ontology: Mol. function=nucleic acid binding; Biological process= proteolysis
  Homolog annotation: Hit_ID=A2XLR7; Match level="QueryCoverage=68%, HitCoverage=31%, E-value=1e-58, Identity=54%"; Hit description =Putative uncharacterized protein
  Pfam annotation: Domain name=Alba; Domain location=17-87; Score =103.3; E_value=7.6e-28; Accession=PF01918.12; Description=Alba
MDRYQRVERPRNESTIEENEIRITAQGLIRNYVSYATSLLQERRIKEIVLKAMGQAISKSVAVAEIIKKRIPGLHQDTNISSVSITDVWEPIEEGLVPYQAPVYIEQPRQQQVPPPQRQPRRPPAQFQQLEYEGMAVILMHGVEEEGVGVEGAGVEVATVAMVDMETTKVAIIRVVGIMTIKVDIMAMIIKVDIVAMIIKVGMVVDMAITKADMGTIKAMTHLDLLIQKMVDITEEEEVVCEEEAIGVTEEVMKVAGAVAMEVAGAVDTKEAGEAAMKEAGEAAMKVAGSMKVAGEGAMKEAGEAAMKVAGEGAMKEAGVAVLRVEGVTVAVEGVEWVVADEGTSAVLAFPSKCMPHLYQGKRQVI

SEQ ID NO: 85177 - protein, 212 aa, Zea mays
  Coding DNA Sequence Number=SeqID_41802
MPGRADCCCPARMQHSVLCPCFRGEDRSEDLPVRFGATGARWCVKGNPRPLFDEPEPEAAVSAWTEAELARKEDFVGRSLTGPSAGGTDAGVELPRPWAGLMSSGDSRLRLRGDRPSRLLEPDSWKRPWRRWPGRGADVVLRSGDPPTVLPFEARSGFAEGGVDVEGAAAPPPSSREGPKNRFGRRVSERWDLFGQRNRLSERELLIVEGDE

SEQ ID NO: 85178 - protein, 371 aa, Zea mays
  Coding DNA Sequence Number=SeqID_41803
  Pfam annotation: Domain name=AT_hook; Domain location=247-259; Score =8.2; E_value=0.91; Accession=PF02178.10; Description=AT hook motif
  Pfam annotation: Domain name=AT_hook; Domain location=303-315; Score =5.7; E_value=2.5; Accession=PF02178.10; Description=AT hook motif
  Pfam module annotation: Pfam domain module=AT_hook::AT_hook; Domain location=247-259::303-315
MQAACNRTQGTHPFDFDTSSMEAQAHTSCNRRAGYYVQETAPPLAPVPRLLDCGTCTATRGDPAHDPTVPIEHIGHGPDRRHLWQAKQATLHLRHNDRVKKGVRKGDTPKGILLREGSGPRAPLLIRGSKAGPSEGFNNCLRALGLRAHYWSEVQRSAPRKGSTAASGHSGSAPTTDQGFEGWPPKGSTTASDAERGMTLGNYASPDPGLGLGLDPGRRRTPPRPTQGSDSGSAPEDDELRLARPRARTRARPRKTTNSASLDPGLGLGLGPGRRRTPPRPTQGSDSGSAPEDDELRLARLRARTRPRPRKTTNSASPDPGLGHDLDLGRPTRPRPRKTDSTPTSEEPPPRPTQGSDRPRHRGGHHYPIPS

SEQ ID NO: 85179 - protein, 208 aa, Zea mays
  Coding DNA Sequence Number=SeqID_41804
MQPPRCKNVNSLYCIEPKSRWSRSEDAQQKPDLREGSTFERQRSAGRHSKRAPAGRPFCVFDHPGLNEPRQGDRQQRTRLRWSRCPRPRQKGRGMSDPAGKATAATDPDGETRSSQRDGGSSRESRSNVDPAGKAATATDPTKARKGRATGRFQPGRGLRRTWQRVLTAPATGEARSGRRCVASAMARDYTGKDADTRFFARVSMPGK

SEQ ID NO: 85180 - protein, 658 aa, Zea mays
  Coding DNA Sequence Number=SeqID_41805
MTVAGGREQRSRRQPGSRPIQGQQESLLPRREDGTGKGGYPEKDPSLRRNRAPSPPTDQRFEGWPSEGFNSRLRSRGPDTHYCGNDLVIESHRREASSPRTPSPGDRVRQITRSSPETPCSVPIEGNMALSPLLLAERRRRGVCKKAESVPDRPLALCGGSGAALAKPGSGQTVDSVNIPARELGPRPCTRATASSHEGTTRPAEALRKALRPRRSETTPPRPRGLHAAGALARTHRNKMQPRKAGPLAKKCDESLQASANTPFEARGLLSGTIIRGTLKTPNSQLEHLTQRWPDTFILTRAPRQSRSDRRHSAAPLTGLTEGQRRLRHFDCSATQQSESDRQSGLAKGAIGSSAPPDPGLGLGLSPGRRRTPLRPTLGLGLGLRPGRRRTPLRPTPGLGLGLRPGRRRTPLRPTPGLGLGLRPGRRRTPLRPTPGLGLGLRPGRRRTPLRPTPGLGLRPGLCRTISASPDPGARGSASATEDRLDLGFGGAPTSPDLGHRPATSTGSAIIILPRADSGGRQQGLDRSNSCPSARLRCSSDSHDITPAGLLREGWPRGTRAGQALSQGRSLPSPAWTLVTPLLQAHPTWARDEHEGRGISTSLTPVSGHLASPPFALAHALDPSGLGHAAHSLVGSGTPRSRNADTMSCSINADNFGS

SEQ ID NO: 85181 - protein, 627 aa, Zea mays
  Coding DNA Sequence Number=SeqID_41806
MPSLGGQRVRSPDFALDLHGRDPAAFMREAEDGAARIVGRYVPRTEGVRSWDIRGSNEAAPATKKRKLGTAVGGVGVSDSFVVDLMGTCAALGGKDVFARGQGVFSVNAGVMERDRQDATKKRRADVRIADHMSEAKRARGSAKSAASGGSRLVPATKPAAPVHSKASASVKVAASDGSKAPLGGAVKGRRPPSPARRVADFGTDISVEDYLVGKLKLLLLFFDEVFNQYHGAGSGEGQLAVVPPTVATTSPTAVVGARGAARDPWANFCASGEILSAAAAKDVAGSMSQRLREASQQLSQQLKQVADFADLVASGALTVDVATEVERLWAQHADAVREKSAAESKNRRLSEKVAAMEAEKMDLLRQLAEERREVNKAIADVHVDKAETSTRAEVERTHVQVVDAYHELGARTADFEVPDQEVGLRFLEWLQEELLVLPTIVIGFMSFASLVTCEGAMNALSREGCRHYEVFDQANENFEREIFKVEDPMVKQSTGALFDRMWGPHGREAVRERSDREIEQMAHAEDVEDLVGLDDVLPEAAEGISMPPSDAALDVAAVEPSPRAESSEELPGASTGYRRQRAVAKQRVSGLARSGEGELRNLFEGEELRIMLFNYREMGIIPKVEP

SEQ ID NO: 85182 - protein, 206 aa, Zea mays
  Coding DNA Sequence Number=SeqID_41807
MGVDLLPRIDDSRTLAMVYNRATMKRGRWRRIVACMVDPCPPEVVAHERYNQASSQRDIPRPQPLRGTRSTATSLDPVQTTAILSRWTRREEVEVREGKRGYPYLSPEDSARDRGNDALDFRQWFRASLAGCCCRRNRDNMRGPTGSDSSARAMSRCQWAPDVRMTMCGERQRLGPRQRDSQGGPNGYSRPRSLTSGQNLHIQIPL

SEQ ID NO: 85183 - protein, 150 aa, Zea mays
  Coding DNA Sequence Number=SeqID_41808
MARIRCTARKSVIPFLPSRLAERPLRRTVTGQSSHLERLHRCLHEEQEHRRQEQEQQDSPPSPQQEVESGRQPSPPPQPEMPPISPYGIPAAGGDPDGDNDDASGSLSHHTELSEQQELEGWIARPITRDIARGCHFHDALDIFLRRAFY

SEQ ID NO: 85184 - protein, 129 aa, Zea mays
  Coding DNA Sequence Number=SeqID_41809
MQDVARRALSQYCSLFSGVADGLDLKYYPRRSTDSAGGMIVSPVGEGNPRMNNMVNLVAMLNTELDHALDELGKVWAEVVELHAERVARHYQDGGSPAPVGIQHPYRSPPHGRFDYSTPDCRTQIDLEP

SEQ ID NO: 85185 - protein, 187 aa, Zea mays
  Coding DNA Sequence Number=SeqID_41810
MGVDLLPRIDDSRTLATVYSGAATKCGHRRRIAAQTVDPCPPEVVAHERYNQASPQRGIPRPQLLRGTRSMAASLDPAQTAAILSRWTRREEVEVREGKRGYPYLSPEDSARDRGNDALDFRQWWRASRVGCCCRRNRDDMLAPTCSDSSARDERMPVGPRCLNDRVRGEAETWAAPEGFTRWAKWI

SEQ ID NO: 85186 - protein, 61 aa, Zea mays
  Coding DNA Sequence Number=SeqID_41811
MAIGVSEALYAKAVSPVLLTGNRWFPRGYGCWSDMAVYLATGLDNRVGPYLSRRGAGGVMG

SEQ ID NO: 85187 - protein, 167 aa, Zea mays
  Coding DNA Sequence Number=SeqID_41812
MASHESTKGGNAHSHTDGLAREGFPIFCGKYCREPVMLRLPSTRCSFSRSTGAEDTIKSTALHVLTTFCGFHPLELSTHPIGLFPAEKEDDPMWKDRVEHAKDVWALYPGQTAHLTVRCMSALYRLQALRGEAMYQLMGLVESTKITLDNREDLVVDLSTELVEKDL

SEQ ID NO: 85188 - protein, 172 aa, Zea mays
  Coding DNA Sequence Number=SeqID_41813
  Gene Ontology: Mol. function=protein dimerization activity; Biological process=DNA recombination
  Homolog annotation: Hit_ID=P08770; Match level="QueryCoverage=20%, HitCoverage=4%, E-value=5e-09, Identity=74%"; Hit description =Putative AC transposase
MAHGAMLVTCPRNDATKVQGNSSKMAPTPGDGEELDASLPVPGLPSERHLLPPPHPSLCSGSKRKTIAVGTGAAPMIAGSSSSSHSQSSPSVAASVDKDIVNPSNVVEVDDSNEVDVSGKRQKRCTSIVWQYFTKKEKIVEIDGKKYNQMWGHCPSQIARQCIELRAINESS

SEQ ID NO: 85189 - protein, 373 aa, Zea mays
  Coding DNA Sequence Number=SeqID_41814
  Gene Ontology: Mol. function=protein kinase activity; Cellular component=integral to membrane; Biological process=protein amino acid phosphorylation
  Homolog annotation: Hit_ID=A5B6X8; Match level="QueryCoverage=71%, HitCoverage=37%, E-value=3e-47, Identity=44%"; Hit description =Putative uncharacterized protein
  Pfam annotation: Domain name=Pkinase; Domain location=180-365; Score=- 110.5; E_value=0.055; Accession=PF00069.16; Description=Protein kinase domain
  Pfam annotation: Domain name=Pkinase_Tyr; Domain location=179-353; Score=-149.0; E_value=0.0027; Accession=PF07714.8; Description =Protein tyrosine kinase
  Pfam module annotation: Pfam domain module=Pkinase::Pkinase_Tyr; Domain location=180-365::179-353
VGAAAFAGNPELCGEVVRRECRGSHLLFFHGGGANGTAAPPVQSAAASDSGPQRENLSVPDSSVPNAKRARRRMTKLAVAVAAGSVLAALLVYAMIAMKRNNKRRRPSTASYESPNPKKSAPASEVSRDNADMGYVECVPDEETAAIMVPEEKARRLERSGCLTFCAGEAASYSLEQLMRASAEVLGRGSVGTTYKAVLDGRLVVIVKRLDAAKIGPAALEAEAFEQNMDAVGRLRHPNLVPLRAFFQAKEERLLVYDYQPNGSLYSLIHEKLRYPHRDGTEYPKPEYSTGFTRYEGGYGMISLPAVIDILEFKTFLTGTGYPTGKNTRAGTDMGTLDPAWLLYEIKNITARISGSKMLMPSQVVNPLNKTYM

SEQ ID NO: 85190 - protein, 173 aa, Zea mays
  Coding DNA Sequence Number=SeqID_41815
  Subcellular localization annotation: CTP_CleavageSite=39; ConfidenceScore=5.38e-01
MSSSSLMRRVFPSSKPPDGGPAAPLHRRSPKMVTFGLMVGESEPGCGPCPSLSLKNFHHQGWGGDCSVPGFQTRVASEPLVAPASATAAGRGSSAGVIARAGHGLTSNSTTFCPSLPYEFWHGRGPPGSSIRPEVSAAAVRPPGAEVVVVAAAGAGDGAPFVGLPLLRRPSPM

SEQ ID NO: 85191 - protein, 139 aa, Zea mays
  Coding DNA Sequence Number=SeqID_41816
  Subcellular localization annotation: CTP_CleavageSite=7; ConfidenceScore=5.61e-01
MGSRDKLAAASSPRRVLLVVFAFCFAFATFLTFLYTTSHFTTAPGSGSGSIAASTTTTTTTTSGSAGGGGGQGQAGPESVSKRLPVPVFHAMNHFASSRTRRTACQTRTSGPCRTCSTRGSTETAGVQTGLVNPRWGWC

SEQ ID NO: 85192 - protein, 216 aa, Zea mays
  Coding DNA Sequence Number=SeqID_41817
MGGMVFLAVMAVGALQKGGWAAVVRCKGRVGAVVVHMEAGARMRGGAWVSGGVDDPDIRILWVHKTGPLWYEKGDRPPGTSNCITFESQRIGDASSGDVEAPPKPRLSLSSMAEAEPEPLGRARWRLFGRRQGGVRALGSGEAEFVIFRVLSPSPSPDRHQRQWTVYRLLPRVEMTGKRRHASPVRPYLNPTRIFANDTLNCDPFVAVPTSTHQVE

SEQ ID NO: 85193 - protein, 101 aa, Zea mays
  Coding DNA Sequence Number=SeqID_41818
MQVVCNRTTEARPFDFDASSMEAQAHTSCNRRADYYVRETAPPLAPMPRLLDCGAGAATQGNPVHGPTVPTGHISDGSGPGKGVFQKGSFSAKEAGPKPSY

SEQ ID NO: 85194 - protein, 127 aa, Zea mays
  Coding DNA Sequence Number=SeqID_41819
  Homolog annotation: Hit_ID=Q6JAD6; Match level="QueryCoverage=85%, HitCoverage=14%, E-value=3e-13, Identity=45%"; Hit description =Putative uncharacterized protein
  Subcellular localization annotation: CTP_CleavageSite=68; ConfidenceScore=5.77e-01
PPLVQSAPPPALQAAVVSAIQAGPPLPPFGPSLLRPVTLDFSSPVVGTVSAQSPVPPVPVVTIAAVAVSMTASAPVDPALQTLSESVPAPASTADPGSESDGDPQLAFTLLPGSRPNAPPPPPSSGL

SEQ ID NO: 85195 - protein, 15 aa, Zea mays
  Coding DNA Sequence Number=SeqID_41820
MAHRTVQCAHVQEVL

SEQ ID NO: 85196 - protein, 96 aa, Zea mays
  Coding DNA Sequence Number=SeqID_41821
MEKEPLDMVESSVRVIETHVDIIRSLVTDGVVDTSETGISNGIGGMPESADPKKRLSPVVYHLPLFVGFTDGWKHLVIANDLRVEDVCELVKGPVD

SEQ ID NO: 85197 - protein, 467 aa, Zea mays
  Coding DNA Sequence Number=SeqID_41822
  Gene Ontology: Mol. function=oxidoreductase activity, acting on single donors with incorporation of molecular oxygen, incorporation of two atoms of oxygen; Cellular component=chloroplast; Biological process=abscisic ...
  Gene Ontology: Biological process=acid biosynthetic process
  Homolog annotation: Hit_ID=A2YIA1; Match level="QueryCoverage=97%, HitCoverage=88%, E-value=1e-163, Identity=64%"; Hit description =Putative uncharacterized protein
  Pfam annotation: Domain name=RPE65; Domain location=29-460; Score =653.2; E_value=2.1e-193; Accession=PF03055.6; Description=Retinal pigment epithelial membrane protein
GERGGGEKGLGFLQRAAAAALDAFESGVIAGLLERPRALPRSADPAVQIAGNFAPVGEQAPVRSLPVSGRIPPFISGVYARNGANPCFEPSAGHHLFDGDGMVHAVRIRNGAAESYACRFTETARLRQERALGRAVFPKAIGELHGHSGIARLALFYARGLCGLVDPSRGTGVANAGLVYFNGRLLAMSEDDLPYQVRVTADGDLRTVGRYDFGGQLAGCGSMIAHPKLDPASGELFALSYDVIKRPYLRYFYLRPDGGKSGDVEIPLEQPTMVHDFAITERDAGTGEVVVVGSCMTPADSIFNDADDGRQLQSVLTEIRLDTRTGASTRRAVLPASAQVNLEVGMVNRNMLGRRTRYAYLAVAEPWPKVSGFAKVDLGTGDVVRFDYGDGRFGGEPCFVPAEGAAPRGEDDGYILSLVRDERKGTSELLVVNAVDMRLEATVQLPSRVPYGFHGTFISERELEAQA

SEQ ID NO: 85198 - protein, 222 aa, Zea mays
  Coding DNA Sequence Number=SeqID_41823
DHLFTTPSRCSQTRHKNKINHHLLYKHLHQLKMREWLKKKRMKAKTMSNLKRRTLIKGEMKMIKIRKIIKRFRIKYHNTQESTKQLKEITPSIPYLPYRIENALRDPDWVVAMQEELNNFTRNEGNDVPPAVWWVQVQGRARRRLLLRLRPGSGEDVIPPEVEVEAGPWGRARRRPPSEVKVEAEPWGRARRSPSSEVEVEAEPWGWVRRSPSSKAEARAEP

SEQ ID NO: 85199 - protein, 176 aa, Zea mays
  Coding DNA Sequence Number=SeqID_41824
MGMIRKINLMGVSLQEKAKKERMLCMRGEGPLQGQLSPVAEPKKGSSKGKALTSVKTWDDSSSKDEPTRTRIHCSSSRSSRSSHKCLMVRGLLEKFETFTNLNCELSTKIEQLESSASSTAIDDGLIKRNEKLKAKLATSQEAIENLLGKMEILSIHNNELTTKLQNIGSTRGIFS

SEQ ID NO: 85200 - protein, 60 aa, Zea mays
  Coding DNA Sequence Number=SeqID_41825
  Subcellular localization annotation: CTP_CleavageSite=38; ConfidenceScore=5.07e-01
MTPEEILGKFVSGRMMVKEARHKKSTGRRKGRTTGKLRARRTWENSVTLTVLLPTPMMRD

SEQ ID NO: 85201 - protein, 143 aa, Zea mays
  Coding DNA Sequence Number=SeqID_41826
MAPLRREHGGGGRERVAVVSGSGGGRVHRLVQQRTRCSRELARAPWIKITGLSGGAPDCPMSHQRPRQRSAVRSASDTWAKPMITRPHRTIRCTPDSVRCAKGTKGSTVGCTRRGKKSGVVHVRWGIGLSGAPTGRRQELPTK

SEQ ID NO: 85202 - protein, 157 aa, Zea mays
  Coding DNA Sequence Number=SeqID_41827
MANKSRSDDPPMMVHTIQTTRINTNFIPLPRQVPVYPVVVEEIHVDLPRIRVENGVILEDSLEEFLPTPTPLAESLAFVAGSSASAPPAPAVQALALGGDDPDDSGDDDEDDEEEEEDGENLNDEANEEQQDHYVGLWPVTEHYTSMFETWNFPTLL

SEQ ID NO: 85203 - protein, 64 aa, Zea mays
  Coding DNA Sequence Number=SeqID_41828
MALTVTFSFSLSRRYNSQLAESEGVAGEDPEQQSVGEGKCPLTHLCPTHSYNSSPAFTHSIPKD

SEQ ID NO: 85204 - protein, 28 aa, Zea mays
  Coding DNA Sequence Number=SeqID_41829
MATSKNSTMKMKNTREDPLADPRVVVSS

SEQ ID NO: 85205 - protein, 26 aa, Zea mays
  Coding DNA Sequence Number=SeqID_41830
MGTIDEELDDDEDYQVPEADIEDTSS

SEQ ID NO: 85206 - protein, 109 aa, Zea mays
  Coding DNA Sequence Number=SeqID_41831
MSGEGDLRLPVKFCRVRGLGKLHGPMAELTETLARLGGDWSGLATVAEALAAMAGRKSSPELRRGVWLAVRFGARKSGLSPCSNPRQIQGFVVSRARVPMPSSGMQQRG

SEQ ID NO: 85207 - protein, 193 aa, Zea mays
  Coding DNA Sequence Number=SeqID_41832
MSGLAPPLRCRCAAQRFLLSIPGRASGARRQPHSHQLSWFMEMDYSRGSMDNMGNEMLGKRGEVALHHHQALGAVEHQGVRPLHRGSTHVWTRLEEIGEHVSTKTIVQLKTILPTCRVNMFASVDGAKEHVYGASNNAARSTTNRKAAKRLFTKELGSGDIADEDRHQKEVEVRLLEEETTKRVEQAIRKKVE

SEQ ID NO: 85208 - protein, 118 aa, Zea mays
  Coding DNA Sequence Number=SeqID_41833
  Gene Ontology: Mol. function=lipoic acid binding; Cellular component =glycine cleavage complex; Biological process=glycine catabolic process
  Homolog annotation: Hit_ID=Q6H713; Match level="QueryCoverage=97%, HitCoverage=72%, E-value=5e-46, Identity=79%"; Hit description =Putative glycine decarboxylase complex H-protein
  Pfam annotation: Domain name=GCV_H; Domain location=1-117; Score =213.7; E_value=4.4e-61; Accession=PF01597.10; Description=Glycine cleavage H-protein
DSHEWVKVESDSATVGITDYAQRALGELVYVELPEVGISVSQGKTFAALESVKAASDTYSPVSREVVEVNEKLSDLPGLVNTSPYEKGWLIKVKLSNSGELNSLMDDDKYSKFCEGNH

SEQ ID NO: 85209 - protein, 158 aa, Zea mays
  Coding DNA Sequence Number=SeqID_41834
MKQPWPDRLTNRPYRRRIQCEDRLTPYPDTRASVGKEAPPRLTLGLDLRRRSPPRPTLGLGPRLGLRRWSPPRPTPGLGLNLGLGRRTPPRPTPGLGLNLGLGRWSPPHPTQGSASTSTSGRITSSLDPGLGLRRSLRLARSWARTDRTTEDASLPYP

SEQ ID NO: 85210 - protein, 242 aa, Zea mays
  Coding DNA Sequence Number=SeqID_41835
  Gene Ontology: Mol. function=protein serine/threonine kinase activity; Cellular component=cytoplasm; Biological process=protein amino acid phosphorylation
  Homolog annotation: Hit_ID=Q6ASU0; Match level="QueryCoverage=100%, HitCoverage=56%, E-value=1e-69, Identity=58%"; Hit description =Kinase domain containing protein
  Pfam annotation: Domain name=Pkinase; Domain location=8-204; Score= -38.3; E_value=2.5e-06; Accession=PF00069.16; Description=Protein kinase domain
MPGRRFPLASKRKGGAENVLIRGDGHIMLTDFDLSLESTASPALEDARSVVGDKDDDVPEPAPTCLPIPELQLLRLRRWKRRAAPRPRFVAEPVDARSSSFVGTHEYVAPEVARGGGHGAAVDWWAYGVFLYELIYGRTPFVGESNEATLRNIVRRPLEFPAAATAHGDSAAARDLIARLLDKDPRTRLGSKRGAADVKAHGFFKGLNFALLRSTPPPVVPPPAAPHRCDKAADVQQLFDHF

SEQ ID NO: 85211 - protein, 289 aa, Zea mays
  Coding DNA Sequence Number=SeqID_41836
MMPPRGGRCLPVREDLNGDLPVQAGAAAIRWRSAGTQVAAVVDVEVVVARGGFSADETVGATRRQTSGSLALIACPRPSSGDVGEGLVIVASTLRSSLMLFSRPERRSLSLLVQWSAASHLEFVVPQALWCGGSSYPREWNQSSICNGTLNAEVPRLGQPCDEPGPEAVVSAWTEAESARKEASSAQEQVVSQAEEVQQRWLELGQVIREWDQPRSHAAEAVSRADVLGGQLAELRSGQLRITYPSESYFSRKVMSEDPAIEAVKKRERRSGRKTFSEENFDAEGVPPF

SEQ ID NO: 85212 - protein, 127 aa, Zea mays
  Coding DNA Sequence Number=SeqID_41837
  Homolog annotation: Hit_ID=Q6J9W0; Match level="QueryCoverage=42%, HitCoverage=13%, E-value=9e-14, Identity=72%"; Hit description =Putative RNA-binding protein
  Subcellular localization annotation: CTP_CleavageSite=61; ConfidenceScore=5.14e-01
MDSNMCFHFLSLLLQPPFLPISYQLYITTIFSSSNPFWEAWKGKGAPSPRRAPRPLPTLVVVTEGAVTSQQMSMVIPLEQSITPVLQDFMNLNIFYLPVYYCGGEEYSSKYDLLFSAILLRSPHTPP

SEQ ID NO: 85213 - protein, 68 aa, Zea mays
  Coding DNA Sequence Number=SeqID_41838
MAAWRVSNLLFCFTVSSAASSFSRDALGYLGTGSGLLWHNSTGWDGAAATWAQRREKTTSLPSIRAGR

SEQ ID NO: 85214 - protein, 89 aa, Zea mays
  Coding DNA Sequence Number=SeqID_41839
MQSLQRKINADSAEVKGEEAPKGGLQRKINTDSAEVKGEEAPKGGLQRKINADSAEVKGEEAPKGGLQRKINADSAEVKGEEAPKGGLQ

SEQ ID NO: 85215 - protein, 126 aa, Zea mays
  Coding DNA Sequence Number=SeqID_41840
MASSTEENMKALLKVLVDCAKDATKSLGGLVDHALDHMHDEEIVARTLYAIKDKLELLQQDALEAKVQAFPEIVKYDGNDISVEPTSSSTPPTVTEPSVDEEEFYCPDVSDEWYFSDSDRSTRNSY

SEQ ID NO: 85216 - protein, 134 aa, Zea mays
  Coding DNA Sequence Number=SeqID_41841
MMKAFPSCRLPYLNVLVYRIRRGPSPGMPVASTLCVNFWARSAGSGGYGDLGGTATVKKSLSSEDAADWTVPHARDEGEDAGAAEGLTIEPTYRQKGQAWTRGAQGARVVGPAQAEHCGTGPTCQRVREVRPAA

SEQ ID NO: 85217 - protein, 214 aa, Zea mays
  Coding DNA Sequence Number=SeqID_41842
MEPSMACGRLLAGHHLLLGVISRHHFERLGSNETQQARRLLDDLDIACQRMGRDALNAKRARRPSPPEREVEGKARTRVSIGPLHTPGSFPFRDPAGVWPYPEAPDLYVYRGPVSFCGNPDLLRCGVFPCHVAPFGLPTRWGQAPSSAWLGDIARVQRLHAVGEEFEPPVIGSTSFVDKDATTWLLCEAIIVVVEVSSSEVGAHVGHLFSNAID

SEQ ID NO: 85218 - protein, 203 aa, Zea mays
  Coding DNA Sequence Number=SeqID_41843
MNSAPVLFTLTWHLLSRHACSPAFLRAEAFENKSPTGPYPLYGLVTCFFLQHSEKGVHQSCGGDLGYMGSADCRLSAAVCLALWGWMALVLPPTLPPAVWSGRGCRTAARATVAPCAGLPHPWLPLPAERTGGPYKRSYAAAVAATFLDGLVLTPVGRTGARTPLCVLRQPPPTGAEVSPPLVRLPLTEVVASTGEGIRAFCR

SEQ ID NO: 85219 - protein, 97 aa, Zea mays
  Coding DNA Sequence Number=SeqID_41844
MAIVGGDCGTVVMHQQVYGRLPKLAGASMGEENHQCPTNLSSSLIHRRKSAVRHGREALCLHLGSEDTCHLKSKLVPGISSARQVVPLITSFYPLMF

SEQ ID NO: 85220 - protein, 91 aa, Zea mays
  Coding DNA Sequence Number=SeqID_41845
MAIVGGDCGTVVMHQQVYGRLPKLTGASMGEENHQCPTNLSSSLIHRRKSAVHHGREALCLHLRSKKKVNLNQEEDESNPTSKGIKIHSSG

SEQ ID NO: 85221 - protein, 230 aa, Zea mays
  Coding DNA Sequence Number=SeqID_41846
  Gene Ontology: Mol. function=aspartic-type endopeptidase activity; Biological process=proteolysis
  Homolog annotation: Hit_ID=A3BKN4; Match level="QueryCoverage=90%, HitCoverage=78%, E-value=2e-22, Identity=34%"; Hit description =Putative uncharacterized protein
  Pfam annotation: Domain name=F-box; Domain location=9-56; Score=40.1; E_value=7.8e-09; Accession=PF00646.24; Description=F-box domain
MDGLERSSLSVDQLPDDALVQILSRLGAKSLCRSKCVSKPWRDLIADRLYCKDLPQSLQGFLYFDVGRRGDGHDAAAANAYGGDLAGSRDGMLLRHGHGRFIDLLGKPMPLLDPSFAFLKEQPGVNAIELLDSCNGLLLFGHRRVSDTYDSLGYIVCNPVTEQWVAIPSSGWTPTPAEEIVDEHVKDPRPFIIFDPSLSSNFDIVQFWQDGTVDDVEGVHVKIGYFLYIV

SEQ ID NO: 85222 - protein, 272 aa, Zea mays
  Coding DNA Sequence Number=SeqID_41847
  Homolog annotation: Hit_ID=A6N1B2; Match level="QueryCoverage=84%, HitCoverage=100%, E-value=3e-53, Identity=51%"; Hit description =Phosphoinositide 5-phosphatase
MGESRRNLEMTSSSPQWCRSAGAWEGTGWRLQLVFSAKRGHLKLFIQSQEFFRTLQRHYSNTCIDANKQAAINLFLGYFQPQQEKPALWELESSAGKHNNNLFDGHPSTLKRVKSDGTILHESNASISGSGRCHNEQLSASQPDVQNGFQFPTSESDSLHENDISSACGSGVAHLRYTPTASDVLHVPRAKVEYCHDSGDSNFLDLEWLSTSGNSSDERSIATSTPDANLSNENVISGITPDIMENHLAEMQYQKLPRNFVQWVNHGDTFWY

SEQ ID NO: 85223 - protein, 88 aa, Zea mays
  Coding DNA Sequence Number=SeqID_41848
MAARQQHRHSFEKVYDANSALAALLLADRVWPVFLFPKISSDPSSHRCSCSHGRHRHRRGREGKEGSDQAQGWRAQQEVGVELLSVKI

SEQ ID NO: 85224 - protein, 376 aa, Zea mays
  Coding DNA Sequence Number=SeqID_41849
  Gene Ontology: Mol. function=transcription factor activity; Cellular component=nucleus; Biological process=regulation of transcription, DNA-dependent
  Homolog annotation: Hit_ID=Q6K7E6; Match level="QueryCoverage=100%, HitCoverage=100%, E-value=5e-99, Identity=55%"; Hit description =Ethylene-responsive transcription factor 1
  Pfam annotation: Domain name=AP2; Domain location=122-173; Score =79.2; E_value=1.3e-20; Accession=PF00847.11; Description=AP2 domain
MCGGAILANLREPAPRRLTERDIWQQKKKLKRGGGGGRRSFAAEDDEDFEADFEVFEADSSDSDLELREGTDDDVVEIKPFTAKRTFSSESISLRFAFFLFADGLSTMTSAVARSAKRKRKNLYRGIRQRPWGKWAAEIRDPQKGVRVWLGTFNSPEEAARAYDAEARRIRGKKAKVNFPDAPAVGQKHRSGSASAKASKSSFGQKPIVKVAMNNLANTNASFFQSASYPSNLFVQHGNMPFVPAMNSTASVDDLIMNLHSDQGSNSFGCSDLGWENDTKTPDITSIAPISTIAEGDESAFVDSNSNSSFVLPALENSAVDLTDGLTDLESYMRFLLDGGPSDSVDSLLNLDGSQDVGSDMDLWSFDDMPIVGDFF

SEQ ID NO: 85225 - protein, 551 aa, Zea mays
  Coding DNA Sequence Number=SeqID_41850
  Gene Ontology: Mol. function=mannosyl-oligosaccharide 1,2-alpha -mannosidase activity; Cellular component=membrane; Biological process=transport
  Homolog annotation: Hit_ID=A2YA94; Match level="QueryCoverage=94%, HitCoverage=70%, E-value=0.0, Identity=61%"; Hit description =Putative uncharacterized protein
  Pfam annotation: Domain name=Syja_N; Domain location=84-369; Score =333.9; E_value=2.8e-97; Accession=PF02383.9; Description=SacI homology domain
MEQDPERACLRSFELHESESSLYVLGTNSDRTLWRLLKIDRSEPSELVIDECSTVYTESEHPDLLKGLDDEHRSTGGVKFVTKFYGIIGFIKFLGPYYMLIITEQKKIGEIFGHPVYQVTRTSMVELANSKTRSTFQNFKDENRYRKILNALDLRKDFFFSYSYHIMRSLQKNLADPQDGWTLYETIFVWNEYLTRRIRNCLRNTLWTVALVHGFFKQDKFSISGKDIMFTLIARRSRHYAGTRYLKRGVNEKGRVANDVETEQIVYEAVPGPTEETSKLNLKPDIILHEMQNNYEATELHFENLRARYGNPIIILNLIKTRERRESILRREFDKAIKIINKSLSEENHLRFLHWDLHQNSQGKPTNVLDVLLKVAFRALNLTEFFYCQVAPNSETSAQCPTLLNGLDQYLCDDNNSDDTECTEIVGDVSQEDISGSSDSSGNATTEDKFENSGLPPPKPPKFQKGVLRTNCIDCLDRTNVAQYAHGLAALGHQLHALGFIESPELGLEAPLAHHLMHFYEMMGDTLAVQYSGSAAHNKTDFQDAVNKLFL

SEQ ID NO: 85226 - protein, 177 aa, Zea mays
  Coding DNA Sequence Number=SeqID_41851
MAGVDGGFPRIAGGDHRADGRYAMREDVEGGFRGMSKEARGCTGNEQNCGARVDVWAALKCVTPYFLLWLCIDFWSMRITKELWEGSVAVDEDGCLSCYWFMSFFGAGGAGFTWPMRSIGSDVDVHLPEQLFRSGGCLLEDSPYEDRVVGPTLEFLGHGCLYDVGDAVPHGLEMPQE

SEQ ID NO: 85227 - protein, 78 aa, Zea mays
  Coding DNA Sequence Number=SeqID_41852
MSSSRGFGGLRKKLAGRFKSKRPRGNDDDYTPTTDSEAQSSAGGTESMDAEDFPHVHPDYAIDTSGWTYSKRRFYMSE

SEQ ID NO: 85228 - protein, 207 aa, Zea mays
  Coding DNA Sequence Number=SeqID_41853
  Gene Ontology: Mol. function=aspartate kinase activity; Cellular component=chloroplast; Biological process=amino acid biosynthetic process
  Homolog annotation: Hit_ID=Q5JK18; Match level="QueryCoverage=92%, HitCoverage=40%, E-value=2e-93, Identity=77%"; Hit description =Aspartokinase
  Pfam annotation: Domain name=AA_kinase; Domain location=1-162; Score=- 38.5; E_value=0.0057; Accession=PF00696.19; Description=Amino acid kinase family
MADCFYLYDTFDIGFITTDEFGNADILEATYPAVAKRLHGDWIQDPAIPVVTGFLGKGWKSGAVTTLGRGGSDLTATTIGKALGLREIQVWKDVDGVLTCDPNIYPHAKTVPYLTFEEATELAYFGAQIVLTSIVLKSNVTMLDIVSTRMLGQYGFLARVFAIFEDLCISVDCVATSEVSVSVSLDPSKIWSRELIQQASVSIPSLY

SEQ ID NO: 85229 - protein, 184 aa, Zea mays
  Coding DNA Sequence Number=SeqID_41854
  Homolog annotation: Hit_ID=A2Y3P0; Match level="QueryCoverage=28%, HitCoverage=14%, E-value=8e-13, Identity=73%"; Hit description =Putative uncharacterized protein
GLAAASGRGRVGAAQLCCGGRRQDACGEGRSSAARSPGRRRVPDGGVARSAQGADVGAAQVLGADGRGAWLGGVPGGSAAVGSERRRVARLAPSAGALRSGKNPAVYKFLGETIHVDVLHGPCAAVYGKLRRSRRLDVVQSGCTALSIVKHGDLMVVANVDDSRVVLGIATYDDAITPSSSSST

SEQ ID NO: 85230 - protein, 422 aa, Zea mays
  Coding DNA Sequence Number=SeqID_41855
MGTEHGVSGELQAGPTRSEAAVEPLGGPAFEPLISRGGSEPGSFTGKDPFRGIPLSRYYGEGEASPASPARSAACPAAELMRRGEWLAGRPLRVREPFEERITGALSSRRERGFSCRPRMGREPGRRRDRCSRPPATVITAGPLSAALTVVPGWRCWVHPARWLRDAWAWASMLACWESGKRVHLARLHAARMAARPFRPLVWAEVGGLFPAAPLHRRSPKMVTSSLMVGESEPGCGLSPSLSLKDFHHQGRGGDCSVPGFRTRVASEPLAAPASATAAGTGSSAGAIAKEGHGPTSNSTAFCPSLPYEFWHGRGPPGSSIRPEVSAAAVRPPGAEVVVVVAAGAGDSAPFVGLPLLRRPSPMEWGLGNRPSRLLGPDSRRSLWTASPSEAGSDLAEGVVDAEGATAPFQLEDPSLQDQIVL

SEQ ID NO: 85231 - protein, 298 aa, Zea mays
  Coding DNA Sequence Number=SeqID_41856
MASGRTTLQQCPRPRLRSRGEDKYKEPEAQSADGGGDPVGDEDFSSRRRLSTNDRSRLPPADPHSDPPGRAEHRPPRRGPPPTTRGLGPTRHASWPRAEEAKPPCAVRATAQRLQAFLHFRPDQRVKGRTAMQAACDRAKWAHPFDSNAPSMEAQAHTSCNRRAGCYVRATAPPLAPLPRLEATLHMTQQCQPGASVTGQSAAGEGAAVNTTKNGPTVMAVAGGRKQRSRRQPSSRPIQGQQRNPLSRREDGAPVFRSSNGSHARNGCPVNHSSRRINSAAGQAAPLAGEAGNASPSP

SEQ ID NO: 85232 - protein, 213 aa, Zea mays
  Coding DNA Sequence Number=SeqID_41857
  Gene Ontology: Mol. function=nucleic acid binding; Cellular component= nucleus
  Homolog annotation: Hit_ID=Q5JLB5; Match level="QueryCoverage=33%, HitCoverage=14%, E-value=2e-11, Identity=51%"; Hit description=Zinc finger CCCH domain-containing protein ZFN-like 2
  Pfam annotation: Domain name=zf-CCCH; Domain location=113-139; Score =47.0; E_value=6.4e-11; Accession=PF00642.15; Description=Zinc finger C-x8-C-x5-C-x3-H type (and similar)
  Subcellular localization annotation: CTP_CleavageSite=16; ConfidenceScore=5.18e-01
MDDAGRPPPHAPVAVTASASASATAAPAPPQPSATAAVDRSSPDPDALYEEGMWQQMAMDSGATMQPGSYPERPVLAINAQLIKDTKMHIQGIVVDTWTLIRAMSKVTNLLGQGEELCKFYSRYGICKFGANCKFDHPTVVAPMIFGNNSRNRINFGYRDASFQVPALFDIIAAPMVPNRGTVEFSGGAEACTCAVEIISSRRFILEPVFSWC

SEQ ID NO: 85233 - protein, 63 aa, Zea mays
  Coding DNA Sequence Number=SeqID_41858
  Homolog annotation: Hit_ID=A6MZE4; Match level="QueryCoverage=50%, HitCoverage=35%, E-value=8e-08, Identity=81%"; Hit description =Senescence associated protein
  Pfam annotation: Domain name=B12D; Domain location=6-48; Score=-2.8; E_value=0.0017; Accession=PF06522.2; Description=B12D protein
MAIPIPQVYPLFVTMGVAMGICGLQLFRNITGNLEVRSGSTLFTPFAYSILARDVLLQLEQGT

SEQ ID NO: 85234 - protein, 420 aa, Zea mays
  Coding DNA Sequence Number=SeqID_41859
MHLRLNPVLHTLRLVLDIMAPVQLGVWLEDEEDDDVSTARKDAPPQHSTTQVKETVASRGVTRPINCVSAHQLMRWSEDANKVVRDALGATERRRGRPSRPGEVPKLASGLDLHAGRRSSEASSAAVGTLGLSWQQEDELPVIGRHGHAVGPRSAQEGAAPTDSLPRLAPGCGRTRGGVCLRAPASASASSPTPTTCSLGLVPGQAGTPDPRLMLPSQPKIFCSSPVAVERSGSRHSHPYRRAAGTPTPVSVCTGARRDASSLARAAVERHQARAPVQASRPWLPSVRDLASLPRFNSSGFARSCASSNPTAGPDGRRLWRAQVSRHFSRDLGALAGILTGRIPDRQEAQGAGRTVGVRDHDELAGPSSDPERALADDDDHEQRQRHHRPQHWASFVEPIIAALLLDSLQIGPYCFCCWA

SEQ ID NO: 85235 - protein, 72 aa, Zea mays
  Coding DNA Sequence Number=SeqID_41860
MALAPGESGRYRLALARAGAPARARGGREGGEREVRHWRGESAGESDVARSDWSTCRDLIGPRVLAVATSRF

SEQ ID NO: 85236 - protein, 29 aa, Zea mays
  Coding DNA Sequence Number=SeqID_41861
MEEAMLNLNEESSSRPKRRRRYINRDRIA

SEQ ID NO: 85237 - protein, 352 aa, Zea mays
  Coding DNA Sequence Number=SeqID_41862
  Subcellular localization annotation: CTP_CleavageSite=37; ConfidenceScore=5.34e-01
MAARRAGRAVLSSLARSLGLRKPKRSSGRRFAFTEITAPKKAPSLLTDQRFKGWPTEGFNSRLRSRGPYTHYWSEVRRPAPRRVPRPPQATRAPRPLLIRGSKAGPRRVHSRLRRRARDDQVYVRYITKARAALPSSPETPCSTPIEGNMALSPLLLAERRHRGRLGGCSRKPGSGQTVDSVNIPARELGPRPYTQATASSHEGTTRPAEALRKALRPRRSETTPPRPRGLHPAGALARTHRNKMQPRKAGSLAKKCDESLQASANTPFEARGLLSGTIIRGTLKTPNSQLGSDSGSALEDGELRSARPRARTRAKTQKTANSAPPDPGLGLGLRPGRRRTPLRPTQGSDSG

SEQ ID NO: 85238 - protein, 81 aa, Zea mays
  Coding DNA Sequence Number=SeqID_41863
MDQKTVLFHTWGLDFPLLSAAIPVIPSGSEIPPTGNIGGADPPPINDGNQSPRHQQGDRQEGGGGSSLQDAAAMMARNNND

SEQ ID NO: 85239 - protein, 268 aa, Zea mays
  Coding DNA Sequence Number=SeqID_41864
  Homolog annotation: Hit_ID=Q2QTA7; Match level="QueryCoverage=43%, HitCoverage=8%, E-value=9e-08, Identity=37%"; Hit description =Retrotransposon protein, putative, Ty3-gypsy subclass
  Subcellular localization annotation: CTP_CleavageSite=86; ConfidenceScore=5.53e-01
MVQIGSTSFRRYYGGTGPHPAVLLGRPRSSWSTGPKPVFPQKSLWAPHGSSLSMSLCRNSYGVRTWTSSTNADGKRRSKMHGTAKRSDATTSGFVHSRELKVEDLVLRRVLNREGLQKLSPSWEGPFKVTEICRPGYNYSSSAGSHWKRSATSSTVSCMPSRATSLVSATGPAITGSKDMVGSWLRKHVKTYSITARQSLPPSASRRAPRIWSRRQRRSAAESSIGSVSEINVGSSVTGIGIIPSSTSVVLASPAHAAMRSTRARCSA

SEQ ID NO: 85240 - protein, 517 aa, Zea mays
  Coding DNA Sequence Number=SeqID_41865
MKEASRRVPPIGLCRVQYATWQHRGSAWAGSRSIHGSSTFPWGSRLTVDTLEYITFSGHVTAPEPPTWWGQALLLAQSSHPRLGRVMVWSHDTPALYDDLGLPTAVLATLPTLDDSGMAVRQIGGRDPLHGIQIPSAAAGGPQPSGAAPSAPVVAPSPLDKGKGAASSASALGGTGGSEEERRRRLRRADGSLVSDPPRSVRGLLVGTRRPAPRSRARRGASVVRSRRRHHHRRARRRHHHHRSRHHHHYLGILTHRLFARASSSTAPKATPPPLGTRPTDGSSSQQQESARSGAGDPPPATAQTAPAASHAPAGGPVAAAPASCGVAATEEVPAGGSAPTSDITPTPDVGGETGGTSSSNPPPAPEEMEVEWEALEAEHQRLSDWRTQLEERTRTASRQFISERSQLERDHKEELEAHRSKKKVARREEAMSQREALAIEFRAKLSALDQTLEEQWVQQTKVVERLQKMQHELKGKASNAALAEEKLKAKEQSLDRRETDLARREMDLTFQEEMLT

SEQ ID NO: 85241 - protein, 165 aa, Zea mays
  Coding DNA Sequence Number=SeqID_41866
  Subcellular localization annotation: CTP_CleavageSite=70; ConfidenceScore=5.04e-01
MPRLSGCSIWCAAYLDGMRQRSAEGFASTPSSPVCGLVGAALFHRCLASRMFISLAAVGKVVAAVGAEVVASAGEPLGASYPRGPTDQQVGLMREDLTGLADAPVVRKRYSFSHSKIVTLGSAYSRYLEGSFPAGGEFHFCMDLSGAWTRGESRRVSGGRQASAP

SEQ ID NO: 85242 - protein, 127 aa, Zea mays
  Coding DNA Sequence Number=SeqID_41867
MAATRGMNPSLKEDSLAPASKRREKPPPMHAERSRTATRANTASPRGPSQKTEKINFQNQCSDSRHHAHGPTKPLSAEVTSQSAAGTGVAVSMIKGGPAVIASTGAQKQRANRQSNFWPHLQARIVP

SEQ ID NO: 85243 - protein, 127 aa, Zea mays
  Coding DNA Sequence Number=SeqID_41868
MAGGRGDEWKGAAEPSKKRRGRGREREGEGREAGAHRGRGRWWATVPGVGARWSREEREGFGEGDDGWGPRGKMQRRFFQPRASGAGDVGGPAGGGWAASRLSRKVGWAGAGAHGGKGRGGQGRLAS

SEQ ID NO: 85244 - protein, 170 aa, Zea mays
  Coding DNA Sequence Number=SeqID_41869
MRSSLLRSGRWEKVPWHHGVRAIRPPISPKSFWDPARFTSDSADSVLVAASALFGFSGGEGADALVLPNSVAVVNLGVRRGVTYGAHVSYTARECGTSWAAGIGQGVKWAEMRCGGQSWWSTAEVKVMRACADGPGAVKDDFWVLADDPVQRGDYPWWLTPETHTRTRTW

SEQ ID NO: 85245 - protein, 576 aa, Zea mays
  Coding DNA Sequence Number=SeqID_41870
MGGLGVSDGFARELMRTCAAPGGRMSSPELRESSARMLRVTGGCWPRNVPILRAAGEDFFTSRMVREWRVFPYGRNIAVVVSAVMDKDRQGAAQKRQAAVRLVEARPKRQRGAAKAAAPGGGKLPLAANGVAEVAKAARALPLSGKRVADFATNINVDDYLGGSDEGQLAIVAPAAATTTAAVVPKAKGRALSAGGEVSALAAVRDEAGAVSRRLKQVKEALSQAADFVDRTASGALTAVVSAEVERLRTQHADAVREKSAADSKCRKLADKVAALEREKADLRRQLAGERRETNEALAKEQAAQAEAKLTRAEGNIARECAKQLQERLTALESRVERAEAVSRAEAERTRKQLMDTYRELGARTGDFEVPDREPGLRCLEWVQEELQALPTVVEGFMSYASLVTCEGAMNALSREGCRHFEVFDQADEDFERDIYKVEDPIVKESAGAIYDRMWGPHSREVVRERAETARAQAARGERVDDFGALNSALPDPEPTPAEAVSGAALEPPPETAEGAPDAPASAAAGGDLPPETAEGTPDAPAAAAPSAEDPATVAAEATAEATAEAPATTGSSQVA

SEQ ID NO: 85246 - protein, 258 aa, Zea mays
  Coding DNA Sequence Number=SeqID_41871
MGLGVCGSLCQGGYEIDGSGYDYGAVSPATSPRRWSPKTVTTSPWVGRSKPGCGLGPTLSFKDVHHPRWGGGRAEPKLYLPRGFVGQPLLQRPRERALTGPARGVDFDNAGLVGGGRRQLQRVGLAGLAPDAPSCRKGGCRAVRTGGPPKTSRATRAAFVFGAVLPLHRYGAPARRSVLRSSGRIRVGICRRADGPCRRCRGGGGSRSPRRRRDHRHHPRFRPPALCTCPRPSSVGEGEGKVAAAFALRPSLLQFGHP

SEQ ID NO: 85247 - protein, 251 aa, Zea mays
  Coding DNA Sequence Number=SeqID_41872
MPDRASTTNRGYGPSTARRSCRVGSGTIKWVVPRAGSLDTAHLAIYTSIIMVFASIATSSFAILLLFYLPSCLHLRAIPFSAEGVGASASSPYSSNTSPDTDSRRGYCTSTRTFHIMRAPSSLSSSDVLFIFPAFALFILPNLLPPSTVAAVSRPTLVDAASAAVGLRVSARSGSSADELWQTVYLAALDRHEEAAWLALGVLHLHGPANGISKLGITKARVLILYSCFVLSVYQLLLFLSEVPRTLMLIM

SEQ ID NO: 85248 - protein, 174 aa, Zea mays
  Coding DNA Sequence Number=SeqID_41873
RICPGVSQLSDSPRCQEEVCGGLLQRFARMRPLATFEHWKKQTATCSTPSAAPEHARARARAAPKPSQRPAIPSPVQPPEKTVHVSVKLPERGIGLCFTGEAGPRSPDFNRPPATVDRDPPRANPTLRRNSLAAEYILVPEQGAAQEVAPDPAPEPAPEDLPATALEGKPRFYA

SEQ ID NO: 85249 - protein, 88 aa, Zea mays
  Coding DNA Sequence Number=SeqID_41874
  Homolog annotation: Hit_ID=A2XFC2; Match level="QueryCoverage=61%, HitCoverage=6%, E-value=7e-07, Identity=56%"; Hit description =Putative uncharacterized protein
MLIRTKLSMFVAFQKVEARIVLSVLRKIKEQYLLGHVELPLRIIITDHEKTSRAEAETTAVDIVQAIITETSAVDVVQARAEVEISFD

SEQ ID NO: 85250 - protein, 396 aa, Zea mays
  Coding DNA Sequence Number=SeqID_41875
  Gene Ontology: Mol. function=DNA topoisomerase (ATP-hydrolyzing) activity; Cellular component=chromosome; Biological process=DNA topological change
  Homolog annotation: Hit_ID=A6P3E1; Match level="QueryCoverage=83%, HitCoverage=74%, E-value=0.0, Identity=98%"; Hit description =Topoisomerase Spo11
  Pfam annotation: Domain name=TP6A_N; Domain location=105-172; Score =107.6; E_value=3.8e-29; Accession=PF04406.5; Description=Type IIB DNA topoisomerase
  Subcellular localization annotation: CTP_CleavageSite=53; ConfidenceScore=5.64e-01
MSEKKRRAGASAAGAASSSKKPRASSAASYAESLRSKLRPDASILATLRSLASASASKSKAAASILSGRGFSFAVPSRAASNQVYLPDLDRIVLVRRESARPFANVATARKATITARVLSLVHAVLGRGIHVTKRDLFYTDVKLFGDQTQSDAVLDDVSCMLGCTRSSLHVVASEKGVVVGRLVFADDGDRIDCTRMGVGGKAIPPNVDRVSGIESDALFILLVEKDAAFMRLAEDRFYNRFPCIILTAKGQPDVATRLFLRRLKVELKLPVLALVDSDPYGLKILSVYMCGSKNMSYDSANLTTPDIKWLGVRPSDLDKYRVPEQCRLPMTDHDIKVGKELLEEDFVKQNEGWVKELETMLRTKQKAEIQALSSFGFQYLTEVYLPLKLQEQDWI

SEQ ID NO: 85251 - protein, 134 aa, Zea mays
  Coding DNA Sequence Number=SeqID_41876
MDTNGLECLLAKLPGGQLISSRTASCVLYLKYHAIVSRLYMSLEGYGKIKKIWESKLLNLNYPRYFSCMKPNLVTRACVPINTQRLFLVLHSVEQETRELEAEHENLYLDDPEAVAATQIDGGGGELSCWLVGS

SEQ ID NO: 85252 - protein, 265 aa, Zea mays
  Coding DNA Sequence Number=SeqID_41877
  Gene Ontology: Mol. function=rRNA binding; Cellular component =ribonucleoprotein complex; Biological process=ribosome biogenesis and assembly
  Homolog annotation: Hit_ID=Q10N30; Match level="QueryCoverage=65%, HitCoverage=88%, E-value=3e-79, Identity=80%"; Hit description =Ribosomal protein L10 containing protein, expressed
  Pfam annotation: Domain name=Ribosomal_L10; Domain location=107-184; Score=-13.2; E_value=0.0094; Accession=PF00466.11; Description =Ribosomal protein L10
MSRAFDDYCIEDCGVILAPEVTQRRIDNSDQFVILAIVRVAFLPRRSAQPNPPFLLQSALLPRKMETSFLPTTLPNTRPLPALRTYAPAASIRSQQRPRRSTIRAAITRGRKEETVTTVREQLEGCYLLAGIKLLVAKNTLVGKAIEGTPWEALKPCMKGMNAWLFVHTEEVPAALKPYRAFQKEERVEETNDFVGAVFEGKFYGPGDFKALETMPSRAEVYATLLGALQGPATSLVATLQAPARDVVAVLSAYVRKLEEEAGAA

SEQ ID NO: 85253 - protein, 149 aa, Zea mays
  Coding DNA Sequence Number=SeqID_41878
MGCIPRASSRFLKNNLLEGIGVKLFALCFGGIHCVPCTDVTVLKNILIIPGRPPQWVWARDGLGLAAEVWTYIRAVERSGLEGSDESEYSSDEEDSDGGSEDEDDDDDGDGDGDGSGRGSGGGSKDGDGGGSRGSNRGGSSRGSTRASG

SEQ ID NO: 85254 - protein, 280 aa, Zea mays
  Coding DNA Sequence Number=SeqID_41879
MEGAFVLKTSYCSEVEGFPYLLRGCALHLGVRKKPKYAWKEYQENGVEKCSMVIYLGESRSYPNHPPFQITAIGNRFPDTCQNTALKALCQLCQNCDKEISETPLCYFPPTNKNSPTWRKRLQSLSGREHNEYDPTVIYMARYLHTLDTHFDDLFSHCTRLTSRVENLEQQIKELKEENAALQNSLEEAEGEEANTCEAYRSLKKDYARRLKRFAPVKKIQKHFKNQGCQTVEEKAEEEPPSPIAALGLDNLSDVEEVSLASLDEILKEFGDVLAGDAQA

SEQ ID NO: 85255 - protein, 103 aa, Zea mays
  Coding DNA Sequence Number=SeqID_41880
MMRLSMIRCFPFSYDDVILVVFKGARAVSRVPLRGYEIVDSGYDYDAASPLQPDRILAEYVDVYSPLLYTPNPPPGCQHCNHCSGEDEAVEGDFQEFQDYDEF

SEQ ID NO: 85256 - protein, 120 aa, Zea mays
  Coding DNA Sequence Number=SeqID_41881
  Subcellular localization annotation: CTP_CleavageSite=18; ConfidenceScore=5.35e-01
MASSFPVTSGKIRPTLKLASLFSCYGTCPIPRNRATGGESPLNPPAAGFPPRVGRFTPPPSAADAVSPPALSGAWARNHDVVSSRARSVSRTWAVLGRHARAAHAHAPRLAGPEFPLSTH

SEQ ID NO: 85257 - protein, 115 aa, Zea mays
  Coding DNA Sequence Number=SeqID_41882
MAGMYCNARDCLNKRMQPPARTAARILFSPVDKAKGSAKKKDRGRGIPREGSFSAKEPGSAPPITDQGFEGWPPEGSTAASDRVGPTPTTGQGFEGRPSEGLHGRLRLLGLRAHY

SEQ ID NO: 85258 - protein, 248 aa, Zea mays
  Coding DNA Sequence Number=SeqID_41883
  Subcellular localization annotation: CTP_CleavageSite=13; ConfidenceScore=5.08e-01
MPSSSSSADATLPAAASSKETLSSVMVEELRAGDSVDFGVSRMTSARVEDMQRLGYFGGGVARAPGTEEVPEPEGELVVFEAFFVAGLRLPAHRVFELNQLSYDGYPGQDEADRRGKKPAVETGGDPALAAAPSSKKRKLVMDKDRQGAAQKRQATVRVHEARPKRQRGAAKAAASGRGKPPLPAKAGACPPSKAPEATVGTEGPKLTKGAPSASGQAEGAKAARALSRPGKREADFDTEINVDDYLG

SEQ ID NO: 85259 - protein, 149 aa, Zea mays
  Coding DNA Sequence Number=SeqID_41884
  Subcellular localization annotation: CTP_CleavageSite=29; ConfidenceScore=5.33e-01
MAAVACPASSGGLPNRTDATGGWPVRGSPAAAVWPIRCSRSTAVMLIRDAALSAFWLVCDVALPAVWPVRDAALPAVWSVRDAALSVLWPTHNFVPACPAPAWEESPPAVAPTWERSLLAAAARSHCACAASKTKVAGGNTPSPSDSIC

SEQ ID NO: 85260 - protein, 93 aa, Zea mays
  Coding DNA Sequence Number=SeqID_41885
MSFVLFDYFESGILKTTEYTLGPRRRGSSSTLGVNYTFGEVRPSLGRQRGRRISTLKDDISTAPGPSLPGSSPGIRPEQTARPATPKPQPAVP

SEQ ID NO: 85261 - protein, 599 aa, Zea mays
  Coding DNA Sequence Number=SeqID_41886
  Homolog annotation: Hit_ID=Q6J9V9; Match level="QueryCoverage=10%, HitCoverage=33%, E-value=2e-08, Identity=46%"; Hit description =Putative uncharacterized protein
MELQFHLRRYEQPPTIGGPAEQQKADGWLAAARFSSSDDDFCSERPNSSSDDLRADAAAIRPSPTSPLEGRGQAEGRRVGGRSVGGTGYLVGGETSSGCRGGRWHRKQRRSRSDWRAGHAAAASATNGERPSPRSLREGAGHCPRGDRPQLGALPSPALMMNILEAEGGAEAVAQLASPHLGAGGHRLGAEEAKPPCAVRVTAQRLQAFLHFRPDQRVKGQTAMQAACDRTKWAPPFDSNASSMGAQAHTSCNRRAGCYVQETTPPLAPLPCLLDCGTGTATRGNPAYDPTVPTRHVDHGSVSRGRRCDGRYGQKWAGSNGGGRQAEAAVKSSAKLTTGGTFGGRSRRRFASAIMTASKKGTGKGDSPKGILLCEGNGPRAPLLIGGSKAGPSEGFNSRLRALGLRAHYWSEVRRPAPRKGSTAASGHSGSAPTTDQGFVGWPSKGFYSRLRRRARDDPRYVRYITKARATLPRGSGAALANPAPAKPLTASTYQPENLGPDPKSGLGRHRKLRLARPQGSDSASAPEDDELRLARPQGSDSASALEDDELRLARPRARTRPRPRKTDSTSTSEEPPPHPTQGSDRPRHRRGHHYPTPS

SEQ ID NO: 85262 - protein, 106 aa, Zea mays
  Coding DNA Sequence Number=SeqID_41887
ARGERVDDFGALNSALPNPKPTPAEAATRVALEPTPETAAIATAAPTSVAAGEDLPPKVAEGAPDAPAAAVPSVEDLAAVAVETTTEAAAEPTAEAPAASGPSQVA

SEQ ID NO: 85263 - protein, 47 aa, Zea mays
  Coding DNA Sequence Number=SeqID_41888
MGKTPNPRQRRFCPTLGMTNQVVNAAKEAVQRSEDLDIRFGISDSTC

SEQ ID NO: 85264 - protein, 262 aa, Zea mays
  Coding DNA Sequence Number=SeqID_41889
  Homolog annotation: Hit_ID=Q6J9V9; Match level="QueryCoverage=42%, HitCoverage=41%, E-value=6e-07, Identity=35%"; Hit description =Putative uncharacterized protein
MQAACNHTKGAHPFGFDASSMEAQAHTSCNWRAGYCVQETAPPLVPLPCLLDCGTSTATRGDPAHDLTVPTEHIGHKSVSHGRRRDGRYGQKWAGSNGGGRRAEAADRRHLWQAKQATLRFRHNDRVKKGTRKGDIPKGILLREGNEPRAPLLIRGSKAGPSEGFNSCLRALGLRAHYWSEVRRSAPRKGSTAASDHSGSAPITDQGFVGWPPKGSTAASDAERGMTLEGGIEPSDPVKRGPGPANHPQVLLERASGPLADP

SEQ ID NO: 85265 - protein, 195 aa, Zea mays
  Coding DNA Sequence Number=SeqID_41890
MWTTTPTTTSRHSLSPPSTLYIFPFINVLPHYLHLEEMFQESNLVGVSRQGVPKPTSAAEPDGGTAVGAVESLLTLSCFLGVAQAALSFCQTGQWSGGVTAVTSALLEARVRIEVSGLLCVKCPCNLVSRCGDLVKVASERSQGLGRAGDVSAIKRGPRARRKSLELYADGGYQLRIRRLEGTPNYGPRQIYSDS

SEQ ID NO: 85266 - protein, 432 aa, Zea mays
  Coding DNA Sequence Number=SeqID_41891
  Gene Ontology: Mol. function=DNA binding; Cellular component=nucleus; Biological process=response to DNA damage stimulus
  Homolog annotation: Hit_ID=Q84KJ3; Match level="QueryCoverage=100%, HitCoverage=75%, E-value=0.0, Identity=71%"; Hit description=UV -damaged DNA binding protein 2
  Pfam annotation: Domain name=WD40; Domain location=238-277; Score =23.9; E_value=0.00058; Accession=PF00400.23; Description=WD domain, G-beta repeat
  Pfam annotation: Domain name=WD40; Domain location=347-382; Score =4.7; E_value=8.3; Accession=PF00400.23; Description=WD domain, G -beta repeat
  Pfam annotation: Domain name=WD40; Domain location=41-80; Score=20.6; E_value=0.006; Accession=PF00400.23; Description=WD domain, G-beta repeat
  Pfam annotation: Domain name=WD40; Domain location=85-124; Score=9.9; E_value=1.9; Accession=PF00400.23; Description=WD domain, G-beta repeat
  Pfam module annotation: Pfam domain module=WD40::WD40::WD40::WD40; Domain location=238-277::347-382::41-80::85-124
MEHGVIPAPKRNANTSLDYVFQSQVKGKIPMVKPKFLIPNQLEHGNIKFHQRRVTCLEFHPTKNSVLLSGDKKGLLGIWDYVKLHEKITYDSVHSCILNSMKIDTTNDGMIYTASSDGTISCTDLDTGIGSSLVKSHPNGLECSLLWSCSIDHFVQKRIYEDVISVSLYLPPSCSGPSSWHMIYGMDLNTDKGLLLVADNFGFLYFLDRRSKTRIGHPILIHKKGSKARIWDTRKLEANSPLASLAHGRVVNSGYFSPRSGNKILTTCQDNRIRVWDYILGDLQSPSREIVHSHDFNRHLTPFKAEWDPKDYTETVAVIGRYISENYNGVALHPIDFIDTSSGKLLAEVMDPDIITISPVNKLHPQDDILATGSSRSIFIWKPKIEDELTEERAKHDNSSDDDSGGDSGGKNKKAKKTRFTHAVKGKGKSKV

SEQ ID NO: 85267 - protein, 141 aa, Zea mays
  Coding DNA Sequence Number=SeqID_41892
MVIEPFPSAPLLPRRRSCGWLLGRQARQRPLPLLLVIDVLSGGFGIFFLDLLLRRRMRRSYPSAAAPRRKPPRQRAARLGGGGGGDCRRSERGLWGPCVPNRVQVSGGGNGETWRGTAGEAVGLGCGGVYEFGVCLALWLI

SEQ ID NO: 85268 - protein, 102 aa, Zea mays
  Coding DNA Sequence Number=SeqID_41893
MRKNSKEFFMLRYERKEGKEIILQQLSSFRLGFVKTLASSFFSFVILRISKSRIRKPAFRKAVAVPREATRAQKSACPPITSSRASTSPSTYSNVLGRLSAE

SEQ ID NO: 85269 - protein, 141 aa, Zea mays
  Coding DNA Sequence Number=SeqID_41894
  Gene Ontology: Mol. function=transferase activity
  Homolog annotation: Hit_ID=Q6QP44; Match level="QueryCoverage=41%, HitCoverage=7%, E-value=6e-16, Identity=72%"; Hit description =Putative aminoalcoholphosphotransferase
MEKSPRSTPIGSGPARAGTHKDVAEAVNGTRLIDGSRRTSIVDTSNIDYGTSRLRPRFDYAQRYNRVWDGLLDAIRQMQLFADELRRLSRRNHVPEYLDMVHKNCLINAMSDVTEIAKGLDTMSRDLEEVLIGPQPLLEDY

SEQ ID NO: 85270 - protein, 73 aa, Zea mays
  Coding DNA Sequence Number=SeqID_41895
MEHRPGLERLLEAAHLELDGKLFVNTQQAPTWRANCRRFETGGSLSRRVNVAACPSPDGSSAKGGKRGGRRWA

SEQ ID NO: 85271 - protein, 67 aa, Zea mays
  Coding DNA Sequence Number=SeqID_41896
MDEGTPLGGLEPEDNAEPSHGLHAVLPSLRGRSRLAHRPGIRLPEDEGVKGSQQANKKTKVGFKMKS

SEQ ID NO: 85272 - protein, 387 aa, Zea mays
  Coding DNA Sequence Number=SeqID_41897
  Gene Ontology: Mol. function=oxidoreductase activity; Cellular component=anchored to membrane; Biological process=electron transport
  Homolog annotation: Hit_ID=A3A4W8; Match level="QueryCoverage=88%, HitCoverage=67%, E-value=1e-136, Identity=68%"; Hit description =Putative uncharacterized protein
  Pfam annotation: Domain name=BBE; Domain location=293-345; Score =62.7; E_value=1.2e-15; Accession=PF08031.3; Description=Berberine and berberine like
GGGFGPMMRKHGLGADNVVDAEVVDAEGRLLDRAAMGEGLFWAIRGGGGGSFGVVVSWTVRLVPVPPVVSAFTVRRLVRRGDQRQTQAAVRLLTKWQRVAHALPEDLFVKVAMEPEVDDAGERHPSVTFKSLFLGNCSGMVAEMSAHLPELDVRAGDCREMSWIQSTLYFYGYTGEQAAEVLLDRSLQPKDYYKVKLDYLTSPIPAAGLGGLLARVVEDRGGSVDVDPQGGAMSETPESDTPYAHRRGYLYNVQYFVKWGGDANVSYEDAHLAWVRGVHRFMTPYASARPRAAYVNFRDLDLGQNLEGETSYEAARAWGEMYFRGNFRRLAMVKAEVDPDQARVISEFCATSLFIRFSISLRHGTADIAVLPPMLCTEPTLKLQGVN

SEQ ID NO: 85273 - protein, 164 aa, Zea mays
  Coding DNA Sequence Number=SeqID_41898
MPSPLPLPPHHSQQLLLCLNQALQSIVLIIIQLWKGNWELTNRIAEHEDYVINALKNGTESPCPRQNRRRTTDPAGKATTATDPAGKTRSGQRDGGSSREGRSYVDPAGKAATATDPTKAMKGVGGGAGPAEQGPAPDLARGVNGAGDRRRSKGEVLLRISAAS

SEQ ID NO: 85274 - protein, 113 aa, Zea mays
  Coding DNA Sequence Number=SeqID_41899
MAVVPKFGEGTSSTAEAKQAAPTAQSAEGSIVVPKVPTVGPAEAKDDVAREPELEKTVTTPSEAELPKVPKAPAATPKMRRMASVLDAIMETTKTLTPAPIKKVAEAVTAQAE

SEQ ID NO: 85275 - protein, 84 aa, Zea mays
  Coding DNA Sequence Number=SeqID_41900
MYPLFRDTSSPHTNTHKTCTEARERESTVPLFWEHGAFGCIETELFSMEICQPLARCIEASSTSYPYGCWLVPNTSEALGLRLL

SEQ ID NO: 85276 - protein, 95 aa, Zea mays
  Coding DNA Sequence Number=SeqID_41901
MLVGGEESGLTRAIQFNQMGQGASLGIKEGGRPKPGEDELGSPVRSCRVRALGKLHGPLAKLTEGPAHLGHDWSELAAVAEAWAVMAGGGKARRS

SEQ ID NO: 85277 - protein, 123 aa, Zea mays
  Coding DNA Sequence Number=SeqID_41902
MSEHTSVKLPERGIELCFAGEASPRSPEFTTPPECVDRSLPEPTPPLTGPISPPQFALLTRSETRSPIPVMVGTSAVTARHQSGSLRHCSLEDMVAGVTWPSALPPGWTVEWDPASAEEEHEE

SEQ ID NO: 85278 - protein, 80 aa, Zea mays
  Coding DNA Sequence Number=SeqID_41903
MASLPSTFCRALGKDFVECHLVLGKEKSPSRRQVTVMDPLPSVFFGTRQRGQFCRVPAIMALGKDGSSGPHRQSLCRELS

SEQ ID NO: 85279 - protein, 122 aa, Zea mays
  Coding DNA Sequence Number=SeqID_41904
MGGAKARHLQVSKLGMTLQAKMNPQGCAATDPHHNHHGYHANALRQQRKGGQTRLGAKEDYLNHEKHQEGLDPKREVRSPKDVGEFGDLAKLGCISWDPSFWIKSIAKWVSEYFGPKFPTDD

SEQ ID NO: 85280 - protein, 70 aa, Zea mays
  Coding DNA Sequence Number=SeqID_41905
MGRNGHLDLNTGVKSIDQKEEHIRDLSVSGKIPGVLGFKETKLCSSFYRRSQVYCHRPLLRAIALDEANP

SEQ ID NO: 85281 - protein, 464 aa, Zea mays
  Coding DNA Sequence Number=SeqID_41906
  Gene Ontology: Mol. function=zinc ion binding; Cellular component =nucleus
  Homolog annotation: Hit_ID=Q6K6K8; Match level="QueryCoverage=67%, HitCoverage=83%, E-value=1e-54, Identity=38%"; Hit description=F-box protein-like
  Pfam annotation: Domain name=zf-MYND; Domain location=277-317; Score =38.2; E_value=2.9e-08; Accession=PF01753.9; Description=MYND finger
AKRPRVGAAPRVVANQMGAFEVLPQELILSVLTALSSAADKPADLFNVMLVCQEFCRLVTNPQVIRAASAACVSVLPRRWCAAADRFLRFCGDNGNADANFFLGMIQFYCLGLQTHGWSRMLMAVRSGHAHAAFAAAVVYYNGSCIDHNQRQPLAAANLFALAACRGHMGALRDLAFCVSNGLGVRQDAEAGRRLTFTANLREFRATYPTAAEQAVAYAHVVGNPGCLTSELGCFTTVPASLRGWAHPANRFLCDWFSANPLPFPPRRLLLMCSMPTCGRPETRGLEYRRCPVCGIARYCSRSCQSLHWRMGHTRECVPTHQWLMEAIANHAVVNADDGANAAAMPAVNNNSATHHNNLGGAAADAPAPKPPTRHLFDDLSSPTAPRGRDSTGHHRLASPPPRPSTLFLSVAVTSDSGNSTSTSAGRCTQYSPSNDADDEEPTVYEAALAERMKPAVAESRLEG

SEQ ID NO: 85282 - protein, 112 aa, Zea mays
  Coding DNA Sequence Number=SeqID_41907
MARRWPGGGQQQHRQSLAWFRLSTLETTDEEAAIFVRASYPEKKLGSDEDMGCQGVCYPRQNLASIPKLGHTPIHGLWPWWARPRPLVTLRKDSGVFCWASKQAKDDSMLDQ

SEQ ID NO: 85283 - protein, 39 aa, Zea mays
  Coding DNA Sequence Number=SeqID_41908
MDLSKALIDSTSEKMYLCQDLVDVGLLIEDPLTGHMPRH

SEQ ID NO: 85284 - protein, 44 aa, Zea mays
  Coding DNA Sequence Number=SeqID_41909
MPGSKDLNDVSPGNNTRLTMDDLSGDEREEFEDYLKKLREETRM

SEQ ID NO: 85285 - protein, 262 aa, Zea mays
  Coding DNA Sequence Number=SeqID_41910
  Gene Ontology: Mol. function=transferase activity, transferring glycosyl groups; Cellular component=cytoplasm; Biological process =multicellular organismal development
  Homolog annotation: Hit_ID=A2X4Z0; Match level="QueryCoverage=87%, HitCoverage=51%, E-value=1e-122, Identity=41%"; Hit description =Putative uncharacterized protein
  Pfam annotation: Domain name=TPR_1; Domain location=133-166; Score =32.0; E_value=2.1e-06; Accession=PF00515.19; Description =Tetratricopeptide repeat
  Pfam annotation: Domain name=TPR_1; Domain location=167-200; Score =32.6; E_value=1.5e-06; Accession=PF00515.19; Description =Tetratricopeptide repeat
  Pfam annotation: Domain name=TPR_1; Domain location=31-64; Score =16.5; E_value=0.056; Accession=PF00515.19; Description =Tetratricopeptide repeat
  Pfam annotation: Domain name=TPR_1; Domain location=65-98; Score =16.5; E_value=0.055; Accession=PF00515.19; Description =Tetratricopeptide repeat
  Pfam annotation: Domain name=TPR_1; Domain location=99-132; Score =37.0; E_value=6.6e-08; Accession=PF00515.19; Description =Tetratricopeptide repeat
  Pfam annotation: Domain name=TPR_2; Domain location=133-166; Score =23.4; E_value=0.00084; Accession=PF07719.8; Description =Tetratricopeptide repeat
  Pfam annotation: Domain name=TPR_2; Domain location=167-200; Score =31.7; E_value=2.6e-06; Accession=PF07719.8; Description =Tetratricopeptide repeat
  Pfam annotation: Domain name=TPR_2; Domain location=31-64; Score =21.2; E_value=0.004; Accession=PF07719.8; Description=Tetratricopepti de repeat
  Pfam annotation: Domain name=TPR_2; Domain location=65-98; Score=7.6; E_value=3.4; Accession=PF07719.8; Description=Tetratricopeptide repeat
  Pfam annotation: Domain name=TPR_2; Domain location=99-132; Score =35.0; E_value=2.7e-07; Accession=PF07719.8; Description =Tetratricopeptide repeat
  Pfam module annotation: Pfam domain module=TPR_1::TPR_1::TPR_1::TPR _1::TPR_1::TPR_2::TPR_2::TPR_2::TPR_2::TPR_2; Domain location=133 -166::167-200::31-64::65-98::99-132::133-166::167-200::31-64::65 -98::99-132
MHILIKGMFIRLWECLKMPLCVINVHCRHVLTMLWLMGNALKDAGRVEEAINCYRSCLALQANHPQALTNLGNIYMEWNMISAATSFYKAAISVTSGLSSPLNNLAVIYKQQGNYADAITCYTEVLRIDPTAADALVNRGNTFKEIGRVNEAIQDYVQAATIRPNMPEAHANLASAYKDSGHVETAIISYKQALRLRPDFPEATCNLLHTLQCVCDWENRDGMFRDVEEIIRRQIKMSVLPSVQPFHAIAYPIDPLLALEIR

SEQ ID NO: 85286 - protein, 255 aa, Zea mays
  Coding DNA Sequence Number=SeqID_41911
  Gene Ontology: Mol. function=translation initiation factor activity
  Homolog annotation: Hit_ID=Q2QYG5; Match level="QueryCoverage=92%, HitCoverage=99%, E-value=2e-72, Identity=60%"; Hit description =Expressed protein
  Pfam annotation: Domain name=DUF567; Domain location=61-240; Score =92.5; E_value=1.4e-24; Accession=PF04525.3; Description=Protein of unknown function (DUF567)
  Subcellular localization annotation: CTP_CleavageSite=66; ConfidenceScore=5.40e-01
MTAAAFPDRSSGMMMAMSTSRIHPSSAAETATTTQPLPPPPLPLPLPPLPPRRAGGRALHHTVWKRSSMGFPGTDGFSVYDAAGALAFRVDNYSRRRKVFAGELLLMDGQGAPLLALRPQIFSMHDQWNCYAATASEEGEGKRTRPRRRLFSMRKCSLLQKGHEAQVSMSGPCGSGCGSFWVEGCFARRSCKIRSGGGEEVARITRKNAGAATALLGDDVFSLVVQPGADCALVMAFVVVLDRICWQPYTPRICS

SEQ ID NO: 85287 - protein, 41 aa, Zea mays
  Coding DNA Sequence Number=SeqID_41912
MDLSKALIGSTSEKMYLCQCQDLVDVGLMIEDPLTGHMPRH

SEQ ID NO: 85288 - protein, 32 aa, Zea mays
  Coding DNA Sequence Number=SeqID_41913
MTMVSLAGFTALSAGLLLISSFLRAQVVNEIP

SEQ ID NO: 85289 - protein, 286 aa, Zea mays
  Coding DNA Sequence Number=SeqID_41914
MGRRETEREGGKKPEGDRRERVMMVPPVDVVGPSLGWARWRLFRGRGRVCLPRPRSSPSPWVGRGGDRRLRPGLSPSPRVGQSGVRRPSGLSPSPSPGVGQSGVHRLSGLSLSPSPRVGRSGVRRLPGLSPSPSPGVGRSGVRRLPGLSPSPSPGVGQSGVRRLPGLSLSPSPRPYSVEWHSSQSSAGGAVLLSGRSVERRSDYGHFGSVNRRARIRIKVSGHLCIKCPCDLVGWRGDLAKVASWQRLGLGRAEGVPVAGGGPRARRRSSGLCADGGYQLRFRSLE

SEQ ID NO: 85290 - protein, 146 aa, Zea mays
  Coding DNA Sequence Number=SeqID_41915
  Homolog annotation: Hit_ID=Q69Q36; Match level="QueryCoverage=39%, HitCoverage=7%, E-value=6e-13, Identity=57%"; Hit description=HGWP repeat containing protein-like
MTRGLRRLKNLNIDGDGAEAAQEEHENVVDNENNESLLSPPDVDGLLVRLPHQPRSPIKIIWPNGEVRQIIGEFTLSNLLALQGGKVIVETDENGVPNERISITKRKVHRIELWEAAHKKINGRYSTEMQIPDAYNPLPSKYTWVH

SEQ ID NO: 85291 - protein, 134 aa, Zea mays
  Coding DNA Sequence Number=SeqID_41916
MGKRGGSGLVMVCTIQTTRVNTNYIPLPWQSPTYPVVVEEVPVDLHHLRVENGVILEDNSEEILATPTPLSESLAFAAGASSSAPSATATQTPAPGGDNLDDSGDRGEDDDNEEEEGDNNNEEANDEQEYMVCH

SEQ ID NO: 85292 - protein, 128 aa, Zea mays
  Coding DNA Sequence Number=SeqID_41917
MANPIHLYRGGEAGEDHLILIQPFAPYPTVHESRPIPAQLRPPGLVKKSSSTAYSPDQSRLCAVERLAESRLMALPARTRSSCRAQAPYRPSESKAVDEPRGGRDKVLYAEMGGVSIGLTAPEFPGDR

SEQ ID NO: 85293 - protein, 189 aa, Zea mays
  Coding DNA Sequence Number=SeqID_41918
MQATRRGGFAANAKSGEQFTPSRSLSSRSEHAAESTAAGHFLSADAILEVAAGFLAGMSGAQGSRTQGFMAGEVGQLTANGFHESRELADIRAMAVAAVRIARITLTARAHAEVRVLRAGERVLACGPDFTATQDDAWVRQRTGPRPIFSSFCLIMKLMCLAEAFGKRFCPLASESPDVDAKPNDGIRS

SEQ ID NO: 85294 - protein, 167 aa, Zea mays
  Coding DNA Sequence Number=SeqID_41919
  Subcellular localization annotation: CTP_CleavageSite=53; ConfidenceScore=5.31e-01
MGPYPHYLAWGADWWAPYVSLTSNLSPRASRSLPLPRSSAEWVLLASIISIPVVNSGRSLRQRNSMNFAYLASTWGLLIPIDQVPDAPTPSALTGSRRRYLGEQRSSPERENQEEGESRSAAMTSAPCLLWCTAAPVATAVGLYWRPSSSSVPVIVWLLLEGRGSVR

SEQ ID NO: 85295 - protein, 87 aa, Zea mays
  Coding DNA Sequence Number=SeqID_41920
  Gene Ontology: Mol. function=N-acetyltransferase activity; Cellular component=intracellular; Biological process=metabolic process
  Homolog annotation: Hit_ID=Q6AUP5; Match level="QueryCoverage=87%, HitCoverage=12%, E-value=1e-27, Identity=77%"; Hit description =Putative uncharacterized protein OSJNBa0007A06.10
  Pfam annotation: Domain name=Acetyltransf_1; Domain location=5-83; Score=17.5; E_value=0.031; Accession=PF00583.15; Description =Acetyltransferase (GNAT) family
MDRRFHNYSFMQVIATVSYQIVPADTQYAEIPLAVVRSSYQRVGIGKLLYKELSQRLQNVGVTSIFCWADKVSEGFWLKQASKRVSG

SEQ ID NO: 85296 - protein, 46 aa, Zea mays
  Coding DNA Sequence Number=SeqID_41921
MADLVVPCAPTVVNASKESTRTNNASKEKKEDNVKKRKEIVPRSEV

SEQ ID NO: 85297 - protein, 64 aa, Zea mays
  Coding DNA Sequence Number=SeqID_41922
  Homolog annotation: Hit_ID=Q10SG2; Match level="QueryCoverage=71%, HitCoverage=4%, E-value=5e-07, Identity=50%"; Hit description =Retrotransposon protein, putative, Ty3-gypsy subclass
MGARTPVSPNAMPSCNARVLRRVMTTKDNHNISPSWDGPFILAQVLLLGTYRLKDIGDNLLSSA

SEQ ID NO: 85298 - protein, 80 aa, Zea mays
  Coding DNA Sequence Number=SeqID_41923
  Subcellular localization annotation: CTP_CleavageSite=64; ConfidenceScore=5.21e-01
MSLQLMSELTLGPPYTSTKKSPTASSSIKGAIFAPPPLPLPPLVLSSDFLRKGRDALELHALLRLDEPAGADARKLRKRL

SEQ ID NO: 85299 - protein, 765 aa, Zea mays
  Coding DNA Sequence Number=SeqID_41924
  Gene Ontology: Mol. function=DNA topoisomerase (ATP-hydrolyzing) activity; Cellular component=chromosome; Biological process=DNA unwinding during replication
  Homolog annotation: Hit_ID=A3B3J0; Match level="QueryCoverage=99%, HitCoverage=64%, E-value=9e-73, Identity=33%"; Hit description =Putative uncharacterized protein
MDATVRRMEFVVFDRCGADEDGEKGKDLAVCDDGEPEPRPVLQQKHGAFGDSLSECSGVHIDNDFVEELPWLKYHGYEYDDSLDDEILEEQRIGEQEVVGAEFSVEQEAEQGTSGRSSDEYKEDAADEENTTNLVRDQEILSDQGVACRVEACEELGGRDEDNILEASAGQGKAEEKLSDDIYKSEIPDQEITARTCATLEGSFEEDISSDQEANDDDEDECHVKSDGESEDTEEQDLEDQQSMPDDVSKMEISEDTISGDGCKEDFSEEVTSAAVLAGEVSYFSSIDCQDVGINKLVIDNLCQNDCTADDVFEQYEKTVDDVHEQDSSPAKAQMELGNPTSKKEDTSEETAILQQINQDSNVDTQRELEIRASILEESGIAQQSNLDGDKMEPEIIVCKLEDVSEESGACTESNLHDNTEYVIDDAEMRQEITLCKREDASKETGIDQETLEDDSSTCGIVDDRNNLEINNCKSEDVSIESVGTQEADHNDNFANFSNDVQGTAEDHDSHLIDDAQNDIQIPGGKSEDTCKEFDTMKETDQSDSSANVRYDAEETVEDDDSVCVSDDAQNDLKNTKCKLEDASKESSTAREAERSDSSANVIADSQNGSELTTNELAVITISNDKENESMLFTCNSEDGFKESIIGQQADHDDSSAYISYDDQNECEVTACHSEGAQGESNVVQEGEDKTAGAENKLEFTAYESVDASLKPAMPQEVAGDINITDATKDIRVTEETNESFNAQMPAECTDAKAPSIDDICGRVH

SEQ ID NO: 85300 - protein, 104 aa, Zea mays
  Coding DNA Sequence Number=SeqID_41925
  Gene Ontology: Cellular component=extracellular region
  Homolog annotation: Hit_ID=A2Y413; Match level="QueryCoverage=62%, HitCoverage=45%, E-value=7e-33, Identity=84%"; Hit description =Putative uncharacterized protein
  Pfam annotation: Domain name=GASA; Domain location=2-104; Score =130.4; E_value=5.3e-36; Accession=PF02704.5; Description=Gibberellin regulated protein
MESKSPWSLRLLICCAAMVAIALLPQQGGQYGGVTPGTGSLQPHECGGRCAERCSATAYQKPCLFFCRKCCAACLCVPPGTYGNKNTCPCYNNWKTKRGGPKCP

SEQ ID NO: 85301 - protein, 152 aa, Zea mays
  Coding DNA Sequence Number=SeqID_41926
  Subcellular localization annotation: CTP_CleavageSite=85; ConfidenceScore=5.06e-01
MRAPRAFRGHRLILVPRVAASLLARRGVPPSFVGYGVPPSLESGGATSSLAYPGSAIVACPPVSEVTLPLARLGALGSPPLAWPRASTTPALRIEESSPSRLRIWEPPMTPDRRTATTAAPGSTPAARSWATVAVARAWGSVARASGWGVKN

SEQ ID NO: 85302 - protein, 341 aa, Zea mays
  Coding DNA Sequence Number=SeqID_41927
  Gene Ontology: Mol. function=ARF GTPase activator activity; Biological process=regulation of ARF GTPase activity
  Homolog annotation: Hit_ID=Q6L4C8; Match level="QueryCoverage=82%, HitCoverage=71%, E-value=1e-109, Identity=71%"; Hit description =Putative zinc finger protein
  Pfam annotation: Domain name=ArfGap; Domain location=42-128; Score= -18.7; E_value=0.001; Accession=PF01412.9; Description=Putative GTPase activating protein for Arf
  Pfam annotation: Domain name=C2; Domain location=185-264; Score =104.7; E_value=2.8e-28; Accession=PF00168.21; Description=C2 domain
  Pfam module annotation: Pfam domain module=ArfGap::C2; Domain location=42-128::185-264
MEGNNLLHFLDTPSAHYRRTCDGFEAQHGGDEHSETSGPCLLAHSSALSALELIEVLVISVNLDEWTDDEVNCLAESGGNSVVNSRYEAFLPENKKLKQDCSTEERNDFIRKKYQFQQFVCDPQFSCPLPLNRKHAPPDKNHQQHNSSKYGFGHTFRNSWRKKDSDSKSLKKMSDVGMIEFVGLVKVNIVKGTDLAVRDVMSSDPYVLIHLGHQSMKTKVIKNTLNPIWNERLMLSIPDPIPPLKLQVFDKDTFSSDDRMGEAEVDIRPLIAATKEHENSTITESTELYRWSASEDSNGVLAKDSVISVASGKVKQEITLRLQNVERGEVEIEIECVPLSQ

SEQ ID NO: 85303 - protein, 120 aa, Zea mays
  Coding DNA Sequence Number=SeqID_41928
MDRGLRNLEELGRRGLDFEFFVATGKRNVRMLKWNSGGNFRGGGKTGKMERPHARRMDFMGWLQQLVDATADEKTKLYTLDCGKKPLNAKVGGVAKHDGRDDPSERVGLVARDDAVKQRC

SEQ ID NO: 85304 - protein, 130 aa, Zea mays
  Coding DNA Sequence Number=SeqID_41929
  Gene Ontology: Mol. function=N-acetyltransferase activity; Cellular component=intracellular; Biological process=metabolic process
  Homolog annotation: Hit_ID=A2Y412; Match level="QueryCoverage=96%, HitCoverage=60%, E-value=3e-28, Identity=50%"; Hit description =Putative uncharacterized protein
MGRPRKTKAEPEPAPAFPIEAHTRLGWAGNCKVEIRGSGLRCETTEQGLTISGPRGAKVVVSGEGSQFILLNPSDADSQTKSLLEEVLMLYKKELPTMDYAADTGRKSGKYKTLILMSSSAAQHEEDLFV

SEQ ID NO: 85305 - protein, 621 aa, Zea mays
  Coding DNA Sequence Number=SeqID_41930
  Gene Ontology: Mol. function=molecular_function; Cellular component =Golgi apparatus; Biological process=protein transport
  Homolog annotation: Hit_ID=A2Y424; Match level="QueryCoverage=99%, HitCoverage=73%, E-value=0.0, Identity=83%"; Hit description =Putative uncharacterized protein
MRKVDAAASKLRSEASAVIDGGVYESNQNDVWCGLQVYYNLGELKTAVEGLVGKHKAAGAKSVSVALDMKAISMTAGVGGGPGGVQRSGTPQIGGSKKAAEALWDRMRQCMDELHRAVTAAWQLQTVLTKKRVPFTQMLFLEEVWQEGEPLITERVWDAIVKAFASQMKTTFTASSFVKEIFTLGYPRLFSMVENLLERISRDTDVKGTLPALTPEGKDHMISAIEMFQTAFLALCHSRLSDYVNSIFPMSNRGTIPSKDQISRLVSRIQEEIEVVRTHGHLLVLVLREIGKTLLLLAQRAEYQVSILLPQKCGKTKISTGPEARQVTGTATAAQLKNFALCLHLQEVHMRISSVLSTLPNVASEVLSPSLGVVYGVACDSVTSLFQAMLDRLESCILKMHEQDFAGQGMDASMDNNASAYMEELQKCAVHFRSEFLSKLLPSSSSRSETICTIMVRRMASRVLIFFIRHASLVRPLSEAGKLRMARDMAELELAVGQNLFPVEQLGAPYRALRAFRPVLFLETSQLDKFPLLQDLPPSVILHHLYSRGPDELQSPLQRNKLTPLQYSLWLDSQGKDQIWKGVKATLDDYEMRVRSRGDKEFSPVYPLMLQIGSSLSQPNT

SEQ ID NO: 85306 - protein, 99 aa, Zea mays
  Coding DNA Sequence Number=SeqID_41931
MGYSTTYIMFKDTHTTSATSIVPAHNNSCPNNPRVVDVGDNHEPPLLNDGQRGAAALDRVQATASRELVVHSGVCDHVGLLLEVELTVAKLLLVIDERR

SEQ ID NO: 85307 - protein, 110 aa, Zea mays
  Coding DNA Sequence Number=SeqID_41932
MALGDLLGDAGIGYLYMYTLHFAPGPHVGAQHPCRANLFDHEGTKRGYPNCDATTTVSYRDQSEVPIDGCEVTSSSAAAVIPRGLVQDAMVEEVAEAQLPPTLSPLAPIT

SEQ ID NO: 85308 - protein, 134 aa, Zea mays
  Coding DNA Sequence Number=SeqID_41933
MVPMLLPIIQAVLMEETTTTLHTVGTAAQTEQHRGGAWNAQSPQTALLAWNLAIDTGGGGSIGGVSSWMNEKVAPPPFLYPRHTESVQEQLARSHADFAPVNVAWHHLRGPADATSGKGIKYKEKKRRCGLMLK

SEQ ID NO: 85309 - protein, 22 aa, Zea mays
  Coding DNA Sequence Number=SeqID_41934
QESGRLVPWFAVALTPCFTGSS

SEQ ID NO: 85310 - protein, 153 aa, Zea mays
  Coding DNA Sequence Number=SeqID_41935
  Subcellular localization annotation: CTP_CleavageSite=27; ConfidenceScore=5.43e-01
MPATALLQKATEAGATQSSSSFLKEFRLASSSSSPRPKQQQLHGRVAEISTDPWQYRSSNQQMEMERHQSHQRREMESSSQPWQHPVVPSRWRWSATSTGVINRGRWSPVSNRGSTPRDQPETEQQADEENATGMAETEQQADEENATGMEEN

SEQ ID NO: 85311 - protein, 69 aa, Zea mays
  Coding DNA Sequence Number=SeqID_41936
  Homolog annotation: Hit_ID=Q2QQM6; Match level="QueryCoverage=69%, HitCoverage=43%, E-value=1e-14, Identity=83%"; Hit description =Expressed protein
MKIQKANAGVLTNFEVLDFLRSRGAKIDPMGCLGAVAVSECKVITDLLLFYPMPYRLDFFLDAVLSFVT

SEQ ID NO: 85312 - protein, 462 aa, Zea mays
  Coding DNA Sequence Number=SeqID_41937
  Gene Ontology: Mol. function=galactose oxidase activity; Cellular component=intracellular; Biological process=cell wall catabolic process
  Homolog annotation: Hit_ID=Q10NU0; Match level="QueryCoverage=41%, HitCoverage=34%, E-value=7e-78, Identity=74%"; Hit description =Glyoxal oxidase, putative, expressed
  Pfam annotation: Domain name=DUF1929; Domain location=136-229; Score =8.2; E_value=1.9e-06; Accession=PF09118.2; Description=Domain of unknown function (DUF1929)
VSSIPVRAHLPSPSPRVMGDMVLLPNGAEVAIINGAADGTAGWESAKTPAYAPVVYRPDHSPGDRFEEQNAAGVARLYHSSAVLLCDGRLLVGGSNPHTYYNFSNVQFPSDLSLEAFSPEYLDTSNDMLRPRILDPSPTGAPATVGYGATMVIRFLVPALARRRRGGRAGCLGDVSVTMVAPSFTTHSFAMNQRLLFLDVTKNVAGPHMEHGHGGDVDRPDRDHIWSMIQASASNSGTFAPPPAPHMSATALLQKATEAGATQSSSSFLKEFRLASSSSSPRPKQQQLHGRVAEISTDPWQYRSSNQQMEMERRGPLRNGPGEWVGILPGSQATKGALKGLRTTWRRAAAANRRHETEDREAPAGQVLESLEQIYERGARAAEGANLVLVELLFRSLRRDRRAEIREDVGFPIRLVPDPSSASCSMSAAAQRHIRPRFASAITRGWAGRSWQPTQAATASVL

SEQ ID NO: 85313 - protein, 161 aa, Zea mays
  Coding DNA Sequence Number=SeqID_41938
  Subcellular localization annotation: CTP_CleavageSite=68; ConfidenceScore=5.46e-01
MSPSSLYALCLSVFRAPGWGKPPSFRPIAGGTQLRGSWYLSAIVRLQGFSSCSPAAPLHRRSPKRATSGLMVGESEPGCGLCPSLSLKDFHHQAKREDEASQGAVSVWVGCPLLPRAPGGERHPPASRRLPPAMSEAAGPEAPADGSGFSSDEIAYSDESS

SEQ ID NO: 85314 - protein, 325 aa, Zea mays
  Coding DNA Sequence Number=SeqID_41939
MTVAGAREQQSRHLPSSCPIRRQQENPLSRREDDAPVTRTSNGSRTRNGNLANYSPRRINSAARRTALRAGAAGTEKGDNPKGILPREGTRLRASLLIRGSKAGPPKGSTAASDRVGPTPTTGQGFEGRPPKGLTTASGYSGSVPPTDQGFEGWPVEGFTVASDAERGMTRAHRRHHVRCPSRRLGGCSRKTGSGQTVDSVNIPARELGPRQCTWATPCSHEGTARPAEALRKALRPRRSETTPPRPRGLHPAGALARTHRNKVPPRKAGPLAKKCDASLQASVNTLFEARGLLSGTIIRGTLKTPNSQLVTPISIKLQRPDGFD

SEQ ID NO: 85315 - protein, 90 aa, Zea mays
  Coding DNA Sequence Number=SeqID_41940
  Gene Ontology: Mol. function=protein serine/threonine kinase activity; Biological process=protein amino acid phosphorylation
  Homolog annotation: Hit_ID=Q94CU5; Match level="QueryCoverage=45%, HitCoverage=4%, E-value=2e-12, Identity=87%"; Hit description =Serine/threonine-protein kinase Nek5
MAMGKYPPGITTPYPYPRHKNNPTGSPIWIYMDLPPYPYLCGIIGTQLAEELAIVLKPFGKAKVSPGETSIWLAKSFKGMMNDEASYSSM

SEQ ID NO: 85316 - protein, 342 aa, Zea mays
  Coding DNA Sequence Number=SeqID_41941
  Gene Ontology: Mol. function=protein-tyrosine kinase activity; Biological process=protein amino acid phosphorylation
  Homolog annotation: Hit_ID=Q6RZV9; Match level="QueryCoverage=52%, HitCoverage=62%, E-value=8e-43, Identity=51%"; Hit description =Putative uncharacterized protein G9-6
  Pfam annotation: Domain name=Hin1; Domain location=163-320; Score =18.7; E_value=4.2e-05; Accession=PF07320.4; Description=Harpin -induced protein 1 (Hin1)
  Subcellular localization annotation: CTP_CleavageSite=47; ConfidenceScore=5.03e-01
MGDLYPRGYEYEGKSIPTNQPGASSRSHQPKTASASTRHRRPTHRPKSNEEAGALSSRLHPPPEGEPPSPVLIHQLSIYASFLPTELNVVSAPSSSAANKADKGGSNKGTPGGKGWQEIGIIEEEGLMDEEDHTRIVPHKCYCFLAFLLGFVALFSFFALVLWGASRSQKPRIVMGTIRFDNFIIQAGTDASLVPTDMATTNSTVRFTYRNRGTFFGIHVTADPFQLSYSQLTLASGDLHNFYQPRSSSRTVSVAVVGNKVPLYGGGPTLTAAPAAGGKGQQQASAKVASVPMVLRTTLHSRAYVLGALVKPKFTLAVECRVLMNPNKQNKPISLRNAYHYS

SEQ ID NO: 85317 - protein, 208 aa, Zea mays
  Coding DNA Sequence Number=SeqID_41942
  Gene Ontology: Mol. function=catalytic activity; Biological process =cellular metabolic process
  Homolog annotation: Hit_ID=Q2QQM6; Match level="QueryCoverage=43%, HitCoverage=81%, E-value=5e-38, Identity=85%"; Hit description =Expressed protein
  Pfam annotation: Domain name=RNA_pol_III_C17; Domain location=118 -208; Score=4.1; E_value=2.8e-05; Accession=PF09417.1; Description =RNA polymerase III subunit C17
MGDLYPRGYEYEGKSIPTNPEVLSGVRRFSKSPILSTHVPAFETLFPSEAAAAADRQLPARLVLGGCRAAAARGIVALAPTEDGVSLHAAPTTDPPSQVQRGGRSAEQPSASSSRRQKANAGVLTNFEVLDFLRSRGAKIDPMGCLGAVAVSECKVYEYILKTPACNQTRESIYEFVKRSEGFRLAEADKLNVINWRPSSAADAYAVL

SEQ ID NO: 85318 - protein, 161 aa, Zea mays
  Coding DNA Sequence Number=SeqID_41943
  Subcellular localization annotation: CTP_CleavageSite=52; ConfidenceScore=5.06e-01
MEHNEGILTTKPKKSSSRESNIGLGDATRKPSLTTRLTEGVPLTTVRRHGARAAISSRAVNSTRPHRVDGSSGATWPEKMIYPRMQSVGPDLHEEAPNPYTHSPDPRIWSGTPKQRPDAATWLVAREVSQRAKPNLAGGVQAILQAACLSSPLPNSTPVLQ

SEQ ID NO: 85319 - protein, 54 aa, Zea mays
  Coding DNA Sequence Number=SeqID_41944
MAHMLRWPLSLASRRCIDQQAGLIRADLTGLAYTYALPSYKREKNSTPQTCSYG

SEQ ID NO: 85320 - protein, 365 aa, Zea mays
  Coding DNA Sequence Number=SeqID_41945
GEPTREERATACGSAPLRLRQNQQPSPWHKGPGPRVILLGRRFLGAEKSHRRSRQYRSSTGPPQKTEKVNFQNQYSGIEAPRAWPNETIKYGSHGSVSREDKRDSWREQAVITTASARKQRANRQSNIGPTCRLVPSPEAGPGATVGTLNQWYPLLQYEGTVPRATISSCAVNSTPTPLRGTAPGAPTWPEKMILSQDAINWNRTSTRKAPGTLIRKSRDPRIRSGDSPSNRAGLYPVRLRSPLRRIPDAATWLVARDVSQRAEPDLAGGVQAILQAACLSSPLPNSTPVLQGKLPLHANTTQIADVRVQEDCSSNSKDERGEACDEDERVQEFLDMVKEVLPAPPKAEVETAEAEAEAGVEAMQ

SEQ ID NO: 85321 - protein, 105 aa, Zea mays
  Coding DNA Sequence Number=SeqID_41946
  Subcellular localization annotation: CTP_CleavageSite=88; ConfidenceScore=5.62e-01
MSSRRPILRGTGQSPPRSETARRALGWGASSPPRRMTRVWPKGAASGNLNRVLNPLRWSSRAACCVQCFLRLRPLPLPGRPAGRQYVLATLRRVERVPFLVPFQA

SEQ ID NO: 85322 - protein, 276 aa, Zea mays
  Coding DNA Sequence Number=SeqID_41947
  Gene Ontology: Mol. function=transcription regulator activity; Cellular component=nucleus; Biological process=regulation of transcription
  Homolog annotation: Hit_ID=Q10NS6; Match level="QueryCoverage=98%, HitCoverage=70%, E-value=1e-59, Identity=50%"; Hit description=Helix- loop-helix DNA-binding domain containing protein, expressed
  Pfam annotation: Domain name=HLH; Domain location=116-165; Score =50.0; E_value=8.1e-12; Accession=PF00010.17; Description=Helix-loop -helix DNA-binding domain
MAPPQIFCWPPQHHHNSSNDVGGGQQPPFFPPLPPLPPTPPPFFADLYARRALQLAYDHHHPGGGPSTSSDPLGLYMAGGGSGMMMMPPPFASSLPFGDFGRMTAQEIMDAKALAASRSHSEAERRRRERINAHLARLRSLLPNTTKTDKASLLAEVIQHVKELKRQTSEITEEEACPLPTESDELTVDAGSDEDGRLVVRASLCCDDRADLLPDLVRALKALRLRALKAEITTLGGRVKNVLLITADDDSSAHDGQREEEEEEAPCRLKHGRVHP

SEQ ID NO: 85323 - protein, 360 aa, Zea mays
  Coding DNA Sequence Number=SeqID_41948
  Homolog annotation: Hit_ID=Q761Z9; Match level="QueryCoverage=20%, HitCoverage=15%, E-value=3e-20, Identity=54%"; Hit description=DEAD -box ATP-dependent RNA helicase 18
  Subcellular localization annotation: CTP_CleavageSite=55; ConfidenceScore=5.33e-01
MAMLQESLPFRQSRLHEQPSFTSKQKQQRVGSGLTPVRRKRRVDGTSLKLLKRTVQAIGSAEQILGQPIVDEEVPMISRYLEKERRLKRRRLFPQISNRSQENSLDSNCEQFNWDDFEVLEIKSALNEVLELIQTEKIDQAKRIGPVNQKTLTMIMMSQRTQYVHRNCQIIRLYEVKPKRVQFQKADSVILKNHADIQMQKVKTWKSSANLKKKSLRITEIRLLKEAYGNHWLLRNPIRVEVKTEAKYTSKVAGRHELGPSITPLGLRYFATCACVDYWAVVLPLINSLKGSPIIASHGKMKQTTNEVYTRVSLLPEDEDTEKRAQARVWEDEDANRRDGEDGAAMRPLARTRTCSARCS

SEQ ID NO: 85324 - protein, 296 aa, Zea mays
  Coding DNA Sequence Number=SeqID_41949
  Gene Ontology: Mol. function=helicase activity; Biological process =protein amino acid phosphorylation
  Homolog annotation: Hit_ID=Q1EPC6; Match level="QueryCoverage=97%, HitCoverage=21%, E-value=1e-118, Identity=62%"; Hit description=DNA helicase homolog, putative
  Pfam annotation: Domain name=DUF889; Domain location=31-250; Score =375.2; E_value=1.1e-109; Accession=PF05970.5; Description=Eukaryotic protein of unknown function (DUF889)
MAKRQSIEALDNSMCDIMGRPDLPFGGKTIVFGGDFRQVLPVVRKGSRAQIVAASLRSSYLWESMCHLKLVRNMRAKSDPWFAEFLLRVGGGTEEVNNDGDVHLPDEVCVPYTGDDRDLDRLIDDIYPSLNENMSNTSYITSRAILTTRNDWVDMINMRMIDRFQREQMMYHSFDTVVDDPNNYYPSEFLNTLTPNGLPPHVLKLKIGCPIMLLRNIDPANGLCSGTRLVHAGMRVFLPRIPLCPSDDEMFPFHFKRKQFLLYVALSRATTRLNVKVLVIPVTDDKMKKGWKRSQQ

SEQ ID NO: 85325 - protein, 261 aa, Zea mays
  Coding DNA Sequence Number=SeqID_41950
  Gene Ontology: Mol. function=helicase activity
  Homolog annotation: Hit_ID=Q1EPC6; Match level="QueryCoverage=95%, HitCoverage=17%, E-value=1e-85, Identity=57%"; Hit description=DNA helicase homolog, putative
MQGKDSYPKTKIVTMGVRKRYTSKENGDVDEIQQYRDARWVTPPEALWRIYGFELSQNSPSVMQLQLHLPNMHMVTFHKRQMVERVVNRPGADRSMIIAYFEANKLYEEARGILYRDFSEWYTWQQGKLLLNHVTGATSYVDLRTVDGDTLPSFREAAQRRGLLEADNTIDECLNEAALYQMPSALRRLFATILVFCEPNDVAKLWQRHLDTMSKDYHRITQSKTHLQQMILIDIRNMLQSMGKDIKTFPLPAIIDRYDDS

SEQ ID NO: 85326 - protein, 573 aa, Zea mays
  Coding DNA Sequence Number=SeqID_41951
  Gene Ontology: Mol. function=nucleotide binding; Cellular component =cytoplasm; Biological process=response to virus
  Homolog annotation: Hit_ID=Q10NS9; Match level="QueryCoverage=96%, HitCoverage=87%, E-value=0.0, Identity=74%"; Hit description=Dynamin family protein, putative, expressed
  Pfam annotation: Domain name=Dynamin_M; Domain location=263-536; Score=-64.1; E_value=3.7e-07; Accession=PF01031.11; Description =Dynamin central region
  Pfam annotation: Domain name=Dynamin_N; Domain location=67-243; Score= 242.6; E_value=8.8e-70; Accession=PF00350.14; Description=Dynamin family
  Pfam annotation: Domain name=MMR_HSR1; Domain location=65-244; Score=- 7.5; E_value=0.0052; Accession=PF01926.14; Description=GTPase of unknown function
  Pfam annotation: Domain name=Miro; Domain location=66-164; Score= -1.8; E_value=0.015; Accession=PF08477.4; Description=Miro-like protein
  Pfam module annotation: Pfam domain module=Dynamin_M::Dynamin_N::MMR _HSR1::Miro; Domain location=263-536::67-243::65-244::66-164
MPKKGHMGTPKQAYATDGGKGDVAAGSTVTASAIASSYDDQIRPLLDAVDRLRHLKVTQEGIQLPTIVVVGDQSSGKSSVLESLAGISLPRGQGICTRVPLVMRLQDDPSADSPKLQLEYSNGRVVTTTEADVADAINAATAEIAGSGKGISDAPITLVVRKRGVPDLTLVDLPGITRVPVHGQPEDIYDQVAKIIKEYIAPKESIILNVLSATVDFPTCESIRMSQQVDRSGERTLAVVTKVDKNPEGLLEKVTMDDVNIGLGYVCVRNRIGDETYDQARVEEERLFKYHPLLSKIDKDMVGIPVLANRLMQIQSTIIAKCLPDIVKQINDRLSRSSAELDQMPQDLNNVADAVRVFFHIVKQVCNSLEKLLVRGDFAEYPDAREFHGTARIADMLSGYAKELPAQCPINRNEPFLMEEVRILEETKGINLPNFLPRTAFLVLLKKKVQIIDVIPQELANKVWDYVEDLVMKVLLKHSENFPQMQSPCRRAVQTLMDKARLRSAHHVKELIAMELVADYTANPRLHEDLDRDKWKGKAFDLRARLTAYWKSIVLRQVDGPCIARPSQRQAAG

SEQ ID NO: 85327 - protein, 119 aa, Zea mays
  Coding DNA Sequence Number=SeqID_41952
  Gene Ontology: Mol. function=hydrolase activity, hydrolyzing O -glycosyl compounds; Cellular component=cellulose and pectin -containing cell wall; Biological process=carbohydrate metabolic process
  Homolog annotation: Hit_ID=Q7XIV4; Match level="QueryCoverage=84%, HitCoverage=18%, E-value=2e-35, Identity=75%"; Hit description =Putative alpha-galactosidase
MTDIADKNNKWASYAGPSGWNVLCGAVQYTITLLLNLCFYADPDMLKVGNGGMTLAEYRSHFSIWALMKAPLLIGCDVRNMTSETMEILSNKEVIQVNQDHSYVVEGNLHNPDSNLEFY

SEQ ID NO: 85328 - protein, 57 aa, Zea mays
  Coding DNA Sequence Number=SeqID_41953
MGSSSLRAEWESRLVGGYEIDGFDYDYGAGCQHCNHCSGEDEAVEGDFQEFQDYDEF

SEQ ID NO: 85329 - protein, 201 aa, Zea mays
  Coding DNA Sequence Number=SeqID_41954
  Gene Ontology: Mol. function=nucleotide binding; Cellular component =cytoplasm; Biological process=response to virus
  Homolog annotation: Hit_ID=Q10NS9; Match level="QueryCoverage=88%, HitCoverage=33%, E-value=1e-59, Identity=58%"; Hit description =Dynamin family protein, putative, expressed
  Pfam annotation: Domain name=Dynamin_N; Domain location=18-188; Score= 75.2; E_value=2.1e-19; Accession=PF00350.14; Description=Dynamin family
MSKKRRTGDKLENDVEDTKRTALAIASGVTASAIAASYNDQIRPVLDAVDRLRHLKGDPSTDSPKLQLEYSNGRVVTTTEAKVADAINAATAEIAGSGKGISDAPITLVVRKSGVPDLTLVDLPGITRVPVQGQPEDIYDQIANIIKEYITPKETIILNVLSATVDFPTCESIPHVAAVDRTGERTLGRGHQGRQGPRGAA

SEQ ID NO: 85330 - protein, 127 aa, Zea mays
  Coding DNA Sequence Number=SeqID_41955
  Gene Ontology: Mol. function=nucleoside-triphosphatase activity; Cellular component=mitochondrial matrix; Biological process=ATP -dependent proteolysis
  Homolog annotation: Hit_ID=P93648; Match level="QueryCoverage=87%, HitCoverage=11%, E-value=5e-44, Identity=82%"; Hit description=Lon protease homolog 2, mitochondrial precursor
MKIIAIAGYITDEKMHIARDYLEKNTRQACGIKTDQVEVTDTALLALIENYCREAGVRNLLKQIEKIYRKIALQLVRQRVSNELDHESVSATVTEESGSDPKSKEEKHVRKRIVNGCNSPYTNHTIS

SEQ ID NO: 85331 - protein, 103 aa, Zea mays
  Coding DNA Sequence Number=SeqID_41956
  Gene Ontology: Mol. function=metal ion binding; Cellular component =integral to membrane
  Homolog annotation: Hit_ID=A2YNK6; Match level="QueryCoverage=84%, HitCoverage=21%, E-value=2e-29, Identity=70%"; Hit description =Putative uncharacterized protein
MVSTATRGNAGKGDNDYLDMVFTQVSLEEVENLCRYELPNESWEVNLPAQKVSPELLEPTLGINFARDGIQEKEWLSMVAAHSDAWLLYVAFYLGAQFGFNKN

SEQ ID NO: 85332 - protein, 281 aa, Zea mays
  Coding DNA Sequence Number=SeqID_41957
TGWGVSIRFGRVSGAAAGGWGGVQAERGERVDNLGALNSALPDPETTPAEAATGVAPGPTPETAEDAPGAPAPAAAGEDLPPKVAEGAPDAPAAAVPNAEDPAEVGAEAAAEASAEAPAAAGPSQVQDFGPAHATATTEFLAASTAEDGNEYGGSVSEFFDFTDSGSSVEWTEESSEEDLDYFAALDVAAAEAAPHAADAPDVPGPSTGHRRRRAIAKRRISAEEGARLRVSRAGRQELLSLPTAAGAGEGELRSLFAGEELRIMLFNYREMGIIPKVEPM

SEQ ID NO: 85333 - protein, 122 aa, Zea mays
  Coding DNA Sequence Number=SeqID_41958
MASQLGRYQAAWPSSPARPAGKREASVGHGGKVEVALLVRSEVLLRSVVSPVHLCGALSVLIIVHRGLVSGLPAARCSSSRAGAVDVSLGSGSGSSIFVNLLPCRPGRGRRNWFSGTEPCVR

SEQ ID NO: 85334 - protein, 59 aa, Zea mays
  Coding DNA Sequence Number=SeqID_41959
MPDAVALYDLDESTLYRYRMHAERVNGTERDCESRMGTERLRPVDFLERNGSGSEENIP

SEQ ID NO: 85335 - protein, 316 aa, Zea mays
  Coding DNA Sequence Number=SeqID_41960
  Gene Ontology: Mol. function=transcription factor activity; Cellular component=nucleus; Biological process=regulation of transcription, DNA-dependent
  Homolog annotation: Hit_ID=Q84ZA1; Match level="QueryCoverage=73%, HitCoverage=78%, E-value=1e-43, Identity=44%"; Hit description=AP2 -domain DNA-binding protein-like
  Pfam annotation: Domain name=AP2; Domain location=83-134; Score=79.1; E_value=1.4e-20; Accession=PF00847.11; Description=AP2 domain
MDRVPPPVSMQVAAMQRHQQQQQFVHHLQQVHQQGTQHEQPPPPHQNGSSSSGRTGGGRKCCPLRRSRKGCMKGKGGPDNQQCPFRGVRQRTWGKWVAEIREPNRGARLWLGTFGSALEAARAYDAAARTLYGDCARLNLQLYLQQQHAMAAPMMMMHSSCCSADGSSSNSDSISNSCSSPVTTAASPAYSHHQTMFQTPALQPSCGAMTMAAAAPHVQGFHVGDDDTTTAMAMHRHQQMMRELAEAPLHQEADDFEDFVTRLPKAEDFGLQGFQEVAPEVFDDAAGIWDHAAAWEPPTMMIDSGAQPQQQLVVPL

SEQ ID NO: 85336 - protein, 315 aa, Zea mays
  Coding DNA Sequence Number=SeqID_41961
LDNHNEKNAGIQCAVTNGTPVPPPQVRTTSLHGGRPAEQQKTDERLTAARSDYDNNHPRPGRRSGLGSSFGAGVATGRLSPAEDENQPFRPGDGDPGLLALYLSRHGWRKSPWDGRMPFSPRRGGRKRQPTHAGAAPRLASSFILAWMTKILEAEGGEGAAARLAFPHRQTGGDSPYVRPQTPRAESSPTRSKALPCGAGARSRMSCKPAQKQKKPNRRARCTQPPSGYKRFPTFAQTNERKGRAAMQAGGRKSHVVSQAHVPSWDSKRASSHGVKTEKRATLRLRRNNRAKKGVRRLAPEGFTVASDAERGMTR

SEQ ID NO: 85337 - protein, 110 aa, Zea mays
  Coding DNA Sequence Number=SeqID_41962
MTKLKERSLTRFLRCGAWFPRGGAIRGDGASVSDGMRRRGRGEAASGGSSGEDKSAACPAEENGMAEDRTKLRMPAAPSLPRDGICWDLGDKPDRWVPIGSGSGEWRQED

SEQ ID NO: 85338 - protein, 344 aa, Zea mays
  Coding DNA Sequence Number=SeqID_41963
  Gene Ontology: Mol. function=catalytic activity
  Homolog annotation: Hit_ID=A7NXN3; Match level="QueryCoverage=98%, HitCoverage=63%, E-value=1e-124, Identity=67%"; Hit description =Chromosome chr5 scaffold_2, whole genome shotgun sequence
  Pfam annotation: Domain name=FrhB_FdhB_C; Domain location=53-212; Score=140.1; E_value=6.2e-39; Accession=PF04432.4; Description =Coenzyme F420 hydrogenasedehydrogenase, beta subunit C terminus
TPDEVIAAKGVKPTLSPNLNTLALVEIFVPISQFKRIRSSSIIFEFVAWQDRKSLRSVEKYLGLEKLYVLGTNCVDNGTREGLDKFLKAASSEPETVMHYEFMQDYKVHLKHLDGHIEEVPYFCLPANDLVDVIAPSCYSCFDYTNGLADLVVGYMGVPKYAGVSMTQHPQYITVRNDRGQEMLNLVAGLLESTPTISSGSRQPFVMETVKADDAAKLGTSPNHHLYGILVLSIGIELVVTMTIRLAYIHVNKQTNGSTGKGPSKPAPRFVGDILAFLLNLVGPKGLEFARYSLDYHTIRNYLHVRRAWGKQRAEQHIPGYAKKIVEAYDKDGRIEAMVTQSGD

SEQ ID NO: 85339 - protein, 44 aa, Zea mays
  Coding DNA Sequence Number=SeqID_41964
MQKVQISAFKSNGYLSGWVKGNQKILQGRSTLKTAYCGPSEALV

SEQ ID NO: 85340 - protein, 168 aa, Zea mays
  Coding DNA Sequence Number=SeqID_41965
MSQTRLHKKGCLPKTMCTIALPLSSHIESVQWPSASTSPYPAREPKLASPPSLPVSLVTANGGGSDQWPRANVPVQAQVHSLSAEEALDHLDRERRLHDFYIEIFKPWARISPSQGPGYHKPATHLKSVLLKFLELVDWLDKVSILCSKVVYKNGRQHPDDNIIVEEF

SEQ ID NO: 85341 - protein, 261 aa, Zea mays
  Coding DNA Sequence Number=SeqID_41966
  Gene Ontology: Mol. function=transcription cofactor activity; Biological process=regulation of transcription, DNA-dependent
  Homolog annotation: Hit_ID=A3BVU9; Match level="QueryCoverage=99%, HitCoverage=20%, E-value=1e-115, Identity=81%"; Hit description =Putative uncharacterized protein
LRTTQPESLSAAVSDIGSVVSMIDRIAGSAPGNGSRAAVGEDLVAMTKCRLQARNFITHDGSGASKRMKRDTGAMPLNVSSAGSLNDSLKQSYTVGTPELQSTATSRVKCQRAEVNHVLLEEIQEINKQLIDTELHVSEDDAESFTTSDMAEGTVIKCTFTAVAVSPSLKSMFASAQMVLRQRNLTGVLCGCSRNSDDLSTKAKSKFSVLLRGLAEPMSLREIARTWDACARKVIAEYAQQTGGGSFSSSYGCWESCVGAS

SEQ ID NO: 85342 - protein, 196 aa, Zea mays
  Coding DNA Sequence Number=SeqID_41967
  Pfam annotation: Domain name=zf-CCHC; Domain location=83-100; Score =9.5; E_value=0.055; Accession=PF00098.14; Description=Zinc knuckle
MEDLSTTTPTIVIGKIAVFEMSRKMGRQEEPTYSRPYAFACEERKGKKKAPTQVPQVKKRKKYKVMMVENLFFNIDRKKQRMRGCFACREKVHFRDICPTMAKPTKGRSKGNALTSVKTWDDSSSEDEPPRTRIHRSSSRSSHKCLMARGKMSIPSFTDDNSSDDEGEGKPSVDELAKDVKFFRMYALNKRLNLNL

SEQ ID NO: 85343 - protein, 41 aa, Zea mays
  Coding DNA Sequence Number=SeqID_41968
MGGKSGKGKCDKKSRSDKRKRPPTPSSDDFGDSNAVTYPDL

SEQ ID NO: 85344 - protein, 120 aa, Zea mays
  Coding DNA Sequence Number=SeqID_41969
  Subcellular localization annotation: CTP_CleavageSite=4; ConfidenceScore=5.44e-01
RPAPCSLVPELLPSPALAGVRLCVTLPQPRALPAESLRVRRSSLAAPCSPQRLPARVSSHRQLTAHSSLSVLSAERFSRARAAPARSPWWPRCLSACWGILVRELHPSVPVAVSRIDSKL

SEQ ID NO: 85345 - protein, 15 aa, Zea mays
  Coding DNA Sequence Number=SeqID_41970
MAPASLHEFIFFIPK

SEQ ID NO: 85346 - protein, 354 aa, Zea mays
  Coding DNA Sequence Number=SeqID_41971
  Gene Ontology: Mol. function=transcription cofactor activity; Biological process=regulation of transcription, DNA-dependent
  Homolog annotation: Hit_ID=A3BVU9; Match level="QueryCoverage=71%, HitCoverage=18%, E-value=1e-79, Identity=60%"; Hit description =Putative uncharacterized protein
MASDCWDAEPRRIQTETLGVRPSPAALKSEVINVKAIETPSDQIKSLKDQYFAELNDVYNKISMKIQNIDNHMPAQKSAEQYERLKGFKGMLERILHFLQANKSSIQPGFREKISIFERQILSIMSSQRRKPVQAPGQQTFQQSGGQAPSSNMSQQHQTSQGLQQHDSHTNQMPQASLPSMNTGVPTSGAPGIQHVPAPQASNFGVPTTQQNVTNAPQAASNPENAQGNNFNPVQHGSMGTALQQGSTGPMQGALNAQHQSNSNMISNNAMSTMQTNTNAMQANVNSLQQLKQHQEHQMMQNQQMKQRQQMLQQMQQKKILQQQLPIQQLQKQQQQGPIQVQQLHSGNDVNELK

SEQ ID NO: 85347 - protein, 80 aa, Zea mays
  Coding DNA Sequence Number=SeqID_41972
MVKVDLGDDERAAAVGAGGERRAIDARVVAHPRAYPIGGEINASSSSGRADSLTNRAKMLAQLVTKLKQDESSRAELTTS

SEQ ID NO: 85348 - protein, 89 aa, Zea mays
  Coding DNA Sequence Number=SeqID_41973
MSKPVPPGRSALRRRLGRVEKGIVDGDDSGVDEVGLHVFREPQLRVPAGGSDELARGRMEIREGRTFSTGNVKGTMSTTARRTTEGHES

SEQ ID NO: 85349 - protein, 88 aa, Zea mays
  Coding DNA Sequence Number=SeqID_41974
  Gene Ontology: Mol. function=cysteine-type peptidase activity; Biological process=proteolysis
  Homolog annotation: Hit_ID=Q5NKP7; Match level="QueryCoverage=81%, HitCoverage=9%, E-value=2e-13, Identity=48%"; Hit description =Putative uncharacterized protein 9C20.3c
MKNVDRPPSNPKQIIIQSTQECFSVDIPRVPAETVRPETRRAADEDDDFMPLSKKRNLDDSPGKVLKKVVTKWRKVVPVGDLFSNAKN

SEQ ID NO: 85350 - protein, 103 aa, Zea mays
  Coding DNA Sequence Number=SeqID_41975
MTRNSVWTYTYHGFQLSREINARLIQSSTESEFSVRIDNVVHRPKGSIGTSDLGLLCITLVPRELGLRNSFRIESPVAAQRKKNVDTIDIASQGDVLDTVLTS

SEQ ID NO: 85351 - protein, 311 aa, Zea mays
  Coding DNA Sequence Number=SeqID_41976
  Gene Ontology: Mol. function=ATP-dependent helicase activity; Cellular component=endoplasmic reticulum membrane; Biological process=vesicle-mediated transport
  Homolog annotation: Hit_ID=A2YPI3; Match level="QueryCoverage=66%, HitCoverage=18%, E-value=3e-92, Identity=79%"; Hit description =Putative uncharacterized protein
MASKVAFDHPERFSEKFEFCADNIKPMVQTCMTTLSSKISACFRRNVWLGDLNYRINLPYEKTHELISKQDWNELFGKDQVHVHNLVIEQSLERETWGFLRVMFEDGDFARTKLLAHLGFEPPQAPPASSTDELSQILADTLNIDHAAVTDNADAQFLIDNGDDFFNNPQPSEASLAEESVSTNGQQIEQEVSGDAVPSDPSIDKSIQHALVVGDYKGAVNQCLASNRMADALVIAHAGGSALWESTRNHYLKNSISPYLKVVSAMVGNDLMSFVSTWPLSSWKETHAHLWTYPLASQHGRRLGVAPDQGY

SEQ ID NO: 85352 - protein, 151 aa, Zea mays
  Coding DNA Sequence Number=SeqID_41977
MAQGHISLSAEAESEPWGRTKRSPSSSVEVEPEPWGRARRSFLWRPRLDLAAVSLTLLSGTAVGATQAALFFCHVARVRIRCQAILALNAPAIRSVGVAIWPRLLLCEDWASGEPKLCADGGYQLRLGVLGVPLIMVPDSSVSQYINTYTK

SEQ ID NO: 85353 - protein, 241 aa, Zea mays
  Coding DNA Sequence Number=SeqID_41978
  Subcellular localization annotation: CTP_CleavageSite=84; ConfidenceScore=5.26e-01
MANTMRATQIARKILTTQPSIYILRTPQFGGSRSMTWIIAGGFSFGMKVFSRDKGKNMVHTLQTTRVNITRVPPPQQAPSYPVVAEEVPMELHHLAVKNGVILEDSSEEILATPTPSSEHHAFAAGASSSALPVLVAQAPTLEVRTLMILAMMEVMTRMEKTTTIMMMPTTSMIKKMALLECGLSWSITPQCSRWDTSQTCFRMCYTHWKPTFDLFMTPDGYLSPLGLVTISLMCISECWM

SEQ ID NO: 85354 - protein, 40 aa, Zea mays
  Coding DNA Sequence Number=SeqID_41979
MALQSVPVPPEHGEDVQKLLTADAPPAQSPARPCHCTLSY

SEQ ID NO: 85355 - protein, 488 aa, Zea mays
  Coding DNA Sequence Number=SeqID_41980
  Gene Ontology: Mol. function=inositol or phosphatidylinositol phosphatase activity; Cellular component=cytoplasm; Biological process=abscisic acid mediated signaling
  Homolog annotation: Hit_ID=Q10C63; Match level="QueryCoverage=82%, HitCoverage=78%, E-value=0.0, Identity=86%"; Hit description =Inositol-1, 4, 5-trisphosphate 5-Phosphatase-like protein, putative
  Pfam annotation: Domain name=Exo_endo_phos; Domain location=68-435; Score=66.5; E_value=9.1e-17; Accession=PF03372.14; Description =EndonucleaseExonucleasephosphatase family
MGGLCAKCVLAAWLVARASCCIFLSFRVTVQQQAMSSPTAHPSTLHDKSEERTLKWVTFGVKLTAVRIFASTWNVGGKSPPRGLNLDDWLHSSLPADIYVLGFQEIVPLNAGNVLGTEDNLPAKKWVSLVRRTLNKNPGSCCYGGYRTPSPVPDPVVEQDADFEGSSRRHDSLSYLHRRSFNLSRSLRVEGNHMLSHPRLDRRFSVCDPVSLGGRPSDFDGNFPFMGSPDDHCIEEDTSNGAHFSPFPYGYGVSAPMEENGYHPNTPSRYCLVASKQMVGIFLTIWVRSEIRNDVRNLKVSCVGRGLMGYLGNKGSISISMSLHHTTFCFICCHLTSGEKEGDELRRNSDVMEILRKTRFPQVRGAADVKSPETILEHDRIIWLGDLNYRIALSYCSAKALVEMHSWKQLLEKDQLSYVRGESRFSDHRPVYSIFMAEVESIRHRRRNAGYFSSRIEVEELLPNPYSHPAFTASSQMVENNHTAQKLT

SEQ ID NO: 85356 - protein, 53 aa, Zea mays
  Coding DNA Sequence Number=SeqID_41981
MAHMIKNQFIPYLSFCWNKEYRKSRLESFAESGSTSLATGKIDNFGLAGLEFT

SEQ ID NO: 85357 - protein, 332 aa, Zea mays
  Coding DNA Sequence Number=SeqID_41982
MQAACNRTKGAHPLDFDAFSMEAQAHTSCGQKQQSSRQQAHAPSWDSERTLSHGVKMTRPSSVPRTARARTTAAPRTTRPIALTLRQDRRHLWQAKQATLHLRHDDRVKKGAPRHSISYPFPLPLSLSCHRDRERGYSERDHSARRKRAPSPLLIRGSKAGPSEGFNSRLKALGLRAHYWSEVRRPGPWKGSTAASGHSVSTPTTDQGFVGWPPKGSDSRLRARRARDDPGYVRYITKARATLPSLGSGRRRTPLRPTPGLGLGLGSGDDELRFARPQGSDSASTPEDDELRLARPPGSDSASAPEDDELHLARPQGSDSTSTSEEPPPRPT

SEQ ID NO: 85358 - protein, 17 aa, Zea mays
  Coding DNA Sequence Number=SeqID_41983
MGTKEAKKHHYGKGCCY

SEQ ID NO: 85359 - protein, 114 aa, Zea mays
  Coding DNA Sequence Number=SeqID_41984
MRSSSSSRAEPEFEPWGRAKRSSSSSGAEPESEPWGRAKRSSSSSKAEPESEPWGRAKRTSLCRAAQQSERRRRRCPLVRPATFALNAPAIRSVGVATWPRLLLGEDWASGEPK

SEQ ID NO: 85360 - protein, 212 aa, Zea mays
  Coding DNA Sequence Number=SeqID_41985
  Gene Ontology: Mol. function=protein-tyrosine kinase activity; Cellular component=integral to membrane; Biological process=protein amino acid phosphorylation
  Homolog annotation: Hit_ID=Q10C82; Match level="QueryCoverage=77%, HitCoverage=18%, E-value=1e-15, Identity=36%"; Hit description =Leucine-rich repeat transmembrane protein kinase, putative, expressed
MATPSHLLLVVFTALLALLPGTTQLQPSQVWTLIKIQQLLNAPPMLSHWRRSTDFCGGGGGAMGPGGLGRRPVLRGHRDATPHRGRGGAASAQELLHRGRGHDAVPGSRTSRWSRCPGLGLWGPLAGEALARLRVRWRIVNMSGHLLFRRGPPGGDASFPGLQKLGPRRNLAGWGGARLEWCPCRSGRSEAGGKNLQGGLAESSGKEPLCGR

SEQ ID NO: 85361 - protein, 130 aa, Zea mays
  Coding DNA Sequence Number=SeqID_41986
  Gene Ontology: Mol. function=nucleic acid binding
  Homolog annotation: Hit_ID=Q655Y7; Match level="QueryCoverage=84%, HitCoverage=25%, E-value=1e-54, Identity=94%"; Hit description =Hydroxyproline-rich glycoprotein-like
IEFEPEYHVNFGNPDIDEKPPMSLEEMLQKVKPFVVAYEGIQNQEEWEEAVKDVMARAPHMKELIDMYSGPDVVTAKQQEEELQRVANTLPESIPSSVKRFTDKTLLSLKVCFLVTTCVLNIRHRTIGSV

SEQ ID NO: 85362 - protein, 262 aa, Zea mays
  Coding DNA Sequence Number=SeqID_41987
  Homolog annotation: Hit_ID=Q2QMB2; Match level="QueryCoverage=19%, HitCoverage=19%, E-value=3e-08, Identity=57%"; Hit description =Receptor-like serine/threonine kinase, putative, expressed
MASATTYIKIALTLFIHFSVFLTEVWTLYEFYDLESIIDRTLKRDFDTEETLWLLKISLVCIPDSPKIKPFMSMDHETWPDHRRHGPESQDGRVGSVQLDIMLEHCRVVAWGVMHPLLVGDFPFSYYESSAMLWRPLAMQEVFFHGRIIVDWWCQVFFHGRCRGAPDCLTYLTSNKGRRLELCELCAGNTGQEHFICLWPKLPCLILQTSNADPFSLMDMLIFKAVEEQVKNRVEHRQGSSSRMPLIVNDKRNQLRCMGFRS

SEQ ID NO: 85363 - protein, 72 aa, Zea mays
  Coding DNA Sequence Number=SeqID_41988
MQGATPRHRGHVLVEEREGLASGPDSIAAAAGANAQRRARGVKEGGAVNDEIDEALSSYRDGKEEVSKGMFK

SEQ ID NO: 85364 - protein, 169 aa, Zea mays
  Coding DNA Sequence Number=SeqID_41989
  Gene Ontology: Mol. function=protein binding; Cellular component =endoplasmic reticulum; Biological process=vesicle-mediated transport
  Homolog annotation: Hit_ID=A3ANH6; Match level="QueryCoverage=100%, HitCoverage=93%, E-value=3e-75, Identity=67%"; Hit description =Putative uncharacterized protein
  Pfam annotation: Domain name=Synaptobrevin; Domain location=83-169; Score=83.8; E_value=5.6e-22; Accession=PF00957.12; Description =Synaptobrevin
MVKLTMIARVTDGLPLAEGLDDGRDLKDSDFYKQQAKLLFKNLSKGHHEASRMSIETGPYYFQYPCAVYVPYKTRKLYLDTRTQRNLAKLNDELYEVHQIMTRNVQEVLGVGEKLDQVSEMSSRLTSDTRIYADKAKDLNRQALIRKYAPVAIVIGVVLMLFWLKNKIW

SEQ ID NO: 85365 - protein, 231 aa, Zea mays
  Coding DNA Sequence Number=SeqID_41990
  Gene Ontology: Biological process=protein transport
  Homolog annotation: Hit_ID=Q7XI79; Match level="QueryCoverage=34%, HitCoverage=86%, E-value=1e-09, Identity=50%"; Hit description =Putative uncharacterized protein P0434A03.111-2
  Subcellular localization annotation: CTP_CleavageSite=61; ConfidenceScore=5.08e-01
HGPFGHLYLRTIMMVLVSIATTSFTIPFLFSLPTCLHLRITTFSTEGVGAGASSLYSSYTSSDTDSHSGYCMSTRTFHIIRAPSFSSSSDVSFIFPAFVLFFLPNLLPPPTVVVASRPTLVDVAESQRPRRPHAVRPLRIAGRESENGVGKMETVKSLLKPKPTPQQQLREWQRRLRNEGRNIDRQIRGEAARFSHSPDPDSPSPNVQREEKKVEKAIMEAAKRNDMGSAK

SEQ ID NO: 85366 - protein, 218 aa, Zea mays
  Coding DNA Sequence Number=SeqID_41991
  Gene Ontology: Mol. function=protein binding; Cellular component =nucleus; Biological process=embryonic development ending in birth or egg hatching
  Homolog annotation: Hit_ID=A2XBM1; Match level="QueryCoverage=58%, HitCoverage=20%, E-value=2e-50, Identity=79%"; Hit description =Putative uncharacterized protein
  Pfam annotation: Domain name=NAC; Domain location=83-141; Score =114.0; E_value=4.6e-31; Accession=PF01849.9; Description=NAC domain
MAGAVRTGGKGSMRRCLIFLLLSSAVIQKGNIKPCDLVNVWMEKKRQADSALICANLHLGHPRVYRVYTVLRKKKAVHKTATTDDKRLQSTLKRIGVNTIPGIEEVNIFKDDIVIQFQNPKVQASIPANTWVVSGVPQTKSLQDLLPTIINQLGPDNLENLKRLAEHFQKQVPGAEASASAAAQDDDDVPELVPGETFEEAAEVKEVPEAEPEEKKES

SEQ ID NO: 85367 - protein, 53 aa, Zea mays
  Coding DNA Sequence Number=SeqID_41992
LEQYSMGIFAWHIKFSSNLKGVLRSGKALPRMPAWPRHQSECPAVREDWELEK

SEQ ID NO: 85368 - protein, 587 aa, Zea mays
  Coding DNA Sequence Number=SeqID_41993
MSSGRDLVEEFIGCGVWLLAHGWVLGEVCPHRMPTLGDQLVQSPSFAVDLRGQNLTAFVREVEAEVARIVGRYVLKTENLRSWDIRGSNVRLNRVFELNRLPYGGYPRDDDAVVGDRRGKRAVAAVDEGPSRGAVPAASAKKRKLGTAVEGLGASDRFAMDLLGTCAAPGERMSSPELQESSARMLKVTGGRWPRNVSIPRAASEDIRTSRLAREMKIFPCGRNVAAVVSVVMEKDRQDAAQKRRAFARVGDPRREVKMAWGVAKSATPDTSKPPLGANSTAPDLSKPLPVVPAQERRPPSPPRTAETEVGGAEVSMIGSWATVVVSAPVAAGSVTVVTGPKGSSQDPWSKFCASGEIASAATAKDVAGSVAQQLKHAVAFAERIASGALTSEFAAERRRLEGRIERLWTQHTKAVRDKSAAENKSRNLMEKLSAAEAEKEDLGRRLAVEKEDADKACTEAQAACADANLALQRAAEASHGSLHSYLDKAEASTRTEVDQARALLVDAYRQLGARTAPFVASGKEVGFRFLGWLQEELEVLPSIVTGLMSFASLITREGAANALSREECRHFEVFDRSDEDFNREIF

SEQ ID NO: 85369 - protein, 276 aa, Zea mays
  Coding DNA Sequence Number=SeqID_41994
  Gene Ontology: Mol. function=metal ion binding
  Homolog annotation: Hit_ID=A2XBK9; Match level="QueryCoverage=61%, HitCoverage=30%, E-value=2e-56, Identity=64%"; Hit description =Putative uncharacterized protein
MVVHHDKMFEEMIKRQNDGVRSKRQKVAEHSYEAANLVASTPATISFSLQTSSWYQLSKCNIIIFMLHLRGGIKNELPVAGARVISIDTSNKIILVSGRANAIGAEYVVTKISMLSNREVRKIHLPPETKAVRDMCILPGGSAIFTSLGRRLSLFSMATDSIVLNWDLPAPGWSCAVGASGSHHIYAGLQNGMVVVFDIRQTVRPLRCMVGLSANPVHTLHSVIDNNGSRKVLSASAIGPCMWDADSNQSRSMKNVMRFRVQVSVAYYSLLSGRIC

SEQ ID NO: 85370 - protein, 91 aa, Zea mays
  Coding DNA Sequence Number=SeqID_41995
  Gene Ontology: Mol. function=hydrogen ion transmembrane transporter activity; Cellular component=integral to membrane; Biological process=proton transport
  Homolog annotation: Hit_ID=Q7F1V0; Match level="QueryCoverage=73%, HitCoverage=14%, E-value=2e-31, Identity=91%"; Hit description =Putative heme binding protein cemA
METTLDKGEHRHARGSREGRTQAAYHSESGWHTLVEVILEHYGFEADEAAVTFFVCLVPVALDVYIKFWVYKYLPRLSPSVGNVLDEIKRH

SEQ ID NO: 85371 - protein, 161 aa, Zea mays
  Coding DNA Sequence Number=SeqID_41996
  Gene Ontology: Mol. function=protein binding; Cellular component =membrane; Biological process=protein transport
  Homolog annotation: Hit_ID=A3BJQ8; Match level="QueryCoverage=93%, HitCoverage=43%, E-value=7e-42, Identity=63%"; Hit description =Putative uncharacterized protein
  Pfam annotation: Domain name=Snf7; Domain location=3-123; Score=-1.1; E_value=2.3e-05; Accession=PF03357.12; Description=Snf7
MWIILYCVLIRKHEVVQAVLTISWEYRNLSATARTVGHLSKSTEVMKLVNGLMKAPEVAATMQEFSKEMTKAGVMEEMVNDALDSTLDSEDMEEEIEEEVDKVLTAIAGETASELPDAVRKEKEKMKQPSTSVPEERTAIAEAVDDGELDQIRERLARVRS

SEQ ID NO: 85372 - protein, 46 aa, Zea mays
  Coding DNA Sequence Number=SeqID_41997
MASGILRMAAVADPGWGEQGRREGERVGRAGAACGVCAAPIAAERQ

SEQ ID NO: 85373 - protein, 119 aa, Zea mays
  Coding DNA Sequence Number=SeqID_41998
  Gene Ontology: Mol. function=nucleic acid binding; Cellular component= ribonucleoprotein complex; Biological process=ribosome biogenesis and assembly
  Homolog annotation: Hit_ID=A7PJ88; Match level="QueryCoverage=93%, HitCoverage=24%, E-value=7e-36, Identity=67%"; Hit description =Chromosome chr12 scaffold_18, whole genome shotgun sequence
  Pfam annotation: Domain name=Sof1; Domain location=28-115; Score =167.8; E_value=2.9e-47; Accession=PF04158.5; Description=Sof1-like domain
MSYHGLPPCVSMFSFSGSDDTNLRLWKSKASEQLGVLLPRERKKQEYQDALKERYKHLPEVKRIVRHRHLPKPIYKAANLRRTMIEAESRKEERRRKHSAPGSMPVQPFRKRRIIREVE

SEQ ID NO: 85374 - protein, 218 aa, Zea mays
  Coding DNA Sequence Number=SeqID_41999
  Gene Ontology: Mol. function=carboxyl- or carbamoyltransferase activity; Cellular component=ornithine carbamoyltransferase complex; Biological process=amino acid metabolic process
  Homolog annotation: Hit_ID=Q8SA97; Match level="QueryCoverage=22%, HitCoverage=11%, E-value=1e-08, Identity=64%"; Hit description =Ornithine carbamoyltransferase
  Subcellular localization annotation: CTP_CleavageSite=53; ConfidenceScore=5.22e-01
MGEENQIVSTSTNLTPKSSSNKDKFSWSRPESFGEKTPAQLSGGKFSWVWSKRADALAVGGYKRSRGRERESESLSVSLFSRAATFSYEGPGPSFYRRKEKAQVEVESEPWGQARRRPSFGVEVESEPWGRARRRPSSGVEVESEPWGRARRSFLWRLRLDLAAVSLTLAGGTAVGAGIRCQTILALNAPAIWSVSGDDLAKVASPRSLPELGLGRVE

SEQ ID NO: 85375 - protein, 282 aa, Zea mays
  Coding DNA Sequence Number=SeqID_42000
MVTRDGDHQFDGGEKQAGMRPPPRPQLQGSSSSLLGQGRAEPELYLPYGPAGRLLLQQSEERALTGLAEGADFDNVGPIGRKRRQLQRAWFAGSAGSGTASGATSHRWAERGYLPVVRATVAPRAPGDHPRRRALLGRRSCSWAVPPSLRHDASARRSMLARPGGLEWGSTGGQVATAVGAEVVAAGEGLAADEIVGAICTPGLRHFGFDSLSSPLEWGRGRGPCRSSIFPEVIAAAVWPLGAEVIVAAAVVGDEPPGACRPAGPPMWGLFVPTGVEPEFHL

SEQ ID NO: 85376 - protein, 157 aa, Zea mays
  Coding DNA Sequence Number=SeqID_42001
MRSSSSSGAEPESEPWGRAMRSSSSSGAEPESEPWGRAKRSSSSSGAEPESEPWGRAMRSFQWRLRPDLAAVSLTLSSGTSSRSGAGGAVLLSGHFCIKCSCDTVGRRDDLAKVASWRRLGLGRAEAEIRSLEGTPNYGPRHFPNECHTCLMAKEKK

SEQ ID NO: 85377 - protein, 486 aa, Zea mays
  Coding DNA Sequence Number=SeqID_42002
MRRKDGGYPPSGGLEGGKTRCIREREDMVAFQGGHPPFKGDYPYSRPQPSRAESSPTRSKALPCGAGAGSHMSCKPAQSRRSQTAARGAHDRPAVTSDPPLLPRPTGERGGQPCRRHATAPSGRASPTPNTPSLEAQAHASCNWRTDCFVHATAPPLAPLPRLLDCGTNTATRGDPSARPSSASLAPRRSGRRFAFAIMTTPVKAPSLPTDQRFEGWPLEGFDSRLRSRGPYTHYWSEVRRPAPRRVPRSPQATRALCPLLIRGSKAGPRRVHNRLRRRARDDHGYVRYITKARAALPRLGGCSRKPGSGRTVDSVNIPARELRTRPYTRATASSHEGTTRPAEALREALRPRRSETTPPRPRGLHPAGALARTHRNKTQPRKAGPLAKKCDESLQASANTPFEARGLLSGTIIRGTLKTPNSQLGSDSGSASEDGELRSARPRARTRAKSRKTANSALPDQGLGLGLSPGRWRTPLRPTQGSDSG

SEQ ID NO: 85378 - protein, 87 aa, Zea mays
  Coding DNA Sequence Number=SeqID_42003
  Gene Ontology: Mol. function=ARF GTPase activator activity; Cellular component=Golgi apparatus; Biological process=regulation of ARF GTPase activity
  Homolog annotation: Hit_ID=Q5KQL0; Match level="QueryCoverage=73%, HitCoverage=16%, E-value=7e-30, Identity=93%"; Hit description =Putative zinc finger protein
  Pfam annotation: Domain name=ArfGap; Domain location=12-85; Score =41.9; E_value=2.3e-09; Accession=PF01412.9; Description=Putative GTPase activating protein for Arf
  Pfam annotation: Domain name=GATA; Domain location=27-60; Score=6.6; E_value=0.058; Accession=PF00320.18; Description=GATA zinc finger
  Pfam module annotation: Pfam domain module=ArfGap::GATA; Domain location=12-85::27-60
MAAAFDAYTDKNAVFRRLKAKPENKMCFDCNAKNPTWASVTYGIFLCLDCSAAHRSLGVHITFVRLTTPAPRFSGAPNDLLHQIFRS

SEQ ID NO: 85379 - protein, 216 aa, Zea mays
  Coding DNA Sequence Number=SeqID_42004
  Gene Ontology: Mol. function=nucleic acid binding; Cellular component= ribonucleoprotein complex; Biological process=ribosome biogenesis and assembly
  Homolog annotation: Hit_ID=A7PJ88; Match level="QueryCoverage=95%, HitCoverage=37%, E-value=2e-60, Identity=58%"; Hit description =Chromosome chr12 scaffold_18, whole genome shotgun sequence
MVDTKGADHQWDGNLFATVGAQVDIWDPDRSEPINSFEWGKDTVLSVRFDPGDSNILITSGRGFEGVAAGCCATVLRHNSTHGDRSLTLYDLRMSSPARKLIMKTRCNSVCWNPREPMNFTAANEDTNCYSFDARKLDEAKLFTKAMFQQSYISYPYEDHMGIEERMDIDYSPTGREFVTGSYDRTVRNFIYLGDTAERITHTQREGRVFFVLNYR

SEQ ID NO: 85380 - protein, 58 aa, Zea mays
  Coding DNA Sequence Number=SeqID_42005
MGNNPWGLVVHGIKIGIRIKVWYRSLEDMVAGVTWPSILPPGWTVEWDPTSAEEEHEE

SEQ ID NO: 85381 - protein, 39 aa, Zea mays
  Coding DNA Sequence Number=SeqID_42006
MANSTFRSGGIPGGTNSVTTSSPSGDTNLIVLLSQLITA

SEQ ID NO: 85382 - protein, 182 aa, Zea mays
  Coding DNA Sequence Number=SeqID_42007
  Homolog annotation: Hit_ID=A2XQP4; Match level="QueryCoverage=68%, HitCoverage=31%, E-value=2e-20, Identity=51%"; Hit description =Putative uncharacterized protein
  Pfam annotation: Domain name=F-box; Domain location=35-83; Score =16.9; E_value=0.076; Accession=PF00646.24; Description=F-box domain
MKLFDNSFHKQPLGCKRPLKGRDPIAATIMAEAAGGGPLLPEELIIWEILTRLPAKPLLRCRAVCLSWCRRLTSDAKFLLAHHRRQPSLPLLTEGDRSTEERRIDALDYRTGERRPIARTTGRTAANGDDLNVLASCEGLLILLANGGLQICNPATRQRAPLTLLHGAYCISALYPHIHESS

SEQ ID NO: 85383 - protein, 226 aa, Zea mays
  Coding DNA Sequence Number=SeqID_42008
MASCAPCSLVRGPRYGCGQHVLGAVARCPGAAAWRPDGLPARRARRPAPTSPGRAFPGTIVQRAAPAGRVPRRSDQGAAACALRGLAAGRRGMRCPVRHAQPSAAPERSSVQPSVALRAPARCLCPGVLRVAPIAIRFRASRDRRSRVGDQVIWFFEFYEAEDPEHLFAVLTVMSGQGNSIDLRNLIRNGWITGGDEDDVYDYGNGKEEGVEVDLQEFQDFDEFED

SEQ ID NO: 85384 - protein, 28 aa, Zea mays
  Coding DNA Sequence Number=SeqID_42009
MMPPSGVSTSSVITSEVEQVYIHLLLTD

SEQ ID NO: 85385 - protein, 97 aa, Zea mays
  Coding DNA Sequence Number=SeqID_42010
MTFTGLAEDLPRHHGSLEHDTLAGAAAWRPKGAGGDAPCARAEKPAQADTVTQASVPGVVHYSRDTANPIRVNIRADFEWGYFVGLVVGADAARLRT

SEQ ID NO: 85386 - protein, 120 aa, Zea mays
  Coding DNA Sequence Number=SeqID_42011
  Gene Ontology: Mol. function=solute:hydrogen antiporter activity; Cellular component=integral to membrane; Biological process =regulation of pH
  Homolog annotation: Hit_ID=Q2RBJ3; Match level="QueryCoverage=62%, HitCoverage=11%, E-value=7e-09, Identity=46%"; Hit description =Sodium/hydrogen exchanger family protein, expressed
MASDDNVNAFRHMEQQAAPRAAPEGQPHPAFLLPFDKSSDGARSMANNAIRSINRSVLHTAVRVLVRSVAILVDHGLASWSACATACSSGRRSTPRCRRRPRGAGVRGTDAGCRGHVADA

SEQ ID NO: 85387 - protein, 74 aa, Zea mays
  Coding DNA Sequence Number=SeqID_42012
  Gene Ontology: Mol. function=protein binding; Biological process =protein amino acid phosphorylation
  Homolog annotation: Hit_ID=Q2QXR6; Match level="QueryCoverage=52%, HitCoverage=7%, E-value=7e-12, Identity=79%"; Hit description =Leucine Rich Repeat family protein, expressed
MARLDEVVHVLDAGSGSEAARESAARVLCSSNFSKNWSTGDACTGRWAGVGCSADGHRVTSLTLPSLDLRGPLD

SEQ ID NO: 85388 - protein, 100 aa, Zea mays
  Coding DNA Sequence Number=SeqID_42013
MAASPGDIVPVASLSPALESVLGREEGGSGATRWRGGREREARPEAVACCSLCTGAAEARVEARADVAGARGRLCTGLSLSSTKASLLEPCYLTIPYGCK

SEQ ID NO: 85389 - protein, 72 aa, Zea mays
  Coding DNA Sequence Number=SeqID_42014
MDRCTPGRGGATGKGSRASLEIEVRSARRSTGARERSDAMEKMADRAGRGLAWGCSHVVGSRSRKKLAERVQ

SEQ ID NO: 85390 - protein, 102 aa, Zea mays
  Coding DNA Sequence Number=SeqID_42015
  Gene Ontology: Mol. function=signal transducer activity; Cellular component=nucleus; Biological process=regulation of transcription, DNA-dependent
  Homolog annotation: Hit_ID=Q5Z8K3; Match level="QueryCoverage=87%, HitCoverage=14%, E-value=1e-22, Identity=60%"; Hit description =Adagio-like protein 1
MEWDSESDGAGSVGVDEQEEEQEEERGGEGGGVDAGGMFTLAIEGMLRASGPCGLVVTNALEPDCPIIYANRGFEEATGYRVEEFLGRNWCNDCCHIESSKT

SEQ ID NO: 85391 - protein, 380 aa, Zea mays
  Coding DNA Sequence Number=SeqID_42016
  Subcellular localization annotation: CTP_CleavageSite=91; ConfidenceScore=5.77e-01
MSSPPDPTPPPDPNPSPSSTSHHSPSTVATPAPATTPLPCPLGFCASQVGRSKFQRWDDNASGSSSGGTVHSYKEALLSSSGATSQELDVNTSTVARPKLCDKERRLRRREVLVPVDKEDGWQVVKSRKQFRCASARRGTIAGPQKLKTPGRLRDLLDIKVSPLQRGTGSAAPPKKRSVWVRISPAPHTFDRKTDQPSPMLNNCAPAVDQRSFRNKRKRRSKSKRGKGPAEAAGTGACVDSPPSSSEAHYTQSRMECHNTSPPTVVGSRVLTFTDEMAREEINLRKAMFVTIAGTRPVVQGSEVLDEVARSFGVCIDKMSIHHSSPEDFLLFLPDEETASRIFNGGRLLVESLNMHGLAPLWKLFLRTHVILLRSILIPC

SEQ ID NO: 85392 - protein, 168 aa, Zea mays
  Coding DNA Sequence Number=SeqID_42017
  Pfam annotation: Domain name=zf-C2HC_plant; Domain location=91-144; Score=49.2; E_value=1.5e-11; Accession=PF07567.3; Description =Protein of unknown function, DUF1544
MTGKKTMTGKKTTTSLWRMRKRQAYLWRHSKESQVSYTIEMPCLSFGCDGNALFAILIVMEGGSVRGKGKEPYIGEGKIYGTRKQLQCSIDDPWSHGEKWKKQEFKCAYCGCAKESGGKTRLRCHLAGLSGDGKSCLNVPKRVRETKIMKDIPSSLQYMLMKDEAYEI

SEQ ID NO: 85393 - protein, 96 aa, Zea mays
  Coding DNA Sequence Number=SeqID_42018
MCHVTIQKQKEIAEAAAQQNQPKQTYGVQKVAEAQKAVSKAQISSKLQKSFYGTQRFLSKHKNSSLRSMKRREGVFSPKAQKRGSKGFRGEIIRLW

SEQ ID NO: 85394 - protein, 268 aa, Zea mays
  Coding DNA Sequence Number=SeqID_42019
MEAAAAAWCFGGWAAVRHGSCKGNSTGWLGQQAWCCAARCWPESRASSMGDGGLTCSSWGGRSGQRRAGARGGGAAARPHHGRASARQDRRAESTQGGGGAMGRRVELSHWHPVRWGRKLGKGAPWQGGGARREEEEGAGTGATAPWLAEGRSRPGRHGRKGGSSLRVGEEGVGEKRLMAAGKIIGVGMQNDQGQGRGIRIYREILGLGFLSGPNGLEWAWPKILYWAALNYFRNKNALAESVATEKQSEKSSDERKVERLIRSRVKF

SEQ ID NO: 85395 - protein, 337 aa, Zea mays
  Coding DNA Sequence Number=SeqID_42020
  Gene Ontology: Mol. function=double-stranded RNA binding; Cellular component=intracellular; Biological process=RNA interference, production of ta-siRNAs
  Homolog annotation: Hit_ID=A7NUL2; Match level="QueryCoverage=99%, HitCoverage=79%, E-value=6e-62, Identity=43%"; Hit description =Chromosome chr18 scaffold_1, whole genome shotgun sequence
  Pfam annotation: Domain name=dsrm; Domain location=7-73; Score=65.6; E_value=1.6e-16; Accession=PF00035.16; Description=Double-stranded RNA binding motif
  Pfam annotation: Domain name=dsrm; Domain location=94-158; Score =60.6; E_value=5.5e-15; Accession=PF00035.16; Description=Double -stranded RNA binding motif
  Pfam module annotation: Pfam domain module=dsrm::dsrm; Domain location=7-73::94-158
VENCYVFKSRLQEYAQRVGIPTPEYHTLKEGPSHEPVFKSTVFVNNTKYESLPGFFSRKAAEQSAAEVALMEIAMSAPVTEIRNMPAVQETGLCKNLLQEYAQKMNYAIPSYICTKQASGVAPFVCSVEIGGILYIGAAARTKKEAEIKAARTALLAIQSQSEGGANGAKKYIVVPGQRPDKETNKNPTETPIPLRVKKRGDRIVQLEPPRDPAEVQYNKEARSVEQDPPRDPAEVQHNKEARSVEQDPPRDPAEVQHNKEARTVEQDPPSNTEVWKPDNKATTTEQESVSAFIALRSNGDSTDVEAAPGDTLMMQGQESEATMQEASHAGEQAQPN

SEQ ID NO: 85396 - protein, 226 aa, Zea mays
  Coding DNA Sequence Number=SeqID_42021
MAKNKTDLKRKRLFRPRWVTIESLANHLRTSPQHRPTLFSPPDSFLTPVNSNGPLFRSLCKDDVRCAACVNQNIVDQKSLDDTRYNHGIIVRIIFELKIFLGEELEPPMIGSTSFLAKGATTWLLCEAIVTTVEGLCSLFLFKSVSSFVFSMSPCRSSFNRSFGLYLHATPAYVLSCRRYLRTRVKIVHDVKSMVETKADVAPKLCTRELRLNGGKRNRLKGEKAI

SEQ ID NO: 85397 - protein, 528 aa, Zea mays
  Coding DNA Sequence Number=SeqID_42022
  Gene Ontology: Mol. function=binding; Cellular component=TORC1 complex; Biological process=embryonic development ending in seed dormancy
  Homolog annotation: Hit_ID=Q6RUS5; Match level="QueryCoverage=97%, HitCoverage=41%, E-value=0.0, Identity=84%"; Hit description =Transducin/WD-40 repeat protein
  Pfam annotation: Domain name=HEAT; Domain location=288-325; Score =6.3; E_value=3.1; Accession=PF02985.13; Description=HEAT repeat
  Pfam annotation: Domain name=HEAT; Domain location=428-459; Score =13.9; E_value=0.23; Accession=PF02985.13; Description=HEAT repeat
  Pfam annotation: Domain name=HEAT; Domain location=474-509; Score =8.2; E_value=1.6; Accession=PF02985.13; Description=HEAT repeat
  Pfam module annotation: Pfam domain module=HEAT::HEAT::HEAT; Domain location=288-325::428-459::474-509
MVYQSLHQMSYTQYIPLSITDLDSWLKTPSIYVFDCSAAGIIVKAFLERLDWSSTSSASSQKDFILLAACEAHQTLPQSAEFPADVFTACLTTPIKMALHWFCKRTSLHGPLDRSLIDQIPGRQNDRKTLLGELNWIFTAITDTIAWNVLPRDLFQRLFRQDLLVAGLFRNFLLAERIMRSANCSPVSYPLLPPTHQHHMWDAWDMAAEICLSKLPQLIADPNTEFQPSPFFMEQLMAFEVWLDHGSKDKKPPELLPIVLQVLLSQPHRSRVLVLLGRFLDMGPWAVDLALSVGIFPCVLKLLQSSAMDIRQNLVFIWTKILSLDKSCQVELVKDGGHAYFIKFLDSLDAFQEQRAMAAFVIAVIVDGYRMGQEACMNAGLMDVCLRHLQPENSHAQTEPLLLQWLCLCLGKLWEDFPEAQLLGLQTNGPEIVICLLSEPQPEVRAAAVFALGNLLDTTSNSHDDGSDDDEKVKAEINVVRSLLQISSDGSPLVRSEVAIALTRFGVGSQQTSQSVASEYWKPHPIHC

SEQ ID NO: 85398 - protein, 112 aa, Zea mays
  Coding DNA Sequence Number=SeqID_42023
MGNWRVVVANRRQERVLGLGDDPTQQTMPSIYSGAKRWPIYSFKVDPIPLKFRLNSIEFKWGFLQIVLNLKVYFANPHTCESYELSGDRFPAGFPMGINSPTGTGTGEKAPP

SEQ ID NO: 85399 - protein, 88 aa, Zea mays
  Coding DNA Sequence Number=SeqID_42024
MVEGSPEKTTSPVPRTISLIEDEPLVGSTNRRHRDEALDDSNVAVPSDSTNDTQIKSNCLPELSPELEPSRTSASNFGSFGSRLGMGF

SEQ ID NO: 85400 - protein, 16 aa, Zea mays
  Coding DNA Sequence Number=SeqID_42025
MAKLVFLVQLQVRTIN

SEQ ID NO: 85401 - protein, 293 aa, Zea mays
  Coding DNA Sequence Number=SeqID_42026
MDLLSKSYPTKEKTLKGMLVIRESRARLSIVKTFCKIGIQRKVIKFKEGNAGIVLAFNSYHLMHQASEKVFKRIKEVANAPGLALVYRFPKFHRKRKWKSLNSAGLNSVAAAQTQVESARARARVADFARRPLAFWLTRSGFFHCCFESLTVFKKTPHVLFLHTPSSSTSTIAVALDLAEKCWRLERKRALVLGTDGFHRGSPPAITGHALYDSPGCGLALKHVARNGDRSTAVKVIPIDDEQGGCGELIRGQTQADPGTKIFTRSQLSTIHSARIPAIIMNHSATVIGGEVH

SEQ ID NO: 85402 - protein, 64 aa, Zea mays
  Coding DNA Sequence Number=SeqID_42027
MASLIVTQWRSYSSRVWSPFFRVSSSSELMLGTMDVLMIRNLGEDQQGLEKGQDIKEEKLGRSQ

SEQ ID NO: 85403 - protein, 227 aa, Zea mays
  Coding DNA Sequence Number=SeqID_42028
  Gene Ontology: Mol. function=nucleic acid binding; Cellular component= intracellular; Biological process=regulation of transcription, DNA -dependent
  Homolog annotation: Hit_ID=A2ZEH8; Match level="QueryCoverage=89%, HitCoverage=65%, E-value=1e-56, Identity=58%"; Hit description =Putative uncharacterized protein
  Pfam annotation: Domain name=zf-C2H2; Domain location=29-52; Score =13.7; E_value=0.37; Accession=PF00096.17; Description=Zinc finger, C2H2 type
  Pfam annotation: Domain name=zf-C2H2; Domain location=67-92; Score =10.7; E_value=0.79; Accession=PF00096.17; Description=Zinc finger, C2H2 type
  Pfam module annotation: Pfam domain module=zf-C2H2::zf-C2H2; Domain location=29-52::67-92
MTHQLEKNVVASTYCLEEFEDHYVTRHTASCSVCSRVYPTSRLLSIHVSETHDSYFQAKVARGFPMYECLVEGCGMKLKSYKSRQQHLIDKHQFPKSFEFFKKARDSQRQRQKSQRRQTAHKGEETRDNSMDVDGKGARQTNRRYRLKQHDHSEPKENKQQHKEAQEDEMEVEQKIDELTSAVSRLSTADSTPSSVTFGHRRSRGLTFVPRSIRQNKQAALPAGSNK

SEQ ID NO: 85404 - protein, 49 aa, Zea mays
  Coding DNA Sequence Number=SeqID_42029
MQKKPDDAMEEEAAAAPGPEIGFWLAARATRPETLLRCRELERELPAKH

SEQ ID NO: 85405 - protein, 61 aa, Zea mays
  Coding DNA Sequence Number=SeqID_42030
  Subcellular localization annotation: CTP_CleavageSite=18; ConfidenceScore=5.28e-01
MKLWKETSRSSKTMTSSRCGLAATPSRLPVKAAFIYVSFPHFDLLVAGKSLSSSRVKASAL

SEQ ID NO: 85406 - protein, 55 aa, Zea mays
  Coding DNA Sequence Number=SeqID_42031
MAMLVRGGGGSVRIRLGGGGEDEESVLGLVVVAVVVIIRGEVDAGAALEGGEEGR

SEQ ID NO: 85407 - protein, 23 aa, Zea mays
  Coding DNA Sequence Number=SeqID_42032
MALADNLAALLEPALLIITGGII

SEQ ID NO: 85408 - protein, 216 aa, Zea mays
  Coding DNA Sequence Number=SeqID_42033
TRRRPGGRGVSGRKKRTALLRTVGGGGRSASLEPELRRTKGAAEEEEQQDGGRLGFLRSAEGKVQTAPTPAPFYRQGRGSSGNPQSDRARRFGKPAIQQYAVHQRSHQKPPRNHFERGQRLRHLATPSALGDFVELVPRRANVGAKAKPPPFARGLRRSRWSDRDKAGRDTLRSIRHFDEGLRRRLSAARPRSVLRPTCDLAHCNGPCVAAFVLRA

SEQ ID NO: 85409 - protein, 332 aa, Zea mays
  Coding DNA Sequence Number=SeqID_42034
  Gene Ontology: Mol. function=homocysteine S-methyltransferase activity; Cellular component=cytoplasm; Biological process =methionine biosynthetic process
  Homolog annotation: Hit_ID=Q9FUM9; Match level="QueryCoverage=99%, HitCoverage=99%, E-value=1e-156, Identity=80%"; Hit description =Homocysteine S-methyltransferase 2
  Pfam annotation: Domain name=S-methyl_trans; Domain location=24-322; Score=290.5; E_value=3.3e-84; Accession=PF02574.7; Description =Homocysteine S-methyltransferase
MVGTAEGGAERAVRRWVDAAGGRLVLDGGLATELEANGADLNDPLWSAKCLLSSPHLIRKASPPARPRPSLRLPSLFVHMDYLEAGANIIITASYQATIQGFESKGFSKEQSENLLTKSVQIALEAREMFLKEHLEKSTPIQHPILVAAALGSYGAYLADGSEYSGDYGEAGTKEFLKDFHRRRLQVLAEAGPDLIAFETIPNKLEAQAYVELLEECNINIPSWLSFNSKDGVHVVSGDSLIECATIADKCAKVTDKPILIYPNSGERYDGEKKEWVESTGVSDGDFVSYVNEWCKDGAALIGGCCRTTPNTIRAIHRTLNQGCHKHQLPVA

SEQ ID NO: 85410 - protein, 152 aa, Zea mays
  Coding DNA Sequence Number=SeqID_42035
  Gene Ontology: Mol. function=protein binding; Cellular component =proteasome complex; Biological process=hyperosmotic response
  Homolog annotation: Hit_ID=O81694; Match level="QueryCoverage=78%, HitCoverage=28%, E-value=3e-51, Identity=84%"; Hit description=19S proteosome subunit 9
  Pfam annotation: Domain name=PCI; Domain location=12-118; Score=91.3; E_value=3e-24; Accession=PF01399.18; Description=PCI domain
MRGDIDQPITARDHRSMTTARYSQPSSVHHFETALRDYKAQLEEDPIVHRHLSSLYDTLLEQNLCRLIEPYSRVEIAHIAEMIELPMNHVEKKLSQMILDKKFAGTLDQGAGCLIIFEDSKTEEIFPATLETITNVGKVVDSLYMRSAKIMA

SEQ ID NO: 85411 - protein, 103 aa, Zea mays
  Coding DNA Sequence Number=SeqID_42036
  Subcellular localization annotation: CTP_CleavageSite=42; ConfidenceScore=5.20e-01
MQASKLESPLESRALTPWRRHCLSFAESFATTRSRSSGCFFSATRTGPPLPTRGDDLEQQDREERQGDTACSHGQDLQQPKVEPMTGGQMRAAVGGGRYICQE

SEQ ID NO: 85412 - protein, 69 aa, Zea mays
  Coding DNA Sequence Number=SeqID_42037
MEAGWLTLYDMILTDFANNEFPLGEGLISRSESGSRQCDEHREQPPCQCQGVGLSPTTWPVVNAQCTHL

SEQ ID NO: 85413 - protein, 100 aa, Zea mays
  Coding DNA Sequence Number=SeqID_42038
MAKLTKWLARLGSDWSGLATVAEALVAMAGRKELAEAKEWRLAGEDGHGVRFKILSKHNGLRLGLPLKCFSRHSRGLLVWLRVGLNYNSDLSFSKTSKVT

SEQ ID NO: 85414 - protein, 184 aa, Zea mays
  Coding DNA Sequence Number=SeqID_42039
  Subcellular localization annotation: CTP_CleavageSite=57; ConfidenceScore=5.16e-01
MATWADWRFGSKAQQRVEQEQKQRATCSTRSELARARPTPAPACPASRQSRAGAVARARARAYKTPRDFDRTPPRALDLTRAPDHRHCPAHGVPAATRTPATVDRPAEPLPAASDPQSRPCKPRPEHSPPTSSPACARGPADSDHHRRRAVPRFDRQNLPEPTPPLAGPPSLPRLKRIVVQRYN

SEQ ID NO: 85415 - protein, 210 aa, Zea mays
  Coding DNA Sequence Number=SeqID_42040
  Homolog annotation: Hit_ID=A2YGC2; Match level="QueryCoverage=60%, HitCoverage=56%, E-value=1e-09, Identity=32%"; Hit description =Putative uncharacterized protein
APPAPPQGVPAVGGVDGGDPDGDDDDGGSSSHNTTLFEEQHSHGLYPDRWEATCLVRRPEDDLRGVEVCSEHYSISERDTLEAAMHDAARLALSQYCLLFSGVADGLNLKYYPRRSTGSIGSWIVSPVGEGNPRLNSAVNLVAVLNIQLDHSLDELRRARVEIAELRVERHHQEYGSPAPAGTQHPYRSPPRGYRAYGTPDCRTKLDLDH

SEQ ID NO: 85416 - protein, 239 aa, Zea mays
  Coding DNA Sequence Number=SeqID_42041
  Homolog annotation: Hit_ID=A2YY02; Match level="QueryCoverage=88%, HitCoverage=47%, E-value=1e-30, Identity=71%"; Hit description =Putative uncharacterized protein
  Subcellular localization annotation: CTP_CleavageSite=30; ConfidenceScore=5.39e-01
MALPKPRPPTPTASAATGTSSSRIDSPSLKAALAMALIHYNRLPGKANATAGTSPPSLLHWKRKAKDRKREILRLREELKVLQGVVEIEFVIGADGVRGEEMEPPVASCRCHFFDGCRDLRPQQGGGGGEHWVDEVLRRRFLRLDFNSEDEMQQLSMSTDFLVELSDGIFAKSEAGHSFATFSHQAVDFILATLKNILSSEREKDLVGEIIDSLVTRLMKRMCTVPEKLVTSDSDTRIG

SEQ ID NO: 85417 - protein, 275 aa, Zea mays
  Coding DNA Sequence Number=SeqID_42042
  Subcellular localization annotation: CTP_CleavageSite=33; ConfidenceScore=5.29e-01
MADPAASSTVLAITAALLGLRRKLCLDCSRRVAATALQRHFSLKALSRSPSTWVVVGNAEAFRHFAWLGGVWVFVAPGIYLPPVLGAVVPDSSVKNRSSLAWELERGVDRIRAPIREIAQIAKTLPFAPGLQALVNLAAPTEVKRPVLGFGPAHATATDNAIFVAASTVAAGDDSFGSEESSDEDLDYFAALDVAAGETSPRVVGAEDLTGARTGCRRRRAVAKRRVSKLSRSDRHHRGEMEGGCLRVDGTGKRELRIMLFNYREMCIIPKVEPM

SEQ ID NO: 85418 - protein, 67 aa, Zea mays
  Coding DNA Sequence Number=SeqID_42043
MTNGQVERANGSDIGMGRSSTLGVIFTLDRIWPGLRRRHGRKDLHLKGGSQRRAWDLDDHVKPLDLG

SEQ ID NO: 85419 - protein, 121 aa, Zea mays
  Coding DNA Sequence Number=SeqID_42044
MALGQTLLLKGPRSCPLTGDENQPLKPKSRRPVAQVALTVSSAEAIAFARGSLTYGDHHPSTDDSDHLPTNNAPANGGCPKAQRQVLTPVLAEAVPEHEYHPRGVRRVVRPPGAADGTRRT

SEQ ID NO: 85420 - protein, 45 aa, Zea mays
  Coding DNA Sequence Number=SeqID_42045
MAKDCTLIITQERDFAQFVAIVPDDEDILHYYPLAKTQLAQLAQL

SEQ ID NO: 85421 - protein, 102 aa, Zea mays
  Coding DNA Sequence Number=SeqID_42046
  Subcellular localization annotation: CTP_CleavageSite=29; ConfidenceScore=5.36e-01
MAVLSRHALVYAWYLFSSSRARTQSPSMRSLEVGSSTSGVGVGLARGDPCFSSCGIIASNPYIKRKGYYGYSSGLDPLGEVFNDDEGEFEIALGCRQWSDDI

SEQ ID NO: 85422 - protein, 294 aa, Zea mays
  Coding DNA Sequence Number=SeqID_42047
DNSIKGLTSVLSVEQVLNAKLTGFNTKTTDQAKDGGKKSFEVPSAREKVKETRNPKPGVKKKTCKVKVDRVKKSCESNIDLKQAKLGKTMKKRKYHSELCWRTNRKARRRTRKMEGWELPNEAPTAPRPFGAIKGTPRRLKQEYKCIQQLSEQMEEGVEIDSKPRELSPPRSASRNLVGKRFLRGSEVLHGDCKPPSQNERLGAPSQSPSFGLVEGQLSSEEIFQVRGLPVLVWSNLILLSLDAHGLTLGGRGYLGLGRGPLGFGRVVDFDGWLIYVPGEDVRGNCRSPRGYFS

SEQ ID NO: 85423 - protein, 86 aa, Zea mays
  Coding DNA Sequence Number=SeqID_42048
  Subcellular localization annotation: CTP_CleavageSite=71; ConfidenceScore=5.80e-01
MKSLFKIKIWWSHRSNDPTSTAGQSQQTSGPPTASSPSGTVPATALSVSTPASSSPPPTVATLTGAAAAVVAGAGEEDYISSSEDF

SEQ ID NO: 85424 - protein, 57 aa, Zea mays
  Coding DNA Sequence Number=SeqID_42049
MEHADLSNRQMLEEMRLMEARLAEKFVGRCDAVEKCVEEWCMICNHSSRGGAIRSRS

SEQ ID NO: 85425 - protein, 67 aa, Zea mays
  Coding DNA Sequence Number=SeqID_42050
MGFVPLLAQGAGRRSEPALVLAGGLPRARWWGRSRDEGDAEGEVARRRHAGVEASLRVHERKEDVQR

SEQ ID NO: 85426 - protein, 126 aa, Zea mays
  Coding DNA Sequence Number=SeqID_42051
MTTSLVVGRSKPGCRLCPALSFKDVHHPHCGEGQAEPVFYLPHGPASRFFLRHLGGEGHPPALRRRHPPATRGKANCCCLDRVQLSVLHPGDGRVVRGPATPSEDGSEDLSVRFGATAVRRRGVGG

SEQ ID NO: 85427 - protein, 86 aa, Zea mays
  Coding DNA Sequence Number=SeqID_42052
MPTDTTLDNENSNGPHDSIYVESHKLTLCKEGAFVECLPSWHSAKGTPMGPFASLVIERAGPALGKGSFLPSARTTTLDKEAVSVL

SEQ ID NO: 85428 - protein, 184 aa, Zea mays
  Coding DNA Sequence Number=SeqID_42053
  Gene Ontology: Mol. function=zinc ion binding; Cellular component =COPII vesicle coat; Biological process=ER to Golgi vesicle-mediated transport
  Homolog annotation: Hit_ID=A7QQS7; Match level="QueryCoverage=83%, HitCoverage=20%, E-value=1e-64, Identity=73%"; Hit description =Chromosome undetermined scaffold_144, whole genome shotgun sequence
  Pfam annotation: Domain name=Sec23_BS; Domain location=41-146; Score =176.3; E_value=7.9e-50; Accession=PF08033.3; Description=Sec23Sec24 beta-sandwich domain
MKVAIERTGGLVVLSESFGHSVFKDSFKRIFEGGEQSLGLSFNGIIEINCSKDIKVQGIIGPCTSLEKKGAMCSDTVVGQGNTSAWKMCGLDRNTSLTVFFDVSPSERSSQPGNQNPHLYIQFVTSYQHPEGQMRIRVTTICRKWVDGSTNTEFHLKAAKSRSRGAFSFALQESRLLEKADESS

SEQ ID NO: 85429 - protein, 84 aa, Zea mays
  Coding DNA Sequence Number=SeqID_42054
  Pfam annotation: Domain name=zf-CCHC; Domain location=48-65; Score =28.6; E_value=2.3e-05; Accession=PF00098.14; Description=Zinc knuckle
MKKKKIMIMKKIDDQPSTSSSKVEEMVRRVGKVEDHLFNIDKEKQRKRGCFTCGEKGHFQVNCPNMIEPKKRRSKGKALTMIKT

SEQ ID NO: 85430 - protein, 28 aa, Zea mays
  Coding DNA Sequence Number=SeqID_42055
MGHGEDGLMTDVVPLGDPRIGTDRVSLY

SEQ ID NO: 85431 - protein, 117 aa, Zea mays
  Coding DNA Sequence Number=SeqID_42056
  Subcellular localization annotation: CTP_CleavageSite=60; ConfidenceScore=5.56e-01
MARPHPRPRKVVSASPDPRARPQPHPRKVVSASPDPRARPQPRPREESRPRPTSTSGGVSASPDLGLGPTMPRGVHHYPTPSYLRLRGNKTGVPSRLAPVTRLKCSSDGHDTTYTGL

SEQ ID NO: 85432 - protein, 250 aa, Zea mays
  Coding DNA Sequence Number=SeqID_42057
MASPSSVLSLVLFLFLDTSCQSSKDDEPCTYLEVVLTSSMDERSHDSGRRKWAARRPTAYSPCHPEEEAQPHNRHHVVGYLLTRRRRSTSPRSATLTNSSSPWLRIRILRSAGVDTEVWIECGFQQCFVKTTFVYVAAIPLKCCPWPKTAVAQINSTVVNLVSGSAARRIGSPCQRLDHGFPPTDCSFASSPDLDSGRPNQLHRRQPRIRLGGPADWISVSSAPRPRVSSDGLQLRLVSGPRQRQLSAGF

SEQ ID NO: 85433 - protein, 105 aa, Zea mays
  Coding DNA Sequence Number=SeqID_42058
MDLQAKVQRQSIDREMDNEGNDKSEVSPAARVQCEGVVFTVTVGNEVAMVAMGGTARVLSSESYFDADTCTRHHFVDVQGKAEAMLFFVSVREDQSRIVSVRRFS

SEQ ID NO: 85434 - protein, 451 aa, Zea mays
  Coding DNA Sequence Number=SeqID_42059
  Homolog annotation: Hit_ID=A2YXL7; Match level="QueryCoverage=13%, HitCoverage=25%, E-value=5e-07, Identity=48%"; Hit description =Putative uncharacterized protein
MDNDKGEVSPAARVVQCEGVVFTATEGNEVARVTKGGAARVLSSESYFDADTCTRHHFVDVQGKTEAMLFFVSVREDLNRVVSVRSPRQADRAPSPTVRSHVVFFFIRCEYAIGRIVVRGYLSDLAAVELHPGHTVEFGVSRISSVRMQDMHQLGYFGNGVGRVSGAEEIPEPEGKIVVFEAFFTADLRLPVHRFVVEKRKVGSKIAQFGSCTFTPRTRKISAEVVELVPCARNKWGNWYDYWFYVAGGEVEDLPGLPTAVMCSHCYVAFPPFEVAEDDSDEGALRCAARMSSGRDLVEEFIGNGVWPLAHGCALGEVCPRQMPSLGEQQVRSPAFALDLCGRDPAAFVREVEDGAVRIVGRYVPRTEALRSWDICGSNVRLNRVFELNRLPYGGYPGDDAAVAIDRHGKKPVVVTEKGPSQEAAPATKKRKIGTAVGGTVKRPQSSGTQM

SEQ ID NO: 85435 - protein, 80 aa, Zea mays
  Coding DNA Sequence Number=SeqID_42060
MAQHRGAADVDFSTSWLVIYIYPLFLDSFIQTMRCALLCASRLTNQDKISLACKTDKFSSKNSENDRKVDQVVFRVTHKN

SEQ ID NO: 85436 - protein, 82 aa, Zea mays
  Coding DNA Sequence Number=SeqID_42061
  Subcellular localization annotation: CTP_CleavageSite=52; ConfidenceScore=5.62e-01
MARGGHAHLVATLFLFLLLVMPLATGASPLRQRRTSCRARLRQCQTHNTSCRARSSSSSRRRGTGTSPTLCRWTCVVPAGDS

SEQ ID NO: 85437 - protein, 926 aa, Zea mays
  Coding DNA Sequence Number=SeqID_42062
MPSSSSSADATPPAAASSEETLSSVMVEELRAGDSVEFGVSRMTSARIEDMQRLGYFGGGVALAPGTEEVPEPEGELVVFEAFFVAGLRLPAHQFVGEKRVVEGGVAQFGSCTFTPKTGKTTMPVVELVPCARNKWGNWNEFWFYVAEATVEGHEGLPVSEMCSHYYSAYPPFEVAEEDADEGALRCAAGQSSGRDLVEEFAAYGVWPLAHGWALGEVCPRQMPFHGGREVRSPAFALNLRNRDPAAFVRDAEDLAVRLVGRYVPRTEGQRSFDIRGSNERLNRVFELNQLPYEGYPGQDEADRRGKKPAVETGGDPALVAAVSSKKRKLGTAMGGLGVSDSFARELMRTCAAPGERMSSPELRESSARMLRVTGGCWPKNIPIPCAAEEDCFTSRMVHRWRVFPYGQNIGAVVWAVMDKDRQGAAQKRQATVRVHEARPKRQRGPAKAAAPGGGKPPLPAKVGASAPSKAPETTVGAGGSKLTKVVPPVSGVAEAAKAARTLPPPGKRVADFGTEINVEDYLGGSDEGPLALVVPGAAIATAAPTPKAGGETLGAGGEVSALALVRDEAGMATRRLKGATEALSRATEALSQPCLPRSRDFGRNTLTLSVRSRPPDSKCRKLAEKVAALEKEKADLRRQLAGERREANEAIAKEQAAQAEARLARAEGNIAKELAGELQRRLTALESRAEGAEAAMRAEAERTRTQLMTAYRELGVRTGDFEVPEREAGLRCLEWVQEELQELPTVLAGLMSFTSLVTCEAAMNALSREGCRHFEALDQADEDFGRDIFEVEDPVVKESAGALYDQMWGSYGREVVRARAEAARAQAERGERVDDFGALNSALPDPETTPAEAAEAAPGAPAPAAAGEGLPPKAAEGAPDAPAAAVPSAEDPAEVGAEAAAEASAEASAEASAEAPAAAGPSQVA

SEQ ID NO: 85438 - protein, 529 aa, Zea mays
  Coding DNA Sequence Number=SeqID_42063
  Subcellular localization annotation: CTP_CleavageSite=9; ConfidenceScore=5.02e-01
KSSAGAKAAASSAGKPPSSEPAKGRRLPSPPRTDEAAARVADFEIDIYVGDYLVGEFFFKLGLNQDHGAGSDVGQLAVVPTPVVATSPTVVVGAKVASQDPWSAFCASDVILSAAAAKDVVGSVSHQLRHVSQQLKHAADFADHVALGSFTSELVAEVERLRVHHADAVREKSAAESKSCRLTERLAAAEAEKGDLRRQLVEERRDANKAIADAQAAQADAKLARAEASLARQRAEELEARLGSLRNRVDKVEASTRAEEELGVLPTIVTGLMSFTSLVTCEGVVNALSHEGCGHFEVFDQSDEGFEREIFQVEVPVLKRSAGALFDRMWGPHGRETVWERSDRAMDQMAHDEEVEDLGDLDSTLPEGTLPEASGVELAPPSDAGEGPSATLAPTGAREDLTPAPAPASEDAPKAVVEPVAEDPTAAAGPLQVPTFGPAQATATGNTDFVAETSTVVPTDDSLFGSVSEYFESDGESESSFPWMEESSDEGLDYIVASDVAAAETSPRVEGAGDVPGAVVWGWSVTVSE

SEQ ID NO: 85439 - protein, 365 aa, Zea mays
  Coding DNA Sequence Number=SeqID_42064
  Gene Ontology: Mol. function=heat shock protein binding; Cellular component=endoplasmic reticulum membrane; Biological process=protein folding
  Homolog annotation: Hit_ID=Q5QMV0; Match level="QueryCoverage=20%, HitCoverage=18%, E-value=2e-23, Identity=78%"; Hit description =Putative Altered Response to Gravity
  Pfam annotation: Domain name=DnaJ; Domain location=263-314; Score =18.9; E_value=5.9e-05; Accession=PF00226.22; Description=DnaJ domain
MPVENVEGQREEDINDQAHPLYNYNEPPKLISKCDGVRILSNSSTEFLHRVSDFTTSFVGIGSMSPATLLYDVCDHYDIQSKGSVRYGMTELTQWWLNAFSLGNSGMAVQSQPNIQRNSMNRLRGLSFIMVYDKGKENIVADTFSQGGSLMAKYGDLAVQIDIPNSVVTNSYALDMLPIVTTHSPHGVVYSVQWGKFIRLHQFGKQCLVSEQAKEEQHVFGGFWHLFSVLQGVWEGLKSGFLEDFSIPEGCDFIMLLQCVAQDHLPRWKTLPPLAELWYCPDKNASNPEASKLFKEVAYSYSILSDPKKRRQYDNADFGALENEGMDMEIELSNLGTVNKCLQHFFANLVFLSRPHYFLLCWKRP

SEQ ID NO: 85440 - protein, 133 aa, Zea mays
  Coding DNA Sequence Number=SeqID_42065
MDPGTHMMVRTLQTTCINTSYAPQPRQIPVYPVVVKEVPADLPPIRVENVVNLEDSSEEQLPAPTPLAESLAFAAGSSTSALAFQAPAPGGDDPDDSGDDDDEDDDDEFFVQTNTSTRKLTTPSNEFKPESFG

SEQ ID NO: 85441 - protein, 68 aa, Zea mays
  Coding DNA Sequence Number=SeqID_42066
MVVAPWVRYLSQEYDPMLTWATSTYRSPSCPYFRYKQNMQRENPLALLKRVLRIVLERVRFVYRTVDF

SEQ ID NO: 85442 - protein, 56 aa, Zea mays
  Coding DNA Sequence Number=SeqID_42067
MIHLYPVGKDCAALQKSRINVDHESFLVMPLFKKAEGTSPHIWETEGSSNQAKELC

SEQ ID NO: 85443 - protein, 89 aa, Zea mays
  Coding DNA Sequence Number=SeqID_42068
  Subcellular localization annotation: CTP_CleavageSite=14; ConfidenceScore=5.02e-01
MPRSPTSPYSRAPSAELSRPLSRPVYATRQAPPPLTEDHHHSATIVEPTSCLFPRSSSSARSPHPRPYRWAQPVSPAQCNTPGVTGTKT

SEQ ID NO: 85444 - protein, 172 aa, Zea mays
  Coding DNA Sequence Number=SeqID_42069
  Pfam annotation: Domain name=zf-CCHC; Domain location=39-56; Score =26.6; E_value=9.2e-05; Accession=PF00098.14; Description=Zinc knuckle
MDHYRRPLPKGRVAAVFVLATFRLRVPQLIQKEDHAQLSTCFNCSQVGHYANACPVGNFGTPAQNKQQTLGKGYSIARVNQVTADATPDGADIALSEEFVGDNIRVLYLCLGKEWFPNDAIDNTGIREHRSLTLGIERSSSLKPASSDEKLRKKKYLIATNSELNGQSALYR

SEQ ID NO: 85445 - protein, 237 aa, Zea mays
  Coding DNA Sequence Number=SeqID_42070
MEHDVHFHSIAHCSARLNSMVNLAAMLNTELDHALDELGKVWVEVAELRAECAARRYLDGGSPAPIGIQHPYRSPPHGHFAYEQAQRCKACLAGTTGTPGGGSSAAAVATATPNDTSPFGPPGESLPHSPLPTRALPYGSAWSAADSHPCCDPVPSLHLGPTVWSQPLAIHFSHVLATGCMSSGPHMSPTRYNRVFVPTSPVIAGAITIVRSSSLQELVAKDPGVQQIEVAEQELIE

SEQ ID NO: 85446 - protein, 41 aa, Zea mays
  Coding DNA Sequence Number=SeqID_42071
MALALKFADEVMMLNSMDASPVIPPVIFLWKDVHVSLYFDE

SEQ ID NO: 85447 - protein, 116 aa, Zea mays
  Coding DNA Sequence Number=SeqID_42072
MECCYQVLIRSYQATLVNCNRQVEPVKDWMSDCLEKQKPARRRKYEKKTLDKLTDQPGNLIPLDIAEVPDLSVSGDNFDLAEDDPCDPTTMSKPEVPMQSLNQLPVVTDLADARSA

SEQ ID NO: 85448 - protein, 133 aa, Zea mays
  Coding DNA Sequence Number=SeqID_42073
MELAEWQYRKYCTSEAKKALVGITGRRISDETSSKWCQQAPVKISDFLNNRAKSYARFKEDCRRKTLDKLTDQPGNLIPLDIAEVPNLSVSGDNSDLVEDDPCDPTTTSKPEVPMQSLNQLTMVTDLADARLA

SEQ ID NO: 85449 - protein, 70 aa, Zea mays
  Coding DNA Sequence Number=SeqID_42074
MAYGQMVNTKKGGGIDLPPNRHTRRIFRQPQPQPDVMDPLQPPPARADPAFTTQMRIIQQMVDTMVDMHA

SEQ ID NO: 85450 - protein, 39 aa, Zea mays
  Coding DNA Sequence Number=SeqID_42075
MAGARAGSAELVGANDGVRTVGAVPGRPMGLALGPQPGP

SEQ ID NO: 85451 - protein, 88 aa, Zea mays
  Coding DNA Sequence Number=SeqID_42076
MSPSSEVEAESEPWGRARRSPSSEVEVESEPWVGRGGDRLPRLRLCPSPRVGQGGAILALNAPAIRSIGVAIWPRLLLCEDWASGEPK

SEQ ID NO: 85452 - protein, 327 aa, Zea mays
  Coding DNA Sequence Number=SeqID_42077
MNGGNHPRGGEPSFSQLLQGLQKGLEILLSLARGPVAPITASGGHHSLRKRREPPVVILEIKPPALPPFIRRRKDGRDVLLCPRQPQLEDAAIGPHRHANSSFPRRRGKKLRGEEMGPQVPVRGNPKISFANRREDGCLRDGVGTEIVQLHPVDVQNRPHKMACRHSEPPLVKRDEAQHIPRRRGRGGSARRGHPLRLRVTGERVKQTFSNKGLQIIRRDGGERPWVAQRNNGHPVGYHQAEEVAAERTRIGNTFGRQSRRRFTSAMMTASKKAGPSEGFNSRLRALGLRAHYWLAPEGFDSRLRARRARDDPRYVRYITKARAMLP

SEQ ID NO: 85453 - protein, 59 aa, Zea mays
  Coding DNA Sequence Number=SeqID_42078
RSATTPVQNKKQTPGSDNGFSIARVNQVSADATAEGADIALGEEQVVQEEQHNEEFDLI

SEQ ID NO: 85454 - protein, 141 aa, Zea mays
  Coding DNA Sequence Number=SeqID_42079
  Homolog annotation: Hit_ID=A2YXZ1; Match level="QueryCoverage=64%, HitCoverage=27%, E-value=2e-41, Identity=86%"; Hit description =Putative uncharacterized protein
ELRGFGFIQYFDPEDASDAKHGVSPTCARTPARPPSSPGPSASKEENEVHLIRLSPAESELVCDGVFYHPNEIWDLKSCPFDHRVFSTVYTSGEGFGASVWKIPELNGQSNSPQLEQLFELSGHTGKIRRWTPVSVGFWLL

SEQ ID NO: 85455 - protein, 264 aa, Zea mays
  Coding DNA Sequence Number=SeqID_42080
MDADRPGLWRGQSGPLARTVRTLAEHYHSIPFYKCGFGGLRKKLAGRFKSKRPRGNDDDYTPTTDSEAQSSAGGTESMDAEDFLHVHPDYPIDIQGWTYPKRRFSMAEYCSRRTVNQYALPSDTNIQFFHTQLQFDVFLGAPLVDTNFHKHQFMGQRTDFNEMAVKQFLATSEIDIAEESITWMTGFKRYSASFADFAAANSLNYGTISAGVDLYTEDNFEDFVQFYEPARLGIPRRFGNSRTQTSSCCHQQDCQSHHSSQEWR

SEQ ID NO: 85456 - protein, 91 aa, Zea mays
  Coding DNA Sequence Number=SeqID_42081
MNPAETKLKEKGIEQSSEGKEAASATRGNAGGQKKQRMMTVMKAIHKTPPPASVEKIVAFANVEVDTDAEAEETAPEAEYLGTTCQRLIEL

SEQ ID NO: 85457 - protein, 100 aa, Zea mays
  Coding DNA Sequence Number=SeqID_42082
MNFRHDRTIKDEGLNIESFVKELQATPCQEHGSDLTFFSSARNNYIMAKVKGYASHKLPKLPNEANDCPSFVPVHARPWGILAGIRPKVLATESQGANGA

SEQ ID NO: 85458 - protein, 98 aa, Zea mays
  Coding DNA Sequence Number=SeqID_42083
MASLAPRAKPPDARTAEQRPAWVILEDSSEELLSTPTPLAESLAIATRSSTSTPPTPTVQAPAPGGDDPDDSGNDDGEEDDNDGEDEEEQVNEEANYA

SEQ ID NO: 85459 - protein, 156 aa, Zea mays
  Coding DNA Sequence Number=SeqID_42084
MVHRVTRSTCSGGFTNSSERDYTIPVGLVLGSCSGKLHGLLGKLSEGSDQVEVARKGLAMVVALEWLWQVARRSPELRASSEGLGVVRGRQRGRWPCPRVGFIAVREHGTGVGMGVAEGARGGERAGVLCRVPECLPTSNTWWFTSVSVQRLVWSP

SEQ ID NO: 85460 - protein, 64 aa, Zea mays
  Coding DNA Sequence Number=SeqID_42085
MAKPGHTTPLGPLLRKQQPTRPSIPVAGMEAKSYHQPKQGGTMDQRASLAGRERRSNPVYLPGT

SEQ ID NO: 85461 - protein, 47 aa, Zea mays
  Coding DNA Sequence Number=SeqID_42086
GGSRVDIAVIAVRREILATALYSLHCFLLPLDLFHAARIEKRRSKLD

SEQ ID NO: 85462 - protein, 178 aa, Zea mays
  Coding DNA Sequence Number=SeqID_42087
  Gene Ontology: Mol. function=DNA binding; Cellular component=nucleus; Biological process=regulation of transcription
  Homolog annotation: Hit_ID=Q5F4H1; Match level="QueryCoverage=18%, HitCoverage=8%, E-value=4e-10, Identity=84%"; Hit description =Putative uncharacterized protein nam2
  Pfam annotation: Domain name=NAM; Domain location=2-65; Score=-59.5; E_value=0.062; Accession=PF02365.6; Description=No apical meristem (NAM) protein
MGVEWYFYCLRDRKYPVVLCTNRATAVGYWKITGKDYVGELQRGGDAENPNVTGGDMLPDEVQVNLHMLRALMLHGIGGEVDCADVIAVDEGGALEGTVELMEELSQPGGLCHAVGHSAVLGLSTGARDDGLPLGGLGDEPHLLDDVGNVRSREGEVLERAGQAPVGHRIGNRGPVVL

SEQ ID NO: 85463 - protein, 44 aa, Zea mays
  Coding DNA Sequence Number=SeqID_42088
MARAAIWVPYVVAGGIQDEQPTVETEVQQVEIAEQELVEGKLCP

SEQ ID NO: 85464 - protein, 61 aa, Zea mays
  Coding DNA Sequence Number=SeqID_42089
MEINHDRFCLSDMLKWFIQEVELHVDDEVMMLSSMDANVVIPPVIFLWMDVHVSLYFDEKG

SEQ ID NO: 85465 - protein, 116 aa, Zea mays
  Coding DNA Sequence Number=SeqID_42090
  Homolog annotation: Hit_ID=Q8SA86; Match level="QueryCoverage=93%, HitCoverage=14%, E-value=2e-07, Identity=28%"; Hit description =Putative retrotransposon protein
MEELGFFTRLISGSELNEKEVFELESKGKALGYGPGALLFGGEDRMLIFSDIEEKHYQVKKRKLSHNLAYTSIKGLMLSKALRMQQEKEKKKLSTLQDEVAELRKFLEEKMQRYHL

SEQ ID NO: 85466 - protein, 208 aa, Zea mays
  Coding DNA Sequence Number=SeqID_42091
MMTALKKGYPPTLLNTASNHHQHKLQRLMGTIQGQGFVWSRDAILPHPSPASGGNNSPRRILASPEGLFKQRTHPRLARTPARAGFVVKQPWPNRLTNRPYRRRIQCEDRLTPYPDTHASVGKVEEEVFASPDPKARPPPRPRKMISASPDPRARPQPRPRKVVSASPDLRARPRPREESRPRPTPASGSGGVSASPDLGLGPTTPRG

SEQ ID NO: 85467 - protein, 166 aa, Zea mays
  Coding DNA Sequence Number=SeqID_42092
  Homolog annotation: Hit_ID=A2Z1U9; Match level="QueryCoverage=46%, HitCoverage=20%, E-value=5e-36, Identity=92%"; Hit description =Putative uncharacterized protein
  Subcellular localization annotation: CTP_CleavageSite=41; ConfidenceScore=5.19e-01
CRGDPRAAGAGTGLPLPGRGAARGPARAPPLPRTCGPSLKRAATREESEQASAESGGGKRRKGAGVVVVRPFALLKPDGLDGGATLADINARVLMRPARPVRHPVGEFACAPRVSADQPGISGKAVAGFTRLHTPGRGSITIIRTRGYRRAGAGSGDSTSESRFRV

SEQ ID NO: 85468 - protein, 136 aa, Zea mays
  Coding DNA Sequence Number=SeqID_42093
MRDVHKRSSEQEKPTSVMYLYQLKKVEMKMHSSWFNKRKQNTIYRIFEENEACASFVYREEVGAVDDTSDEISLSFQLSRCRDRACNFSSKVPLSSYFKPKEWIQKAAFSKSRVCRSGKLKGFNDPESIYRRKFND

SEQ ID NO: 85469 - protein, 171 aa, Zea mays
  Coding DNA Sequence Number=SeqID_42094
  Homolog annotation: Hit_ID=A2X003; Match level="QueryCoverage=46%, HitCoverage=3%, E-value=3e-20, Identity=61%"; Hit description =Putative uncharacterized protein
MNKPPEMISGNMKVGLHGWYIPEIIVAEGSRKKFKEIQFQKLQRLLDGCHPDFDNDHLCFVNNHDLLLEMSTPSADLHLLPETGVENIRTPKSLHAELKRELSKLNTVLKLQDNVLFLANQFIEYLLHNHLVVREPRSILHAFNIALCWRAASFLKYTELDHRESVALASD

SEQ ID NO: 85470 - protein, 191 aa, Zea mays
  Coding DNA Sequence Number=SeqID_42095
  Gene Ontology: Mol. function=sequence-specific DNA binding; Cellular component=nucleus; Biological process=regulation of transcription, DNA-dependent
  Homolog annotation: Hit_ID=Q6YPD0; Match level="QueryCoverage=62%, HitCoverage=33%, E-value=6e-43, Identity=76%"; Hit description =Putative homeobox-leucine zipper protein
  Pfam annotation: Domain name=HALZ; Domain location=92-137; Score =66.6; E_value=8.5e-17; Accession=PF02183.9; Description=Homeobox associated leucine zipper
  Pfam annotation: Domain name=Homeobox; Domain location=37-91; Score =54.8; E_value=3e-13; Accession=PF00046.20; Description=Homeobox domain
  Pfam module annotation: Pfam domain module=HALZ::Homeobox; Domain location=92-137::37-91
MDISAQGQGQGQDQAAPAADRACSRASDEDDGGSARKKLRLSKEQSAFLEESFKVRATPNPKQKLALARQLNLRARQVEVWFQNRRARTKLKQTEVDCEHLKRCCETLTGENRRLHKELAELRALKAVRPLLHMHLPATTLSMCPSCERVASTSSAAPAAPAPASPSPAAGAGIAASAPDPDQRPSSSFAA

SEQ ID NO: 85471 - protein, 68 aa, Zea mays
  Coding DNA Sequence Number=SeqID_42096
MAGLRTLGRRRSGSERKEAYIIDDSPLRIDLVSGFMQTSIKYYTSTVIGVLHINMIRIRVVYDILRII

SEQ ID NO: 85472 - protein, 261 aa, Zea mays
  Coding DNA Sequence Number=SeqID_42097
LVNSRVERSMTARRAQLVMAMLGMDICHFILYLIALPESSALPLEKHSAKTLSSVALDKEISANSTSAMTSLSSTFYRALGKVGTRQRKMAVTAPGDGGGDFAELLLTIVNSRVERSMTARRAQLVMAMRNAHARWGWHTPAITAYLINNANDFSDRSYRSVPRHVYGPGHVHFGWNYGRQRKSEDGVGDGEQGRAHSIPMAVLADQGPGPGDPGRACRDAGQGRRRERIVVRRLAGGERDARLHCPVYGYGDSLGDGDFN

SEQ ID NO: 85473 - protein, 137 aa, Zea mays
  Coding DNA Sequence Number=SeqID_42098
MTPEATRPTKKTHWTSWKRLGTWPYYTRRESGIARGRSCTLGFVSTLGEIRPDLGRRRKWEDFHLKGGRQHRAWARGGRVKPLNFGQGSFIFVRKAVPLADLLQIHIVVGSEYSEGPPNAVMQRLAESTTRVITQGL

SEQ ID NO: 85474 - protein, 159 aa, Zea mays
  Coding DNA Sequence Number=SeqID_42099
  Homolog annotation: Hit_ID=Q7XBD1; Match level="QueryCoverage=42%, HitCoverage=17%, E-value=1e-08, Identity=51%"; Hit description =Putative retrotransposon protein
MEEGVEIDSKPRFFKTGTSIPLQPSRRVFHSTAIQPSSRGKKIKVLTHRPRYIETARVPKLVEGTSSTAEPGRLAHAGSKEESAEVLEIIGRLPKLLQLGAGPSVPIETEPVGTGQSIEQGPSDVGLVLEKEDAPKKVESPTLEASTEELDFYYSTRFG

SEQ ID NO: 85475 - protein, 246 aa, Zea mays
  Coding DNA Sequence Number=SeqID_42100
  Gene Ontology: Mol. function=transcription regulator activity; Cellular component=nucleus; Biological process=transcription
  Homolog annotation: Hit_ID=Q5Z677; Match level="QueryCoverage=81%, HitCoverage=58%, E-value=3e-19, Identity=35%"; Hit description =Putative uncharacterized protein P0532H03.17
  Pfam annotation: Domain name=TFIIS; Domain location=48-124; Score= -9.7; E_value=0.067; Accession=PF08711.2; Description=Transcription factor S-II (TFIIS)
MAEKSPLRRWKRFFSAFGAIDAAIEAATHCSRDNHRQVRGDIVEILCDVTGNDSVERAEWLCQLLDEAMVEALETLRVVEATPTLLATTNVIEAVGDLWSHESGRVRGLACSIIDGWTTSINGKISRCRAIFEKLSQIDQEQEAVCVPVDTDLPVQRDKKQWLCAKKKMSPVAVGVAVGRIRSEQTGDAKRKFPGGYYREEDDQKRRRNNNVVRQVVDQRPRKTTSKRSERKRASYWKGASWLLDD

SEQ ID NO: 85476 - protein, 41 aa, Zea mays
  Coding DNA Sequence Number=SeqID_42101
MDAGSWEVEPPLALVPLLLGAPAEDREGGDPTLPRGLLPVT

SEQ ID NO: 85477 - protein, 269 aa, Zea mays
  Coding DNA Sequence Number=SeqID_42102
MSGIGLLISAEVKRPGRCFRWRQRRDTVDGSVLLTRRPTSKEYDSWARAAVLEAGSPWHASGEIFCGVLGRQWGNLSLKRDSPERGSHSHHSLRPFTLEFSALFCRRSRHGLARSTRASPARGGTQLGAQPAQMGCADIRRKDLCRRLSSQRSHRQRVHALCLQPPQRSGAADFIFLRAAAGGAWPPTSALHALLHPLGSHHRLPLQGVHGGDASSRFFLQHSEERMFTSLVKVDSGLSYGSIPRLSFNSMGVVEMAAMRFKLDPTDVE

SEQ ID NO: 85478 - protein, 396 aa, Zea mays
  Coding DNA Sequence Number=SeqID_42103
MAVRPFTRWSGRKWRNAWGGPWSVLEKTQPAMAEDATIVRLQGFLSGSPAASPRRWSPKTVTTSSWVGRSKPGCDLGPALNFKDLHHPCWGGGRAEPELYLPRGFVSQPLPQHSRERALTGLAGGSDSDNAGTIGGERRQLQLVGLAGSAGSGSAPGAPSRRKGGCRTARTGGPPKTSRAARAAFVFWGCPAFAPVRRLCAEVGASLVREDPSGDLPVGRRLLSSVLRWRRLEKSSSPTGSLPPSALRASGSLYLSSPLERRRGRGHYCSGVRPEAIAAAVRPPGAEVVVAAAGAGDDSPVSYLNRFTKCELPRAKVTSESGDPPTASPSEARSDLAEGVVDAEGAAAPFNCQGPSLQDRKVMSEVSVSRRRRSPSARSVLTAYVYSVVFRIPLSK

SEQ ID NO: 85479 - protein, 109 aa, Zea mays
  Coding DNA Sequence Number=SeqID_42104
MPKETAAGSSEGGLVYLKYSYRFKSARTRAESNDHVFDALWARQSTPDTCPACPASRQSPAGVMARARAYKAPRDFDRTPPHALDLTGAQNHRRLPVHGVPAAARSPPP

SEQ ID NO: 85480 - protein, 223 aa, Zea mays
  Coding DNA Sequence Number=SeqID_42105
QTRLGATISSKPDPIFPWNSHELGSPRRREEILHKPYGKIHTFGCSVGARTRAESNGHVFDALWARQSTPDARPACPASRQSPAGAMARARAYKAPRDLTVLLCTRSTSPEPKTTGVCPCTACPRPPDPRHRRPANRTIPDPVQPSEKTVHTSVKLPERGIGVCFAGKASPRSPDFAQPPVSVDRIVVVWPGTSAADETTRLRAWTGRFCHPRGRSHTPFVIA

SEQ ID NO: 85481 - protein, 59 aa, Zea mays
  Coding DNA Sequence Number=SeqID_42106
MAKVVARVLGVEGGRLSSPKNSYYIDTFVLFEGDDARAITIQCEQYGGIVHLFIGNRKG

SEQ ID NO: 85482 - protein, 143 aa, Zea mays; identical to SEQ ID NO: 76446
  Coding DNA Sequence Number=SeqID_42107
  Subcellular localization annotation: CTP_CleavageSite=36; ConfidenceScore=5.23e-01

SEQ ID NO: 85483 - protein, 143 aa, Zea mays
  Coding DNA Sequence Number=SeqID_42108
  Subcellular localization annotation: CTP_CleavageSite=70; ConfidenceScore=5.33e-01
MRAAALAQQPCAPAPTPAAMRAAAPDHARSSPPRDGSQRRQKRVPTGKSCAWGELGGRRERQAQGRVAVVADGGRRYDAQEGVVEAHVVLLGSLGRHHSDDGCKDYSEGTLLSKCKVPRTIRADMPSRQIYNRELTILLKRLQ

SEQ ID NO: 85484 - protein, 86 aa, Zea mays
  Coding DNA Sequence Number=SeqID_42109
MAEERREESIAAAGAEEEGGGRLWLRRGERRADRRLAEGVRVPRPALASAQESDLENAEGPRKAQDGLLMQKTSGSDDEHKKTNLQ

SEQ ID NO: 85485 - protein, 176 aa, Zea mays
  Coding DNA Sequence Number=SeqID_42110
MADRFQKIREEGKNFDPLILEDFDWDNEWVDPLDNSSHFSNALGDDFNLSWDQVDEAIGASAHLRGRNFPRRAVGGCVRRNEDLEEEETNLANEDDEDEEYILDDLDVEYEIEGSNSGKDGDDQGVDAHGLHIDEFDDGYWSCIKVVTYVVELVLLNLICFFLCYYAICFVNSTYV

SEQ ID NO: 85486 - protein, 298 aa, Zea mays
  Coding DNA Sequence Number=SeqID_42111
MGSTRVAFFLRVLEERDPVGVGALQTSPGFKDFHHAARLQSPADGRGASSSCAEEASSSHAGEGPPCAVGCTGGSHNTSYATRAVLVFWDGPVLVLVARTGVRTCRCALGRPLFAGAVLVGRWPLSSVLRWWQPEELVSADEIVGATCGWTSGSLALMACPRPSCGDVGEGLFTAASALRSSLLLFSRPRRRSLSLPVERSLVSHLEFVIPQALYGVGADGGGVSSNRGFVGPGAGGFLGRGGAAAAARAWPGRGPCGEPDHEGPSAVLASSFEVEILSPVSPSEAGPDSAEGGNDAE

SEQ ID NO: 85487 - protein, 45 aa, Zea mays
  Coding DNA Sequence Number=SeqID_42112
MGTNGHLDLDTGVYFKPSHRCIEREIGVFGEDKGFNFVTHPSPSL

SEQ ID NO: 85488 - protein, 36 aa, Zea mays
  Coding DNA Sequence Number=SeqID_42113
MKAMDLSKLVKEKRFLVASLLYGEQRCRCQRFNTNQ

SEQ ID NO: 85489 - protein, 219 aa, Zea mays
  Coding DNA Sequence Number=SeqID_42114
  Gene Ontology: Cellular component=mitochondrion
  Homolog annotation: Hit_ID=Q7XAM2; Match level="QueryCoverage=89%, HitCoverage=42%, E-value=2e-63, Identity=52%"; Hit description =Pentatricopeptide (PPR) repeat-containing protein-like protein
  Pfam annotation: Domain name=PPR; Domain location=115-149; Score =26.3; E_value=0.00011; Accession=PF01535.11; Description=PPR repeat
AAGRTFSTDLLNAAWSLLRKSLRQKRAPTPETYLAKIYAHSSIGQLQRAFGTLHEFENAYGNSKDVDLELFSPFTSLHPLVVACCKDGFSTLDLTGEACNVFQHVLTLGVKPNATTYSRLVDAHLANKDPKAALAIIDEMVDAGFTPSKDTLRKVRRRCSRESDFDSDEKVQSLAKQFNYRMGGENRREMLYSIEYNPAVSTEFAGRWESTDIVACKFT

SEQ ID NO: 85490 - protein, 74 aa, Zea mays
  Coding DNA Sequence Number=SeqID_42115
MNTKDPEPRAKLTAMNSADQFAYLGYLVTGGKEIVEAAALYSSHWREEASGSKEAATVMYTEESMGKTILDFLA

SEQ ID NO: 85491 - protein, 114 aa, Zea mays
  Coding DNA Sequence Number=SeqID_42116
  Gene Ontology: Mol. function=nucleotide binding; Cellular component =myosin complex; Biological process=keratinization
  Homolog annotation: Hit_ID=A2X5V9; Match level="QueryCoverage=40%, HitCoverage=3%, E-value=4e-20, Identity=100%"; Hit description =Putative uncharacterized protein
  Pfam annotation: Domain name=DIL; Domain location=6-107; Score=-3.1; E_value=0.0054; Accession=PF01843.10; Description=DIL domain
MQTRALSTASLAGFLDRTREEASRLLHGRHPRQWPHALVLLRGSPPHKLVLVPGDSLRGLLLVFGDRHVIFKKFRISYDEIVNDLCPVLSVQQLYKICTQYWDDKYNTESVSEE

SEQ ID NO: 85492 - protein, 144 aa, Zea mays
  Coding DNA Sequence Number=SeqID_42117
  Subcellular localization annotation: CTP_CleavageSite=51; ConfidenceScore=5.41e-01
MGRHRASRHARMSRRGQYPLRSSWLAPSSWYASPSPTLAPRLPVRVPSTVCASSAQWASQLLRRRAGVQAGHNCLSGVQADRHCLVGACARGAVVHSRGHVFVFSTAGDALLKLKAFASSGEFCVTTLFAWAPSTSGKRASSRP

SEQ ID NO: 85493 - protein, 87 aa, Zea mays
  Coding DNA Sequence Number=SeqID_42118
  Subcellular localization annotation: CTP_CleavageSite=49; ConfidenceScore=5.38e-01
MTKDFAMTIVLPPYDDMTSLRGSPSWLMSSRGRAAPGANAFFGGMTKVVARVVVEGGCLSSPKVGANVGHLFSNAVIEQQGNTIVKD

SEQ ID NO: 85494 - protein, 36 aa, Zea mays
  Coding DNA Sequence Number=SeqID_42119
MEKGRLRWRRDGPGEGRTRWWAGPCNRDRISGPKQA

SEQ ID NO: 85495 - protein, 356 aa, Zea mays
  Coding DNA Sequence Number=SeqID_42120
  Gene Ontology: Mol. function=nucleotide binding; Cellular component =myosin complex; Biological process=signal transduction
  Homolog annotation: Hit_ID=A2X5V9; Match level="QueryCoverage=96%, HitCoverage=30%, E-value=1e-117, Identity=84%"; Hit description =Putative uncharacterized protein
  Pfam annotation: Domain name=Myosin_N; Domain location=10-51; Score =30.6; E_value=5.6e-06; Accession=PF02736.10; Description=Myosin N -terminal SH3-like domain
  Pfam annotation: Domain name=Myosin_head; Domain location=64-356; Score=-68.3; E_value=2e-12; Accession=PF00063.12; Description=Myosin head (motor domain)
  Pfam module annotation: Pfam domain module=Myosin_N::Myosin_head; Domain location=10-51::64-356
MASKVRFTVGSQVWVEDAEVAWIDGLVEEVQGDELIINCTSGKKVTANVSSVYPKDAEAKRCGVEDMTRLAYLNEPGVLQNLKSRYGMNEIYSNPVLEAFGNAKTVRNNNSSRFGKFVEIQFDKNGKISGAAIRTYLLERSRVCQISDPERNYHCFYMLCNAPAEDRERYKLGDAASFHYLNQSSCIKLDAMDDASEYIITRRAMDIVGISSDEQDAIFRVVAAILHLGNVEFSEGSEADSSVPKDDKSQFHLRTAAELFMCDEKALEESLCKRVMVTRGESIVKNLDARAAALSRDALARIVYSRLFDWLVTKINTSIGQDLSSKLLIGVLDIYGFESFKTNRCLTDPRGSVKIP

SEQ ID NO: 85496 - protein, 89 aa, Zea mays
  Coding DNA Sequence Number=SeqID_42121
MAGSRVSRLSVHRQLGTIGIFNAEKGALKKMKSVWIPKRKLKSTASVWIPKSSSPIVPPLPVRVRLGPEEENYEQMLWLALPRLFYVKR

SEQ ID NO: 85497 - protein, 53 aa, Zea mays
  Coding DNA Sequence Number=SeqID_42122
MGPELVVGAAVAGNRATDATAAQSLELCRRRTGSIHCLRCFYFRSRCCQFRSR

SEQ ID NO: 85498 - protein, 140 aa, Zea mays
  Coding DNA Sequence Number=SeqID_42123
MAEAESGPWVGRGGDCRLRPGLSPSPGLGRGGPHSVEWHRSRSGAGDAVLSSGRSVERRSDCGHFGSVDWRARVRIRCQAILALNASAVRSVWRSGQGCFLAKTGPRASRRPLQLCADGGYQLRLGVLGVPLIMVPDNML

SEQ ID NO: 85499 - protein, 106 aa, Zea mays
  Coding DNA Sequence Number=SeqID_42124
MEAAAPKSMAEPRLLVRNCAHRGPNPRELRKNTVPPPRGGGQGDSLSRNEPRRLGADEVGRALYPAARPNLLLVLRIRPRITAAIPAESVLCGMVKTTYRPRYPTQ

SEQ ID NO: 85500 - protein, 195 aa, Zea mays
  Coding DNA Sequence Number=SeqID_42125
MTFFVFFGLPRLCGPGGLFFFCHLILVYHPQMLEEYVKSGEQISFLYPSCIQLNSLSTCLHSRMIVHHNVSSRLPLIHKEGPKDQCKLECELENASNGFKTSSLVFFTFTPFSKYFMTISNVSKQDNISSANHYVVYRLAVPSAAARTVRGSGPDDMRPGRRSGAFSASHQTVRSSGMDGPRPGDRIVFLLLVGI

SEQ ID NO: 85501 - protein, 91 aa, Zea mays
  Coding DNA Sequence Number=SeqID_42126
  Subcellular localization annotation: CTP_CleavageSite=84; ConfidenceScore=5.08e-01
MSKNTRDTRFIPRFGHTTKVPYFLVEAPTKSRVSFNPNPPFADHKGQAHTLIFAQTSGRENPSSTARRQVQLVYGQRGSQLKLSSAEVQPS

SEQ ID NO: 85502 - protein, 612 aa, Zea mays
  Coding DNA Sequence Number=SeqID_42127
  Gene Ontology: Mol. function=nucleotide binding; Cellular component =Golgi apparatus; Biological process=regulation of transcription, DNA- dependent
  Homolog annotation: Hit_ID=Q53WP4; Match level="QueryCoverage=85%, HitCoverage=69%, E-value=0.0, Identity=71%"; Hit description =Putative auxin-independent growth promoter
  Pfam annotation: Domain name=DUF246; Domain location=191-534; Score =652.0; E_value=4.9e-193; Accession=PF03138.5; Description=Plant protein family
MAAAATTSTATSCSSSSTSPGPHRRRQPNDIERDDDSCCGCGGGADHHFLHACAHDDAECDLHGHAAAATPCSGRALQLARRKRAWAVAGAPPRTAWMRGIVLCLLGLVAVIGFLGSHRGGGRTATSAGGAGTDDGGRLRVEVADADVMEWTEENLTALARRSPEPPIQLHFLNQDTLASGKNNASVGYLVVDANGGLNQMRMGISDMVAVAKIMNASLVIPTLDHQSFWTDPSDFKDIFDVDHFKESLKEDIVIVDSLPPHYRRVKPYVRAPTSWSRASFYRDFAKILRKFKVVRFTHTDSRIVNNGLAPSLQKLRCRANYEALQYRKEIEELGNTLVDRLRNESQHYIALHLRYEKDMLAFTGCNHNLTLDEAAELTDMRFKVRHWKEKDINSEERRLQGGCPMTPREAAVFLKAMGYPSATKIYIVAGEIYGAHSLDALRAEYPNIYTHYSLATVDELEPLELYQNRLAAVDYIVALQSDVFVYTYDGNMARAVQGHRRFEGFRKTINPDRLKFVELIDKLDEGSMSWTEFQTVVRKQHENRLGAEISGEGTGCAECEVRRQKSCVKARNADVQLEGDESTSVTQKRLSDSREQYGGTVHLFIGTGHNP

SEQ ID NO: 85503 - protein, 185 aa, Zea mays
  Coding DNA Sequence Number=SeqID_42128
MERINIWISPTQTHSRRQSSVAANQPWRNPLSAAACRHSQISGRWYKLARPVIGWAHRRAREGEGHKGKGQGPLGHSVELVEGVRFFNEHANPTCQPFNKSSPLVMRLHLARPAQSPFISKPKKHPQNPTLPSPDPVLLAPPSFARHPPPAGLPKPGGLRPELREEQPNQRPGASSLSGPAPGAV

SEQ ID NO: 85504 - protein, 532 aa, Zea mays
  Coding DNA Sequence Number=SeqID_42129
  Gene Ontology: Cellular component=integral to membrane
  Homolog annotation: Hit_ID=Q657I0; Match level="QueryCoverage=99%, HitCoverage=55%, E-value=1e-148, Identity=52%"; Hit description =Transmembrane domain, a coiled coil-4 domain, of eukaryotic origin (91.3 kD)-like protein
LRSFLECLLSGGTSTETADLTTSEANNQESSVQDGLDTTCAKENKGNDGVDNAAENSTQISESSDGGQLSLQDNKMGDSDAADANRSSASSTIVSEGKESILKHDCDSVQAPKLGASAANGPSSKSKRSYRVNILRCESLASLAPSTLERLLARDYDIVVSMIPLPSSSVLPCPSGLVHFGPPSYSSMTPWMKLALYTSGTCGPVSAVFMKGQRLRLLPEPLASCEKALIWSWDQSVPLSEHDLDETGSIVTIDVPLPLKNADGSIPSTVVGTDLPEDQVSSLILLLEDLSNRVELSTVGYLRLLRLHRANESSEHGSFEWVPLTIEFGIPLFSPQLCERICERVVESQMLQKDDIAEHYETMQNVRRRLRELCTEYQATGPTARLFNQRGGSKNNSPRKLVQIVSGRWSPFHDPSTPTHSSSPPAEHERAKPARRQRCFTEVLSFDGRILRSYALTPVYEAATRSVSEEQPTTPAAKPDHEDANTKDVALPGVNLIFDGTELHPFDIVACLQARQPLSLIAEASATSLAMK

SEQ ID NO: 85505 - protein, 312 aa, Zea mays
  Coding DNA Sequence Number=SeqID_42130
MAAESIKEAKGAKLNPGLGVHHLQAGHRSPPGEDRDHRTAPRALVGGTRGLRAHRQGSEARNVQAGQQSRRGLRQRLEHPTATSLLPLRCFQEPHGRVKVRVSGKAEPRDSYASGIRIPHSSPSARSNSRSHKHPYYRQKSPDTRNKRKRDAALQHNEGVFWPQRPQETHATRQSDPAGSGLDAGRGSSTLGINDTIGEGLLREPGPSRRLGRSPRGLGQPSSEGASPTRGFGWSTLASVPLTDDPARLRPTRFHFRANSAPVHADVATPGLGSSKSGRGVPLTKLEEPRTTRPTEPRDSYASGIRIPHSSP

SEQ ID NO: 85506 - protein, 105 aa, Zea mays
  Coding DNA Sequence Number=SeqID_42131
MSICFQDIENCGKPLFREIKLERNYLTRDKYSATSSTNHRLRKTCTKEQGKTIDRVRFRTGFVTRKAKQKHQLHIASLRTKSYAIQVLGLEVTTDSWSPAGPALG

SEQ ID NO: 85507 - protein, 155 aa, Zea mays
  Coding DNA Sequence Number=SeqID_42132
MMNKVQIKSKVLETGKDQFGKDLAWQPRLCAVWVHRTVSGGAPESVRCARLALANWLLSGFRRRRTAKIHWTVRCAPDCPERNPHRTVSGGALDCPVRQTTEGKNCLPGMLSMAPSYLGAIKGTPKRMEEDTKHSLSIPEHQDSNSAHSILCDSN

SEQ ID NO: 85508 - protein, 238 aa, Zea mays
  Coding DNA Sequence Number=SeqID_42133
MSNTRSSGYLQSTFRPQGVPGPTSKLSLCVPAQMGLCEMEHKGEKREPRLVLSCTQGRCACSRRLQAFAREGESLLVSPSSHAATFSYEGPGPSFYRCKERVQVYNGGVATSGEAVTSLRSRLSPSPRVGARRRPSSEVEAESEPWGRARQRPSSEVEAESEPLGSGEAETVFRGRGGGRAPGSGEAKLPMVPEAGLSYCQPHPGRWHSSRSRAGGAIFLSGQSVEGRSDCGHFGPAD

SEQ ID NO: 85509 - protein, 236 aa, Zea mays
  Coding DNA Sequence Number=SeqID_42134
  Homolog annotation: Hit_ID=Q6QP51; Match level="QueryCoverage=26%, HitCoverage=30%, E-value=3e-16, Identity=65%"; Hit description =Putative growth-regulating factor 1
MGPQIPVGVNPQKSFANRREDGRLHDGVGVEIVQLHPVEMQDRPHETACWHSEPPLMEGDETQHIPRRRGQGGPARRDHPLRLRVTREGTEQAIGDKGLQIVHRDGGERPRVARWNDDYPVGHRQAKGVAAEWTRDRERGYSERDPSSRRKRAPSPPNDLGFEGWPLGRVRQPPQSTRAPRPLLIRGSKAGPSEGFDGRLRALGLRAHYWSEVRRLAPRKGSTAASGHSGSAPTTD

SEQ ID NO: 85510 - protein, 46 aa, Zea mays
  Coding DNA Sequence Number=SeqID_42135
MGKNNKRKREPTPPSEEFGDSEYSEEEFSSESEGSLAPVPLRIAVE

SEQ ID NO: 85511 - protein, 240 aa, Zea mays
  Coding DNA Sequence Number=SeqID_42136
  Subcellular localization annotation: CTP_CleavageSite=36; ConfidenceScore=5.48e-01
MRQGVPFIAPRQLGAVGNKSGRPSLPSVSWRTGQSVAGEKPESGLFSRGSLAHRTLSGAPPDTVRTSFVLFDYFESGILKTTEYTPTEPRDSYASGIRIPHSSPSVKSSDLDGGGAAAPSASTTPSAKSDLASDDNTVGGSPLRRTTSAPRPGHRRQGLLQESGSSRQLGRPPRSLSQLSPEDISPARGLGNSTPASVPPVDSPARLRPTKSSFRANSTSVHTDTAAFGFGSSKSDRGII

SEQ ID NO: 85512 - protein, 280 aa, Zea mays
  Coding DNA Sequence Number=SeqID_42137
  Homolog annotation: Hit_ID=Q654G7; Match level="QueryCoverage=60%, HitCoverage=44%, E-value=3e-27, Identity=37%"; Hit description =Putative uncharacterized protein P0412C04.14-2
MEIHKRLAEDSSVQYGGRSSYYLRTQKLFNVWMRKLICLIANGKLQTEPILNLVHGLISFDKWYSGLPKDMQVEDFDVYDESCGIPMKSNGSAGTDLLVNSDEDSMNIDESSLATCSSESSINNENIDKKMNNKPGFLHPKEEMDPLESQGNENLRSIFLDTSDGPTCGGPSSVEGEGPSVVGGQLRLTLGLWFLRDFASRSSPHSHFPATKPEGNNHPSASPSLRLGMALSLRRSGVGQGGLWALPIRLCLKRSSPRWLLGATKFVGCLRGAKGPLVLS

SEQ ID NO: 85513 - protein, 110 aa, Zea mays
  Coding DNA Sequence Number=SeqID_42138
  Homolog annotation: Hit_ID=A2YB71; Match level="QueryCoverage=95%, HitCoverage=35%, E-value=2e-15, Identity=51%"; Hit description =Putative uncharacterized protein
MAAAASGGDTPKQLLSIIRDFAYEKSHGERRVSDLRRRLADARAAADVAAAELDAAKRAREAAEQEFRGSQVQDAIAADSILALEATISCLHEEISKASTDLDALKVRAS

SEQ ID NO: 85514 - protein, 102 aa, Zea mays
  Coding DNA Sequence Number=SeqID_42139
MALGDDVMDSDAWWSVNLRGELADREYALLLGLGVTRRKRNERRVSEPSIKDMNRLSHGVHDLHARRRPARPRSALPLAGRPQVERPQGDSDFGSYFPSGAQ

SEQ ID NO: 85515 - protein, 141 aa, Zea mays
  Coding DNA Sequence Number=SeqID_42140
  Subcellular localization annotation: CTP_CleavageSite=54; ConfidenceScore=5.15e-01
MARLARLAQSEKRQQGRDAHDRRDRLPTPTTGTPDSTPTRSVSHGRRPRETRPRGFSSGSTSTNHIKDGESRSFFNRKIELSYEIVICDLTFRRRENSVIMFGSLGSTKRIRCNLKILEERSKRGVAIGIIVENPELVPLE

SEQ ID NO: 85516 - protein, 139 aa, Zea mays
  Coding DNA Sequence Number=SeqID_42141
  Homolog annotation: Hit_ID=A3BA70; Match level="QueryCoverage=94%, HitCoverage=19%, E-value=2e-39, Identity=64%"; Hit description =Putative uncharacterized protein
MSHSIICTEGLEQSLLPLKLKFATGASNDCFDKYMKYKSVPNTLYEDAEKCLRLALYSNPPVMAALLPLIQILLLGDKLKVALNELEKACLSLATALPFRLRGRLVKDYDQKQVSTIFSFYEEVRRRDHTCTVSMERLI

SEQ ID NO: 85517 - protein, 348 aa, Zea mays
  Coding DNA Sequence Number=SeqID_42142
  Subcellular localization annotation: CTP_CleavageSite=30; ConfidenceScore=5.41e-01
MSSRSLMHRVFPPSKPPDGGYPPSFCLIVGGTQLRGSWYLSAIVRLQGFSSVSPAVPSRRRSPKTVTTSPWVGRSKPGCDLGPTLSFKDVHHPCWGGGRAKPELYLPRGFVGHPPLRRSRERALTGPAGGPDFDNVGLVDGGRRHPQRVELVGLAPGGPSCRKAAVAPCAREDRPRCRALLGGVRVLGWSCLCTGMAPPHGGRCPTRPAGFEWGSARGLMAPAVGAEAEAAREVPVADGITATIRASGLRLFVLVLAPRAAGGCEPLVSLLLLRRPTPIEWGYSPVGCLNRFTKRESPRVKVTSESGDPRTASPFEARSDLAEGVVDAEGVTAPFQRQDPSLQDQSVL

SEQ ID NO: 85518 - protein, 291 aa, Zea mays
  Coding DNA Sequence Number=SeqID_42143
MGRRETEREGGKPEGDRRKGETRDLRVCPAPRSGRVRALGSGEAEFVIFRGRGRVRTLGRARRRPSAEARAESEPWGRARRSSSSSGGEAESEPWGRARRSSSSFGAEAEPRVGRGGDRRLRPGLSPSPRSGEAEFVAFRSRGRVRALGSGEAEFPMAPEAGLGCCQPHSVEWHSSRSGAGGAVLSSGRSVERRSDCGHFGSVDWRARVRIRCQAILALNASAVRCGRSVWRSGQVCFLGEDWASGEPKVCPLLEGALGREACADGGYQLRLGVLGVPLIMVPDTVVAHFT

SEQ ID NO: 85519 - protein, 174 aa, Zea mays
  Coding DNA Sequence Number=SeqID_42144
  Homolog annotation: Hit_ID=Q6QP51; Match level="QueryCoverage=32%, HitCoverage=25%, E-value=1e-14, Identity=64%"; Hit description =Putative growth-regulating factor 1
MQAAYNRTKGAHPFDFNASSMEAQAHTSCNRRAGCYVQETVPPLAPLPCILDCGTSTTTRGNPAHDPTVPTRHIGHGAGGTFGRRSRRRFASTIMTASKKGPGKGIPRKGSFSAKETGPETPTDQRFKGWPLGRVQQPPQSTRAPRPLLVRGSKAGPSEGFNGRLRPLGLRAHY

SEQ ID NO: 85520 - protein, 363 aa, Zea mays
  Coding DNA Sequence Number=SeqID_42145
MDKYSQYLYYIDTFGLPEGENARVTQERLQFGVNNVDPREIDLAMRIAERMFLKMKEDEAKNKIEEENDLWRSNDESTSSQGSSFKSTSHMRFIANGSDSESESEDEEEQESDSEDEDDLQQFFAQLSKKHWMSLLKLMKRAEEQKEMLHKQENFLIRKIEDLEKLTKEHEKLKDSNSKLLTFRNSGGRSAIIHRTVRWRTGLSGVPAEQRLLRANGHLQKALNALQCAPESEQSQTARRTVYRTFLVHHRTVRCPRRQKLQRSESNSQVTWQAHRTLSGAPATSPGRWILTVEASVFWGTGQSGGAPDRSCRLSGALSGSALTLARTVAHLMPSTDDRWREVAVAMLAHRTVRCAIGQSGEL

SEQ ID NO: 85521 - protein, 281 aa, Zea mays
  Coding DNA Sequence Number=SeqID_42146
  Gene Ontology: Mol. function=peptidase activity
  Homolog annotation: Hit_ID=A2YB74; Match level="QueryCoverage=96%, HitCoverage=34%, E-value=7e-20, Identity=72%"; Hit description =Putative uncharacterized protein
MGPAPREPMKQRVNRCLLRLSDRDTEAMAAAELDAIARELDADELPVFVAAVSDARPTDRTPLRRHSLRLLALVAGEHPRDAVAPLVPRLLAAALRFFLGPGLLRARRARRRGPRRGGRRGVASRGAGPARRRRAPRAGPASEPTDDLAAYLRGLLPRLYKLLRSAAFKAKPALISLIGAASAASGGGAASAAVPCLRDALTADDWAARKAAAEALALLALEHGDDLVSHKSSCITVFEAKRFDKVKIVRESMNRLIEAWKEIPDLDEEVRFDRWEKHQAA

SEQ ID NO: 85522 - protein, 167 aa, Zea mays
  Coding DNA Sequence Number=SeqID_42147
  Homolog annotation: Hit_ID=Q654G8; Match level="QueryCoverage=97%, HitCoverage=23%, E-value=9e-54, Identity=66%"; Hit description =Putative uncharacterized protein P0412C04.14-1
MWSGGYYNTIQLLEAIALHLDSVNGKSCIWEELVSCFLRLFSDNTADYEDCISCTNTHGGESLEASSKFSSVFFEQFTRESWKARCRWWARHHFSQNAYTSEAQSGDCKLLAAKAACAAHLFGPEFPYVKAVGVYIAKQEALDEISVLVRNKQNSVRLLQTLEKLTR

SEQ ID NO: 85523 - protein, 39 aa, Zea mays
  Coding DNA Sequence Number=SeqID_42148
MPPWRPTHAPRASAAVALRPQRERQGAQAPQVCSPFLES

SEQ ID NO: 85524 - protein, 59 aa, Zea mays
  Coding DNA Sequence Number=SeqID_42149
MEVLTGMASARLGLASRGAGAMGEMLPRPVIEQFVQNQSKRGIVSKGHSVTQGKRVLCA

SEQ ID NO: 85525 - protein, 89 aa, Zea mays
  Coding DNA Sequence Number=SeqID_42150
  Homolog annotation: Hit_ID=A2XH93; Match level="QueryCoverage=67%, HitCoverage=21%, E-value=5e-14, Identity=63%"; Hit description =Putative uncharacterized protein
MEDGRVAALARDEQRLSSRVDEVMVGRSWQRENPGLYKDNDSRPSGNPGGKATDTKNPDGVGAGRREAASDELMLQRFRKREKFRALRR

SEQ ID NO: 85526 - protein, 195 aa, Zea mays
  Coding DNA Sequence Number=SeqID_42151
MEENDVCLTAIVDQDFVQVPACHAAVDNHGVDVGGAAQVDVSGPASAALCRSRCWTPSDHMNDSAIRLIGEVFLFWGVGVGDVLMLLVWRWGWGSLRHEKDSRIGAAAAHAPDPYREFRFRGPGGILLAARGISCGVLVGDVVHLLLIAAVSTGVWLRSPRPRAAGLWSIFGFPLRLDLALVELLRFGEASNSEI

SEQ ID NO: 85527 - protein, 158 aa, Zea mays
  Coding DNA Sequence Number=SeqID_42152
MGRHLARAYFAQRPAMRQRPHPVCHKLLNQIAPAAQAGGAPKGPFVRILLRHFKRRDFSHKSVRRQAKTSDKERLEHNQLAFRLGDLLRPRNTSNSAAKLQFKEHKEQLIQEAKAKFLANFKVDRNNKVVRQQATDLASLRPTMTTPEMNSENKCKIS

SEQ ID NO: 85528 - protein, 335 aa, Zea mays
  Coding DNA Sequence Number=SeqID_42153
  Homolog annotation: Hit_ID=Q6QP51; Match level="QueryCoverage=23%, HitCoverage=38%, E-value=4e-15, Identity=57%"; Hit description =Putative growth-regulating factor 1
MRAACDHTKGAHLFDSDASSVEAQAHTSCNRHAGYYVRETAPPLASVPRLLDCGTSAATRGNPAHGPIVPTGHVDHGSVSHGRRRDDRYGQKWADSNGGGRRAEAAVKSFGGSRPLLGQRESPLPRREDDAPVSRSSNGSCTHNSCPGPGKGILRKGSFSAKEAGPEPPTDQRFEGWPLGRVQQSPQSIRAPRPLLIRGSKAGPSEGFDSRLRALGLRAHHWLEVRRLAPRRGSTAASSHSGSAPTTDQGFVGWPPKGSTAASEHVERGMTLGTSDTWSRLGLRSRGTLGHFRDQQERFCNRIPSEGGIEPSDPIKRDRVRAITCRYFWSAPLGH

SEQ ID NO: 85529 - protein, 95 aa, Zea mays
  Coding DNA Sequence Number=SeqID_42154
MGSPGLRYWTTKARSVVAVGICYEVGGGVVSLWWVQGWEDTRILSPFSDQCLVQVFVVSFSGNEQGRTVRDQGSDSPRPGAGLRFSCLTVGQSVP

SEQ ID NO: 85530 - protein, 89 aa, Zea mays
  Coding DNA Sequence Number=SeqID_42155
  Homolog annotation: Hit_ID=Q2R482; Match level="QueryCoverage=56%, HitCoverage=5%, E-value=1e-14, Identity=76%"; Hit description=DNA replication licensing factor MCM2, putative, expressed
MDEHDQYESIGLDDSLEDERNLDETMADRRVVEVEPNARDVRTGVADDKKYAFKTSFSYCMILEKLSYLYSRLMILIELPNEYLIIPDE

SEQ ID NO: 85531 - protein, 65 aa, Zea mays
  Coding DNA Sequence Number=SeqID_42156
MATACTEPTLQCWWCRRCGFMDDGWMDQQLLFARRGGGLVSNITEEKNVLRASPTMPQTIGHPLK

SEQ ID NO: 85532 - protein, 335 aa, Zea mays
  Coding DNA Sequence Number=SeqID_42157
  Pfam annotation: Domain name=IQ; Domain location=102-122; Score=23.8; E_value=0.00063; Accession=PF00612.18; Description=IQ calmodulin -binding motif
  Pfam annotation: Domain name=IQ; Domain location=144-164; Score=27.0; E_value=7.2e-05; Accession=PF00612.18; Description=IQ calmodulin -binding motif
  Pfam module annotation: Pfam domain module=IQ::IQ; Domain location =102-122::144-164
  Subcellular localization annotation: CTP_CleavageSite=54; ConfidenceScore=5.04e-01
AATLEPSLRQRGITSPEKTAIPMDRRSMTPGISSRLSSPPPAAYPSPPPAAAQSAAATPSHPPSPTLDAFTRLKESFGRLTEKWDQFVVMFHRYKEKTEKELQAALRLQAAARGFLARRQVQSLRGEKHLAVASRATPWPSSHEQAVVRLQAAVRGFLVRRAVRKLHLLISSSLHQLAACAPNHQVSSILFEPSAEVEIWVCSPPARPKRVVSFIRTTALVLDKPNIRTGWFLLHLSSNVKSAVPLFPWDPGGHSCSSVGVSRQGVPKPTSECAACPSPDGSSAWASAKGGEARWPESSVREVEVPRPSCSSRAQVSRKERIQVYNGGCSRVLRV

SEQ ID NO: 85533 - protein, 176 aa, Zea mays
  Coding DNA Sequence Number=SeqID_42158
MEVCRQTSFCHNEDGFPKLLRACTVRLGIRSQPEYDGREFVEHGTKKCVVTVYIGSSPHHVEWSVTAAGHRFKDTCQVVARKALRALYQIYEEEVADTPLRFFPPFQRNRPVWMARIRALEGSRLRPLKGHDPASPEPSLGQRQPTWRIHVSPKGPLKQRTHLRLARGPGFAEKQP

SEQ ID NO: 85534 - protein, 52 aa, Zea mays
  Coding DNA Sequence Number=SeqID_42159
MTQEMTLEEYEKGSDKDLKKKESAEREERGNKGSDKDLKKKESAEREEQGKK

SEQ ID NO: 85535 - protein, 278 aa, Zea mays
  Coding DNA Sequence Number=SeqID_42160
  Gene Ontology: Mol. function=oxidoreductase activity, acting on the CH-CH group of donors; Cellular component=mitochondrial inner membrane; Biological process=tricarboxylic acid cycle
  Homolog annotation: Hit_ID=Q6ZDY8; Match level="QueryCoverage=47%, HitCoverage=26%, E-value=4e-46, Identity=59%"; Hit description =Succinate dehydrogenase [ubiquinone] flavoprotein subunit, mitochondrial precursor
  Pfam annotation: Domain name=FAD_binding_2; Domain location=1-263; Score=-127.2; E_value=0.0034; Accession=PF00890.15; Description=FAD binding domain
MALCLCAMVTGASGVLKFIFCKHHQHADSCLKQISLGLHYAESKPDFSPIGSALLYSGVTVEFGDQGEDSIILSPWLKEISTPDRPAALRFLGEKYNNLIERCRPLSSDEVNHGCLSVVEIDPSHETELQFVRVKKKGSPLSSITFLGQRMTKNLCPVLVVSPGSRGEGGILRNSEGPLKDHIYLHQNHLPPEVLKERLPGISETAAIFAGVDVTKEPIPVLPTVHYNMGGIPTNYHKEVVDIKGDNPDAVIPGLMAAGEVACAAPRWWMIDRPVVCD

SEQ ID NO: 85536 - protein, 119 aa, Zea mays
  Coding DNA Sequence Number=SeqID_42161
  Gene Ontology: Mol. function=nucleic acid binding; Cellular component= ribonucleoprotein complex; Biological process=mRNA metabolic process
  Homolog annotation: Hit_ID=A2WZS5; Match level="QueryCoverage=31%, HitCoverage=30%, E-value=7e-14, Identity=100%"; Hit description =Putative uncharacterized protein
MSRSLGIPVKLLHEAAGHVVTVELKTGEVYRGSMVECETLELPARKHHLHGKGRQGVAAGARLHQGEQGQGKGSAVGVGRGRAVAMRARAAAGRGGGPVGRGGAPPVRSFFENLAVERI

SEQ ID NO: 85537 - protein, 69 aa, Zea mays
  Coding DNA Sequence Number=SeqID_42162
MAPWLCCPSSSGMGKQEHPAREREGRAGPERHAMRKPNDGRSRARHGEEEGVLVLQFVLKVNPHILNIN

SEQ ID NO: 85538 - protein, 132 aa, Zea mays
  Coding DNA Sequence Number=SeqID_42163
MGVGKGRLEQERRKLLTPFRQQAEARADSSPEDFGDSEYLEEEFSSESEGSPVHATPPASFDDSDDSQGIAAEVWTYIRAVERAGLKGSDESEEGSDGDDGDDDGGDGDGDGNGDDKGGSGKGGSGSGKASG

SEQ ID NO: 85539 - protein, 123 aa, Zea mays
  Coding DNA Sequence Number=SeqID_42164
MAGSVREEQEAKHHLRVEKPVALYGVTRPRNIHPSRDIMGVITSLVAFGHLPITDELEFVGMVESGEDLIFDALCSNLESDDVSPTSSDGRRPSDGESKAHITLATPAQMEGAGVIGSTREMG

SEQ ID NO: 85540 - protein, 132 aa, Zea mays
  Coding DNA Sequence Number=SeqID_42165
MAECVVNPGACCVDPFISPGRYKVALVAVLPFLFALRAPVATPSSSSKKDAAAAPYPDLGVFRYQGGCLELPRVGANMVASTWEIGSHRRARNCSSSHFWTVDLHDEQATVDPEVQQIEVAEQELIEGKLCP

SEQ ID NO: 85541 - protein, 169 aa, Zea mays
  Coding DNA Sequence Number=SeqID_42166
  Homolog annotation: Hit_ID=Q5K2M9; Match level="QueryCoverage=80%, HitCoverage=25%, E-value=2e-52, Identity=62%"; Hit description=START domain-containing protein
  Pfam annotation: Domain name=DUF1336; Domain location=1-129; Score =97.3; E_value=4.8e-26; Accession=PF07059.3; Description=Protein of unknown function (DUF1336)
MELAAIDWFKDTKRMDNVARQKGCVAQVAAEKGMHTFIVNIQGSWLVRQSVGSTPCLLGKAVDCSYVRGPAYLEVDVDIGSSAVANGVLGLVFGVVTTLVVDMAFLIQANTYEELPEQVIGAARLAHVEPATAVVPDLSNTSNDSSNSNDDNSNNNIGSSEDDVSKKTN

SEQ ID NO: 85542 - protein, 411 aa, Zea mays
  Coding DNA Sequence Number=SeqID_42167
  Homolog annotation: Hit_ID=Q5K2M9; Match level="QueryCoverage=80%, HitCoverage=58%, E-value=1e-105, Identity=53%"; Hit description =START domain-containing protein
  Pfam annotation: Domain name=START; Domain location=47-265; Score= -29.2; E_value=0.016; Accession=PF01852.10; Description=START domain
MIYVLCIYNKKEKEHQITITNELNSQMGAYDIEDAMTWKKKIELIIDLQQDSITAKNRRAFASVDFDRELGGQFLFSDHDNTAEDDDERSTLTHRPTIGNGLFEAEVVTVLVLPGLRIFEELLEVDYLARSCSRAMKAVGVAEATCEAIFGLVMSMDVTRYELVWPRDLCYARYWRRNDDGSYVVLFRSIEHPNCGRQRGFVRAFIESGGFKISPLKCHNGRPRTQILNCVADEIHIIPRIHVMETMFDVDSKPKFHKLQEVETKENKNMGIIDEESDDDDDYQVPEANIETLTKTNIQEDPNTSDNDNKHTDVKGAPAREADSSARGCAGQGVPRPRQKRRGMSDPAGKATAATDPDGETRSSQRDGGSSREGRNNVDPAGKAAAATDPTNARKGRATGRFQPGRGLRRT

SEQ ID NO: 85543 - protein, 41 aa, Zea mays
  Coding DNA Sequence Number=SeqID_42168
MALLKVVDFGHPFCEPRLGNSSWRFALALELVDALLDGIGR

SEQ ID NO: 85544 - protein, 344 aa, Zea mays
  Coding DNA Sequence Number=SeqID_42169
  Gene Ontology: Mol. function=structural constituent of ribosome; Cellular component=ribonucleoprotein complex; Biological process =translation
  Homolog annotation: Hit_ID=A2WZS3; Match level="QueryCoverage=100%, HitCoverage=65%, E-value=1e-164, Identity=85%"; Hit description =Putative uncharacterized protein
  Pfam annotation: Domain name=Ribosomal_S5; Domain location=168-234; Score=51.4; E_value=3.1e-12; Accession=PF00333.11; Description =Ribosomal protein S5, N-terminal domain
  Pfam annotation: Domain name=Ribosomal_S5_C; Domain location=262-335; Score=17.5; E_value=7.6e-05; Accession=PF03719.6; Description =Ribosomal protein S5, C-terminal domain
  Pfam module annotation: Pfam domain module=Ribosomal_S5::Ribosomal_S5_ C; Domain location=168-234::262-335
MTKINNFEERHLKLPLEYRVIGDMMNRLKDATGKERFVLLQKLNRAVRIMEIKEAYDPSNPANFGIIQHQQVGSPEDVVLNAGFDKEKQMIQGAELEDVDEEFNDVKERDDILIDKLDAIEKKIEGKLELLDHTFGKKGRALEEEIKDLVEERNSLSEKSRRPMYRKGFDVKVIDVNRTCKVTKGGQIAKFTALLATGNYNGVVGFAKAKGPTAKIAIQRAYEKCFQNLHYMERYEDHTIAHAIQAKYEKTKVNTWKYRISLIFVNPAVIYLWPGPMRSGMSAAGRTVETVLYLAGFSNVKTKIIGSRNPLNVIKALFIALNAIETPKDVQQKFGRTVVESYLL

SEQ ID NO: 85545 - protein, 151 aa, Zea mays
  Coding DNA Sequence Number=SeqID_42170
MSMICNCCVRELLILAHTWFAFGLPSKTGCDKTLSTADVETGPKLYKHHRWKPFGEDVGELGGGRDVKDANSSTGNSFADEVKVDLDMLRALVLGGVGGEVDDADIVAENQHARGQQTMELLKKLALGAGAGDNRLALGRPGDEVVPRNTA

SEQ ID NO: 85546 - protein, 116 aa, Zea mays
  Coding DNA Sequence Number=SeqID_42171
MSHPDSPVRHQTLSGAPTTSPGRWVLTVGASDRWATGQSGGAPDSHYSLSDMDLGGFLLEMAMGKYPPGITTPYPYPRHKNNLTGLPIYTSGYGFTLIPIPMWVWVTHRVTRTHKN

SEQ ID NO: 85547 - protein, 176 aa, Zea mays
  Coding DNA Sequence Number=SeqID_42172
  Gene Ontology: Mol. function=RNA-directed DNA polymerase activity; Biological process=RNA-dependent DNA replication
  Homolog annotation: Hit_ID=O48967; Match level="QueryCoverage=47%, HitCoverage=42%, E-value=2e-16, Identity=82%"; Hit description =Putative uncharacterized protein
  Pfam annotation: Domain name=Retrotrans_gag; Domain location=29-110; Score=-1.2; E_value=0.071; Accession=PF03732.8; Description =Retrotransposon gag protein
MAGRRRPTTRYGTLYLNQIEDTVIPTPARGVSVCALALRSVYSWEELYPWFVENFASAYQQHGVEAHLHAVRQEPGETLWKFISRFTKRGNSVSCPTHPNGRHRAAEFREIIDLAKRVSERREQSSKDGSPPRRRPGKEKVDDGEVATAERDLRYQSPERDLKDVFAGGSYSGGDN

SEQ ID NO: 85548 - protein, 186 aa, Zea mays
  Coding DNA Sequence Number=SeqID_42173
MGTQGRDLALRQVPDQEGLRNSPPAGKDPSRYELPPHQQGRGIASSERLARGGDHLSTDGSDRLCTDDSPAVAITSARAPLRKGPHPRLPTEGDNEAIKAKELEARRQVALMVSPAEATTSAMGSLTSDGDHLITDDSGHLRTDGRRLPQHARTGPRSHPYCRSEDKAIQEHDRRPRSVRCLVRPA

SEQ ID NO: 85549 - protein, 921 aa, Zea mays
  Coding DNA Sequence Number=SeqID_42174
  Gene Ontology: Mol. function=ATPase activity, coupled to transmembrane movement of substances; Cellular component=integral to membrane; Biological process=transport
  Homolog annotation: Hit_ID=Q8GU78; Match level="QueryCoverage=97%, HitCoverage=92%, E-value=0.0, Identity=55%"; Hit description=MDR -like ABC transporter
  Pfam annotation: Domain name=ABC_membrane; Domain location=372-652; Score=164.8; E_value=2.3e-46; Accession=PF00664.14; Description=ABC transporter transmembrane region
  Pfam annotation: Domain name=ABC_tran; Domain location=67-253; Score =241.5; E_value=1.9e-69; Accession=PF00005.18; Description=ABC transporter
  Pfam annotation: Domain name=ABC_tran; Domain location=702-875; Score= 157.6; E_value=3.3e-44; Accession=PF00005.18; Description=ABC transporter
  Pfam annotation: Domain name=SMC_N; Domain location=56-257; Score= -126.7; E_value=0.026; Accession=PF02463.10; Description=RecFRecNSMC N terminal domain
  Pfam module annotation: Pfam domain module=ABC_membrane::ABC _tran::ABC_tran::SMC_N; Domain location=372-652::67-253::702-875::56 -257
MAAFAKARVAAAKIFRIIDHRPGISSRDGAEPESVTGRVEMRGVDFAYPSRPDVPILRGFSLSVPAGKTIALVGSSGSGKSTVVSLIERFYDPSAGQILLDGHDLRSLELRWLRRQIGLVSQEPALFATSIRENLLLGRDSQSATLAEMEEAARVANAHSFIIKLPDGYDTQVGERGLQLSGGQKQRIAIARAMLKNPAILLLDEATSALDSESEKLVQEALDRFMIGRTTLVIAHRLSTIRKADVVAVLQGGAVSEMGAHDELMAKGENGTYAKLIRMQEQAHEAALVNARRSSARPSSARNSVSSPIMTRNSSYGRSPYSRRLSDFSTSDFTLSIHDPHHHHRTMADKQLAFRAGASSFLRLARMNSPEWAYALAGSIGSMVCGSFSAIFAYILSAVLSVYYAPDPRYMKREIAKYCYLLIGMSSAALLFNTVQHVFWDTVGENLTKRVREKMFAAVLRNEIAWFDADENASARVAARLALDAQNVRSAIGDRISVIVQNSALMLVACTAGFVLQWRLALVLLAVFPLVVGATVLQKMFMKGFSGDLEAAHARATQIAGEAVANLRTVAAFNAERKITGLFEANLRGPLRRCFWKGQIAGSGYGVAQFLLYASYALGLWYAAWLVKHGVSDFSRTIRVFMVLMVSANGAAETLTLAPDFIKGGRAMRSVFETIDRKTEVEPDDVDAAPVFRDLSLRARAGKTLALVGPSGGYTSPRPGACSWTGKDVRKYNLRALRRVVAVVPQEPFLFAASIHENIAYGREGATEAEVVEAAAQANAHRFIAALPEGYRTQVGERGVQLSGGQRQRIAIARALVKQAAIVLLDEATSALDAESERCVQEALERAGSGRTTIVVAHRLATVRGAHTIAVIDDGKVAEQGSHSHLLKHHPDGCYARMLQLQRLTGAAAGPGPSTSCNGAA

SEQ ID NO: 85550 - protein, 157 aa, Zea mays
  Coding DNA Sequence Number=SeqID_42175
MGDTRRLSASSLEERNSVGVGTFQPSFGFKDFHQPARLYPPAGGRAEPELYLPRGFVGHPLLRRSRERALTGPAGGSDFDNARLVDGGRRQPQRVELVGLAPGAPSCQKAAAAPCAREDRPRCRALLWRRSCSGAVLPLHRYGASVRRSVPHSSGRI

SEQ ID NO: 85551 - protein, 89 aa, Zea mays
  Coding DNA Sequence Number=SeqID_42176
MGAQAHMSYNRRAGYRVRKNRTAAQCHVFSGLASSPDMGPGATVGTLNQGYPLLQYEDAAPERHLQATRRTAPDPTIWAGLRAPRGKER

SEQ ID NO: 85552 - protein, 188 aa, Zea mays
  Coding DNA Sequence Number=SeqID_42177
  Subcellular localization annotation: CTP_CleavageSite=34; ConfidenceScore=5.53e-01
GCRAPNKPPSLPLLPTSSLPLLPTPAASQGCRTNAAIAAPSSSLLPVTSSSEQFTNHLNPHQMDSADSIADKAIGRMQEIADKIFSVARETIRPGRGLTSFEATKLRVALEDIACMLEQDSLVLQENLDNVNNVTNPGQSSYESSALSSPPPADEYLSPDWDFDEHFANFWGLEYDSDQMPSFSDNEV

SEQ ID NO: 85553 - protein, 136 aa, Zea mays
  Coding DNA Sequence Number=SeqID_42178
  Gene Ontology: Mol. function=nucleic acid binding; Cellular component= intracellular
  Homolog annotation: Hit_ID=A9P9T1; Match level="QueryCoverage=51%, HitCoverage=55%, E-value=5e-22, Identity=73%"; Hit description =Putative uncharacterized protein
MGGKCPHRKVKKRRLSHKTARRGKFLLKADDAVYDELVKLADQGKDAEAKELPVDEDLPGLGQFYCLHCEYALPLSSLSLPSIPPVCYFLSSANTETENYSCCTDCKAGIAEYVELLVDGDVCKSLPFGICIENGL

SEQ ID NO: 85554 - protein, 256 aa, Zea mays
  Coding DNA Sequence Number=SeqID_42179
  Gene Ontology: Mol. function=carboxyl- or carbamoyltransferase activity; Cellular component=ornithine carbamoyltransferase complex; Biological process=amino acid metabolic process
  Homolog annotation: Hit_ID=Q8SA97; Match level="QueryCoverage=76%, HitCoverage=26%, E-value=1e-23, Identity=41%"; Hit description =Ornithine carbamoyltransferase
  Pfam annotation: Domain name=LRR_1; Domain location=203-225; Score =8.8; E_value=7.1; Accession=PF00560.24; Description=Leucine Rich Repeat
  Pfam annotation: Domain name=LRR_1; Domain location=228-251; Score =9.3; E_value=5.7; Accession=PF00560.24; Description=Leucine Rich Repeat
  Pfam module annotation: Pfam domain module=LRR_1::LRR_1; Domain location=203-225::228-251
  Subcellular localization annotation: CTP_CleavageSite=50; ConfidenceScore=5.09e-01
MAPPVDVAGLRPRLGDVEAPPKPRSRLSPSPSPVSGGAEFAVFWDLARVRALGRAERSSPSSGAEPESDPWVGRSGVRCLPGLSPSPSPGSGGAEFTVFRDLARVRALGRAERSSLSSGAEPESEPWVGRSGASYGRSVGRRSDGGHFGSASRGARVRIKLYADGGYQLRIRSLEGTPNYGPRRNGLGLSGELFASSLCRVRGLVALSLASNGFEGQVPAGLATLGGILQVLDLGENLLSGVLHPALFGNLTSLLN

SEQ ID NO: 85555 - protein, 56 aa, Zea mays
  Coding DNA Sequence Number=SeqID_42180
MSDGAGAVLMKRYVALKKVNVNGGVIAIGHPLGATEKYNAHHFFLDTWSLRILLLS

SEQ ID NO: 85556 - protein, 177 aa, Zea mays
  Coding DNA Sequence Number=SeqID_42181
MTDTGLILGEPSSYLLFTIFFSLTLSFSLLFPLEDSIKEYHHHTEEETEDYETCTRVFNPIITKHCDLRGEGVGNGVACDLAEGVLSGVCFALSDMGVKGAGGGFYRRVLVFGCGVVVEQVTQGNKFDGGGMVLLAVMAAVGALQKGHGAVVVRMEAGHACGEHGGSALILTVDPFD

SEQ ID NO: 85557 - protein, 97 aa, Zea mays
  Coding DNA Sequence Number=SeqID_42182
MAPGTHVDRIIRHNQYQVHWKAKTLAWGHKPVAPEGRLIVGRAKITIEMGQPKKAMGSRPDRPRIMRNLKGAVYLSRARCPQMPGIDRDEAIGFSLR

SEQ ID NO: 85558 - protein, 90 aa, Zea mays
  Coding DNA Sequence Number=SeqID_42183
MERAEVNEEIECGGYLKDPPKADSRWEKWTKNRLNRFLNRLNQFPPESSRFTETGRSEVTEGTVQKPVEPVLGPVEPVFETEGQVLRKLR

SEQ ID NO: 85559 - protein, 277 aa, Zea mays
  Coding DNA Sequence Number=SeqID_42184
  Gene Ontology: Mol. function=phosphoprotein phosphatase activity; Cellular component=nucleus; Biological process=multicellular organismal development
  Homolog annotation: Hit_ID=A2X8H4; Match level="QueryCoverage=28%, HitCoverage=21%, E-value=6e-27, Identity=55%"; Hit description =Putative uncharacterized protein
EVQRIRHEHPDDDQCVVNDRVKGRLTVTRAFGAGYLKQYLNNEEVVPHVENFMERFPEGDPAQSLIEELLSRAAKKAGKLIVWSSSSKPDAPRTTPSKPSSESAIRKWWRSLTPALLAAALAITVAALRPTMEHADAKGRTPLWLTCSAARLAAFLASRCRDQGGTTIGHEGLQSHLKENVLELKPQKRRHQAHWWICIGKATQGRDLAPFFVTTAISLIVPTKILKVRNSLSTKLQTETGFGPSVVDSFFYRNTYGRRHKKGTSTNKATELEELEE

SEQ ID NO: 85560 - protein, 226 aa, Zea mays
  Coding DNA Sequence Number=SeqID_42185
MCRAKIAWSTVGAGDRWRIEQSGAPPDNPGVPGANGRARWRSEWKGEGAQGVAELGLDRSRHQLGGVSGVGALSECDQGSGATRSGEGNEGEQHEHEPGDVAGVWRTYGSGATQSGEGNEGERARAGGGGGARCGCLRCCGGGAGERMVGCVRRGGGGMTGGDGVDSGGSGPKLRAAAAAPDPCILDDALVEMFGLLPANSLHRFKCVSKAWCGLVTDPLHCQRFA

SEQ ID NO: 85561 - protein, 53 aa, Zea mays
  Coding DNA Sequence Number=SeqID_42186
MAAPPTTRPIALTPRRDRRRLWQEKRATLRLHRNNCAKKGTGKGGYPEKDPSL

SEQ ID NO: 85562 - protein, 147 aa, Zea mays
  Coding DNA Sequence Number=SeqID_42187
MGKSNKCKREPTPPSEDFGDSEYSEEEFSSESEGSPAPVSPPASSDDSDDSQGIAAEVWTYIRAVERSGLEGSDEEDSDGGEDEDDDDDDGDDDDGGDGDGDGSGSGGGDGSKGSTRGGSSTGSTRGGSSKGSTRGGGGGCSSKASG

SEQ ID NO: 85563 - protein, 66 aa, Zea mays
  Coding DNA Sequence Number=SeqID_42188
MEVVAAVLPTLVPSGNAVVVLLADLGYLAAAEQCSIGCCAIGSAGRFESRNFYGVALELLVILRAV

SEQ ID NO: 85564 - protein, 129 aa, Zea mays
  Coding DNA Sequence Number=SeqID_42189
  Gene Ontology: Mol. function=carbon-nitrogen ligase activity, with glutamine as amido-N-donor; Cellular component=chloroplast
  Homolog annotation: Hit_ID=Q10E52; Match level="QueryCoverage=33%, HitCoverage=7%, E-value=2e-16, Identity=97%"; Hit description =Chloroplast outer membrane translocon subunit, putative, expressed
  Pfam annotation: Domain name=TPR_1; Domain location=2-35; Score=28.5; E_value=2.5e-05; Accession=PF00515.19; Description=Tetratricopeptide repeat
  Pfam annotation: Domain name=TPR_2; Domain location=2-35; Score=25.8; E_value=0.00016; Accession=PF07719.8; Description=Tetratricopeptide repeat
  Pfam module annotation: Pfam domain module=TPR_1::TPR_2; Domain location=2-35::2-35
SVKAYLRRGTAREMLGYYKEAVDDFNHALVLEPMNKTAGVAINRSANGLQPKLVTLIVWNSPNASELRTLDVACCADPVLGCAACKDSIPLAGSKRDAVSSYRTRPNNLTPCEKEDGPLWFTHKASYLT

SEQ ID NO: 85565 - protein, 408 aa, Zea mays
  Coding DNA Sequence Number=SeqID_42190
MGDARRLFALSLEERNSVGVGTFQPLFGFKDFHQPARLYPPPPPRRRSPETVNTSSWVGRSKPSCDLGPTLSFKDVHHPCWGGGRAEPALYLPRGFVGHPLPRCSKERALTGPAGGTDFDNAGLGDGGRRHLQRVGCVGLAPSGPFCRGAAAAPCAREDRPRCRALLGRRSCSGVVLPLHRDGAFHAEAGAPLVREDLSGDLSESRWPLPSVPRRRRLEKSPSPTGSPPPSALRASGPSYLSSPLERRRGRGQDRSSTHPEACAAAARPSGAGAVVVVVRAGGSVPLHQDSPVNYLNRFTKHESPRVKVTSEARGSGISMNRGGVGSKMKRGWPEPSWVVRQRDRRRSRSAEASGRAGALGRWLAEAPGSGDPQTASPSEARSDLAEGVVDAEGAAAPFQRQDPSLQD

SEQ ID NO: 85566 - protein, 71 aa, Zea mays
  Coding DNA Sequence Number=SeqID_42191
  Subcellular localization annotation: CTP_CleavageSite=23; ConfidenceScore=5.04e-01
MDRPSRASIGQINPTSVIPYLCSCLAISPSTQNRTTGDEPPSGSPATGSHRRGPPFFPPRGGWKPLPPFSL

SEQ ID NO: 85567 - protein, 376 aa, Zea mays
  Coding DNA Sequence Number=SeqID_42192
  Subcellular localization annotation: CTP_CleavageSite=17; ConfidenceScore=5.22e-01
MQPARRLLRARNYTATRATTVPPRLRNQYRDSRQTCAGGSSGQVVSQAHVPSWDSERTLSHGVKTARPCSVPRTARARATAAPRTTRPVALTLRRDRRHLWQEKRATLRLRHNDRVKKAGTGKGDTPKGIHLREGNGPRAPLLIRGLKVGPLEGFNSRLRALGLRARYWSEVRRLAPRKGSTAASGHSGSAPTTDQGSLETPCSAPSEGNMALPPPSSLRKGEAGAAARIAPTAVPLDRVRLTATKSSLERPRKLRLARPRARTRARPRKTTNSASPDPGLGLELGPGRRRTPPRPTQGLDSSSAPEDDELRLTRPQGSDSASASADGLRLARPKGSDSTSISEDRLNLDLGGASASPNLGLGPTTPQEEPSLPYP

SEQ ID NO: 85568 - protein, 261 aa, Zea mays
  Coding DNA Sequence Number=SeqID_42193
  Subcellular localization annotation: CTP_CleavageSite=30; ConfidenceScore=5.09e-01
MSSRSLMHHVFPPSKPPDGGYPPSFCLIIGGSQLRGSWYLSAIVRLQGFSSHSPVAPLRWWSPKTVTSSSWMGRGKPGCDPDPALSIEGVRHPRWGGERGEPGLYLLRGSAGHLFFQLLVVAIALQPCGGDVLQPCRGRRTVAAQLGCNIPPSPSHSRRGRHWFASLERDREREPSGGRVHPGPWPLLQRSLAALDSPVGCLNRFTKHESPRVKVTSESGDPWTASPSEARSDLAEGVIDAEGVTAPFQRQDPSLQDQSVL

SEQ ID NO: 85569 - protein, 202 aa, Zea mays
  Coding DNA Sequence Number=SeqID_42194
  Gene Ontology: Mol. function=solute:hydrogen antiporter activity; Cellular component=integral to membrane; Biological process =regulation of pH
  Homolog annotation: Hit_ID=A3APA1; Match level="QueryCoverage=69%, HitCoverage=25%, E-value=9e-27, Identity=46%"; Hit description =Putative uncharacterized protein
MDVKKVMPERVLAKYSDMLRSHEDSFFVKRSIVLLQRSDMELPDLVELIVLNIGRDHNSTRCSTRRGSLPRAHGAHNYLDQGHPAFTAMEASRGTRRSKLTVLTMYAMHLVDLSERLSAISMGQRARRNGLPFSCRRWRDGGAEIVVAYEAFRRLRAVAVKPMTAISDLGTIHEGMMTASFSLIIKYMKNHFLYFHTDGPLV

SEQ ID NO: 85570 - protein, 218 aa, Zea mays
  Coding DNA Sequence Number=SeqID_42195
  Gene Ontology: Mol. function=aspartic-type endopeptidase activity; Cellular component=extracellular region; Biological process =proteolysis
  Homolog annotation: Hit_ID=A2XU00; Match level="QueryCoverage=54%, HitCoverage=25%, E-value=7e-13, Identity=38%"; Hit description =Putative uncharacterized protein
  Pfam annotation: Domain name=Asp; Domain location=1-213; Score= -171.7; E_value=0.0019; Accession=PF00026.14; Description=Eukaryotic aspartyl protease
  Subcellular localization annotation: CTP_CleavageSite=92; ConfidenceScore=5.43e-01
MTYGSGWTYVFQGTEKATFGSSTPADQVRVPGIAFGCSNASSGFNASSASGLVGLGRGSLSLVSQLGAPKFSYCLTPYQDTNSTSTLLLGPSASLNDTGVVRAAVLSLVTLPTTDGSAATGLDLCFELPSSTSAPPSMPSMTLHFDGADMVLPADNYMMSLSDPDSDSSLWCLAMQNQTDTDGVVVSILGNYQQQNMHILYDVGKETLSFAPAKCSTL

SEQ ID NO: 85571 - protein, 138 aa, Zea mays
  Coding DNA Sequence Number=SeqID_42196
  Gene Ontology: Mol. function=electron carrier activity; Cellular component=membrane; Biological process=electron transport
  Homolog annotation: Hit_ID=Q10ME8; Match level="QueryCoverage=39%, HitCoverage=5%, E-value=7e-22, Identity=81%"; Hit description=HAD -superfamily hydrolase, subfamily IA, variant 3 containing protein, expressed
  Pfam annotation: Domain name=NHL; Domain location=70-98; Score=23.8; E_value=0.00064; Accession=PF01436.12; Description=NHL repeat
MSVNNLFVTVFAGEDLVLERKGLIDNVLSDYLWAKAILLTTTTVSTGCSAGAGNSDYGTTIDWKVFMQVLNSPWDVCYDPAEEAVYIAMAGQHQIWKHNLHDGVTKVISGDGYERNLNGSSAVMFMKMVNDGFYLMSG

SEQ ID NO: 85572 - protein, 275 aa, Zea mays
  Coding DNA Sequence Number=SeqID_42197
  Gene Ontology: Mol. function=actin binding; Cellular component =cytoskeleton; Biological process=cytoskeleton organization and biogenesis
  Homolog annotation: Hit_ID=Q6Z3N3; Match level="QueryCoverage=93%, HitCoverage=33%, E-value=1e-105, Identity=65%"; Hit description =Putative villin
  Pfam annotation: Domain name=Gelsolin; Domain location=45-120; Score =41.7; E_value=2.6e-09; Accession=PF00626.13; Description=Gelsolin repeat
MADAEAGEFWGFFGGFAPLPRRAPAEGNEKHDETAFKLLCFDQGKLEPVDCQSLAHELLETNKCYFLDCGAELYVWMGRITSLMERKGASEAAEKLLSDSNRTRTHIIKVIEGFETVTFKSKFKEWPQTPELKLSSEDGRGKVAASICKQINSVLTYFFHYTYPGDDKEECLIGTWFGKKSIEEDRVIAVSLASKMVESAKFQAVQARFYEGKEPIQFFVIFQSFQVFKGGLSSGYKRFIAENGIDDESYSEDGLALFRIQGSGPENMQAIQVEP

SEQ ID NO: 85573 - protein, 225 aa, Zea mays
  Coding DNA Sequence Number=SeqID_42198
  Pfam annotation: Domain name=zf-CCHC; Domain location=124-141; Score =27.0; E_value=7e-05; Accession=PF00098.14; Description=Zinc knuckle
MSGGDGPPPVFDGDDFPYWKIRMEAYLEAIDIGVYKAATQGFPEPRDPTNLKRIWLSKANHDRKGKAKIQIEEESSSDDDLDANIALMVRKTTKMLKKLNREGIKFDSRKKKFFSNKRKPISEMDCYNCGELGHLAHQCNKPKKNKFKGKKEDDSDDEKKEKKFFKRKDGKQKRFHKKKNGKAYIVGDWLTDIESSSGSSSSEEENDEKVAAIAGAFSSPPPSPS

SEQ ID NO: 85574 - protein, 201 aa, Zea mays
  Coding DNA Sequence Number=SeqID_42199
MADIVPSSGDLGACCLGDFYRCLEDSPLRISGRRDLGAYCLGASSRRPLAISRFRSSGLRANFSPMLRDILLCYAVYSAMSNSPCVRVASRHEAKRPRHSAFAQDCPVFETADGHRIFHAEAEIDSSNLPGTSNQPIPALQESPGTAMFAHSFLQQKQYGVSDAYVDTALAAYNRRRRRSRVRHMVADEPCQSRFLWTGHT

SEQ ID NO: 85575 - protein, 166 aa, Zea mays
  Coding DNA Sequence Number=SeqID_42200
  Subcellular localization annotation: CTP_CleavageSite=94; ConfidenceScore=5.37e-01
MGAAAAAKHALQVVAAGGDAGQSSFSANSPPTTGAGFVALDVGELSSLAGDAGPPGTPIAPPRTPRVVRSLSRKGDRKPADADANATAGGGRERAAAVRTRGCRRPRGRARQRPAGRPHAAGRHARKQVPAVRKAGGAVARSPQGGLPLRHAVRKLSPSVVSPYDF

SEQ ID NO: 85576 - protein, 100 aa, Zea mays
  Coding DNA Sequence Number=SeqID_42201
  Subcellular localization annotation: CTP_CleavageSite=73; ConfidenceScore=5.01e-01
MASVSLGWAYDADEAPLSSITSPSALSPSAISPNVAVGAALASARRAELDGGHCSRDLEILRSGQTPPRSRRLAFHRASLPPLPPPPPLLESALLMDSVK

SEQ ID NO: 85577 - protein, 263 aa, Zea mays
  Coding DNA Sequence Number=SeqID_42202
  Gene Ontology: Mol. function=protein serine/threonine kinase activity; Biological process=protein amino acid phosphorylation
  Homolog annotation: Hit_ID=Q7XC99; Match level="QueryCoverage=66%, HitCoverage=7%, E-value=5e-49, Identity=60%"; Hit description =Transcriptional regulator, putative, expressed
VDRLGKEKEGFIHHCTEAFVQLVASLVPGILDTVSSDIQQVMVGKRHGPVTALAGRAHPKSTIHMFPVILHLLGSASFKHRVVTGHVLLQLANLIKILEAPFQVLFKNLTVDIKDVKPTSLLKDRLREVEGNPDFSNKDVTASQTPVVAEVPSGTIPSLTHMEQQPEINITSRAMSLPNILNQYAAPVRLPTNSTVEDDKVALMMPEQVPSLTQVSPAQTQSTSPSPFSVNQLMATIPREEIRFKINPKLGSLGPQLQYSKKT

SEQ ID NO: 85578 - protein, 327 aa, Zea mays
  Coding DNA Sequence Number=SeqID_42203
  Gene Ontology: Mol. function=protein serine/threonine kinase activity; Cellular component=integral to membrane; Biological process=protein amino acid phosphorylation
  Homolog annotation: Hit_ID=A3BKN0; Match level="QueryCoverage=95%, HitCoverage=53%, E-value=7e-70, Identity=48%"; Hit description =Putative uncharacterized protein
  Pfam annotation: Domain name=DUF26; Domain location=194-247; Score =11.6; E_value=0.00022; Accession=PF01657.8; Description=Domain of unknown function DUF26
  Subcellular localization annotation: CTP_CleavageSite=77; ConfidenceScore=5.52e-01
MILAALLLLLSFPKQLAGSQSVCSSANIVYMQSSTYMSNLNALAGALFAKVTSSNSHSAHGTAGTGSDMIYGAVLCRGDMIPGAACAKRLKEVLDAAMDNPANSSCSSQKDITLFDDGYLVQLRFSDQDFISNFRDSQECVVRANLNPPLLGDVSEQFHSLVSKLMTKLTDAAVKNMGRYETGQGWLTEKSQTVYGLVQCQEDMLKGTCQDCLSSAMAKREQMVDQMGGAILGVGCSLWYQTEVQFFAGTPALSLNMPTQRARYELQLLSMAIQNVINLWRIEEGNSGFSLYDFSQIKEATGNFSSENKLGQGGFGPVYKMLTKEYS

SEQ ID NO: 85579 - protein, 80 aa, Zea mays
  Coding DNA Sequence Number=SeqID_42204
MAEMSRGTPTARDIGATGDLGHHVMSRLIEAMMLNSGGGGGSKGMGGGYTGGGSGGQVNGVEGARAVTASEHITSGKVAY

SEQ ID NO: 85580 - protein, 153 aa, Zea mays
  Coding DNA Sequence Number=SeqID_42205
  Gene Ontology: Mol. function=ubiquitin-protein ligase activity; Cellular component=ubiquitin ligase complex; Biological process =protein ubiquitination
  Homolog annotation: Hit_ID=A2Z8A9; Match level="QueryCoverage=27%, HitCoverage=11%, E-value=2e-10, Identity=73%"; Hit description =Putative uncharacterized protein
  Subcellular localization annotation: CTP_CleavageSite=28; ConfidenceScore=5.03e-01
MKPFRALPAFCGRCFAERPFVFSRFNPRSSPEPQSDPTVGCARDCSWFCSCISSVIRISCCYLPVSIDASLSRDTLKSPAILFIRQTNQAFCPWMFILQSYLVDSQDVVATGGIDTNAVIFDQSSGQILCTLTGHSKKNRYYGIEMFGSTYRV

SEQ ID NO: 85581 - protein, 70 aa, Zea mays
  Coding DNA Sequence Number=SeqID_42206
  Gene Ontology: Mol. function=actin binding; Biological process =cytoskeleton organization and biogenesis
  Homolog annotation: Hit_ID=Q6Z3N3; Match level="QueryCoverage=51%, HitCoverage=3%, E-value=1e-11, Identity=86%"; Hit description =Putative villin
MSGLEIWRIENFKPIPAPASSYGKFFMGDSYIILKVSSGMISSCHQLYFALDLISIGGGVECSKYIILLL

SEQ ID NO: 85582 - protein, 354 aa, Zea mays
  Coding DNA Sequence Number=SeqID_42207
  Subcellular localization annotation: CTP_CleavageSite=50; ConfidenceScore=5.02e-01
MGDIRRLSGSSLEERNSTGVGYLFSRRSASKDFSSCSLAAPLHRRSPKTVTSSPWMGRGKLGCDLGPTLSFKDVHHPRWGGGWVEPELYLPRGFVGRPLLRRSRERALTGPAGGSNFDNAGLVDSGRRQPQHVGLVGLAPGAPSCRKAATAPCAREDCPRYRALPGRRSCSGAVLPLHRYGASTRRSSGDPWTASPSEARSDLAKGVVDAEGAAAPFSRQDPSLQDWIILQRVFSAAAEAETHPRRIESLGSVDLAAYAHSYPSMGFCHRRSREGSKNRSGRRASERDVRPAESLIRTVAVDLALTVGQLPKHQVTHLEVSGPDPSGVVASHGLLALVLGEPYSRSVGKMASAP

SEQ ID NO: 85583 - protein, 111 aa, Zea mays
  Coding DNA Sequence Number=SeqID_42208
MGKSNKRKREPTPPSEDFGDSEYSEEEFLLRVRGAVERSGLEGSDESEYSSDEEDSSDSSKEGGGGDGGDDDDGGDGDDDDEGGDGGSRGGNGGSKGGNGGSSRGSNKASG

SEQ ID NO: 85584 - protein, 173 aa, Zea mays
  Coding DNA Sequence Number=SeqID_42209
  Gene Ontology: Mol. function=helicase activity; Biological process =RNA-dependent DNA replication
  Homolog annotation: Hit_ID=Q53R78; Match level="QueryCoverage=98%, HitCoverage=9%, E-value=9e-39, Identity=45%"; Hit description =Putative uncharacterized protein
MGDVLIPELQRGNTSVTICARVSRLWDFCDPQDEAKLLHCDMVLLDEEGNGIHAAIFPPVIQKFKPLIKEGVVYNITYFRVRASNNLYKPVFNENMITFTNWTKLEEVVEVPPAFPVLTYSLTPIDQLHLCVDHREYYTDAIGIVTSISAVAPHRSRGQHTTSSKRTISLCSV

SEQ ID NO: 85585 - protein, 297 aa, Zea mays
  Coding DNA Sequence Number=SeqID_42210
  Gene Ontology: Mol. function=transcription factor binding; Cellular component=intracellular; Biological process=regulation of transcription, DNA-dependent
  Homolog annotation: Hit_ID=Q3S835; Match level="QueryCoverage=26%, HitCoverage=42%, E-value=1e-29, Identity=75%"; Hit description=RAB7
  Pfam annotation: Domain name=Ras; Domain location=111-232; Score= -55.1; E_value=3.3e-05; Accession=PF00071.13; Description=Ras family
CPTILAAAIPSIGAPILALPSAPVAGVRARTAIHSAAARVLTDIKADLRDAEGSGGRSRAPSLDREAAEASATGRNPDVKSPSPLWLSRIVKLWIQALLGFVNAPGRFLATYKDNFLATWNDWEIRMLVLAVPPSTRTPSPPAFSTEDNDVLWKRHLLSLLTQAGPSDPQRFLFILVGNKIDLDGGSKRMVPEKKAREWCASKGNIPYFKTSAKEVHNVDTAFLCIARLALEHEHDQDMKAREWCASKGDIPYFETSAKEDHNVDTAFLCMARLALEHEHDQDMLPNPGHSQIDLQF

SEQ ID NO: 85586 - protein, 118 aa, Zea mays
  Coding DNA Sequence Number=SeqID_42211
  Gene Ontology: Mol. function=catalytic activity
  Homolog annotation: Hit_ID=A2Y3P0; Match level="QueryCoverage=88%, HitCoverage=39%, E-value=1e-23, Identity=48%"; Hit description =Putative uncharacterized protein
MYDKLPRSRRLDTVQSSCNALSIVKQGGLMVVANVNDSWRIRWCNGQGYYLADEPGVHFVWQPNQESSVLVMSRAFDDYYIEDCGVILAPEVTQRRIDNSDQFVILATVRVAFVPTCL

SEQ ID NO: 85587 - protein, 287 aa, Zea mays
  Coding DNA Sequence Number=SeqID_42212
  Gene Ontology: Mol. function=protein phosphatase type 2A regulator activity; Cellular component=protein phosphatase type 2A complex; Biological process=signal transduction
  Homolog annotation: Hit_ID=Q6ER76; Match level="QueryCoverage=97%, HitCoverage=41%, E-value=3e-82, Identity=57%"; Hit description=Rab11 binding protein-like
  Pfam annotation: Domain name=WD40; Domain location=117-198; Score =21.3; E_value=0.0037; Accession=PF00400.23; Description=WD domain, G- beta repeat
  Pfam annotation: Domain name=WD40; Domain location=26-64; Score=39.4; E_value=1.2e-08; Accession=PF00400.23; Description=WD domain, G-beta repeat
  Pfam module annotation: Pfam domain module=WD40::WD40; Domain location=117-198::26-64
MTWSKSNFLLTSSKDKTVRMWKVGCDDCLAVFKHRDYVTCIQFNPVDEGYFVSGSIDGKVRVWDVSERRVVDWADAKDIITAVGYQPDGQGLIVGIAAGRCRFYNHAGENVELEKVLKVTKKKSAGRQITSLQFSCGDPARILIASAGSKIRVSDGGAKINRKFEGRRGSKVLVPPSLTSDGQYLVSAGADSNVYIWDLDRPARGKSRTRGPRRVRSCEHFFSEGVTSVATWPGLAHQQEDLQSPEKGAAPTLCRDRELCSFGTWFSADGARGAATWPEEKAAAVPQ

SEQ ID NO: 85588 - protein, 287 aa, Zea mays
  Coding DNA Sequence Number=SeqID_42213
  Homolog annotation: Hit_ID=A2X5S8; Match level="QueryCoverage=100%, HitCoverage=100%, E-value=7e-34, Identity=40%"; Hit description =Putative uncharacterized protein
  Pfam annotation: Domain name=VQ; Domain location=76-106; Score=51.8; E_value=2.4e-12; Accession=PF05678.5; Description=VQ motif
MDASSGDRSSPRSRQLQGPRPPRLAVSKDSHKVRKPPVAPQRQQHQHQQPAAQLQQQQHQYHQQQQQQGRQPVIIYDASPKVIHTKPGDFMALVQRLTGPGSTSQAQFDAAAAAAGPSHPAAMEFEPREFLLSPTAALSPAARLAAIERSVRPLPPHHAPAAVPPYFGATNDDGFFLPGSADMDSLSAALGPPAGRPGILSPAALPPAASTGLFSPMPFDPSCLSWLSELSPFLPSAGTRAAAAGLLDQAPFAPSPRSSLLLSTPTMPSPATFSVLEFFSSPNFPDL

SEQ ID NO: 85589 - protein, 278 aa, Zea mays
  Coding DNA Sequence Number=SeqID_42214
  Subcellular localization annotation: CTP_CleavageSite=37; ConfidenceScore=5.18e-01
MVRERRTQTNTMSKNTRDTRFIPRFGHTTKVPYFLVEAPTKSRVSFNPNPPLPTTKYQSSNQEEQEGFKDEAPKSQLFNLTQRFLSKDLKWERQEVCEREWEVFLRLEMESKSCSSMEERDPPPSEKARKETRVRYVAHRLHPGPPPSSVSPVFLALVYLVLVGKNSSVSSQVCFGIFRLKFHLATFNKSFNLHGYIGDRCQNGWKSHVYTAAVKNVCEKCNVTITKENISSRSKTFDKHYNIINGLLSTSGFGWDWEKNKLKVDSDTVWDEYVEISI

SEQ ID NO: 85590 - protein, 76 aa, Zea mays
  Coding DNA Sequence Number=SeqID_42215
  Homolog annotation: Hit_ID=Q8H6I0; Match level="QueryCoverage=67%, HitCoverage=4%, E-value=3e-07, Identity=44%"; Hit description =Putative gag-pol polyprotein
MKKVIYYEIDSSTPSTSNAESTSSKCQERKKYKKPPYFDSEDYSMWSDKIRVGPENLVAQCRTKIEAPLTTNTKNL

SEQ ID NO: 85591 - protein, 64 aa, Zea mays
  Coding DNA Sequence Number=SeqID_42216
MALKTSPCHLCSSRSSGTISRFDLNRFRISEKNGNVMLRKRDMQKWKYRLSPILYGLFCATCGG

SEQ ID NO: 85592 - protein, 76 aa, Zea mays
  Coding DNA Sequence Number=SeqID_42217
MRLQPSNGHFCGGWKTAVKPGREVLKQLRWRVLYRVGGDCTARSRSVFDVATGIGRVDEILDGVPSSWRMGGNRKE

SEQ ID NO: 85593 - protein, 77 aa, Zea mays
  Coding DNA Sequence Number=SeqID_42218
MGGSEPGSFAEKDPFRGWDVSLADDQLTHRLLDAWAWVPKLACQKSEKRVHLARLHAACMAARPFCPLVWAKMGGRL

SEQ ID NO: 85594 - protein, 224 aa, Zea mays
  Coding DNA Sequence Number=SeqID_42219
  Homolog annotation: Hit_ID=Q6QP51; Match level="QueryCoverage=22%, HitCoverage=22%, E-value=4e-19, Identity=90%"; Hit description =Putative growth-regulating factor 1
MQVACNRTTGTHPFDFDASSMEAQAHTSCERKQQSNRLQAHVPSWSSGGALSHGVKTTRPCSIPRTARATTAPRTTRLVALTSRQGKRHLWQAKRASFHLRHDDRVKKAAPEHSGFRLITDQRFEGWPLGRVRQPPQSTRAPRPLLIRGSKAGPSEGFDSRPRARRARDDSGTSDTWPRLGLRSRGTLGHFRDQQERFCNRIPSEGGIEPSDPIERDRVRQITY

SEQ ID NO: 85595 - protein, 306 aa, Zea mays
  Coding DNA Sequence Number=SeqID_42220
MVTQDGDHQFDGGEKQAGLRPLPRPQLQGSSSSLLGRRAEQVWGLALRVGPANPPSSLPASGGGNHPPALRREASSSHAGEGELLLPGQGAAFRSPPGRLWPAAPEGRTTRPVARWCGVGGQVAAVIGAEVVVARGGFSADDTVNATCAPGLRLFGFNGWFSSPMRGRERGPSSGSVRPGAIAAAVLPSEAEVVVAATVVGGEPPGVEILPAVSPSEAGPDSAEGGNDTEGAAAPSVDDLFVGSRIVYLSESYFSREVMSEDPAIEAVEKRERRSGIKTFTEENLDAPLLAPEGGSGFAEARLTLP

SEQ ID NO: 85596 - protein, 577 aa, Zea mays
  Coding DNA Sequence Number=SeqID_42221
  Gene Ontology: Mol. function=nucleoside-triphosphatase activity; Cellular component=integral to membrane; Biological process=cell division
  Homolog annotation: Hit_ID=Q8LBL6; Match level="QueryCoverage=73%, HitCoverage=72%, E-value=1e-124, Identity=54%"; Hit description=Cell division protein FtsH-like protein
  Pfam annotation: Domain name=AAA; Domain location=326-512; Score =290.9; E_value=2.5e-84; Accession=PF00004.20; Description=ATPase family associated with various cellular activities (AAA)
  Pfam annotation: Domain name=AAA_5; Domain location=326-457; Score= -3.5; E_value=0.0053; Accession=PF07728.5; Description=ATPase family associated with various
  Pfam annotation: Domain name=FtsH_ext; Domain location=154-300; Score= 42.2; E_value=1.9e-09; Accession=PF06480.6; Description=FtsH Extracellular
  Pfam module annotation: Pfam domain module=AAA::AAA_5::FtsH_ext; Domain location=326-512::326-457::154-300
  Subcellular localization annotation: CTP_CleavageSite=20; ConfidenceScore=5.68e-01
MASLCPLSAAPAFPRAARPRAASFRGPASWSGLAATASNACVCSCGLLPTGGYARLRSRLRSPVRAKIDEADKGTGAGLGFPSPRRRKLRLRLRPRLRLLWWRLRRLSPRELMTDAGAALRRAVRRVPPAAAAPVVLALLLAVARLALPKNVAREVAYSDLVAGLREGAVAAVAFEEDSRRIYFSKNAGDDVGSDTNETGENAAAPAPKWPYYARRVPHDEGFLLGLMRDGRVDYRSSPRPAGRLLVDMLSTLLTLWVSLVPVMWFIQRQMSGAGGADKRRKPRKQRVGFDDVQGIDEAKEELVEIVSCLHGSLNYKKLGAKLPRGVLLVGPPGTGKTLLARAVAGEAGIPFFSVSASEFVEVFVGRGAARVRDLFKEAKEAAPSIIFIDELDAVGGSRGRSFNDERDQTLNQLLTEMDGFDSDMKVIVMAATNRPKALDAALCRPGRFSRKVVVGMPDVEGRKKILDVHLRNIPLEEDHGIISDLVARVTPGLVGADLANIVNESALLAARRGRNTVSREDIMDAIEREKYGVTGRQEADSERQGLTKLFPWLSKPGNKPSSPDDFRGLMGYHTLS

SEQ ID NO: 85597 - protein, 179 aa, Zea mays
  Coding DNA Sequence Number=SeqID_42222
MAYDILYDPPGGVLGSQASDHHWRRHRSHQSQRDGATAWLASHPKELGARGMESRLTPLSTFTTLASGGDHLCTSGLPAVATTSASPDCPVCQRSNGYFAPTVVCRGIKCATVCGCARRSQSTRQKVHQTVYRTCPVHHRTVQWPERQKLQRSESNGRVTWLAHRTVRCAMRQQPPPNG

SEQ ID NO: 85598 - protein, 75 aa, Zea mays
  Coding DNA Sequence Number=SeqID_42223
  Homolog annotation: Hit_ID=A2X6H7; Match level="QueryCoverage=97%, HitCoverage=96%, E-value=7e-14, Identity=60%"; Hit description =Putative uncharacterized protein
MGGRSFFCIFSFSRKSRRYSVDDEEAGDAAWEVPGRLRKVRSSDEDNGWWVGERDVDQKASDFIATFHRQRRLVV

SEQ ID NO: 85599 - protein, 54 aa, Zea mays
  Coding DNA Sequence Number=SeqID_42224
VSSELDYEHIRLWLRRSLTEPAITTKDKAITKLCAEELRHNGGKGNRLKDEKPD

SEQ ID NO: 85600 - protein, 145 aa, Zea mays
  Coding DNA Sequence Number=SeqID_42225
  Subcellular localization annotation: CTP_CleavageSite=50; ConfidenceScore=5.30e-01
MAQSTVGSLRAVSTPDSPVPPSSRWLGHVSRADRAADRWPCRPVAHRTVRCTPDSPALVLDTKSPKYLEMAQGHISLSVTLRGSAGVMGQRRRHKDTMGLRLRKNRSGERGPDEPERGRANRRVSRADDGKAKLTVARDGAWTRQ

SEQ ID NO: 85601 - protein, 133 aa, Zea mays
  Coding DNA Sequence Number=SeqID_42226
MDRHTLSIEYHCVVYQHSSETYPDRWEATCLVRRLEDNLWGEGNPRLNNIVNLVDVLNTELDHTLNELSKARAEIAELRAERVERLHEDYGSPASARTQHPYRSPPQGYHAYDVSQQASRQEVYPARAACPIG

SEQ ID NO: 85602 - protein, 322 aa, Zea mays
  Coding DNA Sequence Number=SeqID_42227
MARLRCTARKSVIPFLPSRRAERPLRRTVPGQSSHLERLHCRLHEEQERRHQEQEQEKEQQDSSPSPQKEGISAAVGDPDEDGDDDDASGSSSHGTERSEEPESEGWIARPITHDAARGCHFHDALDTLLRWAFDRHTWSIKYRCVVYQHRRGLYPDQWEATCLVHRPDDYLRGAEAFSEHYSITERDTAEAAMQDAARRALSQYCLLFSEVANGLDLKYYPRRLTGSAGGVIVSPVGEGNPRLNNMVNLAVVLNTELDHALDELGKVLAEVAELCAECATRHYLDGGSPAPVGIQHPYRSPPRGRFDYGTPDYRTQIDLDP

SEQ ID NO: 85603 - protein, 88 aa, Zea mays
  Coding DNA Sequence Number=SeqID_42228
MMAHSGNGTARQTVVMGWLRAGARGQGRKAPNLGGGIGRFHLLVRLVACGLYYKSHVKVVHGSEEGFRREALGGASCSSHGSPKEKHW

SEQ ID NO: 85604 - protein, 84 aa, Zea mays
  Coding DNA Sequence Number=SeqID_42229
MENRHRTSRAVDPDRFAPFLVRPRTPSAHPLSGEEGSDPPEIVAPEEGQEPDLSEIDLLGQENFDEGKSILPLMHKLPTLSTTA

SEQ ID NO: 85605 - protein, 147 aa, Zea mays
  Coding DNA Sequence Number=SeqID_42230
LWCWIWGYLLSSSLLRHEDVLSVSKVTVYRNSMNIIRKKEKGGAAYRWRDRSGEGRGWLGEALAVTAIDCVHKESENGSVDYPVHALRRGCELRRPWTGLSGEAGFDSSLGELHQGLLNRLRGLDRVGKGWAGRFTAAGARVAADTP

SEQ ID NO: 85606 - protein, 552 aa, Zea mays
  Coding DNA Sequence Number=SeqID_42231
  Homolog annotation: Hit_ID=Q6JAD6; Match level="QueryCoverage=90%, HitCoverage=72%, E-value=1e-172, Identity=80%"; Hit description =Putative uncharacterized protein
MEKCKPIKTPMPTNGHLDLDEGVTLCDRVPSPVLPGSSPLVMPRTKNASASGGGDDEDPRRPFRQVKGKTVYLEQQEGRKKRRSDREARAAAAAAAAAAQAALGDQPDVPSDQIAFRGRRLASRSRSSTHTSASTPPPTLPAPVTPIAPSTSTAIPTTSTTPASTATPAQAPTSAPPVPPPRFRERDETEVRPLASDPRLFDLQRATAARVRRFRAQMSAQIALRVHRLLDLPAFLLAAGAESEAHLTYLPGLLSFLTISGRYVEEWVRVFYASVWIDPDHHWMRFRFEREDVTITADQIRQLFGFPVSTTRLHSLCYGTSDPPRRPHGGVAPGTAHVAALFRPPFSDGSRRSPADFTTAAKYLYELVRRTLLPRMGYREATTHIQLWLLGALVSHSEFDVVDFLICEIEDTVLDGIRARRQLPYAHYLCHIFAQLIQPPRFQSTLEASRLVFGSYRPAPEIPVPAYAPMFDTQAEDAALRQFDTQGAADDDDDDDDFGIPPPPPPPMPPRSHDHEAGSSSAAPATPQAMDPALASILQTLTQCCSAGSRAG

SEQ ID NO: 85607 - protein, 66 aa, Zea mays
  Coding DNA Sequence Number=SeqID_42232
MGTHFTKKFIGFHRDWKGFAKRGGKLPKNQRDGEAEKGDLLTEGKQEGSADSPEHGRDGGRRGFHE

SEQ ID NO: 85608 - protein, 103 aa, Zea mays
  Coding DNA Sequence Number=SeqID_42233
MEDLITMTVAIVIGKLVEFEMSEKISQDEATSSSKIISLTHDEHKKMKGKKQDDDDEYDDKASTSSFAKEEIKEKGCYGNGKKALWKIGQTKPTPNAKKKEKS

SEQ ID NO: 85609 - protein, 126 aa, Zea mays
  Coding DNA Sequence Number=SeqID_42234
MQNGIGIQVGQIQVIEVKETAEERGNWKTKAADEKRNVNDGFVGVFCRNSDPTTDPPRTELLRRKNSDGYKMEKVRFRDNRHVVTCERQLTVGIDEGNDCGRQTLGFPLGRHLNLASEQSGSSIVR

SEQ ID NO: 85610 - protein, 176 aa, Zea mays
  Coding DNA Sequence Number=SeqID_42235
  Gene Ontology: Mol. function=peptidase activity; Cellular component =membrane
  Homolog annotation: Hit_ID=Q9M584; Match level="QueryCoverage=94%, HitCoverage=58%, E-value=3e-89, Identity=100%"; Hit description =Hypersensitive-induced response protein
  Pfam annotation: Domain name=Band_7; Domain location=8-169; Score =137.4; E_value=4e-38; Accession=PF01145.16; Description=SPFH domain Band 7 family
MGQALGLIQVDQSTVAIKETFGKFDEVLEPGCHFLPWCIGKQIAGYLSLRVQQLDVRCETKTKDNVFVNVVASVQYRALADKASDAFYRLSNTREQIQSYVFDVIRASVPKMNLDDAFEQKNEIAKAVENELEKAMSMYGYEIVQTLIVDIEPDEHVKRAMNEINAGKLHIFLVHS

SEQ ID NO: 85611 - protein, 192 aa, Zea mays
  Coding DNA Sequence Number=SeqID_42236
  Homolog annotation: Hit_ID=Q75HV8; Match level="QueryCoverage=34%, HitCoverage=11%, E-value=6e-19, Identity=73%"; Hit description =Putative uncharacterized protein OSJNBb0092G21.7
MEIPRVVPSRGQRTVAPRFAAREFRLTVVLLFRSWEGLKFSSSRFKYRAELRRIRLLFRPDNNAALLALETCRAADFSRDACRDGGRGSPRTTAARTSTQRGGTSARSTSATATEASAPAASGDAAGQSHPFPWQDAAISEPYYFLHLLAFFSYFAARSTTLSADDGGELHDHLLRREIQAVLVFLLLFESS

SEQ ID NO: 85612 - protein, 278 aa, Zea mays
  Coding DNA Sequence Number=SeqID_42237
  Gene Ontology: Cellular component=cytoplasm; Biological process =intracellular protein transport
  Homolog annotation: Hit_ID=A2ZWB9; Match level="QueryCoverage=39%, HitCoverage=21%, E-value=1e-23, Identity=48%"; Hit description =Putative uncharacterized protein
MVLGQPIWNDMEEFLPARAGSVLEDSLEKEQKAKDQAAVSKVEEVGTTAENADATGVGGIFSQLLALESTVEFNGAGSSEAVKQILKELAECFSNGSISREFISSRVGLLKLVVTAYPIEERNGGDLEIGLGQKMAVAIIGKLLADLVLSSEQIVWSGLDSVSIYWPEVLLMIGPYGGLVQYKYGEPTKHIPECDGVRILFNSSMRVIHRVSVFTTSFVGIGSKIPTTFLYEVRYQCASQNKDSVRYGITGLTQWWLKAFSQGNSHYTKILNFRGAKP

SEQ ID NO: 85613 - protein, 46 aa, Zea mays
  Coding DNA Sequence Number=SeqID_42238
MRCAACGLAVLAAALLGADRQTRTFFSVEKAARFTDMQSLVSSKAF

SEQ ID NO: 85614 - protein, 102 aa, Zea mays
  Coding DNA Sequence Number=SeqID_42239
MTASSRRPAMCSIRSAPTLTFTVVFTTENGQSIEKISIRCQCTFSDSVRDGDQSNNGKRDLTDVSNEENILYPTTIGKLLERLHKELKKKNTSNVAATLASF

SEQ ID NO: 85615 - protein, 178 aa, Zea mays
  Coding DNA Sequence Number=SeqID_42240
  Homolog annotation: Hit_ID=Q10QH2; Match level="QueryCoverage=37%, HitCoverage=37%, E-value=8e-12, Identity=61%"; Hit description=F-box domain containing protein
  Pfam annotation: Domain name=F-box; Domain location=11-71; Score =26.8; E_value=8.1e-05; Accession=PF00646.24; Description=F-box domain
MGGAGEVTELELRIQLPDGGGGGGYNINDNADILAEILARLDGRSLAAAACVCRLWAAVARRDAVWEALCLRHVGPAPPAAAAGPATRAVVAALGGYRRLYRLCLGPALDRLAQAQAQAARAHHLSLSLSLSLFSIDCYERLGGGGGAAGPSAGAGARGRQQQQPSSLLFLCKPVDVS

SEQ ID NO: 85616 - protein, 294 aa, Zea mays
  Coding DNA Sequence Number=SeqID_42241
MAERYQLPRSCVPPTTRRKDCGCLPSGGSEAVVGRVFSNTLQGPPPTARGLGPTRHANWPRAEEAKPPRAVHATPSGYEHSSTFAQTSGRKGGQPCRRHATAPSGRAPPTSNAPSMGAHAHASRNRRTGCNVRATAPPLAPLPRLLDCGTSTATRGNPAYDPAVPARRDGQYDQKWAGSDGGGRRAGAAVTSSAKLASLLELALSRKGIQRGARYNGPDHTWASKLDEAARWDDLVAGLRPMLYQAKGVPARFVSVGPATVAKASSEGWRLCLRPNICPPRDQFDKVTWCRRRR

SEQ ID NO: 85617 - protein, 22 aa, Zea mays
  Coding DNA Sequence Number=SeqID_42242
MAGNPGPLALTKMFSQVTVGAK

SEQ ID NO: 85618 - protein, 137 aa, Zea mays
  Coding DNA Sequence Number=SeqID_42243
MEKVRSSRAHRCDFLDPCCGSAQDAGALGNPRPVGRTEKQRAVTTEITVHRFRIHVVAGACRRGSHGISCQYETLPQIHSLSWTGFLMRRLTVSISTAGSTCPMLRVTAFELARSGHGLRRAGAAAAAWEKREMYGR

SEQ ID NO: 85619 - protein, 184 aa, Zea mays
  Coding DNA Sequence Number=SeqID_42244
MNKKHWHSKCHYKRNSGSPPQEQTTPLRGGRPAEQREADGWRAVTCSSSGDYDDFCSEGPSSGNADLRLDAAAKRPPPMPKLVRQGRAEGRRVGGNSPYVRPQTPQAKSSPTRSKALPCDSGAGSRMSCKPAQGRRSQTAARGAHDRPAVTSDPPTFAQTNGRKGRPAMQVACNRARWMRFSDF

SEQ ID NO: 85620 - protein, 167 aa, Zea mays
  Coding DNA Sequence Number=SeqID_42245
  Gene Ontology: Mol. function=carboxyl- or carbamoyltransferase activity; Cellular component=ornithine carbamoyltransferase complex; Biological process=amino acid metabolic process
  Homolog annotation: Hit_ID=Q8SA97; Match level="QueryCoverage=48%, HitCoverage=19%, E-value=9e-11, Identity=43%"; Hit description =Ornithine carbamoyltransferase
MALPVDVAGLRPRSGDVEAPLKPRSKARAESEPWGRAKRSSSSSGAEPESEPWVGRSGVRRLPGLSPSPSPESGGAEFAVFRGLARVRALGRAPESEPWVGRCGVRRLPGLSPSPSPGSGGAEFAVFRGLARVRALGSGGAEFAVFWGLAQVRALGRAERSSPSPGF

SEQ ID NO: 85621 - protein, 149 aa, Zea mays
  Coding DNA Sequence Number=SeqID_42246
MNREKWFLFKCFDSYKKALERSRAKTSSKDNLEAVGVSRQGVPKPTSECAACPSPDGSSAWASAEGGEARWPEPSVREVEVPRPSCSSRAQVRCACSRGVTSVHAGEGSERPQESACPVLGPTRPTFSEKALVLPFIVVRRGSRCTMGM

SEQ ID NO: 85622 - protein, 175 aa, Zea mays
  Coding DNA Sequence Number=SeqID_42247
  Homolog annotation: Hit_ID=Q10G12; Match level="QueryCoverage=82%, HitCoverage=59%, E-value=1e-58, Identity=74%"; Hit description =Expressed protein
  Subcellular localization annotation: CTP_CleavageSite=62; ConfidenceScore=5.39e-01
MTPCAVHSLDTSAGDNTAATPFSLPSLGALTREKYQQASAGGFMVAFAGRKYAARSIPIFVSNTSVTVSSFTLVLEFNKGRLENLHWKKDGCGACSGKSNFVCLGKQTCAIRTQSCKSQGPVDCSVGIQLAFSGTDKHESVLNSWYEVSNLRQYSLYGLYSNLKGTLSGQFNKIF

SEQ ID NO: 85623 - protein, 115 aa, Zea mays
  Coding DNA Sequence Number=SeqID_42248
MAGMYCNARDCLNKRMQPPARTAARILLSPVDKAKGSARKKDRERGIPRKGSFSAKEPGSEPPITDQGFEGWPPEGSTVATDRVGPTPTTGQGFEGQPPEGLHGRLRLLGLRAHY

SEQ ID NO: 85624 - protein, 120 aa, Zea mays
  Coding DNA Sequence Number=SeqID_42249
MGKNNKRKHEPTPPSEDFGDSEYSEEEFSSESEGSPTPIPLRNCRVLTGRFLKRYLAREYPISTALLAASAFRALVLAFLPPNPFCNSALAPSASRIEMAPKRKASSSSAAVIPPIDPNS

SEQ ID NO: 85625 - protein, 282 aa, Zea mays
  Coding DNA Sequence Number=SeqID_42250
  Subcellular localization annotation: CTP_CleavageSite=63; ConfidenceScore=5.23e-01
MRRVFPPSEPPDGEHSQSFRLVVGGTQLRRSWYLSAIVRLQGFSSGSPAASPRRWSPKTVTTSSMVGRSELGCDLGPALSFKDLHHPGWGGGRAEPELYLLRGFVGHLLPQHSRERALTGLAGGSDFDNAGLVGGERRQLQRVGLAGSAGSGSAPGAPSRRESGCRAARTGGLPKTSRAARAAFVFWGCPAFAPVRRFCVEVGAPLVREDPSGDLPVGGWLPSSVLSWWRLKKSSSPTGSPPPSALRASGSLALIACPLPSSGDVGEGVVAPPCALMALSLQ

SEQ ID NO: 85626 - protein, 49 aa, Zea mays
  Coding DNA Sequence Number=SeqID_42251
MADKGEGKGIVISNPRMSDISQKEIARKASDEKAKSCSSKNTSKKIVST

SEQ ID NO: 85627 - protein, 152 aa, Zea mays
  Coding DNA Sequence Number=SeqID_42252
  Gene Ontology: Mol. function=transcription factor activity; Cellular component=nucleus; Biological process=regulation of transcription, DNA-dependent
  Homolog annotation: Hit_ID=Q60DJ8; Match level="QueryCoverage=59%, HitCoverage=29%, E-value=2e-17, Identity=52%"; Hit description=CCAAT- box transcription factor-related
MSQASHGAAPAGAPLPWWAGAQLLSGEPAPLSPEEAPRDTQFQVVPGASQGTPDPAPPKGGTPKVLKFSVFQGNLESGGKGEKTPKNSTAVVLQSPFAEYNGRFEIGLGQSMFKSFLGVPFNVDSSTDFFAKGVEKLTSFFFPAGPFQLFLC

SEQ ID NO: 85628 - protein, 335 aa, Zea mays
  Coding DNA Sequence Number=SeqID_42253
  Homolog annotation: Hit_ID=A2ZQV2; Match level="QueryCoverage=79%, HitCoverage=39%, E-value=3e-43, Identity=45%"; Hit description =Putative uncharacterized protein
  Subcellular localization annotation: CTP_CleavageSite=58; ConfidenceScore=5.52e-01
MSPAARNHNPNRCHRCCGGGFGDESSSSGEASTCPSACFTASSSGTASSHSFSALSSSASTASSSAAGEERRDLTWLLDAFASATFDQIDSAYREAGGDPFVAAGILSSTQDTHPPQPPQPAPQPPPPPDLSPRSGSGGRKAGRRPKRVAVAATGMVADVIGKEYTRPAANSVVSMPNAWKGRDGESDGSGSGGRKDSVEEAEQFLCSMLGDNSELGMGVVRDVLGQYGYDVEKSFLPSISLVALDGLASISKNITTVCINVMEILWLFVVLIKCFQALDALLDISGVSSVENMETNHQSARRNDTCHLDMFSGNGLSVENLTAGNRRSLRQVFA

SEQ ID NO: 85629 - protein, 93 aa, Zea mays
  Coding DNA Sequence Number=SeqID_42254
MAGMYCNARDCLNKRMQPPARTAARILLSPVDKAKGSARKKERKGAERRTVTGPPLEYMKARAKPFPARRLDRTQDSKSAKRHSRSSKRLAHA

SEQ ID NO: 85630 - protein, 196 aa, Zea mays
  Coding DNA Sequence Number=SeqID_42255
  Homolog annotation: Hit_ID=A2YHW7; Match level="QueryCoverage=64%, HitCoverage=29%, E-value=8e-19, Identity=46%"; Hit description =Putative uncharacterized protein
  Pfam annotation: Domain name=DUF1005; Domain location=51-196; Score =83.2; E_value=8.2e-22; Accession=PF06219.3; Description=Protein of unknown function (DUF1005)
MASVFYVNSQLHAMQHGEMVAPLSLYDDGWPGGGEVAMGMTGDGELQNCRPSPCPRLHETSTTYYVRLRTGDAQLGYRFELVPDHNSNITDSAVCVAESSVPAVRGGQFAIDLTTAGSPGRGSSELGHALWPPGGFVMSAAVQEEGRRGRPSVGISVAHFGCAEDAAAFVALAAAVDLSMDVCRLFSCKLRRELSA

SEQ ID NO: 85631 - protein, 68 aa, Zea mays
  Coding DNA Sequence Number=SeqID_42256
  Subcellular localization annotation: CTP_CleavageSite=43; ConfidenceScore=5.30e-01
MSLAPYQSQQPPGGFVRPPALPTTTGSRCATCPQVFGFPEELWAHHVSGLPRRGWSSSRWSRKVSVPI

SEQ ID NO: 85632 - protein, 96 aa, Zea mays
  Coding DNA Sequence Number=SeqID_42257
  Homolog annotation: Hit_ID=A2WM97; Match level="QueryCoverage=38%, HitCoverage=6%, E-value=2e-12, Identity=91%"; Hit description =Putative uncharacterized protein
  Subcellular localization annotation: CTP_CleavageSite=47; ConfidenceScore=5.35e-01
MASGGGGPAFVGQVFTMLDPSGNGLMAVTTRFELPRFLTNRIATQLSCTSEAPPNVINPVIPKEIDQRFQKLPLFPIVKTSPHKKPTFDNRDNKRQ

SEQ ID NO: 85633 - protein, 28 aa, Zea mays
  Coding DNA Sequence Number=SeqID_42258
MATYDPITQATPDDRRERVSVVKKVITI

SEQ ID NO: 85634 - protein, 278 aa, Zea mays
  Coding DNA Sequence Number=SeqID_42259
GHVAQRPYVRLRPLAYVTGSRPCGSIGSPPERRAEAYTVWSGHMSAPDPRLALVKAWVFFVPESRDPAVTGPNLTQRGPEPILGVRFAPVRVLDLSRRSGPRVRDWAVVFGGDEEAHYRGRRFAPRVAAFAGRIRAGTSPLGNLAAGEFVPFVSYLSCGLALPISPFFLLLLEELGLQLQHLTPSPSSRPSSPTCARCSWGWCSSAQCADERMLRIELPKMESELSCDSFHRMNSIASCSGLVSSSLGFTRISWVCGRLAPSGCGGSGAMTTLSKDAH

SEQ ID NO: 85635 - protein, 426 aa, Zea mays
  Coding DNA Sequence Number=SeqID_42260
  Homolog annotation: Hit_ID=Q5GAU8; Match level="QueryCoverage=15%, HitCoverage=55%, E-value=3e-13, Identity=56%"; Hit description =Putative uncharacterized protein
MSVLSVGYLLPRILHQKKRCFFFQWIDGPDKFDPLTLDIRGVSFSSGSMVHTDAEKEVATERRMDSPPRCDCGDRAVIDEDYDKQFCCPNIDYPYGWRKCRFREWLYGPLSHWPEPEVKEKRYMGWAAEEVKFDPVLCKCGIEAKYGLVPSELGVGYFCGHMVDYDEETRKCSWESYDDKGEVMRTIESKRIMGQKMRCGSRLVDSYINDRIRDMRREAKSAFYDSPKRAEYRRLKAADEKRAQDAREWEAAQAEKQMLDNLADRLKGKIGSGVNYLADEAHARYVQDKMATVELMEEEDDDTSRLSELIALAEAGLHEEEEDDMSRLSELIALAEAGLRAQEEEDEFMSQAAAEVEAAYYKKKSDEAEAEDELFSQAADEAEANYYKRTGDKCDAGQCSKWNEVVVEDCATDDSEDELLIDCDSD

SEQ ID NO: 85636 - protein, 88 aa, Zea mays
  Coding DNA Sequence Number=SeqID_42261
RIPGRDKFSNRDVDGRKTFLMNIHMDRFSFQNLYRASDFTGTTLDKYVVEIDAYTTKPLTITGVRAGWKTKQAGPRGSAGAGLFKFEL

SEQ ID NO: 85637 - protein, 93 aa, Zea mays
  Coding DNA Sequence Number=SeqID_42262
  Subcellular localization annotation: CTP_CleavageSite=58; ConfidenceScore=5.33e-01
MGPAWRPLGPCSRLTFPWRMGPTATALLPGRKNRHGSCATPVYSYGSESTAGAATRVVAAFDVGVTDEQTTVESEVQQVEVAEQELIEGKLCP

SEQ ID NO: 85638 - protein, 146 aa, Zea mays
  Coding DNA Sequence Number=SeqID_42263
MNKTPALKVPLQTELRFHLRRYEQPHTIGGPAEQQKVDGWLAAASSNNDDDFRSEGPNSSSDDLRADAAAIGPSPTSSLERQGRAEGRRVGGQSVGGTGYLVGGETSSGCRGGRRHRKRLRSHSGQRAGHAAAASATNGERPSPDH

SEQ ID NO: 85639 - protein, 100 aa, Zea mays
  Coding DNA Sequence Number=SeqID_42264
MQKAAVEVGYLSVNVLRLWHSAIDCASFGLLSEVPLEAVAKMLGVGLPKRQKLQGDCLRILESSPISFCFWMERDASWPKKEITGVLGINLDGPEERNFP

SEQ ID NO: 85640 - protein, 15 aa, Zea mays
  Coding DNA Sequence Number=SeqID_42265
MASTDSLLSKRLAMG

SEQ ID NO: 85641 - protein, 43 aa, Zea mays
  Coding DNA Sequence Number=SeqID_42266
MDLLSWIVAGSIVALLILCILLMALERCGLESGLDACVCVHDS

SEQ ID NO: 85642 - protein, 115 aa, Zea mays
  Coding DNA Sequence Number=SeqID_42267
MTNGEVSTNDMNAAALGELGIVQQGPRPRFSASGHRAGMTVLRPSGAQQQLQKREKQVKERVTPEFGEYLKRNFIPLKSGCYKSNPLNRISPSRFKKRLARTTKLVHRLSKAFLS

SEQ ID NO: 85643 - protein, 56 aa, Zea mays
  Coding DNA Sequence Number=SeqID_42268
MAKAPLAVSAEPTEPLLGPCALQWAMPPWPLRAQVWPSTSLPWPTPLLAAGISWRK

SEQ ID NO: 85644 - protein, 104 aa, Zea mays
  Coding DNA Sequence Number=SeqID_42269
MQAACNRTKGAHPFDFDAPSMEAQAHTSCNRRAGYYVRETAPPLALVPCLLDCRTGTGKGDTPKGILLREGSGPRAFLLIRGSKAGPSEGFDSRLRALGPRAYY

SEQ ID NO: 85645 - protein, 222 aa, Zea mays
  Coding DNA Sequence Number=SeqID_42270
  Gene Ontology: Mol. function=inositol or phosphatidylinositol kinase activity; Cellular component=mitochondrion; Biological process =cellular iron ion homeostasis
  Homolog annotation: Hit_ID=A2WVS8; Match level="QueryCoverage=52%, HitCoverage=88%, E-value=4e-52, Identity=82%"; Hit description =Putative uncharacterized protein
  Pfam annotation: Domain name=Frataxin_Cyay; Domain location=110-222; Score=133.4; E_value=6.5e-37; Accession=PF01491.7; Description =Frataxin-like domain
  Subcellular localization annotation: CTP_CleavageSite=68; ConfidenceScore=5.19e-01
MASPSRKVLLGVTFERRLRSRTRQLFWAADLPVATTSRSLAAAAATTLPSGGSPAALLFSLRTISSTRLSKLSAFSDAPGPSVVDHKFVSRPRSLSTDNGQKVVQERSIMQEDEFHKLADETIHDLLETLEVEYGDSIQMDGFDIDYGNQVLTLRLGDLGTYVVNKQSPNRQIWLSSPVSGPSRFDWDAATNGWIYKRTGSNLVQLLEKEIGELCGTPVQLS

SEQ ID NO: 85646 - protein, 78 aa, Zea mays
  Coding DNA Sequence Number=SeqID_42271
  Gene Ontology: Mol. function=diacylglycerol kinase activity; Biological process=activation of protein kinase C
  Homolog annotation: Hit_ID=A2WVS4; Match level="QueryCoverage=96%, HitCoverage=11%, E-value=4e-35, Identity=93%"; Hit description =Putative uncharacterized protein
MDAQVSYAFHSQRKLHPEKFKNQLSNQKTYLKLACTQGWFCASLFHPMSRNIACLAKVKIMKKSGKWETMEIPQSSIF

SEQ ID NO: 85647 - protein, 155 aa, Zea mays
  Coding DNA Sequence Number=SeqID_42272
  Gene Ontology: Mol. function=diacylglycerol kinase activity; Cellular component=plasma membrane; Biological process=activation of protein kinase C
  Homolog annotation: Hit_ID=A2WVS4; Match level="QueryCoverage=96%, HitCoverage=23%, E-value=7e-70, Identity=82%"; Hit description =Putative uncharacterized protein
  Pfam annotation: Domain name=DAGK_cat; Domain location=37-155; Score =48.4; E_value=2.5e-11; Accession=PF00781.15; Description =Diacylglycerol kinase catalytic domain (pres
MENDVEKNNMVKEFYIPTYIFVPESPVEHASQIPTCPVIVFVNTKSGGQLGRELIVTYRKLLNHAQVFDLLDEAPDNVLHRLYSNLERLKHGGDTLASEVYRRLRLIVAGGDGTAGWLLGVVSDLKLGHPPPVATVPLGTGNNLPYSFGWSCLVK

SEQ ID NO: 85648 - protein, 71 aa, Zea mays
  Coding DNA Sequence Number=SeqID_42273
MTASAGAKLMVAINFLVIIATSPIWGAEDYSLVNLYDRSHNQELKEHVHNGSTSRTSVPIHTHLGKMAAAA

SEQ ID NO: 85649 - protein, 78 aa, Zea mays
  Coding DNA Sequence Number=SeqID_42274
  Homolog annotation: Hit_ID=A2WVS5; Match level="QueryCoverage=80%, HitCoverage=15%, E-value=1e-15, Identity=63%"; Hit description =Putative uncharacterized protein
MGLWLALLLADHGSLMYLFLGDLGCMLYTGCFRWELGSDKARRAKQALLDELGGDTIIDVLYLEFWTTPIVAEQVNFT

SEQ ID NO: 85650 - protein, 296 aa, Zea mays
  Coding DNA Sequence Number=SeqID_42275
  Gene Ontology: Mol. function=enzyme inhibitor activity; Cellular component=cell wall; Biological process=response to stress
  Homolog annotation: Hit_ID=Q5ZAV7; Match level="QueryCoverage=75%, HitCoverage=82%, E-value=1e-79, Identity=71%"; Hit description =Universal stress protein-like
  Pfam annotation: Domain name=Usp; Domain location=46-217; Score=80.6; E_value=5e-21; Accession=PF00582.17; Description=Universal stress protein family
  Subcellular localization annotation: CTP_CleavageSite=68; ConfidenceScore=5.59e-01
MAAKLSTSADAPASVRLSAAAQAAAIQPSSPRFFFSSLAGTNPASPHRRIAIAVDLSDESAFAVKWAVQNYLRPGDAVVLLHVRPTSVLYGADWGSIPVSVADEADAAEDAAAAAEGGPSEEELQKKREEEYDAFTSTKAQDLAQPLVDAQIPFKIHVVKDHDMKERLCLEAERLGLSAMIMGSRGFGASRKGGKGRLGSVSDYCVHHCVCPVVVVRYPDDAADASGDASGATDELHTVPEDEPVYHDAPEVQKGLFRHTFNVATKAEIYSLPPSWKLFHFEVFAFWKVLPRDSDN

SEQ ID NO: 85651 - protein, 106 aa, Zea mays
  Coding DNA Sequence Number=SeqID_42276
  Subcellular localization annotation: CTP_CleavageSite=54; ConfidenceScore=5.11e-01
MTNGEVSTNDMNVAALSELGIVQQGPRSRFSASGHRAGMTVLRPSGAQQQLQKREKQVKERVTPEFGEYLKRNFIPLKSGCYNRTVSGAPGKNDSGTRQLREFAPL

SEQ ID NO: 85652 - protein, 83 aa, Zea mays
  Coding DNA Sequence Number=SeqID_42277
MAKAPLAVSAEPTEPLLGPCALQWAMPPWPLRAQVWPSTSLPWPTPLLAAGGDKDDGYDYGNGKEEGIEANLQEFQDFDEFED

SEQ ID NO: 85653 - protein, 48 aa, Zea mays
  Coding DNA Sequence Number=SeqID_42278
MGSGHSTCSAEPGCRGGDKDDGYDYGNGKEEGIEANLQVFQDFDEFED

SEQ ID NO: 85654 - protein, 124 aa, Zea mays
  Coding DNA Sequence Number=SeqID_42279
MGSSSLRAEWESRLVGGYEIDGFGYDYGAASPLQPNRILAEYVDVYSPLLYTPNPPQVVSIATTAQAKMKLWKETSRSSKITTSSRCGLAATPSRLPVKAAVIYVSFPHFDLLQELYGRLRRMM

SEQ ID NO: 85655 - protein, 268 aa, Zea mays
  Coding DNA Sequence Number=SeqID_42280
  Gene Ontology: Mol. function=tryptophan-tRNA ligase activity; Cellular component=cytoplasm; Biological process=tRNA aminoacylation for protein translation
  Homolog annotation: Hit_ID=Q2QP62; Match level="QueryCoverage=43%, HitCoverage=28%, E-value=2e-52, Identity=88%"; Hit description =Tryptophanyl-tRNA synthetase, putative, expressed
LSDGGSPHGRGKGINKAGPFPANVEMMFRIHDLDPYFRMTRDVAPRIGYQKPSLIESRFFPALQGENTKMSASDANSAIYVTDSAKEIKTKVNKYAFSGGQDSIELHRKLGANLDVDVPIKYLNFFLEDDDELAHIKKAHSTLILATGRSIQPYQSDPHPTAQQISKPNTLGLALSPDTDIPWPLPLPTHLRSAIPSSRRLRIHLPGATSGQPLAVQPSSPSGELRGVAKMISRQLVLTYLYLLIYICLSSGVILFNKVGLCLLPSNA

SEQ ID NO: 85656 - protein, 106 aa, Zea mays
  Coding DNA Sequence Number=SeqID_42281
  Gene Ontology: Mol. function=hydrolase activity, hydrolyzing O -glycosyl compounds; Cellular component=cellulose and pectin -containing cell wall; Biological process=carbohydrate metabolic process
  Homolog annotation: Hit_ID=Q75I92; Match level="QueryCoverage=54%, HitCoverage=40%, E-value=4e-18, Identity=72%"; Hit description=Beta -glucosidase
  Subcellular localization annotation: CTP_CleavageSite=21; ConfidenceScore=5.04e-01
MDARWAVLLALLVASGGVRVCAAAGAKGANWLGGLSRASFPKGFVFGTATSAYQVEGAASTNGRGPSIWDSFAHVPGTASLRHCVPPTLNSARLLRLAREWRRKSD

SEQ ID NO: 85657 - protein, 434 aa, Zea mays
  Coding DNA Sequence Number=SeqID_42282
MKLGTAVGELGVSDSFAMELMGTCVALGGRMSSPELRESSARMLEVTGGRWPKNVPIPRAAGEDFFTSRMARDLRVFPYGRNIAAVVSAVMTKDRQDAAQKRRAVIRMVDPVREAKRARGSAKAAASGSGKLVPAAKMAAPWGSEASTGEKAAAAGGTKPLLGGPSPAKLPPPGKRVADFGTNISVEDYLGGSGEGQLVVVPPSVAATSPSAVVKAKGATHDPWAAFCASDEILTAAAARDVVGTMSQRLREVSQQLSQQVTQQLKQGFMSYASLVTCEGAMNALSREGCKHYEVFDQSDDNFEREIFKVDDHVVKDSTGALFDWMWGPHGREAVRERSDLAREQMVRAEDVEDLRHLNGAQPEAEVNPVLPEAEVDPAPPSETGEGSLAAPASTVSGEGSSPASAPMAEDPPKAAAELATEDPMAAAGSSQVA

SEQ ID NO: 85658 - protein, 113 aa, Zea mays
  Coding DNA Sequence Number=SeqID_42283
MPSSSSSAATTPTAEASSEDTSGTVAAAELRPGDTVEFGVSRMSSVRVQDMQQLGYFGGGVGRVPGAEEVPEPEGELVVFEAFFIAELRLPAHRFVSEVLQKFEVQRLKLKTT

SEQ ID NO: 85659 - protein, 250 aa, Zea mays
  Coding DNA Sequence Number=SeqID_42284
  Gene Ontology: Mol. function=structural molecule activity; Cellular component=intercellular junction; Biological process=regulation of transcription, DNA-dependent
  Homolog annotation: Hit_ID=Q75I82; Match level="QueryCoverage=87%, HitCoverage=53%, E-value=4e-61, Identity=58%"; Hit description =Expressed protein
  Pfam annotation: Domain name=Pinin_SDK_memA; Domain location=115-250; Score=11.4; E_value=5e-06; Accession=PF04696.4; Description =pininSDKmemA protein conserved reg
MAAATEKTAEDIRRELQELQRQHREAVGPESGDQPPQKRRLLSAVVKVDGAENNEEGTKDADAEGHGTGSGATEGSAGRGFNNGGFRRDGGLRMQRRVDYNSLPEPAPRELPRNEDPNLVRRNKRMLGQLLVGTLEKFQQEDKKLSNSEAFLRRSETQRKAEQKVREESERLRQKEREQIAEKRKRDMTLRARVAAKAEEKRLELLYIQWTEHHKRLSNFLRTKAEPPIYYMPTKPIIDDPAIVEQNKEK

SEQ ID NO: 85660 - protein, 109 aa, Zea mays
  Coding DNA Sequence Number=SeqID_42285
MSKSTLKRDYYELKECHLKGTIIGHIPNETVKVCKNKAEKTEKASEKGLTQSEKMVRLAGQTVLDRFNRSWTPVQPVSARGFPGEYQPNLKFNLEVQLVSPAELESSAG

SEQ ID NO: 85661 - protein, 242 aa, Zea mays
  Coding DNA Sequence Number=SeqID_42286
MQPGCTPPPVVTQDGDLQLDGGGKRVGLRPLPLPQPQGFSSPGLGRGVCRVGVGPCVGGGPLLHSVIGGKGGRRPWRRQLHRAWLSDASGFGAARAPASATAAGRGSSADEIARAAHGPTSNSTAFCPSLPHEFGHGRGPLGSSIRPEVSAAVVRPPGAEVVVVAAAGAGDGAPFGDSPVGCLNRFTKRESPRVKATSESGDPWTAPLSEARSDLTEGVVDAEGAAAPFQRQDPSLQGQIVL

SEQ ID NO: 85662 - protein, 175 aa, Zea mays
  Coding DNA Sequence Number=SeqID_42287
  Gene Ontology: Mol. function=hydrolase activity, hydrolyzing O -glycosyl compounds; Cellular component=cellulose and pectin -containing cell wall; Biological process=carbohydrate metabolic process
  Homolog annotation: Hit_ID=Q42975; Match level="QueryCoverage=81%, HitCoverage=28%, E-value=1e-75, Identity=88%"; Hit description=Beta -glucosidase
  Pfam annotation: Domain name=Glyco_hydro_1; Domain location=1-175; Score=-126.8; E_value=2.6e-12; Accession=PF00232.9; Description =Glycosyl hydrolase family 1
NIAGNQNGDVAVDQYHRYKEDVDLMKSLNFDAYRFSISWSRIFPDGEGKVNPEGVAYYNNLINYLLQQGMTPYINLYHYDLPLALEKKYGGWLSAKMADLFTDYADFCFKTYGDRVKHWFTFNEPRIVALLGYDTGSNPPQSCKIPYEISGISILRTSEVPLKNNITLALLGVVN

SEQ ID NO: 85663 - protein, 161 aa, Zea mays
  Coding DNA Sequence Number=SeqID_42288
  Homolog annotation: Hit_ID=Q75I82; Match level="QueryCoverage=70%, HitCoverage=28%, E-value=2e-26, Identity=56%"; Hit description =Expressed protein
MREFRPLLVIPVTTADVLSHQSKKEVAAGCGAKECRPNFLRRLYQKTLVNTQDANRDELTRFQKQVEEQYLSNVERQLERIQNARNARKANGHANMQEMDKELDTHRAEHGPKTRRVPEEGGNDDDEDAEDMAAEDEVMDEVLGINDGINEDPSKPSESYY

SEQ ID NO: 85664 - protein, 257 aa, Zea mays
  Coding DNA Sequence Number=SeqID_42289
MRAPLRRGPRPRPPTGGDNEAIKAKELEARRQVALMVSPAEATTTTVGSLTNGDDHLSTDDSGHLCTGGLLATAAASAHAKRSSLPSSYGSEDKTIQERDHHPHGVRRLVRPPGWHRNSAAGGAGDAVDVADLRTAQPSPVRWTDIAAACLAPWLGWPRCRLRRCLLPLGQGVAEERQPREVALLQQQQEEDKIGSTTTQETKSASSPAVRPPEGVALTWIPLVNTSAPHPEAQKAEGRDECKRSEAWQLPEEWTPF

SEQ ID NO: 85665 - protein, 77 aa, Zea mays
  Coding DNA Sequence Number=SeqID_42290
MNPPCWGKNLPSATLGDGETEAETCGDIMKLENGIRLNPSHETKPQRWGRPLMKEHIENSATPIAVTVVKLRNASGS

SEQ ID NO: 85666 - protein, 46 aa, Zea mays
  Coding DNA Sequence Number=SeqID_42291
MAMMGSTSEKMYLCQVRKQQIFVAFVPRWCPKKKIKTEASGGSVLL

SEQ ID NO: 85667 - protein, 286 aa, Zea mays
  Coding DNA Sequence Number=SeqID_42292
MKLPERGIGLCLAGDTRSRSPDFTRPPASVDRAPRPKHPPPTSSPACARGPADSGHHRRQVVPRRDRKDFPEPTPSFAGPPSPPLFEEHRVPCCRVRMTLEPHPLQPGWRSLDSESFGYRAEDTIEAIALHGLTTFYGFHPLELSTRPIGLFPAEKEDDPMWKDRVEHAKDIWALYQGQTAHLTVRCMNALYRLQAVRGEAMSQLMALVEDTKITLDNREELVVDLSMEMVEKDLQVEHMANQIQELEELEGARENTIEVLEDQLINTQQQLEEANQHLDMHHQEI

SEQ ID NO: 85668 - protein, 66 aa, Zea mays
  Coding DNA Sequence Number=SeqID_42293
MGKLVPSLLMLLLCRAINNFCQVITFPLVTQCSSMDQAVSLAARSRQFESSFYPCKWVNPYLCGLF

SEQ ID NO: 85669 - protein, 132 aa, Zea mays
  Coding DNA Sequence Number=SeqID_42294
  Gene Ontology: Mol. function=aspartic-type endopeptidase activity; Cellular component=chromatin; Biological process=chromatin assembly or disassembly
MADPTTAVFAKMIENLTTTVTSLQATVVQLQKDKSSGAPGDHYGPRHHERPSAGDHYRQHHHDQPPRFRKMDFPRYRRMKAPPSWRRVKELFNLRYGPPRRSAPLAELAACPAYKNGSRISRSVPGASSSAV

SEQ ID NO: 85670 - protein, 84 aa, Zea mays
  Coding DNA Sequence Number=SeqID_42295
MVKLAISMRQGFDPFLEKLHGSSGKLSKGSVEAEGLWKWLAVVAGARVAQSSPELRTVSGQRRLMGFADWSQRYGVMKFGLSHF

SEQ ID NO: 85671 - protein, 53 aa, Zea mays
  Coding DNA Sequence Number=SeqID_42296
MDALRTARPVALTLRRDRWRLWQGKRATLRLRHNDRVKKGNGKGGYHEKDPSP

SEQ ID NO: 85672 - protein, 350 aa, Zea mays
  Coding DNA Sequence Number=SeqID_42297
MNKRPAFNVPLQTELQFRPRGHEQPPHRGAYGATSSGRLASDLCSSSHGPRTDTATGRLSFASPLKGREPDIKAKERAAPKRTGSNSPPPPAWLEDISSAELEDGFHQQKLEEEVSSRPVREVEPRLASLSALARMMNILEAEGGTKIAARLCFSPSRGWWSPSWVTTGEGMQPGRVMKILEDERWLKGTNSHRVAFLHRQGGRIAGVPHPGARKSSWAKSSPTRSKLLPYGAGAGSHASCKLAQGRRSQTAARAVHANARRSQASLRFRPDQRVKGRAAMQAACNRAKWARPFDFQRTQHGGPRPRVMQPACRSPTCKQLHRRLHHYHASSTVEPVPRLEATLRTTQQC

SEQ ID NO: 85673 - protein, 96 aa, Zea mays
  Coding DNA Sequence Number=SeqID_42298
MGRLKGKCAFGPFLSILVIECQHKWSCVNLCQMMDKVKINIKKQEKSIWKRDDFVQPKTVQSGSTGLSGGAPDSVRCARLALANWLLSGFIGGVRL

SEQ ID NO: 85674 - protein, 20 aa, Zea mays
  Coding DNA Sequence Number=SeqID_42299
MVVQKIDNQKHVLKAAEASL

SEQ ID NO: 85675 - protein, 19 aa, Zea mays
  Coding DNA Sequence Number=SeqID_42300
MGRQLPLLIHRNCPVKPPD

SEQ ID NO: 85676 - protein, 285 aa, Zea mays
  Coding DNA Sequence Number=SeqID_42301
  Gene Ontology: Mol. function=oxidoreductase activity, acting on the CH-OH group of donors, NAD or NADP as acceptor; Cellular component =cytoplasm; Biological process=metabolic process
  Homolog annotation: Hit_ID=A2YK32; Match level="QueryCoverage=85%, HitCoverage=72%, E-value=1e-112, Identity=75%"; Hit description =Putative uncharacterized protein
  Pfam annotation: Domain name=2-Hacid_dh; Domain location=16-240; Score=24.7; E_value=1.6e-06; Accession=PF00389.21; Description=D -isomer specific 2-hydroxyacid dehyd
  Pfam annotation: Domain name=2-Hacid_dh_C; Domain location=122-285; Score=101.4; E_value=2.9e-27; Accession=PF02826.10; Description=D -isomer specific 2-hydroxyacid dehyd
  Pfam module annotation: Pfam domain module=2-Hacid_dh::2-Hacid_dh_C; Domain location=16-240::122-285
MGDPSERNGHGALTRVLFCGPYWPASTNYTREYLQDYPFIQVDEVGLEQVPDVIHSYHICVVKNKRIDSDIIAKATQMKIIMQYGVGLEGVDVNAATEHKIKVARIPGSTTGNAVSCAEMAIYLTLGILRKQKEMDTAVNRKDLGVPVGDTLFGKTILILGFGAIGIEVAKRLRPFGVKILATKRNWSSDTLPSYVDELVDKKGGPEDMYEFAGRDHLLQIGIVDHKFVSSMKKGSYLVNIARGRLLDYKAVFDHLESGHLAGLGIDVAWMEPFDPEDPVLKFPN

SEQ ID NO: 85677 - protein, 264 aa, Zea mays
  Coding DNA Sequence Number=SeqID_42302
MVTTSPWVGRSKPGCDLGPTLSFKDVHHPRWGGGRAEPELYLPRGFVGRPLLRRSRERALTGPAGGSDFDNTGPVDGGRRQPQRVGLVGLAPGAPSCRKAAAAPCAREDRPRYRALPGQRSCSGAVMPLHRYGASARRSVPHSSGRICVGICRRADGPCRRCRGGGGSRSPRCRRDHRHHPRFGPPALCACPRPSSVGVGEGKIAAASALRPSLLQFGHPERGSLSLLSERATASRPSVFCCSAGPPHRVGLFVPAEVEPEFRL

SEQ ID NO: 85678 - protein, 188 aa, Zea mays
  Coding DNA Sequence Number=SeqID_42303
  Gene Ontology: Mol. function=enzyme inhibitor activity
  Homolog annotation: Hit_ID=Q6ZC83; Match level="QueryCoverage=85%, HitCoverage=81%, E-value=3e-15, Identity=36%"; Hit description =Putative uncharacterized protein P0702G08.13
  Pfam annotation: Domain name=PMEI; Domain location=37-184; Score =29.8; E_value=9.9e-06; Accession=PF04043.6; Description=Plant invertasepectin methylesterase inhibitor
  Subcellular localization annotation: CTP_CleavageSite=41; ConfidenceScore=5.35e-01
MATTGTCMGSIIPPLVLLMTVFSAAPRVSGEPPSVVPSACKAATAAGGGTFTEDFCLSALDGKSAGAADYADMALVAVDLATANATATEAKIDALLGSSSGSGAASSEGLRSCRALYGAVVRQYQPECRAAVAGGRYGDAEACLGRTAQAAAACERWFVQRKVASPVAPEDDALAKLADLAIALASVA

SEQ ID NO: 85679 - protein, 143 aa, Zea mays
  Coding DNA Sequence Number=SeqID_42304
MIFASPDPRGLDSASTPEDGLRLARPQGSDSTSTPEEVLRLARPPGLRLSLDLGGVTTSLGPTTPQGEAIITLPLASPGYGEQDRRPIWLAPVKQVMMAPRVLHDNGGSQPLTEARIRQQGSDSPDNCASTGLKRSSDGHDAT

SEQ ID NO: 85680 - protein, 426 aa, Zea mays
  Coding DNA Sequence Number=SeqID_42305
  Homolog annotation: Hit_ID=Q6QP51; Match level="QueryCoverage=10%, HitCoverage=32%, E-value=1e-06, Identity=47%"; Hit description =Putative growth-regulating factor 1
MQAACNYTKGAQPFDFGASSMDAQAHTSWTGKGDTPKGILLREGSGPQAPLLIRGSKAGSSEGFDSHLRALGLHAYYWSEVRRLAPRKGSTAASGHSGSMPTTDQGFVGWPPDGFDSRPRARRVRDDSGNDSVTESHQREVSSPRTLSNGTGSGKSLAGSGAALANPAPAKPLTASTYQPENLEPDYAPGLRPLVTPISTKLQRPDGVQFRLRAPSTQGTRSRLARAQPRGRNGRPRQIHASPEGLLKQWAHLRLARGPARAGFTEKQPWPDRLASRPDRRSIQCKDRLTPYPDARFPVDKAEESPPRPTPGLGLDLASDDNLRLARPLGSDSTSPWTMISASPDPRGSDSASTPEDGLRLAQPQGSDSTSTLEEGLRLARPLGLGLSLDLGGVTTLLGPTTPQGEAIITLPLASPGYGEQDRRPI

SEQ ID NO: 85681 - protein, 103 aa, Zea mays
  Coding DNA Sequence Number=SeqID_42306
MVKNFGSKTVQIAMNAVVTSHLLVCLYSAAAFENKLPTVPQAPPPGFAPPEGEDAIEDGEVIDISAEDQLKLWDLRIKNHNLQKLKDILKAKRQRVTTQAKVR

SEQ ID NO: 85682 - protein, 219 aa, Zea mays
  Coding DNA Sequence Number=SeqID_42307
MQIIERKCEVQKGAGISSILLHGPESLAQVEGVAPELGKMVPGLEKVLLESLGSVDLATQGFSCLVKGTLGRSAMSRSQRQRCQHGQRQSWLEKKLCRPEPGRAVHWRDRRRSRIAEAMSRADVLGGQLAEATERPVELSARAGFPEETLAAMAQAWCRQDLFVGNRIVCPSESYFSRKVMSEKVMSEVSVSRRRRSPSARSALPAYVYSVVFRIPLSK

SEQ ID NO: 85683 - protein, 144 aa, Zea mays
  Coding DNA Sequence Number=SeqID_42308
MDIEEQSAPGEAKEAVSRDMLQANGAGLAVVMAASINRIDDVEAAKSAESTRLEDHEQSREDASQKPYSPSPGAGSRRRRVLETCSSDRRCTSAVGTKGTKRRLSYEERRKRNWDDLEAGCRAPFIGPSPRPPILSAHKNLTIS

SEQ ID NO: 85684 - protein, 84 aa, Zea mays
  Coding DNA Sequence Number=SeqID_42309
  Subcellular localization annotation: CTP_CleavageSite=72; ConfidenceScore=5.68e-01
MAAESRPSRVLAQLGLYSVPVARASSSVFPARLCSFLCSSAFPSTPSHGSHALYSFQPVESLYSRALGLQLPCARVPGSRSDLA

SEQ ID NO: 85685 - protein, 56 aa, Zea mays
  Coding DNA Sequence Number=SeqID_42310
MQIIERKCEAQKGAGIRSNLNFDVIGLIMKIVSYAQSKNEQEKDVSNLIYYSMVEF

SEQ ID NO: 85686 - protein, 255 aa, Zea mays
  Coding DNA Sequence Number=SeqID_42311
  Homolog annotation: Hit_ID=Q6QP51; Match level="QueryCoverage=19%, HitCoverage=22%, E-value=4e-14, Identity=77%"; Hit description =Putative growth-regulating factor 1
  Subcellular localization annotation: CTP_CleavageSite=29; ConfidenceScore=5.33e-01
MLQGPPPTTRGLGPASCKLAQDRRAKPPRAERTTAQRLQALHFRPNQRVKGRTAMQAACNRNKGAHPFDFDASSMGAQAHTSCNRRGGYYVREAAPPLAPVPCLLDCGTSAATRGNPALDPTVPTEHIGHGSASHGRRRDGRYGQKWAGSNGGGRDRERGYTEWDPSPRRNRALSPPTDQRFEGWPFRRVRQPPQSTRALSPPTDQRFEGWPLGRVRQPPQSTRAPRPPLVGGSKAGPSEGFDSRLRPLGLRAHY

SEQ ID NO: 85687 - protein, 126 aa, Zea mays
  Coding DNA Sequence Number=SeqID_42312
MSSWQLERFWRPVHVMSWPSEERLSPVEGRVRRNPSSEVEAESEPWGRARRSLSSDVEVEPEPWGRARRSFLWRSRLDLAAVSLTLSSGTAVGAGQAALFSRQVGQWSGEVTVVTSALSTEECASG

SEQ ID NO: 85688 - protein, 81 aa, Zea mays
  Coding DNA Sequence Number=SeqID_42313
MPPEKKYKHLKALYLKGHIDVGWRQSVSSPSDDSCKISLTDMNVWDVDGQEPISGIDLEGCDHVEASKNGLRLVLSTGLTE

SEQ ID NO: 85689 - protein, 119 aa, Zea mays
  Coding DNA Sequence Number=SeqID_42314
MAQSGSSGNNQVLRAIAPCPVAVSTRERCGTLPIDLETLQGRSPGTQCQRLPDLVTVAQKLVRGKPSWRGHSCVTGDNQRSSGIVIERIRSLRADHKRRDLHLIKLSYLMEDWALPSIR

SEQ ID NO: 85690 - protein, 95 aa, Zea mays
  Coding DNA Sequence Number=SeqID_42315
MRIRLKLMKMKIKRMSHLKRKTMIKGEMKRMKTRKMIKKFSVKDCHTQESTKQFNKVTLSTPSSVTFIRGVVDALRDPDWVLAMQEELNNFTRNE

SEQ ID NO: 85691 - protein, 66 aa, Zea mays
  Coding DNA Sequence Number=SeqID_42316
MGDQGERTVGPEMGKKKLGCLQAGGTRAGRQKSEGGERRSGWEMKPRELPWKKQERSAQRPEDNDG

SEQ ID NO: 85692 - protein, 157 aa, Zea mays
  Coding DNA Sequence Number=SeqID_42317
MCLLPNQHGQAKPSSDEDLEAEALPPSQDLARTPLYNYLHHDKISDRTRPMGTRHPALLRRAARHHGIQVAPPLVVTRRQPHCPPLRHATIPISHVPPLPITRAPLICPSCGRMGTPSTHLPYAHLESDPPPPKANKTSLTLDIAAHPLLQSYADGM

SEQ ID NO: 85693 - protein, 229 aa, Zea mays
  Coding DNA Sequence Number=SeqID_42318
MASSGRRLGGARAMGERRELDRREKRRAGAGRSDRHRGTRPGDPPATNAPRKKSTGLGRRTSRGTHDCAQTNLRERVKQGGSRGRKSMEGCPAHHRSSPHGRIATVLTTTARPTPLAWSMSREMDSLPSPGADCSSVCSRVAWRGAGHVLEIRERRKTTEGLEARGSRALLLHQCDSSVVEGAGAGRGAPRRWAGGRTHGACGIFQRRRKIPATVRRKRSARNKKSREW

SEQ ID NO: 85694 - protein, 93 aa, Zea mays
  Coding DNA Sequence Number=SeqID_42319
MNRYVPTMVGSKTNGSDLIQRGDMPKLISTVQGWISGPEAFFYLTMEALLEENSEANRGTVILPAVWVQTALATASCGPRRKEERSEELPVCR

SEQ ID NO: 85695 - protein, 28 aa, Zea mays
  Coding DNA Sequence Number=SeqID_42320
PPQSGPVPRTIGASPESPAMQSVPVFGA

SEQ ID NO: 85696 - protein, 120 aa, Zea mays
  Coding DNA Sequence Number=SeqID_42321
MAGSKDHTKISTTNIIKPAMEALPADDQRPFEDLVMHDEKEVPEVHNESIKRPRMGSNKVSKGQPKCALVWRTGLSGVPPDSVRCTRGLQAEHFTFGNSQRRFSIIHQTVRCTTGQCPVP

SEQ ID NO: 85697 - protein, 238 aa, Zea mays
  Coding DNA Sequence Number=SeqID_42322
MEHEDMVAFQGGHPPFKGDSPYLRPQPSWAESSPTLSKVLPLRCGGWVPRVMQAGPEQKKPNCRRGACNRPAVTSIPPLSPRLAGERADSHAGGMQPRQVGAPLRLPTHPAWGPTPTRHATGSPVATCKQLHRHSHHCHASSTAEPGLGKGDTPKRILLREGTRLRASLLIRGSKAGPSGGFNSRLRARGFCTHYRSEVRRPAPRKGSTAASGHSGSAPTTDQGFVGWPSKGSQPPQT

SEQ ID NO: 85698 - protein, 290 aa, Zea mays
  Coding DNA Sequence Number=SeqID_42323
ENPLNKQQQLLRREILEALGLNSVLHCRNPRGSRPQLRPTLPWEPHWWFSEALEALGLNSVLHCHGNLTGGSVKLCGRYQRPVFIRPKPRNPRRLTQICPVITEKVSASPDPRPRPREESHPRPTSASASGEVSASPDLSLGPTTLQRIHHYCRRFETGGSDALAVGGYKRPRGRGSERLQASACLVLVPARPTPSKRALVLPFIGVRRGSSWCDVVAVGGVPEPGGGTTVGAIESLLTSSCFRKGAESRRRHRVESEPLGRARRIPTAEARAESEPRGSGEAEFVVFWG

SEQ ID NO: 85699 - protein, 187 aa, Zea mays
  Coding DNA Sequence Number=SeqID_42324
MQAGMNHCTLLSSALDLGTSNPHALDPHTLDLGTSNLRGQHPTIPTLWIWERAISAHLCWFVLHPHAPNILHQRTYLSPISAPFHLTWKPKSPPQSAFIVDSYIRAIPSNMETSMPTSISVHRRVPPSSAHSVPSTLSTSIKTHDHCEGCRQIPHQTSTLVVCSTPITIAVGFNAFAVFMLSVWLVS

SEQ ID NO: 85700 - protein, 94 aa, Zea mays
  Coding DNA Sequence Number=SeqID_42325
MGLGVCGSLCQVWVRPLGRKCLKTDISAVLAVMSGQGSSSDLVVLDQRHYGTGGYEIDGFGYDYGAGCQHCNHCLGEDEAVEGDFQEFQDYDEF

SEQ ID NO: 85701 - protein, 99 aa, Zea mays
  Coding DNA Sequence Number=SeqID_42326
  Subcellular localization annotation: CTP_CleavageSite=54; ConfidenceScore=5.54e-01
MAAHLDSAGGPCASFNGVVQGAVAISRELPRMRLGLLFLKVTLGTGFQSVKSTFAFRRKRFCPTVNIPLIPLLSHPGFGAPRPGRKHNHQVCWDQVSHI

SEQ ID NO: 85702 - protein, 15 aa, Zea mays
  Coding DNA Sequence Number=SeqID_42327
MVLGLREFGHGSDDK

SEQ ID NO: 85703 - protein, 151 aa, Zea mays
  Coding DNA Sequence Number=SeqID_42328
  Homolog annotation: Hit_ID=Q6QP51; Match level="QueryCoverage=32%, HitCoverage=22%, E-value=1e-11, Identity=71%"; Hit description =Putative growth-regulating factor 1
MQVACNRTTRAHPLGFDASSMEAQAHTSCNRRAGFYVQATASPLAPMPRLLDCGTGAATRGNPAHGPIVPIEHIDHGDRERGYFERDPSPRRKRAPSPPTDQGFKGWLLRRVRQPPQSTRASGSLLIRDSKAGPSEGFDNRLRALGLRAHY

SEQ ID NO: 85704 - protein, 115 aa, Zea mays
  Coding DNA Sequence Number=SeqID_42329
MKLQKPFLRERSRKVNADSAEIKGEEAPKGALQRKTIRASTASMELLPFILQLQLRLGQPVCKYYKLNSKFKGKARFQERISGAPRSYQGTKVAVSSNNIIEVINLTFDVFEGSW

SEQ ID NO: 85705 - protein, 160 aa, Zea mays
  Coding DNA Sequence Number=SeqID_42330
TDDTTEAAAMKTLTTFCGYHPLEMALQSDAMAHLANLAQTTKLTLDSREDFVVDLSSELVEKDLQQELEEANDHLDMHHLEMEANEGGSKGEEDPEELGPAPGANVTTSVMPPSPMVARQHCGQNEQVPPPPPPAPTVQELMAQQKEILRQLLQRQPHPQ

SEQ ID NO: 85706 - protein, 104 aa, Zea mays
  Coding DNA Sequence Number=SeqID_42331
  Subcellular localization annotation: CTP_CleavageSite=49; ConfidenceScore=5.50e-01
MVVLISIAATSFAILLLLSLPSCLHLCATLFSAFTMFFLPNLLPLPMVVAASRPTLVNAGTGRVGLAPGLSPCVPPRRTQWHLPRLGYLGDEESGSEIMDIQGP

SEQ ID NO: 85707 - protein, 69 aa, Zea mays
  Coding DNA Sequence Number=SeqID_42332
MAYFPDSCPRSCSPSSPDRIPSCTCVADAWDPLPVRSSPIERELRGQNLLTEILAPRLSGSRATDADFG

SEQ ID NO: 85708 - protein, 133 aa, Zea mays
  Coding DNA Sequence Number=SeqID_42333
MRTIRLKSPRNSQEKPLSSSRLVEASGNETDGFGYVYGAGKWYSFRLERVMELPLDAQSSGRCLDVDERVEQCRAVAGVLHVLARFVQVLQMQHLRGIHTYREEAPRTELLGSRRRLGEGERWAAAVSSQVAN

SEQ ID NO: 85709 - protein, 314 aa, Zea mays
  Coding DNA Sequence Number=SeqID_42334
  Gene Ontology: Mol. function=RNA-directed DNA polymerase activity; Biological process=RNA-dependent DNA replication
  Homolog annotation: Hit_ID=A3AWR3; Match level="QueryCoverage=34%, HitCoverage=23%, E-value=4e-11, Identity=36%"; Hit description =Putative uncharacterized protein
MATERVGVDTRLTQQASRKPRRHGARRDETPTRRAPTSCNPATTELNRKDKSPPPSPKLKSHFRPGYVNRRRRNTTSTGTVENEDSSGALSAPLEVAATHGLIDVSRVFRRILESLLPVQGGSSSPLVLGAEDALQQVPDSWGLSSPTTVEGVAAATSTATDDSVLKTIFVPPSAAVLEAVEPTATPAVRNNRPRSFNVSAVCRSARISATKPMPSMIRAQQNLCHKLGLLKTDDRSAFDVALQKFSTLFKGPLPKEVAAALESLFNLDIVDAELVDEALMEVAGDGIAEIQESAAELQEEVRRNACSSLLVAA

SEQ ID NO: 85710 - protein, 99 aa, Zea mays
  Coding DNA Sequence Number=SeqID_42335
  Subcellular localization annotation: CTP_CleavageSite=65; ConfidenceScore=5.15e-01
MRQKGSAYNNLRTNNSFLPDSARAQAAAVWNLDSFTAAFLSFLVREGGGAGRPLRKQKVKTNVCVRRKKWVLSIRLQSCLMFLRQNRQGFFSLSFDICG

SEQ ID NO: 85711 - protein, 175 aa, Zea mays
  Coding DNA Sequence Number=SeqID_42336
MMIEQRYVKQIELGRGHSTNLYGLSKKGLYEVKTKGAKENKKEKGESVLDCIAPDSPWTVCAERQTVRCASRQRLAATSAEGQWSSGAPDSLVPLRTGNQSIMLFSVHALFTVRCVPDSPVHPRTEGNEGLPNRASMAPRSLRTIKGTPGRMELHTKHPMNILQCRDFAITPLFH

SEQ ID NO: 85712 - protein, 156 aa, Zea mays
  Coding DNA Sequence Number=SeqID_42337
MYCLGFRVYGSDLVEFGVCLCCITISSPTKMDSADSIADKAIGRMQEISDKIFSVARETIRPGRGLTSFDATKLRVALEEIACMLEQDSLVLQEHLDIVNNVNIPVDSSYEPSTLSSPPPSDDDLTPHWDFAGHFQNFWGVEYDSDQMPSFSDNDV

SEQ ID NO: 85713 - protein, 496 aa, Zea mays
  Coding DNA Sequence Number=SeqID_42338
  Gene Ontology: Mol. function=microtubule motor activity; Cellular component=microtubule associated complex; Biological process =microtubule-based movement
  Homolog annotation: Hit_ID=Q10I12; Match level="QueryCoverage=72%, HitCoverage=70%, E-value=1e-109, Identity=62%"; Hit description=DTW domain containing protein, expressed
  Pfam annotation: Domain name=DTW; Domain location=329-486; Score =24.4; E_value=2.3e-07; Accession=PF03942.6; Description=DTW domain
  Pfam annotation: Domain name=Kinesin; Domain location=20-236; Score= -134.3; E_value=2.3e-06; Accession=PF00225.14; Description=Kinesin motor domain
  Pfam module annotation: Pfam domain module=DTW::Kinesin; Domain location=329-486::20-236
MEKISVGVRFRHPNLVAANISPDSSGGGIDHEWRIDDSHISLLHRAAGPVLGASFAFDHVFDGAATNERIYGTVVRELVGAIGGGFSGTAFTYGQTSCGKTFTMNDSDADPGIIRRAVRDVFDTVRQDGGGLAFPRYGVCGAKSDGKHSATCDFEESGLSACGYLGAEDIISFGGSCERLDLRDLNGGIFCDLAGEVGSLSCCHNDGGCARFIKKTKSDGWPAGLERPSSAANQIENFVDDSTIGESNHGSEVGFTYTVNGNLSHSVVTNDSDSDEVNGMVNGCNGMGKEIDEVSAAIGQDWTRKNMDKCTIAYTEKELRIGIERGVKPKIRWLSRGPLGEAAVSNGFLVTKIQMKKCKLTGEITVFEEFSITIPPKSALLFPCQRAISIDALGCQVQHLIVLDGTWAKAQKMYHENPWLQLLPHVKLESDRVSLYSEVRHEPKAGCLSTIESIVVAMRKLGEDSKGLDDLLDVFESMIADQRRCKDENVKQKLKS

SEQ ID NO: 85714 - protein, 342 aa, Zea mays
  Coding DNA Sequence Number=SeqID_42339
  Gene Ontology: Mol. function=DNA binding; Cellular component=nucleus; Biological process=regulation of transcription
  Homolog annotation: Hit_ID=Q84U75; Match level="QueryCoverage=72%, HitCoverage=74%, E-value=1e-82, Identity=66%"; Hit description=R2R3 Myb transcription factor MYB-IF25
MMLLLDEELVSLSALMRVRGLGLGRLGACSETVGVDAVERAAAKADGEALQARKSPEKLWLSQPTERDLATFRPNDGDDNEPSAPRCGGRVCENRNTWSLIAGHLPGRTDNEIKNHWNSHLRRRGRAGDSRDDGVVVNIDLVKLPGGRRASSRGIVAAAKPAGKNKEKRKNGKGRNNVAEAEQQLEEEDANVSTTTPRTQSHCASAAQSEEQAQASASGLTSEEDLLALSEEMVVSALLAPGSPKLLEVGPDGSCVDGDGGLSGDSGRGSGGPSGDVAQELHLDDDAIMDWDSMGLDIPTADDTWNPLVWDYDQTSLVPEPEGEGRRQRDEMMSDLFFLDNL

SEQ ID NO: 85715 - protein, 65 aa, Zea mays
  Coding DNA Sequence Number=SeqID_42340
MAGGGRGRTWTLLLGRARLWLWLRRHLCCGAEANAQRRTGAGEQTMRMEARLVAAAEGDDGVGPS

SEQ ID NO: 85716 - protein, 136 aa, Zea mays
  Coding DNA Sequence Number=SeqID_42341
MGKNNKRKREPTPPSEDFGDSEYSEEEFSSESEGSPAPIPLRESSDDSDDSQGLAAEVWTYIRAVERSGLEGSDESEYSSDEEDSSEGGGGDGDDDDDGGGGGNDGDDGDDSDGGGRGGSKDGDGGSSRGSNRASG

SEQ ID NO: 85717 - protein, 542 aa, Zea mays
  Coding DNA Sequence Number=SeqID_42342
  Gene Ontology: Mol. function=ubiquitin-protein ligase activity; Cellular component=intracellular; Biological process=protein modification process
  Homolog annotation: Hit_ID=Q2L3D3; Match level="QueryCoverage=88%, HitCoverage=56%, E-value=1e-169, Identity=65%"; Hit description =Polyubiquitin-like protein
  Subcellular localization annotation: CTP_CleavageSite=35; ConfidenceScore=5.07e-01
MAPLRRRRRPPHRRPPRRPGWCTSLCALPIPEPSRCTRGGTTPSAPCSTTSAPVGTGAILRLLYAGRQLALDSTLAELRLPPDSTLHLLARLRSTQHPHAWQLASHIASTAAIAESEPSRMPSAAFSLDELVKEFILRAHRANLRLSRYDRAATVEDRAAADHTAEYLEIFLQAGAALALVRLYLSKSPFRSYAESAIKCFVPTDPSSLPMDLLIVLLEFCRLLSLAAGRNELLYRSCRRTLASALSTRPKLPPSMNSPTRLIEQVLPFARETVDMVLDGLASMPMIISPSDLDEFSNFLKVMCQQARRWISDEGPIPSIFYSRESQHGDTWIWRFHIMSMYMLKRLDECLKTLEMDLPLSSESIGVMESQTIWAARSHILVMLTELDFIAAIYEDVGHNLQLVLLAHKAPLNALVRCSKRNERLHWLVKHKNLLCFEARRSLVFMMLPEGKDDFGELHEMLIDRSHLLDESFNYIAQAEQAELHGALFMEFKNEEATGPGVLREWFCLVCQALFSPKQVLFSPCPEDKRRFYLNESKFPGY

SEQ ID NO: 85718 - protein, 166 aa, Zea mays
  Coding DNA Sequence Number=SeqID_42343
MARCMGSDQLRGKWVTRLVGKDTQPLQSVKLPYTSHELPPLMVNTRKGGGIDLPPNRHTRRIFGQPQPQPAEMDPPPPPPPVGVDPTVIAQMRMMQQMTDTMADMHAQMRKEHQETCQERERIYTRKCARRERRYARREGRSCNSSKHHCILHHHQFHPGTSTGNL

SEQ ID NO: 85719 - protein, 42 aa, Zea mays
  Coding DNA Sequence Number=SeqID_42344
MASATTQWHHRGLGYRNALLVGHKVRILCNKSSTGEHKGAKG

SEQ ID NO: 85720 - protein, 220 aa, Zea mays
  Coding DNA Sequence Number=SeqID_42345
  Gene Ontology: Mol. function=ubiquitin-protein ligase activity; Cellular component=intracellular; Biological process=protein modification process
  Homolog annotation: Hit_ID=Q2L3D3; Match level="QueryCoverage=86%, HitCoverage=22%, E-value=2e-71, Identity=68%"; Hit description =Polyubiquitin-like protein
  Pfam annotation: Domain name=HECT; Domain location=1-220; Score=37.8; E_value=1.3e-11; Accession=PF00632.16; Description=HECT-domain (ubiquitin-transferase)
MELFKPNCVAEFTAQVAVWGGGGASAVDPLHLKYFTFAGRIIGLALMHKVQVGVVLDRTLFLHLAGRSITLEDISVADPVKYASCKKILEMDAAEIDNLYLTFSRGAHELGTEKIIDLCPGGEDVSVNIGNRKHYIDLLIKNIFVDSISSQLTHFAEGFADILVNPKRREELFECLDLEDFDRLLGGSNNAINLQDWKSHTQYNGYKEKDRQITLFWKID

SEQ ID NO: 85721 - protein, 98 aa, Zea mays
  Coding DNA Sequence Number=SeqID_42346
  Subcellular localization annotation: CTP_CleavageSite=48; ConfidenceScore=5.20e-01
MGVGKGRLVTAVRSERLPFPSINNPFASLVSSHLFAAPYCLFPFFSPKASTMGKNNKRKREPTPSIGGVLVDSEYSEEEFFLRAPKGSSGSRLSPGVV

SEQ ID NO: 85722 - protein, 371 aa, Zea mays
  Coding DNA Sequence Number=SeqID_42347
MVQAEATRQHIAWKRSRKEEAQDEDPIPPAPEDGQQLPLVFFGLGQPMPPAGLDLNFPPGPMGGDLPAPQDDNTHGDWDQWIENVQPNQHIPQPFPPDLQPVQPDELQLSNQHSGLSSDSSFGAGQVAPLQNGHVVEEGPVLLGDGLAVNIAAFNGPQEVDGPTLQVDHVPGIADLPLQAHVGDPNNNHFQNLEMNFMINQEWQPGPVFQMFEERKRADQFSRLWTSWSKSFLLSTIPSALLKPGMKSLPFAIPKECPNVKLLDDVLSESSKDSDSCDAPTPIIVESELRRSKRLKESRAGFMHGACPKRNCLMCQHNFDGPPLLSSKVMRNLGSRFCNLSDDDLSEKKIEEEEISCGSCWPAEDGQKGFG

SEQ ID NO: 85723 - protein, 561 aa, Zea mays
  Coding DNA Sequence Number=SeqID_42348
  Gene Ontology: Mol. function=monodehydroascorbate reductase (NADH) activity; Cellular component=peroxisomal membrane; Biological process=hydrogen peroxide catabolic process
  Homolog annotation: Hit_ID=A2X8R9; Match level="QueryCoverage=85%, HitCoverage=99%, E-value=0.0, Identity=81%"; Hit description =Putative uncharacterized protein
  Pfam annotation: Domain name=Pyr_redox; Domain location=165-260; Score=113.1; E_value=8.4e-31; Accession=PF00070.18; Description =Pyridine nucleotide-disulphide oxidor
  Pfam annotation: Domain name=Pyr_redox_2; Domain location=7-305; Score=155.0; E_value=2.1e-43; Accession=PF07992.5; Description =Pyridine nucleotide-disulphide oxidore
  Pfam module annotation: Pfam domain module=Pyr_redox::Pyr_redox_2; Domain location=165-260::7-305
MGRAFVYVILGGGVAAGYAALEFARRGGYSRGELCIISEEAVAPYERPALSKGYLLPEGAARLPGFHTCVGANDELLTPKWYKEQGIELVLGTKVISADVRRKTLLTGTGETISYKTLIIATGARALKLQEFGIQGSDASNICYLRNIDDADKLVSVMKSCPGGNAVVIGGGYIGMECAAALVTNKIRVTMVFPEKHCMGRLFTPKIAEFYENYYTSKGVTFVKGTVLTSFEKDTTGKVTAVILKDGRHLPADMVVVGIGIRANTSLFEGQLMMSTENGGIKVNGQLQTSDSSVYAVGDVAAFPIKLFDDDIRRLEHVDSARRTGRHAVASILDPSKTRDIDYLPFFYSRVFTLSWQFYGDNVGEVVHFGDFTSSSPRFGAYWVNKGRIAGAFLEGGSREEYEAISIAVRREAVVTDMGELEKQGLALAIQESQKEVPDSGLAVVGKPTYAWHATAGVIAAVSIAAIGYWYGRKRRRCPIRWSIEWHRTVAAKKRRRMKIIVFAKKNTHISLVGDGKNGRHPPIGSRRRWNTREGIVSCPPLSSLEAKNRAGRGPVSYLKE

SEQ ID NO: 85724 - protein, 124 aa, Zea mays
  Coding DNA Sequence Number=SeqID_42349
  Homolog annotation: Hit_ID=Q6QP51; Match level="QueryCoverage=42%, HitCoverage=24%, E-value=2e-07, Identity=53%"; Hit description =Putative growth-regulating factor 1
MQAACNRAKWTRFSDSRHASMEAQAHASRTGKGGNPEKDPSPRRNQAPSQLTDQRFEGWPPEGFQQPPQIAWALHPLLVRGSKAGPPKGSTTASGYSGSVPITDQGFEGWPPKGSQSPQTPSKG

SEQ ID NO: 85725 - protein, 238 aa, Zea mays
  Coding DNA Sequence Number=SeqID_42350
MAPRMLCDDGDSQFSYGSRRTTLLHLHCTPGSSPYAYKRKDQGPLREGWPRGDEDGTGALLGPLASLSRVDACNPLLQAHPTWARDEHEGRGIPTSLTPVSGRLAPFPPSRSLHALDPSGLGHAATLTRRPEGPPGLETPTILLVETSELSFEPAIEGRFDRSICVVPSGVAKKYVDTFLEAPITSKEPAAVLSGQARTVRGTGLDGPRPGVRRQCSLVRRGRSAAQGRTVCDLVQEP

SEQ ID NO: 85726 - protein, 303 aa, Zea mays
  Coding DNA Sequence Number=SeqID_42351
  Gene Ontology: Mol. function=hydrolase activity
  Homolog annotation: Hit_ID=A2X8R7; Match level="QueryCoverage=98%, HitCoverage=89%, E-value=1e-135, Identity=78%"; Hit description =Putative uncharacterized protein
  Pfam annotation: Domain name=Abhydrolase_1; Domain location=74-288; Score=48.5; E_value=2.3e-11; Accession=PF00561.11; Description =alphabeta hydrolase fold
MELEPGTTMHVWAPKHHVGKKGTTISPLEPTAAKKKKKNRKSPESRPNVVLIHGFAAEGNVTWQFNFGVLVSRYNLYIPDLMFFGKSSTSSADRSPDFQAECVAGALARLGVARCDVVGFSYGGMVAFKLAEARPGLVRSLCVSGSVVAMTDAVNRETMERLGAGSSAELLMPDTLKGLKALLSVSMYRKMWFPDRFYKDYLKVMFTNRKERMELLQGLITSNTDAKIPVFQQKIMLLWGEEDKIFDIELARKMKEQLGDNCFLYGIRKAGHLLHVERPCAYNRQLQRWFAYVNSTEDHVQAR

SEQ ID NO: 85727 - protein, 189 aa, Zea mays
  Coding DNA Sequence Number=SeqID_42352
  Subcellular localization annotation: CTP_CleavageSite=40; ConfidenceScore=5.30e-01
MRMVMIMLMVMVVSIATTAQEKMKLWKETSRSSKTTTSSRCGLAATPSRLPVKAAVIYVSFSHFDLLKTRASSPARLRLSSARRSSVGAPLTEGERTDAVASCWCRDDRGLDLVEVECAMLSSRSTSSRHCFMALGEAVELEGWRSNSLATDNAPSAALDGVRDACAGVCCRAACTTARDENGWNAWMS

SEQ ID NO: 85728 - protein, 246 aa, Zea mays
  Coding DNA Sequence Number=SeqID_42353
GLQASEEKEEEFPGTLCMDGPKDYKTGVLKDCTAQRPYVRLRPLAYVTGSRPRGSIGSPPKRGAGAYAAWSGHVLVPDPRQALIKAWVSFAPQPWDLAASGPDPAQGGPGARPRGPSTLVVISTFFRPRGGPGADHMEGSDAVYDATIDSRVGTVPSHCSKGPTPKKYDSWAQTPVSEARPPWRASGEIFSGVSGRQWGNPSLKRDSLERGSHPHHSQRPFALEFSGLFCRRASNSLAWMVLLSPP

SEQ ID NO: 85729 - protein, 142 aa, Zea mays
  Coding DNA Sequence Number=SeqID_42354
MEKRIGKRLGSVQPKLSSVWHTGLFGGAPDSARCATLVSGEKAALGKRSAAYGYNSPDCPVVHRTVRVILLQVTTDIQLSSTTRQPPTTPNRELYLVVKVHCGEEVAIKLLFNPYSEKIYDYLGGIEDIKKSKFSPFNRFVL

SEQ ID NO: 85730 - protein, 287 aa, Zea mays
  Coding DNA Sequence Number=SeqID_42355
  Gene Ontology: Mol. function=DNA binding; Biological process =regulation of transcription
MWPDRPTLYSDCLAPYADGPDGLSRVCTACGGLGAGLGNWLLKMGSAAADPDGPHLRADGPDMCRSANLSPMCVGRLSLPRSYPLNPAIEGRFDASIFAFPSGVAKKYVDAFLERQTLNKNRGGALCIGADGLRAGAERSVAWCEARRCSLHRGGRCKGIDNYELKPKGNTFRQFCSRPKRHLENIIWALQTSDAKIKMSKLVSRVSNEFFSNVITDVKGSSSVHKLEPKQIEFVESSTNSYLSVVEGFKEHRLHNHGVLKPYDETEQQYSENGTEKKSQVNTGWRN

SEQ ID NO: 85731 - protein, 27 aa, Zea mays
  Coding DNA Sequence Number=SeqID_42356
MAAAMNNNEVTDWYSRDLGIDPRHHII

SEQ ID NO: 85732 - protein, 30 aa, Zea mays
  Coding DNA Sequence Number=SeqID_42357
MTKVMLAEGVQSSRNGRKQGYNRDANAKSA

SEQ ID NO: 85733 - protein, 132 aa, Zea mays
  Coding DNA Sequence Number=SeqID_42358
MSMLVDCYSSTDCLSGELGGLEEVRVRGRDPGGAEVSHLAGAAPRRTQDRSSFRLRLRLELSQPPPLVAIRDGDSAAGTGSPATAEAKRGRPGRMQAPTAKKDTALAVSEPESGMQMRSELRPNRRLHGHGQ

SEQ ID NO: 85734 - protein, 96 aa, Zea mays
  Coding DNA Sequence Number=SeqID_42359
  Gene Ontology: Mol. function=nucleotide binding; Biological process =defense response
  Homolog annotation: Hit_ID=A2ZFB2; Match level="QueryCoverage=63%, HitCoverage=6%, E-value=3e-10, Identity=60%"; Hit description =Putative uncharacterized protein
MDKKDIKKGLTHLSAIKCPLLMFIPSDELEQHYQRENLMKIEHLVASRFPLIWEVDSMSHKALHVEHSSTNATDESWHMKTSSNHWKRFRRDEVCV

SEQ ID NO: 85735 - protein, 990 aa, Zea mays
  Coding DNA Sequence Number=SeqID_42360
  Gene Ontology: Mol. function=microtubule motor activity; Cellular component=microtubule associated complex; Biological process =microtubule-based movement
  Homolog annotation: Hit_ID=Q93XF4; Match level="QueryCoverage=86%, HitCoverage=99%, E-value=0.0, Identity=91%"; Hit description=Kinesin heavy chain
  Pfam annotation: Domain name=Kinesin; Domain location=4-335; Score =314.8; E_value=1.6e-91; Accession=PF00225.14; Description=Kinesin motor domain
  Pfam annotation: Domain name=Kinesin-related; Domain location=409 -958; Score=1106.7; E_value=0; Accession=PF06548.2; Description =Kinesin-related
  Pfam module annotation: Pfam domain module=Kinesin::Kinesin-related; Domain location=4-335::409-958
VVVRVRPTVSRPVNGKDLWFVRKTAPDSVAVGDRSFPVDGVLDDRASQADAFDLVGLPMIENAMAGFNTSLVCYGQSGTGKTYTMWGPLGAMVDSGSDHADRGVVPRVFQNLFSRIQRMGESSPEKQTSYQCRCSFLEVHNEQINDLLEPSQRDLQIRENASNGIHVENLTDEYVSTADDISQILMKGLSNRKVGTTSMNLKSSRSHVIFTCVIEAWSKGSSNGFSSSRTSRITFVDLAGPDTDELGAAKHSTKEERHLKKSLSRLGKLVNVLSETPESHKVDLPYEQSRLTHVLKDTLGGNSRVIFLCSISSEHRCRSGTLSTLRFGERAKLMPNKPVINEISEDDVNGLSDQIRQLKDELIRTKSGDTTTCKARYFSAQSARESLHTLRVSLNRSLIFPHIEVDSEEEMDVDEEDVQELRDQISKIHSSSEDTLDDFMDAESGDESTPCSVGRSEDDQVIIDDFEGPQQEEQKEVSNNTNANEDLGSDRKSNLSIIASTRLSPIQDPTLCSSPKIHNKARMSITSLGLSPSKIRISDSPGDRNVEMCTNSAFRSSLQSSKLSPTDSLAASLQRGLHIIEYHQQNPAPRKSFIGLSFDHFARQSVAKISSAVQALPEDQGNNLCSFCKKPMNTNDNQTENVNLDKQIKDGNITKEIASKRETELEALCEEQRAKIQELSSLIDQYKNRSEELTSEGKVSVSLSVNEREVLLAEIQSLREQLKNQTTVSTTGSLLDQLRNGSTDQEYELDKERQKWMESESKWISLTEELRVDLESNRMHAEKTEMELCNEKKCTAELDDALQRAMYGHARMVEHYVELQELYNDLLEKHRRVMEAISEVKRAAARAGRKGCGTAFAAALAAELSTVRIDREKERAQLKEQNRRLRIQLRDTAEAVHAAGELLVRLRETEEASTLEKERTAALLQENEKLKKQLEKLRKKHEMELETMKVHLAESRLPESALGAFYHHENERTPDDDLSWRAAFASAYSD

SEQ ID NO: 85736 - protein, 94 aa, Zea mays
  Coding DNA Sequence Number=SeqID_42361
METHDLRAERESRLMGGNENDGLALTMVMVVSIATTAQEKMKLWKETSRSSKIMTSSRRGLAATPSRLPVKAACIYVSFPHFDYCKDYVDVSDI

SEQ ID NO: 85737 - protein, 45 aa, Zea mays
  Coding DNA Sequence Number=SeqID_42362
MATGVTTDTHRQAMPLAIAKAERPFESEELFLVNLELLELSQTCS

SEQ ID NO: 85738 - protein, 120 aa, Zea mays
  Coding DNA Sequence Number=SeqID_42363
HLERLHHRLHEEQERRRQEQEQQGSSFSLQQEIESVRSCSPVLPLEAPHAPPLSAPAPGVAAGGDPDDGGGDDSSSFSVAEPPELFQLKCLSHAPWVYKESSSLISCEKQTIRIEFYPCK

SEQ ID NO: 85739 - protein, 304 aa, Zea mays
  Coding DNA Sequence Number=SeqID_42364
  Subcellular localization annotation: CTP_CleavageSite=46; ConfidenceScore=5.61e-01
PTPAKGTPAWDWVPIGLCGATAVKSWSRLWPSMFWRRSRALSKETRASSPARLRLSSARRSLVYVPLTEGERTDADASCWRRDDRGLDLVEVECAMPSSRSTSSHHGFMAPDEAVELGGCRSNSLATDNAPGVALDGVRDVCAVGEASRIRDEYSAPRSTGTLFRQRTGHAACPLRNKCEGRAAQSPYVMLRSLAYVTDNKPCGSIRPSTEWGAEVLRIESGHASIPDPCLGHDTSFPGTLSWVVRSSLGRVRTLSNGSGLLYFGGPGCAYRGPVSSGPDGVVSDNATSTAHEILLELFSARLR

SEQ ID NO: 85740 - protein, 79 aa, Zea mays
  Coding DNA Sequence Number=SeqID_42365
MPSPSPQAGSLSRLAWLYVVGRVIGKKTIEVEMDLTKAKSERYLWGNNTAAMNSDKKQQFTLGLAPVSKETSVSNQAEY

SEQ ID NO: 85741 - protein, 269 aa, Zea mays
  Coding DNA Sequence Number=SeqID_42366
  Homolog annotation: Hit_ID=Q6J9V9; Match level="QueryCoverage=24%, HitCoverage=33%, E-value=1e-09, Identity=47%"; Hit description =Putative uncharacterized protein
MARGLGPTRHASWPRAEEAKPPRAVHATAQRLQASLHFHPDQRVKGRTAAQAACNRAKWARPSDFQRTQHGGPGPRVMQPARRLLRASNCTATRTTTTPPRLRNQYRDSRQPCVRPGSASQARRGSERRYAFAIMTASKKGPGKGDTPKRILLREGNRPRASLLIRGSKAGPSEGFNSRLRARGLHTHYWSEVRRPAPRKGSTAASGHSGSAPTTDQGNDLVMESHQREASSPRTPSTGDRLTGDTMFGALRGQHGAFPPPPYGKATQA

SEQ ID NO: 85742 - protein, 181 aa, Zea mays
  Coding DNA Sequence Number=SeqID_42367
MERSEEQEPKGWIARPITRDATRGCHFHDALDTLLRWAFDRHTWSIEYHCVVYQHRRRLYPDQWEATCLRGSCGLDLKYYPRRSTGSTGGVIVSLVGEDNPRLSSMDNLAAVLNTELDHTIDELGKVRAEVAELRAECVARHYLDGGFPAPVGIQHPYCSSPRGRFDYGTPDCRTRIDLDS

SEQ ID NO: 85743 - protein, 70 aa, Zea mays
  Coding DNA Sequence Number=SeqID_42368
MHDLLLVLVLLGHFGWLLGQEDELSGYSDAGTDFLQIGCSDGTAAAAAAEETASGTDAGADASAGAGDLA

SEQ ID NO: 85744 - protein, 153 aa, Zea mays
  Coding DNA Sequence Number=SeqID_42369
  Subcellular localization annotation: CTP_CleavageSite=53; ConfidenceScore=5.12e-01
MTLQGTGGEICLEKGAHPSGSSHASLLLHSPRPSAFRASGWGVPVFVGGIRVRATLPSGLAAGELALFVSYAVVLPILSSSCCCWRSATSWGLALFCHRSTSRIFIMQPGCSLPSVVIYKDDHQPRGGGKRAGLRLPPALSFEDVHHPRWGGR

SEQ ID NO: 85745 - protein, 136 aa, Zea mays
  Coding DNA Sequence Number=SeqID_42370
  Subcellular localization annotation: CTP_CleavageSite=46; ConfidenceScore=5.20e-01
MGARPHTLYKLARSAKKANRRTGSVQTALRLHALPPSPQPAVKKANCHTRSVQQSCGYSPFHLHHNQRSRSEPPHKEHATAPRLRAPSASLQPVVQPLAWGPRPTCHTPGAPTPRCREVTPLLVPIPRLLEAVAED

SEQ ID NO: 85746 - protein, 95 aa, Zea mays
  Coding DNA Sequence Number=SeqID_42371
MEDLEVQEDLTYIEKPTQILETADQGAPPPPIVDHCLFCGHHRVRAPSSAMPESHHRRPIESLRLRRCFATPALPLKTALIAPRLVPKPQEPRHG

SEQ ID NO: 85747 - protein, 49 aa, Zea mays
  Coding DNA Sequence Number=SeqID_42372
MVWWWWLGNAVAGAMCHTRFWKRSHTLPQVMIPVLPGGHDSPLITTKVT

SEQ ID NO: 85748 - protein, 55 aa, Zea mays
  Coding DNA Sequence Number=SeqID_42373
  Gene Ontology: Mol. function=ATP-dependent helicase activity; Cellular component=intracellular; Biological process=DNA recombination
  Homolog annotation: Hit_ID=A3BNH4; Match level="QueryCoverage=96%, HitCoverage=2%, E-value=5e-12, Identity=56%"; Hit description =Putative uncharacterized protein
MGEEAKNIVDNNYDKLQMHGRGKDYSSNWWKAFGGLLIAHGTNVDLSIHSIILII

SEQ ID NO: 85749 - protein, 77 aa, Zea mays
  Coding DNA Sequence Number=SeqID_42374
MELSLTQDCSGEDAAHGDTCGLRTRPMTPGDTPCTRRRAQPAAKVEINDGDKSHRGSHSLRISRRVMAKALVARVRL

SEQ ID NO: 85750 - protein, 86 aa, Zea mays
  Coding DNA Sequence Number=SeqID_42375
MGLGVCGSLCQAWVHPLGEDRAHGYERPRELQRLVVLDQRHCGTGGYEIDGFGYDYGAGCQHCNHCSGEDEAVEGDFQEFQDYDEF

SEQ ID NO: 85751 - protein, 408 aa, Zea mays
  Coding DNA Sequence Number=SeqID_42376
  Subcellular localization annotation: CTP_CleavageSite=19; ConfidenceScore=5.22e-01
MPTSSSSAAATPPSDSLPPAAASSEETLSSLMAEELRAGDSVDFGVSRMSSARVQDMQRLGYFGGGVARVPGTEEVPKPEGELVVFEAFFAAGLRLPAHRFVGKVLRRFNKRMIGDEVAQFGSCTFTPKTGKTTMQGTVEGHEGLPVSEMCSHFYSVYPPFEVAEEDVDEGALRCAAGLSSGRDLVEEFVAYGVWPLAHGWVLGEVCPRQMPFHGGRVVRSPAFALNLQSRDPAAFVREAEDGAVRLVGRYVPRTEGQRSFDIRGSNDRLNRRVDEDVRGPGGKDVFARAPGVFGSDAEVMDKDRQGAAQKRQAVVRLVEARPKRQRGSAKVAAPGGGKPPLVAKSGAPTSSKAPEATTGAGGSKSTKAVLPASRVPEVAKAARALPSAGKRVADFATGYLVWRTILV

SEQ ID NO: 85752 - protein, 156 aa, Zea mays
  Coding DNA Sequence Number=SeqID_42377
  Gene Ontology: Mol. function=5-formyltetrahydrofolate transporter activity; Cellular component=membrane; Biological process=translation
  Homolog annotation: Hit_ID=A2YIM0; Match level="QueryCoverage=55%, HitCoverage=15%, E-value=3e-37, Identity=91%"; Hit description =Putative uncharacterized protein
  Subcellular localization annotation: CTP_CleavageSite=14; ConfidenceScore=5.33e-01
MVIPSQCRSPLAVPAPAVSTNKLGFTPEFLGRVKLVTSFASLLGVGLYNYFLKEVPLRKIFLVTTIICSALGMTQVLLVTGLNRKFGISDKWFSIGDSLIITVLGQVLEQLSGQSPAMQLLECGLKVKDNELLRRNFSDTGCFGCGIQEHIDLGIK

SEQ ID NO: 85753 - protein, 64 aa, Zea mays
  Coding DNA Sequence Number=SeqID_42378
MMFCRAMANLDGAREANNSIRRKFEMKKENHEDEVLQQKEKIQGLENEVNRQKEQNQTLMKCLV

SEQ ID NO: 85754 - protein, 398 aa, Zea mays
  Coding DNA Sequence Number=SeqID_42379
  Gene Ontology: Mol. function=aspartic-type endopeptidase activity; Biological process=DNA integration
  Homolog annotation: Hit_ID=Q33BC8; Match level="QueryCoverage=61%, HitCoverage=16%, E-value=5e-10, Identity=24%"; Hit description =Retrotransposon protein, putative, Ty1-copia subclass
  Pfam annotation: Domain name=zf-CCHC; Domain location=246-263; Score =19.3; E_value=0.0018; Accession=PF00098.14; Description=Zinc knuckle
MSGEDGPPPVFDGDDFPYWKIRMEAYLEAIDIGVYKAATQGFPEPRDPTNLVGEEFNYEKWNAKAKNTLFRGLCKDVFNRVKIIEMLMICGWIFVLYMKGLKEVNGLGLTQISQSDVVRKILSVLPIDKYGTHCHCATSNESFHLLLPHKYWEMINAHEMYMHINDKDGSSSKRKDLALKDSQEKKGKAKMQVEKESSSDDDLDANIALMVRKTTKILKKLNREGIKFDSRKKKLFPSKRKPISEMDCYNYGELGHLAHQCNKPKKNKFKGKKNDDSDDEKKEKKFFKRKEEKHKRLHKKKKWRSIYCCTSCDDLSQVDQSSLHDELIEKAEVMTLENRKLKRYLTDATTRGKVAIESNDINNELAVDNERLRNEVKKLKIENEHFATVGDLFSNAMN

SEQ ID NO: 85755 - protein, 44 aa, Zea mays
  Coding DNA Sequence Number=SeqID_42380
MSENMVTGTLQDMVDGVTWPSTLPPGWTVEWDAASTGEEQEERG

SEQ ID NO: 85756 - protein, 113 aa, Zea mays
  Coding DNA Sequence Number=SeqID_42381
  Subcellular localization annotation: CTP_CleavageSite=51; ConfidenceScore=5.34e-01
MRAWGSRHPLLFLLAHKITRPVTLDFSSPVIRPVSALPLVPPAPAITTVVVAVSVTAPALVDLASQPTLESVPALASTSDLGFETDSDPQLVFALLPRPRPDAPSPPPSSSGL

SEQ ID NO: 85757 - protein, 147 aa, Zea mays
  Coding DNA Sequence Number=SeqID_42382
MAERVPTPTELRSSNDKAEGLRGIPHLGAWKPSRAESSPARSKVLPLRRGGWAPHQRVKGRAAMQAACNCAKWVQLSDFQRAQHGSPGPRVMQPVRRMLRASNCTATRATATPPRLRNQYRDSRQPYARPSSASLARWSIRPKMGRQ

SEQ ID NO: 85758 - protein, 113 aa, Zea mays
  Coding DNA Sequence Number=SeqID_42383
AGRAVDDFGRDDVLLTRSHLGGAVLGRLEPTPRDCERPHGCLRVRCDPAKTCPPEVAEGAPDAPAAVAPSAEDPVVGGGNDSGSNGGASGGGSRNVRAFAGSRFWACARNRYY

SEQ ID NO: 85759 - protein, 321 aa, Zea mays
  Coding DNA Sequence Number=SeqID_42384
MDEGAPLGGLESEDNAESNHGLYTVLSSLWGRGHLAHRLRIRFPEGEGLRRPKQSNKPRRLTGPARRGSGHGLTALGAVSAVPATLPHPRGSVPRPPGGRLGASAATRRPRAAQAHASLGRAVRRRQGSEARDIQAGQQSRRGSDRDGGGAAAPSASTPPLAKSDRASDGNTGEGSPLRRTTSAPRPGYRRQGLLQESGPSRRLGRSPRSLSQLSPEGISPAHGLGNSTPASVPPVEGPARLRLTKFSFRANSASVHADTAALSPGSSQSGRGATKPLVAHRRLNSSSDNDFRPGRPNSSSDDLWADTAATRSSPASPPKG

SEQ ID NO: 85760 - protein, 97 aa, Zea mays
  Coding DNA Sequence Number=SeqID_42385
MGNQKLAKSLMGQSTREKCKPMKKSYPFKVVISKSTYHIMPISYALHSLDCNLADGEYVLIPEQGPVQEEDQEQASEAAIEDLPAAPAIEGKPRSYA

SEQ ID NO: 85761 - protein, 96 aa, Zea mays
  Coding DNA Sequence Number=SeqID_42386
MAGGIKLAGAKGKWLAGEGYGFGSISLPMGLVMGSNGNPTVGMGNPLGTQNPHGHGFGQNFIPVMDMDFLAGVFFLRGYGFGQVIPSGFLPIAIST

SEQ ID NO: 85762 - protein, 216 aa, Zea mays
  Coding DNA Sequence Number=SeqID_42387
  Homolog annotation: Hit_ID=A2XNL7; Match level="QueryCoverage=75%, HitCoverage=9%, E-value=2e-07, Identity=90%"; Hit description =Putative uncharacterized protein
  Pfam annotation: Domain name=DUF300; Domain location=9-212; Score= -156.3; E_value=0.071; Accession=PF03619.7; Description=Domain of unknown function
MEWGSAAYTAATLVCAAAASVVALTHIYRHLLHYAKPIYQRFIVRIIFLVPVTLSARRSHPQQALAPDLSPAFAVAFPYRVSSRDCPRRYRSSARRSTRSTNPAANPARPHSPLVAAAARAPRRDTGGAPVVVAGPMEWGSAVYTAAALVCAAATSVVALTHIYRHLLHYVEPIYQRFIVRIIFMVPVTLSARRSHPQQTLAPRAPSRQICHPPLL

SEQ ID NO: 85763 - protein, 140 aa, Zea mays
  Coding DNA Sequence Number=SeqID_42388
MTPKQPLSQLHDLHFFRFDAIDLAIGNLPSAVAAELTVRATASSDGRKIAPSLALALFPSGTSPPPSFLQNDTLILSRNELCSVTITISVSSVTTDAQTLFSNENHPLLLSNLPVVSPPLHRNVIVCTEAVSNFQLLCFC

SEQ ID NO: 85764 - protein, 351 aa, Zea mays
  Coding DNA Sequence Number=SeqID_42389
  Gene Ontology: Mol. function=translation elongation factor activity; Cellular component=cellular_component; Biological process =transcription
  Homolog annotation: Hit_ID=Q6H8E1; Match level="QueryCoverage=97%, HitCoverage=31%, E-value=1e-99, Identity=61%"; Hit description=PHD finger protein-like
  Pfam annotation: Domain name=TFIIS_M; Domain location=208-313; Score =102.9; E_value=9.7e-28; Accession=PF07500.5; Description =Transcription factor S-II (TFIIS), central
  Subcellular localization annotation: CTP_CleavageSite=38; ConfidenceScore=5.65e-01
MARLQSSPSMAGRKSQQKVACPKVQMLKSLSFQSSNKRSAQKEPTSKVQHHQLESVRSKFRESLIAALSLDSDQQNRSQSPDNVQSDGSTDKFKPAAGDVVQDLVANTSKDVCTTNSGIATTVAPSRCEENEKLISDLASQMTMSINDGMQQPSNQVSSEDDLLGQCMVAEELLQGHGLSWVSDHVVGISKPNAEPNDLKSLRTSDVESESKRMKSANELAMDEEKFNQRPESLAFRIEEEPFKLFRGVNKKYKEKGRSLLFNLKDKSNPELRERVSSGDIAPERLCSMTTASKELSEWRLAKVEEFAQMVVLPNMEVDPRSLVRKTHKGEFQVEVEEPDGTEMYIYNKLI

SEQ ID NO: 85765 - protein, 252 aa, Zea mays
  Coding DNA Sequence Number=SeqID_42390
  Gene Ontology: Mol. function=nucleotide binding; Cellular component =plasma membrane; Biological process=small GTPase mediated signal transduction
  Homolog annotation: Hit_ID=P16976; Match level="QueryCoverage=59%, HitCoverage=68%, E-value=2e-68, Identity=90%"; Hit description=GTP -binding protein YPTM1
  Pfam annotation: Domain name=Arf; Domain location=86-251; Score= -78.9; E_value=0.0016; Accession=PF00025.12; Description=ADP -ribosylation factor family
  Pfam annotation: Domain name=Miro; Domain location=63-181; Score =26.2; E_value=3.6e-05; Accession=PF08477.4; Description=Miro-like protein
  Pfam annotation: Domain name=Ras; Domain location=89-235; Score =174.4; E_value=3e-49; Accession=PF00071.13; Description=Ras family
  Pfam module annotation: Pfam domain module=Arf::Miro::Ras; Domain location=86-251::63-181::89-235
  Subcellular localization annotation: CTP_CleavageSite=53; ConfidenceScore=5.50e-01
MTPLPPSRCLLHCLDLAPSSTSCETRSTTSTRSFVALVATHGRLRAGRVSIAVAAVDVGPWTGMRGGTSALAACARASSAPPPLPCTLLLLLHLQPTEKSMVKIRTVEVEGKTVKLQIWDIAGQERFRTITSSYYRGAHGIIIVYDITDMESFNHVKQWLGEIDRYANDSVRRLLVGNKCDLAENRAVDTSVDSSTGQNFQAYAEEVGIPFLETSAKESINIEEAFLAMSAAIKKSKAGSQAALERKPSNVV

SEQ ID NO: 85766 - protein, 80 aa, Zea mays
  Coding DNA Sequence Number=SeqID_42391
MDMVACSTFDSGHMAVVRGRCGSWALPDHPFEFPDCLMMSRTIRVYAPDRPRHAEQGPAPGYLPAPVPTPRVGGHYGNLL

SEQ ID NO: 85767 - protein, 78 aa, Zea mays; identical to SEQ ID NO: 74436
  Coding DNA Sequence Number=SeqID_42392
  Homolog annotation: Hit_ID=Q2QTF5; Match level="QueryCoverage=83%, HitCoverage=98%, E-value=3e-08, Identity=45%"; Hit description =Retrotransposon, putative, centromere-specific

SEQ ID NO: 85768 - protein, 232 aa, Zea mays
  Coding DNA Sequence Number=SeqID_42393
MARIRCTTRKSVIPFLPSRLAEHPLRRTVSGQSNHLEILHRRLHEELEHRCQEQEQHDSSPSPQWEVESERLPSPAPQPDMPPAPPQGIPAAGGDPNGDGDDDDASGSSSHYTKLSEELEPEGGVADGLDLKYYPRRSTSSVGGVIVSPVGEGNPRLSSMVNLAAVLNTELDHALDELGKMSENRRRGARRAQPEKQAPQEDAAQKQQLPPPPSMRVEQMFMMQTQAVQAIG

SEQ ID NO: 85769 - protein, 211 aa, Zea mays
  Coding DNA Sequence Number=SeqID_42394
GGRKIHGEHGGHATGRFSHRTHGRPGISPLASDSPLASKSIAHFSSHPLFSHPLFLQPPSIHANAAAGESLICRRQDYNLGSGRFRDDLLTVPCAAIATTPGLPPKSGEKGTAAGHGSHCRQPEVASQLRPRIWAVAPRGDTLMVHRVIPGAIGGQGEAEFLIGNQDLGLCRHLPWACAFAAARPGALKQNSHAKGYGVMSTIESEIGGPD

SEQ ID NO: 85770 - protein, 115 aa, Zea mays
  Coding DNA Sequence Number=SeqID_42395
  Subcellular localization annotation: CTP_CleavageSite=22; ConfidenceScore=5.56e-01
MALGFSAAISPNFYSITRTHPSASRGSSALTKSGGRVSEKSRYEVSRGPCRGALPPCYWNWLPAISCKKRVLSEVALTKAAIASANVGGTGGGFGVSSRPREVPAPSCAGVLDGI

SEQ ID NO: 85771 - protein, 116 aa, Zea mays
  Coding DNA Sequence Number=SeqID_42396
  Pfam annotation: Domain name=zf-CCHC; Domain location=49-66; Score =28.9; E_value=1.9e-05; Accession=PF00098.14; Description=Zinc knuckle
MATCLDLTYSRAISTALAVEAKNTGQGKSKGFGGDRSNQGPKKRTSSSTGCFNCGKSGHFIKDCPYQWRNKSNNQQNSGSSKQSKGNMANNSMGKNVKKTGRIYYTQVATTPEGEP

SEQ ID NO: 85772 - protein, 391 aa, Zea mays
  Coding DNA Sequence Number=SeqID_42397
MDAEDWLRIVERELHTAQCNDQEKENSAARPSPTAVPPARVRLTAAESSLRRNRKLRLARPWASALGGSLRLAPTPGLGPRLGLEGWSPPRPTLGLGLNLDLGRNCVLARPQPRPQEESPPRPTLGSDRPCRRGLWGNKTGVPSRLTPVTSNDGSPRASMTTVALSPLRKQGDVSKVPTAPTTVLLQGSNAPPTAMTPHMPPHTRKTTRKSTRPIGVPWHQLAPRHEESSSGNNDPIGVLKAQVEQLRTELRHRNRVWVKDGQRINELRVDVRHLQDELAERDLAIDWAVNSRSIAWDREAKARARVEELSTAVDNLQVYCNTLHEEVHVLYSRLHPDIPADPVGMGAGPSGTADEALGGELDLFKPPSSMNLADEWSPTTDSEATKDDKY

SEQ ID NO: 85773 - protein, 165 aa, Zea mays
  Coding DNA Sequence Number=SeqID_42398
MDEGTTLGGLKSEDNAKPSHEFLIVLSSLWGRGYLAHRLGIRFPEDKGVQTPTEGAATPSALFPPSAESGSASDGDKGERISTSKEGLSLEDISPAHGLGSVTPKLVPLTDDLARLQPPLLRLLGQGSHVPRADEASSRADSASVHADTTASDSGSSQSSRGFLN

SEQ ID NO: 85774 - protein, 233 aa, Zea mays
  Coding DNA Sequence Number=SeqID_42399
  Homolog annotation: Hit_ID=Q6J9V9; Match level="QueryCoverage=31%, HitCoverage=31%, E-value=2e-13, Identity=53%"; Hit description =Putative uncharacterized protein
MQVACNRTTRTHPFDFNASSMEAQAHTSCNRRAGYYVRKTAPPLVPMSRLLDCGTGAATRGNPAHGPTVPTEHIGHGSVSRGRGRDGRYGQKWASSNGGNRQAEAAVKSSAGSRTLLEQQGSPLPRREDDAPVFCPSNGSRNDRPAKQALFHLRHDDHVKEGTGKGNISKGILLREGSGPRALLLIRGSKVGPSEGGSKAGPSEGFDSRPRARRARDDSGYVRYMAEAWATLP

SEQ ID NO: 85775 - protein, 102 aa, Zea mays
  Coding DNA Sequence Number=SeqID_42400
MARASAYIMPSDLNRTIPRTLNLTGAQTHWRLPVHGVEYVLVSEQGAAQEVAPDPAPEPAPEDLPATALEGKPRNPFEMDTSMLGRVAALLTRISVEVEWFF

SEQ ID NO: 85776 - protein, 90 aa, Zea mays
  Coding DNA Sequence Number=SeqID_42401
MAVGVSEALYAKAVSPDLLTGNRWGRLMCVGTECPYMSSSAFGNPTPQPNSCMSRGSLEDMVAGVTWPSILPPGWTVEWDPASAKEEHEE

SEQ ID NO: 85777 - protein, 88 aa, Zea mays
  Coding DNA Sequence Number=SeqID_42402
  Subcellular localization annotation: CTP_CleavageSite=46; ConfidenceScore=5.17e-01
LGVEAACPTHAAVDRNTNNNHSSTRLLRVHALASAWNCVTSFNSPEAGAVAVLSEQSGDTHRPGCFIFTALAYRKRHDAAAGAREESA

SEQ ID NO: 85778 - protein, 117 aa, Zea mays
  Coding DNA Sequence Number=SeqID_42403
MAGAHRRRGCGRAWGPRATGKAQGGRVKCDEHRGGGSIDVGALQDGGPRQDGSAAVLPHSGEELRTVESRRWKKGGPGRLVNSRGVSGTFERRQRHGGDSGRRRQRCGCMKEDQFAR

SEQ ID NO: 85779 - protein, 125 aa, Zea mays
  Coding DNA Sequence Number=SeqID_42404
MKNICSTDIGVVVETTARVPHLLGLTALAGGAISMMTMGRRVVRVLSPSRGRGTILLMAALHGQGRGPGLYTSEVILQATHQAGSLPTIRAVVKPLKVTRLSGHHAAKWTLRKARGQERDHRLAC

SEQ ID NO: 85780 - protein, 69 aa, Zea mays
  Coding DNA Sequence Number=SeqID_42405
MDTGSCNKAAAPPPPRNIEKNQQVEKEPIEEKPNAAAQLQDRVFNILGENSSELAGDRPQERYQATTSS

SEQ ID NO: 85781 - protein, 58 aa, Zea mays
  Coding DNA Sequence Number=SeqID_42406
MEYLDDPNRLPIRYRCVDGKMEDCEWMYMGCSSQGLVTNEWIDKTDAFLEQAFGEVTK

SEQ ID NO: 85782 - protein, 130 aa, Zea mays
  Coding DNA Sequence Number=SeqID_42407
MSYTKNVAYHPRHPLEKAEPETRTFDMPWHGFCREIAYTSPQEAHRALGLNQIAVVWPVKKNRKCDLNNEPEGTLIFVRILIQDCNLADGEYILVPEQGAAQEVAPDPAPEPAPEDLPATALEGKPRFYA

SEQ ID NO: 85783 - protein, 151 aa, Zea mays
  Coding DNA Sequence Number=SeqID_42408
MDVDLAEVGPKSFCAQGENRGEGTLCRARRPWGSQRGRRSGGRWRHWLEEHGVTPCMGERVTSMEEEEQSSLLLCCGDQGGRKSVPAARLQGASAQGGGRHGEDGSSSARPWKESRASAAMGGALARSREEKGLPALACVKEQGRRMAWGE

SEQ ID NO: 85784 - protein, 189 aa, Zea mays
  Coding DNA Sequence Number=SeqID_42409
GVYNCMALERWRDRARDPRRISAHSLALKSTGPISLGQTKSVFGVTRLSAQSAGEEQAFAPGLIRSGRFSPTRLRSSLSPLRIRRLLSLTHELVVAHCLLFLYLAHSTPPTVSSLTRTDGEMRSNDQVDYYAICIANEDKLFRTEDADYKVFLPTNLSHQLILSSDEEYNIPVALKLLRMRCTKDQILK

SEQ ID NO: 85785 - protein, 196 aa, Zea mays
  Coding DNA Sequence Number=SeqID_42410
  Homolog annotation: Hit_ID=Q0WWS3; Match level="QueryCoverage=20%, HitCoverage=51%, E-value=5e-17, Identity=95%"; Hit description =Putative uncharacterized protein
MKNVAKCDTWCELQNPANHRVFERKLRPKPSGGGHVCLGVTPKDTPNTPPRGEGRGVWPPAPQGEVGRSRGYRRTAPDAAREASSATDRAQVLWKGTPGRVRAPSGPDPVAPRGAVNESGCLGMQPKSGGFELEHACRDPKDGELCLSGAKPEETLVEARSDTDDSWSPHEFYRVKPMIRGIGGATPSTYSQTLNR

SEQ ID NO: 85786 - protein, 458 aa, Zea mays
  Coding DNA Sequence Number=SeqID_42411
  Homolog annotation: Hit_ID=A5BKB8; Match level="QueryCoverage=27%, HitCoverage=34%, E-value=4e-31, Identity=64%"; Hit description =Putative uncharacterized protein
MERWRRGGRAVRPNVWAENEGAWQYGGKTARRRAATGGMAIRPSVWAKNEGARWNGGKTGGRARRRVAGLFGLAFGLKNKVFAMGKVEQRENDTEARDELRLGHGGARRRAAGLFVLAFGLKTRGSPWRALRKQRFGHDREKGLSPGVWKDNEAKVHVWSEGQGGTEGKREEARGRRAAWLFGLAFGLKRGFRHGARVQNSGWGMASEISQVQACGNTPKLMCMSWVKGMVERTENDTEARATGGRVVRPCVWAENENSPKSWEGVSSAEPRTPSRPSRGRSAPYRAQLRLALLAAWPAMNPTNHRVFERKLRPKPSGGGHVCLGVTPKDTPNTPRGARDVASGPPRRRASVPARGRPFGPKDPSSDRACPRTATPEASSATDRAQVLWKGTPGRVRAPSGPDPVAPRGAVNESDCLGMQPKSGGKLRPRLNTGERPIANKYREGKMKRTLKRESKSA

SEQ ID NO: 85787 - protein, 218 aa, Zea mays
  Coding DNA Sequence Number=SeqID_42412
  Homolog annotation: Hit_ID=A5B938; Match level="QueryCoverage=30%, HitCoverage=59%, E-value=4e-08, Identity=53%"; Hit description =Putative uncharacterized protein
NPANHRVFERKLRPKPSGGGHVCLGVTPKDTPNTPPRGEGRGVWPPAPQGERRPQRRTGPKFSGKGRLGGRETDSEQVLRGKDEKDFEKRVKECLKLPGGKQMGAGDAHRPYAERLLLVRRTARGVDRLSPAPAAKARGPYAPPAAVVGTDGFELEHACRDPKDGELCLSGAKPEETLVEARSDTDDSWSPHEFYRVKPMIRGIGGATPSTYSQTLTR

SEQ ID NO: 85788 - protein, 275 aa, Zea mays
  Coding DNA Sequence Number=SeqID_42413
MANGPKTDFRPQPRKRARGRARDPPVVPPRETWKFGSTREGKRVTLAKPLILSKNTVSSHLRWVSWGPGKMPWFSKGRTPRSPGRGYAPQPRPAMAGYRRPDALDEWLHSGMARCSMRFPFLPRSVDLRSPSSQADPPHPARRDALDGSTVAATLAHELSWTRDCLEDPAAVRPTPGARVPSLVRASYACCVEKCLRAATRPTGSRARYTLPSSSSPPGVRLVGSRAPAAFASCRHRPMAGGTEDTSLALLVSDVAHAEGRRRVGVTRPRIGPPE

SEQ ID NO: 85789 - protein, 174 aa, Zea mays
  Coding DNA Sequence Number=SeqID_42414
  Homolog annotation: Hit_ID=A5BKB8; Match level="QueryCoverage=43%, HitCoverage=21%, E-value=7e-15, Identity=60%"; Hit description =Putative uncharacterized protein
MKNVAKCDTWCELQNPANHRVFERKLRPKPSGGGVPARGRPFGPKDPSSDRACPRTATPEASSATDRAQVLWKGTPGRVRAPSGPDPVAPRGAVNESGCLGMQPKSGGFELEHACRDPKDGELCLSGAKPEETLVEARSDTDDSWSPHEFYRVKPMIRGIRGATPSTYSQTLNR

SEQ ID NO: 85790 - protein, 192 aa, Zea mays
  Coding DNA Sequence Number=SeqID_42415
  Subcellular localization annotation: CTP_CleavageSite=22; ConfidenceScore=5.01e-01
MANGPKTDFRPRPRKRARGRARDSPVVPPRETWKFGSTREGKRVTLAKPLILSKNAVSSHLRWVSWGPGKMPWFSEGRTPRSPGRGYAPQPRPAMAGYRRPDALDEWLHSGMARCSMHFPFLPRSVDLRSPSSQADPPRPARRDALDGSTVAATLAHELSWTRDCLEDPRCRAADSRRPCPIARAGILCLLR

SEQ ID NO: 85791 - protein, 318 aa, Zea mays
  Coding DNA Sequence Number=SeqID_42416
MESHDLWAVRESRLVGGNEIDGSGYDFGAGKWYSFRLERMARLRHTAQKSVIPFLPSRLAERPLRRPVAASRVATGGDPDDGGGDDSSSHDTDFSADQEPEGWVARPITRDAARGCHFHDALDTLLHRALNRRTWSIEYCCVVYQHSRGVYPDRWVATCLVRRPENSLQGAEACLEHYSISERDSAEAAMQDAARRALSHYCSVLGGVADSLKLKYYPRRPSGSIGGVIVSPVGEDNPRLSSTVNLAAVLNTELDHALDELSRAHAEIALLRAERAKRRHLDDGSPAPVGTQHSYRSPRRGRQSYGNPDCKTKINLEP

SEQ ID NO: 85792 - protein, 438 aa, Zea mays
  Coding DNA Sequence Number=SeqID_42417
  Homolog annotation: Hit_ID=A2WPL9; Match level="QueryCoverage=60%, HitCoverage=64%, E-value=3e-25, Identity=34%"; Hit description =Putative uncharacterized protein
MPCIKYLFEGHIFVLLNLRRTFVPPCVKEPKWVKIRVPIGSSISIPPNSHTRTTQGGGSSPPRFKLLSWFPPQLRFCGALNTTVMDSKKMYVCSLPLMPYVVFGFVGSQLPSAPNWQSYKVDDPNAPRMILLVILYIYVILLAKIKNDRIYIETATAVVISYVSLLQISWSYIWLVPFPIVAIGFIVALCKELSHEDEAGGSHSQEQSNEGEGEATTSSWEKVEGLAAVTVVPYWALLIMGLFHPDKFAVSQFLLFFSFMLGALTMMMTRLVETGRAIAHRGIVPASELLWKASLVVLLVAVHAVAAELLGENALLLCMPEILPVLLWLSVRLDTADDRIKLVLDSNLLPAALPAVLAMLAKGEPLLYWCRKALVSCVVSALLTFYVYFMLCQWPGGQRDRTLTGSSLQHALIHLKSWAKVLLKAVAVLLIFVCILSN

SEQ ID NO: 85793 - protein, 92 aa, Zea mays
  Coding DNA Sequence Number=SeqID_42418
MKNAKEQRVAEVPLTPSLDVPETRVEEFVSKIEATASQAEANSVNRFEDSDNIDIEEDSTTIRPTKLSHVDFSKSKIKGGHCWGPASSPKVR

SEQ ID NO: 85794 - protein, 134 aa, Zea mays
  Coding DNA Sequence Number=SeqID_42419
MRKSKKGGSSSHHSGDKRKREPTPPSEDFGDSEYSEEEFSSESEGSPVHASPPASSDDSDDSQGIVAEVWTYIRAVERAGLEGSDESEYSSDSSEEGGGGDGGDSDDNGGDGDGGGDGGEGSKGSSRGSNKASG

SEQ ID NO: 85795 - protein, 277 aa, Zea mays
  Coding DNA Sequence Number=SeqID_42420
MGSTLVSISAKTESLNIEKPYLDSHITSITLRVFSLVGWFQKKNNKTEVREDSVLHLGSFAFVFSGGVCASPNLTNNIFPLEKMPPRTRLTARKSTGPIGVPRHQLAPRHESSSSGSNDPIGDLEARVSRLQAALQHRTDAWVADGDRINELRRDIRHLQDQLADRDLALDWVVQSRLLMCGKEARAQARIKELSSTVDDLQVYCNTLHEEVHVLYSQLHPSEPAPPAEAEAGPSHVAGRALGGELDLFEPPPSLRLVDVWTPTPDDEAAKTDGKQE

SEQ ID NO: 85796 - protein, 228 aa, Zea mays
  Coding DNA Sequence Number=SeqID_42421
MFVGRPTKIRHLFSSAAEADENTATLIPRTLDSNPFCPNSPRTLARSSPPLAAARRLPPSPLPLLTGSPRARPPVRRSSPRPLLTGSPRARPPFAAPRRARSSPPHAARPRPLLTAARPPSTAPHRGHARRPPLLVAPASHRCPLLTMRPLLVAAHSSPRARSSPPPARPPSEMPIPTSRIRRIRTRLGSRHAPSTSSHVLSEFYFLSLTVANRMRHPFVNDERHIGL

SEQ ID NO: 85797 - protein, 202 aa, Zea mays
  Coding DNA Sequence Number=SeqID_42422
  Gene Ontology: Mol. function=sulfite reductase (NADPH) activity; Cellular component=sulfite reductase complex (NADPH); Biological process=amino acid biosynthetic process
  Homolog annotation: Hit_ID=Q57KH8; Match level="QueryCoverage=72%, HitCoverage=25%, E-value=1e-69, Identity=87%"; Hit description =Sulfite reductase [NADPH] hemoprotein beta-component
  Pfam annotation: Domain name=NIR_SIR; Domain location=4-150; Score =98.0; E_value=2.8e-26; Accession=PF01077.13; Description=Nitrite and sulphite reductase 4Fe-4S domain
MSFDGVPPRPYILDRGALHAEINVWLPAYALEISILPLRVEDSLNDIDLHANDMNFVAIAENGKLVGFNLLVGGGLSIEHGNKKTYARTASEFGYLPLEHTLAVAEAVVTTQRDWGNRTDRKNAKTKYTLERVGVETFKAEVERRAGIKFEPIRPYEFTGRGDRIGWVKGIDDNWHLTLFIENGRILDYPGASAENRPCWKS

SEQ ID NO: 85798 - protein, 315 aa, Zea mays
  Coding DNA Sequence Number=SeqID_42423
AEGPLWHIMAQAIPKKDPAQLLNPNQSAARALEPSAIPHVHRRVPRPEPTVPAPRHRLRLWALAIVRRPLGPRPRAAPARRGYGSPATVRPSGERPRARAAERASSSAPPPAVRSGSDRASPPTPRLRCSLLRRSARRPPSARAWSLGPSRSATLARRPPFARRPEKASRSSSAPQPAVRSAEARAVAPVPPFAGRAAVRLSLSLRPPSCCAFRLHRPPSRSVRERDTPTAELPPSAESYLNFFRSSATVCGLISWELREQSGGERWSSGCVARGHGRFGLQSNPRLATGGPGHILLMAGFLREEDTTVLWDVQV

SEQ ID NO: 85799 - protein, 425 aa, Zea mays
  Coding DNA Sequence Number=SeqID_42424
MKVIPSWIFGYEAYPQQLTAVESSPRRHRKLCLARPWASASGEVSALPDPRARPPPRPWKVISASPDPRARPRPRPRKVVSASPDPRARPQPRPREESRPRPTPASASGGVFASPDLGLEPTTPQEVHHYPTPSQLRLRGNKTGVPSRLAPVTSNDGSPRASMTTVALSPLRKQGDVSKVPTTPTAVLLQGSNAPPTATTPWRHGEHNRGHHAGAGAPEGADRDGKVPQRRKLTPVSNCATTRTINGKIKVRVGCLPQAQTQERLEDGGEAVKSRVDGGGLRLHGKHSGECGLGKPEGLGANRGVSRVADGEAELTGATEATWTQRRSQNGGGLWGKWASETRGLKGQGREEVAEERAVMGASTVGERGREVRDVEGADGWGCYKCLLEQETNQSRDSLPTLYSLSGAFADRRQPKPTKWSSNGS

SEQ ID NO: 85800 - protein, 224 aa, Zea mays
  Coding DNA Sequence Number=SeqID_42425
  Homolog annotation: Hit_ID=Q6JAD6; Match level="QueryCoverage=59%, HitCoverage=41%, E-value=1e-25, Identity=66%"; Hit description =Putative uncharacterized protein
MESWLPAKRDPAAADPFSTRIQESFYKAQLLAQIALRAHQLLDLPAFLLAAGADSEVHLSYLPGLLTLLTTSGRYVEEWLIRPPQFQGTLEDSRLIFGSYRLAPEDPVPAPAPVIDTQAEDTTFHQFETQDAAVHDDDDNDDDDDDDDDFGVPPPPPPPMPPCTHDHEAGSSSAAAPPAIDPALAAILQTLTQQQAHLAAVQQQMSERMLSMFQKIRDRQDTLQ

SEQ ID NO: 85801 - protein, 70 aa, Zea mays
  Coding DNA Sequence Number=SeqID_42426
MGKTETILNYKCTFGLIEGEMSQDKEVAAETKLTEEEKLFKEKKAVNPYIAGFIESMAKTNTEKITKEIL

SEQ ID NO: 85802 - protein, 213 aa, Zea mays
  Coding DNA Sequence Number=SeqID_42427
  Homolog annotation: Hit_ID=A2X6T6; Match level="QueryCoverage=30%, HitCoverage=5%, E-value=2e-10, Identity=46%"; Hit description =Putative uncharacterized protein
  Pfam annotation: Domain name=B3; Domain location=133-212; Score=4.4; E_value=0.025; Accession=PF02362.12; Description=B3 DNA binding domain
MEKEPLDMVESSVRVIETHVDIIRSLVTDGVVDTSEPESVYTLKTTLFQIGDVCDMLEKCALSIKKYADSKRAKIIQDEALQYAEDDEAADDLEELPSPDLLTQADILGKCFGIEIAWAECLNRVGKHEADRSALSNAVRQRRHGCDVIMLKDTKKRLWSVIHHHCPLFVGFTEGWKHLVTANDLRARDVCELVKGPDDGDPVYYVRMCGHKI

SEQ ID NO: 85803 - protein, 142 aa, Zea mays
  Coding DNA Sequence Number=SeqID_42428
MARVACTIHGKRLDGGVSVLSIGVNPVWVVQGPLDQDNYVGRSTAQPVRAAWRFAFPPAALYKQTEGPVAEGTLTAEAEQITVGGSENEDEGDYTILSPAKPSHIEFGKSTVTTDDTVMMKKLGYFWEAESKLFVLLARSDS

SEQ ID NO: 85804 - protein, 58 aa, Zea mays
  Coding DNA Sequence Number=SeqID_42429
MAPGSLACSTASVPDRLVPGRPNYFNREAGGLQGRGAFVRVCADGGSSLDVDGAQLRR

SEQ ID NO: 85805 - protein, 92 aa, Zea mays
  Coding DNA Sequence Number=SeqID_42430
MELARDARRSAYLWSLLALSCIAHPNPWSTGCPAVTSLVALYTCQALDKLPESENHYRSREFESAIGMLAQCINEFMSTVIKWVLKVRSVVY

SEQ ID NO: 85806 - protein, 75 aa, Zea mays
  Coding DNA Sequence Number=SeqID_42431
MEMGRDERHERGGEDDLATGTMAQGKAELGPARAGSTEIEEAAARRAAKGHVTLSISAIIKAVPSKGECLRMGFL

SEQ ID NO: 85807 - protein, 74 aa, Zea mays
  Coding DNA Sequence Number=SeqID_42432
MGSPRGRTLQGERLTAGVVESEASTGMKERAHDPRRARMSEQGATLDWRPDMRREREEATWERRLGKMNMEKAD

SEQ ID NO: 85808 - protein, 130 aa, Zea mays
  Coding DNA Sequence Number=SeqID_42433
MVSHSGYGGYKCGHCTTAVGVSEALYAKAGEDDLGASSLAARLAFVGLRVFRIPGIALHELTTFCGFHPLELSTHPIGLFPAEKEDDPMWKDRVEHAKDLMGLVEATKITLDNREDLVVDLSTELVEKDL

SEQ ID NO: 85809 - protein, 179 aa, Zea mays
  Coding DNA Sequence Number=SeqID_42434
MRMIRKINLMGVPLQVEDLLFNIDMKKGHFRDSCPTMVEPKKERSKGKALTSVKTWDDSSSEDEPPRTRNHRSSSRSSRKCLMAKRKMSIPSSSDESSSDDEGEGKPSVDELAEAVQFFQDVQCTLPPATPAPEFTLAMRFVPTGARITSWGEKIFTADELETLFRPDRCVRLTHGRFR

SEQ ID NO: 85810 - protein, 86 aa, Zea mays
  Coding DNA Sequence Number=SeqID_42435
MGAKCWNLPSKTGRSNGKVGREFAKHNMVLEGPLAPVKDILTLEYLVYRQNIPMMVKKQQTSVASVQRWYPKINTKTRAPGGKALR

SEQ ID NO: 85811 - protein, 196 aa, Zea mays
  Coding DNA Sequence Number=SeqID_42436
MAAKRATSKAVVSINDAAKVALLAEKKGKALADTTPQEAFEDDTVNSKRQRQDHPTPNGTVHTCSSEGAPQAPPPGFAPPEGEDTIEDGKIISISAEDQLKLRALRIKNNHLRKQKEILEAKRQRVTMQTKVHQMIQDEEQRARELEQEITLIQGEGQYNLQREPLAPPVPLQQYIQAGDPFQPQRDPFIPPAVAF

SEQ ID NO: 85812 - protein, 154 aa, Zea mays
  Coding DNA Sequence Number=SeqID_42437
MSSACGALHKSTSLASKVREDLGDAEAAVVEPAPLDGAGKHGWVDAGFVHCGRVAGDVFAVKQAIESVRLLCPSAASSSCAIATTLGGIPDDDRLSGWVLIGYGVHMLMVAIVPARVWLRRPSPGSAGLRRVLGISLRFNLALMELLRPGILLK

SEQ ID NO: 85813 - protein, 464 aa, Zea mays
  Coding DNA Sequence Number=SeqID_42438
MEKDRQDVARKRRAFARVGDPRREVKMARASVKPTAPGASMSPPGAPGATMPLPTAPTHERRPPSPPHAAEAAVAGAEVSMDISVDDYLVGGVAMFDAHTGRGPATAVTAGPMAVATMVKWSSQDPWFKFCASDKIASTAAAKDVATSVAQQLKHRFRTQHTEAVRDKSAAENRSRNLLEKLSAVEADKEDLGHRLMAEREDVEKSYAEAQAAHAEASLALKRATDVESGQRNLHGHLDKTEASTRAGVDRVHALLMDAYHQLGARTAPFDTSDEGVGLCFLRHFEVFDRATEDFDHCIFQVEDEVLKWSSGALYDRMWGPHGRDTVRERSGRALEQMMNDEEVEDFNALESSVTRAEDARTGAEEQPAPQADPSEDPVEEAMPAGRDPATVAAPTGEDPPVAAAPSQVVGSLPVSGNSSGFEAESWSSDGANFGSPLSWIEESSDKYLDYFAVLDVAAVESLP

SEQ ID NO: 85814 - protein, 134 aa, Zea mays
  Coding DNA Sequence Number=SeqID_42439
MVALVKYVWAVTSYSGQPSVELNRLPYAGYPGDDDADVAVRQGKKVMTTADKGPSRGTTPSAVAKKRKLGTTVEGSRAFDRIVVDLLETYAVPGETMSLPELRESSARMLKVTGGRWPSNVPIPRVADKYMFTY

SEQ ID NO: 85815 - protein, 1009 aa, Zea mays
  Coding DNA Sequence Number=SeqID_42440
  Gene Ontology: Mol. function=helicase activity; Biological process =viral genome replication
  Homolog annotation: Hit_ID=A3ASR7; Match level="QueryCoverage=99%, HitCoverage=79%, E-value=0.0, Identity=42%"; Hit description =Putative uncharacterized protein
MSAEKKNELKKRRESRKKGNVMHHEYSEVCNIPANKDNNNHQNNEIEDVDDDSYQLHKNNSFEDLIGIEDPKFTPELVWSSTDAEAPHGSLCSSEGMAIPKLSPTPFVPNPSQTEDVEKDSMTESPRRQRHKRHVSSGQRQTLVSRQNQKFHLAIGTNFATATRDRVMENDVDNEIDHQTVSEIDNNEDDDEAVLFEDDEDEGYLFAGQDGESGEDIDIDETQDAFTVIPDIPDPYDKVYSIIPEETYLLNTVADCDYCKAKKFQYEPPGFCCRNGQIDLAPFETPSQHRRLWECADADARHFYDNIRFFNGHFSFTSLYCCLDNMTTNMDRGKLGGEQKHLELYFYDDDPSLEHRYRKCRQEQLDKDKAVIKHLVEILKGNPYSEHLRSMGHVDNIEDYHIALNLDQTLNQKLYNATITSEVAAVWIEGSERRGQFNNSVMLHGKDRSSHGIRSYHGCYDALSYPLFFPKGELGWHANIPKSNVSMDEVEAYRDQHRTRDANDDDTGIFNPILHGKRLFQQFAVDSYIKVESSRLDFIRRNQDRLRADLYKDLVVRIFRAKLEELKKRLTKQHILGKIHAYVYVVEFQKRGLPHAHFLLIMQRKYKLTCPDQYDLLISAEIPDKKKYPQLYKMVIKHMMHGPRRDDGRKETVRCCELDNRWVIPYNPYLLWLFNCHINVEACESIKVVKYLFKYIYKGHDRAFVAVTDANKADGDVDEIKQYRDARWVTPPEALWRIFSFDLSQNSPPVMQLQLHLENMHMVSCHERAKVNHVVQRPGADRSMLTAYFEANRLHEEARGILYRDFLSGTLCNREKCGKGRKRNTGGQVGRIVSAHPAEGERFYLRLLLNHVTGATSYADLRTVDGDTLPSFREAAQRRGLLEADNTIDECLNEAAIYQMPSALRRLFATILVYCEPNDVAELWQRHLDSMSEDYHRSTQSKTHVQQMVLIDIRNILQSMGKDINTFPLPAIIDIYDDSHGTDREIYEEECIEPTIEDVAMKETLNEEQ

SEQ ID NO: 85816 - protein, 201 aa, Zea mays
  Coding DNA Sequence Number=SeqID_42441
  Subcellular localization annotation: CTP_CleavageSite=36; ConfidenceScore=5.24e-01
MEASSAGMNSSFKQGTSASQHTLESLFFSRPSEVIKARIGACGPDNLGGLSQTPGFGPRLGLGRWTSPRPTLGLGLNHDLEDDELRLARPQGSDSASAPEDDGLRLARPQGSDSASAPEDDGFRLAQPQGSDSASAPEDDGLRLARPQGSDSTSTSEESQPCPNSGLDRPRRQGAIITLPLASSGYGEQDRHPIWLAPVNK

SEQ ID NO: 85817 - protein, 88 aa, Zea mays
  Coding DNA Sequence Number=SeqID_42442
MVRVGRSTCAGGRAHPRRGHQPIQGGIVQLNGSESFTRGQGRHRREELENGSPDISVHGWWRVIEVRLMGFADWIKRYGGVKLGLTHC

SEQ ID NO: 85818 - protein, 285 aa, Zea mays
  Coding DNA Sequence Number=SeqID_42443
  Gene Ontology: Mol. function=RNA-directed DNA polymerase activity; Cellular component=chromatin; Biological process=RNA-dependent DNA replication
  Homolog annotation: Hit_ID=Q2QRZ1; Match level="QueryCoverage=89%, HitCoverage=18%, E-value=2e-15, Identity=26%"; Hit description =Retrotransposon protein, putative, Ty3-gypsy subclass
  Pfam annotation: Domain name=zf-CCHC; Domain location=228-245; Score =25.1; E_value=0.00024; Accession=PF00098.14; Description=Zinc knuckle
MAGNQFQQHGGRVPPQGLRDTTYLEFSETRPPLFVKAEEPLEANEWQSNLVDIRLPRKNQVGILGTLCSGGTTRDETRRVPPTEARGDTVMQYLNKFNHLSQYAIKHVDTDLKNKNCFMRGSNDRLQQKMATCLDLTYSSAVSTTLAVEAINAGHGKSKGYAGEKSTQGPEKRTRLVIRPFNPNHSSPRPPSYPFKQPVFIRPTFAPAPTNQPSAPGTRFPALPNSSSCCFNCGKSGHFIKDCPYPKQNKSNFQQTSGNSNQGKGNTTNSSMGKNFKKTGRVYYT

SEQ ID NO: 85819 - protein, 316 aa, Zea mays
  Coding DNA Sequence Number=SeqID_42444
  Gene Ontology: Mol. function=phosphatidylinositol phosphate kinase activity; Cellular component=plasma membrane; Biological process =phosphatidylinositol metabolic process
  Homolog annotation: Hit_ID=Q8SA90; Match level="QueryCoverage=100%, HitCoverage=47%, E-value=1e-148, Identity=79%"; Hit description =Putative phosphatidylinositol-4-phosphate-5-kinase
  Pfam annotation: Domain name=PIP5K; Domain location=189-316; Score =39.6; E_value=4e-13; Accession=PF01504.9; Description=Phosphatidylino sitol-4-phosphate 5-Kinase
MSATFFAPPGAVAVSRRSSVEGVGDKATPRICIWESEGEAGDITCDIVDALEASMPMLFKEAAAIAGGATYMRSASGVPRWASAVATTPQSKRPGRTISKRHKNYELMLQLQLGIMHSVGKSSAVPMRELEQGDFDPRENALSWTEFPPEGSKATLPHSTGYFCWKDYCPMVFRHLRKLFAVDTGDYMLSICGNDPLRELSSPGKSGSFFYLTQDDQFMIKTVKKSEVKLLLKMLNSYCKHVDRYKNSLITRFYGVHCVKRHNGQKIHRRFDLKGSSYGRTADKFEDEIDETTTLKDLDLNFVFRLQKSWYTDLHE

SEQ ID NO: 85820 - protein, 141 aa, Zea mays
  Coding DNA Sequence Number=SeqID_42445
CKLKGQWTAADYAEQESSDDEDTAFDIAARHRSQIEAAPILDRVQDVQPPMCAVGPSTAGLSSSRSTRDTFENVAQDDDDDDDDDAGAGAAGQVEIGPSQLQDAPTTQPSQLTPRRRRPRDPYTPGTDALGAKGKGKTRRK

SEQ ID NO: 85821 - protein, 59 aa, Zea mays
  Coding DNA Sequence Number=SeqID_42446
  Subcellular localization annotation: CTP_CleavageSite=16; ConfidenceScore=5.17e-01
MTARSPQSHRGGESIRLSVATSFSASVIGGGFGGGGIRSSAPRSVAPSYEAAPPPRRSQ

SEQ ID NO: 85822 - protein, 218 aa, Zea mays
  Coding DNA Sequence Number=SeqID_42447
MAERYQLLRSCVPPTMRRKDGGPTGERGGQPCRRHATAPSGHASLTPDTPAWRPRPTRHATGAPDAACKRLHRHLRHHRASSIAEPIPRLEATRRTTQQRQPDAVVNAAKGGPAVMTVAGGREQRTRRQPSSRPIRGQQGNPLSRREDNAPVVRSSNGSCTRNGRPANNSPRRINSAEGQTAPLAGEAGDASPSPDRERGIPRKGSFPVKEPGSEPPY

SEQ ID NO: 85823 - protein, 182 aa, Zea mays
  Coding DNA Sequence Number=SeqID_42448
  Homolog annotation: Hit_ID=Q6J9V9; Match level="QueryCoverage=35%, HitCoverage=33%, E-value=1e-08, Identity=46%"; Hit description =Putative uncharacterized protein
RSERRFAFAIMTASKKGPGKGDTPKRILLREGNRPRASLLIRGSKAGPSEGFNSRLRALGFRAHYWSEVRRPAPRKGSTAASGHSGSAPTTDQGFVGWPSKASGKGSRPRRNYVSPEAPSINGHTFGSPKAQSSPRSNLCQIATPTDQIAGAFNAKRRLRRSDCCATRQSEADSSQVRPQTP

SEQ ID NO: 85824 - protein, 200 aa, Zea mays
  Coding DNA Sequence Number=SeqID_42449
MICESGTAYAGQGDTRMGSDADASCWRRDDRGLDLVEVECAMPSSRSTSSHHCFMAPVEAVELGGWQSNSLAADNAHGVALDGVRDVCAAACCRAACTTAVHDTGQLGTCGVEETTYSSTRKSIDVSTRNTMDIVLELLMFATGAIFLNHDIQDLHSIGVQGKLLDGPDTACQRSGQDALNAEGAHRLSAGWTGGASSSQ

SEQ ID NO: 85825 - protein, 136 aa, Zea mays
  Coding DNA Sequence Number=SeqID_42450
MDYSAPAGSRWKLAPGSLTSDGDHLYSERLDSRHPAHGPTKPLSAEVTGRTQTQHRLSALKLQQQSNTQWSRVLRSGGPNHSKLSRVYVLRDRLAGQTKRLSPFLILGLSAGALRHPAGEFPLRQTPIGSETLISQ

SEQ ID NO: 85826 - protein, 119 aa, Zea mays
  Coding DNA Sequence Number=SeqID_42451
  Subcellular localization annotation: CTP_CleavageSite=18; ConfidenceScore=5.38e-01
MQSTTKLQKAIPKGAQPRLQKGNSCAPRSYQGTEVTMSGYNFVKIINFTFNMLEGTRQVFSRRSKFLATGSNKIEHLLQPLNASIAELQTSIMKACHVFSSELFGLGLKLTNQADSSEY

SEQ ID NO: 85827 - protein, 79 aa, Zea mays
  Coding DNA Sequence Number=SeqID_42452
  Subcellular localization annotation: CTP_CleavageSite=38; ConfidenceScore=5.29e-01
MAKRPKKRIFGQGPRKRGTWKGNGNPPVVPPRENVEVKGAPVSSAEPRTPSRPSRGRSAPYRAQLRLALLAAWPAVVRP

SEQ ID NO: 85828 - protein, 519 aa, Zea mays
  Coding DNA Sequence Number=SeqID_42453
  Homolog annotation: Hit_ID=Q8SA86; Match level="QueryCoverage=27%, HitCoverage=20%, E-value=1e-08, Identity=26%"; Hit description =Putative retrotransposon protein
  Pfam annotation: Domain name=Transposase_28; Domain location=142-309; Score=-53.6; E_value=0.012; Accession=PF04195.3; Description=Putative gypsy type transposon
MAGGSWDQASLTSNFNTMSLTLPNSIEWYADSGAEDEGWTSPVVLLPLVQQDRRRLERRVASSPSPQYLPSNGPVRLSHLVPKTSLDGGDAALARSGSTGVFDVTVDERGTVGLRVSPKRRILCIKGGVGRRWSGSLSTRRKTLASFSTARPLSCPPCSCSSKIWPASSRPLANTDATWIFWQRSGLCPEGRGGSRARGRVGRFEAFFTAGLRLPAHRFVAVVLQRFEVQVHQLTPNAVVALAKYVWAATSYGGRPSMEVFAKHYCEVEDHPGLPMAVMCSHYYVAYPQFEVAEDDEDEGALRGTARMSRGHDLVEEFIRFGVWPLAHGWALGEVCPREMPSLGGQRVRSPAFALDLHGRDPTAFVREAEDSATRIVGVFELNCLPYGGYPGEDTANRRGKKPVDVTEVGPSQEAAPATKKRKLGIAVGVGVSKSFAMDLMGTCAALGGRMSSPELRESSARMLEVTGGRWPKNVPIPRAAGKDFSTSRMARDLKVFPYGRNIAVLVSEVMERDRQDAA

SEQ ID NO: 85829 - protein, 128 aa, Zea mays
  Coding DNA Sequence Number=SeqID_42454
MSTPVSQQDTQFTDTQGKHGDGGKNMPTNTNVTPKATPHMEPDAPIFDATPQIKSTGGVQQAAETDLLDSGPCFDQTPSEHVSVETDPATNTPQVDQVSLDSEMQTVLALREYLCGTQSDTSRSWFPW

SEQ ID NO: 85830 - protein, 47 aa, Zea mays
  Coding DNA Sequence Number=SeqID_42455
MSTRFQGNVRVFVVRKGRGAGGVDCGDWSKTTKAMYEFLFAENTDMR

SEQ ID NO: 85831 - protein, 249 aa, Zea mays
  Coding DNA Sequence Number=SeqID_42456
MAASILSSTRRCTGRAHRSPVRSGGGKTTAGVEEVARQGDMAAGVEDEVRWGSLSTWRRMHNGESRPADSEVLGGDVEEVARSSAMGAKTARECVNSSNTGNYPTSYNTKRRYKIMIPGAPPLELHKKLKLRPRSSFFMEPELKAHRINIRQVTQEARLSSNLLIEQPNEVRLPNDLPNKQPSEAGLPNNLPVEQPSQPTGPPSNPAKRQSTHRKSRPGTIKPRRHDETSPSQIQTVKTTLRGLCQTRQ

SEQ ID NO: 85832 - protein, 93 aa, Zea mays
  Coding DNA Sequence Number=SeqID_42457
DRDQRLEQVEQRPAEAQSSAGQPPGEYPATEERRARTELLCWLLLQPAARSAGACCGGAALCADGLDWICSAAPLWLCAADGTMAGGNFGKTA

SEQ ID NO: 85833 - protein, 226 aa, Zea mays
  Coding DNA Sequence Number=SeqID_42458
MAPGLQRSTAPFLEGNRAPDSVRWCTGLSGVTEPPKSLGPPTVVLVQQTSDNPVDVPELLDKFGIFPLTFPGTFHPSDRQENKKARKIGLIFLGFFCNFLRISKAGQKKKKENVEQYWADSGPNRPNHTGNQGAPTPMLTKVHDGVHVWPKSGELLDRPIGAMTGANLRFTPDSTPEKYFPQHNCTNNQGVCSGHGGREQSGKIVVFPAIGDGIVQLKGSESLRRT

SEQ ID NO: 85834 - protein, 98 aa, Zea mays
  Coding DNA Sequence Number=SeqID_42459
  Subcellular localization annotation: CTP_CleavageSite=69; ConfidenceScore=5.49e-01
MQAACKRAKWAHLSDFQRAQHGSLGPRVMQPGRRMLRASNCTAARATVTPPRLRDQYRDSRQPYARPSSASLARRDRERGIPRKGSFSVKEPGSEPPY

SEQ ID NO: 85835 - protein, 459 aa, Zea mays
  Coding DNA Sequence Number=SeqID_42460
MESHDLRAEWESRLVGGYETVESGYDYGAASPLQPNRILAEYVDVYSPLLYTPNPPPQVVSIATTAQAKMKLWKETSRSSKITTSSRCGLAATPSRLPVKAALSTFLFRTLIYCKNYMDVSDMARLRHTARKSVIPFLPSRLAERPLRRPVAGQSSHLERLHHRLREEQERRRQEQRSSSLSLHQEIESVRSCSPVLSLEPPPAPPLGAPASGVAAGGDPDDGDGDDSSSHDTDFSANPEPEGWVARPITRDAARGCHFHDALDTLLRRTFDRHTWSVEYRCVVYQHSRGVYPDRWEATCLVRCPEDSLQGAEACSEHYSISERDSAEAAMQDAARRALSHYCSVFGGAADGLDLKYYPRRSSGSTGGVIVSPVGEGNPRLSSTVNLAAVLNTELDHALDELSRARAEIALLRAERAERRFLDGGSPAPVGTQHPYRSPQRGHQSYGNPACKTKINLEP

SEQ ID NO: 85836 - protein, 232 aa, Zea mays
  Coding DNA Sequence Number=SeqID_42461
MTGANLRFTPDSTPEKYFPQHNCTNNQGVCSGHGGREQSGKIVVFPAIGDDPRGGGAEFERTVWAAEDEEEPWRGEYVSSGVAAAPAINREPLRLTTMRWKDILKTGTSIPRQPTRRVLHSTAILLRVEIKVKYFVANCTAPTLYIACDANLSKGEEKNWPPNDESTSSTGLSSTSNKCLIANNDGGDKSDDDEEYEDEESTSSQGKMRPTMWKKRRFDVSTPISTKKTQRS

SEQ ID NO: 85837 - protein, 71 aa, Zea mays
  Coding DNA Sequence Number=SeqID_42462
MGGEKRGQSRMKLLEDRVLLKNFYVKNLWEEFLPPSLCNHFRISASPMNILSVRRVKRSWKGKRKDTELVK

SEQ ID NO: 85838 - protein, 115 aa, Zea mays
  Coding DNA Sequence Number=SeqID_42463
MAGMYCNARDCLSKRMQPPARTAARILLSPVDKAKGSARKKDREKGKPRKGSFSAKEPGSEPPTTDQGFEGWPPEGSTVASDRVGPTPTTGQGFEGQPPEGLHGRLRLLGLRAHY

SEQ ID NO: 85839 - protein, 497 aa, Zea mays
  Coding DNA Sequence Number=SeqID_42464
MLLFHHAGKTSSIPPPAGGLSAAIVVVARRWKKCHVVAAVEGHELKSPETKHRPGPERLLETTHLELDGELFVSTQQAPTWCANCRRFETGGSLSRRPESEPWGRAERSFVVFRVLARVRALGSGGAEFRRLPGLSPSPSPGVGRSGVRRLPGLSPSPSPRVGRSGVRRLPGLSPSPSPGVGRSGVRRLPGLSPSPSPGVGRSGVRRGAFGKARLPDRLTLSSGTAVGAAQAALSFRQTGQWSGGVTAVTSALPGARVRIEVSGHLCVKCPCNLPPDGGGPQSFRLVVGGTQLRGSWYLSAIVRLQGFSSCSPAAPLRRWSPKAVTTGPWMGRGKPGCDLGPALSFKDVHHPCWGGERGEPGLYLPRGPAGHLLFQLLVVETILQLCGGGVLQPCRGRRTVAAQLGCNIPPSSSLSWRGRERGPAGAVWSSPLFGFDGWFASLEREREREPSGGCVRPGTMAAAAEVADESPGTRRPADSPVWRLFIPTGTEPEFRL

SEQ ID NO: 85840 - protein, 319 aa, Zea mays
  Coding DNA Sequence Number=SeqID_42465
  Gene Ontology: Mol. function=cysteine-type peptidase activity; Biological process=proteolysis
  Homolog annotation: Hit_ID=Q5NKP7; Match level="QueryCoverage=59%, HitCoverage=24%, E-value=2e-53, Identity=55%"; Hit description =Putative uncharacterized protein 9C20.3c
EKLSWKRDGFVQPKSAQSGCTGQCPVHQAGSGELAALGTSTAVYGYKSPDCPVVHRTVRCSSLHYSVLLCEHLCKGERLQVVEIPRKRDIVKLSKTPWYSSGSLDRLRGVDCNPRPLGRHNVEGTLDMKNVDRPPSNPKRITIQSTQECFSVDIPRVPAETVRHETRQADDEDDEFMPISKKRNFDDSPWKVLKKRLNVRCNPQDVLVSIQILNDRQRQAITRRGFSSILDMRLDALGSRSHLAWLMEKLDHNDMTIRAGPGKELKITKDTVHLFFGVTKCWWEELHWGIDEAVAANNFKSLNLGYRKKDFGVAALPRS

SEQ ID NO: 85841 - protein, 163 aa, Zea mays
  Coding DNA Sequence Number=SeqID_42466
  Subcellular localization annotation: CTP_CleavageSite=64; ConfidenceScore=5.37e-01
MALHKLCDDGGPPALLRKQGDVSKDSTAPTAVPPPGSVAPPTATTSRQQGAKTSPAATLAWRTRAFLEEVGRAGPRTGQALSWGRSLPSPTWTLVTPLLQAHPTWARDEHEGRGTSTSLTLDSGHLASPPFALAHALDPSGLGHAAHSLVGFGTPLSRNADNY

SEQ ID NO: 85842 - protein, 180 aa, Zea mays
  Coding DNA Sequence Number=SeqID_42467
MPSSSSSVADTPPTGASSEETLSNVVGEELRAEDIVEFGVSRMSLVRVQDMQQLGYFGGGVARVPGTEEVPEPEGELVVFEAFFAAGLRLPAHRFVGEVLRRFDVQKRKIRNKIAQFGSCTFTPKTGKTSMEVVELVPCARNKWGNWWEFWFYVAEGTVEHHPGLPVAIVFALLLSVPAV

SEQ ID NO: 85843 - protein, 87 aa, Zea mays
  Coding DNA Sequence Number=SeqID_42468
  Subcellular localization annotation: CTP_CleavageSite=47; ConfidenceScore=5.25e-01
MRHAEEGVSGMVDDFINPVRSRARSADKKRMTPVSVLSAQPQRFRIVSNTQSRGPQQQQGRWVIRPQQQQQAPNRTQFPAQRNNQQQ

SEQ ID NO: 85844 - protein, 164 aa, Zea mays
  Coding DNA Sequence Number=SeqID_42469
MLLLQLQIYAVTPIYDTDVPNDPGTHMLCTRLCPLETGVTTAKATAPDGSQPTLAAKPAAPGSSKVPEGVKAAGAGGTKSASVGATKARELPSPGKRVADFGTDISVDDYLVGSGEGQLVVVPPAVATTVFAVVPRVKGSALSAGGEISALTAVRDEAALCPAG

SEQ ID NO: 85845 - protein, 245 aa, Zea mays
  Coding DNA Sequence Number=SeqID_42470
  Subcellular localization annotation: CTP_CleavageSite=78; ConfidenceScore=5.68e-01
MKPLPPLPFAPQRSSADLPPPPSYTMQAPTLNHLPTTLAASSLDPSRFLSLRPLPQTSNADGLAWRQPLRLVGLPTTRDATAITPHIPLSLYIEIRQYCDHTRCIEAAGPLYGQPSLQARWQAMGYRRGPSIVSVGRSRFPIPSQNTYGEAPSQDTDKTTRLETDDAGWISVSYRHRKRETLRARINSPTSRRAPRPVFNASFQARHLLTSATAFTFRLASVVAPSPPRLDDTSVFPRLPIGRMS

SEQ ID NO: 85846 - protein, 189 aa, Zea mays
  Coding DNA Sequence Number=SeqID_42471
MVGPSPGSGEVEAPPRLRSSLSSEVEVESEPRVGRGGDHHLRPRLSPSPGGRARQSSFVFRSRGRVRALGSGEAEFVIFWSRGRALGSGEAEFVVFRSRGRDGGRALGSGEAELPMAPEAGLGCCQPHSVEWHSSRSDAGGAVFLSGRSVERQISVAIWPRLLLGEDWASGEPKLCADGGYQLRLGVLG

SEQ ID NO: 85847 - protein, 88 aa, Zea mays
  Coding DNA Sequence Number=SeqID_42472
MGIGAIGFGLLLPPEAATPAFAAENSPKTKRAQVPRVLGQSGWPQEVREGVGTRWRGPNHGGSTEGRRSTTRWHGGDASNSDEQLRFA

SEQ ID NO: 85848 - protein, 228 aa, Zea mays
  Coding DNA Sequence Number=SeqID_42473
  Gene Ontology: Mol. function=nucleic acid binding; Cellular component= nucleus; Biological process=poly(A) tail shortening
  Homolog annotation: Hit_ID=A2Z4M2; Match level="QueryCoverage=90%, HitCoverage=72%, E-value=2e-37, Identity=39%"; Hit description =Putative uncharacterized protein
  Pfam annotation: Domain name=CAF1; Domain location=2-203; Score=14.9; E_value=1.7e-09; Accession=PF04857.11; Description=CAF1 family ribonuclease
MAENMNSELNVIGSLLPLFPCITFDVEYAGTLHRSSAATRIAPSKQYALVKKNVDAVPIVMLGITLSNEYGNLPLTADGEGRLFQLAWEVTFSDFDPRRDRHAPESVTFLRSQGVCLDKARARGILTGGQPLPETWHEFMAQTHALLGGGRVFDAKYMAEHCERTDLGGLGLRRMAATLGMRWDFPELPFLAGRKSHIACFICTIMRRRILYRDGGDILVGLLDGIHW

SEQ ID NO: 85849 - protein, 76 aa, Zea mays
  Coding DNA Sequence Number=SeqID_42474
  Subcellular localization annotation: CTP_CleavageSite=46; ConfidenceScore=5.06e-01
MDRTRRGRSSLRSPSPRSKGDWGTMALGRGLRPWRRRGGRSPLRIEFQKRGKGGSLGQCAWTVDLLSNNRDGEEAT

SEQ ID NO: 85850 - protein, 203 aa, Zea mays
  Coding DNA Sequence Number=SeqID_42475
  Gene Ontology: Mol. function=sequence-specific DNA binding; Cellular component=nucleus; Biological process=regulation of transcription, DNA-dependent
  Homolog annotation: Hit_ID=Q60D94; Match level="QueryCoverage=46%, HitCoverage=17%, E-value=7e-21, Identity=56%"; Hit description =Unknow protein
MANEVVTTEARTIIIVWRSSRNKPEIDPPHAHIGLGPAEQPFPISPPPRHEAGARWQPPRIGFPHAMSSPCISHQCTTSRTKQFDEFTSRLLEIHDKMMSINTKEDAHNMEVSTPVPTINPEGNDEDETPKNTVSRNGGFLQNAVGQDLVHLGVARTASGDPSAVASGVSTGHQHNRMDLDPASSNVDNFKTSEFTKKNDLQE

SEQ ID NO: 85851 - protein, 304 aa, Zea mays
  Coding DNA Sequence Number=SeqID_42476
  Gene Ontology: Mol. function=sequence-specific DNA binding; Cellular component=nucleus; Biological process=regulation of transcription, DNA-dependent
  Homolog annotation: Hit_ID=Q60D94; Match level="QueryCoverage=65%, HitCoverage=37%, E-value=6e-49, Identity=52%"; Hit description =Unknow protein
  Pfam annotation: Domain name=GSH_synth_ATP; Domain location=1-297; Score=-131.1; E_value=0.00011; Accession=PF03917.8; Description =Eukaryotic glutathione synthase, ATP binding domain
  Subcellular localization annotation: CTP_CleavageSite=58; ConfidenceScore=5.35e-01
MPQFPVTRSGTVPAVGLVHAPFSLLPARFPASFFNQACELAPIFNELVDRVSLDGEFLQAALSRQVLNSIHWILLVNSRLSFSNFRTKQVDEFTSRLLEIHDKMMSINKKEVVQNDIPPESMDAMRPVQQHLPTRTSTPPSKMNNLPKDAQNMEVSTPVPPINPEGNDEDETPKNTVSRNGGFLQNAVGQDLVHLGVARTASGCPSAVASGVSTRHQHNRMDLDPASSSVDNFKTPELTKENGLEEDGKGESSMYDERQPKRRKRTLMNNEQIDELEKALVDEPEMHKKPCSIAELVREVKSAG

SEQ ID NO: 85852 - protein, 236 aa, Zea mays
  Coding DNA Sequence Number=SeqID_42477
  Gene Ontology: Mol. function=nucleic acid binding; Cellular component= nucleus; Biological process=poly(A) tail shortening
  Homolog annotation: Hit_ID=A2Z4M2; Match level="QueryCoverage=90%, HitCoverage=72%, E-value=3e-38, Identity=39%"; Hit description =Putative uncharacterized protein
  Pfam annotation: Domain name=CAF1; Domain location=2-211; Score=23.2; E_value=5.5e-10; Accession=PF04857.11; Description=CAF1 family ribonuclease
MAENMNSELNMIGSLLPLFPCITFDVEYAGTLHRSSAATRIAPSKQYALVKKNVDAVPIVMLGITLSNEYGNLPLTAGLRNDGVCLDKARARGVSSAAFAAKLAAILSATPRPNELTWAAFGGAYDFAYMLKILTGGQPLPETWHEFMAQTHALLGGGRVFDAKYMAEHCERTDLGGLGLRRMAATVGMRWDFPELPFLAGRKSHIACFICTIMRRRILYRDGGDILVGLLDGIHW

SEQ ID NO: 85853 - protein, 91 aa, Zea mays
  Coding DNA Sequence Number=SeqID_42478
MGREAGPQPGKRPIEFIYSEKSLQYSYSYDLGFYMRMLLGGGIYECGGRVHLQQILQVILCSLALDTIKKSASSLSKAGVKRIGVSELFFF

SEQ ID NO: 85854 - protein, 86 aa, Zea mays
  Coding DNA Sequence Number=SeqID_42479
MSAPIMTAKYWAVKEGIWRWAEMGGDHAAIKEFCGEARAYSRKMEKHLGLVFAVVMTVLWQEPELLRDVGDREWLDGHMTDTIQIE

SEQ ID NO: 85855 - protein, 57 aa, Zea mays; identical to SEQ ID NO: 66588
  Coding DNA Sequence Number=SeqID_42480

SEQ ID NO: 85856 - protein, 147 aa, Zea mays
  Coding DNA Sequence Number=SeqID_42481
  Subcellular localization annotation: CTP_CleavageSite=72; ConfidenceScore=5.15e-01
MEDQPPMDPWLEGVISSRGSKMMYRTALCDTSFLRTMTINLSQIAVTPRRCTRARRSASTCTSSCCGSRTVRGAASRTCCALASRSGWRRRSDSGGLGHGETQLHKDEEVTSTEAFASTAPDLYDSVMDAAVAIKKSDEVTKGNLTI

SEQ ID NO: 85857 - protein, 482 aa, Zea mays
  Coding DNA Sequence Number=SeqID_42482
  Gene Ontology: Mol. function=sequence-specific DNA binding; Cellular component=nucleus; Biological process=regulation of transcription, DNA-dependent
  Homolog annotation: Hit_ID=Q60D94; Match level="QueryCoverage=44%, HitCoverage=40%, E-value=1e-54, Identity=53%"; Hit description =Unknow protein
  Pfam annotation: Domain name=GSH_synth_ATP; Domain location=56-455; Score=-118.9; E_value=2.7e-05; Accession=PF03917.8; Description =Eukaryotic glutathione synthase, ATP binding domain
  Subcellular localization annotation: CTP_CleavageSite=42; ConfidenceScore=5.17e-01
MSSPCVSHQQQVRLRLRAASRLPAPDTASFAPPAPRQLRMAHAAMSAKAPLGVAPTEEGAGTPGQQAVLGKEEEEEANSMPQFPVTRSGTIPAVGLVHAPFSLLPARFPASFFNQACELAPIFNELVDRVSLDGEFFQAALSRQVLNSIHWILLVNSGLSFSNFRTKQVDEFTSRLLEIHDKMMSINKKEVVQNDIPPESMDAMRPVQQHLPTRTSTPASKMNNLPKDAQNMEVSTPVPPINPEGNDEDETPKNTVSRNGGFLQNAVGQDLVHLGVARTASGCPSDVASGVSTRHQHNRMDLDPASSSVDNFKTPELTKENGLEEDGKGESSMYDERQPKRRKRTLMNNEQIDELEKALVDEPEMHKNPVLLQSWSEKLSLQCIPSSRPTSISPPSRYRMRLLIMVQMKQAMWLFRPARKGNSGKSHRMPRVAAMRLRPRPPKSVRSQCSAMYLASNTRPPPRKSMGLGHELVPCLRQFCLP

SEQ ID NO: 85858 - protein, 96 aa, Zea mays
  Coding DNA Sequence Number=SeqID_42483
MAGSRGSRGAGHSAPCAQGNSRGTKKWSREGIEAEGKTAGGGAMGRSGARAPAMEESRASAAMGGAPAMKKKGRWVAWKLLLPAAAARQEEQGGRR

SEQ ID NO: 85859 - protein, 267 aa, Zea mays
  Coding DNA Sequence Number=SeqID_42484
  Gene Ontology: Mol. function=nucleic acid binding; Cellular component= nucleus; Biological process=poly(A) tail shortening
  Homolog annotation: Hit_ID=A2Z4M2; Match level="QueryCoverage=91%, HitCoverage=72%, E-value=4e-51, Identity=45%"; Hit description =Putative uncharacterized protein
  Pfam annotation: Domain name=CAF1; Domain location=2-242; Score =105.4; E_value=1.7e-28; Accession=PF04857.11; Description=CAF1 family ribonuclease
MAENMNSELNMIGSLLPLFPCITFDVEYAGTLHRSSAATRIAPSKQYALVKKNVDAVPIVMLGITLSNEYGNLPLTADGEGRLFQLAWEVTFSDFDPRRDRHAPESVTFLRSQGVCLDKARARGVSSAAFAAKLAAILSATPRPNELTWAAFGGAYDFAYMLKILTGGQPLPETWHEFMAQTHALLGGGRVFDAKYMAEHCERTDLGGLGLRRMAATLGMRWDFPELPFLAGRKSHIACFICTIMRRRILYRDGGDILVGLLDGIHW

SEQ ID NO: 85860 - protein, 411 aa, Zea mays
  Coding DNA Sequence Number=SeqID_42485
  Gene Ontology: Mol. function=sequence-specific DNA binding; Cellular component=nucleus; Biological process=regulation of transcription, DNA-dependent
  Homolog annotation: Hit_ID=A3B0Q2; Match level="QueryCoverage=87%, HitCoverage=52%, E-value=4e-93, Identity=50%"; Hit description =Putative uncharacterized protein
MSAKAPLGVAPTEEGAGTPGQQAVLGDQERSLGLAWFTLHSRCFQHVFRTKQVDEFTSRLLEIHDKMMSINKKEVVQNDIPPESMDAMRPVQQHLPTQTSTPASKMNNLPKDAHNMEVSTPVPPINSEGNDEDETPKNTVSRNGGFLQNAVGQDLVHLGVARTASGGPSVVASGVSTGHQHNIMDLDERQPKRRKRALMNNEKIDELEKALVDEPEMHKNWSEKLSLSLFVTVFSRAISRLNIRKAKLARIAKERAENADKPSIPHPGESSESAGEDNYLPPAGVMTALSKGGSLLSPDSTEQTSQAELSPNTTMMVRPFTRSFSLEPGRLVSLVDSDGKEVGRGKIFQAPGKSTTKSCVCVVDVTELRTEKWRELPHPSEAFGWTFQEAEVRNGGIIRVSWDAVRLFPVA

SEQ ID NO: 85861 - protein, 131 aa, Zea mays
  Coding DNA Sequence Number=SeqID_42486
MDTDRIPWRASLQWIHGLKVSLALEDPRCEAPNRWRDVPGREYLPQHALSICCGSRTVRGETSRTRCALASRSDWRRRPDSGGLGHGETQLHKDEEVAPTEASASTAPDLYDIPRTCAFCNHNPRLNYMES

SEQ ID NO: 85862 - protein, 105 aa, Zea mays
  Coding DNA Sequence Number=SeqID_42487
  Subcellular localization annotation: CTP_CleavageSite=36; ConfidenceScore=5.64e-01
MTINLSQIAVTPRRCTRARRSASTCTSSCCGSRTVRGAASRTCCALASRSGWRRRSDSGGLGHGETQLHKDEEVTSTEAFASTAPDLYAVAIKKSDEVTKGNLTI

SEQ ID NO: 85863 - protein, 185 aa, Zea mays
  Coding DNA Sequence Number=SeqID_42488
  Homolog annotation: Hit_ID=Q6ZJ59; Match level="QueryCoverage=71%, HitCoverage=39%, E-value=1e-28, Identity=52%"; Hit description =Putative glycine-rich protein
  Subcellular localization annotation: CTP_CleavageSite=75; ConfidenceScore=5.50e-01
MPEIPTTSQLQPPLITISFTFSLATLTPPPTIPSASSCPSALAGTAFALFSGLGDPSVGSGGFGQPGSLMSAPLSGMMQPSFMNPFGSMVQPSLLGPSMFAPHGNLNGGMFGSQTHLSQGISNGSGFIQQAPEPSRPKGPIIKELSSDDEDDVDDDEEGEKKNGNFRKHQRESKEPYVEDPVDVE

SEQ ID NO: 85864 - protein, 225 aa, Zea mays
  Coding DNA Sequence Number=SeqID_42489
  Gene Ontology: Mol. function=glutathione synthase activity; Cellular component=chloroplast; Biological process=glutathione biosynthetic process
  Homolog annotation: Hit_ID=Q7X9G1; Match level="QueryCoverage=84%, HitCoverage=30%, E-value=9e-40, Identity=53%"; Hit description =Glutathione synthetase precursor
  Pfam annotation: Domain name=GSH_synth_ATP; Domain location=15-225; Score=-162.7; E_value=0.0039; Accession=PF03917.8; Description =Eukaryotic glutathione synthase, ATP binding domain
MSAKAPLGVAPVEEGAGTPGQQAVLGQMVEDAAVWCAVHGLVVGDRANQRSGTVPGVGPGARLPFSLLLARFSASFFNQACELAPIFNELVDRVSLDGEFLQAALSRQVLNSIHWILLVNNGLSFSNFRTKQVDEFTSRLLEIHDKMMSINKKEVVQNYIHQKAWMPCARELDSNRKLMQQDAHNMEVSTPVPPINAEGNDEDETPKNTLSLEMLVSCRMQLAKT

SEQ ID NO: 85865 - protein, 82 aa, Zea mays
  Coding DNA Sequence Number=SeqID_42490
  Subcellular localization annotation: CTP_CleavageSite=20; ConfidenceScore=5.27e-01
MDMIQVKASSTQGMRSHLARAQPLAGTVLLDESTPRPRTSSSNGRTLDSPEAQLGQALQWSNLGQIASPTDRIAGAFNARIA

SEQ ID NO: 85866 - protein, 275 aa, Zea mays
  Coding DNA Sequence Number=SeqID_42491
  Gene Ontology: Mol. function=protein binding; Cellular component =protein complex; Biological process=protein catabolic process
  Homolog annotation: Hit_ID=Q9LT08; Match level="QueryCoverage=100%, HitCoverage=100%, E-value=1e-103, Identity=68%"; Hit description=26S proteasome non-ATPase regulatory subunit 14
  Pfam annotation: Domain name=Mov34; Domain location=24-120; Score =73.6; E_value=6.3e-19; Accession=PF01398.12; Description=Mov34MPNPAD- 1 family
MERLQRIFGASGMGQPPTDSPLLDSSEQVYISSLALLKMLKHGRAGVPMEVMGLMLGEFVDDYTVRVVDVFAMPQSGTGVSVEAVDHVFQTNMLDMLKQTGRFHVSLKVIGELILLVVQLTCMFCSYKRKMEESFEALNPRAVAVVIDPIQSVKGKALIHGLNRHYYSIAINYRKNELEEKMLLNLHKKKWTDGLILKRFDTHSKTNEQTVQEMLNLAIKYNKAVQEEDELPPEKLAIANVGRQDAKKHLEEHVSNLMSSNIVQTLGTMLDTVVF

SEQ ID NO: 85867 - protein, 91 aa, Zea mays
  Coding DNA Sequence Number=SeqID_42492
MEIKERKMNNGNLCHLKTFVNCPLKSIKAIPIHYNNLKENLILKDCNLADGEYILVPEQGAAQEVAPDPAPEPAPEDLPATALEGKPRFYA

SEQ ID NO: 85868 - protein, 122 aa, Zea mays
  Coding DNA Sequence Number=SeqID_42493
  Homolog annotation: Hit_ID=Q5NKP3; Match level="QueryCoverage=29%, HitCoverage=14%, E-value=3e-11, Identity=88%"; Hit description =Putative uncharacterized protein 9C20.7
MSCTFDDYYIKDYGVILAPEVTQRRTDGNDHSSSSGSQQQRWMRVGFCSLAMESASSISQGRVLKHFFPDKVLFVVDFVLDEYPNEGLDLWERVGAPHKLGVVVMTEQTYKRRDKAGKHQTA

SEQ ID NO: 85869 - protein, 279 aa, Zea mays
  Coding DNA Sequence Number=SeqID_42494
MWRLGDVRYPGESSGSRGGEKSERAVVPSLATSIHLGEGASRRGSSAEPSKLGSKRPCSSGSGGGPLSVVGGKEVAREETEIQGSGATVGVRRRRTAIAKKLRRSTAPTKEGAQKRKRISSPPSSSASTSSGAPHPKRKRSRVYGYANTHSMLVGFIDQLTMDSENAKLRRALAHLIRVVEERCADIVDVVHGAFQPVSGPVLNEMNRALVQIEDLANDLDQLALEKDWEMEHMTPTPIAESSQTEDELLIDYDSELNNDDIVGYDDGRDYSTDDTYPY

SEQ ID NO: 85870 - protein, 49 aa, Zea mays
  Coding DNA Sequence Number=SeqID_42495
MGTNGHLDLDTGGKSIDQKVHKFIYNSSKSTVRNTVDYYGQEKLFGKTD

SEQ ID NO: 85871 - protein, 207 aa, Zea mays
  Coding DNA Sequence Number=SeqID_42496
  Subcellular localization annotation: CTP_CleavageSite=40; ConfidenceScore=5.36e-01
MHGGALPGSDRADPAAPGGVPLGQLGGNVARRAAETTAARCSGRAATSLLSQSRNQVPASDNARENSAACAAPTAVPPARVRLTAAKSNLGRHRKALPRPTLGLGPCLDLGRRSPPRPTPGLRLNLDLGRRSSPRPTPGLGLNLDLGRRSLPRPTPGLGLNLDLRRRSPPHPTLGLGLSPDLGGVSASPDLGLGPTTSQGGTSLPYP

SEQ ID NO: 85872 - protein, 149 aa, Zea mays
  Coding DNA Sequence Number=SeqID_42497
  Gene Ontology: Mol. function=ATPase activity, coupled to transmembrane movement of ions, phosphorylative mechanism; Cellular component=integral to membrane; Biological process=phospholipid transport
  Homolog annotation: Hit_ID=Q10LU3; Match level="QueryCoverage=83%, HitCoverage=9%, E-value=5e-49, Identity=81%"; Hit description =Phospholipid-translocating P-type ATPase, flippase family protein, expressed
  Subcellular localization annotation: CTP_CleavageSite=35; ConfidenceScore=5.49e-01
MTTGDPLLLSSSGSADSPSKHQAPARPSVGSLGCLCATDSFSSSLYEDCETSSVTVTDEREAQPRHLHELSDVSRVAERFQSADSQFFHRLSVECSQKERQRKVSWGGAMERQHSPSSLEIGMVSSSHEKPNRSQRIRNKSSQFEDPSE

SEQ ID NO: 85873 - protein, 347 aa, Zea mays
  Coding DNA Sequence Number=SeqID_42498
  Gene Ontology: Mol. function=heme oxygenase (decyclizing) activity; Cellular component=plasma membrane; Biological process=heme oxidation
  Homolog annotation: Hit_ID=A2WX03; Match level="QueryCoverage=53%, HitCoverage=34%, E-value=3e-86, Identity=83%"; Hit description =Putative uncharacterized protein
  Pfam annotation: Domain name=Heme_oxygenase; Domain location=161-344; Score=-52.9; E_value=0.0031; Accession=PF01126.11; Description=Heme oxygenase
  Pfam annotation: Domain name=PRONE; Domain location=1-220; Score= -32.0; E_value=6.3e-12; Accession=PF03759.4; Description=PRONE (Plant- specific Rop nucleotide e
  Pfam module annotation: Pfam domain module=Heme_oxygenase::PRONE; Domain location=161-344::1-220
MAFHHRDEKWWLPVHRVPPGGLHNKTRKQLQHKRDCANQILKAAMAINSNTLAEMEVPEPYLDSLPKNGRSTLGDIIYHYITSDQFSPECLLDCLDLSTEYQALEVTNRVEASVYVWRRRVAAKPVNGLGRSSSARSSWGMVKDMMVDSEKRELLLAEQSEGLLICLKQRFSRLTQTSLDMSKIQYNKVFLSLIWFSQYSIHNQITDAEFRNTGLERSEALKNDLEWFRQQGHTIPKPSAPGTTYASLLEDLSEEDPQAFICHFYNVYFAHTAGGRMIGKKVSEKILNNKELEFYKWEGNLSQLLQNVHNKLNQVASNWSREEKDHCLEETEKSFSYSGGPFRHIFT

SEQ ID NO: 85874 - protein, 53 aa, Zea mays
  Coding DNA Sequence Number=SeqID_42499
QSQYFNGMKLAIDVAEKAAALAPAPASSSAPVSYTVGAAAAAAVVAAAAVLAF

SEQ ID NO: 85875 - protein, 144 aa, Zea mays
  Coding DNA Sequence Number=SeqID_42500
MGKNNKRKREPTPPSEDFGDSEYSEEEFSSESEGSPAPVSPPASSDDSDDSQGIAAEVWTYIRAVERSGLEGSDESECSSDEEDSDGSDEDEDDGDDDDDDDDGDGDGSGSGRGGGDGSRGSTKGDSSEGSTKGGGSGRGRASG

SEQ ID NO: 85876 - protein, 115 aa, Zea mays
  Coding DNA Sequence Number=SeqID_42501
  Subcellular localization annotation: CTP_CleavageSite=63; ConfidenceScore=5.32e-01
MALLDSARSTEPRNSYASGIRTPHSSPTAKNNSYFESSIARGRSGTLGFVSNLGFISTLGEIRHSLGRRRKRKDFHFEGGRQHRAWARGGRVKPLNFGQGSFIFVGKAVPLADPL

SEQ ID NO: 85877 - protein, 137 aa, Zea mays
  Coding DNA Sequence Number=SeqID_42502
MEKAPVAAARKRKLGMGDDETGPRAIVSFVEELMETCAVLEELMSSPELRETSSRMLKELSVDDYLVGGVTMFDAQTGLPPTAAAGRMGTTKGDAGTSEDQQSRFWAVAGGGGGLASAPPLLVTAFAEQVALGSLTS

SEQ ID NO: 85878 - protein, 66 aa, Zea mays
  Coding DNA Sequence Number=SeqID_42503
MAKMLPLLEVVPWGFLKCRMLEMQRLGYFGSGVGRAPGAKDFPEPEGELVVSSYGGEPSVEFFAKN

SEQ ID NO: 85879 - protein, 289 aa, Zea mays
  Coding DNA Sequence Number=SeqID_42504
  Gene Ontology: Mol. function=nucleic acid binding; Cellular component= nucleus; Biological process=mRNA processing
  Homolog annotation: Hit_ID=Q8GZZ4; Match level="QueryCoverage=98%, HitCoverage=73%, E-value=4e-77, Identity=54%"; Hit description =Putative uncharacterized protein OSJNBa0013D02.8
  Pfam annotation: Domain name=RRM_1; Domain location=9-68; Score=14.0; E_value=0.0076; Accession=PF00076.13; Description=RNA recognition motif. (a.k.a. RRM, RBD,
  Pfam annotation: Domain name=zf-CCHC; Domain location=116-133; Score =27.4; E_value=5.1e-05; Accession=PF00098.14; Description=Zinc knuckle
  Pfam annotation: Domain name=zf-CCHC; Domain location=94-111; Score =31.1; E_value=4e-06; Accession=PF00098.14; Description=Zinc knuckle
  Pfam module annotation: Pfam domain module=RRM_1::zf-CCHC::zf-CCHC; Domain location=9-68::116-133::94-111
MEMMKLQVNVFEYFDSRQLIVCGNHFRRIREVELKRDYAFIEFSDPRDADDAQYNLDGRDVDGSRIIVEFAKGVPRGSGGSRDYNGRGPPPGTGRCFNCGVDGHWARDCQAGDWKNKCYRCGERGHIERNCQNSPRNLSRSRSPSGSPRGGRRDRDERRSRSLSYSRSASPRRSVSPVKEKERSRTPDGSRSPSPRDKVSPPPKDNGAHNGSDREDSPGGREMSKRSRSPSDGYRSPVGNGRSPSRSPSPKVNNGDDPSPKGNNGDDPSPKGNNGDDEHRGSPRGSQSP

SEQ ID NO: 85880 - protein, 157 aa, Zea mays
  Coding DNA Sequence Number=SeqID_42505
  Gene Ontology: Mol. function=RNA binding; Cellular component =nucleolus; Biological process=ribosome biogenesis and assembly
  Homolog annotation: Hit_ID=A2YPL9; Match level="QueryCoverage=32%, HitCoverage=8%, E-value=4e-17, Identity=86%"; Hit description =Putative uncharacterized protein
MKECNIQDFDLEKAQLDLGHGYNRAEMKFNVNRVDNMVIQAIFLLDMLNKDINSFSMRVSPSNQLWNPNGQAFGWKVQQSVPAVCQPSPRGRAVDLPQADSLHSTAPSVVPLPLVAFPIRVVSTVPTPRIVHATDSPVLSTHDVHSCMLPPHDLHFA

SEQ ID NO: 85881 - protein, 194 aa, Zea mays
  Coding DNA Sequence Number=SeqID_42506
MDSWHTGLSGVHRTVSGHFETGSSIPLQPTRRIFHSTAIWSLSRKWLYLWVLTRSGGRDWDGGIVPCTELAETEAVQGAALQIKSNTLPENERRAQEEQDWDGGIVPCTKLAEIEAVQEAALQIKSNTLPEMRDVHKRSSEVEVMGRKHAGVDVVGTEDGGVGCMNYAGSGDGGNHTNGEGHQRERHDRWGGGV

SEQ ID NO: 85882 - protein, 78 aa, Zea mays
  Coding DNA Sequence Number=SeqID_42507
MRNRIAPVSHSEGRDPHDFIKAYSPPQALRQGIPLIPHLGDIGVLCRYHSVLKLTTHLLNGVTNVSKIAIYEFWINVL

SEQ ID NO: 85883 - protein, 239 aa, Zea mays
  Coding DNA Sequence Number=SeqID_42508
  Gene Ontology: Mol. function=protein-tyrosine kinase activity; Biological process=protein amino acid phosphorylation
  Homolog annotation: Hit_ID=A7P525; Match level="QueryCoverage=51%, HitCoverage=69%, E-value=2e-23, Identity=40%"; Hit description =Chromosome chr4 scaffold_6, whole genome shotgun sequence
MEESRGILREMFQCKEVTELINSVGDKIQAESLVDLLSSACDQGRIDEILLFEDLNVNNGVSVCLLLVYVCYSCWISCFIFWDVEIIFVSLDRDEASFRDHFQGMPWLAVPFDAAGLLRQKLCARFAIERIPALIPLSASVTSSSGLGCGEDAVRLVGEYGVDAYPFSAQRRELESMDDARREGGRLQELLGCEERDFVISADDIKVNKKFVKFLINQNYFHKCIPLCIFHFDHLVNLV

SEQ ID NO: 85884 - protein, 125 aa, Zea mays
  Coding DNA Sequence Number=SeqID_42509
  Gene Ontology: Mol. function=ubiquitin-protein ligase activity; Cellular component=ubiquitin ligase complex; Biological process =protein ubiquitination
  Homolog annotation: Hit_ID=Q9AV81; Match level="QueryCoverage=98%, HitCoverage=27%, E-value=2e-56, Identity=77%"; Hit description =Putative WD-repeat containing protein
  Pfam annotation: Domain name=WD40; Domain location=11-48; Score=16.5; E_value=0.098; Accession=PF00400.23; Description=WD domain, G-beta repeat
  Pfam annotation: Domain name=WD40; Domain location=52-89; Score=32.4; E_value=1.6e-06; Accession=PF00400.23; Description=WD domain, G-beta repeat
  Pfam module annotation: Pfam domain module=WD40::WD40; Domain location=11-48::52-89
VEAVTVHVTQKYFVGEASGQEGYTSASFHPDGLILGTGTTDAVVKIWDVKAQSNVAKFEGHVGPVTAMSFSENGYFLATAAHDGVKLWDLRKLRNFRTFSSYDLDTPTNTVEFDFSGNYLAIGLI

SEQ ID NO: 85885 - protein, 94 aa, Zea mays
  Coding DNA Sequence Number=SeqID_42510
MERGAEKLYSEDDVSAPFYTHDAAKQASKQSCSHNTNVIYSQSITINARIISYQNRKTISLFMKQREWNTSITASTSLYLKKLTSSCLFSLEIP

SEQ ID NO: 85886 - protein, 189 aa, Zea mays
  Coding DNA Sequence Number=SeqID_42511
MLPGKPSDNYARATTSNKNTPAWRKRLQALSGGDPIEDDPTIVYMAGYLHTLDNQYDDLASHCTHLNSRVESLEQKVRELTKEKASLQESLEIAEGEETNTREAYRTLKMDYDKKLKKLAPARKIRKKTKSQGCQAEQKEEAPPALPPTRIRNSSDTEEMSLASLDDLLKEFGDTLEKEFGSTLDSTRV

SEQ ID NO: 85887 - protein, 60 aa, Zea mays
  Coding DNA Sequence Number=SeqID_42512
MSSPNSSRSCRSCHVDEQEDLMLGTFWCHCHLAPIRCYGVASLRLGFWFLQFLGAVATIM

SEQ ID NO: 85888 - protein, 119 aa, Zea mays
  Coding DNA Sequence Number=SeqID_42513
MAPPVDVAGLRPRLGDVEAPPKPRSSPSSVAEPESEPWVGRSGVRRLPGLSPSPSPGSGGAEFAVFRDLARVRALGRAERSSSSSGAEPKSEPWVRRSGASYGRSVERRSDGGHFGSVG

SEQ ID NO: 85889 - protein, 181 aa, Zea mays
  Coding DNA Sequence Number=SeqID_42514
MRRKDGGYPPSGGLEGGKTRCIRESEDMVAFRRGPTRHATGAPDASCKQLHRHSRHYRASSTAEPIPRFEATQRTTQQRQPGATVNTAKNGPAVMAVAGGQEQQSRRQPSSRPIRGQRENPLSRREDNAPVFRSSNGSRLRNGRPANHSPRRINSAAGQAAPQAGEAGTGKGGYPEKDPSP

SEQ ID NO: 85890 - protein, 43 aa, Zea mays
  Coding DNA Sequence Number=SeqID_42515
MSSSMTRTGLGHSSPPPSLELHRTGSAAPPFAPKKWGPSIRNP

SEQ ID NO: 85891 - protein, 41 aa, Zea mays
  Coding DNA Sequence Number=SeqID_42516
MAHQTLYGAPPDSPWLADPVALALISPPLALSTKTGSFLAL

SEQ ID NO: 85892 - protein, 57 aa, Zea mays
  Coding DNA Sequence Number=SeqID_42517
  Homolog annotation: Hit_ID=A3BZE5; Match level="QueryCoverage=52%, HitCoverage=7%, E-value=8e-07, Identity=86%"; Hit description =Putative uncharacterized protein
MSDPELRLVLELATDEELMEVEEILYGTRFSAYCSLYLVLANSNFHVSKFSISDKDV

SEQ ID NO: 85893 - protein, 117 aa, Zea mays
  Coding DNA Sequence Number=SeqID_42518
MENGKGSDVGTPGLERWRGLQLGDAGLGPVEGAAAWRDGGGARGVGRWRGGGGGRGGRGIGRAAHRGDERLGGARRVGRRLCGGSARRRHGVRNRMSERRMTRFETPSSAPRSMAPS

SEQ ID NO: 85894 - protein, 187 aa, Zea mays
  Coding DNA Sequence Number=SeqID_42519
MAIAGDVLHGESRLQIPIQQVQHIIDVKTELGIVILPRVARDGDRPAVECGSATMLASEVGDGARLWVETEENERGRPLVIATTARWALKNQPRCPEFCIGSFGQRHGRAEVEFALTSGSHAGVTEWAARRSCQSAGFLGPRVNQSTGEEELGLGHAADKAVLPVGAAVKARLEWARWAARSRFDPS

SEQ ID NO: 85895 - protein, 91 aa, Zea mays
  Coding DNA Sequence Number=SeqID_42520
  Gene Ontology: Mol. function=RNA-directed DNA polymerase activity; Biological process=RNA-dependent DNA replication
  Homolog annotation: Hit_ID=UPI00005A975E; Match level="QueryCoverage =94%, HitCoverage=19%, E-value=9e-09, Identity=68%"; Hit description =PREDICTED: similar to Retrovirus-related Pol polyprotein from transposon 297
MIKSQALVDFVVEWTEAQEPSLVEDPEYWTMYFDGSYLKTGCGAVKATSTMSDKTHMLAQALQTIPVTGPFAVWGLDLVGPFKKASGAAPT

SEQ ID NO: 85896 - protein, 222 aa, Zea mays
  Coding DNA Sequence Number=SeqID_42521
MEGKELTPSGRVHDLINTRERKGVLVACLIEPSVVDAHPLALVLVLDKHGICDPHWVVYCSYEPHRQESCYLFAYGLAFFFTKAAKPLVTGLTVGWIFRELSKFPWDSRHLCGFPSKGIAIGLEEVDEGALLPVGDRGPDSNMLGRVSVIDLNVFSVLGGFEHAGGNLGPLGSPSLRTTEHNQQNNLSKRVDSVAGRDAVDRRDAEGQRRACDPRASKFLRT

SEQ ID NO: 85897 - protein, 162 aa, Zea mays
  Coding DNA Sequence Number=SeqID_42522
  Gene Ontology: Mol. function=calcium ion binding
  Homolog annotation: Hit_ID=A2Z8I8; Match level="QueryCoverage=29%, HitCoverage=9%, E-value=1e-11, Identity=72%"; Hit description =Putative uncharacterized protein
MRSYEAQRDPPILIKGTFRQLFIHDGPVLCRLRQLSLSLRHLDVFYILLMMKLKYNKTGRENDCLPRVGHWNMMNKGPTRRDAAALDPELLQLVELAPGALRENSIADVLYSQWLVLPDTTKLLGSTAIGLKMKDGVVLAIEKRVTSPLLVLSHFLSGHSVK

SEQ ID NO: 85898 - protein, 179 aa, Zea mays
  Coding DNA Sequence Number=SeqID_42523
MGSGEAEFIVFRGRARVQALGRARRSSSSSGAEPETEPWAGRGGVRRLPGPSPSPSPGSGEAEFVVFRGRARVRALGQARRSFLWRPRPDLAAATFALNAPAIRSVGVAIWSRLLIGEDWASGEPKLCADGGYQLRFRSLGDPPGVAPEASEEWFDSFEVLMRFAMLQPVWLFPHASWP

SEQ ID NO: 85899 - protein, 194 aa, Zea mays
  Coding DNA Sequence Number=SeqID_42524
MQAACNRTKWAQPFDSNASSMGAQAHTSCVKGSHLANKKIKYWIQQRSKGATEEDSNLNSPPSGISRGTPLKFTGLSGVHRTVSGAPRKSRLRNSPASGKRSGCSAIIHRTCPVYTGLSGEPAEQRLLRANGHLQAHSMRARSVQKSGTPILAHRTLNSTCPVCTGHPGRPRRQKIQRSESNNFGDVAGAPDMS

SEQ ID NO: 85900 - protein, 67 aa, Zea mays
  Coding DNA Sequence Number=SeqID_42525
  Subcellular localization annotation: CTP_CleavageSite=46; ConfidenceScore=5.21e-01
MVQKNHNNGKGKQKAIKPNKTTTFKKRNNKVELPPSHALNFGTFVRIVLRKQIIVRKGQYHRDYPRE

SEQ ID NO: 85901 - protein, 259 aa, Zea mays
  Coding DNA Sequence Number=SeqID_42526
  Gene Ontology: Mol. function=electron carrier activity; Cellular component=nucleus; Biological process=cell redox homeostasis
  Homolog annotation: Hit_ID=A7P525; Match level="QueryCoverage=71%, HitCoverage=67%, E-value=1e-39, Identity=41%"; Hit description =Chromosome chr4 scaffold_6, whole genome shotgun sequence
  Subcellular localization annotation: CTP_CleavageSite=46; ConfidenceScore=5.71e-01
MAPPPHRAFSSSAPTSLAPTTVAAARHKCPTPSPRPSPKTTVVSPSCDDQVAPSPRLPPIRHPTHSAHHPLRTPFKPCRSFTPTLLQAYTALRSAGKSVEIIFVSLDRDEASFRDHFQGMSWLAVPFDAAGLLRQKLCVRFAIERIPTLIPLSVSATPSSGLGCGEDAVRLVGEYGVDAYPFSAQRRRELESMDDARRGGGRLQELLGCEERDYVISADDIKIPIADLAGKTVGLYFGAHWCPPCHVFTKQLKELLVKM

SEQ ID NO: 85902 - protein, 187 aa, Zea mays
  Coding DNA Sequence Number=SeqID_42527
  Gene Ontology: Cellular component=integral to membrane; Biological process=photosynthesis, light harvesting
  Homolog annotation: Hit_ID=Q94KE7; Match level="QueryCoverage=62%, HitCoverage=63%, E-value=3e-48, Identity=86%"; Hit description=Early light-inducible protein ELIP
  Pfam annotation: Domain name=Chloroa_b-bind; Domain location=62-178; Score=-16.9; E_value=0.00039; Accession=PF00504.12; Description =Chlorophyll A-B binding protein
MRLWTPGTRAMGKSSIWVRGGSMGCESGEGSDGGAWYLPLECFDLSKTSFVSSKADDAAADTSASAAPAARKLGLWDALAFSGPAPERINGRLAMVGFVSALAVEATRGDGILSQAGNGAGLAWFAYTAAVLSAASLVPLLQGESAEGRSGRFMTADAELWNGRLAMLGLVALAVTEYLTGAPFVNV

SEQ ID NO: 85903 - protein, 223 aa, Zea mays
  Coding DNA Sequence Number=SeqID_42528
MQPGCTPPPAVIRDGDLQLDGGGKRAGLRPLPLPQPQGSPGLGGDSCTVPGSRTRVASEPLAAPASATAARRGSSTGEIARVGHGPTSNSTAFCPSLPHEFGHGRGPLGSIIRPEVSAAAVQPPGAEVVVVAAAGAGDGVPFVGLLLLRRPSPMESGYLPVGCLNRFTKRESPRVKVTSESGDPWTVSPSEARSDLAEGVVDAEGAAAPFQCQDPSLQDQIVL

SEQ ID NO: 85904 - protein, 217 aa, Zea mays
  Coding DNA Sequence Number=SeqID_42529
MRQQWGDYSDAVERLSHAAHGPGGGGHRRVYGSIRKAEREATGCYKRAKELEERFNALQTRVERAEASTRSEAERTRKQLKDSYHELGARTVDFEVPDRELGLRCLEWLQEELLALPAIVEGFMSYASLVTCEGAMNALSREGCRHYEVFDQADEDFERDIYKVEDPVVKESAGALFDRMWSPHGREVVRERSETARGQAARNEKGGGLRGFEQRAA

SEQ ID NO: 85905 - protein, 146 aa, Zea mays
  Coding DNA Sequence Number=SeqID_42530
  Homolog annotation: Hit_ID=Q852F5; Match level="QueryCoverage=40%, HitCoverage=5%, E-value=2e-08, Identity=40%"; Hit description =Retrotransposon protein, putative, unclassified
MTGRLKEVERVQQQLLMQSELAAVVAEQAATERNDLYRKLEETGREDHGANDRGPQHDQQMPGGGHQRGLRNDPRQLVDSGNQAIPKLPFPKFSEGDPVVWLDQCKEYFTVYRIPESIWVSVASLNLENIASQWWKTHKLRHGIGI

SEQ ID NO: 85906 - protein, 153 aa, Zea mays
  Coding DNA Sequence Number=SeqID_42531
MALIMLIGDGSTTCHAVRHLAHALPLVAPIAVSRIYVVPKPSIVPVGTLPLMLAISTIPVVGAMPRIHVVPNTAALPPMLAAVPPIMPKLTLPLMPVVRPKVGDSPPMPVVMPKACEDARGVSEPENQMYMCAYLGGRRRVRVAGECQATCDE

SEQ ID NO: 85907 - protein, 460 aa, Zea mays
  Coding DNA Sequence Number=SeqID_42532
  Gene Ontology: Mol. function=sugar:hydrogen symporter activity; Cellular component=integral to membrane; Biological process =carbohydrate transport
  Homolog annotation: Hit_ID=Q41409; Match level="QueryCoverage=99%, HitCoverage=89%, E-value=0.0, Identity=83%"; Hit description=Glucose transporter
  Pfam annotation: Domain name=MFS_1; Domain location=1-377; Score =76.3; E_value=1e-19; Accession=PF07690.7; Description=Major Facilitator Superfamily
  Pfam annotation: Domain name=Sugar_tr; Domain location=7-425; Score =411.7; E_value=1.1e-120; Accession=PF00083.15; Description=Sugar (and other) transporter
  Pfam module annotation: Pfam domain module=MFS_1::Sugar_tr; Domain location=1-377::7-425
MDPFLEKFFPVVFHRKNSGGKNNYCKYDNQGLAAFTSSLYLAGLVASLVASPVTRNYGRKASIVCGGVSFLIGAALNVAAVNLAMLILGRIMLGVGIGFGNQAVPLYLSEMAPAHLRGGLNMMFQLATTLGIFTANLINYGTQNIKPWGWRLSLGLAAVPALLMTLGGLFLPETPNSLIERGRVEEGRRVLERIRGTADVDAEFTDMVEASELANTVEHPFRNILQPRNRPQLILTGINSILFYAPVLFQSMGFGGNASLYSSVLTGAVLFSSTLISIGIVDRLGRRKLLISGGIQMIVCQVIVAVILGVKFGAEKQLARSYSVAVVVVICLFVLAFGWSWGPLGWTVPSEIFPLETRSAGQSITVAVNLLFTFAIAQAFLSLLCAFKFGIFLFFAGWITVMTVFVYVFLPETKGVPIEEMVLLWRKHWFWKKVMPDMPLEDGWGAAEGHAAPASNNHKG

SEQ ID NO: 85908 - protein, 81 aa, Zea mays
  Coding DNA Sequence Number=SeqID_42533
MALINTVANRIRIPLWRLFGGASDSVTTNIIKWDWPLCSSSNQFTEMIGKVFEMSAMWPWRKTKSLLLLMRAIGVCLMLRK

SEQ ID NO: 85909 - protein, 65 aa, Zea mays
  Coding DNA Sequence Number=SeqID_42534
MRSSSSSGAEPESEPWGRAKRSSSSSGAEPESEPLGSGCPHCIQCSGGDAGNMEDFEEFQDYDEF

SEQ ID NO: 85910 - protein, 111 aa, Zea mays
  Coding DNA Sequence Number=SeqID_42535
MERRGMSIIKDGAKAMIVTDKGENATKVRIGKTPFSNRDGKDDNSKGRHKISIMERSSDYKGSFKMQVQDKHHGKDQGMTRVKVITDKHNQGGILDKTCEVSKNGKQSMVK

SEQ ID NO: 85911 - protein, 71 aa, Zea mays
  Coding DNA Sequence Number=SeqID_42536
MKTDGSEKRQYKCVYNQGRSARYGEMWRSPYLAPTPRRSPSTSLPTYLTLSGAFRATTGNMWCGIRMVGKG

SEQ ID NO: 85912 - protein, 203 aa, Zea mays
  Coding DNA Sequence Number=SeqID_42537
MSGALQGQHGASPPSSLRKGDAGAGSGAALANLAPAKPLTASTYQPEDLGPDPKSGLERHRKLRLARPQGSDSGSAPEDDELRLARPQGSDSGSAPEDDELRLVRPQGSDSSSAPEDEELRLARPQGSDSGSAPEDDELRLARPQGSDSALASAGLRLARPRGSDSTSASEDRLDLDLGGASASPNPWLGPTTSQGGPSLPYP

SEQ ID NO: 85913 - protein, 128 aa, Zea mays
  Coding DNA Sequence Number=SeqID_42538
  Subcellular localization annotation: CTP_CleavageSite=44; ConfidenceScore=5.66e-01
MPPPSRSTASLPLLVDSALLPTTPSLCQSRFTPPAPVSVSVPSSASQGSNIFKTRIDNVDADIYLIDEPSAYLDLEQRIVASKVIKRFGICPFSSQSRTKPESLEHLNQCIRTFTKHIDLNAQVFLDL

SEQ ID NO: 85914 - protein, 328 aa, Zea mays
  Coding DNA Sequence Number=SeqID_42539
  Gene Ontology: Mol. function=transporter activity; Cellular component= mitochondrial inner membrane; Biological process=transport
  Homolog annotation: Hit_ID=Q10NJ7; Match level="QueryCoverage=87%, HitCoverage=82%, E-value=1e-103, Identity=68%"; Hit description =Mitochondrial carrier protein, expressed
  Pfam annotation: Domain name=Mito_carr; Domain location=131-224; Score=99.2; E_value=1.2e-26; Accession=PF00153.18; Description =Mitochondrial carrier protein
  Pfam annotation: Domain name=Mito_carr; Domain location=229-323; Score=109.0; E_value=1.5e-29; Accession=PF00153.18; Description =Mitochondrial carrier protein
  Pfam annotation: Domain name=Mito_carr; Domain location=27-122; Score= 86.7; E_value=7.3e-23; Accession=PF00153.18; Description =Mitochondrial carrier protein
  Pfam module annotation: Pfam domain module=Mito_carr::Mito_carr::Mito_ carr; Domain location=131-224::229-323::27-122
MQTEARVGVVVDGGAAVGRCQEQRHIGTAAHLAAGGFAGAVSKTCTAPLARLTILFQVAGMHSDVATLRKCSIWHEASRIFREEGIEAFWKGNLVTIVHRLPYSAISFYSYERYKNLLQTVPGLDRDSNNVGVVRLLGGGLAGITAASLTYPLDVVRTRLATQKTTRYYKGIFHAVSTICRDEGVKGLYKGLGATLLKLQGVGPSIAISFSVYESLRSYWQMERPHDSTAVVSLFSGSLSGIASSTATFPLDLVKRRMQLQGAAGTASVQKSTISGTVRDILQREGLRGFYRGIAPEYLKVVPSVGIAFMTYETLKGLLSSIDIDDES

SEQ ID NO: 85915 - protein, 167 aa, Zea mays
  Coding DNA Sequence Number=SeqID_42540
  Homolog annotation: Hit_ID=Q8RU34; Match level="QueryCoverage=77%, HitCoverage=18%, E-value=8e-18, Identity=43%"; Hit description=Bzip transcription factor-like
  Subcellular localization annotation: CTP_CleavageSite=50; ConfidenceScore=5.43e-01
MGCTTSHDVVAAAVTSSNSRPRARRSSASEPSPRRGDPAALCRKRVALIRAAADRRYALATPGSSPVLTLPPSPAKLVAAASTSLPSWPSSTVSPLSHSLAEKRWIFREAALKGSAGERTRSRTQATAAHSCIRIRFRVRAHTCQRRIRDAPVKCGRGFKRSEVLIT

SEQ ID NO: 85916 - protein, 79 aa, Zea mays
  Coding DNA Sequence Number=SeqID_42541
  Gene Ontology: Mol. function=ammonium transmembrane transporter activity; Cellular component=membrane; Biological process=ammonium transport
  Homolog annotation: Hit_ID=Q947N1; Match level="QueryCoverage=79%, HitCoverage=11%, E-value=5e-25, Identity=77%"; Hit description =Ammonium transporter 1-1
MASHWFWSADGWDATRRTSGPLLFGSGTIDFAGYGVVHMVGGIAGFWGALVEGPRTGRFDHVGCEPLALDHVLISTCLT

SEQ ID NO: 85917 - protein, 93 aa, Zea mays
  Coding DNA Sequence Number=SeqID_42542
MDVDNICDIDNNVSNEDEIHVAQDASASASENASIAASVQISTEDDCDEELDVKKKKLTSWVWEHFTRYDVEVEQNDGSIVKQKWAKCKKCPT

SEQ ID NO: 85918 - protein, 100 aa, Zea mays
  Coding DNA Sequence Number=SeqID_42543
  Homolog annotation: Hit_ID=Q6QP51; Match level="QueryCoverage=56%, HitCoverage=37%, E-value=3e-13, Identity=50%"; Hit description =Putative growth-regulating factor 1
MQAACNCTTGMHPFDFDASSMEAQAHTSSASEHSGSAPTTDQGFEGWPPEGFDSHPRTRRARDDSGYVRYMAEARATLPRGSGAALANPAPAKPLTASTY

SEQ ID NO: 85919 - protein, 101 aa, Zea mays
  Coding DNA Sequence Number=SeqID_42544
MGVFQKDDAQSTRVERRSVMVSVGESDVAVRVLNAFDGLRCVCSSPNAAIPHRASIDADSQNGEEHMSNTRTTFVRKLWWIGQRALSTKEQYCHNHLIGLI

SEQ ID NO: 85920 - protein, 97 aa, Zea mays
  Coding DNA Sequence Number=SeqID_42545
  Homolog annotation: Hit_ID=A2ZP56; Match level="QueryCoverage=62%, HitCoverage=12%, E-value=4e-12, Identity=60%"; Hit description =Putative uncharacterized protein
MEGLLPFLYRAILHLASGGQSPTGNPFFRNDSPPESPLAAHYYVRLAAGADVPAFLSSAARGYYDRGFSDTGEYDTDLQYIAEKKCQGFERFLSSCA

SEQ ID NO: 85921 - protein, 170 aa, Zea mays
  Coding DNA Sequence Number=SeqID_42546
  Homolog annotation: Hit_ID=A2ZP55; Match level="QueryCoverage=73%, HitCoverage=53%, E-value=2e-14, Identity=40%"; Hit description =Putative uncharacterized protein
  Subcellular localization annotation: CTP_CleavageSite=38; ConfidenceScore=5.51e-01
MTFVSATASATLFLSILSQARSPGACICRQPLSSTHLRCTQRVDMLSEEKVLTSGGQRGPLFFGVRCDRTLCTASGPAVESVPDNFPFEIIDEEGISVVSLRRDYKYEKIEVTVSMANLVGGPEFGDEDGEADGESAAKDDEEAEDSKHFSRPGPKLEFTIHNLSSGDHH

SEQ ID NO: 85922 - protein, 167 aa, Zea mays
  Coding DNA Sequence Number=SeqID_42547
  Subcellular localization annotation: CTP_CleavageSite=74; ConfidenceScore=5.64e-01
RGSPLPAPARRRQSRPLPGAARRPCPSPSPCGSAHVPAPLPARRGPAPPLSARRGPTPPLPFSAARRLAPAPPVAARPTPPLLPPLRRLGHRRGPDAAPARPPTRFGLGAAPGVVLCPDATARPLRAALGPLHAASRPRRDSRSPVYPLTRSRVRKPMRAVIIFGCS

SEQ ID NO: 85923 - protein, 64 aa, Zea mays
  Coding DNA Sequence Number=SeqID_42548
MTKDFTMTTELPPYDYMRGSFVAEEILNVEFFMTKVVMIVTIMILVSAGSMDARIELVVVAFFD

SEQ ID NO: 85924 - protein, 164 aa, Zea mays
  Coding DNA Sequence Number=SeqID_42549
  Homolog annotation: Hit_ID=Q2R1M0; Match level="QueryCoverage=51%, HitCoverage=6%, E-value=4e-07, Identity=36%"; Hit description =Retrotransposon protein, putative, unclassified
MDGASRETVCSDSFRDGSNDVCIIERRIEVGADDGPSGEEVGDGGVWASSLGRTGGSLRHGSEECRRRTYHSGQANGRDEQGGGVSMFGGDGQRTGRFQGKEPGICWQSAIYQVPKALWAISASMHMEGNNARWLQVYKMKQGFGNWMQFGRAVRDKFGVEEYP

SEQ ID NO: 85925 - protein, 182 aa, Zea mays
  Coding DNA Sequence Number=SeqID_42550
  Gene Ontology: Mol. function=serine-type peptidase activity; Biological process=proteolysis
  Homolog annotation: Hit_ID=A2YAN8; Match level="QueryCoverage=64%, HitCoverage=20%, E-value=1e-48, Identity=79%"; Hit description =Putative uncharacterized protein
MHPRIASGATGKSTAPYGSWESPISAAVVSAAGRTAEGFAIAGDGRLVWVETRPEDGGRAVLVKEAAGPGGKALDVTPQGFAVRSLAQEYGGGAFAVQGDTVVFSNYTDQRLYRQTIGASLSDKTPYVSLIFFLWPLGGSPVEVVLPRDGGSTLACIAVEVMLARGGQAKAMLEVVTSLRGG

SEQ ID NO: 85926 - protein, 26 aa, Zea mays
  Coding DNA Sequence Number=SeqID_42551
MAAQAQVAVWARSAPAPHAIRKIYED

SEQ ID NO: 85927 - protein, 59 aa, Zea mays
  Coding DNA Sequence Number=SeqID_42552
  Subcellular localization annotation: CTP_CleavageSite=15; ConfidenceScore=5.09e-01
MGGRAAVGRVLSVVVASMVGERRPDSLSSSTSLSVTRILVLVVDQRWIRSSNGTCMGEA

SEQ ID NO: 85928 - protein, 111 aa, Zea mays
  Coding DNA Sequence Number=SeqID_42553
  Subcellular localization annotation: CTP_CleavageSite=55; ConfidenceScore=5.37e-01
MGSSASPDPGLGLSLDPGRRSLPRPTKGSDSASPYPRARTQPWPWKTPRPRKTVCASPDPGLGISLDIGRRTPPRPTPGPRLDLDLGGASASPDLGLGPATSQGRPSLPYP

SEQ ID NO: 85929 - protein, 226 aa, Zea mays
  Coding DNA Sequence Number=SeqID_42554
  Subcellular localization annotation: CTP_CleavageSite=38; ConfidenceScore=5.44e-01
MAAQGAGRAISSSLAKSLGLRKPKREAGSGAKNRQQALSQEKRATLRLRHNNRTKKRLGGCSRKPSSGRTVDSVNIPARELGTRPYTRATASSHEGTTRLAEALREALRPRRSETTPPRPRGLHPAGALARTHRNKMQPRKAGPLAKKCDKSLQASANNPFEARGLLSGTIIRGTLKAPNSQLKDSAACAAPTAVPLDRVRLIGSQVLQKAPQETPLCATQGSDSG

SEQ ID NO: 85930 - protein, 102 aa, Zea mays
  Coding DNA Sequence Number=SeqID_42555
MEIAVVVHAVWTKLDIHLSTSPPCAIHVLHYSTREDDQTSQHCPTHSVQHKCLSVKRWTKYKSRIKEKSNCKCLGSSSQDSAESGSTGLSGGAPDSVRWCTG

SEQ ID NO: 85931 - protein, 332 aa, Zea mays
  Coding DNA Sequence Number=SeqID_42556
  Gene Ontology: Mol. function=transferase activity; Cellular component= intracellular; Biological process=protein localization
  Homolog annotation: Hit_ID=A3BP25; Match level="QueryCoverage=94%, HitCoverage=11%, E-value=1e-147, Identity=77%"; Hit description =Putative uncharacterized protein
  Pfam annotation: Domain name=MtrD; Domain location=1-183; Score= -101.6; E_value=0.093; Accession=PF04207.3; Description =Tetrahydromethanopterin S-methyltransferase, subunit D
MDFTNLTYMCAQLTMKGVLGSAGVIGNPMGFARNVGFGLKDFISASRKGKLQSPVELLNGIAQGSKTLIGSTVYAVSSATSHFSKTAYKGLTGLLQSPIRGAEKHGLPGVISGLAMGTAGLVARPMASILEATGRTAQSIRNRSNPHESNYLRVRFPRPVARDRPLFPYSWEEAIGESLLAQADSGRLKEETFVMCKTLKGAGKFLVLTEKLLLLVSSPYLVDLGSPRFIGVPPDPQWSIDTEMHLKSVVHLDRSQEVVNIVGSNGQTSPRDKRGGTRNRVMSSAFVPLFHLSIELPNEEDAEGTVQVLQALIEKGKARRWDKNILHRSNIS

SEQ ID NO: 85932 - protein, 236 aa, Zea mays
  Coding DNA Sequence Number=SeqID_42557
MLAGSVMTAMVAMAPEGGSAATPKVDTTTPEGVGPMLVALGSDGVEAMTPQGMEETHPPTTRTEAKTASQGSKVGDRAGGSSSQQNLVRACHVIGSEDRGWDSRPRPSSGRLGRDGPSKRGEREKGRTRVVRRQAAGHGWRQPRREVGREPTARGRGRRLIAYWRRFFFREHAGELRIIKLRGETVPNGPKYNGTKGQTQDHQTLTKHKTTKSATHRNAASFCAWKQQHTIWRRIE

SEQ ID NO: 85933 - protein, 406 aa, Zea mays
  Coding DNA Sequence Number=SeqID_42558
  Gene Ontology: Mol. function=DNA binding
  Homolog annotation: Hit_ID=A5ASU7; Match level="QueryCoverage=46%, HitCoverage=36%, E-value=3e-11, Identity=26%"; Hit description =Putative uncharacterized protein
  Pfam annotation: Domain name=zf-C2HC_plant; Domain location=185-240; Score=67.7; E_value=4e-17; Accession=PF07567.3; Description=Protein of unknown function, DUF1544
MLRIRRNSRSQVRMNRSTDQRRLGLGAETTFLPASGAAITTIGWPETAEKAGEGAPPTNGPSETPGPNRVDHLARGRRHIPHMNRRLFHMEVHGRGQSLRTSTPNSHLEHRQVHVFFSDRHDFQVSVKCQELKTVQRVGFCQVSRLHRVASSDNIISSPNEAPSFVAGEYDPKSDPTRKPRKSTDPGWKYGFRLDLQNKNKVECTLCGQVVSGGIKRLKQHLAGAYGDAKLCPKASSGLRKEMTSYLEANKRKRPMFLDEDEEDDEVVEVAAEDEANDTSVVESQASKVQPKPSSGTAAKKRQSTLQFKASSEAQPKTAKSVVEMLWRTPEEVVDERLSGSYQPTILASAKSKEDKHYVDMQWALFFYECGVHQEVVPPYGSSRDDMEAHEARHPATEAKHHHRTP

SEQ ID NO: 85934 - protein, 91 aa, Zea mays
  Coding DNA Sequence Number=SeqID_42559
  Homolog annotation: Hit_ID=A3BP25; Match level="QueryCoverage=100%, HitCoverage=3%, E-value=3e-22, Identity=55%"; Hit description =Putative uncharacterized protein
MFSGLGMECKIWDDAATILAWLDSLRCSTGDGLGAPVVSIQVDFPKSNERSEASTRVVVQEFNAIYETRNSFVNVLYSTWGFPPSHFQHDR

SEQ ID NO: 85935 - protein, 200 aa, Zea mays
  Coding DNA Sequence Number=SeqID_42560
MGIRKKPEYVWKEYRENGIEKCSMAQQKHPHLEEKTPGSVRRRSTEDDPTIVYMAGYLHTLDNHYDELSSQCTHLNSRVESLEQQFKELKQEKASLQESLDIAEGEEANTREAYRTLKMDYDKKLKKLAPKKKIQKKTTDQGCQTEKKKKKKAPLALPPPRIDDWSDDEDISLASLDDLLKAFGDTLEKEFVSTSGNALV

SEQ ID NO: 85936 - protein, 113 aa, Zea mays
  Coding DNA Sequence Number=SeqID_42561
MFSGIGCWALTQKLESLLLQVFRICTKVLFRGTHWLRFWAMMQKSEDEGDKIKAACRRRLKQHLVGVHGDVDKCPKTTSAISKEMSDYLKKNARQKPIELDDDKEGDKDDEVE

SEQ ID NO: 85937 - protein, 191 aa, Zea mays
  Coding DNA Sequence Number=SeqID_42562
  Homolog annotation: Hit_ID=A3BP25; Match level="QueryCoverage=78%, HitCoverage=4%, E-value=3e-57, Identity=75%"; Hit description =Putative uncharacterized protein
MAQNLSQCVPLKSTYKEGSCLSLYQKEKEARSNGVQVTPYGGLNALLRLNQMITDSLDPSNGSGIWEDPGILRLNHDDVRTRRYAPYFLSNDTSLPFRFKVYRGAVNSDDIGSFSVIDENSVPAGYAVPIYVEETPDEFFFQHREARSSDHLIEKRMSALSHYMISIEFDGTSGPFKTNVNGPLWGIYFFE

SEQ ID NO: 85938 - protein, 1101 aa, Zea mays
  Coding DNA Sequence Number=SeqID_42563
  Gene Ontology: Biological process=protein localization
  Homolog annotation: Hit_ID=A2YQN4; Match level="QueryCoverage=98%, HitCoverage=30%, E-value=0.0, Identity=58%"; Hit description =Putative uncharacterized protein
MIVRKRAIGSRDCNVWKCVEVLSSLNRFNNLGTRLVSKLKYMSANRKKLIWDLRIYHFVIRIPSQNCERKELAMVIDAGDVFIQSKDTIDDISRTQESNSFLDHISKSLPSYFSDDLLLGIQLDELYNQFELGLTGFQVKVLLPDRHNVSSTLIKLDASIALRLCVFLDEPVLKQLEVGFIVSSIDAYLSQTMYSTIVNLPRMKETNLFKNSVFDNTKTHVPKKLALNVSVSLKLAKLGLHVDLDGNFEESSGLIVGIEDIDIRYAICELSDLSLAMKTVNVTFRYWKDKSDSHVLCLSGNLTRCPENSVETCLDLHYRTHKHDDQIHHVYRLILCDVDLHVNPSVIGQIRMFLRKLDSGPSIGSDVESTMIGQSSMKSGAANGILPMFFLSNLCGADGTVFAGVSVDHFPFLVADHSCGYNFGCLGTQNVEAQESLYSKNEHCHDTSGLNGYHASDLTSNTYGKTQRSDCSSGSSNDPKNASRTVLDLSLISVRIHFPESCGTLVTITIPESISTLTYFDASSWDLLLSANNLTLASPWTPPNVNELVWGTASHRNASVLNVRVKKDLPALSTEVCVGIQNVCCVLPSKLLAMFVGFFLLDDWNRIAEQEFLVADNNLEGLRESHDCVTYKFDISDCVVFFPVEEQGLSCLKLEVPHFFCEFIANGSSVEFAKRIPKEFFSSECIVSRRVDVICIYARNASISLLILDENVPKRIHSLIEKLDADVWIQVPCKDIPYSQQPTSPTSVMSKISRCNLIAEDLYFINGMETVIGVVDQLISIGNESKMYKGNASQFLDHRSFCEGNPDPNECTNLTISIKDLMILLGQSKAKGLALERIATANMEFDVSAVLVGEKPERIDFDVVSLTLQSPGGYTLISIVSDGPLSPVFFKFTKHHTGQDEILLSVPLFEIWLYLQDWNTIINHSHSYIKTEVNSMPVEHAAALSQFPEMVSSPLIASEFGSPDDFNLVVTCETISGVLHIPIWGKEENHTSNHMGVTPASFPMEVGTHETDDIQYCEPKGCKFVTLTFDTKHFVVMSGDSCINFRCDLERLKVLLEMIQENKGTSVPFVHISKVKSSGYVRQSERNLEHLSVDLQAEYMD

SEQ ID NO: 85939 - protein, 30 aa, Zea mays
  Coding DNA Sequence Number=SeqID_42564
MVIKASQKQRLSVALAIKRPKMVRRPSRIE

SEQ ID NO: 85940 - protein, 153 aa, Zea mays
  Coding DNA Sequence Number=SeqID_42565
  Subcellular localization annotation: CTP_CleavageSite=26; ConfidenceScore=5.09e-01
MSKNTRYTRFIPRFGHTTKVPYFLVEAPTKSRVSFNPNPPFADHKDRLNRPLGRLNRPWQAWQTVCQSDWQTDAQNDLQTDCRSEVRGVRDQLNYPLGPVQPVLTSEFRRENPSSTARRQVQLLKKLNSAEVKFSWKAQLQLKKFSCFSARTL

SEQ ID NO: 85941 - protein, 139 aa, Zea mays
  Coding DNA Sequence Number=SeqID_42566
MAALILWPRRAYKNRSRCIPCDRFNRLDYQSLPIIARKEGAGGDRAATVESHRHRRHAPCEFALSVSHGLWHLGKGSSSDRNPDTPGNFSSEGTSTLSPVLRRNSRVRRPNSDGQANEDLGAQEVENTEQEVIEGKLCP

SEQ ID NO: 85942 - protein, 65 aa, Zea mays
  Coding DNA Sequence Number=SeqID_42567
MVGGRRRGAVVEEMKLNTGNVFTALESLKKKKKGYKGKAVGFSPMGEVLIFYTLSRYGTILEKEM

SEQ ID NO: 85943 - protein, 396 aa, Zea mays
  Coding DNA Sequence Number=SeqID_42568
  Homolog annotation: Hit_ID=A2WQE8; Match level="QueryCoverage=68%, HitCoverage=71%, E-value=8e-74, Identity=50%"; Hit description =Putative uncharacterized protein
MPMLSAVLYERQSNDDLILSDEEIHGSSKPTANWPSHARRHRKRDPDVIGIYVDNDGVFKKEGRGTLKGIAAATKRIKNGDHKLKIEFSSKLGGPVGPNARTFVDEIVLFTKKKAPLIGVKKWKDIELNVRSSIASNVLRRWEFLTNEDVHEKIWSIAKERYKGWRSTLSSTYKAYNSYAERMKNKPEDVDIVEWHYMMLYFGSEKFQKISCRNSENRQKQRTKHIMGSRTFSQISFQQRDPETGIEPTDLSLWMITHCKNDEWSEEASRGIYEKAAEKIVEKIYQTERFKLTREEENAIFQTTFKETTGCKANRLHGHGYLSRYPTRSQVMESKFLEQARATVATNQKNIELESQVQLLNEKLACEVAEREEYYRKKCKHCKKKKKEKDKCLEKK

SEQ ID NO: 85944 - protein, 87 aa, Zea mays
  Coding DNA Sequence Number=SeqID_42569
MNMTLDGAGPRACCRDLDMTSWLYRASLGRGSSVRRINVLEVPSNSDQNHSVRSTNNTKVDAAPKLRARKLRLDSRKGNRLKGEKAI

SEQ ID NO: 85945 - protein, 97 aa, Zea mays
  Coding DNA Sequence Number=SeqID_42570
MTEEVNNRGHSIPRKLRGSNKALFGRQLQEAEAPGASEEDSRSPKIAEAQKVVPKGMRGYKSHCKYRQSYQKSFLRNAIGSNGSGGGDSSAAVEGIN

SEQ ID NO: 85946 - protein, 579 aa, Zea mays
  Coding DNA Sequence Number=SeqID_42571
EGWGGVILAGTCEDEGQRSWDIRGSNDRLNRVFELNRLPYGGYPGQDDVDRCGKKPAAEAGDDPAPAAAPSSKKRKLGTATGGLGVSDGFARELMRTCAAPGGRMSSPELWESSARMLKVTGGWWPKNVPIPRAAGEDFFTSHMVRDWRVFPYVRNIVAVVSVVMDKDHQGAAQKRQAVVRLPEARSKRSRGTAKAAAPAAASRRWRRSRPPLGPAGVGRGAAAAVPGARGGALSAGGEIPALTAVKDEAGAVSRRRKEALSQAADFADRVASGALTAVVSAEVERLRAQHADAVREKSAADSKCRKLAEKVAALEGERTDLRRQLAEERREANEAFTKAQSAQAEANLARVETRVERVEASTRTEAERTHKQLMDSYHELGARTADFEVPDQEPELCCLEWLQEELVALPTIVEGFMSYASLVTCEGAMNVLSREGCRHYEVFDQSDEDFEREIYKVEDPVVKESAGALFDRMWGPHGREVVRERSDTARGQAARNEKVEDFGALNSAQPDSESNPVAALSEVAPAPAPETAEGAPNAPAATAAGGGSSPTAAPRAEDPVNMAAESAAEDPATAGSSQ

SEQ ID NO: 85947 - protein, 239 aa, Zea mays
  Coding DNA Sequence Number=SeqID_42572
PKYEGHEFVEHGTEKCVVTVYIGSSPHHVEWSVTAAGHRFKDTCQVVAHKALRALCQIYEEEVTDTLLRFFPPFQRDRPVWMARMRALEGKQLLEDDPTVVYLTAYVLTLDAQYDFLARHHPQARATALESREVIVVEALKQAKDEHVQKLMEAYLVTHNQRRALRIQEPTPSNPVQPMRAEDPQIFEGHPAMNKQEHPESSQDPPPELFEPLTMKKIPAPSREIKRRSCKHPTSTAAL

SEQ ID NO: 85948 - protein, 38 aa, Zea mays
  Coding DNA Sequence Number=SeqID_42573
MAAIHLGEKASTVFLRIRDKLVWTGLERHVGKAGKHIC

SEQ ID NO: 85949 - protein, 228 aa, Zea mays
  Coding DNA Sequence Number=SeqID_42574
MAVVGAKGAARDPWATFCASGEILSAAAAKDMAGSMSQRLREASQQLSQQLKQEELLVLPTIVIGFMSFSSLVTCEGAMNFLSREGCRHYEVFDQVDENFECEIFKVEDPVVKQSAGALFDRLWGLHGREAARERSDRAIEQMAHAKDVEDLVGLDGALPEAVKVDPVLPSDAGEGPSATPAPVAAGEDPAPAPAPTGEDALKVAAEPAAEPAAEDPTAAVRPSQVAE

SEQ ID NO: 85950 - protein, 338 aa, Zea mays
  Coding DNA Sequence Number=SeqID_42575
  Gene Ontology: Mol. function=zinc ion binding; Cellular component =intracellular
  Homolog annotation: Hit_ID=O82112; Match level="QueryCoverage=91%, HitCoverage=90%, E-value=2e-36, Identity=33%"; Hit description=Zinc finger protein
  Pfam annotation: Domain name=CCT; Domain location=280-324; Score =77.7; E_value=3.8e-20; Accession=PF06203.5; Description=CCT motif
  Pfam annotation: Domain name=zf-B_box; Domain location=11-44; Score =13.8; E_value=0.0045; Accession=PF00643.15; Description=B-box zinc finger
  Pfam module annotation: Pfam domain module=CCT::zf-B_box; Domain location=280-324::11-44
MSAADAAGGKEAAPACDSCTGMPAVVYCRADSARLCLPCDRHPLPLRPATRGGFLCASCRLGEEKDERDGGGAADSSSDDGGAVEGYAGCPSVADLATILGAGSAWEEPQTLRLESRSSGGELADEVIRQLVELARSEAAARAEMEQLTPWPSPELAAITGQYADFGALDADTAWHDDAAAIAAAVVPSTEEEQQAWIAAGCDVGACRTEEKARENDAALAEPCLSSFVEMSEICPASVVVTLSHGGDEGVDSSGKTAPRPQLAAPTPAKGGYDVAYPDRGTVISRYKEKRKNRRFDKQIRYESRKARADGRMRIKGRFAKSGELAARTCRCVLVYVD

SEQ ID NO: 85951 - protein, 80 aa, Zea mays
  Coding DNA Sequence Number=SeqID_42576
  Subcellular localization annotation: CTP_CleavageSite=52; ConfidenceScore=5.61e-01
MSSPQPWRHNRPPAVEAQQTCATAGRLPHSRSAPKTSSQPAILCGSTLPTPKTSTSSQPSSTSTALHLIIWRRLASRFIA

SEQ ID NO: 85952 - protein, 172 aa, Zea mays
  Coding DNA Sequence Number=SeqID_42577
  Gene Ontology: Cellular component=exocyst; Biological process=vesicle docking during exocytosis
  Homolog annotation: Hit_ID=A3BRU6; Match level="QueryCoverage=79%, HitCoverage=24%, E-value=8e-45, Identity=70%"; Hit description =Putative uncharacterized protein
  Subcellular localization annotation: CTP_CleavageSite=59; ConfidenceScore=5.17e-01
MANIDFLCSSAVLSMVDSEQAPTSTATGRLVNSMQPLSRRTRSIKGDNHIGGPVDGFPKVSSVDGGSSFDGPDDNSLDMSESDGHTRKDSKSFSHEIPIFLSYATPDEFLESMIKADAPLNVKYLRTLVQCLSMLGKVAAAGAVIWYFSSYLFFNFLTEEFIGEGKGEVSCG

SEQ ID NO: 85953 - protein, 100 aa, Zea mays
  Coding DNA Sequence Number=SeqID_42578
  Homolog annotation: Hit_ID=A2Y3P0; Match level="QueryCoverage=42%, HitCoverage=11%, E-value=2e-09, Identity=71%"; Hit description =Putative uncharacterized protein
MCYEFDLWKQSYVAACAAVYGKLRHSRRLDAVQSGYTALSIIKQGDVGGLCLPKVPSDLDQNHSVRSTNNTKVDAVPKLRARELRHDSRKGNRLKGEKAI

SEQ ID NO: 85954 - protein, 184 aa, Zea mays
  Coding DNA Sequence Number=SeqID_42579
  Gene Ontology: Mol. function=nucleoside-triphosphatase activity; Cellular component=protein complex; Biological process=cell division
  Homolog annotation: Hit_ID=A2YPT9; Match level="QueryCoverage=36%, HitCoverage=6%, E-value=8e-29, Identity=92%"; Hit description =Putative uncharacterized protein
  Pfam annotation: Domain name=AAA; Domain location=15-158; Score=-4.9; E_value=5e-05; Accession=PF00004.20; Description=ATPase family associated with various cellular activities (AAA)
MECGSSWRLLAVVVGILFCAALFSPPAATLNIGIQSAGDGVVDGMLGRRENPGEHEAMRKMKNEFMVNWDGLRTREKERVLVLAATNRPFDLDEAVVRRLPRRICVLLLHTILYGLGSRGRPGRVGVGVRWARAAARPGRLGRGAGAAARGAGLACALEREDFFFKRITTKHSILNHAHTKKND

SEQ ID NO: 85955 - protein, 694 aa, Zea mays
  Coding DNA Sequence Number=SeqID_42580
MDKDRQAAAQKRQATVRLHEARPKRQRGAPKAAASGGGKPPLAAKAGASAPSKAPEATAGAGGSKSTNVVPPASGVAEASKAARALPLSGKRVADFGTDITVDDYLGDALQGRTRGQLAMVAPGAETATAAIVPRARGEALGAGGEVSALAVVRDEASAATRRLKGVTEALSQATEALSQVADFASRTASGALTAAVSAEVERLRTQHADAVREKSASDSKCRKLTDRVAALEREKADLWRQLAAERREANEAIAKEQAAQAEAKLARAEGNLAKELAEHLQERLTALESRAKGAEAAMRAEAERTRAQLTDTYRELGARTGDFEVSDREPGLRCLQWVQEELQELPTVVGGLMSYASLVTCEGAMNALSREGCRHFEVFDQADEDFERDVYKVEDPVVKESAGALYDRMWGLHGCEVVRERAETARAQAERGERVDDFGALNSALPDPEPTLAKAVTGVALEPTPETAAITTAASTSAAAGEDLPPKVAEGAPDAPAAAVPSAEDPAAVAAETTAEAAAGPTAEPTAEAPAASGPSQVQDFGPAHATATTEFLAASTAEGGNEYGGFTSEFFDFTDSGSSVEWTEESSEEDLDYFAALDVAAAEASPHAADAPDVPGPSTGRRRRRAVAKRRVSAEEGARLRVSRAGRQELLSLPAAASTGERELRSLFAGEELRIMLFNYREMGIIPKVEPM

SEQ ID NO: 85956 - protein, 89 aa, Zea mays
  Coding DNA Sequence Number=SeqID_42581
MGDPYPHGYGYGGDPFNLLADSPDGAFPWLVADFSSVPISLLADAPDITSSDQRLQRKVTSEGWRLCLRPNICPPRDQFDKVTWCRRRR

SEQ ID NO: 85957 - protein, 54 aa, Zea mays
  Coding DNA Sequence Number=SeqID_42582
MGLGVCGSLCQVWVRPLGRSAVDMRIDGFDYDYGAGEDEAVEGDFQEFQDYDEF

SEQ ID NO: 85958 - protein, 84 aa, Zea mays
  Coding DNA Sequence Number=SeqID_42583
MMVQDMASRLSILANTTRASGRRPDFAHIDSSEFQVNVFHRAYEVDADEEARLDGYGFALRERGGALGSHGGGGKAVVVCTGLV

SEQ ID NO: 85959 - protein, 206 aa, Zea mays
  Coding DNA Sequence Number=SeqID_42584
  Gene Ontology: Mol. function=binding; Cellular component=nucleus; Biological process=metabolic process
  Homolog annotation: Hit_ID=A2XMF9; Match level="QueryCoverage=100%, HitCoverage=59%, E-value=4e-73, Identity=40%"; Hit description =Putative uncharacterized protein
  Pfam annotation: Domain name=PPR; Domain location=166-200; Score =26.3; E_value=0.00011; Accession=PF01535.11; Description=PPR repeat
  Pfam annotation: Domain name=PPR; Domain location=31-65; Score=11.9; E_value=0.3; Accession=PF01535.11; Description=PPR repeat
  Pfam annotation: Domain name=PPR; Domain location=98-132; Score=0.1; E_value=7.7; Accession=PF01535.11; Description=PPR repeat
  Pfam module annotation: Pfam domain module=PPR::PPR::PPR; Domain location=166-200::31-65::98-132
MANFVLYMYGKCGDAETARAVFERMQMRSVSRWNVMVSLYIHQGRMDLVVSMFENMVEQTIVTWKTIIAGYNQNGLDGMALNFFSRTLSASSMEPDAFTVVSVLSAYTNLRMLKIGKQMHSYILRTGMSCRSQIMNALISTYTKSRSIKTARRIMDQAVVADLNVISFTALLEGYAKLGDTKQARELFDVMNNRDVIAWTPMIVGY

SEQ ID NO: 85960 - protein, 336 aa, Zea mays
  Coding DNA Sequence Number=SeqID_42585
  Homolog annotation: Hit_ID=A2YID4; Match level="QueryCoverage=50%, HitCoverage=85%, E-value=3e-72, Identity=77%"; Hit description =Putative uncharacterized protein
  Pfam annotation: Domain name=CPT; Domain location=11-187; Score= -56.2; E_value=0.022; Accession=PF07931.3; Description=Chloramphenicol phosphotransferase-like pr
  Pfam annotation: Domain name=SKI; Domain location=20-190; Score= -45.4; E_value=0.045; Accession=PF01202.13; Description=Shikimate kinase
  Pfam module annotation: Pfam domain module=CPT::SKI; Domain location =11-187::20-190
MAGGHPAPLRPVVVAMKGHPGSGKSTAARAIATALCCPLLDKDDVRDCMLPLEGLAAAGMLNDLSYAVLWRMAERQVRLGLSVVIDSPLSRRSHLDMLTRLAGVLVVVVECRPGDNEEWRRRLESRGSAVANGGGGDGWHKPKTWAELERLLEGYQGCTDYEIGDVPRIVVDTTDPTVDAQVAAEKPTILWETGFTCLPLETKMYTSLSIRTTLCVGVKIYRAGISNGICWPKARGACYSTGAGAILRDVQARSVPSSHRKEFYSAFKKANIQGYRQSWDTISQASQIIQVSPANINIPSHLKAPSFVSTQFSTKSAKEDGNPTQPKASMIMHHAR

SEQ ID NO: 85961 - protein, 194 aa, Zea mays
  Coding DNA Sequence Number=SeqID_42586
MVSNCTTHVSWTEHAACQWNGQAHVLSVMNAKARVAQRRHARFRPLAYDARSMPHGSVGSPPERGAGVYADRYGSHQTRSDTSHGGPDSLLMPWIYHFLWTRGGPGAAHVVGSGVVAGQSSRPRLGRVMAWSHIQLLYHATKDSHVGTASSHSSKGYPSFRVPTVAPGLTSGEDVSLQVGPKLCTLLQHDLIGD

SEQ ID NO: 85962 - protein, 92 aa, Zea mays
  Coding DNA Sequence Number=SeqID_42587
  Gene Ontology: Mol. function=nucleic acid binding; Cellular component= nucleus; Biological process=regulation of transcription
  Homolog annotation: Hit_ID=A2XMF9; Match level="QueryCoverage=94%, HitCoverage=43%, E-value=4e-30, Identity=48%"; Hit description =Putative uncharacterized protein
  Pfam annotation: Domain name=PPR; Domain location=43-77; Score=40.0; E_value=8.2e-09; Accession=PF01535.11; Description=PPR repeat
MDQAVVAELNVISFTALLEGYAKLGDTKQAKEIFDVMNNRDVIAWTAMIVGYQQNGQNDEAMELFMLMIKSGPKPNSHTLAVVLSLCKLDIS

SEQ ID NO: 85963 - protein, 183 aa, Zea mays
  Coding DNA Sequence Number=SeqID_42588
  Gene Ontology: Mol. function=nucleoside-triphosphatase activity; Cellular component=integral to membrane; Biological process=transport
  Homolog annotation: Hit_ID=A3C3E3; Match level="QueryCoverage=23%, HitCoverage=3%, E-value=9e-11, Identity=81%"; Hit description =Putative uncharacterized protein
MASSNGPEGVPVVTSADDPPTRADIPFLCNSVDETCEATGDDSAPLNAQICTGFSKLISLEVKKGLQKCATFPPSSGQPQQEDCSCSHVGDGLTGAPAFWRFVSLPEFIEEVMALVKLDQLRYALVGKQGSTGLSTEQRKRLTIFSNYVAYCSRLPELPYFFLVKELFCLLLNLNLGGEYVRN

SEQ ID NO: 85964 - protein, 301 aa, Zea mays
  Coding DNA Sequence Number=SeqID_42589
MQEVQHAGATGEQDQHHVAQHAQNEHCVALGHGDPYGISQDILQLQLLLMGQCGAAPATEQDVTAMMQQMAAAASGWQQQDHPAPQPQYAEMRDNTLGHGHGHPDGLSSEEILQPQELSMEQCDAAVEGTAPAEQDVMAMMQQMAAAASGWQQQDHLAPQPQYVEMRDNTLGHGHGHPDGLSSEKILQLQELLMGQCDAAEEGAAPTEQEVMVMMQQMAAAAWPQQDPAPQYAETDITIGHGHPDMQKLLDTTELARNQLMTNNYVTTMVQQNSSSVLAPSSPRGRTSPRPGLLPPRDWPW

SEQ ID NO: 85965 - protein, 86 aa, Zea mays
  Coding DNA Sequence Number=SeqID_42590
MGLGVCGLLCQECYEIDISAVLAVMSGQGSSIDYRYLIRDVWFTGGDEDDGFGYDYGTGCPRCYHCSGEDEAVEEDFQEFQEYDEF

SEQ ID NO: 85966 - protein, 97 aa, Zea mays
  Coding DNA Sequence Number=SeqID_42591
MGDQGRKRKRKAMNSAGLILAQAAQTQAETRARPHPRRQVCAVAAGIHGEAEGAQFIDPIDGGVQFRKVVLAAGGKQGYWSRGWVAFTVALSPVITG

SEQ ID NO: 85967 - protein, 29 aa, Zea mays
  Coding DNA Sequence Number=SeqID_42592
MTSTGNRHRASDYRVELVRVNREISSKKN

SEQ ID NO: 85968 - protein, 132 aa, Zea mays
  Coding DNA Sequence Number=SeqID_42593
  Subcellular localization annotation: CTP_CleavageSite=61; ConfidenceScore=5.08e-01
MGMDSVWGARRVQGNFTTQSHSKDDGTHTTQGKAPAMCAASANRWSSIGHPWRSTECRTKECAMKSELGERQGTSGPSERRENDAVGKNRAAGQTGAEHRQEPSREIGRPRSCMPAMGNQLEIFLTLDFSEK

SEQ ID NO: 85969 - protein, 29 aa, Zea mays
  Coding DNA Sequence Number=SeqID_42594
MTSTGNRHRASDYRVELVRVNREISSEKN

SEQ ID NO: 85970 - protein, 77 aa, Zea mays
  Coding DNA Sequence Number=SeqID_42595
MQGRRAEGEREAAGHDVGSREAGAAMAGKPLRAESFDGWELKEERAGNLAAARQGTELEKAARGEEISIARNIQGEG

SEQ ID NO: 85971 - protein, 63 aa, Zea mays
  Coding DNA Sequence Number=SeqID_42596
MSEKGDRPPGTSNCITFESQRIGTLQNLFSNLLTRAGDTNFLGSFTTLETPKQPQSIKELEGS

SEQ ID NO: 85972 - protein, 85 aa, Zea mays
  Coding DNA Sequence Number=SeqID_42597
  Homolog annotation: Hit_ID=Q42601; Match level="QueryCoverage=51%, HitCoverage=3%, E-value=1e-07, Identity=63%"; Hit description =Carbamoyl phosphate synthetase large chain
MAPPLREHIIDAERPDAMLPTMGGQTVLNLAVSLAGSGTARQDGSPSAATWVLTPPRWILWSSCLRVGGRKMPWAPFDLRPTVGI

SEQ ID NO: 85973 - protein, 99 aa, Zea mays
  Coding DNA Sequence Number=SeqID_42598
MDHLAGLSAEAWTVRDIGRMDRNLAQERLLLCIRPDGPRLGLGRFAMAQRVFFFAADLDLASREGPRRGRRDPRVCLGVGRPPKTPLVDVEPKKGEDLR

SEQ ID NO: 85974 - protein, 64 aa, Zea mays
  Coding DNA Sequence Number=SeqID_42599
  Homolog annotation: Hit_ID=A2XXH5; Match level="QueryCoverage=42%, HitCoverage=6%, E-value=2e-07, Identity=96%"; Hit description =Putative uncharacterized protein
MSVPVQTDLNERGIKKSDVNTVAFADETGHLIYSGSDDTLCKVVLCYVMKIFMTISIGWRLWST

SEQ ID NO: 85975 - protein, 94 aa, Zea mays
  Coding DNA Sequence Number=SeqID_42600
  Gene Ontology: Mol. function=kinase activity; Cellular component =ornithine carbamoyltransferase complex; Biological process=amino acid metabolic process
  Homolog annotation: Hit_ID=Q6QP54; Match level="QueryCoverage=76%, HitCoverage=25%, E-value=6e-10, Identity=52%"; Hit description =Putative kinase
MEPGGGTAVGAVESLLTSFRFPEVESEPLGRARWRLSAEARAESEPWGRAKRSSSSSGAEPKSEPWVGRSGVRRLLGLSPSPSPGSGGAEFVVF

SEQ ID NO: 85976 - protein, 287 aa, Zea mays
  Coding DNA Sequence Number=SeqID_42601
MAWENKSEELALVEFREAMERANIEKITDKMLGYQMILKKARTLILKRMLTMSKSDLGSQVMSFLTSLLGRSHPRVHAVPLSLLCKTHAPAPPLIASHSLVSLTVVPTCQISPQQTRPHFLHDRRGAESSADDLGVARSCAWTGSRVLKYRVIGAQSYPLLPSHLHVHGACLISGTTEVIVPPSPHFTFSPSRSPGDQPERIAWVSALCVYPLRAVARLGYPPIAHRRRRIAVVPPYTVARIILTTIIDMDRTIEFTFISAFLGSWARSGWNSGSLGESTDSRLEGG

SEQ ID NO: 85977 - protein, 141 aa, Zea mays
  Coding DNA Sequence Number=SeqID_42602
MAGSRDSSDISPSNIIEPTWETLPADEQLQFEEHKERMIQEAKAKFLANFKVDRNNKIVRHRATDPASLQPTPDIPNVVTTSHNPFMGCRWTHTLSNRKSAANQPICTCPDHPHVSADRPGQQQSGLFLMSYLGMRPSHHT

SEQ ID NO: 85978 - protein, 79 aa, Zea mays
  Coding DNA Sequence Number=SeqID_42603
MWAVWGTAGTSEGGHSGGERAGARRGRAGGRAAAPTGTRQRGRAAAGLRPAWTDGRGRDGTAAGTGGGAAVVAVRGGGG

SEQ ID NO: 85979 - protein, 106 aa, Zea mays
  Coding DNA Sequence Number=SeqID_42604
  Subcellular localization annotation: CTP_CleavageSite=32; ConfidenceScore=5.45e-01
MAPSFSLLPQPSCPSLSHFVTRYRSPSPELVRAAPRHPQQRHVPVVEPLLALCPARHREARCLTVRIRTSSPEFVLTIRVPRRSFVAHAAPRDRTHAVRRRPFTQG

SEQ ID NO: 85980 - protein, 126 aa, Zea mays
  Coding DNA Sequence Number=SeqID_42605
MEGNDVSSVARSVRAQGRARRRLLLRPRSGEDAIPPEVEVEAEPWGRVRRRPPSEAEGEAEPWGRARRRPPFEAKGEAEPWGRARRRPPPEVEAQGRGEAELPVGQWKGEVTAVASTLPTEARVSG

SEQ ID NO: 85981 - protein, 44 aa, Zea mays
  Coding DNA Sequence Number=SeqID_42606
MQVACNCTTGTHPFDFDASSMEAQAHTSCNDVATLIKTLSKPYV

SEQ ID NO: 85982 - protein, 190 aa, Zea mays
  Coding DNA Sequence Number=SeqID_42607
  Subcellular localization annotation: CTP_CleavageSite=47; ConfidenceScore=5.32e-01
MGVGKGRLVTAVGGEWLPSPSINNAVVSLAFSHLSLFSVASLSSLPCASTIGKNNKRKREPTPPSEEFGDSEYSEEEFSSESEGSPAPIPLRESFDDSDDSQGLAAEVWTYIRAVERFGLEGSDESEYSSDEEDSDGGGEDEDDDDDDDDDDGGDGDGDGSGRGGGGGSKDDDGGGSRGSDQGGSSRASG

SEQ ID NO: 85983 - protein, 169 aa, Zea mays
  Coding DNA Sequence Number=SeqID_42608
MLRRYSKAKICSEKYYFEGIERPSTNECIQKVTGMVILPSATICLPPKPIKRDIVDQKSLDDTRYDHCIIVGIVLELKILLEKVIELEPPVIGSTSFVAEAEGDRHGYLAECHNLSSSKTTKRDIVDQKSLDDTRYDHCIIVGIVLELKILLGEELEPPVIGSTSFVAE

SEQ ID NO: 85984 - protein, 123 aa, Zea mays
  Coding DNA Sequence Number=SeqID_42609
MGPCSEAEGDRHGYLVECHNLSSSETTKRDIVDQKSLDDTRYDHCIIVGIVLELKILLGEGSELGPPVIGSISFVADGAIVWLLYEAIITVVETKVMKVTPSFYHVNMNINKKVKEFQKNTKE

SEQ ID NO: 85985 - protein, 265 aa, Zea mays
  Coding DNA Sequence Number=SeqID_42610
PDYPGYQQPNPISRDGIATNPADNAVAPVRYGAEGISLTSGPTDAATQVVVYAREPQHTVSTRQKLAHKSVTGCYMRGREETDRVGPHVSSTSAQTAHWKPVQWGPPGSRREEKKRRSYVGHACEMKLGQVDSAHKQGSGEGLGEEGESLIVTSRYGSSSLVLGVGLATNPSDGARKLVEELDWVELGWSDRATVVVASVSLWDAVLGFEAIIGAQSPVEGYGHAGGQGRGSGHLIGEDSGTATGWSARPSQPTLVACPARSERA

SEQ ID NO: 85986 - protein, 461 aa, Zea mays
  Coding DNA Sequence Number=SeqID_42611
MAERYRLPRSCAPPTTRWKDGGSPPSGGLEGGKTRCIREREDMVAFQGGKPPFKGGSPYSRPQPSRAESSPTRSKTLPCGAGAGSRMSCRPAPSRRSQTAARGARNRPAVTSGPPLLPRPTGERGGQPCRRHATAPGGRASPTLDTPAWRPRPTRRATGAPDAACKQLHRHLCHHRVSSIAKPTPRLEATQRATQQRQPDAAVNAAESGSAVMTVAGAREQRSRRQPSSRPIREQRENPLSRREDNAPMIRSSNGSRTRNGCSANYSPRRINSAAGQAALLAGAASDASPSPKQPRQKRYAASFGSVSFSFFPLSLSLATGTGKGGYPERDPSTRRNQAPSLLTDQGFEGWPPEGFNSRLRSRGPYTHYWSEVRRPAPRRVPRPPQATRAPRPLLIRGSKAGPRRVHSRLRRRARDDQGYIRYITKARAALPSSPETPCSVPIEGNMGPLPPSSLRKGDVG

SEQ ID NO: 85987 - protein, 169 aa, Zea mays
  Coding DNA Sequence Number=SeqID_42612
MVTSSLMVGESELGCGLCPSLSLKDFHHQGWGGEEGRPSSVALASVACLAFGREWLRSHSRRRRLPRQLEEVLPPALIAKAGHGLTSNSTAFCPSLPHEFGHGRGPPGSSIRPEVSAAAVRPPGAEVVVVATAGAGDGAPFVGLLLLRRPTPIEWGCSYLRRGELEFRL

SEQ ID NO: 85988 - protein, 43 aa, Zea mays
  Coding DNA Sequence Number=SeqID_42613
  Homolog annotation: Hit_ID=Q8SA85; Match level="QueryCoverage=93%, HitCoverage=3%, E-value=2e-07, Identity=75%"; Hit description=Prpol
MASQSNQDVASSAMKLVLPITGGSSFEPANKRQKKEAQRRRYY

SEQ ID NO: 85989 - protein, 93 aa, Zea mays
  Coding DNA Sequence Number=SeqID_42614
MAVGFNQSARGAPRGDVEAMHARNREMVQWFTRSMCSGGFTNSGERDCTVPVGLVLGSSSSKLHGLLRKLSEGSDRAKVGGNGLVTVGALGRL

SEQ ID NO: 85990 - protein, 63 aa, Zea mays
  Coding DNA Sequence Number=SeqID_42615
MRHPSSKTSRRRALQLAYDHLPAPASRAAEAVPKRILELMNVEKLTRKMSRAIFRNTGSISND

SEQ ID NO: 85991 - protein, 330 aa, Zea mays
  Coding DNA Sequence Number=SeqID_42616
  Gene Ontology: Mol. function=transferase activity, transferring phosphorus-containing groups; Cellular component=membrane; Biological process=two-component signal transduction system (phosphorelay)
  Homolog annotation: Hit_ID=A3B912; Match level="QueryCoverage=100%, HitCoverage=32%, E-value=1e-71, Identity=49%"; Hit description =Putative uncharacterized protein
  Pfam annotation: Domain name=HisKA; Domain location=192-258; Score =36.2; E_value=1.2e-07; Accession=PF00512.16; Description=His Kinase A (phosphoacceptor) domain
MLFFSAPVGDAAGVVSAAIAVHDVFEAAAARIGVQDGLNVYYAVGDKVASAATTNYKPLSLGYQYGTAEDTAEEKLSFSRLTCAASAIDDATPELGQLVPGGPKYRRYKAACTTFDVSGVQVALRLVLRPSIQGHMLQALCVSVVFLACVLVLAAAVSCALAVRALRWAAAREMALNVDLARQKEALRQAEFKSNAFASASHDIRSALSAIAGLVDMSRPEVQSVPGIMENLDQMGVCTNKLFDILNSVLDTSKVGAGKMQLEEAEFTMADVLQESEDMVNVTGVQRGVQGVWDPCNFSVLRCTVIISYSERHKQILDDLLGNVIEFTDE

SEQ ID NO: 85992 - protein, 133 aa, Zea mays
  Coding DNA Sequence Number=SeqID_42617
  Homolog annotation: Hit_ID=Q6K9N7; Match level="QueryCoverage=100%, HitCoverage=100%, E-value=5e-12, Identity=36%"; Hit description =Putative uncharacterized protein OJ1234_B11.17
MSLSEKLEAARVVLGKRKERERELLQAQPLPVAARAEPWNPAPARAAPSAAAAAAGDNKLLAGHLAHEFLAHGTLLGRRIEPSRGAPAPAPARAEPDPRKRYAEVSWLLVARGAHVPGVVNPTQLGRWLQIKD

SEQ ID NO: 85993 - protein, 242 aa, Zea mays
  Coding DNA Sequence Number=SeqID_42618
MGWWFRGGGDFSASSALGAHENGGVLRGGIGSSVEEMSLPFMRAEDFAPREGVIKLWQQEKTVLLIVESHTILVHAIYKLYQVDPAKSEETLPFAKNSTGGKNSDIGKEQHQVREREGRDAARPHLVPKRRSKVKPEPSSVSSTTRPTGRHENRECCSEVCRGHERHTACEEEDHEALAGEQRCCWRWRRGGDGMREPDSTLVTVSRSGGGGSGVEGGTARESGWEIVVGPSRTGKGRPRTR

SEQ ID NO: 85994 - protein, 293 aa, Zea mays
  Coding DNA Sequence Number=SeqID_42619
RAALARYPGALHIQPNIDLNDYDALLALDENNHQHTGASESQINNLPQSVVQAVWRSWPRHTSLQHSRFSWRPVGLVVELTDDGSGFTLLRRFGTRLWEISKIPKGVAMSRSVWSFAVKTFVLWPYENQSDSSYIPVWWSSKLVLWLVLNAFSFPRAVAARPDLRCNGARHLLPPTPRQHQNSGVASASTAQPTRPNCVRQPSPPESVRFGESVMGGIDRGAKSSARIKGKLISSTLDPIPPLKTPPFSARGAPIGDLAGVRLGVEQGGGAAVRVGAVGASVVRRWMTSNGCD

SEQ ID NO: 85995 - protein, 153 aa, Zea mays
  Coding DNA Sequence Number=SeqID_42620
  Gene Ontology: Mol. function=metal ion binding; Biological process =defense response to bacterium
  Homolog annotation: Hit_ID=Q10NB7; Match level="QueryCoverage=90%, HitCoverage=38%, E-value=1e-57, Identity=69%"; Hit description =Ankyrin repeat family protein, putative, expressed
  Pfam annotation: Domain name=Ank; Domain location=27-59; Score=27.3; E_value=5.8e-05; Accession=PF00023.21; Description=Ankyrin repeat
MGGKGVVPCALWRCRGFARFVNVRDDTGATPLHLAARQGWRRCVHVLLENGAIVSASSGAFGRIPYEVAAKRGHVACAALLNPSSAEPLVWPSALKFISELEPDAKSLLEAALMEANRERERRILKGAKNALPSPSHPDDGAHDTAIAEASDA

SEQ ID NO: 85996 - protein, 207 aa, Zea mays
  Coding DNA Sequence Number=SeqID_42621
  Gene Ontology: Mol. function=nucleic acid binding; Cellular component= intracellular
  Homolog annotation: Hit_ID=Q5ZAF8; Match level="QueryCoverage=48%, HitCoverage=17%, E-value=1e-12, Identity=40%"; Hit description =Tuftelin-interacting protein 39-like
  Pfam annotation: Domain name=G-patch; Domain location=109-153; Score =55.0; E_value=2.7e-13; Accession=PF01585.14; Description=G-patch domain
MADDEWCYAINRLEDDERGYTGDNRRAWPQWPSGPNSASAHRGDDSLRPSGSRPPKRRRHRAGDLPKPVHFVSAAVSSPDEHGGSRDLESSSEDPPRQATPPEPGSLASNAVVAQMMKRMNYKEGAGLGRHGQGIIAPIEVAVRPKNAGLGTVERSIRGADQPPPPSDENWPTWDEAGGARKRKRDRELDDDKILAGRLEESAAEAV

SEQ ID NO: 85997 - protein, 209 aa, Zea mays
  Coding DNA Sequence Number=SeqID_42622
  Gene Ontology: Mol. function=carboxyl- or carbamoyltransferase activity; Cellular component=ornithine carbamoyltransferase complex; Biological process=amino acid metabolic process
  Homolog annotation: Hit_ID=Q8SA97; Match level="QueryCoverage=32%, HitCoverage=12%, E-value=4e-16, Identity=68%"; Hit description =Ornithine carbamoyltransferase
  Subcellular localization annotation: CTP_CleavageSite=58; ConfidenceScore=5.09e-01
MSGAHRTVRCPLLAVGSATCPAQIARPTVGPADRWLTGQSGAHRTVRNGPRAHFPFTSAVARAESEPWGRAKRSLPSSGAEPKSEPWVGRSGVRRLPGLSPSPSPGSGGAEFAVFRGLARVRALGRVERSSPSSGAEPESEPWVGRSGVRRLPGLSPSPSPGSSGAEFAVFQGLARVRALGRAERSSPSSGAEPESEPWVGRSGASYGA

SEQ ID NO: 85998 - protein, 147 aa, Zea mays
  Coding DNA Sequence Number=SeqID_42623
MPLVRFEVRNEVGLGDPGLYGGGASAAAATAGEEEEPNALLEGVTVAGLVGILRQLGDLAERGRFISRQEATMESGFPLYPMESGFGVSPFSCDFGIPAPFPFMEGMRCCWSAHWNGTDIDRTFKFISKELRLTDLWISLDALTKVN

SEQ ID NO: 85999 - protein, 94 aa, Zea mays
  Coding DNA Sequence Number=SeqID_42624
  Subcellular localization annotation: CTP_CleavageSite=32; ConfidenceScore=5.01e-01
MDPREQAGKVVVMGVAPAALLVDPASATKKARSRMEQQFRTPPQEVLSLGSCRDLPGFLVSMPQCDKSLVAPFQFNEPQTPSSQLRQYGFQKRT

SEQ ID NO: 86000 - protein, 178 aa, Zea mays
  Coding DNA Sequence Number=SeqID_42625
  Homolog annotation: Hit_ID=Q6K9N7; Match level="QueryCoverage=74%, HitCoverage=100%, E-value=8e-12, Identity=36%"; Hit description =Putative uncharacterized protein OJ1234_B11.17
  Subcellular localization annotation: CTP_CleavageSite=58; ConfidenceScore=5.42e-01
MGLFSAPHDINSRLAPVLPPSFLFESDFSPASSILSRLSRSAAVDMSLSEKLEAARVVLGKRKERERELLQAQPLPVAARAEPWNPAPARAAPSAAAAAAGDNKLLAGHLAHEFLAHGTLLGRRIEPSRGAPAPAPARAEPDPRKRYAEVSWLLVARGAHVPGVVNPTQLGRWLQIKD

SEQ ID NO: 86001 - protein, 563 aa, Zea mays
  Coding DNA Sequence Number=SeqID_42626
  Gene Ontology: Mol. function=metal ion binding
  Subcellular localization annotation: CTP_CleavageSite=71; ConfidenceScore=5.03e-01
MTDMNSDEILEVPDTPDRLQQSKYHVSSSIVGRDGTMAAANPSPQRKFRIRFKNNSVQGSSSQNNGCSILPAALDTDHIFKQAEAAQILELSKDYKAKFSLQKPDSTRISVDSEKRAGKHGFDQSRSISNNISCSVTGGRNPTFQVKDGEVGQQDAGHQSANFLDIGPGFPTIQVGKPGYRLCTRTTDKLKGVTGADVCPGSSSGEVKGDLITNKVIAGPTSPLRVFPRRHVGQKRLVRNGCISPSNIAKTDAKVNEKQEMCSLSEHLDHPHQPDAFDGGDVIDLTENSPIMTRQRSEVNNKLMSGHNMDTRAAKKLRTDRFGRTLVRQSKCHANNSSCSEVSLSGLNNNGKGIDCDILDSDQTGEANLRGVDLSTAGTYLNKNFSDISTEQGWRTTHNHTSKLPISFMGNITSSSGWESGSSTTRSNQNHGFAGGKHSSVRGANIIGPDKIGNKTIMLGRERRKQTSTSSHIGESSSAADEPRGDLQSSKISAGPNHSSHQHNIPVINIDDVSPEARPSSSGFTNRTLDPTIEAQLESDELLARQLQEQLYNESARFAPTEE

SEQ ID NO: 86002 - protein, 137 aa, Zea mays
  Coding DNA Sequence Number=SeqID_42627
MDRIAGDSRGGKRKVGTWKQLKFTISDNSSAGQKALLPLLVHNNFCHHHTCGVQKYGCHMKKWRLRLTCLSPLEIAPRDSATRPVQTCLQRVRVEIRLRRDRMEKNNSGPIASYRTEMERSAKAAEKDRGVEEEETL

SEQ ID NO: 86003 - protein, 161 aa, Zea mays
  Coding DNA Sequence Number=SeqID_42628
  Gene Ontology: Mol. function=binding; Cellular component=intracellular
  Homolog annotation: Hit_ID=A2YN66; Match level="QueryCoverage=65%, HitCoverage=21%, E-value=1e-38, Identity=78%"; Hit description =Putative uncharacterized protein
MKKTLKMHDESNKRQKVDDDVQEGALPPYLLDCDQTQRAKLLYACIYMNFLLTTIGSWRINKNSWKEPIAFLSTLLEADDRAVRMAAGEALALCFELNLLDVSSREDDGVNTGGTTGSKNKLFLDMQALKTKISGLATNLSTEAGVQGVEPEKIIMLKYIK

SEQ ID NO: 86004 - protein, 252 aa, Zea mays
  Coding DNA Sequence Number=SeqID_42629
  Subcellular localization annotation: CTP_CleavageSite=78; ConfidenceScore=5.06e-01
MHPGSGRIKGWEKALVSVFPNATATRPWRTSKGRGSEDIREPSKSASGVISQSGNRRSAKGSTLRRWMAAITPAAWCRIAHIKRLAGTPNPRSWKETKLTMYPGGGDGAAPLTGGIHSGRFSSERGRSKPSATRSSRSPTVTVEKGHGSRGEMMVTRSAITEQKGWRRKGQGGRFPFLWLSLSGCENLRGRQEAEQRTIARPSPEYIKTKARPVQRSARTGRRIQKLEAKQSFLERLAHAQRPPREPHAPSL

SEQ ID NO: 86005 - protein, 144 aa, Zea mays
  Coding DNA Sequence Number=SeqID_42630
  Homolog annotation: Hit_ID=Q852E2; Match level="QueryCoverage=56%, HitCoverage=18%, E-value=2e-15, Identity=53%"; Hit description =Putative regulatory protein
MQPNSSYCACEEVAGDEEEDRGLASVMLRAATVDDRTVNPLKHVTAYADMSVSSNAVFGDDPDDMDNFPNRPTRASSNVTPNSRTIAMTKAWHRARERFLGKNQHPVFDAIKKGACHRLTDLGLAVHGPDLRRRILQLRQDLGK

SEQ ID NO: 86006 - protein, 122 aa, Zea mays
  Coding DNA Sequence Number=SeqID_42631
  Gene Ontology: Cellular component=extracellular region
  Homolog annotation: Hit_ID=A2Z299; Match level="QueryCoverage=86%, HitCoverage=80%, E-value=8e-42, Identity=75%"; Hit description =Putative uncharacterized protein
  Pfam annotation: Domain name=DPBB_1; Domain location=52-111; Score =13.8; E_value=0.00021; Accession=PF03330.9; Description=Rare lipoprotein A (RlpA)-like double
MAIPKATSIVLAMVLTLAMVSLVAETTGYATFYTPSYTPSACYGYQYMGTMIAAASDVFWNGGAACGDRYAVSCKGGTNEGVPHPCTGRSVTVQIVDLCPAGCQGTIQGRSWLFRGPVRNSI

SEQ ID NO: 86007 - protein, 304 aa, Zea mays
  Coding DNA Sequence Number=SeqID_42632
  Gene Ontology: Mol. function=transferase activity, transferring glycosyl groups; Cellular component=integral to membrane; Biological process=protein amino acid glycosylation
  Homolog annotation: Hit_ID=Q10BV0; Match level="QueryCoverage=48%, HitCoverage=23%, E-value=2e-69, Identity=85%"; Hit description =Galactosyltransferase family protein, putative, expressed
  Pfam annotation: Domain name=Gal-bind_lectin; Domain location=14-208; Score=-9.6; E_value=0.0023; Accession=PF00337.13; Description =Galactoside-binding lectin
  Pfam annotation: Domain name=NOP5NT; Domain location=43-89; Score= -6.1; E_value=0.017; Accession=PF08156.4; Description=NOP5NT (NUC127) domain
  Pfam module annotation: Pfam domain module=Gal-bind_lectin::NOP5NT; Domain location=14-208::43-89
  Subcellular localization annotation: CTP_CleavageSite=77; ConfidenceScore=5.41e-01
MGPLMRHTIVDSTTRTYMVNSTVTTRSWFAINAMNRPRWISMLVDVNVLSLPSSDSCGTFVGTVVQLKAFDRFENTSDAQSAATLIIDSRPSKGLHRFLHKHCEGERVKDCTICGISLIDIGRNLMAKQDMSELGFRTMDEAVFASSKGYHVNVDYLFVLTLTAGLEGYHVNVDGQHVTSFPYRTGFVLEDSTGLSLNEDLDVQSVFAGTLPTTHPSFSPQKHLELLPSWQAHPLPDEPVEIFIGILSAGNHFAERMSAAQKSSNVVARFFVALHGRNEVNVELKKEAEFFGDIVIVPFMDNDI

SEQ ID NO: 86008 - protein, 532 aa, Zea mays
  Coding DNA Sequence Number=SeqID_42633
  Gene Ontology: Mol. function=nucleoside-triphosphatase activity; Cellular component=integral to membrane; Biological process=transport
  Homolog annotation: Hit_ID=Q6K4D2; Match level="QueryCoverage=99%, HitCoverage=70%, E-value=0.0, Identity=79%"; Hit description =Putative ABC transporter
  Pfam annotation: Domain name=ABC2_membrane; Domain location=229-441; Score=155.3; E_value=1.7e-43; Accession=PF01061.15; Description=ABC -2 type transporter
  Pfam annotation: Domain name=ABC_tran; Domain location=4-112; Score= -11.5; E_value=6.6e-06; Accession=PF00005.18; Description=ABC transporter
  Pfam module annotation: Pfam domain module=ABC2_membrane::ABC_tran; Domain location=229-441::4-112
MAAPAKRERAEETLREMGLEAAADTRIGGWMHKGISGGQRRRVSICMEILTRPALLFLDEPTSGLDSAASYHVVSRIARLARREGMTVVAAVHQPSTEVYGLFHGLCLLAYGRTVFFGAAAETNQVNNCQREVRIQQRSGTFFALSGFPCPSLMNPSDHFLRTINKDFDKDIEEGLNGETKMTTAEAIDTLVNSYKASAYMEKVTRQIADTREAGGAVVKKEWQASFLTQSLVLTKRSFVNMYRDLGYYWLRFAIYIMLCLCVGTVFYDVGHSYGSILARGSLLNFVAAFLTFMAIGGFPSFVEDMKIFGRERLNGHYGAAPFTIANTVSAAPYLALISVVPGAIAYYLVGLQSSFGHFAYFALVLFTTMMVVEGLMMIVASAVPDFLMGIITGGGIQGVMMLNGGFFRLSDDLPKPVWRYPMYYIAFHKYANQGLYKNEFLGLTFPSNQAGGSATAATLSGGQILTDFWQVEMGYSKWVDLAILCGMVVLYRMLFLAIVKLTEKVKPMIKGFRFRNTAQSVHVVDRGSGSP

SEQ ID NO: 86009 - protein, 994 aa, Zea mays
  Coding DNA Sequence Number=SeqID_42634
  Homolog annotation: Hit_ID=Q7XBD4; Match level="QueryCoverage=14%, HitCoverage=16%, E-value=4e-07, Identity=28%"; Hit description =Cinful1 polyprotein
  Pfam annotation: Domain name=MAP7; Domain location=531-689; Score= -84.0; E_value=0.095; Accession=PF05672.2; Description=MAP7 (E-MAP -115) family
  Pfam annotation: Domain name=TSC22; Domain location=536-596; Score= -3.4; E_value=0.099; Accession=PF01166.9; Description=TSC-22dipbun family
  Pfam module annotation: Pfam domain module=MAP7::TSC22; Domain location=531-689::536-596
MSSSSSAANTPPADASSEDTLSNIAAEELHPGDMVEFGVSRIFSVRVQDMQQLGYFGSRVGRVPGAEEVLEPEGELVVFEVHQLTPNAVVALTKYVWAKRKIGHKIAQFGSCKFTPRIGKTSMEVVELVPCARNKWGNWWDFWFYVSEGEVEDHPGLPVAVMCSHYYVAYPQFEVAEDDEDEGALRCAARMSSGCDLVEEFIGYGVWPLAHGWALGEVCPREMPSLSGQQGLRSWDIRGSNVRLNRVFELNCLSYSGYPGDDAVDRRGKKPVDVTEEGPSQEAAPATKKRKLALGGRMSSPKLQESSARMLEVTGSRWPKNVPIPRAAGEDFFTSRMARDLKVFPYGRNIAVVVSAVMERDRQDAAQKCWAVVWIADPMREAKKARGSTRAAASGGSKPVPAAKPATPGHSKASASAKAAAPSGSKPPPGGLVKGRRSPSPARRIADFGTDICVEDYLVGSGEGQLDVVPPPVATTSPTTVVGAKGATRDPWATFCASGKILSAAAAKDVAGSMSQRLREASQQLSQQLKQAADFTDLVASGALTADVAAEVERLRAQHADAVREKSAAESKNRRLLEKVAAMEAEKTDLWRQLAEERREANKAIADAQAAQAEAKVARAEGSLARQRAEELEARFNALRSRMDKAKSSTRAEVERMHVQFVDAYRELGARTADFEVPAKKRAFVSLNGCRRSYWHYEVFDQADENFEREIFKVEDPVVKQSAGTLFDRMWGPHGREAVRERSDQAIEQMAHAEDVEDLGGLDGALPEAAVVDPVPSSDAGEGPSTTPAPTTAGEDPAPAPAPTCEDASKAVAEPATEDPVTAAEPSQVPMFGPAQAITTINTDFAAEASISVPADDEVPGSVSECFESKGESGSSFCWTEESLDEGLNYFVALDVAATETSPRVVDAEDLPGASAGYRRRRAVAKQRVSRRHRSEMESGRLRVDETGKRELLSSPVGASVGEGELQNLFEGEELRIMLFNYREMGIIPKIEPM

SEQ ID NO: 86010 - protein, 57 aa, Zea mays
  Coding DNA Sequence Number=SeqID_42635
RARGYERPRELQRLVILDQRHCGTGGYEIDGSGYDYGAGEDEAVEGDFQEFQDYDEF

SEQ ID NO: 86011 - protein, 355 aa, Zea mays
  Coding DNA Sequence Number=SeqID_42636
RARGYERPRELQRLVILDQRHCGTGGYEIDGSGYDYGAGKWYSFRLERMARLRHTARKSVIPFLPSRLAERPLRRPVAGQSSHLERLHHRLREEQERRRQEQHSSSLSLHQEIESVRSCSPVLPLEPPPAPPLGAPASGVAAGGDPDDGGGDDSSSHDTDFSANPEPEGMGCSTHHSRRCSRHSRGVYPDRWEATCLVRCPEDSLQGAEACSEHYSISERDSAEAAMQDAARRALSHYCSVFGGAADGLDLKYYPRRSSGSTGGVIVSPVGEGNPRLSSTVNLAAVLNTELDHALDELSRARAEIALLRAERAERRFLDGGSPAPVGTQHPYRSPQHGHQSYGNPACKTKINLEP

SEQ ID NO: 86012 - protein, 25 aa, Zea mays
  Coding DNA Sequence Number=SeqID_42637
MGTNGHLDLNTGGSKSILRKFTLGP

SEQ ID NO: 86013 - protein, 176 aa, Zea mays
  Coding DNA Sequence Number=SeqID_42638
MPTTGRVGQPAHHVGPCREHRAPRRVTPGEQTACHTGRASRWHGAALGQGLRRGRARAAGGQAAHRAPRRKPRRGCAEGRPRRARPAEAAPQTPRLHARVEAARSRRGCHVAAEGRAPEPGPRPRRGRARAATEGRTPETGPCRGRHAAVEGRAPEPRAQGTMEKVRVGEGEREAD

SEQ ID NO: 86014 - protein, 156 aa, Zea mays
  Coding DNA Sequence Number=SeqID_42639
  Gene Ontology: Mol. function=nucleoside-triphosphatase activity; Cellular component=integral to membrane; Biological process=lipid transport
  Homolog annotation: Hit_ID=Q6K4D2; Match level="QueryCoverage=92%, HitCoverage=18%, E-value=3e-44, Identity=68%"; Hit description =Putative ABC transporter
  Subcellular localization annotation: CTP_CleavageSite=33; ConfidenceScore=5.06e-01
MRSTDEASLPFGSGRARSFPFPLTQPSLEISVVAAANGTAGSGGGGADGPVAREKSLRRADEGVVVSWEDLWVSAAGGNKGGRVPILCGLNGYARPGEVLAIMGPSGCGKSTLLDALAGRLGSNVSQKGDILINGLRQKLAYGTSYSIHGFARSKN

SEQ ID NO: 86015 - protein, 150 aa, Zea mays
  Coding DNA Sequence Number=SeqID_42640
APGPTSGEETSLQVGPKLDWRLTCCFCALDGEPAPKEDDSWARAPVLETGLLVSVEVKRCTTADGGVLLTRRFAFSAHGGRRPKSMTRGPGPRVRDWSATFGGGEEAHYRRWWRAPHAAVHLLHTRRPMPKEYDSWARAPVLETGPLLSA

SEQ ID NO: 86016 - protein, 123 aa, Zea mays
  Coding DNA Sequence Number=SeqID_42641
MALLDPPERLQPEVVLNLVRNLLGWGVSTFTGKISVSGSPHGNLATGEFVFFVSNLPSGLALPISSFFVLLLLEELGLQPQHFMPCFILQAAIIAYLRKMSMGATLLPTSSSSIQREGCSPAL

SEQ ID NO: 86017 - protein, 72 aa, Zea mays
  Coding DNA Sequence Number=SeqID_42642
MESDVQTAVGYFSTFQFRAACPVCARSRLDLVVIPCVIKKSQESGGFVSVVGTVVCSGCICRIGLNWLFAEK

SEQ ID NO: 86018 - protein, 87 aa, Zea mays
  Coding DNA Sequence Number=SeqID_42643
MAYPRRSFACGHAIRHPDAPNLKLSSAKPRGEDGEHAERGLTSVRDVEFAVHEEAQSIAEGVHWRAIAATPRMTDSIVSVHASFPWS

SEQ ID NO: 86019 - protein, 189 aa, Zea mays
  Coding DNA Sequence Number=SeqID_42644
MAEKGTDLKGKRLSSPRWVVHKSIVNMKGMNQCSTLTILFGKPYTSHELPPLGIPATGGVAGGATVGDPDRDDDGGSSGHNTELSEEQELEGWVARPITHDAACGYHFHDALDTLLCQAFDRHTWSIEYRCVVNQHSHRKYPDRWEATCLVRCPEDDLWGTEACLEHYAIPERDNAEVAMQDASRHALS

SEQ ID NO: 86020 - protein, 464 aa, Zea mays
  Coding DNA Sequence Number=SeqID_42645
MEVVELVPCARNKWGNWNEFWFYVAEGTVEDHEGLPVSEMCSHFYSAYPPFEVAEEDADEGALRCAAGLSSGRDLVEEFVAYGVWPLAHGWALGEVCPRQMPSHGGKLVRSPAFALDLQSRDPAAFVREAEDGAVRIVGRYVPRTEGQRSWDIRGSNDRLNRVFELNRLSYNGYPGQDDVDRRGKKPVVESGDDPAPAVAPSSKKRKLGTAMGRLGVSDGFARELMRTCAAPRGRMSSPELRESLARMLRVTWGWLPTNVPIPHAAGEDFFTSRMVREWRVFPYERNIAAVVSAVMDKDRQGAAQKRQAVVRLHEARPKRQRGAAKAAAPDGGKPPLAAKSAVSASSKAVEAAAGAGGSKSVKTVPPSSRAPKVAKAARGLPSPGKRVADFATDISVDDYLGGSDEGQLVIVAAAAATTAAVVVPKAKGGALSAGGEMPALAAVRDEAGAVSRRLKEMKEALSQ

SEQ ID NO: 86021 - protein, 139 aa, Zea mays
  Coding DNA Sequence Number=SeqID_42646
  Subcellular localization annotation: CTP_CleavageSite=31; ConfidenceScore=5.52e-01
MGVFPRSSSQSPIPRTTSITGITSTLHRRPTQSTERAVTREADGDVQPVLRSSELTFATVNDSSWCYKAVVGVGSEGRHERVFPPLIQRSQGIGRRLSCALGTGALTASSRWHYEEKSIGLSGVKSLRANGHLRCQPNG

SEQ ID NO: 86022 - protein, 88 aa, Zea mays
  Coding DNA Sequence Number=SeqID_42647
RPQTRNPTLSPLLHAVRRYNGERNVEVGVIDYVLWMEDEDKVFVRVDEVGTELAANLRALAANLRALPEPAVIIVIAMGVFLFFTNIC

SEQ ID NO: 86023 - protein, 118 aa, Zea mays
  Coding DNA Sequence Number=SeqID_42648
MGPAVADPDGPRSRADGPDMCRSAGLLPICVCSGFKRLEFVGATYIWGNRSRSERSQICRPLPNDFVVPVHFEVSQEFRLCFLDQLLLALLEQELFFSRQGFPCRCDDIAGGNLRAIL

SEQ ID NO: 86024 - protein, 278 aa, Zea mays
  Coding DNA Sequence Number=SeqID_42649
  Gene Ontology: Mol. function=hydrolase activity, hydrolyzing O -glycosyl compounds; Cellular component=extracellular region; Biological process=carbohydrate metabolic process
  Homolog annotation: Hit_ID=A2Z3F3; Match level="QueryCoverage=96%, HitCoverage=90%, E-value=1e-105, Identity=64%"; Hit description =Putative uncharacterized protein
  Pfam annotation: Domain name=Glyco_hydro_17; Domain location=13-277; Score=269.2; E_value=8.7e-78; Accession=PF00332.9; Description =Glycosyl hydrolases family 17
MAVAAAAGDAGKIGICHGRVGSNLPPPSAAAALLKRNGITKARLFLPDPAVLPAFAAAGIDLMVGVPNENLTFLAAAGPEGAAQWLRSAVLAHAPAERVRCLAVGNEVLYNNQFYAPHLVPAMRNLHAALATPGAGRQGSSHVNDPANVQLAYALFGAGAAPVQDGALVYTNLFDATVDALVAALEKEGFDGVPVAVTETGWPTAGHPAATPQNAAAYNAKIVERAARGVGTPKRPGVPVEVFLFDLYDEDGKPGPEFERHFGIFRADGSKAYDINFA

SEQ ID NO: 86025 - protein, 235 aa, Zea mays
  Coding DNA Sequence Number=SeqID_42650
  Gene Ontology: Mol. function=pantothenate kinase activity; Cellular component=cytoplasm; Biological process=coenzyme A biosynthetic process
  Homolog annotation: Hit_ID=A7PCZ3; Match level="QueryCoverage=62%, HitCoverage=77%, E-value=4e-56, Identity=73%"; Hit description =Chromosome chr17 scaffold_12, whole genome shotgun sequence
MKYVGLIKYMYNMVVISIRTSDGDTNDFPIRIGLHQGLALSLYLLALVMDEDTRINVIEIRGIDENVSHRIEARWMKWCQAYGVLYDKRVVLVANSLPALNDVTANELPEVIAEASKHCGILRKAAEAGGLIVDAMAGIQDDLKDETVSVPLMVVENGCGSPCIDFRQVSSELAAAAKDADLLILEGMGRSLHTNLNARFKCDALKLAMVKNQRLAEKLFNGSLYDCICKFEPVP

SEQ ID NO: 86026 - protein, 38 aa, Zea mays
  Coding DNA Sequence Number=SeqID_42651
MSRVNGTERDCESGMGTERLRPVDFLERNGSGFEENIP

SEQ ID NO: 86027 - protein, 520 aa, Zea mays
  Coding DNA Sequence Number=SeqID_42652
  Gene Ontology: Mol. function=nucleoside-triphosphatase activity; Cellular component=mitochondrial matrix; Biological process=ATP -dependent proteolysis
  Homolog annotation: Hit_ID=P93647; Match level="QueryCoverage=99%, HitCoverage=57%, E-value=0.0, Identity=93%"; Hit description=Lon protease homolog 1, mitochondrial precursor
  Pfam annotation: Domain name=AAA; Domain location=410-520; Score=0.9; E_value=1.5e-05; Accession=PF00004.20; Description=ATPase family associated with various cellular activities (AAA)
MSDSPVELPSRLAVLPFRNKVLLPGAIVRIRCTNPSSVKLVEQELWQKEEKGLIGVLPVRDSEATAVGSLLSPVVTALVGVGSDSGEGGSKVGGSAVESSKQDTKNGKEPIHWHSKGVAARALHLSRGVEKPSGRVTYIVVLEGLCRFSVQELSARGPYHVARVSRLDMTKTELEQAEQDPDLIALSRQFKATAMELISVLEQKQKTVGRTKVLLDTVPVYRLADIFVASFEISFEEQLSMLDSVHLKVRLSKATELVDRHLQSILVAEKITQKVEGQLSKSQKEFLLRQQMRAIKEELGDNDDDEDDVAALERKMQNAGMPANIWKHAQREMRRLRKMQPQQPGYSSSRAYLELLADLPWQKVSEERELDLRVAKESLDQDHYGLTKVKQRIIEYLAVRKLKPDARGPVLCFVGPPGVGKTSLASSIAKALNRKFIRISLGGVKDEADIRGHRRTYIGSMPGRLIDGLKRVSVSNPVMLLDEIDKTGSDVRGDPASALLEVLDPEQNKAFNDQYPFIYH

SEQ ID NO: 86028 - protein, 459 aa, Zea mays
  Coding DNA Sequence Number=SeqID_42653
MESHDLRAEWESRLVGGYETVESGYDYGAASPLQPNRILAEYVDVYSPLLYTPNPPPQVVSIATTAQAKMKLWKETSRSSKITTSSRCGLAATPSRLPVKAALSTFLFRTLIHCKNYMDVSDMARLRHTARKSVIPFLPSRLAERPLRRPVAGQSSHLERLHHRLREEQERRRQEQRSSSLSLHQEIESVRSCSPVLSLEPPPAPPLGAPASGVAAGGDPDDGGGDDSSSHDTDFSANPEPEGWVARPITRDAARGCHFHDALDTLLRRAFDRHTWSVEYRCVVYQHSRGVYPDRWEATCLVRCPEDSLQGAEACSEHYSISERDSAEAAMQDAARRALSHYCSVFGGAADGLDLKYYPRRSSGSTGGVIVSPVGEGNPRLSSTVNLAAVLNTELDHALDELSRARAEIALLRAERAERRFLDGGSPAPVGTQHPYRSPQRGHQSYGNPACKTKINPEP

SEQ ID NO: 86029 - protein, 415 aa, Zea mays
  Coding DNA Sequence Number=SeqID_42654
  Gene Ontology: Mol. function=hydrolase activity; Cellular component =cytoplasm; Biological process=metabolic process
  Homolog annotation: Hit_ID=Q69SH3; Match level="QueryCoverage=87%, HitCoverage=91%, E-value=0.0, Identity=84%"; Hit description=PTS protein-like
  Pfam annotation: Domain name=Metallophos; Domain location=53-310; Score=66.5; E_value=9e-17; Accession=PF00149.19; Description =Calcineurin-like phosphoesterase
MGGCGLGRGRRTACLLLLLPPLLLFAVADAAASGKEKQGVSGKLRFRRESGTFKVVQVADMHYADGRSTACEDVLPSQVAGCTDLNTTAFLYRVFRAEDPDLVVFTGDNIYGADSTDAAKSMDAAIAPAIDMKLPWAAVIGNHDQEGTLSREGVMRHLVGMKNTLASFNPEGIEIDGYGNYNLEVSGVEGTSMDEKSVLNLYFLDSGDYSTVPSINGYGWIKASQQVWFQQTSSSLQAKYMNKNPKQKEPAPGLVFFHIPLPEFSSFTASNFTGVKQEGISSASINSGFFASMVEAGDVRAAFVGHDHINDFCGKLSGIQLCYAGGFGYHAYGKAGWSRRARVLSVQLEKTDSGEWRGVKSIKTWKRLDDKHLSTIDSEVLWNRGSNGKTLSYAWIRYLTQTCHSNCRVGGGFGE

SEQ ID NO: 86030 - protein, 178 aa, Zea mays
  Coding DNA Sequence Number=SeqID_42655
MLDEGGSTGDSPYHESGDSLSWARWRLVHSGVHRRWGYFRGLLRKARYPARLQSLGSRAPSTDDPPNQQRGQSPEKLTTMCSPYSGPPIKRPSVGFNTRAKEQQKAPLVWRTGLSGVPPDMSGAPGDSNSELLAFGNFRRPLRYNSPDCPVHTGHVRCSKEGRPPELASLGFSLQLLR

SEQ ID NO: 86031 - protein, 170 aa, Zea mays
  Coding DNA Sequence Number=SeqID_42656
  Gene Ontology: Mol. function=nucleoside-triphosphatase activity; Cellular component=mitochondrial matrix; Biological process=ATP -dependent proteolysis
  Homolog annotation: Hit_ID=P93647; Match level="QueryCoverage=100%, HitCoverage=16%, E-value=2e-69, Identity=84%"; Hit description=Lon protease homolog 1, mitochondrial precursor
  Pfam annotation: Domain name=Lon_C; Domain location=1-160; Score =109.0; E_value=1.4e-29; Accession=PF05362.4; Description=Lon protease (S16) C-terminal proteolytic domain
VRARAADLNLSPTSDINLLESRDIHIHFPAGAVPKDGPSAGVTLVTALVSLFSNRKVRADTAMTGEMTLRGLVLPVGGVKDKVLGHCLTPFSFLSFYFENVEGLIIFEPVLAAHRYGIKRVILPERNLKDLSEVPLPILSDMEILLVKRIEEVLDHAFEGRCPLRSRSKL

SEQ ID NO: 86032 - protein, 25 aa, Zea mays
  Coding DNA Sequence Number=SeqID_42657
MGMKYSSECKQVQGITMDWNLPRIK

SEQ ID NO: 86033 - protein, 85 aa, Zea mays
  Coding DNA Sequence Number=SeqID_42658
  Subcellular localization annotation: CTP_CleavageSite=62; ConfidenceScore=5.24e-01
MAHRSYSGPPETFSPSFSLLCPWIHGPFPAIKFVMAPSSSLPNSGDPRTPVAHACLNPGDLTAAERSSTARSRSPLSGLIPFVRS

SEQ ID NO: 86034 - protein, 229 aa, Zea mays
  Coding DNA Sequence Number=SeqID_42659
MAAPRTTRSVALTPRRDRRRLWQEKQATLRLRHNNRAKKGTRLRASLLIRGSKAGPPEGFDSRLRSRGPYTHYWSEVRRPAPRKGSTAASGYSGSVPITDQGGSDLVTESHQREASSPRTPPPGDRVRQITRSSPETPCSAPIEGNMALSPLLLAERRRMGVCKKAESVPDRPLALCRGSGAALANPAPVEPLTASTYQPENLGPDRTPRLRPARMREQPDQPKHYVRH

SEQ ID NO: 86035 - protein, 128 aa, Zea mays
  Coding DNA Sequence Number=SeqID_42660
MDWNQQRAWTTEILFVDVWPSRMGAGASPRWPSAQRRSRRGLKRKSAPKASPDAPKQKKAKILTHWLKSFYLERAAKLPTVETSKTEPAEAVEENPSAPEMIEASVVVVEAPSILLETTKTESSRMEQ

SEQ ID NO: 86036 - protein, 176 aa, Zea mays
  Coding DNA Sequence Number=SeqID_42661
MADGGRMKGVQSAGGGAGDDEEGNEEVREEPELALSLGRRVWHLPPRQEAAPRSLNWTPVLPEWNPDAAGSSQGVERALGGQSISSLGFHDMFGGILDDPQAGGSMEVGWGKLNEEDEDRDLQNKRLRVRHFGDGESPLTEPGVRLPLVIPSQTLFLWEPPILGLSFSRYIALAST

SEQ ID NO: 86037 - protein, 188 aa, Zea mays
  Coding DNA Sequence Number=SeqID_42662
  Homolog annotation: Hit_ID=A2XFR6; Match level="QueryCoverage=63%, HitCoverage=34%, E-value=8e-16, Identity=41%"; Hit description =Putative uncharacterized protein
  Subcellular localization annotation: CTP_CleavageSite=49; ConfidenceScore=5.44e-01
MTTTKKMTRRTSTKRPMTFSRTTSWDLGLSQNITHQCLRQGTSQPAARRAARVGNLCLTLVRDKARDRGSRTVSANESLTPLSTYAASVSDAARRTLWSLNHTYWQQLQDTKFRHLPLRLSGGSQTSNIPGGAREDRLNPLVGVVAGLNIDLDSATLNLTRVHLELEDAHARIAAQETQLQGWDPPEA

SEQ ID NO: 86038 - protein, 60 aa, Zea mays
  Coding DNA Sequence Number=SeqID_42663
  Homolog annotation: Hit_ID=Q7XIY9; Match level="QueryCoverage=100%, HitCoverage=25%, E-value=4e-18, Identity=78%"; Hit description =Putative MAGE
EKDKLVADVMPYVLFRTHQNFECPIKQEELTGIVHKNYRQRVLPTLVIKEAKDMLAATFG

SEQ ID NO: 86039 - protein, 57 aa, Zea mays
  Coding DNA Sequence Number=SeqID_42664
MESHDLRAEWESRLVGGYEIDGSGYGYDAGCQHCNHCSGEDEAVEGDFQEFQDYDEF

SEQ ID NO: 86040 - protein, 183 aa, Zea mays
  Coding DNA Sequence Number=SeqID_42665
  Homolog annotation: Hit_ID=Q338K8; Match level="QueryCoverage=55%, HitCoverage=34%, E-value=3e-14, Identity=48%"; Hit description =Expressed protein
  Subcellular localization annotation: CTP_CleavageSite=96; ConfidenceScore=5.12e-01
GTRRARKRDGTPASDSGNCRRPASPGARLASLLSAIFSGKRQHPAPADDEPACSTAPSSVRPCLAKTLPSARARVTRRQSRSRTVRFLDIEGDVAVAAAAAGCMRFPVVEVKDSGGSEESSDASSDLFELESLAALAPVNGISGCRRTFENELPVYGDDWNWAWARHCSRPSPPFGASKLPRK

SEQ ID NO: 86041 - protein, 112 aa, Zea mays
  Coding DNA Sequence Number=SeqID_42666
MGSRHSACSAEAECRGSFVLLLLVTLLRGESDDSEEVEDSSDSEKGSGSKGDSDKGDNSGGGGDDGGEGSDDDDGGEGGSRGRRRPEQRQRRAMATASTGGDGKAGGIVLSA

SEQ ID NO: 86042 - protein, 451 aa, Zea mays
  Coding DNA Sequence Number=SeqID_42667
  Subcellular localization annotation: CTP_CleavageSite=39; ConfidenceScore=5.44e-01
QSLVVFATSVVRSLKSLMVFASAHRSEGGARTFAWTTSVARMAEPAVATFNLWTVDVEILERGGGVFIFAPIFAIRGASLTKSTGVEDYREMVKTLPSLEMVPRRQCYFGNGVGRAPGVEEKFEVQVHQLTPNAVVALAKYVWAVSSYGGQPSMEVFTKNYCLHWQKRKICDKLPRNIEGLPSLPPAILCSHCYVALSQFEVAEEDEDEDEGALRYAARLSSGRDLVKEFIAYRMWPLAHGWTLGEVTPRGMPTLGGQLVRSPAFGVDLRGQDTAAFVREVEAEAVKLVGNSRGNNVFTRAPRNLYMNAEARDLKIFPYGRNVGAVVSAVMEKDRQDAQRKKHWAPARLVDPRQEVKVARPSAKSAASGAGMPPPVAPASEGRPPSPPCIAEMVVAGAKGVSTELSVDGYLVGGVTMFDAQTGLPPAGDRLRGTYCFGGTDLGVCHRKAAT

SEQ ID NO: 86043 - protein, 110 aa, Zea mays
  Coding DNA Sequence Number=SeqID_42668
MSEHTSVKLSERGIEACFAGEASPRSPEFTTPPECVDRVKKNRKGDINNEPEGTPIFVRVLIQYCNLADGEYVLVPEQGASQEVAPDPAPEPAPEDLPATALEGKPRFYA

SEQ ID NO: 86044 - protein, 96 aa, Zea mays
  Coding DNA Sequence Number=SeqID_42669
  Subcellular localization annotation: CTP_CleavageSite=88; ConfidenceScore=5.50e-01
MALSLTLAAQADPSPRSALPSPLPLPARAIPSALRPIGPTTVIPYPRPCLATTPPSQNPGPRRRTRRGPHWRSGSDRMKGIHPHHLVSGMIRDSLV

SEQ ID NO: 86045 - protein, 56 aa, Zea mays
  Coding DNA Sequence Number=SeqID_42670
MGADGGCSEEGGADRRDPLVSGPKAVDACCPYCNQCSGGDEGNMEDFEKFQDFDEF

SEQ ID NO: 86046 - protein, 238 aa, Zea mays
  Coding DNA Sequence Number=SeqID_42671
MPPAPPQGIPAVEGDPNRDRDNDDDGGGSLIHSMELSDEQEPKGWIARTITRDATHDYHFHDALDTLLCRAFDRHTCSIEYRCVVYQHRRGLYPDQWEATCLVSECPTPCVKDACALRHLVYPQNIPINGVADGLDLKYYPHRLTGSAGGVIVSPVGEGNLRLSSMVNLVAVLNTELDHALDELGKARAEIAELHAARRHQEDGSSALVGIPHPYRLMPHGHYAYGTPDYRTQIDLEP

SEQ ID NO: 86047 - protein, 76 aa, Zea mays
  Coding DNA Sequence Number=SeqID_42672
MVELDRVAQRKGSGVSGTASAQTSAMVALRLDERADDGAPRRTSARHDEHRGEVLVGCFGEMRRAGGGVTVRGVMP

SEQ ID NO: 86048 - protein, 292 aa, Zea mays
  Coding DNA Sequence Number=SeqID_42673
  Gene Ontology: Mol. function=protein binding; Cellular component =cytoplasm; Biological process=protein modification process
  Homolog annotation: Hit_ID=Q338L7; Match level="QueryCoverage=97%, HitCoverage=61%, E-value=1e-125, Identity=36%"; Hit description=F -box family protein, putative, expressed
  Pfam annotation: Domain name=LRR_1; Domain location=10-34; Score=2.4; E_value=1.1e+02; Accession=PF00560.24; Description=Leucine Rich Repeat
  Pfam annotation: Domain name=LRR_1; Domain location=108-130; Score =2.9; E_value=89; Accession=PF00560.24; Description=Leucine Rich Repeat
  Pfam annotation: Domain name=LRR_1; Domain location=171-193; Score =2.4; E_value=1.1e+02; Accession=PF00560.24; Description=Leucine Rich Repeat
  Pfam annotation: Domain name=LRR_1; Domain location=220-245; Score =5.8; E_value=25; Accession=PF00560.24; Description=Leucine Rich Repeat
  Pfam annotation: Domain name=LRR_1; Domain location=262-287; Score =4.9; E_value=39; Accession=PF00560.24; Description=Leucine Rich Repeat
  Pfam annotation: Domain name=LRR_1; Domain location=62-87; Score=8.7; E_value=7.6; Accession=PF00560.24; Description=Leucine Rich Repeat
  Pfam module annotation: Pfam domain module=LRR_1::LRR_1::LRR_1::LRR _1::LRR_1::LRR_1; Domain location=10-34::108-130::171-193::220 -245::262-287::62-87
MAHVSLNCPQLLELDFQSCHKLSDNAIRQAATACPLLAKLDMSSCSCVTDETLRDIASSCPSLSVLDASNCPNISFESVRLPMLIDLRLLSCEGITSASMAAIAYSRLLEALQLDNCSLLTSVSLDLPTSKNISSRALRKFADLNLRSPVLSYIKVSRCSALHRVSITSTTLQKLVLQKQESLSSLSLQCHNLIDVDLTECESLTNAVCEVFSDGGGCPMLRSLILDNCENLSIVELNSSSLSCLSLAGCRSMTLLRLSCPNLQHVNLDGCDHLQSAAFCPVGIVSTTSIEI

SEQ ID NO: 86049 - protein, 72 aa, Zea mays
  Coding DNA Sequence Number=SeqID_42674
APRYKACPARAAGTTGGGTSVAVATTTPNDNRADVFDAGPRQSKQLGQTLADMQQVQQQQPPPQPQLQVQMP

SEQ ID NO: 86050 - protein, 113 aa, Zea mays
  Coding DNA Sequence Number=SeqID_42675
MASKARGSCGRGRGGASPTRDVGAETAARSAGGYAKTDKLTFRARGAQREKKAGAGAREAGLTGGAGRAEREGGGCAEGGRADKPGPLRRHRRGERRARGSTWKLEFPTPPMG

SEQ ID NO: 86051 - protein, 107 aa, Zea mays
  Coding DNA Sequence Number=SeqID_42676
MGSRHSACSAEAECRGRGLRLARPQGSSPASASEGGLRLARPQGSASISTSEGGLRLARPQGSASTSTSGGIASSPDPGLGLRRSLRLARPWARTDRTTEDASLPYP

SEQ ID NO: 86052 - protein, 78 aa, Zea mays
  Coding DNA Sequence Number=SeqID_42677
MRKTPCLSSQVDVDLLPKLLLLLFRFLLPRLLLMLLHLPSLAAFRSLLPQGATTSLSGSGTTGGATHRMINMYKRKQQ

SEQ ID NO: 86053 - protein, 152 aa, Zea mays
  Coding DNA Sequence Number=SeqID_42678
MWQHAKKSFAQMNVNGNLQNGIGIQMGQVKAIEIKEAAEKGRNGKTETAEKKRNVNYGFMGILCRDSDAMTNPPRTQLPRGKDPDGHEVEKVGLGDNRHVVTCERQLTVGVDWGNHRGGRTRGFPLGSHLNSIGEQSERRIAERIWRQESKN

SEQ ID NO: 86054 - protein, 128 aa, Zea mays
  Coding DNA Sequence Number=SeqID_42679
MGKNNKRKREPTPPSEDFGDSEYSEEEFSSESKGSPAPIPQTTPRGLRRRLEGSNESEYSSDEEDSSEEDGGGDGEDDDDDSGGGRAAAAAIRMATAAAAGAAAAAAAARPATRPVAKCHWFLDISID

SEQ ID NO: 86055 - protein, 180 aa, Zea mays
  Coding DNA Sequence Number=SeqID_42680
MAPLVTWLARALGRARRRLLREPRLSPSPGSGEAEFVVFRGRGRVRALGSGEAEFVVFRSRGRVRALGSGEAEFVVFRSRGRGPSPGVGKGEVDTRKPLHEAGDAAIEVGKGDGLAQASWACIQYVGERDLGGDDRGVERLLNLCSHGSQCRTGEGARPIEVEMMGTSSTDAQGGGRAKA

SEQ ID NO: 86056 - protein, 142 aa, Zea mays
  Coding DNA Sequence Number=SeqID_42681
  Pfam annotation: Domain name=VQ; Domain location=43-73; Score=30.8; E_ value=4.9e-06; Accession=PF05678.5; Description=VQ motif
MEGQPRSGGASWGPPAEATRPGGRRPTTTTQNQQQQQQQVKVKHIVTREVSTDQANFKDVVQWLTGKDSAAARAAVVAAGADGTSSSWSAGGGAVAARGATSTATGVASGSVVVFEDNVAGAGAGATTVFPADEEADMKRWW

SEQ ID NO: 86057 - protein, 67 aa, Zea mays
  Coding DNA Sequence Number=SeqID_42682
MEGAPRSGNTVHLLPTLSIESPSTISRRCRGASVGRLGWHGGTESEEPRSRSGREGANRGFFPLRGG

SEQ ID NO: 86058 - protein, 96 aa, Zea mays
  Coding DNA Sequence Number=SeqID_42683
  Homolog annotation: Hit_ID=A2YWA2; Match level="QueryCoverage=72%, HitCoverage=7%, E-value=2e-07, Identity=37%"; Hit description =Putative uncharacterized protein
MRAEKRSRKAWLAAIPVLFGATKGAEIAHWRQGHKDECHPPSVNTKHDDEEEKVEVGRAAKENVSVGVKQVAEMNKPVVGSETSDAHHDLKSSMVK

SEQ ID NO: 86059 - protein, 77 aa, Zea mays
  Coding DNA Sequence Number=SeqID_42684
MAWLLPGQALVSTGARTEGASRITVSYGKGPDLKGLQQHGPLTVLHTDMDEEGSFDAVVVRCDYAFLNGLAAHSSFG

SEQ ID NO: 86060 - protein, 58 aa, Zea mays
  Coding DNA Sequence Number=SeqID_42685
MAVAIATKPMAAVVVAAVDPENAKAAADLSSNRRLHLSEQEQEEEVGLESPTNQAESS

SEQ ID NO: 86061 - protein, 710 aa, Zea mays
  Coding DNA Sequence Number=SeqID_42686
MLSSSSYTADTPPAGASSEETMSNVAVEELRTGDTVEFGVSRMSSVRVQDMQQLGYFGGGVARVPGAEEVLEPEGELVVFEAFFVAGLRLPAHRFVGEVLRRFDVQKRKIGNKIAQFGSCTFTPKTGKTSMEVVELVPCAHNKWGNWWEFWFYVAEGTVEDHPGLPVAVMCSHYYSAYPQFEVAEEDEDEGALRCAARMSSGRDLVEEFVGYGVWPLARGWALGEVCPRQMPSRDGMLVRSPAFALDLHGRDPAAFVREAEDGAVRIVGRYVPKTEAQRSWDIRGSNDRLNRVFELNCLPYGGYPGQDVVDHRGKKPAAETEDDPAPEAAPSTKKRKLGTAMGELGVSDSFAMELLGTCAAPGGRMSSPELRESSARMLEVTGGRWPKNVHIPCAAGEDFFTSRMARDLRVFPYGRNIAAVVSAVMNKDHQEVAQKRRAVIRLPEARPKRARGTVKATVPGGNQPTLATKSAAPGSSKVSESMKAAGAGGTKSAPDGAAKVRELPSPGKRVADFSTNISVDDYLVGSGEGQLAVVPPAVATTVSAAVPGVKGSALSAGGEISTVAAVKDEAGTVSRRRREVSQRLSQAADFADRVASGALTADVSAEVERLWAQHADIVREKSVADSKCRKLAKKVAALEGERTDLRRQLVEERREANQAIAKAQAAQAEANLAQVEGSLASQRAEEWEVRFHALQARMERPRGLYALGS

SEQ ID NO: 86062 - protein, 50 aa, Zea mays
  Coding DNA Sequence Number=SeqID_42687
MLDEAARWDDLVTGLRPVTRGTKARLAKASSEGWRLRLRPNICPLRDQFD

SEQ ID NO: 86063 - protein, 998 aa, Zea mays
  Coding DNA Sequence Number=SeqID_42688
MPSSSSSAAATPPAAASSEETLSSLMAEELRAGDSVDFGVSRMTSARVQDMQRLGYFGSGVARAPGTEEVPEPEEEDDWDEVAQFGSCTFTPKTGKTTMQVVELVPCARNKWGNWNEFWFYVAEGTVKGHEGLSVSDMCSHYYSAYPPFEVAEEDADEGALRCAAGQSSGRDLVEEFVAYGVWPLAHGWAFGEVCPRQMPFHGGRVVRSPAFALNLRNRDPAAFVRDAEDGAVRLVGRYVPRTEGQRSFDIRGSNDRLNRVFELNQLPYDGYPGQDDADRRGKKPAVETGDDPAPAAAPSSKKRKLGTAMGGLGVSDSFARELMRTCAAPGGRMSSPELRESSARMLRVTGGCWPRNVPIPYAAGEDCFTSRMVREWRVFPYGRNIVVVVSAVMDKDRQGAAQKRQAAVRLHEARPKRQRGAAKAAASGGGKPPLAAKSGASASSKAPEATAGAGGSKSTKVVPPVSGVAEVAKAARALPLSGKRVADFGTDINVDDYLGGSDEGQLAIVAPAAAIATAAIVPKARGEALGAGGEVSALAVVRDEAGAATRRLKEVTEALSQVADFASRTTSGALTAAVSAEVERLRTQHADAVREKSASDSKCRKLTDKVAALEREKADLRRQLAEERREANEDVAKEQAAQAEARLARAEGNLARERAEHLQERLTALGSHVKGAEAAMRAEAERTRTQLMDTYRELGGAAGTPHCRGGFMSYASLVTCEGAMNALSREGCRHFEVFDQADEDFERDVYKVEDPVVKEFAGALYDRMWGPHGREVVRERAETARAQAARGERVDDFGALNSTLPDPKPTPAEAVSGVALEPTPETAEDAPDAPTSAAAGEDLPPKVAEVAPDAPAAVVPSVEDPAAVAAETTAEAAAEPTTEAPAASGPSQVQDFGPAHATATTEFLAASTAEGGNEYGGSASEFFDFTDSGSSVEWTEESSEEDLDYFAALDVAAAEASPHAADAQDVPGPSTGRRRRRAVAKRRVSTEERARLR

SEQ ID NO: 86064 - protein, 229 aa, Zea mays
  Coding DNA Sequence Number=SeqID_42689
DAPCTTIGHLGCWRRPWGYGDDNNAGGSSSHGTEHSEEPELEGWIARPITRGAARGCHFHDALDTLLCRAFDRHTWSIEYRCVVYQHHRGLYLDQWEATCLVRHPDDDLLGAEAFSDGVANGLDLKYYPRRSTGSAGGVTVSLVGEGNPRLNSMVNLAAVLNTELDHAHDQLGKVRAEVAELHAECAARHYLDGGSPAPVGIQHPYRSPPHGRFDYDTPDCRTRIDLDP

SEQ ID NO: 86065 - protein, 194 aa, Zea mays
  Coding DNA Sequence Number=SeqID_42690
MKQLKKCATSHRTIKDKCLNTESFVKKLQSMMMDGYPITTFIQAATSPHDARITWTKELRKATPQKKTLRRSRKVQERRRVLPADCLCVEHRTVRWHTGLSGAHTPDCPVHLGTAAQRLVPGGTRSLRRQRSPALTGVRQATARRTGQATVRCPVCRREQQLFSNGYNCVGGYKYTPNRPFSSVGAQATYQAIL

SEQ ID NO: 86066 - protein, 106 aa, Zea mays
  Coding DNA Sequence Number=SeqID_42691
  Homolog annotation: Hit_ID=Q9SK74; Match level="QueryCoverage=27%, HitCoverage=7%, E-value=3e-08, Identity=89%"; Hit description =Putative uncharacterized protein At2g20280
  Pfam annotation: Domain name=zf-CCCH; Domain location=74-99; Score =12.0; E_value=0.035; Accession=PF00642.15; Description=Zinc finger C- x8-C-x5-C-x3-H type (and similar)
MTMSILEVNLFDLPALYIETYGVWIITEFDVYRIFQILLQPLDGGGLRATAWLKEYHEKVLVEIYRLRYACVDPKSIVCESFKAGQCQKCFKCKFSHDLNECPEEG

SEQ ID NO: 86067 - protein, 91 aa, Zea mays
  Coding DNA Sequence Number=SeqID_42692
MWCQGTSLVEGWPMLQAKVAFASVFELCTLLQGWPMLQAKVAFARVFQLCALLQGWPMLQAKVAFALHQRDLPLEVLGLLLFVAYHLPHLG

SEQ ID NO: 86068 - protein, 99 aa, Zea mays
  Coding DNA Sequence Number=SeqID_42693
MACYNGPDHTWASMLDEAARWDDLVTGLRPVTRGTKARLAKASSEGWRLRLRPNIGRGPGVSGGRVEVRITGGGDRRRAGRVRRQSGSSAAHSPACSRR

SEQ ID NO: 86069 - protein, 313 aa, Zea mays
  Coding DNA Sequence Number=SeqID_42694
  Gene Ontology: Mol. function=protein binding; Cellular component =integral to membrane
  Homolog annotation: Hit_ID=P16919; Match level="QueryCoverage=69%, HitCoverage=15%, E-value=1e-102, Identity=83%"; Hit description =Protein rhsD precursor
  Pfam annotation: Domain name=RHS; Domain location=249-289; Score =86.3; E_value=9.7e-23; Accession=PF03527.5; Description=RHS protein
  Subcellular localization annotation: CTP_CleavageSite=53; ConfidenceScore=5.30e-01
MASLGHSDRFQSEEALNLARARASTTLTVPPLQPPPAPSSSLQSRPRPHRPFPASRPRQRRPFPAIPPPPAPSLPYIPPPPVPFLPCIPRRPRAPIRYLYDPLGRRMAKRVWRRERDLTGWMSLSRKPEVTWYGWDGDRLTTVQTDTTRIQTVYEPGSFTPLIRVETENGEREKAQRRSLAETLQQEGSENGHGVVFPAELVRLLDRLEEEIRADRVSSESRAWLAQCGLTVEQLARQVEPEYTPARKAHLYHCDHRGLPLALISEDGNTAWSAEYDEWGNQLNEENPHHVYQPYRLPGQQHDEESGLYSFRH

SEQ ID NO: 86070 - protein, 117 aa, Zea mays
  Coding DNA Sequence Number=SeqID_42695
MDLTFREEMLTRQGKLLAEHELEAEEKERRLEEQICQFNAAQAAPGVTEPPKSLGPPTVVLVQRTSDNPSGAPDHLTSSVSEFLTFPRAFYPSRRHYNSSEIRKCGSSYNNLLLLKS

SEQ ID NO: 86071 - protein, 673 aa, Zea mays
  Coding DNA Sequence Number=SeqID_42696
  Subcellular localization annotation: CTP_CleavageSite=57; ConfidenceScore=5.46e-01
MASSLLVSFFSLRDASSSLAHTLWRSLLYSLQSRSSWDRSEMNCWDVVLVRSSSWVRQSLRRWSSSSSASHSRKIAAPVSLRIWWARDSMRGRGTGAASCSTLDRSRCPNTTSISSGAGGGWSWTRLLCHPQCREWARIPQLGPPPPLRRHPTLVPLPPDPQLGHGKPLPLSWQQPGTDCQHHPQQILAAESQTRRWAWLKEKGTTLTWGPGPSSDPGSEAITAPAVAAVAAAAAAVAIAAAGVPGVLWRFWGAPKRVTRQRDVACVASPPPTPQSYLGGGTACSPFALIQGARGHGGIGAASHTGGLGTSNWCIGDLDPVVGVPASSLANRHAAVVKGRQRGQDRRPQARVIAEHRDVLGSIRDLGTKVSQVIPPTRTASSSQDRSVPDPRWILPMSFGSVNQQHRRGLLCSGTIRRFRRSPTTCTDVRPLVAKPLILSNTEENDRLNGERRDDGLNGERHDDQLEYQGAEREEAGGSASKSPGNYGETRAAKDAVRHAQLRRTEQGCRARVRGNARPNEQRRRDGHGRQKRSARREQGQPARTGVSSSRKTTEPPPAHGGHGRARQGAAGGRPSAMGEGREKLGELEGIGELEAERRPGSWRAGRWSTRLSGEQNQAHAAGKEYQRERESDGNWEGCRGRWKRLAVDDAGRLQKNQRPDRIQGSWPGVHVR

SEQ ID NO: 86072 - protein, 103 aa, Zea mays
  Coding DNA Sequence Number=SeqID_42697
MLDLADVSLTLAGGTAVGARQAALSCQVIDKGVMLPAGIRSMMALEQLEGVDVFKKINVFAQELGHLTYLRRISFFLCHKDPKEFDTVGSEDLRFPYDHKDRT

SEQ ID NO: 86073 - protein, 90 aa, Zea mays
  Coding DNA Sequence Number=SeqID_42698
MAILVPRSSLKSHPVGDKQWFPTSTSDATTFIGIPLGRAPQIQVRYWDQVYMFFFSWHLNDLGFDGKEKGEVVEASALPARAGEFTVTGC

SEQ ID NO: 86074 - protein, 82 aa, Zea mays
  Coding DNA Sequence Number=SeqID_42699
MEHRLGLERLMETTHLELDGKLFVNTQQAPTWRANYRRFDPGGSLDRRVNYRCVSQPRWVSARQNTRGKTARGNCGLVLSYA

SEQ ID NO: 86075 - protein, 375 aa, Zea mays
  Coding DNA Sequence Number=SeqID_42700
  Homolog annotation: Hit_ID=Q6J9V9; Match level="QueryCoverage=31%, HitCoverage=40%, E-value=1e-48, Identity=82%"; Hit description =Putative uncharacterized protein
MEARAHMSCNRRTTYYVQRNRTATYANAASSWDYRTCATTRGSPAHDPTVQIKCDGHGSVSRGDRHDSWDRERGHFEGALRSKRNGSRALLLIRGSKVAPCGVRRPPQSTRAPSPLLIRGSKAGPSKGFDSRPRTCRVRDDPGYVRYMAKARATLLRYPKTFPRPAGTVCNGIPPKGGTEPSDPIERVRVQQITCRPHEGTTRPTEGSQEELRPHRSQTTPPRPRGLHPTGKQHYSPCSDYCANHQGKTNNSKSRPPPSSASGATGNSASPDPRPRHQPRPREKVSASPDSRPQSRPQEKSPPHPTLASDRPRYRGYIITLPLASLLRLRRNKTGVTSRLLRQQLSTKAKKRQQDPGPHRQLRFYRAQALLRRPR

SEQ ID NO: 86076 - protein, 167 aa, Zea mays
  Coding DNA Sequence Number=SeqID_42701
MAALYLVRMLLILSLYYVHGADHLGGCRNVEQERSLVTRGTRMEALDRRRHEASGLLGFDHSVIDISLHDRFDEVTKTLNHTPLVSETSIFKPKGMVMKKYEPDRVIKEVAGASCDILALVDGDILAQGLIELIEYSYQQGGYSFSKTYLERTSRLIVLRLKQFGDG

SEQ ID NO: 86077 - protein, 88 aa, Zea mays
  Coding DNA Sequence Number=SeqID_42702
  Subcellular localization annotation: CTP_CleavageSite=45; ConfidenceScore=5.22e-01
MKLWKETSRSSKTTTSSRSGLAATPSRLPVKAAVIYVSFPHFDLLSGHVSALAPAWALIKARVCSVREPWDPIVGGPDPIRGGVRIPF

SEQ ID NO: 86078 - protein, 88 aa, Zea mays
  Coding DNA Sequence Number=SeqID_42703
MGSSAAWSFRSRVVVGYLLRSTLEKRVSPAVTIDGLRERNSLPELLCMVRYRSECMNKTISKYDNIKQIQRLPDNAFWKLNLTRNASE

SEQ ID NO: 86079 - protein, 112 aa, Zea mays
  Coding DNA Sequence Number=SeqID_42704
MAVGPLICFAAYIGLLQPHSDDMSRVVDQLLKLIATFIDIEVRALLGQGGSLPEAMVELSLTCATVGGVVAYGIRGGAGLRIECECPPLAFGCALSSSPGTGSGETVRAIIE

SEQ ID NO: 86080 - protein, 126 aa, Zea mays
  Coding DNA Sequence Number=SeqID_42705
MRAEDPQILEGHPVSIKGEKKAWELPEGAIVLEGIPVFPQAMDKQEHHESSQDPPPELFEPLTMKKIPAPSLEVKEEATSTPLAPPPSEELQEPVEMAMGTRNPKPDGFLPHYGTGLGQFSYPWVC

SEQ ID NO: 86081 - protein, 225 aa, Zea mays
  Coding DNA Sequence Number=SeqID_42706
MRFRPTVNISSDTASVTPGFKEQSQFIGSSNAGFLADRHRSKINQGPPYTDHSPTALAPFGIADLRPGFLPNRRGSVVRSGPPAYDPMANDPFPAFPLPAWAIRRRHPTATVGSTPARLRLTPRVPQYPNCSELRDAGDKTITGDRFLTEGMKHRGLATESFARRRSPHADEQFPRVSLNSHTKTPRIHTGGTGEVLWLHARAESSLEVANAHGSGVLTRFFLFL

SEQ ID NO: 86082 - protein, 143 aa, Zea mays
  Coding DNA Sequence Number=SeqID_42707
MGKKRKREPTPPSEDFGDSEYSEEEFSSESEGSPAPIPLRESSDDSDDSQGLAAEVWTYIRAVERSGLEGSDESEYSSDEEDSDGGGEDEDGDDDDDEGGGGGDGDGDGSGRGGTSCGKDGDGGGSKGSNRGGSRGGINRASG

SEQ ID NO: 86083 - protein, 211 aa, Zea mays
  Coding DNA Sequence Number=SeqID_42708
MSQVNRSDKTVVPSAFTNYDDMGHTYEISVGLSLGANSASVEAGLSLKTNSTSPKPGLDYLLPANLAGGHSFNCVTHVYESWSGLGHGLGRTSASPEPAFSLDISNERAPNVTRNNGRGYSPYSALHQPLRHGKLPHQVDKFIYNYSKSTVRNAVDYSGQEKPFEKTPMRGPSGPLRRTVRDTRGRTIQTRGTDHPRSAEKEQRLGSGWRL

SEQ ID NO: 86084 - protein, 91 aa, Zea mays
  Coding DNA Sequence Number=SeqID_42709
MATETRRQPESTVADLGGCAENGGERGQRDSGRERGNWGASRVAEAGAKLSVAEGTAGLQRRWRNELGRRWINGGGALACEQRGEVEWGPA

SEQ ID NO: 86085 - protein, 102 aa, Zea mays
  Coding DNA Sequence Number=SeqID_42710
MTTTKTTAWSPLSRRRRKDGSPDPSPVTPLAAFDQHTWSIEYRCVVYQHSRGRYPDRWEATCLVRRPEDDLRGAEAVSEHYSISERDTAEAAMQDAARRALS

SEQ ID NO: 86086 - protein, 402 aa, Zea mays
  Coding DNA Sequence Number=SeqID_42711
ERSSQGGRPDCLDDTWNDAELGTSVKQATPKPSKGWMYMMLSPLPPSISTLVRRFDPHDRLDDEGVGAGMRDYIGMVMVVEDDWEFQPLEVPRDGGLHVEHLSSGHLAAASVTVCICLAEHHETSHGFREVFSRGFLFFGFVGSSCFAFLAGGLEMKHFRSSHSWSLWRTEKPRPIYGSEFSFLGARGAVVPSASIGVLSSIPPFAAGFTGVTWVFSLAENHPHRVFLVSKLGHNVEEVEPFDECVQLLLLLSEDGFAGKDARLTLVLVFLLLDGGSQVPPFVVALWWRGHEVGSFLRLIEVQDRFYRGTARVILKEIMDGRRLAADDSHHGWWWDCFHPLFSGNGGRIEASLECGGTSFEASFLRLGLGRMPRPQAYVIGLVVGNKAEFAGLLGEEVKGAK

SEQ ID NO: 86087 - protein, 247 aa, Zea mays
  Coding DNA Sequence Number=SeqID_42712
  Subcellular localization annotation: CTP_CleavageSite=81; ConfidenceScore=5.73e-01
KQIPDSSWSSAPPHRLLTRLLPERRAVASSSPRSAVVMSLAPHPFSSSLIFPFGASVVFFTPTPSFECRRRGFDCSTGTPFASVAQGLGRAVRLALQQLVEPVARHLELRQPGHDPPARGVEKDHATGEAAKTPAGGARDMSKEEGTGKELTSSTTSESLKRQRSSDSFTSMIAEKLDKFTEAIRDEAPKGPTSKEIFSRLEEIDGLDEDTFLDLFDILTGDARKYESLLALPLILRKRWLLKQHKK

SEQ ID NO: 86088 - protein, 660 aa, Zea mays
  Coding DNA Sequence Number=SeqID_42713
  Pfam annotation: Domain name=zf-CCHC; Domain location=209-223; Score =2.6; E_value=0.63; Accession=PF00098.14; Description=Zinc knuckle
  Pfam annotation: Domain name=zf-CCHC; Domain location=225-242; Score =18.1; E_value=0.0028; Accession=PF00098.14; Description=Zinc knuckle
  Pfam module annotation: Pfam domain module=zf-CCHC::zf-CCHC; Domain location=209-223::225-242
  Subcellular localization annotation: CTP_CleavageSite=17; ConfidenceScore=5.43e-01
NHTKGMGPRVSSVPGPRVSSPPARDPSSHARDPSTFHGAAPPTNGPATHLPTPATAHTIYGGAAASPRPSSSARSSPSLVSSTSATQGRTKFQRWSGSARDPLLTVFLLGPGPAGPCSATCCFSSARHLLQHRVPRLRGSPPHFETVTSSPHHKGTTPFGFVALERALETTLGGGWTRVESRKYEEGAAYAHCGARRPVPRRPRRVVVFNCLAEDHLAASCRLGPRCFRCKALGHRSYVCPGPVNGDKIFPVLRRRLKGAVWSMLSTVAPANVDRGATVPVSQHQLARASVWERLVPPTPRPCEKTRVSVWRRISPPGVEKGQAHFERMNGAVDARAIVTPSSDVGAAAASASQVSLPPRPRRRRHRKRKSSPRGGSDPGCGQSDQPGNEETPQDVPSPVHLQHPCVIGWNSLMDKAEEDLNAVSIFVVSDVLVPVADIADAVAQKLEALSPCTVKDGPGFLDPQKVHEETLELKNLEAFRCYGWCYDLASIPHSRDLWITEPLGIGPCAERLSLAYRVQIKVLDGPRVVPDPIQIPTDMNGSTRQRRRFRSRSPPGDRDGRRGSTEDSVLLGRRSALERLGPRSEVQPRKEGDASQCVQTAGNYEILEESSAVEITAGIPADLVAVPNLAAVWGTMASASEHIQGPLAPVDVLETVEQL

SEQ ID NO: 86089 - protein, 101 aa, Zea mays
  Coding DNA Sequence Number=SeqID_42714
  Gene Ontology: Mol. function=metal ion binding
  Homolog annotation: Hit_ID=Q7EYS4; Match level="QueryCoverage=46%, HitCoverage=21%, E-value=4e-16, Identity=78%"; Hit description =Receptor like protein
  Pfam annotation: Domain name=PHD; Domain location=28-67; Score=-6.8; E_value=0.083; Accession=PF00628.20; Description=PHD-finger
MAAKHSPDGIQATLTHDPDIGQHDLDTGFGLAQPGPMSRWFHPSCVAMTIEQAKKLDHFVCSDCFKENGSKRLSNAYATSPNFEPKFCDLVLKLMDVFVSD

SEQ ID NO: 86090 - protein, 787 aa, Zea mays
  Coding DNA Sequence Number=SeqID_42715
  Gene Ontology: Mol. function=cation transmembrane transporter activity; Cellular component=membrane; Biological process=cation transport
  Homolog annotation: Hit_ID=A3BT86; Match level="QueryCoverage=100%, HitCoverage=100%, E-value=1e-180, Identity=47%"; Hit description =Putative uncharacterized protein
  Pfam annotation: Domain name=Cation_efflux; Domain location=363-786; Score=272.1; E_value=1.1e-78; Accession=PF01545.12; Description =Cation efflux family
  Subcellular localization annotation: CTP_CleavageSite=41; ConfidenceScore=5.65e-01
MSGRHAPHLRLAVPPRLSAHPSFRFPSTPLPTPSKARGLPSSAAPPSSRYADGLLRLIVLHALFLLAPAVRALPSLAHALAFSPPLALLSAAALLLHHFAAASRKTHQPHRPFPGFPALVRPAFLLALSILLRLVALRILPAPGLLVLADSAGSLLARALRRPSRRRVISTAVAALSLVCISPSPSVILAIPFAAGFLSSTEQSAAARHATRTRLARAAAFALAAAFLSVPALVGLSFFGASDAGDGPPDGAVPIGPVWWLLLNSAFFGMALERRQEHGSGGGRPSVDFALTFLCTLVLELLYYPKLSLPGFLICGFLLWIASRELIPAGYVEHGTEDISESVFEAIMGPVRHILSERKSRKIAVFLLINTAYMFVEFGCGFVSDSLGLISDACHMLFDCAALAIGLYASYIARLPANGMYNFGRGRFEVLSGYVNAVFLVLVGVLIVLESFERILEPREISTSSLLSVSIGGLVVNIIGLVFFHEEHHHAHGGTCSHSHSHSHHGHEHHQHHGHEEHKHHNHDHHGANNVKACCDHHGDDNHRHDHHGNSKSEGIHNNIMDNTCKEKHGHEHHHHEHSEHCHQSRDHSHQNCNNITVEQQLLDIPLSNISSHDTESHSSKEGLRPSDSGNSNKPGHRHHIDHNMEGIFLHVLADTMGSVGVVISTLLIKYKGWLIADPICSVFISVMIVSSVIPLLRNSAEILLQRVPRNHEKDLAVALDDVMKIEDVLGVNNVHVWNLTNTDTVGTFQLHVSAEADKSSIRNKASRIFQEAGVQDLIIEIECVKR

SEQ ID NO: 86091 - protein, 175 aa, Zea mays
  Coding DNA Sequence Number=SeqID_42716
MPPTPPQGILAAGGDPDGDGDDDDAGGSSSHGTELSEEPEPEGWIARPITHDATRECHFHDALDTLLRQAFDRHTCGVADGLDLKSYPRCSIGSAGGMIVSPVGEGNPRLSSMVNLVVVLNTELDHSLDELGKVRVEVVELHAECAARHYLDGGSLAPVGIQHPYRSSPRGRFDY

SEQ ID NO: 86092 - protein, 151 aa, Zea mays
  Coding DNA Sequence Number=SeqID_42717
  Gene Ontology: Mol. function=aspartic-type endopeptidase activity; Biological process=DNA integration
MDANLEVSCLMLACMEPELQMQFETNHEVHDMIVALKDIFQTQCVQSLSRMQASRRRSSWATRNQNGWLQNFITNYHMHGAERGLNELCGMLKTAEGDIKKSAGSSGHVMAVQNKPNFKKKVKSQKKKGKAKDTVSKPNQKPKAGPAADAE

SEQ ID NO: 86093 - protein, 86 aa, Zea mays
  Coding DNA Sequence Number=SeqID_42718
MDANLEVSCLMLACMEPELQMQFETNHEVHDMIVALKDIFQTQCVQSLSRMQASRRRSSWATRNQNGWLQSEVGEARLPNKPRVGH

SEQ ID NO: 86094 - protein, 67 aa, Zea mays
  Coding DNA Sequence Number=SeqID_42719
MLLQLLSLKLLLLVQAVVQPLQMARLTSHWTAKRTLSETRGQEGDDGLPCGVSKTSHLQKTPAHTYD

SEQ ID NO: 86095 - protein, 56 aa, Zea mays
  Coding DNA Sequence Number=SeqID_42720
MPPPVLRLFAAAPPRALGGRARAHRGDGGFARLRLRVRAAAGEAAPAPSRTQGKRL

SEQ ID NO: 86096 - protein, 120 aa, Zea mays
  Coding DNA Sequence Number=SeqID_42721
MDLEHNFHTPLSPQAAQEYHVFRELYKLLELCGFHWNHDLDFFSMIQETKGVFGHSFFMKRAQSAVHLGSGRRRRGLPSRCSDAQAQAREPAIATMRPGAATESAGRSCREQAKNRRRHR

SEQ ID NO: 86097 - protein, 52 aa, Zea mays
  Coding DNA Sequence Number=SeqID_42722
MENECKIPFKHKNSLYEAFMTMRFVGQEFGDQLDDYVEERNGYVVTNGNRGC

SEQ ID NO: 86098 - protein, 221 aa, Zea mays
  Coding DNA Sequence Number=SeqID_42723
MRLMVLGFDSGNASGVAAGGGPDNGGGDDSSSHDTDFSADQEPEGWVARPITRDAARGCHFHDALDTLLRRALDRRTWSIEYRCVVYQHSRGVYPDRWEATCLVRRPENSLQGAEACSEHYSISERDSAEAAMQDAARRALSHYCSVLGGVADGLNMKYTPAVHLAAQEMSENRRRGGRRAQQERPAQQDEAPQQQQLPPSPPMYIEQMFLMQTQAVQAIG

SEQ ID NO: 86099 - protein, 296 aa, Zea mays
  Coding DNA Sequence Number=SeqID_42724
SPETAPSLPELRPEVRHPFSCPISLIAPCVRPILPSPVLDRGGPPHSALSPLPAAGIAHRSFSDPPEAFPPPFSPLCPWIRGLFPAIEFVVAPSSPLPNSGDLGANLARTCLNSGDFTAAERSGAARSDIEQSEFPECVVGDLPGQQPEGEVGNMDDFEEFQEYDEFYSPETAPSLPELRPEVRHPFSCPISLIAPFVRPILPSSVLDRGGPPHSALSPLPAAGIAHRSFSDPPEAFPPPFSPLCPWIRGLFPSIEFVVAPSSPLPNSGDLGANPARTCLNSGDFTAAERSGAARS

SEQ ID NO: 86100 - protein, 71 aa, Zea mays
  Coding DNA Sequence Number=SeqID_42725
MVQLAQLITQGGNSCIHAHTIALGLSAQGICHNVGFARMICLSENVFETLMISVNVTERFTRLADIIEHQR

SEQ ID NO: 86101 - protein, 96 aa, Zea mays
  Coding DNA Sequence Number=SeqID_42726
MGRLEPRAEWESRLVGKMVRIRCTACKSVIPFLPSRLAERPLRRTVPGQSIQLERLHRRMHEEQERRRQEQEQEQQDSSPSPQWEVESERPPSPAP

SEQ ID NO: 86102 - protein, 260 aa, Zea mays
  Coding DNA Sequence Number=SeqID_42727
  Gene Ontology: Mol. function=polyribonucleotide nucleotidyltransferase activity; Cellular component=membrane fraction; Biological process =mRNA catabolic process
  Homolog annotation: Hit_ID=P05055; Match level="QueryCoverage=100%, HitCoverage=37%, E-value=1e-118, Identity=84%"; Hit description =Polyribonucleotide nucleotidyltransferase
  Pfam annotation: Domain name=RNase_PH; Domain location=11-144; Score =197.1; E_value=4.4e-56; Accession=PF01138.12; Description=3' exoribonuclease family, domain 1
  Pfam annotation: Domain name=RNase_PH_C; Domain location=147-217; Score=84.9; E_value=2.5e-22; Accession=PF03725.6; Description=3' exoribonuclease family, domain 2
  Pfam module annotation: Pfam domain module=RNase_PH::RNase_PH_C; Domain location=11-144::147-217
EPRIDGREKDMIRGLDVRTGVLPRTHGSALFTRGETQALVTATLGTARDAQVLDELMGERTDTFLFHYNFPPYSVGETGMVGSPKRREIGHGRLAKRGVLAVMPDMDKFPYTVRVVSEITESNGSSSMASVCGASLALMDAGVPIKAAVAGIAMGLVKEGDNYVVLSDILGDEDHLGDMDFKVAGSRDGISALQMDIKIEGITKEIMQVALNQAKERALNARQRAVGAEIAVAPESHRTVRCTPDSPVNFSGLAVGVSRS

SEQ ID NO: 86103 - protein, 57 aa, Zea mays
  Coding DNA Sequence Number=SeqID_42728
MQAACNRAKWAHPFNSNAPGMEAQAHTSCDRRAGCYVTGGTFGKRSGRCFAFAIMTA

SEQ ID NO: 86104 - protein, 536 aa, Zea mays
  Coding DNA Sequence Number=SeqID_42729
  Gene Ontology: Mol. function=protein kinase activity; Biological process=protein amino acid phosphorylation
  Homolog annotation: Hit_ID=Q10NJ0; Match level="QueryCoverage=85%, HitCoverage=63%, E-value=1e-169, Identity=68%"; Hit description =Protein kinase domain containing protein, expressed
MCQRLKGPTEKASMTVAVQNNEEGVTSSSYGIRTEHIELYDIVIDGSKKFSLRYYSYVVTWNGEMAQLSANINGAVLICVIDPVERLTVEEFVHHPFLSEHAPEKTLSLTQSDIRDGFPRNNSSPTRHSNHSSQEDCMPFPLDDESSGQDEGPVPDSKSLMKSYGFPMGKRLDKTSGQKSPPKHNSLFSRYVLGNNHAPSSQHHGHSGKVTKESKIHEVQGQKVVYPEDSPIIDSLEFVDQEYVFVSGPHLEGSSSSTNASQQLNVPAKYDNSSVSPPKLTFMSAPMPINGLPINRQQLAGTGSFDSHCSPASGTSQGSADISDAMDQPPSDYLTRIRLLEQYASAIAGLVRDEIKGGRHLEAFSIQLIVLATWKQAIHIGNTFVASPARESPSQDIPMKGHIAGASHLPANSKLADDACMQIEKQFLSEVEYAEELASIVGQIADGTEMPDAIEMIFQSALLIGRRGGVDEMFGKAADAMTGYMRAVSMLRFLLVEAPSLALNPPLTLTRSDRNRLRTYIDALNTRLCQMQSQRH

SEQ ID NO: 86105 - protein, 152 aa, Zea mays
  Coding DNA Sequence Number=SeqID_42730
MVRERRTQVSTMNKNTRDTRFIPRFGHTTKVPYFLVEAPTKSRVSFNPNPPFADHKAEALQTTDMTSKVTPHNSTTLEEMDPKQENNKLVKESIFYTVETLGVVLAYMGSLESLLTYHKDVDETLLYETFSVFGVIVTNPKVTVDIQYLLSS

SEQ ID NO: 86106 - protein, 498 aa, Zea mays
  Coding DNA Sequence Number=SeqID_42731
  Gene Ontology: Mol. function=oxidoreductase activity; Cellular component=endoplasmic reticulum membrane; Biological process =electron transport
  Homolog annotation: Hit_ID=Q9AXH9; Match level="QueryCoverage=87%, HitCoverage=89%, E-value=1e-165, Identity=65%"; Hit description=Ent -kaurenoic acid oxidase 1
  Pfam annotation: Domain name=p450; Domain location=43-474; Score=6.8; E_value=1e-13; Accession=PF00067.13; Description=Cytochrome P450
MSVPGLWAAVAAVAVVIIDALVRRAHRWAWEASLGGSRRARLPPGDMGWPVVGAMWAFLWAFKSGNPDSFIGSFIRRFGRTGVYMTFMFSKPTVLVATPEACKRVLMDDDSFLEGWPRATVALIGRKSFLTLPCEEHRRLRKLTAAPINGFDALTTYLGFIDRTVVATLRGWSDAGEIEFLTELRRMTFKIIVQIFLTAADDATTLALESSYTDLNYGMRAMAINLPGFAFHRAFKACPILQAKYNQWRLLLDLKKVDTARGVLNERRARKRLPRSSVDMMDRLIDAEDEHGRRLDDEEIIDILVMYLNAGHESSGHICMWATVYLQKHPEIFAKAKAEQEEIMRSIPSSQMGLSLRDFRRMEYLSQARGFSNAQRILTIYFNLWYRSVHMDPEVYRDSKEFNPSRWEGYTPRAGTFLPFGLGTRFCPGNDLAKLEISVFLHHFLLGYKLTRTNPNCRIRFWSSDTSDGFSNTFSGSPDTPSNKKRDTQDNYGVPKPV

SEQ ID NO: 86107 - protein, 654 aa, Zea mays
  Coding DNA Sequence Number=SeqID_42732
  Gene Ontology: Mol. function=receptor activity; Cellular component =mitochondrion
  Homolog annotation: Hit_ID=Q65XG5; Match level="QueryCoverage=67%, HitCoverage=93%, E-value=3e-70, Identity=39%"; Hit description =Putative uncharacterized protein OJ1362_D02.2
  Pfam annotation: Domain name=DUF668; Domain location=308-409; Score =56.5; E_value=9.3e-14; Accession=PF05003.3; Description=Protein of unknown function (DUF668)
MPARTWLADLRSRLRVGPRKNDGLGILAFEAAANMSRLVSLHRTVSDVEVRRLRADVLRAEGVARLTSTDQSLLLRFACGELLADLDRAAGSVACLGARCCAGDAPLLRDFDRVYAEAKRGRLAQLDATVGFSRGATRRFKEMERHVVVAAKLYAEMDALSELEASERRMERWKQHSGPIPAQTTGTGKGSAADPGEKLMSKLREQRQKVRRVMEGSLWNVAASKAARLMAKSVLAVLARISLAFAAFVPGLPPWTVGRAWALGHSSGSGPLHRSATPAALQHSAPIFGQRDSASLLSASSIKPSVSTVGGSSMELRYANVILAAKTLLAALRPPAGDNEEAHEGMIDLSKRDALYKMLPVGIRKAMNAKLREIWKKAQPVDEVSAAASKDAVECLLRWLSPMAHDTVRWNDEQSMERAQRFSMQPRALMVQTLHFADRKKTDAAIVDVLIGLTCVCCQHNQDDPTSIAVLINEPLLVGQPSAHKQGDCSDAQLQEFVAHIALPKDQPLIHSPPIDIPDSFSALLGQSTESAAVLSNQTTTFKKRSSIRLAAKKKTMMGRSRDAISKAQDILIAKLNNTATNQKQNQNSIASCSSNQDNSFEQIARLFSRPLTKEQMEAIMELVNQGVEKTGHKRRGRKVTPIASPTIRAVGDA

SEQ ID NO: 86108 - protein, 64 aa, Zea mays
  Coding DNA Sequence Number=SeqID_42733
MGVPDFCARWRAFNALQDRRHLWQEKRATLRLRHNDRVKKRDRERGIPRKGSFSVKETGPEPPY

SEQ ID NO: 86109 - protein, 68 aa, Zea mays
  Coding DNA Sequence Number=SeqID_42734
MACGFLEMGTVVCSFLGMGTVACAFVEMGTLACAFVEMGTLAYAFLVMGTLACALLEMEMDVYLSGNA

SEQ ID NO: 86110 - protein, 75 aa, Zea mays
  Coding DNA Sequence Number=SeqID_42735
MPSYSSSAADKPPADPSPSAAASYEEPMGSLMAEDLRSGDSVDFGVSRTSSVRAQDMQRLGYIGGGVARVPGTEE

SEQ ID NO: 86111 - protein, 399 aa, Zea mays
  Coding DNA Sequence Number=SeqID_42736
  Gene Ontology: Mol. function=actin-dependent ATPase activity; Cellular component=cleavage furrow; Biological process=actin filament-based movement
  Homolog annotation: Hit_ID=Q10NJ2; Match level="QueryCoverage=86%, HitCoverage=85%, E-value=1e-134, Identity=70%"; Hit description =Expressed protein
MARRSVFPLVPDLRSETRGNQRAGAELLARVQELENGNTELVRENKMLLSKIDEKGVEKDALVNRLNDLERNVVPSLQKNLNDISLEKDAAVVAKEDALAQLRSMKKRLKEAEEEQYKAEEDSASLRAQLNTLQQQVMGHSYSGYTMGISTEESVAMEKEIQDLQAQLKQESLLRQQEQQKLAEESQLRQQEQEKLAKEQIHIASLEAEKQQLEDQITMLTKKATGKTTVHASKHQDREKLENQLHDMALMIERLEGSRQKLLMEIDSQSSEIEKLFEENSALSTSYQEAIAITVQWENQVRDCLKQNEELRSHLEKLRLEQASLLEGQLIKEQSRSESLLAEIMKLSAELRKAVQAQNNLVRLRNQQALAQDAGECIGLMPFSRCWWKAVLSVATIHK

SEQ ID NO: 86112 - protein, 166 aa, Zea mays
  Coding DNA Sequence Number=SeqID_42737
  Gene Ontology: Mol. function=protein serine/threonine kinase activity; Cellular component=cytoplasm; Biological process=protein amino acid phosphorylation
  Homolog annotation: Hit_ID=Q10NJ0; Match level="QueryCoverage=88%, HitCoverage=20%, E-value=3e-42, Identity=63%"; Hit description =Protein kinase domain containing protein, expressed
  Pfam annotation: Domain name=Pkinase; Domain location=21-166; Score= -48.0; E_value=9.6e-06; Accession=PF00069.16; Description=Protein kinase domain
  Pfam annotation: Domain name=Pkinase_Tyr; Domain location=21-166; Score=-134.7; E_value=0.00037; Accession=PF07714.8; Description =Protein tyrosine kinase
  Pfam module annotation: Pfam domain module=Pkinase::Pkinase_Tyr; Domain location=21-166::21-166
MGDGASGRGGGGGAGRRVGEYELLRPIGSGAYSQVWLGRHRARGTEVAVKEIAMERLSNKLRESLLSEVDILRRIRHDNVIALHESIKVPRRALPPHLMSLVISRAIDVDLQGVGAVGGSDYRLGSSGLQMLRDNNVVHRDLKPQNILLVENNENSLLKIADFGFA

SEQ ID NO: 86113 - protein, 131 aa, Zea mays
  Coding DNA Sequence Number=SeqID_42738
MTTAALSPLTEARRRQQGLDSPDSCPSARLQCSSDGHDTTRTGCQNLSGCHDGMALLQRVGRAGKDGTALAPSPKRMPTLVTRAPSTPPPFPPSEAAAASASAKMSGGLFRGTCADQDTRFSNKQAKLFKT

SEQ ID NO: 86114 - protein, 155 aa, Zea mays
  Coding DNA Sequence Number=SeqID_42739
  Subcellular localization annotation: CTP_CleavageSite=31; ConfidenceScore=5.10e-01
MGMPVLFFRDPSRFWGRMMMALPVDVAARVRALGSGGAEFAVFRVLARVRALGSGGAEFAVFRVLARVRALGSGGAELAVFRVLARVRALGSGGAEFAVAPLARPDCLSDSLCRVAPQSEWRRRRCPSVRLLYADGGYQLRIRRLEGTPNYGPRQ

SEQ ID NO: 86115 - protein, 127 aa, Zea mays
  Coding DNA Sequence Number=SeqID_42740
MGKRGGSGLVMVRTIQTTGTNTNYIPLPRQVPVYPVVVEEISMNLPCIRVENGVILEDSSEEFLPTPTPLVESLAFAAGSSSLTPPAPAVQAPALGGDDPYDSSDDDEDNEEEREEEENIYKEANGE

SEQ ID NO: 86116 - protein, 102 aa, Zea mays
  Coding DNA Sequence Number=SeqID_42741
MADGVTKGELAATIRQQMPGSSVPISSETLAPPTGSYPPLRQCPGHPAGGVPVYSITEQYARAAGCTVPIITGTLPGKLPLHASTMQIADIRAQGDCSSNEH

SEQ ID NO: 86117 - protein, 83 aa, Zea mays
  Coding DNA Sequence Number=SeqID_42742
MGWWAVADRLRLVTGGARWPLGAQAGGLDAVYQRSGQDTLNAEARVFPARYLAVSGPDLTRRDPDPIQGVRLACFGSLRPYPE

SEQ ID NO: 86118 - protein, 444 aa, Zea mays
  Coding DNA Sequence Number=SeqID_42743
  Homolog annotation: Hit_ID=UPI00006CB2DA; Match level="QueryCoverage =21%, HitCoverage=4%, E-value=5e-07, Identity=30%"; Hit description =Viral A-type inclusion protein repeat containing protein
MAVRQTSGRDPHRGIQITGVPAGGSQPTDAQGAQRRVSPLPAPPSDPPPPPPPSGSPPPPQGQQQHQQQQQQQGQQTSRFQGRWKVQGPKASSPSASKVAPTGESGPQQQASTGSGAGDLPLPATAEAPPSGPQVPSATAEAAPSGPQVPAGSEGSSAADVYCKPNGGDVVEYTVGNGGRRGGRVQLHPDAHSGGARGYSWAAAPKVFDREREVTRKEKRLAKKEEHLDQREEVITALQEKLKAYNVMLEKQRDEQTAAVATLQKLQRKLDDRASNIAMAEENLKAKDASLEERATDLAWREKDLAFKEVMWERRDKLLADHELDAEEKEKKLEEKERTQRTLEERVRRFQETQVAQVAQAAQAAPGSQAVEAMKKTLEDLQAEHRTGVQRIAAWADEASSALVPLGVSPIPVLKQSVSISDALPMLDSAADRLRHLDQILGDA

SEQ ID NO: 86119 - protein, 239 aa, Zea mays
  Coding DNA Sequence Number=SeqID_42744
MEDSLVIRTSYCSEVEGFPHLLRSCALRMGIRKKPEYVWKEYLDNGMEKRSMSLSPDTASQIFAKMLPEKPSDNYARTTAGWSLKPPFATFHPAKKTPAWRKRLQALSGSDPTEDDPTIVYMAGYLHTLDNQYDDLASHCTHLNSRVESLEQQVKELTREKVSLQESLEIAEGEETNTREAYRTLKMDYDKKLKKLAPAKKIRKKTRSQGCQTEQKEEAPSSPTSYQDRETRSTLRKCP

SEQ ID NO: 86120 - protein, 148 aa, Zea mays
  Coding DNA Sequence Number=SeqID_42745
MAAALWLREESSGERGPGEPEGEGRTEGRPRLRGIWRSLPRQQTRRGFNGDRRTGVRPRRAAAELRDRAHRARERERGRGCSTEGAMSEEGRVNEGEVQKRLGRMGRGRETCKCGCVNSEEHGRFGGERSDKQDPPVSESGRVNRRSG

SEQ ID NO: 86121 - protein, 303 aa, Zea mays
  Coding DNA Sequence Number=SeqID_42746
  Subcellular localization annotation: CTP_CleavageSite=67; ConfidenceScore=5.16e-01
MTLGTSVTWPRLGLRSRGTLGNFRDQRERFVMESHRREAPSPRTLSNGSGSSKSPAEARRLLSNQTTAKLLTTSTKQLENSEPDHAPGLRLGPHEGTTRPTEESQEELRPQRSQTTPPRPRGLHPTENSTIHPIPTTVPTTRVKLTTGAPPRPTSGLGLGLGLERRSPPRPTPGLSLSLSLGLGRRSPPRPTSGLDLILGLRRSHNLARPQPRPQEKSPPRPTLASNRLHHRGYIITLPLASCLRLRRNKTGVPSRLLQQQGMSKAFLGGRAEAKEANSDGSLQGQTLSREACNPYYEHPGAR

SEQ ID NO: 86122 - protein, 67 aa, Zea mays
  Coding DNA Sequence Number=SeqID_42747
MRSSTELEVALGDEDPSPEWDFGAVLRWGEDALPGAILNSEKPVTEDPGEQQVEVAEQELIEGKLCP

SEQ ID NO: 86123 - protein, 164 aa, Zea mays
  Coding DNA Sequence Number=SeqID_42748
  Gene Ontology: Mol. function=thiamin-phosphate diphosphorylase activity; Biological process=thiamin biosynthetic process
  Homolog annotation: Hit_ID=Q2UVH9; Match level="QueryCoverage=66%, HitCoverage=19%, E-value=1e-53, Identity=95%"; Hit description =Phosphomethylpyrimidine kinase/thiamin-phosphate pyrophosphorylase
MEPGCTLASCIAAELAKGATMLHAVQVAKQFVESALYHSKDLVIGNGPQGPFDHLFELKSPLYKTGSLQKFNPGDLFLYAVTDSGMNKKWGRSIKDAVKAAIEGGATIVQLRLSFLKNGQSSLVIQSLQMISLTVLRISNVQRKRRRDTGVLGSCQGLCGNLQV

SEQ ID NO: 86124 - protein, 628 aa, Zea mays
  Coding DNA Sequence Number=SeqID_42749
  Subcellular localization annotation: CTP_CleavageSite=15; ConfidenceScore=5.14e-01
MSAAKLAAPGSGKSSASEKTAATSGTKPPPVEAVKVRELPSPGKHVADFGTNISVEDYFVGPGEGQMVVVPPLVATTSTSVVVRAKGTAQDPWAAFCASGEILTAAAAKDVAGTMSQRLRDASQWAVAAAESSKLSWTSAADFADRVASGVLTADVAAEVERLRAQHADAVREKPAAESKNRRLAEKVATLEAEKTDLRRQLVEERKEANQAIAEAQAAQAEAKVARAEGSLASQRAEEWEARFNALHGRVDKAEASTRLEVERTLAQFVDSNRELGARTADFEVPDREAGLRFLEWLQEELLVLPTIVEGFMSFASLVTCEGAMNVLSREGCRHYEVFDQSDESFEREIFKAEDPVVKQSAGALFDRMWGGAHGREAVRERSDRAREQVKMERAEDVEDLGGLVGAPPEAVEVNPVLPSDAGEGPSAMPVLAMAGEDPMSAPAPTVEGAPEVVAELAVEDPTTAVVPSQVQGFGPAHATATDNVNFVVASTVVAENDSDDSVSKFFESDDSRSSVVWSEESSDEDLDYFAALDVAAAETSPRVMGAEVLPGPSAGHRRRRAVAKWRVSEVEGGRLRVDGASKRELLSSPAGASVGEGELQNLFEGEDLRIMLFNYREMGIIPKVEPM

SEQ ID NO: 86125 - protein, 489 aa, Zea mays
  Coding DNA Sequence Number=SeqID_42750
MNVVEGVSTVQGRDSGFGVEQGTTRSSCCVQRSSGGVPRMANGTGSGDGHGCSGDEGHGGRLYGGARQENMRESEEQAKSRGVNGQRLVGLRSLGTACSWLVRGVGFRSGSACRGGIGAVGGSVGFEGHAAGRGRGLLGLALVPGGAVSIGSCGTRPRPASGLASCAWARCFRPAGQHPVKALPRSRPSVSSRDCRRRLPRDNHSPHDPCCTVFRFTNECGGISATQIQREGRTSHQLPAPGGHLARAYFAQRPAMCQGPYPIPDKFLNKIAPATHACSAPKGSFILIILRYLKLRGTNSTTSIEVLPVFGTIMFCEDFHRGLTAIRSRRPDVLRQGHHDIRRQLVDLDLESPQDLHHESMRRQTKASGEKSLKNDQLPFWLGDLLHSQDTPHSAAKISKLLHILHADRGHPRDAKLHGITRMQLLRHHVAQCILGRCAGRRCIGSRRGRGRHGYVPSATAGGLLHAGQISDEQEQGGQASDQTVSRGG

SEQ ID NO: 86126 - protein, 141 aa, Zea mays
  Coding DNA Sequence Number=SeqID_42751
MVGIEPRGMGASGVGGGASRPAGECPWKRCCTVGQGGGALALLGGSNGSLDGGDGGDERGFTGENVRKLVRSPRPSMHDENVRKLCFVPALICNWMILLHSLKLLLNVAWETTSLMGFWNSDHTSTSRTPLEPQEVTHSPI

SEQ ID NO: 86127 - protein, 134 aa, Zea mays
  Coding DNA Sequence Number=SeqID_42752
  Subcellular localization annotation: CTP_CleavageSite=66; ConfidenceScore=5.50e-01
MWPGQAPSTSHPLVLAPALLTTPPTNGMPPYGVPPLTPPQLLLSGQSTMTPWSPFAAGWDPTAFASASAYSTMALAPPPSDWVIDSGASVFPGPFDLNDVLVAPHITHNLLSVHLFTTNNFYSIEFDPTGFSVL

SEQ ID NO: 86128 - protein, 170 aa, Zea mays
  Coding DNA Sequence Number=SeqID_42753
  Gene Ontology: Mol. function=hydrolase activity, hydrolyzing O -glycosyl compounds; Biological process=carbohydrate metabolic process
  Homolog annotation: Hit_ID=Q3MV21; Match level="QueryCoverage=59%, HitCoverage=15%, E-value=7e-09, Identity=37%"; Hit description =Fructan exohydrolase
  Subcellular localization annotation: CTP_CleavageSite=35; ConfidenceScore=5.50e-01
MPFTFGSNSIVLHQGLNSLFIFKSVSFSAITPKLSCSHLRRYVNLRILWASPTVDRLQERLRKSKCLGLEEAAKNKGFDLGNVDAMQTDMEVVFEVLKSLEDVEELDPEWLHDPHKLHTCVEKDTSLSDSCGVGPFGLVVMAPEGMQSRSRSPYSSGSDQHLSFSIYASL

SEQ ID NO: 86129 - protein, 297 aa, Zea mays
  Coding DNA Sequence Number=SeqID_42754
  Homolog annotation: Hit_ID=A7PYF8; Match level="QueryCoverage=59%, HitCoverage=49%, E-value=3e-28, Identity=40%"; Hit description =Chromosome chr15 scaffold_37, whole genome shotgun sequence
MASLPCSQIKLSKVLVRRKFHESGQTNLPRPLHWKPLRPGRFENLVLQCTKNLSWETSLPYASAEDDASIIKGTGVVEPIDTEEAPQIPILQSDEDVVEVKNEPSWHLKAFKLAMWLVGPSILLVTGIVPTLWLPLSLVFHGPNIAGLLSLVGLDFIFNMGAMLFFLMADACSRQENSIFDLKRSALDDLHTETTSSKKTSTFNVDVSACRNGPGHKGPIWFSDGRSEGKAEGGGEDGRTGGGGERGEDAGLPVDGWRDGAREGGGLPAGCRVRCDRERMWGGCGGAAEPCGCERLQ

SEQ ID NO: 86130 - protein, 213 aa, Zea mays
  Coding DNA Sequence Number=SeqID_42755
MPIVGGSCLPRIRFRRRLVVVFVLTGQDACFGAGPTIPPAYVVVGFSALMSIGGRRGDYGGSAEVSRLQAELRRRTAIWVVDGDRINELRRDVRHLRDQLADRDLELDWVVQSCSLAWDKEQKAQARVAELNLTVEELQTYCNTLHEEVHVLYSQLHPNEPTNPIESEAGPSHVAGHALGGELDLFQPPPMRLVDKSSPTPDDEAAKSNGKQD

SEQ ID NO: 86131 - protein, 79 aa, Zea mays
  Coding DNA Sequence Number=SeqID_42756
  Gene Ontology: Mol. function=nucleic acid binding; Cellular component= cytoplasm; Biological process=multicellular organismal development
  Homolog annotation: Hit_ID=Q6Z4F1; Match level="QueryCoverage=70%, HitCoverage=5%, E-value=2e-22, Identity=80%"; Hit description =Putative leaf development protein Argonaute
MSGQGVASKAWRGDGLSQPRGEGTVVDNNICHPTEFDFFLCSHAGAKGTSRPTHYHVLRDDNKFTADALQSLTYNLCYM

SEQ ID NO: 86132 - protein, 99 aa, Zea mays
  Coding DNA Sequence Number=SeqID_42757
MACPLDKDDKGQVTPNTTAIQFVRTHNINLQPLSTEVSQKLLKTTGKGYLQQAALGGAQVQAYHPSILSECLTVNLGKSVEDQVPKEPITFLYVCHIKA

SEQ ID NO: 86133 - protein, 112 aa, Zea mays
  Coding DNA Sequence Number=SeqID_42758
  Subcellular localization annotation: CTP_CleavageSite=32; ConfidenceScore=5.25e-01
MARAKRVAARLISGGGSRGGAGSSRASGGRLLAATREGGLRSPSRRASQQHHHPSTHPSAPAPREEPATSSVDKASRGREVAFRGETAMGRFGRHEAAAAAARYCEESESSR

SEQ ID NO: 86134 - protein, 225 aa, Zea mays
  Coding DNA Sequence Number=SeqID_42759
  Gene Ontology: Mol. function=structural molecule activity; Cellular component=cytoskeleton; Biological process=multicellular organismal development
  Homolog annotation: Hit_ID=A2X6S3; Match level="QueryCoverage=84%, HitCoverage=37%, E-value=3e-55, Identity=59%"; Hit description=Actin- related protein 3
  Pfam annotation: Domain name=Actin; Domain location=2-214; Score= -237.0; E_value=0.064; Accession=PF00022.10; Description=Actin
  Subcellular localization annotation: CTP_CleavageSite=59; ConfidenceScore=5.11e-01
MGFAGNVEPCFISPTVVAVNESFSGSAQPAARGTPARGNWLAQHSAGVMADLEALARSRASSSHNLSYPIRKGQVGAPAVYCRVQLLVFFFATLLTIDLGWGELFQVENWDTMERFWQQCIFNYLSCDLEDHYFLLTESPLTAPETREYTGEIMFKTFNVPSLYIAVQPVLALAAGYTTTKPQPPNLTVGWRRLLDGAPDSPVHTGQSGAPATSLLPLDSDRWSF

SEQ ID NO: 86135 - protein, 67 aa, Zea mays
  Coding DNA Sequence Number=SeqID_42760
MAHRTDRCTPDMSGFPATSSEQLEIDRWSSDFWARLDVRWRLGTQGCSPPTRKTDDPQRAITFGDAN

SEQ ID NO: 86136 - protein, 284 aa, Zea mays
  Coding DNA Sequence Number=SeqID_42761
  Gene Ontology: Mol. function=molecular_function; Cellular component =cytoplasm; Biological process=phagocytosis, engulfment
  Homolog annotation: Hit_ID=A7Q8N8; Match level="QueryCoverage=91%, HitCoverage=18%, E-value=5e-84, Identity=56%"; Hit description =Chromosome chr5 scaffold_64, whole genome shotgun sequence
  Pfam annotation: Domain name=WD40; Domain location=115-198; Score =11.6; E_value=1.2; Accession=PF00400.23; Description=WD domain, G -beta repeat
  Pfam annotation: Domain name=WD40; Domain location=4-42; Score=36.0; E_value=1.3e-07; Accession=PF00400.23; Description=WD domain, G-beta repeat
  Pfam annotation: Domain name=WD40; Domain location=46-87; Score=47.4; E_value=5.1e-11; Accession=PF00400.23; Description=WD domain, G-beta repeat
  Pfam module annotation: Pfam domain module=WD40::WD40::WD40; Domain location=115-198::4-42::46-87
METAFCLASCRGHEGDITDLAVSSNNSVVASSSNDFIIRVWRMPDGMPVSVLKGHTGAVTAIAFSPRPGAAFQLLSSSDDGTCRIWDARYSQQPPRLYTPKPPDVAPGKSGDASSSAAQVQPTNHQILCCAFNANGTVFVTGSSDTYARFSGCAVASRSFSSDSSHTSKEENSLKLRNSWFTHNIVTCSRDGSAIIWVPRSRRSHGKIGRWTRAYHLKVPPPPMAPQPPRGGPRQRYQPTPRGVNMIVWSLDNRFVLAAIMGTFGLLIHMFSVIHCNHIHILLE

SEQ ID NO: 86137 - protein, 172 aa, Zea mays
  Coding DNA Sequence Number=SeqID_42762
  Homolog annotation: Hit_ID=A3AH64; Match level="QueryCoverage=86%, HitCoverage=6%, E-value=4e-37, Identity=57%"; Hit description =Putative uncharacterized protein
MSAGYDGKTIIWDIWEGKPVQIYETGQFKLVDGKFSPDGTSLILSDEVGRVFIIGTGQGESQKDAKYDQIGLTRSKLVRCLCGMQPLCLLLGGNLNHITAHPRVARTDLDPPENHDKFKFFLGDYRPLIRDTNGSVIDQTPLHSQSRRREAKAATEGNVEAETNFKHDAFKE

SEQ ID NO: 86138 - protein, 165 aa, Zea mays
  Coding DNA Sequence Number=SeqID_42763
MAPKRATSKADEAAKAALLAEKKGKALVDTTHQEACEDDALSKRQRNEQPTPEGNLRTCSSGGQPQLPPGFAPPEGANATEDGEVIGVSAEEQLQLRALRIKNRNLQKQKEILEAKRQRVSAQAKVRQMIRDEEQKAQELEQEIALMQSEGQLGLQHGPPLQQRA

SEQ ID NO: 86139 - protein, 742 aa, Zea mays
  Coding DNA Sequence Number=SeqID_42764
  Gene Ontology: Mol. function=transcription factor activity; Cellular component=nucleus; Biological process=regulation of transcription, DNA-dependent
  Homolog annotation: Hit_ID=Q7F803; Match level="QueryCoverage=78%, HitCoverage=87%, E-value=0.0, Identity=70%"; Hit description=Similar to Arabidopsis thaliana chromosome V P1 MJJ3
  Pfam annotation: Domain name=C1_3; Domain location=107-138; Score =7.6; E_value=0.068; Accession=PF07649.3; Description=C1-like domain
  Pfam annotation: Domain name=zf-NF-X1; Domain location=211-229; Score= 22.4; E_value=0.0017; Accession=PF01422.8; Description=NF-X1 type zinc finger
  Pfam annotation: Domain name=zf-NF-X1; Domain location=264-283; Score= 20.8; E_value=0.0053; Accession=PF01422.8; Description=NF-X1 type zinc finger
  Pfam annotation: Domain name=zf-NF-X1; Domain location=317-336; Score= 24.2; E_value=0.0005; Accession=PF01422.8; Description=NF-X1 type zinc finger
  Pfam annotation: Domain name=zf-NF-X1; Domain location=371-391; Score= 23.1; E_value=0.001; Accession=PF01422.8; Description=NF-X1 type zinc finger
  Pfam annotation: Domain name=zf-NF-X1; Domain location=435-450; Score= 3.0; E_value=3.5; Accession=PF01422.8; Description=NF-X1 type zinc finger
  Pfam annotation: Domain name=zf-NF-X1; Domain location=458-470; Score= 2.1; E_value=4.4; Accession=PF01422.8; Description=NF-X1 type zinc finger
  Pfam module annotation: Pfam domain module=C1_3::zf-NF-X1::zf-NF -X1::zf-NF-X1::zf-NF-X1::zf-NF-X1::zf-NF-X1; Domain location=107 -138::211-229::264-283::317-336::371-391::435-450::458-470
  Subcellular localization annotation: CTP_CleavageSite=74; ConfidenceScore=5.79e-01
MPSSYAAAAAGSSSRKPNRTSSAAAPTLRPPAPSPSPAPAPLAVNPSVISDSDPSSYSSSSADEADFAASDSATASVVSAYLSVAGEGADLSKVGIFLSSAARRRSPPCLICFDPIRPSDPVWSCSSSCFAILHLPCIQSWAHQSASGPAVPCPTWGCPKCRFAYPKSEIPSSYVCFCSKTIDPAPDPWILPHSCGDVCGRRLDANLDSGCEHTCLLLCHPGPCPPCPAVVPKATCFCGVHREPRRCAHQRYSCGGKCNKRLSCGLHHCPVDCHDGPCPPCAVLGSHKCECGEILEEKLCSERIFQCKRECGGMLDCGKHKCERGCHGGKCGECPLRGRRTCPCGKKNYPRLECDAEAATCGSTCEKVLGCGRHRCPERCHRGPCDGTCRLVVTKACRCGGLKKEVPCGTEKNQKPPKCSKKCNIPRLCRHKLECRPHKCHYGACPPCKLICGEEFPCGHTCKERCHGPISPPNSEFTLKPTKKKMGKHIECTPGTPCPPCKEVVLVSCFAQHLGQERTVNTRCACSTLKQEWRCQDVLKEYRKSGRDPKEVPKSQFGVGLLACGEDCKKKLKAPDSELHLRKSQENKIPAVEVVNAPKRRKRRDRGQEVKISKFQEVKTFVLRALLIILLSIIVAAGLYLLWKGIFWLSDWMNEMEEQRASQRSNTIVCKYRLYEKFDDNFTLNEMCDTRKSMTHYMLMSLHNEGYWSRYKMVVQGSNMTLLEVLLENGYRKSFYGVRVNE

SEQ ID NO: 86140 - protein, 977 aa, Zea mays
  Coding DNA Sequence Number=SeqID_42765
  Pfam annotation: Domain name=Transposase_28; Domain location=26-179; Score=-45.1; E_value=0.0026; Accession=PF04195.3; Description =Putative gypsy type transposon
MSSSSSSAADTPPAGASSEETLSNVAAEELRTGDIVEFGVSRMSSVRVQDMQQLGYFGGGVARVPGVEEVLEPEGELVVFEAFFAAGLRLPTHRFVGEVLRIFDVQVHQLTPNAVKRKIGNKIAQFGSCTFTPKTGKISMEVVELVPCARNKWGNWWEFWFYVVEGTVEDHLGLPVAVMCSHYYSAYLQFEVAEEDEDEGALRCAARMSSGRDLVEEFVGYGALGEVCPRQMPSRGGMLVRSLAFALDLHGRDPAAFVREAEDGAVRIVGRYVPKTEAQRSWDIRGINDRLNRVFELNCLSYGVDEDMRGPWGRMSSPELRESSARMLEVTGGRWPKNVPIPRAAGEDFFTSRMARDLRVFPYGRNIAVVVSAVMNKDRQEAAQKRRAVIRIPEARPKRARGTAKATAPGGSQPTLAEKPVALGPTRELPSPGKRIADFGTNISVDDYLVGSGEGQLVVVPPAVATTVSVAVPRVKGSALSAGGEILAVAAVKDEAGTVSRRLREASQQLSQAADFTDRVASGALTADVSAEVEKLRAQHADAVREKSAADSKCRKLAEKVAALEGERTDLRRQLVEERREANQAIAKAQAAQAEAKLARVEGSLASQRVEEWEVRFNALQARMERAEASTRSEVERTRKQLVDSYRELGARTADFEVPDREAGLRFLEWPQEELLALPTIMERFMSFASLITCEGALNALSREGCSHYEVFNRSDEDFGREIYKVEDPVMARAEDVEDFGPLNRAQPEAEANPVVAEAEVDPAPPPETGEGSLAAPAAAVSGGGSSPATAPMVENPPKAATEPAAEIPWWRLGLHRWLSGCGDFGPAHATAIANFMAASNVVAGNESDESTFKFSDFDDSGSSVEWTEESSNEDLNYFAALDVAAAEASPHVTDAEVLPGSSAGRRRRRAVAKRRVSEVDGGRLRVGRAGKRELLSSPVGTSVGEGELRSLFEGEELRIMLFNYREMVIIPKVEPM

SEQ ID NO: 86141 - protein, 291 aa, Zea mays
  Coding DNA Sequence Number=SeqID_42766
MAERYQLLRSYVPPTTRRKDCGRPPSGGLEGGKTGCIREREDMAAFQGDQRAKGWIAMQSACNRAKWARPFDSNALSMEVQAGESSGHVVSQAYVPSRGSERTLSHGVKTTRPCSVPRTARARTTAASRTTRPVTLTLRRDRQRLRQEKQATLRLRHNDRVEKGNRPRAFLLIKGSKAGPSKGFNGRLRALGFCAHYWSEVRWPAPRKGSTAASGHSGSAPTTDQGGNDLVTESHQREASSPQTPSKGDRVRQITRSAACAAPTAEPLDRVRLTAAKSGLRRHRKLRFARP

SEQ ID NO: 86142 - protein, 164 aa, Zea mays
  Coding DNA Sequence Number=SeqID_42767
  Pfam annotation: Domain name=Transposase_28; Domain location=1-158; Score=-60.8; E_value=0.042; Accession=PF04195.3; Description =Putative gypsy type transposon
MALLDPLECFQSEVALNSVRNLLRRGVSAFARRIRVGATPLGDLAAEEFVLSVSNFSYGLALPISPFFVLLLEELGLQPQHFTLHFILQAAIFAYLYEMSVGATHHLTYRIWPGKPSRVPGPPESQFQILGHHRRVVERVGLRYGTRLSGYTVPDHPRGRASIL

SEQ ID NO: 86143 - protein, 41 aa, Zea mays
  Coding DNA Sequence Number=SeqID_42768
MGMEVTTSQNELAWLAQSSRAALSQGKPLQASRLASLEFFF

SEQ ID NO: 86144 - protein, 60 aa, Zea mays
  Coding DNA Sequence Number=SeqID_42769
  Gene Ontology: Mol. function=RNA-directed DNA polymerase activity; Biological process=RNA-dependent DNA replication
  Homolog annotation: Hit_ID=Q94BM2; Match level="QueryCoverage=68%, HitCoverage=2%, E-value=5e-09, Identity=73%"; Hit description=Gag -pol polyprotein
MAQGHISLSKGHKLVTFEPDLKPYAGEDEELPSRMTSIQEGEDDEDINPNKGMATPTEPA

SEQ ID NO: 86145 - protein, 50 aa, Zea mays
  Coding DNA Sequence Number=SeqID_42770
MDTSKSLNKERRGRVRESRLLAKNKDGRRPNLVAACNPALWEYSGDKLGV

SEQ ID NO: 86146 - protein, 141 aa, Zea mays
  Coding DNA Sequence Number=SeqID_42771
MAVPCPSATAPVPRSRLAACAGGGDDVRTLWPDSTPSTALRYDYSTTTVHVFTVPASQLQPRFPILSVDRYSDPADQRTNTRDKEAVAVPRDLYCNVTLGRAGRRPALCRRDRVFVQTHAFGGGRRQIPCTAGGLFRNPEF

SEQ ID NO: 86147 - protein, 154 aa, Zea mays
  Coding DNA Sequence Number=SeqID_42772
  Gene Ontology: Mol. function=kinase activity; Cellular component =ornithine carbamoyltransferase complex; Biological process=amino acid metabolic process
  Homolog annotation: Hit_ID=Q6QP54; Match level="QueryCoverage=64%, HitCoverage=29%, E-value=1e-10, Identity=49%"; Hit description =Putative kinase
MEHRPGSERLLETAHLELDGKLFVNTQWVERVGEREGGKGARRPETGVREVGIPRPSCSSRAQVGVMMALPVDVAGLRPRLGDVEAPPKPRSSLSSMAEAESEPLGWARRRSFGRGQGGVRALGSGEAEFVVFRDLARVRALGRAERSSPSSGT

SEQ ID NO: 86148 - protein, 369 aa, Zea mays
  Coding DNA Sequence Number=SeqID_42773
MGAEHGVSGELQAGPTRSEAAVEPFGGPAFEPLISREARSLVPSRGRILFGHPARRLRDAWAWASMLACRESEKRVHLARLHAACMAARLFHPLVRAKAEGHLNATPWELVPFSHRSASRIFISEPGCTPPRRRSPETVTTSSRVGRSKPGCDLGPTLSFKDVHHPHWGGCRAEPELYLPRGFAGHPLLRRSRERALAGPMGGPDFDNAGLVDGGRRQPQRVELVGLAPGGPFCRKAAAAPYSPVDYLNRFTKHESPRIKVTSEPGCPLAGPTPESISRGLGSGWRPWKMVGRGPRGNRPSRLLGPDSQRSPWQRLSERDDDVVLQSGDPWTASPSEARSDLTEGVVDDEGVTAPFQRQDPSLQDQSVL

SEQ ID NO: 86149 - protein, 123 aa, Zea mays
  Coding DNA Sequence Number=SeqID_42774
  Gene Ontology: Mol. function=kinase activity; Cellular component =ornithine carbamoyltransferase complex; Biological process=amino acid metabolic process
  Homolog annotation: Hit_ID=Q6QP54; Match level="QueryCoverage=80%, HitCoverage=29%, E-value=1e-11, Identity=50%"; Hit description =Putative kinase
MGEREGGKGARRPETGVREVGIPRPSCSSRAQVGVMMALPVDVAGLRPRLGDVEAPPKPRSSLSSMAEAESEPLGRARRRSFGRGQGGVRALGSGEAEFVVFRDLARVRALGRAERSSPSSGT

SEQ ID NO: 86150 - protein, 92 aa, Zea mays
  Coding DNA Sequence Number=SeqID_42775
MKAKSHQQPNQGGTCKNYATSKAEYTNIQLDLPVTALVPTITGMGDHVSGRVRRAISGQVHSDHASPWIRVHRPSSFCYQSGYNQFLTSREC

SEQ ID NO: 86151 - protein, 88 aa, Zea mays
  Coding DNA Sequence Number=SeqID_42776
MVARRGRVRGVSWGSDELDDGGDWSEEDKSETQGTPKRFLRRAQNEFERKRSEATMDLNSRIFKWKSNLRRKASSMSSLLPTHHNKIV

SEQ ID NO: 86152 - protein, 139 aa, Zea mays
  Coding DNA Sequence Number=SeqID_42777
  Subcellular localization annotation: CTP_CleavageSite=37; ConfidenceScore=5.57e-01
MALAVTAAASLQLVLAVTSPWSSHTRGSLGVSPMAASCSALTPVDLELQREVFSAVGSPQSKIGASRDQAKAFRGGGSVWEFSATLQFLAVDLRSAADPLSPCMDALRAETAEEPVTEDPGEQQVEVAEQELIEGKLCP

SEQ ID NO: 86153 - protein, 154 aa, Zea mays
  Coding DNA Sequence Number=SeqID_42778
MANSSDGGGGSNGEESEREKGASSGREEGQRSSAGIYREKEGRGEEVGRERGDRVLQDAIDGGGINGERVGRGEMVALKLHYAEETNDCGTSRGVARTRSLGAARRLAARHRARGGVLARGSTGVGARRPGGCAVGEGRGKKRGAGWGPRLMVL

SEQ ID NO: 86154 - protein, 113 aa, Zea mays
  Coding DNA Sequence Number=SeqID_42779
MDAQYDVTQEWLDRVKIARKGLRGTKRSWYSNTGSAGFQAGSAGRIRVERDPALCGRLNEEVGHLGDVDPRAIDLAMRIAERMFLKMKEDEAKNKIEEENDRWRPNNESTSSQ

SEQ ID NO: 86155 - protein, 306 aa, Zea mays
  Coding DNA Sequence Number=SeqID_42780
MDEGTPLGGLESEDDSKPSNGLHAVLSSLWGRGYLAHRLRIRFPEDEGVRRPKQPGQMRRLTGPAGRGSGHGLTTLGKSLTVKEGSALPRQSPTLPQGLEGGNPLCVKNFLGKSLSVRTSFALFDYFDSGILKTMEYTMIFRAFSTVSITESYGRVRVHDQTSVGGAAAPSASTPPSAESDPASDDDTGEGSPPRRKMSAPRLGHRRQGLLQEPGPSRRLDRPLCNLSQLSPEDTARLIASAARLQSWSRQCTTQPGSGRRCYAFSVWEVPCSRADEVSSPTDSASVHADTAASGSSSSHSGRGFL

SEQ ID NO: 86156 - protein, 52 aa, Zea mays
  Coding DNA Sequence Number=SeqID_42781
MAYQKLPVWVHIYMPSALQLGGPHMSLTIAILAKGRYFLHDLRLKIIISQGR

SEQ ID NO: 86157 - protein, 254 aa, Zea mays
  Coding DNA Sequence Number=SeqID_42782
  Subcellular localization annotation: CTP_CleavageSite=72; ConfidenceScore=5.20e-01
MVTQDGDHQFDGGEKQAGLRPLPRPQLQGSSSSLLGRRARRAGACLRVGWRPASSSGLWGWKPSSSSVEEASSSHAGEGELLLPGCSIPFSVRATVASRTGGSHNTSYAARADGSEGLPVRFGAAGARWCGVGGQVDAAVGAEVVAAGESFSVDETVSATRGPTSGSLALMCGSRPSSGDANESLPAVASALGPSLLLQRSPASHPEFVVPQALRCGGCSYPREWNRSSVCNGILSAGVCSLWLSGPKHLGILA

SEQ ID NO: 86158 - protein, 445 aa, Zea mays
  Coding DNA Sequence Number=SeqID_42783
  Gene Ontology: Mol. function=hydrolase activity; Cellular component =nucleus; Biological process=metabolic process
  Homolog annotation: Hit_ID=Q6ZDG3; Match level="QueryCoverage=53%, HitCoverage=73%, E-value=4e-82, Identity=66%"; Hit description =Putative PrMC3
  Pfam annotation: Domain name=Abhydrolase_3; Domain location=81-362; Score=73.7; E_value=6e-19; Accession=PF07859.4; Description =alphabeta hydrolase fold
MATAPAAPPPASADDEIIYESMPCIRVYKDRVERYFGTEFVAASTNDSTGVASRDVVISPNVSARLYLPRLDDGNAKLPIFVYYHGGGFCIGSAFNPIFHDYFNCLVALADILVVSVEYRLAPEHPVPAAYADSWEALAWVISHLGPAGDGARDPWIAGHADFSRLFLGGESAGSNIAHHMAMRAAAEGLAHGGPDPGLVMIHPYFLGHGQGALRRPQPGGAREPGVPVALHVGLPEPRHHLGSPLPDGVPPGSEIQAPSAIFRRLCVRADRPAPGRGPSGRQAEVPAAHQAADRPAPGRGQSALAQRAPPRLAPGRGPSGPCARTVRPCVEGTATVLVECLALRKGVNILLATPLGTTYLSSSNRPSMAGSRDSFDISPSNIIEPTWETLPADEQLQFEEHKERMIQEAKAKFLANFKVDRNNKVVRHRATDPASLQPTPDIPN

SEQ ID NO: 86159 - protein, 76 aa, Zea mays
  Coding DNA Sequence Number=SeqID_42784
MRKEANKSFNDKSLNKKIEDLQCPTLPRPDGPKSQLARGLPQARNTVMTRLRPLLDKQHISYSTDGILGDDLEYDM

SEQ ID NO: 86160 - protein, 115 aa, Zea mays
  Coding DNA Sequence Number=SeqID_42785
MAALVTGSDDGARDRRNSVIGCASCDCASHHFGETPMMVREGESLGSLRALQHPVASSACARTERAEAQGVPTAAGQSSLSTPRSVTVHSRRRVCIVPRADWLAVDEVTGLCGYM

SEQ ID NO: 86161 - protein, 319 aa, Zea mays
  Coding DNA Sequence Number=SeqID_42786
  Gene Ontology: Mol. function=binding
  Homolog annotation: Hit_ID=A2Y5D9; Match level="QueryCoverage=99%, HitCoverage=100%, E-value=1e-59, Identity=62%"; Hit description =Putative uncharacterized protein
  Subcellular localization annotation: CTP_CleavageSite=41; ConfidenceScore=5.04e-01
MAMSWIRSVVRRALIAPKPRGSRQFTVTAAGGGATQTERVAAEMVRYALGGAVHRSSPVEDVKTQWKSSKQPNKLPLLQFLETVDRLLFEHPMQIYYNPTLPYVFFGIGVAAWEALMGLHMEAGQEMSYLISPNDSVDLSIKYDSKWSDQDHLKFRVNAVRGLVTLLNGETESAAQLFDGWCRDFSRGENQTGANHPKVGIILTCVARMYKLKAKSEGSTSIMVQEGLYRKALEVLKAPAINSEGTSKQVDWRDIISLARGEYAELLLIQSNRKAEGERMKQWAEDAWRNRRLTLAQALEFSEPSKPTVVVDTRIGRVV

SEQ ID NO: 86162 - protein, 132 aa, Zea mays
  Coding DNA Sequence Number=SeqID_42787
MAHFLSSLINLPLKIDETEHLFFLLLDLLMNGFKVPDFLVQLLLLSGCNAAPGPDDFFGEMAKKLPVTVYYTGKHVSRVFENLWKTKAPSKNLLRRYVLNFNSIHGYQVPQGPPHKESESLASLYNKENWRE

SEQ ID NO: 86163 - protein, 75 aa, Zea mays
  Coding DNA Sequence Number=SeqID_42788
  Gene Ontology: Mol. function=unfolded protein binding; Cellular component=cytoplasm; Biological process=cellular protein metabolic process
  Homolog annotation: Hit_ID=Q75HJ3; Match level="QueryCoverage=70%, HitCoverage=9%, E-value=1e-14, Identity=77%"; Hit description =Putative TCP-1/cpn60 chaperonin family protein
MVGLVSMVGYGIQSMLKEGHDHLSWLKEAMLKNIDAYQELSVITRTFLGPNGVIIHPARQRTHQEECETLFGFGN

SEQ ID NO: 86164 - protein, 41 aa, Zea mays
  Coding DNA Sequence Number=SeqID_42789
MDVLMIRYLGEYQQGLGKGQGISLRGEVIRVSRVITNGAVV

SEQ ID NO: 86165 - protein, 246 aa, Zea mays
  Coding DNA Sequence Number=SeqID_42790
MTFDYIDNRTLKTTRGTLSGKADRAEELLRLRDTDTSLITFREKNEQPPHQRACGITNSRWLASDRSTGSDNDICLGRLNSSSDDLRADAAVKGPSPTSPHEGRGQAIKAKESEVQPQVAPTVSSTETTSSGCHHLSTDDSGHLPTDTAPANGSRPSLHRQIPTHVLPDGPASTSVQRRRAGVRTRQSKNTNAAHAAYDVLYGPPVRTARQPPVRWTDSNAQTKRQEAASEAAPEPAEPASQAHCS

SEQ ID NO: 86166 - protein, 409 aa, Zea mays
  Coding DNA Sequence Number=SeqID_42791
  Subcellular localization annotation: CTP_CleavageSite=15; ConfidenceScore=5.35e-01
MKPKGCTTVVRSHASCVAVRPSARWFRQGWGNAYNRGAVTCFARGGLASSVSAVGGARPRGGWRSSDIARLHGFSSHSPAAVPRRRSPRMMTVGLVVGRSKPGCVLCPAFSFKDVHHPRCGRGRVEPGFYLPHGPASRFFLQHSGEKALTDLAEGANFDNAGPVGRKRRQLQCAWLAGSAGSGAASDAASCRLVWALLSVHRTGGCRAVRTGGPYKTSYAAWAAFVFLDCLVLTPARRLCTEVDAGPSGRTLGRLPFAGAVSVGRWPLSSVLRWWQPEEVVSVDETVGATCGWTSDSLALMACPRPSCGDVGEGPFTAASALRSSLLLFSRPRQMSLSLPVERSLASHLEFVIPQALCHDLRPLCDELKPEAAVSAWTEAESARKEASSAREHVASQAEEVQQRRLELG

SEQ ID NO: 86167 - protein, 213 aa, Zea mays
  Coding DNA Sequence Number=SeqID_42792
  Homolog annotation: Hit_ID=Q7XIR4; Match level="QueryCoverage=92%, HitCoverage=29%, E-value=5e-76, Identity=74%"; Hit description =Membrane-associated salt-inducible protein-like
  Pfam annotation: Domain name=PPR; Domain location=145-179; Score =22.3; E_value=0.0018; Accession=PF01535.11; Description=PPR repeat
  Subcellular localization annotation: CTP_CleavageSite=42; ConfidenceScore=5.02e-01
MPGAKVAQAPGGQARRVRYSGGSGDNATPVASGRLSKLFWPARMHVADVIGRVLERGQSLDSVELELERLHVDLDPFVVNRVLRSISDSEMAVRFYWWAESRPGFDHTQFAIAYVVSLLFVDSNFFLLSEFLERVRSQGVALHRSLYRILLSGYVRAGKFDSVIHTFDEMVTSGCREFGVDYNRFIGVLVKNCCFDLVEKYYSVALDKGCMMP

SEQ ID NO: 86168 - protein, 376 aa, Zea mays
  Coding DNA Sequence Number=SeqID_42793
  Gene Ontology: Mol. function=binding; Cellular component=nuclear pore; Biological process=intracellular protein transport
  Homolog annotation: Hit_ID=A7PRP5; Match level="QueryCoverage=65%, HitCoverage=55%, E-value=5e-56, Identity=41%"; Hit description =Chromosome chr14 scaffold_27, whole genome shotgun sequence
  Pfam annotation: Domain name=Arm; Domain location=137-177; Score =26.1; E_value=0.00013; Accession=PF00514.14; Description =Armadillobeta-catenin-like repeat
  Pfam annotation: Domain name=Arm; Domain location=179-220; Score =20.3; E_value=0.007; Accession=PF00514.14; Description=Armadillobeta- catenin-like repeat
  Pfam annotation: Domain name=Arm; Domain location=222-262; Score =40.0; E_value=8.3e-09; Accession=PF00514.14; Description =Armadillobeta-catenin-like repeat
  Pfam annotation: Domain name=Arm; Domain location=265-304; Score=2.2; E_value=5.8; Accession=PF00514.14; Description=Armadillobeta-catenin -like repeat
  Pfam annotation: Domain name=Arm; Domain location=60-95; Score=14.9; E_value=0.14; Accession=PF00514.14; Description=Armadillobeta -catenin-like repeat
  Pfam annotation: Domain name=Arm; Domain location=96-135; Score=21.1; E_value=0.0041; Accession=PF00514.14; Description=Armadillobeta -catenin-like repeat
  Pfam module annotation: Pfam domain module=Arm::Arm::Arm::Arm::Arm::Ar m; Domain location=137-177::179-220::222-262::265-304::60-95::96-135
MLLSQSSICREELNCDKNHPSGCPAQICRVSFKTWASPAPINLVYFSQMEAAWVLTNIAASDYTLLVAECGAVPREGMKIPVLRTAMWALSNLCFGKLPAEVQVKPILEIISQLIHSADEKILADACWTVYYICGDKGDAVQDVLDAGVCPQLVNLLMHASANVLLPVIMALARISAGDDKQVEVLIENDILNCLGQLVARNYPKNIKKQACLIVSNIAAGSKDQIQAVIDADIITSLIVLLRTSEPDVKKEAAWAISTAASGGSSDQIQYLVSRGCLEPLCSVLTHNDPDLVRPGKKGRGIRDETHTPSFILRVRRSGETGGSAGRGQRQDLRASHEAATELLGGGREESLVPFLSGTGILYDTYYDQVDVERNV

SEQ ID NO: 86169 - protein, 226 aa, Zea mays
  Coding DNA Sequence Number=SeqID_42794
  Gene Ontology: Mol. function=transferase activity, transferring hexosyl groups; Biological process=carbohydrate biosynthetic process
  Homolog annotation: Hit_ID=A4PBN5; Match level="QueryCoverage=87%, HitCoverage=60%, E-value=3e-76, Identity=65%"; Hit description =Galactinol synthase
  Pfam annotation: Domain name=Glyco_transf_8; Domain location=4-190; Score=108.3; E_value=2.4e-29; Accession=PF01501.11; Description =Glycosyl transferase family 8
MRLQIPECVNSNGILFTIYRHRTQPFVEYERMVYLDADMQVYENIDHLFDLDKGKFHAVMDCFCEKTWSHTPQYKIGYCQQSPDRVAWPEQELDLPPQPPPLYFNAGMFVHEPSLRTARALLDALAATPPTPFAEQDFLNLFFRDAYAPLPPTYNLVLAMLWRHPDKVALHEVKVVHYCAAGAKPWRYTGKEPNMEREDVRALVAKWWDIFDDESLDYDKQQGAAP

SEQ ID NO: 86170 - protein, 258 aa, Zea mays
  Coding DNA Sequence Number=SeqID_42795
  Gene Ontology: Mol. function=protein dimerization activity; Cellular component=nucleus; Biological process=regulation of transcription, DNA-dependent
  Homolog annotation: Hit_ID=Q7X993; Match level="QueryCoverage=84%, HitCoverage=75%, E-value=3e-91, Identity=72%"; Hit description=BZIP transcription factor
MENGSGAVVPSNSSDRSDRSDKPLDQKAYVQQLESSKLKLAQLEQELQKARQQGIFISSSGDQTHAMSGNGALTFDIEYARWLEDQNKQINELRTAVNAHASDSDLRLIVDGIMAHYDEIFKVKGVAAKADVFHILSGMWKTPAERCFLWLGGFRPSELLKGMEALQQSLAETLAGSLGPAGSSGNVANYMGQMAMAMGKLGTLENFLRQADNLRQQTLHQMQRILTIRQASRALLAIHDYFSRLRALSSLWLARPRE

SEQ ID NO: 86171 - protein, 36 aa, Zea mays
  Coding DNA Sequence Number=SeqID_42796
  Gene Ontology: Cellular component=intracellular; Biological process =ER to Golgi vesicle-mediated transport
MDHKCNIFLNPLYLPGSRITSSHFDTKVRALARKYL

SEQ ID NO: 86172 - protein, 74 aa, Zea mays
  Coding DNA Sequence Number=SeqID_42797
MGRPKGATWQGKTPHPSKAGPPQKDIEPLYTSPEPSAAHASAGVPDSVEGSAYGADCGQRIDVPPLAPRHHWGP

SEQ ID NO: 86173 - protein, 117 aa, Zea mays
  Coding DNA Sequence Number=SeqID_42798
  Gene Ontology: Mol. function=transferase activity, transferring hexosyl groups; Biological process=carbohydrate biosynthetic process
  Homolog annotation: Hit_ID=Q40710; Match level="QueryCoverage=73%, HitCoverage=26%, E-value=7e-41, Identity=91%"; Hit description=WSI76 protein induced by water stress
MACMGHAADAYVCIQRRKTAGTAYVTFLAGDGDYWKGVVGLAKGLRRVRAAYPLVVAVLPDVPEEHRRSLRDQGCVVREVQPVYPPQSQTQFAMAYYVINYSKLRIWEVLGTCSQML

SEQ ID NO: 86174 - protein, 55 aa, Zea mays
  Coding DNA Sequence Number=SeqID_42799
  Gene Ontology: Mol. function=small conjugating protein ligase activity; Cellular component=nucleus; Biological process=regulation of protein metabolic process
  Homolog annotation: Hit_ID=Q8W2X7; Match level="QueryCoverage=92%, HitCoverage=31%, E-value=8e-21, Identity=84%"; Hit description =Ubiquitin carrier protein
MSGGIARGRLAEERKAWRKNHPHGFVARPESLTDGSVNLMVWNCTIPGKHGEVEK

SEQ ID NO: 86175 - protein, 97 aa, Zea mays
  Coding DNA Sequence Number=SeqID_42800
MEASVMAPIFSLRDLGTGVVPRLSPEGRGYKFGEDPREKPRSDTLPDHLGSGQWGVALIGQKGNHGSWVNCATSPECNETDISAVLTVKSGIRILFD

SEQ ID NO: 86176 - protein, 103 aa, Zea mays
  Coding DNA Sequence Number=SeqID_42801
MTMTKPMLYDIVGLISLCLMLGDIYVVETSLISMLFVVVLSCISLSGSRDKALELTKWCALFIVAPYVRSLCSMGSTPLRICQVKHEEYSIVRPISAAIAMGH

SEQ ID NO: 86177 - protein, 79 aa, Zea mays
  Coding DNA Sequence Number=SeqID_42802
MVDDPKGLPGVANQANMRRNDCAPRQDTKDVLNKFNIGEVEPLFTPMSMMMDLDGNEDGYSDGDFVECHLDHKSALSIC

SEQ ID NO: 86178 - protein, 265 aa, Zea mays
  Coding DNA Sequence Number=SeqID_42803
  Homolog annotation: Hit_ID=Q5Z9G5; Match level="QueryCoverage=30%, HitCoverage=33%, E-value=1e-11, Identity=44%"; Hit description =Putative uncharacterized protein P0655A07.24
  Subcellular localization annotation: CTP_CleavageSite=57; ConfidenceScore=5.06e-01
ASSFSPCNTEQQRLRGGSDHTDGLHGQSTGVRPSPATARSARPQPQRGCGLDVGVPKARSVPGGSSVARLGYCSDKCATAMAWCFLYLGDACFCIPMATHVGKGSSVHAEWLFATKREAPVGRGGVGGDGAVHGACGRGAAGRRGRPCGGADAAAPRVVRGGAGGLAVLCAYPFRVPARGVLPLAYVARAQGAPLGDAGSAAMEVALRDGVVPFRVDGEARTRWKVAGIIGVDQWTRLACQLRFFWPNGTVLPFRCISKSKFLFF

SEQ ID NO: 86179 - protein, 57 aa, Zea mays
  Coding DNA Sequence Number=SeqID_42804
MGDLVSGRVRGYVHCRVHSGFNDIMLKETKSRSNLGFLSHAGLPVGYAYYFLGLGFH

SEQ ID NO: 86180 - protein, 71 aa, Zea mays
  Coding DNA Sequence Number=SeqID_42805
  Subcellular localization annotation: CTP_CleavageSite=7; ConfidenceScore=5.18e-01
MARAWSRAAAGARGFAHGRALSVPLDVSSRRTRGSSLLPWFNGGFEHHSVRKYITTFIFGPSHDHKIYMTF

SEQ ID NO: 86181 - protein, 295 aa, Zea mays
  Coding DNA Sequence Number=SeqID_42806
  Gene Ontology: Mol. function=oxidoreductase activity; Cellular component=extracellular region; Biological process=response to oxidative stress
  Homolog annotation: Hit_ID=A2Z9R1; Match level="QueryCoverage=91%, HitCoverage=89%, E-value=1e-103, Identity=67%"; Hit description =Putative uncharacterized protein
  Pfam annotation: Domain name=peroxidase; Domain location=46-270; Score=329.6; E_value=5.5e-96; Accession=PF00141.14; Description =Peroxidase
MAVGKGGGLLVLVVVGLLLHGTRVADAQSLRVGYYSQTCGSAESIVADEVQKASYRDRGVLASLIRLHFHDCFVNGCDGSVLLEASDRQAEKNAKPNLSLRGFDVIERIKQRLEAACALTVSCADIVAFAARDSVKLDGTVSRASMTGDLPPPNQRNVDLLAQYFYRKGLTLDEMVLLSAAHTVGIAHCSSFDYRLTSDQDKGMDPAFRNSLRSQCQYNPSNYVPLDAGSQYAFDTGYFSNVLANRTVLDSDAALASPRTADKVKQWKNNPDWFKNSFAAAMVKMGSIRGSYPGK

SEQ ID NO: 86182 - protein, 42 aa, Zea mays
  Coding DNA Sequence Number=SeqID_42807
MATTTPEKRGGSWIRPRCPTEEEERPDSAVPPAVSVRHAGGE

SEQ ID NO: 86183 - protein, 144 aa, Zea mays
  Coding DNA Sequence Number=SeqID_42808
  Gene Ontology: Mol. function=sequence-specific DNA binding; Cellular component=nucleus; Biological process=regulation of transcription, DNA-dependent
  Homolog annotation: Hit_ID=A9J1V8; Match level="QueryCoverage=85%, HitCoverage=47%, E-value=3e-35, Identity=66%"; Hit description=MIKC -type MADS-box transcription factor WM1A
  Pfam annotation: Domain name=K-box; Domain location=33-144; Score =30.1; E_value=1.3e-06; Accession=PF01486.8; Description=K-box region
MALTDKNNIFTTLMTFLEKRRSLQKTIDRYRTYTRENVNNKTVQQDIQQVKADAVSLASRLEALEKTKRAERPSIHRLDMSCRMFLGENLEECSIEELHNLEVKLAKSLHVIRGKKTQLLEQQISKLKEKERTLLQDNKELRDK

SEQ ID NO: 86184 - protein, 49 aa, Zea mays
  Coding DNA Sequence Number=SeqID_42809
MSMNGVEFVIQILKKAAKLASEAEARRREAWARAQRGQLAFPRPRDAWG

SEQ ID NO: 86185 - protein, 280 aa, Zea mays
  Coding DNA Sequence Number=SeqID_42810
  Gene Ontology: Mol. function=transferase activity, transferring phosphorus-containing groups; Cellular component=chloroplast; Biological process=sulfate assimilation
  Homolog annotation: Hit_ID=A2XDM7; Match level="QueryCoverage=82%, HitCoverage=78%, E-value=3e-97, Identity=77%"; Hit description =Adenylyl-sulfate kinase
  Pfam annotation: Domain name=APS_kinase; Domain location=87-257; Score=292.7; E_value=7.2e-85; Accession=PF01583.11; Description =Adenylylsulphate kinase
MVKLPSGISQNPEGDVSDGAGWLFLYMRLSTCCICFTGRQPLPLTFVSWRSSVKEKPVMSNIGKSTNILWHNCLIGQSDRQKLLGQKGCVVWITGLSGSGRAGCQARAASRARARQYPCALEPVLFAGTRGHLTYVLDGDNLRHGLNRDLSFKAEDRAENIRRVGEVAKLFADAGVICIASLISPYRRDRDACRALLPHSNFIEVFIDLPLKICEARDPKGLYKLARTGKIKGFTGIDDPYEPPINGEIVIKMKDGECPSPKAMAKQVLCYLEENGYLQA

SEQ ID NO: 86186 - protein, 476 aa, Zea mays
  Coding DNA Sequence Number=SeqID_42811
  Gene Ontology: Mol. function=hydrolase activity, hydrolyzing O -glycosyl compounds; Cellular component=extracellular region; Biological process=carbohydrate metabolic process
  Homolog annotation: Hit_ID=Q10QC6; Match level="QueryCoverage=93%, HitCoverage=66%, E-value=1e-139, Identity=58%"; Hit description =Glycosyl hydrolase family 10 protein, expressed
  Pfam annotation: Domain name=CBM_4_9; Domain location=72-245; Score =16.2; E_value=0.00011; Accession=PF02018.8; Description=Carbohydrate binding domain
  Pfam annotation: Domain name=Glyco_hydro_10; Domain location=284-468; Score=-64.6; E_value=1.3e-08; Accession=PF00331.11; Description =Glycosyl hydrolase family 10
  Pfam module annotation: Pfam domain module=CBM_4_9::Glyco_hydro_10; Domain location=72-245::284-468
MTKAKLAFWLGWIALLQGCMVKSSLPYEYDYSASIEASPCVPYMTACAMHDNCTCPSTSRCLPEPLEPQYGGGVLRNADFSAGLRGWSAFGYGSIAESTSAAGNGFAVALNRTRPYQSVSQKVYLQADTHYTLSAWLQVSDGGADVRAVVKTVGDFVHAGGGVAKAGCWSMLKGGLTAASSGPAELYFEVGTRSSVDCFCFTDVRERVRPRQPIEMIYDTIVRPYYVQSNATVDLWVDSVSLKPFSKDEWTAHRAESVSAARKKAVRLQATDSAGNPLEGAAVSLDAVRTNFPLGAAVSRYILTNSAYQTWFASRFAVATFENEMKWYSTEPAPGQEDYTVPDAMMAFAKSNGIAVRGHNVFWDQPSQQPRWVQSLPYPQLLAAASRRIRSVVSRYAGQVIGWDVVNENLHFNFYEGRFGWDGVHRLLRRRAPAGRRAPALMFMNEFNTVGAAGRHGRAARRGITSNMELDFCVIG

SEQ ID NO: 86187 - protein, 333 aa, Zea mays
  Coding DNA Sequence Number=SeqID_42812
  Homolog annotation: Hit_ID=Q6J9V9; Match level="QueryCoverage=19%, HitCoverage=33%, E-value=1e-07, Identity=45%"; Hit description =Putative uncharacterized protein
MAERYQLPRSCVPPTTRRKDCGCPPSGGSEGGKTRCIREREDMVAFQGGHPPFKGDSPYLRPQPSWVESSPTRSKVLPLRRGGWVPHVMQASPGRKNPNRRARCMQPSSGYKRPSTFAQTSGRKGGQPCRRHATTPSGRTSPTSNTPSMEAHAHASCNRRAGRYVQATAPPLAPLPRLLDCGTSTATRGDPAHDTAAPSWRDGQYGQKWAGSNGGGRRAGAAVTSRSKRRFAFAIMTASKKGPGKGDTPKRILLREGTRLRASLLIRGSKAGPSEGFNSRLRARGLHTHYWSEVRRPTPRKGSTTASGHSGSAPTTDQGFEGWPSKGSQPPQT

SEQ ID NO: 86188 - protein, 346 aa, Zea mays
  Coding DNA Sequence Number=SeqID_42813
  Gene Ontology: Mol. function=hydrolase activity, hydrolyzing O -glycosyl compounds; Cellular component=extracellular region; Biological process=carbohydrate metabolic process
  Homolog annotation: Hit_ID=Q10QC0; Match level="QueryCoverage=87%, HitCoverage=52%, E-value=1e-137, Identity=77%"; Hit description=1,4 -beta-xylanase, putative, expressed
  Pfam annotation: Domain name=Glyco_hydro_10; Domain location=2-279; Score=32.2; E_value=1.4e-13; Accession=PF00331.11; Description =Glycosyl hydrolase family 10
MGAEILRSPAYQRWFASRFTVATFENEMKWSSTERLRGREDYSVPDAMLRFARSHGIAVRGHNVFWDQPGQQPAWVRSLPYRQLLQATARRIRSVMSRYAGQVVAWDVVNENLHFRFFEDRFGRDASAELYRKAHQMDGQALVSMNEFNTLEWPGDPKAWPSKYLGKLFQIKEFPGNTNDARMAIGLQGHFSVPSIPYIRAALDTLSRANAPIWLTEIDVAPGPNQAYHLEQILREVYAHPAVHGIILWTARHRQGCYVMCLTDNNFQNLPTGDVVDRLIAEWKTHSHAGVADADGYYEAELFPRGLQGHRQPPGGQLHRGAEPERRQGRPIPIPSSPYTSNCLSS

SEQ ID NO: 86189 - protein, 76 aa, Zea mays
  Coding DNA Sequence Number=SeqID_42814
MAGDGQLLPPLQLGLNDFGNLTVVFVHLKKKSRLGDELLAFQHFGRKKSYRKLPKHDLILFLGCHNYASGYYPDGS

SEQ ID NO: 86190 - protein, 583 aa, Zea mays
  Coding DNA Sequence Number=SeqID_42815
  Gene Ontology: Mol. function=helicase activity; Cellular component =nucleus; Biological process=RNA-dependent DNA replication
  Homolog annotation: Hit_ID=Q5NA16; Match level="QueryCoverage=74%, HitCoverage=92%, E-value=4e-64, Identity=31%"; Hit description =Helicase-like protein
  Pfam annotation: Domain name=Rep_fac-A_C; Domain location=362-488; Score=-60.4; E_value=0.019; Accession=PF08646.1; Description =Replication factor-A C terminal domain
MLLRNLNQSEGLCNGTRLLITSLCDKVIEGQIMTGIHRSKNVLIPRISLTLKNTKWPFVLQRRQYPIKIYQVTMLFTPVAELHPQSTNVVIRVRVIRKWEFRGATNDGPLQHINLVLADEQGTSIHAEIAAALAVDKGSIIEIEKVYELKRFRVTPSRNYFKPVDNNFMIQFTLYTQAKVVKDPPQVFPRYIYKLTCFENIEDSIDNRTYLIDVLGMLTQINPPHPVGYNNSTIIRDIFIKNTSDMSLKITLWGNQASSFSISDVYNQSNKQPIVILLVGFLAKRFKGQPYLSSTAASSWYFNPVIPEAQTYYNRLQNNDLQLIQPTAAEEEILLSQPPNLEQKTVEELLNIDPDMFPPEGYRCTVTISRIVQNSKWWYPSCSRCHKSSSQTSTGYHCTSCGCTDINFRYKLSFIATDGTCEAEFFCFDSIARKIVGKPCDNLVTAVATSQGPPAALAAIVCLKFTLAVTINMSAYSVTNRVFSILSILTNHGRQALIPSNMPSHPQQELDTQDEIPSLTTTQDSPATSMAKLSTCSNERNEGDAQRISELSNEELSSPPKRMKHGHSSKGIPDLTDPKEKSS

SEQ ID NO: 86191 - protein, 109 aa, Zea mays
  Coding DNA Sequence Number=SeqID_42816
  Homolog annotation: Hit_ID=A2Y5G3; Match level="QueryCoverage=48%, HitCoverage=23%, E-value=3e-08, Identity=58%"; Hit description =Putative uncharacterized protein
MQKLISYIDTICRVLSMQQDVLLPLFGVMMSFISYLLSWPFATGSWIGRMSFERPNLQRRRLLNESLLIHGPSHVLANSGQDLKSPRARKRTAYELVYLCSIESFSYFA

SEQ ID NO: 86192 - protein, 172 aa, Zea mays
  Coding DNA Sequence Number=SeqID_42817
  Gene Ontology: Mol. function=binding
  Homolog annotation: Hit_ID=Q943L3; Match level="QueryCoverage=49%, HitCoverage=18%, E-value=9e-28, Identity=71%"; Hit description =Pentatricopeptide (PPR) repeat-containing protein-like
MNQKCGYAQNAKGEEALYAYRMMRATGLMPDNTTVLGLLFGCKHAGLVDEGNALFKTAGMEQPGILKAEHYACVVDLSLSHAKWFDDCKGFLEELLLESFGRGLREIKVKGLKRITGCSWIEVQDKEEHTRPDYTSVLHAGRMNNQISGFINAFAVAAIKVPPSIPTAKESA

SEQ ID NO: 86193 - protein, 67 aa, Zea mays
  Coding DNA Sequence Number=SeqID_42818
MSTEKRHLDQIELLSARRLLLNHLIFSCGGCEDSKGGAHTLIIAQQVVGGTSGHKLTKGLKLSIAFK

SEQ ID NO: 86194 - protein, 107 aa, Zea mays
  Coding DNA Sequence Number=SeqID_42819
MGKNNKRKREPTPPSEEFGDSEYSEEEFSSESEGLEGSDESEFSSDEEDSDGGEDEDDDDDDGDDDDGGDGDGDGGNGGGGSGGKGGSSVGSTGGGGGKGSGGRASG

SEQ ID NO: 86195 - protein, 111 aa, Zea mays
  Coding DNA Sequence Number=SeqID_42820
  Gene Ontology: Mol. function=small conjugating protein ligase activity; Cellular component=cytoplasm; Biological process=ubiquitin- dependent protein catabolic process
  Homolog annotation: Hit_ID=A7PNK7; Match level="QueryCoverage=54%, HitCoverage=35%, E-value=4e-21, Identity=80%"; Hit description =Ubiquitin carrier protein
  Pfam annotation: Domain name=UQ_con; Domain location=20-110; Score =34.3; E_value=1.1e-07; Accession=PF00179.17; Description=Ubiquitin -conjugating enzyme
MEGTFNAINELPTKITQTARHQSDLPSENVGIQMFCFLTSCIIFEETPVYPDGRVCISILHPPGEDPNGYELASERWTPVHTVESIVLSIISMLSSPNDESPANIEAAIAC

SEQ ID NO: 86196 - protein, 61 aa, Zea mays
  Coding DNA Sequence Number=SeqID_42821
  Gene Ontology: Mol. function=structural constituent of ribosome; Cellular component=ribonucleoprotein complex; Biological process =translation
  Homolog annotation: Hit_ID=A2WWU0; Match level="QueryCoverage=88%, HitCoverage=33%, E-value=9e-19, Identity=88%"; Hit description =Putative uncharacterized protein
  Pfam annotation: Domain name=Ribosomal_L17; Domain location=17-59; Score=-31.6; E_value=0.0093; Accession=PF01196.10; Description =Ribosomal protein L17
MGKFRKLGRDYSQRICMLRTMVSQLVKHERIETTVAKAKEVRRKADQMVQLGKESDPFISQ

SEQ ID NO: 86197 - protein, 350 aa, Zea mays
  Coding DNA Sequence Number=SeqID_42822
  Homolog annotation: Hit_ID=A2WWT9; Match level="QueryCoverage=100%, HitCoverage=88%, E-value=2e-77, Identity=53%"; Hit description =Putative uncharacterized protein
  Pfam annotation: Domain name=DUF966; Domain location=45-350; Score =366.2; E_value=5.6e-107; Accession=PF06136.4; Description=Domain of unknown function (DUF966)
MAVVVAGSRARAEQARRQWREQEPRSPEMAAPPPRSTMPRPARAAAVVYYLARNGHLEHPHFMEVALSCPDGLHLRDVMDRLDALRGKGMARMYSWASKRSYRNGFVWHDLAEDDYIHPVVAREYVLKGTERLHPALLDAAAASSSSSAGSQETPTTSSSARWEAHRMTMKGACGGADLGEYVAAYMGEERGADAATQTEDDGRGRQRRVQSPAAQEELSRAETSPPTASTSPEALAKADGRAVLEGAVSGSGRARASSVLMQLISCGSVSVRDARASPVMPRAHHHHRPPRPPAVEAPSYRRAKLVVEDKEYFSGSIVETATKRSPADGVTSRDDLAVLRRSASYNAER

SEQ ID NO: 86198 - protein, 278 aa, Zea mays
  Coding DNA Sequence Number=SeqID_42823
  Gene Ontology: Mol. function=nucleic acid binding; Cellular component= intracellular; Biological process=regulation of transcription
  Homolog annotation: Hit_ID=Q5NA09; Match level="QueryCoverage=26%, HitCoverage=43%, E-value=1e-26, Identity=80%"; Hit description=C2H2 zinc finger protein
  Pfam annotation: Domain name=zf-C2H2; Domain location=148-170; Score =17.2; E_value=0.062; Accession=PF00096.17; Description=Zinc finger, C2H2 type
  Pfam annotation: Domain name=zf-C2H2; Domain location=195-217; Score =18.0; E_value=0.036; Accession=PF00096.17; Description=Zinc finger, C2H2 type
  Pfam module annotation: Pfam domain module=zf-C2H2::zf-C2H2; Domain location=148-170::195-217
MRARRCGWRPSVVVCTTSATASRFFVSKPLVTSIQAELSSADGLADRFADVNASSIPITVEIRLPQSAHCAHTQTPTHRPQPQASALGPVYTIIFEHVRAHTTRERARRWRASVRTPRPALLTLSSTTTGGTGTGTGTGTAAAAEGAFECKTCSKRFPSFQALGGHRTSHTRLQARTLVGDPAERYDDRPAARVHECAVCGLEFSMGQALGGHMRRHRGEGPPPPAAHDDDGDGPAQPDRDMPDLNLPPLDDDDGSQAGSRQSGGGRGSGPQLLNLLV

SEQ ID NO: 86199 - protein, 204 aa, Zea mays
  Coding DNA Sequence Number=SeqID_42824
  Gene Ontology: Mol. function=microtubule binding; Cellular component =phragmoplast; Biological process=negative regulation of microtubule polymerization
  Homolog annotation: Hit_ID=A2Z906; Match level="QueryCoverage=100%, HitCoverage=100%, E-value=1e-40, Identity=75%"; Hit description =Putative uncharacterized protein
  Pfam annotation: Domain name=CH; Domain location=15-116; Score=20.4; E_value=0.0021; Accession=PF00307.22; Description=Calponin homology (CH) domain
  Pfam annotation: Domain name=EB1; Domain location=99-145; Score=81.8; E_value=2.2e-21; Accession=PF03271.8; Description=EB1-like C-terminal motif
  Pfam module annotation: Pfam domain module=CH::EB1; Domain location =15-116::99-145
MAASNIGMMDGAYFVGRNEILAWINTTLQLGLSKVEEAASGAVACQLMDAAHPGAVPMHKVNFDAKTEYDMIQNYKVLQDVFNKLKITKITELKLLVDSLEKERDFYFSKLRDIEILCQNPEVEHVPVHAIQNILYTSEEDPQQQAPALSPIMEASEERPKQEAAHKRKSISDLDEFGMSSSSRQRLSDISDVQLCGSPLTSFS

SEQ ID NO: 86200 - protein, 157 aa, Zea mays
  Coding DNA Sequence Number=SeqID_42825
  Gene Ontology: Mol. function=RNA binding
  Homolog annotation: Hit_ID=Q7G2G8; Match level="QueryCoverage=52%, HitCoverage=12%, E-value=9e-23, Identity=67%"; Hit description=KH domain containing protein, expressed
  Pfam annotation: Domain name=KH_1; Domain location=15-78; Score=42.5; E_value=1.5e-09; Accession=PF00013.20; Description=KH domain
  Pfam annotation: Domain name=KH_2; Domain location=15-63; Score=17.0; E_value=0.0047; Accession=PF07650.8; Description=KH domain
  Pfam module annotation: Pfam domain module=KH_1::KH_2; Domain location=15-78::15-63
MEEECDVTSENGDKSIRILCASELIGSVIGKSGANVRRVEQQTGVRIKVQEIDKDASGERLITVSSNEIPTEPISPTIEALILLHDKVAGPPAIARGALTEIASRLRTRTLRDTSTANSPPPFAPSDDPPGILNTVYMNILLASPLLKAILKDATAV

SEQ ID NO: 86201 - protein, 28 aa, Zea mays
  Coding DNA Sequence Number=SeqID_42826
MKSLQGAQDLVKGSGGAAEIACFLSVCR

SEQ ID NO: 86202 - protein, 67 aa, Zea mays
  Coding DNA Sequence Number=SeqID_42827
MATSRCVKPPSAFCMGTDEVQTPHGKRPGDGYCLQGLSGQVWRNPVLLSLDAQGLALGARGYLGLGR

SEQ ID NO: 86203 - protein, 135 aa, Zea mays
  Coding DNA Sequence Number=SeqID_42828
MAHRTVRCTPDMSGAPATSSVPLESDRWSSDLWATLDVRWRTGQLLFIVRCAGMGKPDVCARCGAFNASAAREPLEIPEGGEFELESPGAPDTVRWHTGQSGAPRPEGLRLALCPFVEPNTWSFYWLCCEPLTPV

SEQ ID NO: 86204 - protein, 221 aa, Zea mays
  Coding DNA Sequence Number=SeqID_42829
  Homolog annotation: Hit_ID=Q7G2F7; Match level="QueryCoverage=99%, HitCoverage=18%, E-value=8e-97, Identity=77%"; Hit description =Expressed protein
  Subcellular localization annotation: CTP_CleavageSite=26; ConfidenceScore=5.10e-01
YRWLPTNSTSSNLKTFEEKFLTQQPQSAGSVQLHWSQWPSQNSAHSRWFSTSKGLLGAGPSGIMAADAIVTESGALHVAGVPLVNPSTVVVWEVMPGLGNGIQATAKINAASSVPPSLNPPSWPGFAPLAAYLFSLQDYLVSEGAQTKKLTDNNETTEAASIHCCPVSNFSAYVSPEAAAQSATTTTWGSGVTSVAFDPTRGGSVITVVIVEGESTAPFRR

SEQ ID NO: 86205 - protein, 78 aa, Zea mays
  Coding DNA Sequence Number=SeqID_42830
  Gene Ontology: Mol. function=serine-type endopeptidase activity; Cellular component=mitochondrial matrix; Biological process =proteolysis
  Homolog annotation: Hit_ID=Q67VA4; Match level="QueryCoverage=88%, HitCoverage=10%, E-value=1e-25, Identity=78%"; Hit description =Putative DegP2 protease
MKLTRYFLLLEVLAFNGTPVTNLKHLATMVEECNEAFLKFDLDHDQVVVLETKTAKAATQDIVTTHCIPSAVSEDLRS

SEQ ID NO: 86206 - protein, 71 aa, Zea mays
  Coding DNA Sequence Number=SeqID_42831
MQFKRGLVLKLRGLGSRYKPLSEDSGNLENGLNSYRHVALGHTIRDLGAGVAPSLHASRRSMPGARLSAMA

SEQ ID NO: 86207 - protein, 147 aa, Zea mays
  Coding DNA Sequence Number=SeqID_42832
  Subcellular localization annotation: CTP_CleavageSite=77; ConfidenceScore=5.73e-01
MAAHPAAVPTAATTAVLPAHSPPSTVAPRRPLRDARLPTPRSPSTHPRPQTPPPPPRPVQPASMPAPDPMIPALAPVCSTPRGDVHRGGAHSAHTSSRHTPARLRRPHPTPCSTKPSYASSSRSQCLGSWLPSEPAAEDATSAMPDS

SEQ ID NO: 86208 - protein, 259 aa, Zea mays
  Coding DNA Sequence Number=SeqID_42833
  Gene Ontology: Mol. function=serine-type endopeptidase activity; Biological process=proteolysis
  Homolog annotation: Hit_ID=Q67VA4; Match level="QueryCoverage=25%, HitCoverage=10%, E-value=3e-29, Identity=93%"; Hit description =Putative DegP2 protease
MSAQHIKAHHALHGVPNVVEATPRSRPHEHNTLCPLCSGCIDLRSQKKPERSPFYVVLPLSFTARGRGELHLCKDGGPHRAETQLLVSFRCCWSIHDECLSRARACHVVVAVTRVYVVEYGAVGFPILGIEWQKMENPDLRKAMGMKANQKGVRVRRVEPTAPETGCLQPSDIVLSFDGIDIANDGTVVRVVSLSHQLSLISNFCDKADLRMCIVSISFLTTGSWVLFLLQLLVEVQCHPLHSLHTLLHLGDDVDLNNG

SEQ ID NO: 86209 - protein, 105 aa, Zea mays
  Coding DNA Sequence Number=SeqID_42834
MRLSTKTNISLTRTPGPELQEHEEREDDDLGAGHRTTSFSMNLATPIFLATTHEHCGLPQDGAHAGKSGEVVDAATPAVATGPIFGRRGTVRRWQNGLVAEQVTL

SEQ ID NO: 86210 - protein, 148 aa, Zea mays
  Coding DNA Sequence Number=SeqID_42835
MAMCPYQGWKYIVHETNPLSLVPLAPRGGMAGVLKLVLKTEPQVSRGVATFLNNLLKIKRDCVGEQAKDDARQTGLGRVIGKGVVGLDVVDEGLSRQGQHHEITPASVFARRSFQNDIHQLANIRGFYGLVVETGNDSLLVGGVGRGV

SEQ ID NO: 86211 - protein, 149 aa, Zea mays
  Coding DNA Sequence Number=SeqID_42836
MGSSASPDPGLGLSLDPERRSPPRPTQGSDSASTPEDGLRLARPQGSDSASASEDGLRLARPRARTQPRPQKTDSASPDPRSRTQPRPRKTVSASPDPGLGDEDITMSTTTPAAPPHQAPLPSLPGPITRARARDLNFVMLLKNEGPEE

SEQ ID NO: 86212 - protein, 284 aa, Zea mays
  Coding DNA Sequence Number=SeqID_42837
  Gene Ontology: Mol. function=serine-type peptidase activity; Biological process=proteolysis
  Homolog annotation: Hit_ID=Q69TI3; Match level="QueryCoverage=90%, HitCoverage=37%, E-value=1e-119, Identity=79%"; Hit description =Putative aminopeptidase C
  Pfam annotation: Domain name=SGL; Domain location=28-284; Score= -123.0; E_value=0.088; Accession=PF08450.3; Description=SMP -30GluconolaconaseLRE-like region
MHPRIASGATGKSTAPYGSWESPISAAVVSAAGRTAEGFAIAGDGRLVWVETRPEDGGRAVLVKEAAGPGGKALDVTPQGFAVRSLAQEYGGGAFAVQGDTVVFSNYTDQRLYRQTIGDNSPLPLTPDYGPVVRYADGVFDPHFHRFVTIMEDHRHNSSNPITTIVAVGISDPDVKEYTMLVSGNDFYAFPRIDPTKKRMAWIEWSNPNMSWDKSQLWVGYFNEKGEIKEKICVAGGDPTIVESPTEPKWSSKGRMESHVGVLDQDSESFLKIDIPFSSVTNIV

SEQ ID NO: 86213 - protein, 210 aa, Zea mays
  Coding DNA Sequence Number=SeqID_42838
  Subcellular localization annotation: CTP_CleavageSite=72; ConfidenceScore=5.62e-01
MAAQGAGRAISSSLAKSLGLRKPKREAGSGAKNRQQALSQRLGGCSRKPSSGRTVDSVNIPARELGTRPYTRATASSHEGTTRLAEALREALRPRRSETTPPRPRGLHPAGALARTHRNKMQPRKAGPLAKKCDKSLQASANNPFEARGLLSGTIIRGTLKAPNSQLKDSAACAAPTAVPLDRVRLIGSQVLQKAPQETPLCATQGSDSG

SEQ ID NO: 86214 - protein, 214 aa, Zea mays
  Coding DNA Sequence Number=SeqID_42839
MGSARVAFVLLSLEERNFVEVGFSSCSPATSPRRWSPKTVTTSLMVGRSKPGYGLCLALSFKDLHHPCWGGGRAEPELYLPYGPAGHLLLQHSGERALTGLAGGGLRHRGADRPQASSAPACPVRWLSWLWHSFRCHLPPLGGVRLSVRRTGGCCAARTGGPPKTSRAARAAFVFLGCPALAPVRRLYAEVGARPSGRTRVGICRWADGCRRRC

SEQ ID NO: 86215 - protein, 126 aa, Zea mays
  Coding DNA Sequence Number=SeqID_42840
MQAACNDTKGAHPFDSDASSMWAQAHTSCNRRAGYYVRETAPPLAPISHLLDCGTGAATRGDPAHGPTVPTEHIDHGDRERGYSERDPSPRRKRAPSPPADQRFEGWPLRRVRHPPQSTRAPSPSY

SEQ ID NO: 86216 - protein, 228 aa, Zea mays
  Coding DNA Sequence Number=SeqID_42841
  Gene Ontology: Mol. function=3-methyl-2-oxobutanoate hydroxymethyltran sferase activity; Cellular component=cytoplasm; Biological process =pantothenate biosynthetic process
  Homolog annotation: Hit_ID=A2WM98; Match level="QueryCoverage=40%, HitCoverage=24%, E-value=8e-25, Identity=70%"; Hit description =Putative uncharacterized protein
  Pfam annotation: Domain name=Pantoate_transf; Domain location=97-228; Score=-166.5; E_value=0.0018; Accession=PF02548.6; Description =Ketopantoate hydroxymethyltransferase
MEGLPPRHSCCSVSPAPLLFLTCGFQFSFMPSDGVLDQRGRVHGTASGAALELEKGCVVTAEGTTQVSGGGVPLHNPPTPPLPSNHVGAEVYYLPYVTDAEYYTTGGKKISATSIYFESLPMSVTKGYINLIFVPSSSSAAAVCLILVLKRRVEWMQSKLEGCAPSRITAAKAIVKDGIVVMGHVGLTPQAITVLGGFRPQGKTVDSVVKVVETTLAMKETGCFSVVY

SEQ ID NO: 86217 - protein, 229 aa, Zea mays
  Coding DNA Sequence Number=SeqID_42842
  Pfam annotation: Domain name=DUF1639; Domain location=13-59; Score =9.2; E_value=0.0038; Accession=PF07797.5; Description=Protein of unknown function (DUF1639)
  Subcellular localization annotation: CTP_CleavageSite=76; ConfidenceScore=5.17e-01
MEAKKLASSIARSKQEITEDFSLIGGTSPPRRPKKRQGATTAQYSASTGSHRTLSPPRFRICRWRSRNFTLTPPHRADADGRDPPRPAPAILVLPRTPLHPSCPICLLDRGVPCPPRTTAALRPRQPSGPPMLGFALAASPAREVDEDGSKDASAAPLRAPPMAAAGLCPWVASRPTLAAFELRRPQSWQGAADAAMDMGSQKTHEKLMNQKPPPHADEIAKLFPNLLG

SEQ ID NO: 86218 - protein, 64 aa, Zea mays
  Coding DNA Sequence Number=SeqID_42843
MARVACTLRGKRLDDGVSMLSVDHILESLLLCRVKKQQTFVASVPRWYRKKRIKTKAAGGKTLR

SEQ ID NO: 86219 - protein, 22 aa, Zea mays
  Coding DNA Sequence Number=SeqID_42844
MEEDDLLGEDLVDYGDTPEHSV

SEQ ID NO: 86220 - protein, 135 aa, Zea mays
  Coding DNA Sequence Number=SeqID_42845
MRSTHVLLAETRAESPSEDFGDSEYSEEEFSSESEGSPAYASPPVSSDDSDDSQGIAAEVWTYIRAVERSGLEGSNESEISSDEEGSSDSSKEGSGGDGDDEGDDKGDGGIGKGDGGNGKDDIGSGRASGKAPLA

SEQ ID NO: 86221 - protein, 60 aa, Zea mays
  Coding DNA Sequence Number=SeqID_42846
MGDHVSGRVRGYVCWQVQSENASPWTVVHRPPSLRYQNGYNQFLDLARVLQKSLDFYRDP

SEQ ID NO: 86222 - protein, 166 aa, Zea mays
  Coding DNA Sequence Number=SeqID_42847
MVEDLVSGQAAAVRVTADRCAFYGYRFLGWQIMVGFGKLPKYHQDPTTEELAKTLDCWPSLNYYITVCKYVLMPWKFNGCYALFVIDHGKKHVTFIDFTPTQDWCKHMPYKRFAEAIIMASKKYKIAYNKKHFGWADDIFKWEHTIRSGVPIDLKGYFLNTMFSTV

SEQ ID NO: 86223 - protein, 109 aa, Zea mays
  Coding DNA Sequence Number=SeqID_42848
MPSVGLPGKEAGYLGEYRRNIMAPDEAGGCDQRAGRCWGPSDAGGGCCLGAATEFMIVETFDTRLLNRTPLSKTCLDSVAFCPHLLAVFSPDSWDLYDRAVFSGGCTHD

SEQ ID NO: 86224 - protein, 196 aa, Zea mays
  Coding DNA Sequence Number=SeqID_42849
  Gene Ontology: Biological process=protein localization
  Homolog annotation: Hit_ID=A2ZAC0; Match level="QueryCoverage=38%, HitCoverage=1%, E-value=2e-28, Identity=82%"; Hit description =Putative uncharacterized protein
PVKSHVTICGDIHGQFHDLAELFRIGGKVVNFKTIVQIDFSSYNVGDEDYCGYDYSLVGQLSEVRIVYLNRFVQEIISYFMGLVPKSSDAVVKLKDNKTNSEKWVRRSPSYQSNLPDALAYGKTFKGNRPSLSLLLPTLSTYEVGQDFVLIWGINSKVFRVVQTTEHEVLMIAESRAEEGHLFEGWTEGVINFPPT

SEQ ID NO: 86225 - protein, 99 aa, Zea mays
  Coding DNA Sequence Number=SeqID_42850
MPPRIRKTARKSTGQIGVPHHQLAPRHEDSSSGSNDPIGDLEAQVEQLRSELHHRNDIWVADGERINELRTDIRHLQDQLAEWDLALDWAVNSRSLAWA

SEQ ID NO: 86226 - protein, 76 aa, Zea mays
  Coding DNA Sequence Number=SeqID_42851
METTPCHDGSHGGFSAFPPRLPHAPGVIAALVSRGHLFMIDYLEFVEMAGGDEDLIYDALCMGSDSDLGPSKCDDE

SEQ ID NO: 86227 - protein, 93 aa, Zea mays
  Coding DNA Sequence Number=SeqID_42852
MAIKNNKVLNMEKRKEKSQDSSAQVKVVRKVPDVSSAGTGGAQDMSTTLDLSPPRDNIEFLGSLSDYWRSSLALIIIVRGSCVDFLGVCEEQL

SEQ ID NO: 86228 - protein, 468 aa, Zea mays
  Coding DNA Sequence Number=SeqID_42853
  Gene Ontology: Cellular component=nucleus; Biological process =regulation of transcription, DNA-dependent
  Homolog annotation: Hit_ID=A2XHV2; Match level="QueryCoverage=66%, HitCoverage=72%, E-value=1e-48, Identity=59%"; Hit description =Putative uncharacterized protein
  Pfam annotation: Domain name=GRAS; Domain location=75-380; Score= -14.5; E_value=1.2e-07; Accession=PF03514.5; Description=GRAS family transcription factor
MKPMSCHEQEHPELAATTTNSGFDWLEDPISFLTADVDIAGGGYGWWSDPAAAQQDGIGSVVAQTLSPPAPLLAHTSPSIASPVVSEPSSKKRKSPAHRASANANHPAGRARAARAGPHDPARRRPGGRGDRAGASLRVPDAGGSRGAEPRLFRASLIKFHEVSPWFALPNALANAAIAQAAASGSGGRGGSEPRSLHVVDLGVSHGVQWPTLLESLTRLPGGRAPPSVRLTVAGAPPAPFSASPPGYDFSPHLLRYAKSIDLRLAISRAASLDSVHGLASSPSGEALVVCLQFRLGHAGADERTEILRKVRGLNPGAGGGLGARRRGRRHRGGRVHGEAGAAVAGSWSRRPRRSRGGMGRRGRLLEAEAGTSVASEAAGAGREAWRERMVVAGFEAAAFGDEAVESAKSLLRKYDGGWEMSASGTARRGGAAVEGAAGVVLLAVAAGVQRLRPRSRASMGSPDQISR

SEQ ID NO: 86229 - protein, 149 aa, Zea mays
  Coding DNA Sequence Number=SeqID_42854
MGKLSLGWTNTRKAGLQWEWRDGESIVYPPGKRLDGGVLSSRLAGTRSGLEKPVGELTYARHTLESLFFSRNLFLLQMLVCDLCLLNPAILEPSEVFETRTGACGPDNLGGSATVDIGRAFVSQHESEGGRTGLRPVDALDLFWRVLWM

SEQ ID NO: 86230 - protein, 101 aa, Zea mays
  Coding DNA Sequence Number=SeqID_42855
METPAPPLRHRGSTAQLGAQTWPINCHCVAYGLVVASYVVRRPRLQSTIVRTSPHDRTDNQGQVLGCRWGISDWKMPKRTSSQLATEQQPTSAFRFKNFLK

SEQ ID NO: 86231 - protein, 191 aa, Zea mays
  Coding DNA Sequence Number=SeqID_42856
MTLAAAEIWSNPPYLLQFVRKNLYADGGYQLRIRRLEGTPNYGPRQMCMNSPKVGVHVKCKAYQRGWLELSIAFKVGQNFISNYLWEAPMQGSCLTAIAAKSTKDLPTLTTPLLPLPLSEHEWVKEVIKGTTCLGLEIPDARDFSENLEDRSAIPEFISEVTAVKGRTAGLFPNTPGALLHFCSAKGYPET

SEQ ID NO: 86232 - protein, 153 aa, Zea mays
  Coding DNA Sequence Number=SeqID_42857
  Gene Ontology: Mol. function=translation initiation factor activity; Cellular component=transcription factor TFIID complex; Biological process=transcription initiation
  Homolog annotation: Hit_ID=Q10JT5; Match level="QueryCoverage=52%, HitCoverage=35%, E-value=2e-26, Identity=73%"; Hit description =Transcription initiation factor IID, 31kD subunit family protein, expressed
  Pfam annotation: Domain name=TFIID-31kDa; Domain location=16-125; Score=57.7; E_value=4e-14; Accession=PF02291.6; Description =Transcription initiation factor IID, 31kD
MDAAGARPSAPSAAAAAVAGASVADEPRDARVVRELLRLMGLGEGEYEPRVVHQFLGLAYRYVGDVVGDAQVYADHAGKTQIDADDVRLAIQTKVNFSFSQPPPHFPLFVIKGVSCVSKSSFYASKYDKAIDTFCPDSLIKYSDSPIPIGSVN

SEQ ID NO: 86233 - protein, 35 aa, Zea mays
  Coding DNA Sequence Number=SeqID_42858
AISRQPMSASTSSADRQRPGDQVGSAAVQAASPLQ

SEQ ID NO: 86234 - protein, 104 aa, Zea mays
  Coding DNA Sequence Number=SeqID_42859
  Gene Ontology: Mol. function=nucleic acid binding
MAGSGESPAMEGDGVRLDPDTEGGVGGNSLVTPPPALMRPEIAEKSIGEEGEQRVRPPMSNISSREMDTPQIMHSHFCGSHRESCSAMISKSWLSNSGVSSEHT

SEQ ID NO: 86235 - protein, 71 aa, Zea mays
  Coding DNA Sequence Number=SeqID_42860
MVSSAVSLLAWWRQILMLPVRLAVRRGPRRGAAEALAFAQFWSGFELGTGDLLEDATDGALKEFEDEVKGK

SEQ ID NO: 86236 - protein, 239 aa, Zea mays
  Coding DNA Sequence Number=SeqID_42861
MGALFQWVLASVHREKRRSHPSAKKAVARTIELRSMSSSSKKHCVGYTIVRSPDQTPTPVYLPLMTYKQLRLQSTHDLQAPRTATHLWLCASDTLKTYQIRPKCAGHQQWCNMTSHTKPQATKFKGRHSPNDGARDHHARAIRNKEYRTTKRSRARQALPHGKMPSFTIVRWLLLEEANMNRPPSLAYKRRGLAPRLERFFLSFEWTTQGRTQMRRRSEDQRTRGGPGDRSSTSKPRLR

SEQ ID NO: 86237 - protein, 276 aa, Zea mays
  Coding DNA Sequence Number=SeqID_42862
  Homolog annotation: Hit_ID=A2XFR6; Match level="QueryCoverage=33%, HitCoverage=26%, E-value=4e-15, Identity=46%"; Hit description =Putative uncharacterized protein
GSHSQTTRVNTSYAPQPRQVPVYPVVVEEAPADLPPVRVENVINLEDSSEEQLPTPTPLAESLAYAAGSSMSASSAPAFQAPAPGGDDPDDSGDGDDEDDDDDGEDEHVNQEADYAQQDHFMGIGPVVEHYTSMFETGHFPNLLHAVLHELGAYARPLYETRRVSEPPRACYYITRIHVRRLRGENQTNIVPGEPGEDRLNTLAGVVAGLNTDLDSATLDLYSVHLELENAHARIAALEAQLQGLDPPEDQVPAVALSPPRKRMRYGEPGSVTRLL

SEQ ID NO: 86238 - protein, 175 aa, Zea mays
  Coding DNA Sequence Number=SeqID_42863
MAPKRASSKAAPSVDEAAKAALLAEKKGKALVDTTHQEACEDDALSKRQRNEQPTPEGTLRTCNSGGQPQPPLGFAPLEGEDASEDGEVIGVSAEEQLQLRALRIKNRNLQKEIHEAKRQRVSVQAKVRQMIHDEEQRAQELEQEIALMQGEGQLDLQHGPPLQQRVPIEDLFFP

SEQ ID NO: 86239 - protein, 75 aa, Zea mays
  Coding DNA Sequence Number=SeqID_42864
MAGAGDERDDREGGGFGRAAGLQRRSYAGDGRVGLAGWGQPGGVGREGGLRCSGGGGAGRRCSGDGGDGRATVVR

SEQ ID NO: 86240 - protein, 234 aa, Zea mays
  Coding DNA Sequence Number=SeqID_42865
  Pfam annotation: Domain name=HALZ; Domain location=140-178; Score =4.6; E_value=0.099; Accession=PF02183.9; Description=Homeobox associated leucine zipper
MEALGSLEHPSAQRKKGFPSSLTKLRATHGDPQEAGICLKEYRENGVEKVLYGNLHGRKPKSPKPPSLPSHLHRAPLSQTLAKTLPEKPLNSYAKTTTESNKNTPTWRKRLQALSGRDPTEDDPTIVYMAGYLHTLDNHYDDLSSHCTHLNSRVESLEQQVKELKKEKVSLQECLDIAEGEEANTREAYRTLKMDYDKKLKKLAPMKKIQKKTKSQGCQTERKKKALQHHLPPG

SEQ ID NO: 86241 - protein, 185 aa, Zea mays
  Coding DNA Sequence Number=SeqID_42866
  Homolog annotation: Hit_ID=Q5GAU8; Match level="QueryCoverage=37%, HitCoverage=56%, E-value=4e-23, Identity=68%"; Hit description =Putative uncharacterized protein
MGGLGSSGRLQNGGGKSEGRRRLGGSDMRRRAIASGTTPFPPILLYLPLQAMIAGNGREGGRRGMGARSSRGDEGGSRGDEGDDIFGKEGRRTPEILYAILDPILGAIGCGAEMKDIYREALWQKRGRPRELYPDVSSKDAPVPPELPMPNCNCGILAWGHLRCLFFQWIDGPGKFDPRYLLFAN

SEQ ID NO: 86242 - protein, 152 aa, Zea mays
  Coding DNA Sequence Number=SeqID_42867
  Homolog annotation: Hit_ID=Q5GAU8; Match level="QueryCoverage=20%, HitCoverage=22%, E-value=3e-08, Identity=83%"; Hit description =Putative uncharacterized protein
MTDAEKEVATERRLDSPSRCDCGDRAVIDEDTEKQFVCPNIDYPYGWRKCRFREWLYGPLSHWLEPEETRKCSWESYDDKGEVMRTIESKRLMGQKMRCGSQLVDSYINDRICDMRRYAKFAFYDSPKRAEFRRLKAADEKRAQDAREWEAA

SEQ ID NO: 86243 - protein, 288 aa, Zea mays
  Coding DNA Sequence Number=SeqID_42868
  Gene Ontology: Mol. function=nucleoside-triphosphatase activity; Cellular component=endoplasmic reticulum; Biological process=cell division
  Homolog annotation: Hit_ID=Q9SCN8; Match level="QueryCoverage=45%, HitCoverage=54%, E-value=8e-56, Identity=59%"; Hit description=Cell division control protein 48 homolog D
  Pfam annotation: Domain name=RNA_pol_Rpb1_2; Domain location=3-115; Score=-15.9; E_value=1.4e-06; Accession=PF00623.11; Description=RNA polymerase Rpb1, domain 2
MDKQRWFVREYGLIRSNLLVLVEYGPHPPPGKTGAKYIIRGDGQRLDLRYVKKSSDQHLELGYKVERHLNDGDFVLFNRQPSLHKMSIMVFSMAFSALSDGARIRKCSAYCLVASNQMVGLFLMIWALKEMKNDITKSEVVKKCQDVKYGKHVHILPIDDTVEGITGNLFDAFLKHTEIFCDGEPIKREDEERLDEVGYYDVGGVRKQMAQIRELVELPLRHPQLFKSIGVKPPKGILLYGPPGSGKTLIAHAVANETGAFFFLINGPEITKFICIARITNGLQNLFS

SEQ ID NO: 86244 - protein, 724 aa, Zea mays
  Coding DNA Sequence Number=SeqID_42869
  Gene Ontology: Mol. function=transcription regulator activity; Cellular component=nucleus; Biological process=regulation of transcription
  Homolog annotation: Hit_ID=Q9ZPN6; Match level="QueryCoverage=95%, HitCoverage=98%, E-value=0.0, Identity=67%"; Hit description =Transcription factor MYC7E
  Pfam annotation: Domain name=HLH; Domain location=509-558; Score =50.7; E_value=5.2e-12; Accession=PF00010.17; Description=Helix-loop -helix DNA-binding domain
MEAFMASADLPAYPWGAPAGGGNPPPPQMPPAMAMAPGFNQDTLQQRLQAMIEGSRETWTYAIFWQSSLDAATGASLLGWGDGYYKGCDDDKRRHRPPLTPAAQAEQEHRKRVLRELNSLISGGASAAPAPAPDEAVEEEVTDTEWFFLVSMTQSFLNGSGLPGQALFAGHHTWIAAGLSSAPCDRARQAYNFGLRTMVCFPVGTGVLELGSTDVVFQTAETMAKIRSLFGGGPGGGSWPPVQPQAAPQQQHAAEADQAAETDPSVLWLADAPVVDIKDSYSHPSAAEISVSKPPPPPPPPQIHFENGSTSTLTENPSPSVHAPPAPPAPPQRQQQNQGPFRRELNFSDFASNPSLAAAPPFFKPESGEILSFGVDSNAQRNPSPAPPASLTTAPGSLFSQSQHTATAAANDAKNNNNNNKRSMEATSLASNTNHHPAAAANEGMLSFSSAPTARPSAGTGAPAKSESDHSDLDASVREVESSRVVAPPPEAEKRPRKRGRKPANGREEPLNHVEAERQRREKLNQRFYALRAVVPNVSKMDKASLLGDAISYINELRGKLTSLESDRETLQAQVEALKKERDARPHPHPAAGLGGHDAGGPRCHAVEIDAKILGLEAMIRVQCHKRNHPSARLMTALRELDLDVYHASVSVVKDLMIQQVAVKMASRMYSQDQLSAALYSRLAEPGSVMGSHFDELKAVGVSCVTCDCEGVREFNMSDSRMCT

SEQ ID NO: 86245 - protein, 1283 aa, Zea mays
  Coding DNA Sequence Number=SeqID_42870
  Gene Ontology: Mol. function=heat shock protein binding; Biological process=protein folding
  Homolog annotation: Hit_ID=Q108V8; Match level="QueryCoverage=99%, HitCoverage=51%, E-value=0.0, Identity=79%"; Hit description=DNAJ heat shock N-terminal domain-containing protein, putative, expressed
  Pfam annotation: Domain name=DnaJ; Domain location=292-347; Score =37.1; E_value=6.1e-08; Accession=PF00226.22; Description=DnaJ domain
MIGDAALSILHSMTSARSDLDDAGEIVTPTPRVKRILSSPRCLPHVAQVMLTGEPSIVEAAASLLMAIVTRNPKAMIRLYITGAFYFALAYPGSNLLSIAHLFSATHTHQAFHGGEEAALSSSLPLAKRSVLGGLLPESLLYVLERSGPSAFAGAMVSDSDTPEIIWTHKMRAENLICQVLQHLGEFPQKLAQHCHSLYDYAPMPPVTYPNLKDEMWCHRYYLRNLCDEIRFPNWPIVEHVEFLQSLLVMWREELTRRPMDLSEEEVCKILEISLDDLVLGENGSIKQSSDLSLANSGNKIENIDEEKLKRQYRKLAIKYHPDKNPEGREKFVAVQKAYERLQASMQGLQGPQVWRLLLLLKAQRILYKRYGDVLGPFKYAGYPMLLNAVTVDKDDSNFLSFDRTPLLIAASELIWLTCASSSLNGEELIRDGGIPLLATLLSRCMCVVQPTTPANEPAARIVTNIMHTFSVLSQFESGRVEILKFGGLADGIVHCTELEFVPSAVDAALLTAANVLVSSELQNALLRAGFLWYVLPLLLQYDSTAEENETCEAHGVGARVQIAKNLHAVHATQALSKLCGLSGDDILYPDNKPAYNALKALLTPKLADMLRNHPPKELLSNLNSNLESPEIIWNSSTRGELLKFVDQQRASQGPDGSYDLTESHSFTYEALSKELNVVTEASMSGNDEVSDSTIEGKMDNSSGKQSTDGDSEVIINLQSGLTSLQNLLTSNPGLAAVFASKERLIPLFECLALHVPSESTSPQICLSVLSLLTKHASCLEAMVAERMSLILLFQILHCNPPCRDGALAVLYSLASTPELAWAAAKHGGVVYILELMLPLQEEIPVQQRAVAASLLGKLVGQPMHGPRVAITLARFLPDGLVSAIKDGPGEAVVSSLELTTETPELVWTPAMAASLSAQLATMASDLYQEQMKGRVVDWDVPEQASGQHVMKDEPQVGGIYVRLFLKDPKFPLRNPKRFLEGLLDQYVSSVAATHHEAIATDPELPLLLSAALVSLLRVHPVLADHVGYLGYVPKLVAAMAYEGQRETMASGQASSGSQAEPGEHDNSSHSEATVQTPQERVRLSCLRVLHQLASSTTCAEAMASTSAGTPQVIPLLMKAIGWQGGSILALETLKRVVGAGNRARDALVAQGLKVGLVEVLLGILDWRAGGRQGLRNKMKWNESEASIGRVLAVEVLHAFATEGAHCARVREVLNSSDVWSAYKDQKHDLFLPSSAQSSAAGVAGLIESSSRFTYALAAPPSSSLSPPSAPANPSGRQYYQHS

SEQ ID NO: 86246 - protein, 102 aa, Zea mays
  Coding DNA Sequence Number=SeqID_42871
MVQGPEQGMLMNPPLLPMKAPPLLMTFPEPVQAVGRQTWIPCQLPPYWRPRHGRSLAQVPQHVAPIRSLVQALVLPWDDSATGDEGLEKGNRASSKTTSREM

SEQ ID NO: 86247 - protein, 374 aa, Zea mays
  Coding DNA Sequence Number=SeqID_42872
MARDLKVFPYGRNIAVVVSAVMNKDHQDAAQKRRAVIKMVDPAREAKRAWGSTKAAASGSSKSVPAAKPAAPGPSKASTGAKTAASGRTKPPPGGPVKGWEVPSPAKLPSPGRRVADFGTNISVEDYLGSGEGQLVVVLPSVATTSPSAVVRAKGTAQDPWAAFCVSGEIVTAAAARDVAGTMSQRLREVSQQLKQEELLVLPTIVHGFMSYASLVTCEGTMNALSREGCKHYEVFDRSDKDFEREIFKVEDPVVKQSAGALFDRMWGSHGREAVRERSDQAREQVAHAEDVEDLGGLIGAPPEAEVNPVLPEAEVNPGLPSDAGEGSFAALVPIVAGEGSLPAPAPTTEDPPKVVTKPAAEDPMAAAGPSQVA

SEQ ID NO: 86248 - protein, 32 aa, Zea mays
  Coding DNA Sequence Number=SeqID_42873
MKELLLKLMQLSRCLLLLSLSSSGSLNLQQGL

SEQ ID NO: 86249 - protein, 47 aa, Zea mays
  Coding DNA Sequence Number=SeqID_42874
MTSKRILKELKYLQKDPPTYVGKQQGKPTRLNFIKTTMIQKDKETLQ

SEQ ID NO: 86250 - protein, 809 aa, Zea mays
  Coding DNA Sequence Number=SeqID_42875
  Gene Ontology: Mol. function=heat shock protein binding; Biological process=protein folding
  Homolog annotation: Hit_ID=Q108V8; Match level="QueryCoverage=98%, HitCoverage=32%, E-value=0.0, Identity=72%"; Hit description=DNAJ heat shock N-terminal domain-containing protein, putative, expressed
MSGHRIDPPCGVAHLEMPYHGSVDMESASMHTKHLAAIAKEAVVSSDTVPGAKIRLWRRIREFNACVPYTGVPVNIEVPEVVVLALISLLPTIPHSLPADAPPLLPPSPKAAATIMGFVACLRRLLTSRSVASHVMSFPVAVGRIMGLLRNGSEGVAAEAAGLVAMLIGGGPGDSSILMDARGESHATYMHAKSVLFSQPMYVPILVNRLRPISVSPLLSLSVVEVLEAMLCEPHGETTQHATFVELLRQVAGLRRRLFALFAHPAESVRETISVIMRTIAEEDAIAAEFMRDAALKDGALLRHLLNAFFLPAGEQRDVSRQLVALWADSYQPALDLLSRILPPGLVAYLHTRSDEESQSQYDEAPLSRRQRRILQQRRVRGSKSMSVQEQGVPPNGVEDGEPFRHTSAGTYGVADVHQRHVGPYSSTHSPLPGISIDPSCAVTVPHGFVPEALSENNHQIGEPQLDSHVYSVDSNANGDLVSSSHSDFSVPAQVVVENTPVGSGRLLCNWYGFWRAFSLDHNRADLIWNERTRQELREALQAEVHNLDVEKARTNDIVPGSSVTEDAGGSDNLPRMSWNYAEFLVSYPSLSKEVCVGQYYLRLLLEIGSNYRAHNFPLRDPVAFFRALYHQFLCDADIGLTVDGAVPDELGSSDDWCDIGRLDGFGGGGGSSVLMNDLSNVEACVLVGGCVLAVDLLTVAHETSERTAIPLQSNLIAATAFMEPSKEWMYIDKDGTQVGPLEKDAIRRLWSKKSIDWTTKCWASGMSDWKGLRDIRELRWALSVRVPVLTPTQVSRAYLVQLFTEELF

SEQ ID NO: 86251 - protein, 237 aa, Zea mays
  Coding DNA Sequence Number=SeqID_42876
  Gene Ontology: Mol. function=transcription factor activity; Cellular component=nucleus; Biological process=regulation of transcription, DNA-dependent
  Homolog annotation: Hit_ID=Q10SM1; Match level="QueryCoverage=77%, HitCoverage=92%, E-value=2e-26, Identity=42%"; Hit description=AP2 domain containing protein, expressed
  Pfam annotation: Domain name=AP2; Domain location=63-113; Score=65.1; E_value=2.4e-16; Accession=PF00847.11; Description=AP2 domain
MDVAVASGTGIGHLHFLHVLLLESPWFSPAECMEREEEQEAGTGTGTAQALLGRRVRADTRHPVYRGIRYRGGKWVSEIREPRKSSRIWLGTYPAPEMAAAAYDTAALALRGAEAALNFPGAALSRPVPASRSPDDIRAAAASAARSQSPQVGGEAAAAAGGGGGGASTSWSGAGADAQGPAPERRAGDRSIVDEDDVFQVPRLLAGMAEGLMMSPPRLAGAALLEEDVVVSLWDHS

SEQ ID NO: 86252 - protein, 143 aa, Zea mays
  Coding DNA Sequence Number=SeqID_42877
MGKGTKRKREPTPPSDDFGDSEYSEEEFSSESEGSPAPVSPPASSDDSDDSQGIAAEVWTYIRAVERSGLEGSDESEFSSEEEDSDGDEGEDDDDDDDGDGDGSGEVSKGGTKDGSSVGSTGGGDSKGGTRGGGGGSNSKASG

SEQ ID NO: 86253 - protein, 68 aa, Zea mays
  Coding DNA Sequence Number=SeqID_42878
MANDDRVEGMVAQTRDDVSVTTRQWATRAAWKRRSGVDNDGGGARGGVDGGVDARRGGLKDDPNNIVH

SEQ ID NO: 86254 - protein, 629 aa, Zea mays
  Coding DNA Sequence Number=SeqID_42879
  Gene Ontology: Mol. function=unfolded protein binding; Cellular component=cytoplasm; Biological process=cellular protein metabolic process
  Homolog annotation: Hit_ID=A2YUU5; Match level="QueryCoverage=85%, HitCoverage=93%, E-value=0.0, Identity=80%"; Hit description=T -complex protein 1, delta subunit
  Pfam annotation: Domain name=Cpn60_TCP1; Domain location=83-609; Score=565.9; E_value=4.2e-167; Accession=PF00118.15; Description=TCP- 1cpn60 chaperonin family
  Subcellular localization annotation: CTP_CleavageSite=47; ConfidenceScore=5.44e-01
RSVALSKSPFPFPNPRAAAYSSLQRDLSPDQALNATALANLLSLRSMAAAVAAPAPSRKTETYTDTKRRDDVRGANIAAARAVADAVRTSLGPRGMDKMIASGDQAQEVIITNDGATILSRMALLQPAARMLAELSRSQDAAAGDGTTTVVVLAGSLLRRAQSLLSAGAHPTAAADALHRLATRAVEILHAMAIPIELSDRESLVKSASTALNSKVVSQYSTLLSPLAVDAALSVVDPAHPDLLDLRDIRIVKKLGGTVDDTELIPGLIFDKKASHAAGGPTRMENAKIAVIQFQISPPKTDIEQSVIVSDYAQMDRILREERNYILGMVKKIKAAGCNVLLIQKSILRDAVTDLSLHYLAKAKILVVKDVERDEMEFITKTLNCLPIANIEHFRTDKFGYADVVEEVSVGEGKVVKITGIKDMGRTATVLVRGSNQLVIDEAERSLHDALCVISRNQNGRDAVLGVDVASCETLCDASLKYWLDETHGTNARCLVSKRFLIAGGGAPEIEMSMQLAAWAKELRGMESYCIKEFAEALEVIPYTLAENAGLNPISIVTELRNRHARGEKNTGINVRKGQITNILEENVVQPLLVLSIEAAGEDHIADLPRSSSPSLSHPFLQDKPNVNH

SEQ ID NO: 86255 - protein, 66 aa, Zea mays
  Coding DNA Sequence Number=SeqID_42880
MVKNFDRKTVQIAMNVVVTSHLLVCLYSAAAFENKSPTDPLRGLYKVPLASENPLQFMGRALARIP

SEQ ID NO: 86256 - protein, 84 aa, Zea mays
  Coding DNA Sequence Number=SeqID_42881
  Gene Ontology: Mol. function=transposase activity; Biological process= transposition, DNA-mediated
  Homolog annotation: Hit_ID=A2ZMN2; Match level="QueryCoverage=94%, HitCoverage=19%, E-value=1e-09, Identity=30%"; Hit description =Putative uncharacterized protein
MAMVADAMYGFAQTIICPKDPTFSKVHNKLRPYDPSFDGCIGEANYPHPPAGRYYLVDAGYSIRDGYLPPYLNQRHHLEDFNRT

SEQ ID NO: 86257 - protein, 168 aa, Zea mays
  Coding DNA Sequence Number=SeqID_42882
  Homolog annotation: Hit_ID=A2WP36; Match level="QueryCoverage=52%, HitCoverage=41%, E-value=1e-27, Identity=68%"; Hit description =Putative uncharacterized protein
MVYFFHWTDDRLLRVKKMTDDPHALRQWCSFTHSDATYSHTHIIEQNDMTIDEYYSAFDRLMSSLLSMLPTCATNPCPAYQFIEKFFTFVMGVRAEYGTLCARLLHTSDSITMAKALSDLLDEETRLKSMSSATGSGSHSVLAAAHKSYAPRSSFWFLLSISRRIPSV

SEQ ID NO: 86258 - protein, 444 aa, Zea mays
  Coding DNA Sequence Number=SeqID_42883
  Subcellular localization annotation: CTP_CleavageSite=45; ConfidenceScore=5.82e-01
MGSPPDPTPPPPDPNPSPSASHHSPSTAATPASATTPQSRPLGFRASQVGRSKFQRWDDTASGSSSGRPLHSYKEALLSRTGTTSPALDVKTFSAARSVFCDKEERQCRRDALAPVGKDDGWHVVKSRKRFRCAPPRRGNTVNLRGRCLKLEHQASLCPSIQVGPQEQKIPGCLRDHLDTDRPFSRESYREGKKFVWQRLEEPRDRLSVFRRLSSQKVSSLQSGAGSVAPHQKKSVWVRISPTPQTTDPKTDQLIPMMNNLATVVDQRSLRNKRKRRRSKSKKGKGPVEDAGAGASVDSPPSSSDNTKAHYTQSRVESHNIYLPTADVSRVLTFTDEMAREEINLRKALFVTIAGTRPVVQGSEVLDEVARSFGVSIDKMSIHHSSPEDFLLFLPDEEMASKVFNDGRLFTGPRFCMLFKRWSRFLHASVSNGPLSGCADLWDP

SEQ ID NO: 86259 - protein, 216 aa, Zea mays
  Coding DNA Sequence Number=SeqID_42884
METGGILVLDVRALPLMAGPSQDVEHAAKEEILCEDLRQLQILKAIGQDPRWKMNNSLDMDPTVIMSGARGSLTPPKTILPQPLVTGSLELAGSGSPLALVPSQVSAFPPAGPVLGPPETTCLSDVSPHMVGPLETHTLRPVSPQDVGMGNAGSGSGFGLPQTDCAPVASTPIIGLPETQKFVFLPSMGNSGGILVAWKRNIGHTGLQRIDSHREC

SEQ ID NO: 86260 - protein, 375 aa, Zea mays
  Coding DNA Sequence Number=SeqID_42885
  Gene Ontology: Biological process=protein localization
  Homolog annotation: Hit_ID=A7R5T8; Match level="QueryCoverage=98%, HitCoverage=56%, E-value=1e-133, Identity=59%"; Hit description =Chromosome undetermined scaffold_1058, whole genome shotgun sequence
MKHFSPKQLQSLNVDEKWEGASIGTILMRNKLQDATLDENILRMIFVLNSTDSSVKQIQYCAIILQPVDLKIDEETLMKLVPFWRASLAPSGTTSTQFYFRRFEVHPIKIIASFRPGGRRTTYSSAQEALRALLHSVIKVPEISNSAVELNGVLLNHALVTFRELLLKCAQHYSWYVLRAIYVTKGSKLLPPSFASIFDDSASSVLDVFFDPSDGSLNVPGLTIGMFKFISKNMKSGGFSGTKRYLGDLGKTVKTASSNALFAAVTEISDSVVRGAETNGLNGMLYIEGYLQAMLDVMYKQEYLRVRVIDDQVILKNLPPNSALINEIVDNVKSFLVSKALLKGDSSTVRPMRHLRNEPEWRIAPTVLTLCEHLL

SEQ ID NO: 86261 - protein, 238 aa, Zea mays
  Coding DNA Sequence Number=SeqID_42886
MGQGEEPTSSKAYAFTCDNKKMRGKKKAPSSSEEEEEEEDDDDDDEDDQASISSSEDEETVRRGGKDSQPPLIITLFTVISQMPYGERNVVIETCSDEIAIENEQLRQEVACLGKALHDKKGKAKQSQPPQDNTTVGVNKPVEGETVVCRLCHKECHKSYQCKVKTGEKQKKKPTSKISDTYINKVDKRAATPYLIKKKKNGKVIAVKANKQANKGKGTKRIRVPNKIISTMKSTKKV

SEQ ID NO: 86262 - protein, 215 aa, Zea mays
  Coding DNA Sequence Number=SeqID_42887
  Gene Ontology: Biological process=protein localization
  Homolog annotation: Hit_ID=A7R2R8; Match level="QueryCoverage=80%, HitCoverage=8%, E-value=5e-35, Identity=44%"; Hit description =Chromosome undetermined scaffold_444, whole genome shotgun sequence
MELLEKLPQPGGLGHSVGHSAVLGLSVRARDDGLPLGGPGDEIENSSRLALVCHFKDNGDALIPGQQSTSVFLSHLTFDDNISHDQMVSICLLKEGVFSTIPISISLHESGIFAWRTRVSPVKDLTTFSGPFIVVKVSHSSEEGLSLSVQPLVRIHNKSDFPLELRFQRPNKASEEAAFVTVRSGDMVDESTGVFDAMDLSGGPKRALMSLALGK

SEQ ID NO: 86263 - protein, 117 aa, Zea mays
  Coding DNA Sequence Number=SeqID_42888
MQNNVNIPETMLAESAEKTSRGVVYLDFAFDNLKTIMDQQRGELLMQFIKLLINTVGFIRSPPREALKMMSDDSKSKLQFNTEFYNEDPMCLPPQYVQQAPLCSPSYLFYKTMLVFQ

SEQ ID NO: 86264 - protein, 106 aa, Zea mays
  Coding DNA Sequence Number=SeqID_42889
MVNQVRNLRSTKWDDHEVIKLILSDRDEDKKGMQKMEKKKYYHKKCGEAHVVREWDSMRDPTTTNMPPTLSSKRDFSSPTSATSVSWPRRAKERYNLEPPQIYYFR

SEQ ID NO: 86265 - protein, 804 aa, Zea mays
  Coding DNA Sequence Number=SeqID_42890
  Gene Ontology: Biological process=protein localization
  Homolog annotation: Hit_ID=A7R2R8; Match level="QueryCoverage=77%, HitCoverage=33%, E-value=2e-41, Identity=23%"; Hit description =Chromosome undetermined scaffold_444, whole genome shotgun sequence
MVLVEALRARLLAALRPWLAASSLAPRVVARGLKLDVAALNAAAGAGESPSWPATFDRAAAAEVELAASPWAAPAIDAVVRGVDVALTLREPAPRKQRPDYKEWVSEEKKRVLASLDPQVRFDDVMIQIRYLDDSHFFVLRTTDLRFGPEPVFRSTLFRGLVGSLIPSRKKNKLSVKCAEFEFLMKENDSVDCSASFTGVSASVRLDNLQLSAFGIHVPKTCWKISPKFAPSLLVILDIANQKEDYAVRNGRELWKAAAQKVDNSVVCQRFSLRKAVSCAAFWRSYVHAYVLLLTLAGYPSDKIVVRNCGRVSRNKKFLGTIRHQWKTVVDLEDKIPVEAIARARRAARSKLIVSQQLKKQESSKAVLVSFLLKILMPFLCLWRFLVFIWRPVWAMMGPRNKASYAYFFPGSTYDVDMELHVSVHLGELSVTLLPFVDCFTDMKGSDRRNTQNELASVHLVMKSSCLLYSAGCTTQSFYLVLGELKTCLSSVPKLVQADSNNSPRRSSSFGTSEFIKDTDSRIILWCDSASMSPFSRQQADRSLYFNDDLSTALIKSDMDELWSNWMIISNAYNESGVIHHEKPSIIFEFKSFLIDPYISISGYQQCRFTIGRLNLDLDYLCVSSTYLLYRQFMHHKQAKEPTERSADFSNNDDTHLDSTSGVADKLRSSNHRIKVAMLDVIPENTLRIVALVTGPSIRNYVYSFFGVRNVISTNLEGKIIGFLAFFCMDELFMVCQIIRNNWRVIIVSTNINNRFIRIGCGTSARMTNVGFVEDEDPDEGAWMGGSHMKEVDSVEKEECVREL

SEQ ID NO: 86266 - protein, 139 aa, Zea mays
  Coding DNA Sequence Number=SeqID_42891
MVTVERARGHGERWRSSESSKKERHMSEGELGRMRVGEMAERTEGGLSRGWARGGGRNSRGRGRGHGGCADWKLEEGERADKRGPPDSGSGTQMREGTRRQAGPKRQREGGRGRAGAKTTADGWAPPVRQSERARKTNL

SEQ ID NO: 86267 - protein, 89 aa, Zea mays
  Coding DNA Sequence Number=SeqID_42892
MAKCPIRRAVESRCWRRFRCAPKTASLASESPRRIEEMKKAEDAEETRWRLFRKPAPKLKVGNARANGAAVVDWKMASYIHMPACWCWG

SEQ ID NO: 86268 - protein, 59 aa, Zea mays
  Coding DNA Sequence Number=SeqID_42893
MKVDKMKDTSMAVEAVTEMAMHEDIINTDVAQSNDSFARNTIGREEEAAVISKGSSLII

SEQ ID NO: 86269 - protein, 254 aa, Zea mays
  Coding DNA Sequence Number=SeqID_42894
  Homolog annotation: Hit_ID=Q6QP51; Match level="QueryCoverage=27%, HitCoverage=34%, E-value=5e-13, Identity=57%"; Hit description =Putative growth-regulating factor 1
MQRLGDCSRNPATAKPLTASTNQLKNSEPDHAPGLRPGRMREQQGKQRRSPRSDCCAIHPGKADNSKFSLGRDRKLCLAQPWVSVSGGGLRLTRPQDSASASASGRITTSPDPGLGLRRSLRLARPWARTDRATGDTSLPYPYLAQATREQDRRAIWLVPVTGNDGSPCASMTTVVLSPLRKQGDVSRIPAAPSAVLLQGSGTSPTATLSHTLGSSTSPTAMLACTQGSGTSLPDTLAHKLHPPLYTWTLSLHL

SEQ ID NO: 86270 - protein, 123 aa, Zea mays
  Coding DNA Sequence Number=SeqID_42895
  Homolog annotation: Hit_ID=Q6QP51; Match level="QueryCoverage=49%, HitCoverage=27%, E-value=1e-23, Identity=85%"; Hit description =Putative growth-regulating factor 1
MIDMAKSGPAVIAAAGEQKQRDRERGYFERDPSPRRKRAPEPSYYSGVRRLAPRKDSTTALEHSGSEPITDQGFEGWPFGRVRQPPQSTRAPRPLLIRGSKAGPSEGFDSRPEHSGSAPITDQ

SEQ ID NO: 86271 - protein, 169 aa, Zea mays
  Coding DNA Sequence Number=SeqID_42896
  Subcellular localization annotation: CTP_CleavageSite=84; ConfidenceScore=5.00e-01
MNKNTGIQSAITNRTPVPPPQVRTTPLHGGRPAEQRKTDERHAVTRSSSGDDDDFCSGGPNSGNADLRVDVAARRPPPMPKLVRQGRAEGRRVGGTGKGGYPERDPSPRRNRAPSPPLLIRGSKAGPPKGSTVASDRVGPTPTTGQGFEGQPPEGFHGRLRLLGLRAHY

SEQ ID NO: 86272 - protein, 59 aa, Zea mays
  Coding DNA Sequence Number=SeqID_42897
MSDVLRDSTSLAMIQNSSIRKFGVGLISYGEDCKQKLKAPDSELHLRKDRRTRSLLWKW

SEQ ID NO: 86273 - protein, 269 aa, Zea mays
  Coding DNA Sequence Number=SeqID_42898
  Homolog annotation: Hit_ID=A0EVH6; Match level="QueryCoverage=60%, HitCoverage=40%, E-value=1e-09, Identity=33%"; Hit description=Milt putative polyprotein
MAGSKDHTVIFPDNILKPAVESLTGDEQEQYEDYMRQAKEKFLSKYTVDHHQKVIKHGETDVASLLSSLQVPNVSKPDDIHSIKHNMISMSNTSATNGDSQPQPLYGKPMNSYPGQIPPPSSLLGRSAPLDMVGSSKLLPGKSGPYADHPAFPIGQSRTAPGLLRGAPIIANTTDQFGCTTGQTGYAYAKLTVAHYAPNYYTPQQQYVLSPTYLTHITPYDHRAINIIDRSQQEGRHNNARPNEPHSLGSDGLPPGAIEKIREEMTELF

SEQ ID NO: 86274 - protein, 76 aa, Zea mays
  Coding DNA Sequence Number=SeqID_42899
MKAKSHHQPIILRSTCKNCATSKVEYTNTQLDLPVTALVPIVTGMGDHVSGHVRGYVHFQVHSGIRTLILIPIFIS

SEQ ID NO: 86275 - protein, 149 aa, Zea mays
  Coding DNA Sequence Number=SeqID_42900
MTAVRAARNLTEDLRRRGWGCAASTRATTRDEGSGDRTGGLLQRAACCAFYRTTGGHNDEQRGRGLAAGISGRPWEELAGGNARAVESALNRPTALCAMVYGWGEQGREGAELSFLLLRVEENRERPWRSRTPGWGQHAMGSAVGVHGG

SEQ ID NO: 86276 - protein, 110 aa, Zea mays
  Coding DNA Sequence Number=SeqID_42901
MGRSKKGGSSSHHSGDKRKREPSPPPRTSGIAAEVWTYIRAVEPSVLEGSDESDISSDEEDSSDSSEEGSDGDGDDEGDGGDKGDGGKGDGDSGKDDGGSGRASGKAPLA

SEQ ID NO: 86277 - protein, 154 aa, Zea mays
  Coding DNA Sequence Number=SeqID_42902
  Gene Ontology: Mol. function=sequence-specific DNA binding; Cellular component=nucleus; Biological process=regulation of transcription, DNA-dependent
  Homolog annotation: Hit_ID=A9J228; Match level="QueryCoverage=84%, HitCoverage=59%, E-value=5e-30, Identity=53%"; Hit description=MIKC -type MADS-box transcription factor WM30
  Pfam annotation: Domain name=K-box; Domain location=4-105; Score =38.4; E_value=2.5e-08; Accession=PF01486.8; Description=K-box region
MATVASHRRGGSCLTLQGVERASRASYRLQLAARTLHGGRRQLMGQDLSGLGVKGLQNLENQLEMSICCIRTKKGSLIQQDNMGLHRKVNLIRQENAELYKKLYEKEAEGEVNRDSTTPYNFVVAEGANVPIHLELNIPLQENGVEQPVAPKLG

SEQ ID NO: 86278 - protein, 26 aa, Zea mays
  Coding DNA Sequence Number=SeqID_42903
MAADLPRSLQFRGWDYGSLDQSTSLY

SEQ ID NO: 86279 - protein, 114 aa, Zea mays
  Coding DNA Sequence Number=SeqID_42904
  Subcellular localization annotation: CTP_CleavageSite=18; ConfidenceScore=5.00e-01
MDNAPTGSTLMLSGLLLRSQSLAGSGSSFWFNARRGRLGKAYEETLTIKDGKLYIFKDKYEKFNMQGGRSYEQEKDKKSITFKGPKVKYDESDDIYSDIGVYKEYSYDNLVEVL

SEQ ID NO: 86280 - protein, 192 aa, Zea mays
  Coding DNA Sequence Number=SeqID_42905
MPGKANYCCPARMQHSVLCPRFRGEDGSEDLPVRFGAAGARWCGVGGQVDAAVGAEVVAAGEVGFFADETVSATRGPTSGSLSLISGSCPLSGDANESLPVAAAILGPWLLLWRSLASRPESIVPQALRCGGVKSSPSANKRPSFGFNKGAKRQPKAPLVWRTGLSEDSNSELAIFGNFRKHSRYIFTGTVP

SEQ ID NO: 86281 - protein, 347 aa, Zea mays
  Coding DNA Sequence Number=SeqID_42906
  Homolog annotation: Hit_ID=Q6QP51; Match level="QueryCoverage=82%, HitCoverage=98%, E-value=5e-32, Identity=38%"; Hit description =Putative growth-regulating factor 1
  Subcellular localization annotation: CTP_CleavageSite=46; ConfidenceScore=5.30e-01
MQAACNRTKGAHPFDFDTSSMEAQAHTSCNRTGDTFGRQSRRRFTSAMMTASKKGPGKGILRKGSFSAKEAGPEPPTDQRFEGWPLGRVQQPPQSTRAPRPLLVRGSKAGPSEGFNGRLRPLGLRAHYSSGVHRLAPEGFDSRLRARRARYDPGYVRYITKARATLPRPRLCSRDTIPPRPSPTSGKDSRPRKIHASPEGPLKQRTDHRFARGTARGSDSTSTSEDGLRLARPQGSDTASASEDGLRLARPRARTQPRPRKADSASPDPRARTQPQPRKTVSASPDPGLRLNLDLGRRNPPRLTQGSDSASTSEDGLDLDLGGAFVSPDLGLGPTTSQGGHHYPTPS

SEQ ID NO: 86282 - protein, 145 aa, Zea mays
  Coding DNA Sequence Number=SeqID_42907
MRSLLLLLVVALLGPDSPDAHGDEDAVNEDDVTIFGAAPGDGHASVQDVMTKLEGGVVHGDGDVDCQDDVTKVACDATHGDGNVGCQDGVTKVACGATHRDGDVGCQDDVTKVACSATHGDGDVGCQDDTMKLVAEAIGSNRNLS

SEQ ID NO: 86283 - protein, 134 aa, Zea mays
  Coding DNA Sequence Number=SeqID_42908
MVGPELRWPNFREGLNMGLASDPELRWLDGEEALATEVSTAAKWLAALVGRPKPHQRWTQRRGPRLWQRWWWPGQWRQSLTCRAHGGFGGGQASGGSRAQAGSGVRVGGEQADDLGEGEGERRQGAAARPLAGR

SEQ ID NO: 86284 - protein, 102 aa, Zea mays
  Coding DNA Sequence Number=SeqID_42909
  Gene Ontology: Mol. function=protein binding; Cellular component=late endosome membrane; Biological process=protein transport
  Homolog annotation: Hit_ID=Q53NN3; Match level="QueryCoverage=81%, HitCoverage=37%, E-value=4e-24, Identity=74%"; Hit description=SNF7 family, putative
MAGGDDKERGESQRWAREYEQQRCEEGGRWGSEGQQGAVKIMTNYLIRTRHQITKFYALKSQLQGVSLRIQTLKSTQAMGEAMKCVTEAMWQMTRQMNLLAL

SEQ ID NO: 86285 - protein, 147 aa, Zea mays
  Coding DNA Sequence Number=SeqID_42910
MAMNVVVTSHQPICLYSPTGEEGEPPQCAHWLNGGLANARNILIVFDNKLREGVFRTFGIPKPSCFSRTELVMKKRSSTAKGYYWGSSSPPKVLKEDTFGKMIQRSALLLPKVLKTKTLRRSNDVETPKLLSALAQINQRRKRLDRP

SEQ ID NO: 86286 - protein, 126 aa, Zea mays
  Coding DNA Sequence Number=SeqID_42911
  Gene Ontology: Mol. function=ATPase activity, coupled to transmembrane movement of substances; Cellular component=integral to membrane; Biological process=transport
  Homolog annotation: Hit_ID=Q6Y3I1; Match level="QueryCoverage=73%, HitCoverage=9%, E-value=2e-38, Identity=68%"; Hit description =Multidrug resistance associated protein 1
MSDGLVVPIHFEVGQELCDHLLLVLLELELFALEKCQLKTAISTTSALLDTVDAILQKVIRQQFSSCTVITIAHRVPTVTDSDKVMVLSYGKLLEYETPAKLLEDKQSAFAKLVAEYWANTKRNST

SEQ ID NO: 86287 - protein, 64 aa, Zea mays
  Coding DNA Sequence Number=SeqID_42912
MAMMGSITDKMYLCQVSFALDRLIPERPTHNGSGEMARVACTLCGKRLDGGVFVLSVGVNPVWS

SEQ ID NO: 86288 - protein, 217 aa, Zea mays
  Coding DNA Sequence Number=SeqID_42913
  Homolog annotation: Hit_ID=Q6JAD6; Match level="QueryCoverage=18%, HitCoverage=5%, E-value=1e-14, Identity=92%"; Hit description =Putative uncharacterized protein
MPRTKNVSAPGGGDDEDPRHPFRQVKGKTVYLEQQEGRKKRHPRLFDLQRATAAQVSKIQQKPIERTRQGSKQRSKKKPKCSLVWHTGLSGVAPDSVRCTREDCLRTLHLRVSQAQPTIIHRTVRCTTGQCPVLQSEAALNWPASGKWKAAPLKFTGLSGVHRTVRCASGATATSRQRSTLTANSAQQYTRQKSEQKDIGAPDCPVCTGTVRVPHED

SEQ ID NO: 86289 - protein, 250 aa, Zea mays
  Coding DNA Sequence Number=SeqID_42914
  Gene Ontology: Mol. function=ATPase activity, coupled to transmembrane movement of substances; Cellular component=integral to membrane; Biological process=transport
  Homolog annotation: Hit_ID=Q6Y3I1; Match level="QueryCoverage=63%, HitCoverage=10%, E-value=2e-66, Identity=84%"; Hit description =Multidrug resistance associated protein 1
MSKNTRDTRFISRFSHNTKVSYFLVVAPTKILSHRFNAVDAHTAAVLFYECVMTALAEKTVVLVTHQVEFLTETDRILVMEGGQVSQQGKYSELLGSGTAFEKLVSAHQSSITALDTSGSQQNQVQGQQESAEYIVPSALQVIRQASDIDVIAKGPSAAIQLTEEEEKGIGDLGWKPYKEYIRPSANQAARCSSSYRKIDLEKGSAWDLGGEPGHGMLQRLDELYGHSPPPTAPSSRGPRAGVAAGAGAP

SEQ ID NO: 86290 - protein, 241 aa, Zea mays
  Coding DNA Sequence Number=SeqID_42915
  Homolog annotation: Hit_ID=Q6J9V9; Match level="QueryCoverage=21%, HitCoverage=18%, E-value=2e-16, Identity=79%"; Hit description =Putative uncharacterized protein
MLCAFDVVETRANVSSGDSRVALVCVFSFEGPLIGNIAFQRRFEQELGVLPSSWSDPLREEILTLRGEAVFKITSDVRYYLVQAICSKIRFVYNQVPKLRGAPMEPHSTGHGTLVTKFSFEYRELFKGPLYYAITITFAMSIMENLTNCYSTYMQLMCWEWIHYSYLVLQAMVIWGNDRRMEFVRKAKILQQNFVLDLLRYKDNLCRYIIPTNIQQRFTIAKNIRLVYNCRHICLSLKILY

SEQ ID NO: 86291 - protein, 122 aa, Zea mays
  Coding DNA Sequence Number=SeqID_42916
MERSVQRHAVAVGEDLSIREPEDVRDRTVAPRGDSHQRRGNQPLRGACGRLRVVNAGAGTALLRHRLLLSSPSDPSRHGSYVFRYSGADNVINGLWAVDDDVGGGEVIDGEVGGSVRSECLR

SEQ ID NO: 86292 - protein, 503 aa, Zea mays
  Coding DNA Sequence Number=SeqID_42917
  Gene Ontology: Mol. function=protein binding; Cellular component =extracellular region; Biological process=cell adhesion
  Homolog annotation: Hit_ID=A3BV13; Match level="QueryCoverage=92%, HitCoverage=68%, E-value=4e-34, Identity=26%"; Hit description =Putative uncharacterized protein
PSGNGAGHRVVGDTYDEDCLISGSSVLSEITSESSRTDDGTLTTVATQYSEKGSSTEDGDPSDPAVGSEQIQDVPTSVVPAEPEDRAKFSSEISESEIQNPSIVRPESDAAGGGTSELTDDVARQQDEVAVTGEDAVFDAIDGSKSSERNSVQGDELNLSCQDILQTETGGGHSSTVVEEDSGSKDPTASDGQEILIEETEPNQQSKHALTGSFEKVPDIESVGSSAEKSVGTGDDLLQSGKGACHSEIPVDIIAQLQLDPTSGTADHPAISKGADNFEGQHYHTTDESIGAIPSTFEPAVGAKVVSVDVTADLTEDVCSSDITIDDGMQENVTSGTIVPSQVDILDSSPSATAHEVNIVGSINDDDEKSQDGKSSADLASYEVKEMVVKDNFEEKQQTKEVIVDPTPHEANNFPSTDNHEENEQNKEIVADTTSHKISAVQSMGSTEEKEHIEDFIAKLASEEIIFTSNRDIVEQQDETDMKTNYEIDRARNLEATEEIAAG

SEQ ID NO: 86293 - protein, 405 aa, Zea mays
  Coding DNA Sequence Number=SeqID_42918
  Subcellular localization annotation: CTP_CleavageSite=23; ConfidenceScore=5.03e-01
MPSSSSSAATTPPAAASSEETLSSSMVEELRAGDSVDFGVSRMTSARIEDMQRLGYFGGGVARAPGTEKVPEPEGELVVFEAFFAAGLRLPAHRVFELNQLPYDGYPGQDEADRRGKKPAVETGGDPALAAAPSSKKRKLGTAMGGLGVSDSFARELMRTCAAPGERMSSPELRESSARMLRVTGGCWPRNVPVPYAAGEDCFTSRMARRWRVFPYGRNIGAVVWAVMDKDRQGAAQKRQATVRLHEARPKRQRGAAKAAASGGGRLPPAAKAGASAPSKAPEATAGVGGSKSMKVVPPASGVAEASKAARALPLSGKRVADFGTDITVDDYLGGSDEGQFAMAASGAETATAAIVPRARGEALGAGGEVSALAVVRDEASAATRRLKGVTKALSQAMEALSQVR

SEQ ID NO: 86294 - protein, 93 aa, Zea mays
  Coding DNA Sequence Number=SeqID_42919
  Homolog annotation: Hit_ID=A2Z2T2; Match level="QueryCoverage=30%, HitCoverage=2%, E-value=2e-07, Identity=78%"; Hit description =Putative uncharacterized protein
MESAHKSGGGSAPGAGAGGEGVLCHACGYQYPNGHPSAKQRRAHRKHCGKPASAAAAAEGSGEHEASELLLGTVGSVPPWWCTGLPGNVVGKI

SEQ ID NO: 86295 - protein, 45 aa, Zea mays
  Coding DNA Sequence Number=SeqID_42920
MNQLDSFTPTGSSSGVPAAVDIDGLAETTTEDPSHGLCKFARSLD

SEQ ID NO: 86296 - protein, 68 aa, Zea mays
  Coding DNA Sequence Number=SeqID_42921
  Subcellular localization annotation: CTP_CleavageSite=39; ConfidenceScore=5.14e-01
MASIPPPLLPQASASLCPLCLALLPSTPMVNALEKNPMFCEEKASRSTLVDVRSSAQIGIAIVLTNVD

SEQ ID NO: 86297 - protein, 107 aa, Zea mays
  Coding DNA Sequence Number=SeqID_42922
MAAVSPGTPHIAHPNPKTATVGPKRIRERGEFVGGSYQALGVAENSGHDKVLPGGAVRSPMRNWAAHDIVPRVGRSRAPWECHGESPSQQSRLMLVEGPEFVDGGCG

SEQ ID NO: 86298 - protein, 71 aa, Zea mays
  Coding DNA Sequence Number=SeqID_42923
MAEQRGKRNHPDKGFIDISIGGKGKDGYRYKIAKHEAIELKDRMGETKEREVLTIVFQQKLGKVYCVTDIA

SEQ ID NO: 86299 - protein, 56 aa, Zea mays
  Coding DNA Sequence Number=SeqID_42924
MPLMGLGVCGSLCQGGDEDDGFGYDHGNGCPCCNPCSGEDEVVEEDFQEFQEYDEL

SEQ ID NO: 86300 - protein, 38 aa, Zea mays
  Coding DNA Sequence Number=SeqID_42925
MARNMVNRYGGYKCGHCTTAVGVSEALYAKAVFLRMIG

SEQ ID NO: 86301 - protein, 56 aa, Zea mays
  Coding DNA Sequence Number=SeqID_42926
MPLMGLGVCGSLCQGGDEDDGFGYDYGNGCPCCNPCSGEDEVVEEDFQEFQEYDEF

SEQ ID NO: 86302 - protein, 84 aa, Zea mays
  Coding DNA Sequence Number=SeqID_42927
HSGVFVDPRGVTPATWKAPDPVHNGQTSEKDPRPFRMGPRQITTGSQDSGAGHTRAPPWKGSGAGTLPARIETPLLLRGLWLMT

SEQ ID NO: 86303 - protein, 138 aa, Zea mays
  Coding DNA Sequence Number=SeqID_42928
MVGLGQTAATAGDVADSWRPTGRRMMVSCRERDLDTKGWRCLEGGLRQNGGREQYLAAPFTDVAAFFMEVAAPSTAAGVTATWTEGWWRAARRGPAGSCSGELDGRGDAQQGASAGCWRRLCGRKTDTGRSLLYVARD

SEQ ID NO: 86304 - protein, 203 aa, Zea mays
  Coding DNA Sequence Number=SeqID_42929
MKKMQRKTPTAEPRPDPADALTHRRDIGCFVAFYYLLPLPFYFSPYDLVHGNPNGEELEKRKEKAKVAYEYRCTFVLCLIGRPKAHNFWHGPYLARSNLIAGPHVHVYLRKEEAIGQAEKVEQQLLESMVYLVGISTVTVSTPSLHTAPILSMSVLSGSTNLRMNFWPSGGPCTACVEFLDVKTRELMLGPLCDYDYMSNYEV

SEQ ID NO: 86305 - protein, 236 aa, Zea mays
  Coding DNA Sequence Number=SeqID_42930
  Pfam annotation: Domain name=LEA_3; Domain location=138-230; Score =33.3; E_value=6e-07; Accession=PF03242.4; Description=Late embryogenesis abundant protein
  Subcellular localization annotation: CTP_CleavageSite=44; ConfidenceScore=5.29e-01
PPQAPRPPVQRPPAECGRRSLRSSKPTPTQADTTWPADALRGPSAASTSRRLARTHLPAAPRDNGNGELCPFGGTRLVRGAPACLDAPHAGLTFIIFTSTSLGKPRRARFAAPASGRKKSRAERHQPILCLPKQQQQLARWLCLSPAPPPASPSRRWSPRARAYAASAASGGHEARGRRARAAGEAKEAGRAAAAAAEGSWVPDPVTGHYRPANWAAAVDPADLRAAHLARTYARA

SEQ ID NO: 86306 - protein, 106 aa, Zea mays
  Coding DNA Sequence Number=SeqID_42931
MGEDTENQNKLIDSFFPSHIFLYLSLSPASICPTLFDPLYHNANRCAPDSPVHLQTEGNHELPNEVQIAPWSLKAIKGPPRRMELSNKHSLSILQLRDLVTTLLFR

SEQ ID NO: 86307 - protein, 121 aa, Zea mays
  Coding DNA Sequence Number=SeqID_42932
MLEHSTEGYESTWSRLATVSSHRTVFLVDLGEIPNWGLLVSNWRHDLVGWVLDYLTDSTAHSIYRLWGRWPVNLELARWRPEKEEVTGGAIMAFTGVVVQRGSDSECLTKQLVTPRSWIFA

SEQ ID NO: 86308 - protein, 145 aa, Zea mays
  Coding DNA Sequence Number=SeqID_42933
SQMEVHCQTSFCQNEDGFPKLLRACTVRLGIRSQPEYDGREFVEHGTKKETVQFGWPGCVHWKGSSCMGDDPIVVYLTAYLLTLDAQYDFLAQHHRQMIARAEDAEKRNRKLHVDLTTAQARATALESREVIAAEALKQAKDEHV

SEQ ID NO: 86309 - protein, 90 aa, Zea mays
  Coding DNA Sequence Number=SeqID_42934
MARTNHSEMGTTKLLILSSRWHVTEDEHAPNDGSWRKHAHDTVAEPSGGALIWKGARMTEPERVRWQVQNVTRELARCCKVSTKGANAEL

SEQ ID NO: 86310 - protein, 269 aa, Zea mays
  Coding DNA Sequence Number=SeqID_42935
  Gene Ontology: Mol. function=kinase activity; Cellular component =cytoplasm
  Homolog annotation: Hit_ID=Q6ZK88; Match level="QueryCoverage=71%, HitCoverage=56%, E-value=7e-80, Identity=81%"; Hit description =Erwinia chrysanthemi IndA protein homolog-like
  Pfam annotation: Domain name=Indigoidine_A; Domain location=42-253; Score=167.2; E_value=4.4e-47; Accession=PF04227.3; Description =Indigoidine synthase A like protein
MVGRLLRLAGLLDRGLVSNWVAKRLWAYFGHLVPGYPTLRSHLVATAQQQFRPLCSLLTRLAYQFLLLGALEVCIDMGEQTMDVSSDLTELGKTPVAVVSAGVKSILDIPRTLEYLETEGVTVAAYRTNEFPAFFTEISGCQVPCRVDSPEECAKIIYANKNLRLGSGILIAVPIPKQHATSGKIIESAIQTALKEAGYSQHLHFWDKRIIGNAITPFMLERVKELTGGSSLEANIALVKNNALIGANIAVALSNLQQREISRMGRSAL

SEQ ID NO: 86311 - protein, 84 aa, Zea mays
  Coding DNA Sequence Number=SeqID_42936
MERDKCAPVWILNEREMDGLGSLLAGRNFVVERERVGIAGRTGPLVGGHHRRRERPRLRLPRVKKTKENRWIRDVGSSTLIRWN

SEQ ID NO: 86312 - protein, 265 aa, Zea mays
  Coding DNA Sequence Number=SeqID_42937
  Gene Ontology: Mol. function=nucleic acid binding; Cellular component= nucleus
  Homolog annotation: Hit_ID=A2X8G8; Match level="QueryCoverage=80%, HitCoverage=11%, E-value=5e-85, Identity=69%"; Hit description =Putative uncharacterized protein
  Subcellular localization annotation: CTP_CleavageSite=54; ConfidenceScore=5.70e-01
MTSLTKVTLSCCLLTSTAPFLRLLSTRFSSRSHRRKSNKNKKKTGKFKSQKRPRLSSESEVILEETSVDTMSIDDNAPSPELISDESPHHYSNKRKKIMSATEEDSNSRSLKKFKKTKSSFISELSPRPKEDLNDSDPKSVARTKSDGRLSIPCMPVKRVIVIKPERLKKKGIWSRDCASDSWTSEEDAVLCGTVHEYGPLWELASDFLHSLPGGSSYRGRYHHPLHCCERYRELFCKYAISATDNSNSEKAPSGTGKAVLRVSE

SEQ ID NO: 86313 - protein, 134 aa, Zea mays
  Coding DNA Sequence Number=SeqID_42938
MASSSDSLRNGAKYGSTLEIGASSAFGGASAHRVSPRVPMDAVAFPLSPAPFLDDDLDFGDFTFASAPQPQPPTAAFAAFDDWGDFVASGLGSDAGTSAPTAAPAAAPSSSPWEKPRGPLPLSLFGVDAAADGQ

SEQ ID NO: 86314 - protein, 181 aa, Zea mays
  Coding DNA Sequence Number=SeqID_42939
  Gene Ontology: Mol. function=nucleic acid binding; Cellular component= nucleus; Biological process=regulation of alternative nuclear mRNA splicing, via spliceosome
  Homolog annotation: Hit_ID=A2X8G8; Match level="QueryCoverage=45%, HitCoverage=4%, E-value=6e-34, Identity=83%"; Hit description =Putative uncharacterized protein
  Pfam annotation: Domain name=HSA; Domain location=23-97; Score=57.9; E_value=3.5e-14; Accession=PF07529.4; Description=HSA
MASKGPRSRLDHDTRARRQKALEAPREPRRPKVHWDHVLAEMLWLAKEFDSERKWKLSMAKKIAQRANKSIVDQAAKGERKQKDRPPTTFRLPRLDVQNPRDGPMPVTTRHPLVAPVWHRVPTNRLFPTLGAQFLVLRRAHDRQTVALRRARNLRRLTRLAVERKASVVAQGVRKASTGRL

SEQ ID NO: 86315 - protein, 30 aa, Zea mays
  Coding DNA Sequence Number=SeqID_42940
RWVRPIGHGAKAEHVYQENQSGPVSTKWSH

SEQ ID NO: 86316 - protein, 82 aa, Zea mays
  Coding DNA Sequence Number=SeqID_42941
MVDSRATTAPRLARAVATSDATTIDICGLRRLCRFSLDCTAAAAKAKWLNSVMEGLTPTTDIHKYRKLNMRGYSWGEVLKVA

SEQ ID NO: 86317 - protein, 129 aa, Zea mays
  Coding DNA Sequence Number=SeqID_42942
  Homolog annotation: Hit_ID=A2ZBF6; Match level="QueryCoverage=74%, HitCoverage=17%, E-value=2e-07, Identity=40%"; Hit description =Putative uncharacterized protein
MDAVAFPLSPAPFLDDDLDFGDFTFASVPQPPTAAFDWGDFVASGLGSDAGTSAPTATPVAAPSSPWEKPRGPLPLSLFGADADDDGQEEEEGPTGPPPMATAPQCALSVPSNGSRPADLKDLIFAATT

SEQ ID NO: 86318 - protein, 207 aa, Zea mays
  Coding DNA Sequence Number=SeqID_42943
MFWRMTGLSAASPGSAAVGEERGGLCQGALDPAARGGGGSLAPRLRRRACGAEAQLPPLVRVDGVPGPEQRLPAPAAAPPLVGRVHGGQGVRVLLRLLRGAGSPRMGATRSNAEEAVGETRAAAAESTNGGHSTDAGGDADERRLSGRRSCDTGTEMAVSSAGRRRSNRWSRVWDRSITSPLKEFREERGACPRALPLGIEEGDPEG

SEQ ID NO: 86319 - protein, 352 aa, Zea mays
  Coding DNA Sequence Number=SeqID_42944
  Homolog annotation: Hit_ID=A2X8G6; Match level="QueryCoverage=99%, HitCoverage=83%, E-value=1e-49, Identity=38%"; Hit description =Putative uncharacterized protein
  Pfam annotation: Domain name=DUF828; Domain location=84-301; Score= -38.6; E_value=1.7e-06; Accession=PF05703.2; Description=Plant protein of unknown function (DUF828)
MGQIVKFGRTLSQIGVSRFDPKEGWQQKLNDQRSLDLYSEIPRKTEYSEPEETKNHLHTAKLRPQSLSSICKQGILEVIALLGKEKLECRSIDALAGNGTLDMCKDDNGNNMLNLNEEIKKRVEEIRALLSSGNVQRTGCQKYKTSHVNRMIVSPVAEWLKGKLMNIMQKGYVKREDKRLQTAQINAALSVAKLSTVVAGTIGNFTFGSNNLSGIAMTERREDTDMKMHAAIMSAAALVAASCAEVAKSAGATREQVSSVINMGMETRALGDLLTLTTSAAACLRGVEGLKMRISNCSLEGRMNNQKDATLFVRTPKGRFHKRIVSVHCKYDNIILTLGKKGHFKSSEKCEY

SEQ ID NO: 86320 - protein, 428 aa, Zea mays
  Coding DNA Sequence Number=SeqID_42945
  Gene Ontology: Mol. function=nucleic acid binding; Cellular component= nucleus
  Homolog annotation: Hit_ID=A2X8G8; Match level="QueryCoverage=68%, HitCoverage=15%, E-value=7e-93, Identity=63%"; Hit description =Putative uncharacterized protein
MYRRIIGSLKYLVHMWPDLAFTVVYVSRFMYSTIDYDLVYPRGIGEAKLLAIDEAVDRCSVFMGNKVCSCNNGGKPIVGMVTGRSHRKGSYHRETENGQHVRCGTQQDIWYHFIRECLKKLSFIKLAATLFLLYLVSKDQAQMLVNVTSELPNNELLLQKHFMAVISSVWRSKCCRHPCCFRNKPGGSSENWPMVNFRPSVNLVREALAAGQAKFTLTVIPPPSRNQEYSRNYLELELDFLKDQHAYEEDFPSVLNVSILEPESSKQAPEPVEQSLLSELSCRQAENRLRIASEACYDGESFHWASSSFHINDAARHKSGLKSIGKHKAASESGRPPKSKVQKITELHQEGPIAMSNFLCMPAQLLPSTADFHISDSLSDFGINDYEFNYSEDLLQEFDALEFFPDQGDSGLLGIEELEPLSDFTDIG

SEQ ID NO: 86321 - protein, 83 aa, Zea mays
  Coding DNA Sequence Number=SeqID_42946
MWKTSLLAMWKDEDVGGNGGHPGTMSGYRHTLKSNSTCSTVVYYGISMVPLLIGRRDEDEGQRHRHGGWDHDVLPWSSSSPFD

SEQ ID NO: 86322 - protein, 250 aa, Zea mays
  Coding DNA Sequence Number=SeqID_42947
MARARAYKTLPDLDCSLPRTLKPHRSRARRRLPVRSESAAAQPLGHHRPAGGAIPNPVQPSEKTVHTSVKLPERGIGVCFAGEASPRSPELSTPPEYVDRVNHSTILRFLVHTVAMLPREAHHALGLNQFAVVWPVYLPPTRTTACTRGPGDSGHPRRQAVPRRDRQSLPEPTPPFAGPPSPPVSRATLFFPAVTVYISGRTAECNLADGEYILVPEQGAAQEVAPDPAPEPAPEDLPATALEGKPRFYA

SEQ ID NO: 86323 - protein, 295 aa, Zea mays
  Coding DNA Sequence Number=SeqID_42948
  Homolog annotation: Hit_ID=A2Z3S7; Match level="QueryCoverage=52%, HitCoverage=16%, E-value=4e-30, Identity=51%"; Hit description =Putative uncharacterized protein
  Subcellular localization annotation: CTP_CleavageSite=42; ConfidenceScore=5.45e-01
MVAPTVFVVTTTPKNEGQNQVKPGQATFLLSFRLTAAAGSIRCSGGALSLFRRESYLHLHGRGRRPTASEHLRTPHVRRRGGVDLDLLEQLLSDDNGWLEVVSRSPNSVAFPPLSAFFSADATATTVTTTATTANASWWIQTGGASPSSVEEQFSQALSYIRDMQSDGDVLVQLWVPVNHDDGKLVLTTSEQPFTLDHRSDSLLRFREVSTKYQFSADVKSGGFAGAAREGLYRQAPRVVAEHQVLHQLRVSQGKGCTIPRCPWHHGSASVREGKLQLTGRHQADHDKAEDKLHF

SEQ ID NO: 86324 - protein, 98 aa, Zea mays
  Coding DNA Sequence Number=SeqID_42949
MGENDEADRWARAARERERREREGGESLTGHDEVDYAVALAVIGYLEPLWAADGWRADDMVEYVGGQGLASSGCLGQCVDLLVLGSVHMLQGGDTKCP

SEQ ID NO: 86325 - protein, 121 aa, Zea mays
  Coding DNA Sequence Number=SeqID_42950
MAPRRASSKVAPSVDEAAKAALLAEKKGKALVDTTHQEGCEDDALSKRQRNEQLTPKGSLRTCSSGGQPQPPPGFAAPEGADATEDGEVIGVSAEEQLQLRALRIKNRNLQKQKEILEAKR

SEQ ID NO: 86326 - protein, 167 aa, Zea mays
  Coding DNA Sequence Number=SeqID_42951
MAGIDAGEGAAAAPPPEMSPQQRIEQAQCQVSKDQVATSFRGMLHRRPGMIIKVLLKRCLSGKVSWSQQGVLLPCGKAGARGRGGDTRGRGGGSAWGRGGGGAGGCGGVAGVVAASLVWWSWRPRRHWVAVGERTGELWGGRATTKNQPCVRTGRQWLLGVGWERIT

SEQ ID NO: 86327 - protein, 389 aa, Zea mays
  Coding DNA Sequence Number=SeqID_42952
AALSFCQTGQWSGGVTAVTSALPGARVRIELYADGGYQLRIRRLEAPEPLHRARGRSGTDSAFYIRPYVAFPQGGGGECAMLPSMGTEHGVSGELRAATGVPVARRVGLGPRLACQKLEKRVHLARLHAACMAARPFCPLVWAKMGGRLAGSSRLPSPRMGDIRRLSASSLEEHNSTGVGTSQPSFGFKDFHHPAWPYPATGGHPRWPRWKMRRVGEPPPRGSAAPFFPLRPGVKGVLEPHGDFLQPCQDMRGARGPGPPFPCLNGWFSSSVGGSPSAVTPPLKLLPKLLRCLGQGWDPSAALWWIEAGGSDISMNRGGVGSRMGNLVGRSLAVSPVSGADAQVGQSRPRIGLAPLEAGCPRPQGRRRCRGCYGSPRREDPSLQDQIIL

SEQ ID NO: 86328 - protein, 220 aa, Zea mays
  Coding DNA Sequence Number=SeqID_42953
MDITSKMNIAKVILGCVARRQLIKPRTEARRASRYQVHGRRSRRLRNPKPRVKKKACKVKGSRSSSKKEIKPRFSSVWHTGLSGGAPDSVRCAKLNPGEQAALGRSLATYDYNSPDCPVCTGLSGEPTVGWANGRPRNPRVTRGQANGQMGAPGCPVCTGQCPVRQRLQDCNGRLVHLWKEIRHQTVSGGAPDCPGILRQDLLFRCNLLEGSFIPLRSGL

SEQ ID NO: 86329 - protein, 139 aa, Zea mays
  Coding DNA Sequence Number=SeqID_42954
  Gene Ontology: Mol. function=xylose isomerase activity; Cellular component=cytoplasm; Biological process=carbohydrate metabolic process
  Homolog annotation: Hit_ID=Q8H3Q7; Match level="QueryCoverage=62%, HitCoverage=25%, E-value=3e-35, Identity=64%"; Hit description =Xylose isomerase
RCSRCGCQLRPIVFLLYAATLNELANFLQAAVDYKKKIGFNRTLLIEPKPQEPTKHHCHHELETARINGLLGNIDANTGDPQVGWDTDQFMTDIAEATLVMSSVVKNARKGDFETLEKKVLEWGEPAVASGKQANVLTV

SEQ ID NO: 86330 - protein, 141 aa, Zea mays
  Coding DNA Sequence Number=SeqID_42955
NIEVFNYNITKRKQAITLEVGSRAGGGGGRGRRGGWTVVEGAGSVGAAAAEAWQRGGWRVVEGAAVEGAGGVGAAVVEARRRGGCTAAEGRGATGEGVVASDEGAAMSEGAAGGRGRGRDGQGRGGVERGGESRLEGGGGE

SEQ ID NO: 86331 - protein, 72 aa, Zea mays
  Coding DNA Sequence Number=SeqID_42956
MRANNSKRPEHKSDDVVVRPSHASIAPDLVDQGLEPVGYPYYQIAFHSQLSPKYWDEERKGDYTFCDSKKRS

SEQ ID NO: 86332 - protein, 53 aa, Zea mays
  Coding DNA Sequence Number=SeqID_42957
MAVLQRDFLHWELPINCSGVFLKIYLNQDTNTKKINLIKERIRVTVKGGNRQG

SEQ ID NO: 86333 - protein, 129 aa, Zea mays
  Coding DNA Sequence Number=SeqID_42958
  Gene Ontology: Mol. function=2 iron, 2 sulfur cluster binding; Cellular component=intracellular; Biological process=tricarboxylic acid cycle
  Homolog annotation: Hit_ID=Q9S7D3; Match level="QueryCoverage=40%, HitCoverage=14%, E-value=4e-22, Identity=88%"; Hit description =Mitochondrial ribosomal portein S14
MVSDPAPSSAPRYLAYSLPSNHLPGEDILFCINVDLEVHAKMNVLGSMSTTSQTKADRAKLDGMYECILCACCSTSCPSYWWNPEEYLGLAALLHANRMIITSTSSAHLRKTSLRKCLKEWNGEPLSIC

SEQ ID NO: 86334 - protein, 387 aa, Zea mays
  Coding DNA Sequence Number=SeqID_42959
  Gene Ontology: Mol. function=DNA binding; Cellular component =chromatin; Biological process=regulation of transcription, DNA -dependent
  Homolog annotation: Hit_ID=Q69MC4; Match level="QueryCoverage=73%, HitCoverage=76%, E-value=2e-67, Identity=54%"; Hit description=DNA -binding protein-like
  Pfam annotation: Domain name=DUF296; Domain location=155-284; Score =136.8; E_value=6.1e-38; Accession=PF03479.6; Description=Domain of unknown function (DUF296)
  Subcellular localization annotation: CTP_CleavageSite=97; ConfidenceScore=5.05e-01
MKGQEDKRITLSLAAAAGTAYPSSSTSTPLLILFLFQLPSPLTAARVLHISISHYRGHIFPASRRRRRHASSSSSTADTVSNRSWSAFSDEVDSRLSAEQKEPASGGALVVSVSGGGDGASIELSKKRRGRPPGSKNKPKPPVVITREAEPAAAMRPHVIEIPCGCDVADALARFAARRNLGICVLAGTGAVANVSLRHPMPCGGGGAPTAIMLHGQYEILSISATFLPPAISAVAPQAAAAAACLSISLAGPHGQIVGGAVAGPLYAASTVVVVAAAFTNPTFHRLPADDDASVSVSVSLSAGSGDPADEHRGGHQHPVPVEPPPRERHRPHVVRRKPAPHLASAAPSVEPCGPPAAPIYAACHPQPQDVMWPPPNRAPHPPPPPY

SEQ ID NO: 86335 - protein, 31 aa, Zea mays
  Coding DNA Sequence Number=SeqID_42960
MAGAWQLADGQGLTIPLLEALAQRCLPQMSA

SEQ ID NO: 86336 - protein, 114 aa, Zea mays
  Coding DNA Sequence Number=SeqID_42961
MKNTGGGKQTEQGPGGQAAEPPLATAGHRNVRSAHPQVAGAGPDVVSFPAAMQCNATGACLEVEGGIHGVVALRRIGFLHQGPAARDDTYPGVEIRQGVGLTRIRSGLPPMPKR

SEQ ID NO: 86337 - protein, 185 aa, Zea mays
  Coding DNA Sequence Number=SeqID_42962
MEVPKAVALVAALALVALGALATRWLQRMEARNEEVRRLALLAAAEEETIAREEAYYYGQYGGFVRSSDLPEAPSLWAAQEVPPAPKEVMAEAAAAAAATVASPTAGKGVCAMCSKPTTLRCKRCKSVKYCVGLLIFEPMSTVNLFNYEVGFQWKILFSTFRSTLHATSSPTARNRCVMHGSTVS

SEQ ID NO: 86338 - protein, 120 aa, Zea mays
  Coding DNA Sequence Number=SeqID_42963
  Gene Ontology: Mol. function=ubiquitin thiolesterase activity; Cellular component=integral to membrane; Biological process =ubiquitin-dependent protein catabolic process
  Homolog annotation: Hit_ID=A2YWA2; Match level="QueryCoverage=70%, HitCoverage=8%, E-value=2e-31, Identity=72%"; Hit description =Putative uncharacterized protein
MFVPIHQIAFPHSPSPIHSFLEDALPAHHHPTVGAVSCYANAILQCLAFTRPLTAYLLEGYHSQNCSKTEWCFMCELEKVLIEGKQGKSPVSPTGILYHLNEIGVSFGQGEEEDAHEFMR

SEQ ID NO: 86339 - protein, 340 aa, Zea mays
  Coding DNA Sequence Number=SeqID_42964
DRDASGGIRAVRLAVGQVKMEVRCPNQLVPRMKMVSPKLLRACTVRLGIRSQPEYDGREFVEHGTEKCVVNIYIGSSPHHVEWSVTAAGHRFKDTCQVVARKALRALCQIYEEEVADTLLRFFPPFQRNRPVWMARMCALEEQQLLEDDPTVVYITAYLLTLDAQYDFLDRHHRQMIARAEDAEKLIRKLHVDLTTAQARVAALESREAIAVEALKQAKDEHIQKLMEAYLVTHNQRRALWIQEPASSNPVQPIRAEDPQILEVFPQAMIKQEHPESSQGPLPELFEPLTMKKIPAPSLEVKEEAASTPPAPPPSEELQEPVPLEEEFNPVLPSQPPPEE

SEQ ID NO: 86340 - protein, 94 aa, Zea mays
  Coding DNA Sequence Number=SeqID_42965
  Subcellular localization annotation: CTP_CleavageSite=33; ConfidenceScore=5.03e-01
MAAGRSWSSAVHATGCHGGSVRRGRRVLGVAGRAMETGKQGAEGRSAKHRGQREALDICWTADTGGKLGGHGRGGSSLRAAVRKKGAGKKGSGG

SEQ ID NO: 86341 - protein, 134 aa, Zea mays
  Coding DNA Sequence Number=SeqID_42966
  Gene Ontology: Mol. function=transporter activity; Cellular component= integral to membrane; Biological process=transport
  Homolog annotation: Hit_ID=Q5PDW7; Match level="QueryCoverage=44%, HitCoverage=5%, E-value=8e-18, Identity=77%"; Hit description =Multidrug resistance protein mdtB
MKKKSNPIARAQMNTSLSLTSHYLIGKIFGLGRGFDLFDLCLVLNAIALVRCLKAENLDILKCGGSSDLPNPPVYSKVNPADPPIMTLAVISTAMPDDASGRYVETRVAQKTSQISGVGLVTLSGVHVRLFVST

SEQ ID NO: 86342 - protein, 210 aa, Zea mays
  Coding DNA Sequence Number=SeqID_42967
MEIPSLGGWTVILKVFSRVPSDRGAPLFILSQREAEGERSPSHAKSRPAEGEGSLGRRRDRVTRLTASDVSGLLLDDFEDCRCSPRGVTQVQHLLDVPDHVRNVVEHGVHCGATIASAITRADLRTPMDLPQGASSGALESLIKGYDEASRGIMGLVSLENLIRCTLGSLEILQQTSAFCDRALVPPILYTGNQGKGHQILYGPAPPLRL

SEQ ID NO: 86343 - protein, 53 aa, Zea mays
  Coding DNA Sequence Number=SeqID_42968
MASRSLHRRIGIQPACRLSGDHYGLQLLRFNDGKDKGWGKCTRSRVRSDFVSS

SEQ ID NO: 86344 - protein, 352 aa, Zea mays
  Coding DNA Sequence Number=SeqID_42969
  Gene Ontology: Mol. function=1,3-beta-glucan synthase activity; Cellular component=1,3-beta-glucan synthase complex; Biological process=1,3-beta-glucan biosynthetic process
  Homolog annotation: Hit_ID=Q8W0J2; Match level="QueryCoverage=96%, HitCoverage=32%, E-value=5e-88, Identity=68%"; Hit description=1,3 -beta-glucan synthase component-like
MGCPANPAVHNENAFLVRVVTPICDVIRVEAESNRDGNAPHAAWRNYDDINEYFWRRDVFDRLGWPHGPVALVLHPAGPQPRTQDRLHRAIVAWEGAKWPWDDLLSSRGLESKDTLTHSGVDLPHGYPDLVCYIFFFVGCICGIFAHLGEIKDMKQLRLRFQFFASAMSFNIMPEEQQRLQLRYGFSRSFRKIESNQVEAQRFALVWNEIISKFQEEDIVSDREVELLELPPKLWNVRVIRWPCFLLCNELSLALGQAVTGSNRRLWRKICKNDYHRCAVIEVYDSAKHMLLEIIKEGNEEHGIVTQLFSNFDGSMKMEKFTVEYKMTELHNIHTRLVALCLPPHAASARQP

SEQ ID NO: 86345 - protein, 51 aa, Zea mays
  Coding DNA Sequence Number=SeqID_42970
MGPRAPRGKEREYIPVFIARSGPPKKDTGPLYIQVQGPKKAASGSSSRRHI

SEQ ID NO: 86346 - protein, 108 aa, Zea mays
  Coding DNA Sequence Number=SeqID_42971
MEIKERKMNNDCNLADGEYTLVPEQGAAQEVAPDPAPEPAPEDLPATALEGKPRNSASAFGNQTPQPNSCMSRGSLEEMIAGITWPSTLPPGWTVEWDPASAEEEHEE

SEQ ID NO: 86347 - protein, 379 aa, Zea mays
  Coding DNA Sequence Number=SeqID_42972
  Gene Ontology: Mol. function=transferase activity, transferring glycosyl groups; Cellular component=integral to membrane; Biological process=metabolic process
  Homolog annotation: Hit_ID=A2Z5G9; Match level="QueryCoverage=98%, HitCoverage=73%, E-value=1e-111, Identity=56%"; Hit description =Putative uncharacterized protein
  Subcellular localization annotation: CTP_CleavageSite=50; ConfidenceScore=5.18e-01
MAGLHFVLVPLLAQGHIIPMVDLARLLAGRGARVSVVTTPVNAARNGAVVESARRAGLDVELAEVAFPGPGLGLPEGMENVDMVVEKEHFMPFFQATWKMDAPLEEYLRSLPRRPDCVVADSCNPWAARVCAPPRHPAPGAALPVRLLPPRHALPVHARRVRPRGPRAGAVRVAGDGKATSATWRRPRPPPTACSSNTFRGLEGVFVDGYAAALGRKTTTTCWAVGPTCASSSGGLDAGATAARGNRADVDVGLVLSWLDARPAASVLYVSFGSLAQLSLKQTVELARGLEASGRPFVWAIKEAKSSADVRAWLLAERFEERVRDRGLLVRGWAPQVTILSHPAVGGFLSHCGWNASLEAITHGVPVLKWPNFADQFFF

SEQ ID NO: 86348 - protein, 506 aa, Zea mays
  Coding DNA Sequence Number=SeqID_42973
  Gene Ontology: Mol. function=transferase activity, transferring glycosyl groups; Cellular component=integral to membrane; Biological process=metabolic process
  Homolog annotation: Hit_ID=Q9FU67; Match level="QueryCoverage=94%, HitCoverage=96%, E-value=0.0, Identity=70%"; Hit description =Putative UDP-glucose: flavonoid 7-O-glucosyltransferase
  Pfam annotation: Domain name=UDPGT; Domain location=28-503; Score= -69.0; E_value=4e-07; Accession=PF00201.9; Description=UDP -glucoronosyl and UDP-glucosyl transferase
MAAAAASATQAALALAHDLEDASERKAHFVLVPLMAQGHTIPMTDMACLLARHGARVSFVTTPLNASRIAGLIDHAAAAGLAIRFVRLRFPAAEFGLPEGCENADMLQSRDLFKNFMDACAALREPLAAYLREQEQPPSCVVSDMSHWWTGDIAREFGVPRLTFNGFCGFASLARYIMVRDNLLEHVEDENELVSFPGFPTPLELTKARCPGSVSVPGLDQIRKKMYEEEMRSSGVVINSFQELEALYIESFEQVTGKKVWTVGPMCLCNQDSNTMAARGNKASMDEAQCLQWLDSMDPGSVIFVSFGSMARTAPQQLVELGLGLESSNRAFIWVIKAGDKFPEVEGWLADGFEERVKDRGLIIRGWAPQVMILWHRSVGGFMTHCGWNSTLEGVCAGVPMITWPHFAEQFVNERLVVDVLKTGVEVGVKGVTQWGHEQEEVTVTKDDVEAAVSRLMDEGEAAEEMRMRAREFGVKARKALVEGGSSYNNINLLIHEMGNRANVST

SEQ ID NO: 86349 - protein, 193 aa, Zea mays
  Coding DNA Sequence Number=SeqID_42974
  Homolog annotation: Hit_ID=Q5GAU8; Match level="QueryCoverage=49%, HitCoverage=84%, E-value=1e-32, Identity=64%"; Hit description =Putative uncharacterized protein
MARPNFLTVFGGLGPKRVRLHRARVGPGGPFGQDLDPKLSAISYDAEMKDMYREALWQKRGRPRELYPDVSSKDAPIPPDLPVPKCDCDRPAWWIDSADKFDPLLFANWLCGRTSHERFKRWVPPPPNPPPMTDAEKEVEELKFDSGLDPMSMGSPRGTTGFKAPQRREQDEKSQPRSGPIEYLAQQPLLPEA

SEQ ID NO: 86350 - protein, 126 aa, Zea mays
  Coding DNA Sequence Number=SeqID_42975
MAPRSQGPVSPHRMKLRLMWQTLFSMEYHSPRKDPDVESGHHKVRKGLFVLFVATNMGAPCAYKPPRSNLIDVGDSQPNEEEQHAEPLIENNNEVMTKQLGLLRTLEGFVKFVSKKSMLVIGRMTS

SEQ ID NO: 86351 - protein, 197 aa, Zea mays
  Coding DNA Sequence Number=SeqID_42976
  Homolog annotation: Hit_ID=A2X449; Match level="QueryCoverage=66%, HitCoverage=90%, E-value=8e-22, Identity=47%"; Hit description =Putative uncharacterized protein
MGLCISVSLWKEKLYGADGSSRSVQCRVVHEVAGVESGDCECGNLGSDADALGVEHKAAAAAAPAAMGVKSGGVEGAAAAVSGGTPVRPIWQRRVLMGVKCQLPRFSGMVLYDESGRPVCTGVRDRARDQEFMNIYILSPISCGSYMLERSIFLSSQPVFIDKPDSDGFNDKFKLGFNVQPTHEKHAAAISVLKDLL

SEQ ID NO: 86352 - protein, 421 aa, Zea mays
  Coding DNA Sequence Number=SeqID_42977
  Homolog annotation: Hit_ID=Q6J9V9; Match level="QueryCoverage=28%, HitCoverage=33%, E-value=1e-16, Identity=49%"; Hit description =Putative uncharacterized protein
MDGSNHPRGGEPSVSQLLQSLQKWLEILLSLARGPIAPVAAGGGHHSLRKRREPPIVVPEVKPPALPPLVRRHKDGGDVLLRTRLPQLEDAATGSHRHADSLFPCRQGKRLHGEEMGPQIPVGVNPQKSFANRREDGYLRDRVGVEIVQLHPIEVQNRPHETACRHSEPPLVERDETQHIPRRRGRGGSARRDHPLRLRVTGEGTKQTVGNKGLQVIRHDGGEGPRVAWQNDGYPVGHHQAKGVAAERTRAGDTFGRRSGRRFTSAIMTASKKGTGNGDTLKGILLREGSGPRALLLIRGSKAGPSEGLDSRLRAFRLRTHYWSEVRRLAPRKGSTAALGHSGSAPTTDQGFVGWPPEGFDSRLRTCRARDDSGYVRYMAEARATLPRGSGAALANSALAKPLTASTYQPENLEPDHAPVL

SEQ ID NO: 86353 - protein, 112 aa, Zea mays
  Coding DNA Sequence Number=SeqID_42978
MPVSGLGRDPVTPCRPGTARLNGAEAPNSVDVDVSAVGRRASWILRPRHVVGILAPPCSIDLARAPVDWICSGASPSSSPDSGGMDLRICLSSVLSISGGLVLLSSVSGSDL

SEQ ID NO: 86354 - protein, 506 aa, Zea mays
  Coding DNA Sequence Number=SeqID_42979
MNKRPAFKVPLQTEPRFHLRRYEQPHTIGGPAEQQKTDGWLAVARSGSSDNDPRSGWPNCGSDGLRANAAATLPSPTPALEGRGQGPSAPRKIPTQILPDERSTDLRAETSYRCKGRTAPEHERRPSSARRLGRSSRARGATTALAAGGGTGSQTGEPNALKLTTSVVDQPRVVEVRPSRRASERPLPRTLKERLTHEPAREVELRLSPASAPTRMMNILEAEGGTKIAARLASPHPGASGARKVERHDAQGSAETWSPFKGVTLLLKATPPTCVPSRRGLSLLQHAPRSSPYGAGAGSHASCKLAQSRRSQTVVPGACNRPAVTSIPPLSPRPAGERADSRAGGMQLRQVGTPLRLPTHPAWRPRPTRHATGAPVATCEQLHRHSHHYHASSTVEPVPRLEATLRTTQQCQPGATVNTAKNGPAVMAVAGGQEQRSRRQPSLRPIQGQRENPLSRREDGAPVFRSSNGSCTHNGRPVNPSPRRINSAAGQAAPLAGEASDASPSP

SEQ ID NO: 86355 - protein, 227 aa, Zea mays
  Coding DNA Sequence Number=SeqID_42980
MEGDRHQRPRPLRQIEESAPQIEESASAMEGDRPVGIILRVRCAQALGPSPTRCHKEMAEPRVWSASHSHRYALAASLAPLRSLPFAGGVGRDGRAFDKCKPKKVPPGSARRTAPSPSPEHMKIIEDNGPGAAFYASAKAMTNGNHTFYVSKLIQRLARFSKYDTMYHLHRYIMKCSSWNINDDQLKLEETTLKRLFESTKCFLLDYGAKIYVWVGQFWNDLPHQAR

SEQ ID NO: 86356 - protein, 430 aa, Zea mays
  Coding DNA Sequence Number=SeqID_42981
  Gene Ontology: Mol. function=Rho GTPase activator activity; Cellular component=intracellular; Biological process=signal transduction
  Homolog annotation: Hit_ID=Q84ZE8; Match level="QueryCoverage=86%, HitCoverage=100%, E-value=1e-169, Identity=82%"; Hit description =Auxin-regulated protein-like
  Pfam annotation: Domain name=RhoGAP; Domain location=210-354; Score =130.8; E_value=4e-36; Accession=PF00620.18; Description=RhoGAP domain
  Subcellular localization annotation: CTP_CleavageSite=81; ConfidenceScore=5.25e-01
MPCARLWKRMHRLYCQTIVLPSLGLRSPIPFRPQSPAATDASRTEHRFSSGPTRRRVVMPLAEPPQWRRKATDFFSTSSVKLKQAGQSAGDNIADVAGKVGSAVKSRWVVFQEARQQQQQQRPPHETVQERIITAAATTGLLFRKGISETKEKVAVGKVKVEEAAKKTADKSKSILNNIERWQKGVASTDVFGVPIEATVQREQSGKAVPLVLVRCADYLVISGLNNEYLFKSEGDKKVLQQLVSLYNEDSGASLPEGVNPIDVGALVKCYLASIPEPLTTFSLYDELRAARVSIPDLRDILKKLPNVNYMTIEFVTALLLRVSHKSSLNKMDSRSLAVEFAPLIMWRQGDAGTDLRNHLKLTLKPPPKIVDTTSNTATWDLFDEDGEDASSQIPLDDASPPDYNSIEVIQCLIEHHNAIFTDANETVWR

SEQ ID NO: 86357 - protein, 154 aa, Zea mays
  Coding DNA Sequence Number=SeqID_42982
  Gene Ontology: Mol. function=protein dimerization activity
MGGGGGDVSRSINHELMVLGEHGDPESRGAATINLGSGIGISSDAAPINLATGDSSTGRGNDIEAPAAVGHGSSNHKRMGKQSMIKFNPDGSVHNFDYCTHRARTEMCRLIARLDLPLNFGLAAREENLDLRLIELAHTSENIDDHIYNVIDDF

SEQ ID NO: 86358 - protein, 252 aa, Zea mays
  Coding DNA Sequence Number=SeqID_42983
  Subcellular localization annotation: CTP_CleavageSite=43; ConfidenceScore=5.06e-01
MGWVFSNTLQSPPLRRGGWVPHVMRTGSEQKKPNRRVWCTQPPSGYKWHATAPSGRASPTPDTPAWRPRPTRRATGAPDAACKQLYRLCHHLASSIAEPIPRLEATQRATQQRQPDAAANAAKSGPAVMTVAGAREQRSRRQPSSRPIRGQQENPLSRHEDNALVIRSSNGSRTRNGCPANYSPRRINSVAGQAALLAGAAGDASPSPKQPRQKRNQAPSLLTDQGFEGCPPEGFNSRLRSRGPYTHYWSEV

SEQ ID NO: 86359 - protein, 98 aa, Zea mays
  Coding DNA Sequence Number=SeqID_42984
MNKTPALKVPLQTELRFHSRRWRTAAHSGSSDNDLRSGRPNSSSDDLRADTGATRPSPTTPLEGRGQATKAVEPEGPGKGILRKGSFSAKEAGPEPPY

SEQ ID NO: 86360 - protein, 100 aa, Zea mays
  Coding DNA Sequence Number=SeqID_42985
MEYSAKTTLPLNSFGIIHSLSVFRIVLLYGVKDSTKTNRKNKTGFKTKEQKETEVLPGLAHRTVRCGTGQCPVHHRTMSGAPGRIAFKLFTFGFLRRSPL

SEQ ID NO: 86361 - protein, 164 aa, Zea mays
  Coding DNA Sequence Number=SeqID_42986
  Homolog annotation: Hit_ID=Q10NR2; Match level="QueryCoverage=88%, HitCoverage=54%, E-value=5e-32, Identity=59%"; Hit description =Expressed protein
MWAKAYYNIHNILTVSSGLQASLANDKGKSMNIEGTDAGETDKVLSSKTDKQKDSVESVTKQMSGIAISESHAMPSTNTINNSQPESSAPDIDKKIRALKKKVYSCSFLRLHIFYEKKMNIRLAEAQVQGDPEKLKSETLEKIKKIDGWCMELKLLEDSRAPAA

SEQ ID NO: 86362 - protein, 110 aa, Zea mays
  Coding DNA Sequence Number=SeqID_42987
  Subcellular localization annotation: CTP_CleavageSite=60; ConfidenceScore=5.31e-01
MSRSSRWDVPVIVSTKQKQRQQAKGMNPTTTLKGGGGTQVVKRLTPLLQGSYQHCSRQTVADPKGKRMVANNHNEKVKILVDDEPKGEKSVYSGTKKEGKKKAYQEDRLL

SEQ ID NO: 86363 - protein, 374 aa, Zea mays
  Coding DNA Sequence Number=SeqID_42988
MERAEASTHSEVERTRKQLVDSYRELGAWTADFEVPDREAGLRFLEWLQEELLALPTIVEGFMSFASLITCEGAMNVLSREGCSHYEGFDPSDEDFGREIFKVEDPMVKDSVGPLFDRMWGPYGREAVGERSDRAREQMAHAEEVEDLGGLNSAPPEATEGGPVLPSDAGEGPSDVLMPAAAGEDPVSAPMLTVEGAQEVVVEPAVEGPTAADAPAQVQGFGPAHATATESANFVVASIVVAENDSGDSVSKFFESDDSGSSVVWTEEFSDENLDYFAALDVAAAEASPCVMGAEVPGPSAGRRRRRAVAKCRVSEVEGGRLRVDRAGRRELLSSPTGASVGEGQLRSLFEGEELRIMLFNYREMGIIPKVEPL

SEQ ID NO: 86364 - protein, 389 aa, Zea mays
  Coding DNA Sequence Number=SeqID_42989
MPSLGGQKVRSPLFALDVRGRDPAAVVREAEDGAVRIVGRYMAKTEAQRSWDIRGSNDRLNRVFELNCLPYGGYLGEDVVDRRGKKPAAVTEDDPALEAAPATKKRKLGTAVGELRVSDSFAMELMGTCTAPGGRMSSPELRESSTRMLEVTGGRWPKNVPIPRAAGEDFFTSCMARDLKVFPYGRNIAAVVSTVMNKDRQDAAQKRRTVIRLPDARREAKRARGSAKAAAPGGSQPTLAAKPAVPGSSKVPESAKAIGASGAKSAPDGAAKVRELPSSGKRVADFGTNISVDDYLVESGEGQLVVVPPAVATTASTAVRGVKGGTFSAGGEISAATAVKDEAGTMSRRLREASQQLSQQLSQAADFADRVASGALTADVSAEVERLRA

SEQ ID NO: 86365 - protein, 214 aa, Zea mays
  Coding DNA Sequence Number=SeqID_42990
MARLRHTARKSVIPFLPSRLAERPLHRTVSGQSSHLEKLHHRLREEQERRRQHREQQDSSSPPQQEVESVRPRSSVAQLEAPPAPPRDAPAIGGATGGGPGGDPDDDDSDHSTESSEPQEAEGWVARPITFYQHSRGRYPDRWEATCLVRRPEDDLRGAEAVSEHYSISERDTAEAAMQDAARRALSQYCSLFGGVTDGLNLRYYPRRPTGSTE

SEQ ID NO: 86366 - protein, 92 aa, Zea mays
  Coding DNA Sequence Number=SeqID_42991
MAPKRANLKAVVSINDAAKAALLAKKKGKVPIADGIPQQAFDDDPVNSKRQCQDNQPERAPRAPAFLRGHHKHPRQASLIQKVKTPSKTTIS

SEQ ID NO: 86367 - protein, 37 aa, Zea mays
  Coding DNA Sequence Number=SeqID_42992
MQVVWAFALQISLEGDWSDEGATLQVVIVLDTQGSKL

SEQ ID NO: 86368 - protein, 114 aa, Zea mays
  Coding DNA Sequence Number=SeqID_42993
MSAGSKIHGERDGAAHTRGGAIAGARQTEATMLPARTKALIRNEEGDSNTMELLTAAGGQWRELATEESGPAVALELRRAIPTSPAPNRTRKGHRRFPDAQATPIEHFPRTKMR

SEQ ID NO: 86369 - protein, 188 aa, Zea mays
  Coding DNA Sequence Number=SeqID_42994
MMSAGSKIHGERDGTAHTCGGAIAGARQTEATMLPARIKALIHNEEGDSNMMELLTAAGGQWRELATEESGPAAALELRRAIPTSPASNRTQKATNEDEDPASPAFAAARGPRFSVMAWQRERLTGRARDQICATPRQSLRDRGAQEDEDRADTPVPVPVTRMPARARAVGRKNRGAGWSAASGARWS

SEQ ID NO: 86370 - protein, 376 aa, Zea mays
  Coding DNA Sequence Number=SeqID_42995
  Gene Ontology: Mol. function=catalytic activity; Cellular component =chloroplast; Biological process=metabolic process
  Homolog annotation: Hit_ID=Q10G39; Match level="QueryCoverage=93%, HitCoverage=91%, E-value=1e-174, Identity=86%"; Hit description =Pyruvate dehydrogenase E1 component beta subunit, putative, expressed
  Pfam annotation: Domain name=Transket_pyr; Domain location=54-232; Score=233.6; E_value=4.3e-67; Accession=PF02779.15; Description =Transketolase, pyrimidine binding domain
  Pfam annotation: Domain name=Transketolase_C; Domain location=245 -367; Score=165.0; E_value=2e-46; Accession=PF02780.11; Description =Transketolase, C-terminal domain
  Pfam module annotation: Pfam domain module=Transket_pyr::Transketolase _C; Domain location=54-232::245-367
  Subcellular localization annotation: CTP_CleavageSite=31; ConfidenceScore=5.59e-01
MATAFSLRAAAPATAPRAVSRSTSAARVVPMASALAGRGRLAKADVPSSTSDGHEVLLFEALREALMEEMELDPTVCVFGEDVGHYGGSYKVTKGLADTFGDLRVLDTPIAENSFTGMGVGAGMKGLRPVVEGMNMGFLLLAYNQISNNCGMLHYTSGGQFKIPLVIRGPGGVGRQLGAEHSQRLESYFQSIPGLQMVACSTPYNAKGLMKAAIRSENPVVLFEHVLLYNLKEKIPDEEYVLCLEEAEMVRPGEHVTILTYSRMRYHVMQAAKTLVNKGYDPEVIDIRSLKPFDLHTIGNSIKKTHRVLIVEECMRTGGIGASLRSAIVDNFWDYLDAPIMCLSSQDVPTPYAATLEDATVVQPAQIVAAVEQLCA

SEQ ID NO: 86371 - protein, 74 aa, Zea mays
  Coding DNA Sequence Number=SeqID_42996
MAERTRREGRTGRGEEAAAEVTAQSLCDCRWALAPPRSIWQPQGYALLEMEVFCEVATDSTVSFVTSGGNLVHF

SEQ ID NO: 86372 - protein, 101 aa, Zea mays
  Coding DNA Sequence Number=SeqID_42997
MAQGHISLSPRQKRDRERGIPRKGSFPVKEPGSKAGPSEGFDSRLRSRGPYTHYWAEVRRPAPRKGSTTASGYSGSAPTTDQGFEGWPPKGSQPPQTPSEG

SEQ ID NO: 86373 - protein, 130 aa, Zea mays
  Coding DNA Sequence Number=SeqID_42998
  Gene Ontology: Mol. function=translation initiation factor activity; Biological process=cellular metabolic process
  Homolog annotation: Hit_ID=Q10G37; Match level="QueryCoverage=90%, HitCoverage=20%, E-value=3e-34, Identity=64%"; Hit description =Translation initiation factor eIF-2B delta subunit, putative, expressed
  Subcellular localization annotation: CTP_CleavageSite=72; ConfidenceScore=5.00e-01
MVLQPPFHKSRKPQRQRDVQFRRLNVLLKRQRRRQLAITDKSGKSAGAAISKQAKPVKTVQKKDVPQAASTVVSEKKATERPPERERKLDAPHPRMQFDDVHKVEKAKKRAVVNQSEARNRVELFRHLPQ

SEQ ID NO: 86374 - protein, 85 aa, Zea mays
  Coding DNA Sequence Number=SeqID_42999
MDGRSAGAMEGARIAGAMEGERIAGRIAATAPWMEGFPRMAGARRARWRLQEDGRRAEDGSRGCRRLRVATRMRDAGGRTCAERV

SEQ ID NO: 86375 - protein, 34 aa, Zea mays
  Coding DNA Sequence Number=SeqID_43000
MALCGIWRGFDLFELESALDESAKALAEALAGVA

SEQ ID NO: 86376 - protein, 90 aa, Zea mays
  Coding DNA Sequence Number=SeqID_43001
  Gene Ontology: Mol. function=voltage-gated anion channel activity; Cellular component=mitochondrial outer membrane; Biological process =anion transport
  Homolog annotation: Hit_ID=Q5NBN7; Match level="QueryCoverage=87%, HitCoverage=32%, E-value=4e-17, Identity=44%"; Hit description =Mitochondrial import receptor subunit tom40-like
MALPHLALKPDLFEGMRFDLTKMITPYFALTHSVAMGSIEIPAQGSETMLMGRVSHEGRENIRVKHDITDNLSLKINAQLCLKPPLKILS

SEQ ID NO: 86377 - protein, 46 aa, Zea mays
  Coding DNA Sequence Number=SeqID_43002
  Gene Ontology: Mol. function=structural constituent of ribosome; Cellular component=ribonucleoprotein complex; Biological process =translation
  Homolog annotation: Hit_ID=O48558; Match level="QueryCoverage=91%, HitCoverage=37%, E-value=1e-15, Identity=100%"; Hit description=60S ribosomal protein L30
MVATKKTKKSTDNINNKLQLVMKSGKYTLGYKTVLRTLRNSKFDRK

SEQ ID NO: 86378 - protein, 101 aa, Zea mays
  Coding DNA Sequence Number=SeqID_43003
MAPEAGLGCCQSHPDGWHSSRSSAGGAVFLSGQSVEGRSDCGHFGLVDWGARVRIRCQAILALNAPAIRSAGEVIWPRLLLREACPSWASGESKGEPLRIA

SEQ ID NO: 86379 - protein, 723 aa, Zea mays
  Coding DNA Sequence Number=SeqID_43004
  Homolog annotation: Hit_ID=Q6JAD6; Match level="QueryCoverage=92%, HitCoverage=97%, E-value=0.0, Identity=72%"; Hit description =Putative uncharacterized protein
  Subcellular localization annotation: CTP_CleavageSite=44; ConfidenceScore=5.47e-01
LSGGFQRPPSKGKLRRPPSPAASISCDLRTSFAPPRMPRTKNASASGGGDDEDPRRPFRQVKGKTVFLEQQEGRKKRRSDREARAAAAAAAAAQAALGDQPDVPSDQIAFRARRLASRSRSSTHTSASTPPPTLPAPVTPIAPSTSTAIPTTSSTPASTATPAPAPASAPPVPPPRFRERDETEVRPLVSDPRLFDLQRATAARVRRFRYVPVESWLPAQRDPAAGVLFSTRIQESFFRAQLSAQIALRVHRLLDLPAFLLAAGAESEAHLTYLPGLLSFLTISGRYVEEWVRVFYASVWIDPDHHWMRFRFEREDVTITADQIRQLFGFPESTTRLHSLCYGTSDPPRRPHGGVAPGTAHVAALFRPPFTDGSRRSPADFTTAAKYLYELIRRTLLPRMGYREATTHIHLWLLGALVSHSEFDVVDFLICEIEDTVLDGIRARRQLPYAHYLCHIFAQLIQPPRFQSTLEASRLGAAAADDDDDDDFGVPLPPPMPPRSHDHEAGSSRAAPAPPPALDPALATILQTLTQQQQTLTQQQQTLTQQQALLAAEQARLSDRMLSMFQSMQDRQDALQQQLIQDRAENRAFMALMLQHSGISAPPVQSAPPSSLHAPVVPSILSAPPAVTSPLRPVTLAFTSPVLSSVCPQPLVPPASAVTTTAVAVSVTASVPVAPAALPASESVPAPASTADPGSETDSDPPSAFALLPRPRPDAPPPPPPAS

SEQ ID NO: 86380 - protein, 80 aa, Zea mays
  Coding DNA Sequence Number=SeqID_43005
MPNGYMSPVAHCIMRIGLGVANPFIGNCCENGVPHVRCKMSVLDSDPKGYKLLYWAAVGKDFRSQVQFGNNGFYGANYIQ

SEQ ID NO: 86381 - protein, 201 aa, Zea mays
  Coding DNA Sequence Number=SeqID_43006
  Homolog annotation: Hit_ID=A2YZS2; Match level="QueryCoverage=33%, HitCoverage=39%, E-value=3e-23, Identity=79%"; Hit description =Putative uncharacterized protein
  Subcellular localization annotation: CTP_CleavageSite=37; ConfidenceScore=5.37e-01
MDTSNLLRQGLSLSRSSTPSQQRSMGVQRRTSVAVIEADRGDAEQRALATSLASGKPATMLEFYSPRCRLYASLQGLMRELKDGTSGAANFVLADAEDDRWLSEESSAQSRPKTLDGPLPTRPLSSNSARQRSRPSPCRATQQGGGPDQVHAEQLSKVEVSTKSLSSTQRGTDPDQVLAEQLSEAEVPTKSLSSNLAGWRC

SEQ ID NO: 86382 - protein, 94 aa, Zea mays
  Coding DNA Sequence Number=SeqID_43007
  Gene Ontology: Mol. function=voltage-gated anion channel activity; Cellular component=mitochondrial outer membrane; Biological process =anion transport
  Homolog annotation: Hit_ID=Q5NBN7; Match level="QueryCoverage=100%, HitCoverage=29%, E-value=2e-40, Identity=82%"; Hit description =Mitochondrial import receptor subunit tom40-like
VATAQIATTGMVALSYVSLASDFMYNQMTKDVTASFGYDYMLRQCRLRGKLDTNGVISSLLEERLTPGVTFQLSAELDHWKKDYKFGFGMALGE

SEQ ID NO: 86383 - protein, 351 aa, Zea mays
  Coding DNA Sequence Number=SeqID_43008
  Homolog annotation: Hit_ID=Q6JAD6; Match level="QueryCoverage=89%, HitCoverage=48%, E-value=1e-150, Identity=77%"; Hit description =Putative uncharacterized protein
  Subcellular localization annotation: CTP_CleavageSite=37; ConfidenceScore=5.17e-01
MRLGVPFIAPRQLGAVENKSGRPSLPSVVGHTGHCPRATAARVRRFRYVPVESWLPAQRDPAAAGADSEAHLTYLPGLQTLLTTSGRYVEEWVRVFYASVWIDPDHHWMRFRFEREDVTITASQIRQLFGFPESTTRLHSLCYGTSDPPRHPHGGVAPGTAHVAALFRPPFSDGSRRSPADFTTAAKYLYELIRRTLLPRMGYREATTHIQLWLLGAMVSHSEFDVVDFLICEIEDTVLDGIRARRQLPYAHYLCHIFAQLIQPPRFQGTLEASRLVFGSYRPAPEIPVPASAPVFDSQAEDAAFRQFDTQVTAAADDDDDFGVPSPPPPPMPPRSHDHEAGSSSAAPATP

SEQ ID NO: 86384 - protein, 186 aa, Zea mays
  Coding DNA Sequence Number=SeqID_43009
MAAPRIARPVALTPRRGKRHLWQAKRASFHLCHDDRVKKGTEKGDTSKGILLCEGSGPRALLLIRGSKAGPSEGFDSRPDHSGSKLITDQGFEGWPLRRVGKKGKQIILIISRVLLITRCCIFSGGSRFYLLFVVLCHEALVADVWEEETLVDGDVCGVLVGGGVGGALVGVPFPANMGDSRLEGG

SEQ ID NO: 86385 - protein, 147 aa, Zea mays
  Coding DNA Sequence Number=SeqID_43010
MEASTRTGVDRAHALLVDVYHELGVRTAPFDKSGEEVGLRFLGWLQEELETLSSIATSLMSYASLVTCEGAANTLSREGCRHFEVFDRVTEDFDRGIFQVGDEVLKWSAGALYDRMWGPHGRDTVWERADRALAQFFKLSFCNFCRC

SEQ ID NO: 86386 - protein, 112 aa, Zea mays
  Coding DNA Sequence Number=SeqID_43011
MVAQQSLLVWVLAVGGCGVEDLGGAEVVVVEPTPLDGAGKHDWVDAGFARYGRVVGGGAHSAVGGGVILALSLAVDSVIFEGLFGGGVLEGFAFLLSRECCLRCVVNGCGSL

SEQ ID NO: 86387 - protein, 48 aa, Zea mays
  Coding DNA Sequence Number=SeqID_43012
MGYTTCGYRVQPLQSVKLMVNPRKGGGIDLPPNRHTRRIFRQPQQQQA

SEQ ID NO: 86388 - protein, 622 aa, Zea mays
  Coding DNA Sequence Number=SeqID_43013
MCSHFYSAYPPFEVAEEDADEGALRCAAGLSSGRDLVEEFVAYGVWPLAHGWALGEVCPRQMPFHGGKMVRSPAFALNLQSRDPAAFVREAEDGAVRLVGRYVPRTEGQRSWDIRGSNDHLNRVFELNQLTYDGYPGQDDVDRRGKKPVVETRDDPAPAAAPSSKKRKLGTAMGGLGVSDGFARELMRTCAAPGGRMSSPELRESSARMLREPGGCWPRNVPIPRAAGEDFFTSRMVHEWRVFPYGRNIAAVVSAVMDKDRQGAAQKRQAVVRLHEARPKRQRGATKAAAPGGGKPPLAAKSGVPASSKAPEAAAGAGGSKSTKAVPPSSRVPEVTKAARVLPSSGKRVADFATDISVDDYLGGSDEGQLAIVAPAAATTAAAVVPKAKGGALSAGGEMSALAAVRDEAGAVSRRLKEVTGALSQVADFADRTASGALTVVVTAEVERLRTQHADAVREKSAVDSKCRKLADKVAALEGEKTDLRHQLAGERRETNEALAKAQAAQAEANLARVEGNLARERTEQLQERLIALESRVERAEAATRAEAERTRKQLMDSYHELGARTGDFEVPDREPGLRCLEWVQEELQALPTIVEGFMSYASLVTCEGAMNALSREGCDDL

SEQ ID NO: 86389 - protein, 316 aa, Zea mays
  Coding DNA Sequence Number=SeqID_43014
MQPGCTPPPAITQDGDLQFDGGGKQVGLRPLPSLSLKDFHHQCWGGDCRVPGSRTRVASKPLPAPASTAAAGRGSSVDEIAGAAYGPTSNSTAFCPSLPHEFGHGRGPPGSSIRSEVIVAAVRPPGAEVVVIAAAGAGDGVPFVGLLLLRRPPPLSGVESLGSVGLAVRGFSCLVKGTPRPLFDEPKPGVAVSARTEAELARKEDLVGRSLAGSSVSGTDAGVDLPRPRVGLMSLGDSWPRPRGDQPSRLLEPDSWRRPGRRWPGRDDEVVLQSGDPRTVSPSEARSDLAEGVVDAEGAAAPFNRQDPSLQDRIIL

SEQ ID NO: 86390 - protein, 203 aa, Zea mays
  Coding DNA Sequence Number=SeqID_43015
MVDQWWMPWGRKAGERWARAEVEAKGAQRPSASFQHTWSIDDDFCILEALVALLSQLVILEALVARYRRRLMGDTTTSSPSTPPPSPTRRRQPAGTGLESNARRLLAARCTRARRSASTCTSSCCGSRTVRGAASRTRCALASRSGWRRRPDSGGLGHGETQLHNDDEVAPTKASASTAPDLYGKPRTCDFYNHNPRLYYMES

SEQ ID NO: 86391 - protein, 161 aa, Zea mays
  Coding DNA Sequence Number=SeqID_43016
  Homolog annotation: Hit_ID=A2X4P0; Match level="QueryCoverage=55%, HitCoverage=19%, E-value=3e-38, Identity=82%"; Hit description =Putative uncharacterized protein
MARADKLRFQPEIQIMVPSIYPGLVYSCNNTFSVDEGLHQYRTSSPPNAAVGATRRGRGPLEPHLRQRQQGNIANYLSLAEVDSIYLLIPVNFIFIGFDGNGRHELKLGAEELERWFTKIDHVFEHTRIPPVGEVLTLFYKTTVKKLQHYDLPLVGHVNHK

SEQ ID NO: 86392 - protein, 55 aa, Zea mays
  Coding DNA Sequence Number=SeqID_43017
MVSAERCGCSITTNELVQRQTVPPTDELAHLAVAVAGEVREDPVHAGSLLQPHLV

SEQ ID NO: 86393 - protein, 381 aa, Zea mays
  Coding DNA Sequence Number=SeqID_43018
MAERYQLPRSCVPPTTRRKDGGCSGLSLLQHTPSPPLRRGGWVHTSCSRLRAEKPNPPCAVRTTAQRLQAALHFCPDQRAKGRAAMQAACNRAKWAHFSDYQHARHGGPGPRVMQLARRMLRACSCTATRATTAPPRLRNQYRDSRRPSARPSSASLARRRSGRRFASAIMTASEKGPGKGDTPKRILPREGTRLRASLLIRGSKAGPSEGFNSRLRARGLHTHYWSEVRRPAPQKGSTAASGYSGSTPTTDQGGNDLVTESHQREASSPRTPSPGDRVRQITRSSPETPCSAPTEGNMALSPLLLAERRRRGVCKKVESDPDRPLALCRGSGAALTNPAPATQLTASTYQPENLGPDRTPGLRPARMRERPDQPKHYTRH

SEQ ID NO: 86394 - protein, 148 aa, Zea mays
  Coding DNA Sequence Number=SeqID_43019
MGKSKKGSGSSPRSGDKRKREPTPPSEDFGDSEYSEEEFSSESEGSPAPVSPPTSSDDSDDSQGIAAEIWTYIRAVERSGLEGSDESEYSSDEEDSSDSSEEDSGGDGGDGGDDGDGGGDSSKGSDGGSKGDHGGGKGSSKGSNKTSG

SEQ ID NO: 86395 - protein, 114 aa, Zea mays
  Coding DNA Sequence Number=SeqID_43020
MMRSANGYLVQEEEEEEHGDEAAARREDEDEEDEEAEAVSEASSIGAASSDSSSSIGENSASDKEEEEEEDEVESKAQGLGMMGLATLESLDDALPSNRNCSCKTTAGDDMFFG

SEQ ID NO: 86396 - protein, 68 aa, Zea mays
  Coding DNA Sequence Number=SeqID_43021
  Homolog annotation: Hit_ID=Q6Z750; Match level="QueryCoverage=79%, HitCoverage=10%, E-value=2e-18, Identity=83%"; Hit description =Ankyrin-like protein
MEKKKYSRDAQTDAGETTLYVAAEASSKEVVHILLPLYDFEAATVRSRLELDAFHVAAKQGHTDELAF

SEQ ID NO: 86397 - protein, 300 aa, Zea mays
  Coding DNA Sequence Number=SeqID_43022
  Gene Ontology: Mol. function=hydrolase activity, acting on acid anhydrides, catalyzing transmembrane movement of substances; Cellular component=integral to membrane; Biological process=calcium ion transport
  Homolog annotation: Hit_ID=A2Q410; Match level="QueryCoverage=93%, HitCoverage=41%, E-value=3e-97, Identity=61%"; Hit description =Cation transporting ATPase, C-terminal
  Pfam annotation: Domain name=Cation_ATPase_C; Domain location=139 -281; Score=28.4; E_value=1.5e-06; Accession=PF00689.12; Description =Cation transporting ATPase, C-terminus
MGRSSPNDKLLLVQALKRKGHVVAVTGDGTNDAPALHEADIGLSMGISGTEVAKESSDIIILDDDFTSVVKVVRWGRSVYANIQKFIQFQLTVNVAALVINVVAAVSSGDVPLNAVEVRTIFILFCAIYSNAAIASSFKKEPLVTNIMWRNLFVQALYQVAILLIFDFDGVRILRLQNESRSDAEKITNTFIFNTFVFCQIFNEFNARKPEEKNVFKGVTKNHLFMGIIGITTVFQILIIQFLGKFFKIVRLGWRLWLVSVAIGLVSWPLAYVGKFIPVPFRSRTQVLIGNADEEEGGQS

SEQ ID NO: 86398 - protein, 195 aa, Zea mays
  Coding DNA Sequence Number=SeqID_43023
  Subcellular localization annotation: CTP_CleavageSite=69; ConfidenceScore=5.04e-01
MLETGHSFPEEFPPPGSVPSSHKTHLGSQKVNLGKFVGAGSAPISLPHPPLRRVLVRKSRHLFIVTRAPCGKVERDPIPFHPFLNRWTRKKRFSSRSTTVSTTRVKLSHDLPRFQPRAQQGAPPHPTSGLGLGRRSPPRPTPGLGLSLGLGRSHILARPRPQPQEKSPPRPTSASDRLRYRGYIITLLLASCLRL

SEQ ID NO: 86399 - protein, 258 aa, Zea mays
  Coding DNA Sequence Number=SeqID_43024
  Gene Ontology: Mol. function=hydrolase activity, acting on acid anhydrides, catalyzing transmembrane movement of substances; Cellular component=integral to membrane; Biological process =metabolic process
  Homolog annotation: Hit_ID=Q9LF79; Match level="QueryCoverage=98%, HitCoverage=23%, E-value=2e-89, Identity=62%"; Hit description =Calcium-transporting ATPase 8, plasma membrane-type (EC 3.6.3.8) (Ca(2+)-ATPase isoform 8)
LAYSMKKMMRDKALVRRLSSCETMGSATTICSDKTGTLTLNKMTVVEAYFAGTKLDPCDDVSQMSDSAASLIIEGIAQNTTGTVFLPEDGGAAELTGSPTEKAILSWGLKIGMDFDDVRTKSSVIHVFPFNSEKKRGAVAVQLDDGVHIHWKGAAEIVLSSCKSWLSVDGSVQSMSAEKHDEFKRSIEDMGANSLRCVAFAYCSFDIEKIPMEDITSWELPEDDLTLLGIIGIKDPCRPGVRDAVRLCTTAGVKITHY

SEQ ID NO: 86400 - protein, 100 aa, Zea mays
  Coding DNA Sequence Number=SeqID_43025
MARGESQKESEDDAQQPHTCSCDLEFWIWGKRLENANRTGARGKGIDRKGAHGMKGAVWKKDESVPKLWTMKLRLSAKTVMENETNLKWKRLLSPRQIIP

SEQ ID NO: 86401 - protein, 208 aa, Zea mays
  Coding DNA Sequence Number=SeqID_43026
MTTTIYLFHRPMHWSFLFLKILGLNPNTRRARLTGVDEVVAQKEQGKLARMRIANDDIAAHTVCVLQRLIVETRSEKACGEARAGNRAREKELAGAPRRGSSTPRRPSREHILRRPASSCVEAAMGVETRQKMKERPSASAKEQGTEELEEVETGRSCAMAKRQCSASAEDEQEQHDGRGTGELQAERAPDTSMKGRSRDAGETQPEE

SEQ ID NO: 86402 - protein, 66 aa, Zea mays
  Coding DNA Sequence Number=SeqID_43027
  Subcellular localization annotation: CTP_CleavageSite=18; ConfidenceScore=5.26e-01
MKLWKETSRSSKITTSSRCGLAATPSRLPVKAALSTFLFRTLIYCCPQCSQCSGGDAGNTEDFEEF

SEQ ID NO: 86403 - protein, 152 aa, Zea mays
  Coding DNA Sequence Number=SeqID_43028
MLVDYTMVLDGPSVSVKGPTKEGIESIVEVTPASGVTSDGSSDPSIRLRLLRKLRVVARTAIGVAIVSVSVASLAEVQGKAASQTPPLAEARGKSPAAPGPSPAPGVSAPAPRAGDDAVSPDDWTDLTPCDAGDAPPVEKAKRESQTYVQCT

SEQ ID NO: 86404 - protein, 118 aa, Zea mays
  Coding DNA Sequence Number=SeqID_43029
  Subcellular localization annotation: CTP_CleavageSite=30; ConfidenceScore=5.10e-01
MQDAARRALSQYCSLFSGVADGLDLKYYPRRSTGNAGGVIVSPVGEGNPRLNSMVNLVTCSTQSWTTPSMSWARCLRTGAEVRGVLSQSSRHPKKKQHLPPPPPMTIERMFLMQIQAV

SEQ ID NO: 86405 - protein, 186 aa, Zea mays
  Coding DNA Sequence Number=SeqID_43030
MPPAPPQCIPAAGGDPDRDGDDDDAGGSLNHGTELSEEPEGWIARPITRDAARGCHFHDALDTLLRRAFDRHTCGVANGLDLKYYPRRLTGSAGGVIVSPVGEGNPRLSSMVNLVVVLNTELDHALDELGKVQAEVADLRVECAARHYLDGGSPAPVGIQHPYRSPPRGRFDYGTPDCRTRIDLDP

SEQ ID NO: 86406 - protein, 36 aa, Zea mays
  Coding DNA Sequence Number=SeqID_43031
MESHDLRAKRESRLVGKEEGIESDLQEFQDFDEFED

SEQ ID NO: 86407 - protein, 125 aa, Zea mays
  Coding DNA Sequence Number=SeqID_43032
VRCANGSKSSTVGCANLGRRSAPESEQGMSGGAPDCPVRHPTEGKNCLPRMPPTAPSCLGAIKGTPRRVEESTKHTLSILNHSHSVFAHSIDFLSDLSFVLVDHLFTPPLGALNWYRSRSLHERD

SEQ ID NO: 86408 - protein, 26 aa, Zea mays
  Coding DNA Sequence Number=SeqID_43033
MANSTVAITPAREHQRARDTARQANG

SEQ ID NO: 86409 - protein, 64 aa, Zea mays
  Coding DNA Sequence Number=SeqID_43034
MDVLMIKNLGEDQKGLGKGLGVEEEQQGRHNRKEIESDSDATPSRVPGPAGISPRGEVNRAVHG

SEQ ID NO: 86410 - protein, 89 aa, Zea mays
  Coding DNA Sequence Number=SeqID_43035
MAHRTLNNACPVHQRTVWWPRRQKLQRSESNGLVTWQAHPDSVPWRNRTVWCAHATVAFTKWLVWWVGAINTANHPPFIGSKVFRIPTL

SEQ ID NO: 86411 - protein, 69 aa, Zea mays
  Coding DNA Sequence Number=SeqID_43036
MAASGAAPLRGGEVTGIEAGAGYGGSGVAGVGQRGRGCHDELDGGDRAMNPRAERGERRVFKSKFKLGF

SEQ ID NO: 86412 - protein, 109 aa, Zea mays
  Coding DNA Sequence Number=SeqID_43037
  Subcellular localization annotation: CTP_CleavageSite=63; ConfidenceScore=5.57e-01
MQGHSVPTHINRPQRFPVSRSGLTALAYNASLTPTGRRAVTALVPTITGMGDLVSGRVRGKVYCQVQSGTRLTDLPYFSARVLDLGLPPEQLLAPARGCTLCWGLVLKC

SEQ ID NO: 86413 - protein, 179 aa, Zea mays
  Coding DNA Sequence Number=SeqID_43038
  Pfam annotation: Domain name=zf-CCHC; Domain location=99-116; Score =16.0; E_value=0.0057; Accession=PF00098.14; Description=Zinc knuckle
MATCLDLTYSRAMRTTLSVEAKNLGHGKTKRYGGEGSSQGSEKRSRLVIRPFNPNRSSPRPPAYPFKQPVFIRPTPAPAQNNQSSAPIARFPALPSSSNGYFNCGKSGHFIKDCPYPKQNRSNFQQTSGNTSQGKGNVANTPMGKNTRKTGRVYYTQVVTTPEGEPLMMGTFFTANLPF

SEQ ID NO: 86414 - protein, 17 aa, Zea mays
  Coding DNA Sequence Number=SeqID_43039
MSRPKRPDFIRVRSHHQ

SEQ ID NO: 86415 - protein, 68 aa, Zea mays
  Coding DNA Sequence Number=SeqID_43040
MRQMKGNLQALMVEWDKSQCQDVEASLRVDSLSKHLEGERSEGRALKARIGGLKKDLETAVQTSRTLS

SEQ ID NO: 86416 - protein, 99 aa, Zea mays
  Coding DNA Sequence Number=SeqID_43041
MSSSSSSAANALPADSSSEDTLSDLAAVELQLGHTVEFGVSRISSYVWAVTSYGGQPSVEVFSKNYYLHWQKRKIGNKIAQFGSCTFTPRTRKTSTEVV

SEQ ID NO: 86417 - protein, 550 aa, Zea mays
  Coding DNA Sequence Number=SeqID_43042
MASRRCGQARRLHEHLAEVRPWMDDGAREVGVEVREKAAAAFWNREEEKWRVGEGKERGGLPFIELELWTCQVAVSSGRWKNVDIGRPFLAFSACFRTLVAVEDFFLDLHSTIVVQNFRAAAFADHIALGALTLEFAAERQRLEGRIERLRAQHTDAVQDKSAVENKSRRLAKRLVAAEAEKEDLMHQLAEERRDTNKACVEAQSAQAEAKLARAEASLARQRPRRWRRGSAACATAWTRQKPRCVRRSSGRIRSSWTGTESWVRGPCPSKCPVKDPVLKRSATALFDRMWGTHGQETVWERFDRAMDQLKMAHDEEVEDLDDLDSTLPEASGVELAPPSDAGEGPSATPAPTGAGEDPTPATVLASEDASKVVGEPAAEDPAAAAGPSQVPTFGPAQATAAGNTDFVVASTVCVPMIIYLALYLSVLSLMESSDEGLDYFVALNVAAAESSLRVEGVGDLPGESTEHRQRRVVSKRSVGEFSRSGRCRHMEMEHGRLRVDWIGKRELLTLPIGASIGEGDLRNLFEGEELRIMLFNYREMGIILKVEPM

SEQ ID NO: 86418 - protein, 257 aa, Zea mays
  Coding DNA Sequence Number=SeqID_43043
MVTNSSTVRVPVAWLEQRQRPTQGDNRTRGHDNDESSTGRRLPGICKSTETHNSRTNQPVKKELTALELETEYRQGIMENASAGNGSRSRAGRKLQLGATKDWASATIVAGEKPSKGGALHGGSTHAQGSLTAWRAQERAQELGQAMRREDRLGEGRTTTMAEGENPTCKNGQEGAEKERSMAGRAPNLVQERARTTPGTRGRSSERQRPRQGKGNPSWGKLGWAGARTGGEIGGRAAERMKARTAAADGITTTRRG

SEQ ID NO: 86419 - protein, 147 aa, Zea mays
  Coding DNA Sequence Number=SeqID_43044
GRAVVVRGVGSCTVPGLRTRVASEPLAAPASATAAGRGSSADEIARAAHGPTSNSTAFCPSLPHKFGHGRGPPSSSIRPEVTAAAVRPPGAEVVVVAAAGAGDGVPFVGLLSLRRPSPMEWGCSSSLVKETPWPLSDEPRPGVAISA

SEQ ID NO: 86420 - protein, 75 aa, Zea mays
  Coding DNA Sequence Number=SeqID_43045
  Subcellular localization annotation: CTP_CleavageSite=29; ConfidenceScore=5.27e-01
MRRLPAASQPSPSHRAASARLALLPQRLPAFSLKCISYLVKAHQSPMPSIELTLRTLDVILAFALLSVNLSVVRL

SEQ ID NO: 86421 - protein, 255 aa, Zea mays
  Coding DNA Sequence Number=SeqID_43046
MASHGSSDDENALTHTDGLAREGFPRILWEVLQGAGYTTPPQYAVQQFEKHRVPRCRVRMTLEPHPLQPGWRSLDSESFGYRAEDTIEAIALHGLTTFCGFHPLELATHPIGLFPAEKEDDPMWKDRVEHAKDIWAIYPGQTAHLTVRCMNALYRLQVMRGEAMSHLMALLEATKITLDNREELVVDLSQEMVEKDLQVEQLSTDIQELEELEIQDQEDNEDVDIEGGDEPASSVDTAGSGRPPSPESSVASFAH

SEQ ID NO: 86422 - protein, 119 aa, Zea mays
  Coding DNA Sequence Number=SeqID_43047
MAVHRLQPSLSGLQCSTARSPVLLHGPRLTGARTDCRLALLRREGLLLLPLRIPPLVAHLGMFLGPTATVLRHTVAAHLVPSHQISSSTSKSRSSECHVSSLVQSVLTGICGRTNQADS

SEQ ID NO: 86423 - protein, 126 aa, Zea mays
  Coding DNA Sequence Number=SeqID_43048
  Gene Ontology: Mol. function=protein dimerization activity; Cellular component=nucleus; Biological process=regulation of transcription, DNA-dependent
  Homolog annotation: Hit_ID=Q8LK78; Match level="QueryCoverage=72%, HitCoverage=20%, E-value=2e-21, Identity=65%"; Hit description=ABA response element binding factor
MASEMSKNVKALDEQEVTSQHSRAQTSDAAEEQRQQQAVDPLARQSSIMSLTLEELQNSLCEPGRNFGSMNMDEFMANIWNAEEFQAATAGCNKEGAYREPVPVATTTGTGENEGGGGGGGRGLVR

SEQ ID NO: 86424 - protein, 251 aa, Zea mays
  Coding DNA Sequence Number=SeqID_43049
MYYLVTEFVSLLSGVANINSLTSSCESQLSNQIGFFVEQLFLKFPSKTTPHPPSSSTHRALFAACDDHCSLQLLRRRFISERKTTEINQVATQENEISQNGRPTSKTCSALPEPILAHWSVNSDHVTADSNVTERQISDPCTNGLMMTLHSGKHDGLTMRYPPWWLIPFLKARINPRLPKTDKTRQQVLKVAPFIQQSTYRADALLLTTLIRVDKELLMVRTEEAAAHTYDLAALKYRESDCKLNFPILSD

SEQ ID NO: 86425 - protein, 51 aa, Zea mays
  Coding DNA Sequence Number=SeqID_43050
  Homolog annotation: Hit_ID=Q8W0X3; Match level="QueryCoverage=60%, HitCoverage=2%, E-value=2e-08, Identity=87%"; Hit description =Putative gag protein
MDPKGKGMVVNDNEKESIFNEPRDDKVNDSGCTIAAISMQLGSSGPVYDIY

SEQ ID NO: 86426 - protein, 298 aa, Zea mays
  Coding DNA Sequence Number=SeqID_43051
  Gene Ontology: Mol. function=endonuclease activity; Cellular component=cytoplasm; Biological process=regulation of transcription, DNA-dependent
  Homolog annotation: Hit_ID=Q338D5; Match level="QueryCoverage=95%, HitCoverage=41%, E-value=1e-117, Identity=76%"; Hit description =Endonuclease/exonuclease/phosphatase family protein, putative, expressed
  Pfam annotation: Domain name=Exo_endo_phos; Domain location=21-290; Score=-8.4; E_value=0.013; Accession=PF03372.14; Description =EndonucleaseExonucleasephosphatase family
MDIRRFTRKGQQRDKFSHVKKYEVEFNKAAQSLTDAIIPSAQKRLALNRLIKDNIALIAVLEAKFANHGAENPGKRQLLCVANTHINVHQDLKDVKLWEFLQVHTLLKGLEKIAVSADIPMLVCGDFNSPPGSSPHALLAMGKVDQHHPDLAIDPLGILRPPSKLNHQLPLVSAYSAFARMVGVGYDLEHQRRRTDPATNEPLFTNCTRDFTGTVDYIFYTASVSPFFWNKIKGTNCAYSFDNDHVCSPSADSLTVDSLLELLDEESLRKDTALPSPGWSSDHIALLAEFRCKPRIRS

SEQ ID NO: 86427 - protein, 191 aa, Zea mays
  Coding DNA Sequence Number=SeqID_43052
  Pfam annotation: Domain name=IQ; Domain location=104-124; Score=23.0; E_value=0.0011; Accession=PF00612.18; Description=IQ calmodulin -binding motif
  Pfam annotation: Domain name=IQ; Domain location=62-82; Score=21.5; E_ value=0.0032; Accession=PF00612.18; Description=IQ calmodulin-binding motif
  Pfam module annotation: Pfam domain module=IQ::IQ; Domain location =104-124::62-82
IQVSHTTAPILHNTAAATPSHPPSPTPDAFTRLEESFVRLAEKWDQFVVMFHRYKEKTEKELQAAVWLQAAARGFLARHQVQSLRGEKHLAVASRATPWPSSHEQVVVRLQAAVRGFLVRRAVRKLHLLISSSLHQLAACAPNHQVSSILFEPPAEVEIWLEDELVLKGGGDVMGIIGSERQQPGWDKARE

SEQ ID NO: 86428 - protein, 160 aa, Zea mays
  Coding DNA Sequence Number=SeqID_43053
MKYRALIPIESRLEGPQPPKWPLGGATIDGRTGQSGAPAHVTQPLGFDRWSSDRWGPRTVRWCTGQKTFKVFLGQFNVKSFNKNMLGGMLEDEEEVPPYPQNGHQLLVEFMGLGQPVTPAGFGLNIPSVQNADINEAEGWDAWPIEEPFQQPHIKQQVQQ

SEQ ID NO: 86429 - protein, 109 aa, Zea mays
  Coding DNA Sequence Number=SeqID_43054
SVRCTREINSKLLSFGFLESHSAIIHRTVRCSTGLSESEQAPEGAPDSEQYLSGAPPDCPDVGAKKCQSRSSQANLMIYESNIKAQASETRQADSGEKAALGNSSAMYG

SEQ ID NO: 86430 - protein, 128 aa, Zea mays
  Coding DNA Sequence Number=SeqID_43055
  Gene Ontology: Mol. function=endonuclease activity
  Homolog annotation: Hit_ID=A3C4P6; Match level="QueryCoverage=41%, HitCoverage=9%, E-value=8e-21, Identity=88%"; Hit description =Putative uncharacterized protein
PRPPASPERSRTFKEPSTGEASFPARISPFPPGRRGGILTLALSAGGLCLLGETGRGGSVGAGAREKRTGEEGGRMLSVVRVHLPSEIPIVGCEVTPYVLLRRPDGAVSTDDVPETAPADGQFMRYRW

SEQ ID NO: 86431 - protein, 109 aa, Zea mays
  Coding DNA Sequence Number=SeqID_43056
MDVHDDLDVFLRTETQGNKYLAVSITKETASLLLHAAISYSLAYSVTIKLVTIQWTGNSRGPLIDSYDHVIGVNTTTLTRKDLEGLDGLIPVYEYERKGGRSRSLQHRA

SEQ ID NO: 86432 - protein, 53 aa, Zea mays
  Coding DNA Sequence Number=SeqID_43057
MQVACNRATVVHPFGFVASGMEAQAHTSWTGKGDISKRILLGEGNGPPSPPTD

SEQ ID NO: 86433 - protein, 201 aa, Zea mays
  Coding DNA Sequence Number=SeqID_43058
  Homolog annotation: Hit_ID=Q8H6I5; Match level="QueryCoverage=30%, HitCoverage=6%, E-value=3e-07, Identity=57%"; Hit description =Putative RIRE2 orf3
MEVVVALLVQWSPASHLEFVVPQALWCGGCSYPREWNRSPEQVASQAEEVQQRRLELGQVIRERDQPRSHAAEAVSRAEVLGGQLAEATERLAGVSARARTLAESLAVRAQARCWHPPSRWRSFRPCRRLRPGQIPPKVETTPRVLLLPLPMSEPTGTICLKIAYPSESYFSQKVMSEDSIIDIVEKARKSFSTRALGLVR

SEQ ID NO: 86434 - protein, 113 aa, Zea mays
  Coding DNA Sequence Number=SeqID_43059
MPEQGAAQEVAPDPAPEPAPEDLPATALEGKPRFPSSRDLRRDPHSGYGGYKCGHCTTAVGVSEALYAKAPCLWHNFTGSLEDMVAGVTWPSILPLGWTVEWDPTSAEEEHEE

SEQ ID NO: 86435 - protein, 291 aa, Zea mays
  Coding DNA Sequence Number=SeqID_43060
  Gene Ontology: Mol. function=endonuclease activity; Cellular component=cytoplasm; Biological process=regulation of transcription, DNA-dependent
  Homolog annotation: Hit_ID=Q338D5; Match level="QueryCoverage=85%, HitCoverage=41%, E-value=1e-119, Identity=81%"; Hit description =Endonuclease/exonuclease/phosphatase family protein, putative, expressed
MGPPLWSPVLDADLSQEKGKSGYRIQSDRKVPICSVHPMEQATIQCLGCLKSKIPVAKSYHCSAKCFSDAWQHHKVLHERASSAQNENGAEEEELCGSGGSGVLSTAGSGSLSNFGQSPSINNEPVPLYPSGTDKNSGETWYEVGRLRTYTPTAADIGHALKFECVAVDSEKRSPIGPPTSVMTSHVIPAPTPTPRRLIQVNGDVLGHLDLDSQTSSLGTFTVLSYNILADTYATSDAYSYCPTWALTWTYRRQNLLREIIGYHADIICLQEGARGNRHAGIRPENKIEMS

SEQ ID NO: 86436 - protein, 95 aa, Zea mays
  Coding DNA Sequence Number=SeqID_43061
RGEEYASCREQADPESSRKKRRCREESALSGAGLVACASQDPSGTGGGESRKRSTGTRWAKWGGELDLDDGSAESKKIFRSGTPPRVHARVLECP

SEQ ID NO: 86437 - protein, 120 aa, Zea mays
  Coding DNA Sequence Number=SeqID_43062
VLSAYIHCIRDEEHLLHREGGKVFLENTFISSLLKRDGDPKLKGLERQIKLAAEHKELYQGKWSNLDVASWPIIEKITTQMQTRWDDITMFRFKLSVILWDSRLNTKKIHQNLDHNVDED

SEQ ID NO: 86438 - protein, 126 aa, Zea mays
  Coding DNA Sequence Number=SeqID_43063
  Homolog annotation: Hit_ID=Q75IA4; Match level="QueryCoverage=67%, HitCoverage=31%, E-value=4e-13, Identity=52%"; Hit description =Expressed protein
MAMPFARRDIEAAGAGASSDDSPAAKKGKPELAGARPALTRSEAFAFAAVLALFTAGIFCVFLTAPRGEFGQILRLPRSLADVRLLKCKFRQLGTFDMLVTNFNEGDKRGLLSYLILQRLHMGDVV

SEQ ID NO: 86439 - protein, 74 aa, Zea mays
  Coding DNA Sequence Number=SeqID_43064
MEREKRIQKQLVRIFVGGNKERNCIHIIPVKLLLLLVLYGILPTSTSLNQVPAVVFNCETNQEALLELKVVLAS

SEQ ID NO: 86440 - protein, 51 aa, Zea mays
  Coding DNA Sequence Number=SeqID_43065
MAECFTPTMRTITLFTFDVDILKGVEREIRNSFFMLMMKMLQKMEIRMLNC

SEQ ID NO: 86441 - protein, 95 aa, Zea mays
  Coding DNA Sequence Number=SeqID_43066
  Subcellular localization annotation: CTP_CleavageSite=59; ConfidenceScore=5.43e-01
MKLLLSSMDASSTVVGPALAPATPPQASAGSAVAAAFPLFSSGGGHPARERNNGRQYRRGSTGGGEVKEALHWHSVGEVGWRTGRLEVKRVMPRR

SEQ ID NO: 86442 - protein, 145 aa, Zea mays
  Coding DNA Sequence Number=SeqID_43067
  Subcellular localization annotation: CTP_CleavageSite=52; ConfidenceScore=5.10e-01
MHPRSTITSPWRVQRGERFAESRSPGRRGVIAGPAAPPTATSSPAQSVGVGRAAYGRAERQRRSADERGRRGTDRSGATADRSCATAGRSGTSRRRSKWRDSRATGDVTAQIEVAATSGQHQSRRGRLGLEERGVRGGGVAVYLA

SEQ ID NO: 86443 - protein, 289 aa, Zea mays
  Coding DNA Sequence Number=SeqID_43068
  Gene Ontology: Mol. function=helicase activity; Cellular component =nucleus; Biological process=viral genome replication
  Homolog annotation: Hit_ID=Q8W2T2; Match level="QueryCoverage=71%, HitCoverage=25%, E-value=1e-85, Identity=75%"; Hit description =Putative uncharacterized protein OSJNBb0089F16.19
  Pfam annotation: Domain name=DUF889; Domain location=6-203; Score =172.6; E_value=1e-48; Accession=PF05970.5; Description=Eukaryotic protein of unknown function (DUF889)
MVDKVQINTKFVALSFKLLQDHLFTPPLGALTIGSDYVRLPEEIVIGYTYTEDSINKLIVDIFPSLEENARSIAYMSTCAILSTKNQHVDQLNAKMIDKFPGNGKVYHSFDNVDDDSRNNYPIEFLNSMTPNGLPPHVLKVKINSPVILLRNLDPNNGLCNGTRLMIRALQDNAIDAEIVGGHNAGTRVFIPWIAMCPSDDISLLFKLKRKQFPIRLSFATTINKAQGQTIPNVGIYLPEPVFSHGQLYVALSRGVSRQTTRILARPKKELDPTWKSTKIIVYKDVLNC

SEQ ID NO: 86444 - protein, 380 aa, Zea mays
  Coding DNA Sequence Number=SeqID_43069
  Gene Ontology: Mol. function=helicase activity; Biological process =protein amino acid phosphorylation
  Homolog annotation: Hit_ID=Q8LML8; Match level="QueryCoverage=99%, HitCoverage=30%, E-value=6e-97, Identity=46%"; Hit description =Putative DNA helicase homolog
MRYNCHINVEACSSIKAIKYMCKYVYKGHDRASFSVYPAHKEDGVINEIRQYMDARYISPPEAVHRILGFPLFGVNPSVLQLQCHLPGMQSVIIDETAKLQDIVNEPSSSMTTLIEYFTKNRADSFARTLLSKDFPEYYRWIHGSKRWQRQKQRGQIGRIVYAHPAEGERYFLRVLLNHVRGAYSFEDLRTLGAITCSTFREACQKRGLIETDMSLDDCLSEAATFQMPHALQRLFATILVFCEATNVRGLWDKHNDSMPEDYNRDNPKSTCIQQMVLKDIQKLVRSMGKDIKYYYLPEINDSGGMGKTFLYKALLARVRSEGLIAIATATSGIAASILPGGRTTHSRFKIPIKLVDNSTCNFTKQSGTAELLRTASLII

SEQ ID NO: 86445 - protein, 379 aa, Zea mays
  Coding DNA Sequence Number=SeqID_43070
  Homolog annotation: Hit_ID=A2XFR6; Match level="QueryCoverage=42%, HitCoverage=46%, E-value=2e-12, Identity=32%"; Hit description =Putative uncharacterized protein
MGSRHSACSAEAECRGSFVLLFVSHPPAGRGSDQWGLALPGQNGNHGSWVKCATSAEGSETDISAVLTVVHIVTTAQEKTKPWKENSRSSKTTTGSRWLVLDTLHEVESVRRRSSVPQLEAPPAPPRDAPAVGGAAGGGPGGDPDDDDSYHSTESSEPQEAEGWVARPITRDAARGCHFHDALDTLLRQAFDRHTWSIEYRCVVYQHSRGRYPDRWEATCLVRRPEDDLRGAEAVSEHYSISERDTAEAAMQDAARHALSQYCSLFGGVADGLNLRYYPRRPTGSTESVVVSPVGEDNPRLSSTVNLVAVLNTELDHSLHELSRARTKIAELRAELAERRHQEGGSPAPVGTQHPYRSPPRGHHTYGSPACKTRIDLDP

SEQ ID NO: 86446 - protein, 80 aa, Zea mays
  Coding DNA Sequence Number=SeqID_43071
  Subcellular localization annotation: CTP_CleavageSite=16; ConfidenceScore=5.03e-01
MKTAHPCFVPRTARARATAAPRTTHPVALTPRRDRRHLWQGKQATLRLRHNDRVKERDRERGIAQKGSFPVKETGPEPPY

SEQ ID NO: 86447 - protein, 337 aa, Zea mays
  Coding DNA Sequence Number=SeqID_43072
  Gene Ontology: Mol. function=heat shock protein binding; Cellular component=plasma membrane; Biological process=protein folding
  Homolog annotation: Hit_ID=O65160; Match level="QueryCoverage=43%, HitCoverage=46%, E-value=4e-55, Identity=60%"; Hit description=DnaJ -related protein ZMDJ1
  Pfam annotation: Domain name=DnaJ; Domain location=26-62; Score=3.4; E_value=0.0019; Accession=PF00226.22; Description=DnaJ domain
  Pfam annotation: Domain name=DnaJ_CXXCXGXG; Domain location=96-163; Score=50.3; E_value=6.7e-12; Accession=PF00684.10; Description=DnaJ central domain (4 repeats)
  Pfam module annotation: Pfam domain module=DnaJ::DnaJ_CXXCXGXG; Domain location=26-62::96-163
EEIPQPYLYLTLDFEVNLEHERVLLHCYAYLRVLPLSLDSPFKELAQAYEVLSDPEKREIYDQYGEDALKEGMGGGGSHVDPFDKFSSFLDPLLEQGLKSGASMRCPGCQGSGMKVTIRQLGPSMIQQMQQPCNECKRTRESINEKDRCPGCKGEKVVQEKKVLEVHVEKGMQHNQKITFPGEADEAVCLFKHQCDKMLSAFRPRGVLGPTSKLSPRAPAQMGQRETEREEGKPEGDRRKGETRSLRVCPAPRSGVRRGPRGSSEVEVESVFHGRGRVRAPGRARWRPSSSGAEAESEPWGQARRSSSSSGAEAESEPWGRARQSLLSSGAEPESEP

SEQ ID NO: 86448 - protein, 261 aa, Zea mays
  Coding DNA Sequence Number=SeqID_43073
MQAACNRTKGTHPFDFDASSMEAQAHMSCNRSAGYCVQETAPPLAPLSCLLDCGTSTATQGNPAHDPTVPTRRIGHGSVSRGRRRDGRYGQKWAGSNGSGTRAEAAAKSSAKLTAGGTFGRRSRRRFTSAIMTASKKVRHVIRFRILFLFLFLSLTTGTGKGDTPKGILLREGNGPRAPLLIRASKAGPSEGFNSRLRALGLRAHYWSEVRRSAPRKGSTAASGHLGFAPTTDQGFVGWPSKGSTAASDAERGMTLGTFDT

SEQ ID NO: 86449 - protein, 110 aa, Zea mays
  Coding DNA Sequence Number=SeqID_43074
MYRSSRSGMDHIEPPTTWYVATVACGTWTVRSDHFLSVECIAAQPLASRNRRRDQHRRSTITYLSPESLTLGSGTGDCCYYCSGGRLQTKTPGWASGARGRMADAASAKP

SEQ ID NO: 86450 - protein, 46 aa, Zea mays
  Coding DNA Sequence Number=SeqID_43075
SEADDSESDLESDDEEREYNQDRDKISVLIQEIEEDDKTDVAEVQT

SEQ ID NO: 86451 - protein, 139 aa, Zea mays
  Coding DNA Sequence Number=SeqID_43076
MAPAHAAGVRGKQGTSPEGSSQGSWMETDAESAGIRYGTVARLLEGTGVEKLTARRGKTGEGARLAPQEQGSGRVLSTAGRAEASRHGHGPGQGRSRELLRAGQGGESRGEGPAGHGAGRGARSQCPDVLEGTSRGAWV

SEQ ID NO: 86452 - protein, 150 aa, Zea mays
  Coding DNA Sequence Number=SeqID_43077
  Homolog annotation: Hit_ID=Q6JAD6; Match level="QueryCoverage=100%, HitCoverage=20%, E-value=3e-21, Identity=41%"; Hit description =Putative uncharacterized protein
MSERMLSLFQTIQDRQDTLQQQLLVDRAEHRAFMTHILQHTGVQITPVQSAPPPALQTVVVPAIQAGPPLPTVGPSSSPLQPVTLVFSSPVIYSVSTQPLVPPAPAVTTAAVAVFVTSSAPAAPVAQPQSESVPAPASTVDPGSETDSDP

SEQ ID NO: 86453 - protein, 332 aa, Zea mays
  Coding DNA Sequence Number=SeqID_43078
  Homolog annotation: Hit_ID=Q6JAD6; Match level="QueryCoverage=83%, HitCoverage=41%, E-value=1e-117, Identity=72%"; Hit description =Putative uncharacterized protein
METWLPAQRDPAAVDLFSTPDTEVLSSSDFCTDCSASAPAFGPSCISASHRGRYVEEWVQVFYASVWIDPDHQWMRFRFEREDVTIHASQIRQLFGFNESSTRLHSLCYGTSNPPRRPHGRVAPGTTHVAALFRPPFSDGSRRSPAVSTTAAKFLYQLMRQTLLPRMGYREAATHIQLWLLGALVSHSEFDVVDFLICEIEDTVLDGLRAHRQLPYAHYLCHIFAQLIWPPQFQGTLEASRLLFGSYRPAPEDPVPAPSLVFDTQAEDTAFHQFETQGTTVHDDDDDDFGVPPPPPPPGSHDHEAGSSSAVLAAPPAVDPALVAILQTLTQE

SEQ ID NO: 86454 - protein, 56 aa, Zea mays
  Coding DNA Sequence Number=SeqID_43079
MDEARFLLLYPKRPCSCLHGRRGIGSELPPCSMAAGPSPLLSPPGRAQELPGWTRP

SEQ ID NO: 86455 - protein, 259 aa, Zea mays
  Coding DNA Sequence Number=SeqID_43080
  Subcellular localization annotation: CTP_CleavageSite=59; ConfidenceScore=5.47e-01
MAMRLMVLVMTMVLVVSIATTAQEKMKPWKETSRSFKTTTSFRRGLAATPSRLPMARLRHTARKSVIPFLPSRLAERPLRRPVAGQSSHLERLHHRLHEEQERRRQEQQGSSFSLHQEIESVRSCSPMLPLEVPPAPPLGAPASGVAAGGDPDDGSGDAGSSHDTDFSADQEPEGWVARPITRDAARGCHFHDALDTLLRRALNQRTWSIEYRCVVYQHSRGVYSDRWEATCLVRRSENSLQGAEACSEHYSISERDSA

SEQ ID NO: 86456 - protein, 905 aa, Zea mays
  Coding DNA Sequence Number=SeqID_43081
  Gene Ontology: Mol. function=oxidoreductase activity, acting on single donors with incorporation of molecular oxygen, incorporation of two atoms of oxygen; Cellular component=chloroplast; Biological process=fatty acid biosynthetic process
  Homolog annotation: Hit_ID=A1XCI3; Match level="QueryCoverage=100%, HitCoverage=100%, E-value=0.0, Identity=83%"; Hit description =Lipoxygenase
  Pfam annotation: Domain name=Lipoxygenase; Domain location=230-889; Score=1055.7; E_value=0; Accession=PF00305.10; Description =Lipoxygenase
  Pfam annotation: Domain name=PLAT; Domain location=117-218; Score =72.5; E_value=1.4e-18; Accession=PF01477.14; Description=PLATLH2 domain
  Pfam module annotation: Pfam domain module=Lipoxygenase::PLAT; Domain location=230-889::117-218
  Subcellular localization annotation: CTP_CleavageSite=48; ConfidenceScore=5.53e-01
MASAMKLLGRSSLASPAAAAPGRERRGGPCFAAVGREGSAHRRRSSLRSTAPVGALAERVVVTPAPPERAGAGPPEPHPQSVAARAVVTVRRRRKEDAKRRVAEQLDAYADRVGRSVLLELISTETDPRKGGPKKSRRSALVGWFEKKDVKTERVVYTADFTVDGSFGEPGAVTVLNRHQREFFIESIVVEGFPSGPAHFTCNSWVQPTRVDRNPRVFFTNKPYLPAETPPGLQELRRQQLSDLRGEGADTGERRITDRVWEYDVYNDLGNPDKGAEFARPVLGGEQQLPSYDRAESRVEYPEPIYVSRDEEFEDGKNEMLSEGALKALLHNFMPLLVSSVSPDIRDFAGFHDVDNLFKEGLRLKQALQDQLFQKIPFVRKIQENSEGLLRYDTPDIIKKDKFAWLRDDEFARQALAGINPVNIERLQAFPPMSKLDPAVYGPPESAITEEHIIGQLDGMSVQQALQDDRLYMLDYHDIFMPFLDRINALDGRKAYGTRTLFFLTAAGTLKPIAIELCLPPMTDGCARAKRVFTPPADATSNWLWQLAKAHVCSNDAGVHQLINHWLRTHAAMEPFIIAAHRHLSTMHPIFKLLKPHMRYTLKINALARQILINGDGVIESGFTPGRYCMEMSSFAYRELWRLDQEGLPADLIRRGMAVEDPTQPHGLRLLIEDYPYATDGLLLWSAIRRWCDAYVAMYYPSDESVQGDTELQSWYREAVHTGHADKRDAPWWPRLSTPADLASLLTTLLWLTSAQHAALNFGQYPLGGYIPNRPPLMRRLVPAEGDPEYAHLVADPHRFFLSALPSLTQTTTFMTVIDTLSTHSADEQYLGERPDEAWTADPAALAAAREFADEVRRAEEEIERRNADTGRRNRCGAGVLPYELMAPTSGPGITCRGVPNSVTI

SEQ ID NO: 86457 - protein, 185 aa, Zea mays
  Coding DNA Sequence Number=SeqID_43082
  Subcellular localization annotation: CTP_CleavageSite=54; ConfidenceScore=5.09e-01
MHKGSTKTWLPFKGITLLLKATLSTRVLSHCGLSLLQHAPRSSPYDTGVGSHASCKLAQGRRSQTGAQCAQMPSGYEHSSTFAQTSGPIQPSETSVHNSVKLPERGIEACFAGEASPRSPELSTPPECVDRIAVVWAGTLAADENTRLHTWTGAIPAIPAVKPHLAVTARASPSQPCPSPDLSRR

SEQ ID NO: 86458 - protein, 162 aa, Zea mays
  Coding DNA Sequence Number=SeqID_43083
MTSHGSSEDGNALSHTDGLAREGFPRILWEVLQGAGYTTPPQYAVQQFKKHRVPRCRGEDDLGASSPAARLALFGLRVLRIPSRGHDRGDRSAWIDHFLRIPSFGAGYPPHWLVPRRKGGRPNVEGSGSVEDMVAGVTWPSILPPGWTVEWDPTSAEEEHEE

SEQ ID NO: 86459 - protein, 20 aa, Zea mays
  Coding DNA Sequence Number=SeqID_43084
MGKPVPSLLMLLLSRVCPSV

SEQ ID NO: 86460 - protein, 72 aa, Zea mays
  Coding DNA Sequence Number=SeqID_43085
MGDHVSGRVRGKVHWQVQSGTRLTDLPYFSVDPLVQARVLDPGLPPEQLLAPAQGRTLRQQGYSLSKCNEHV

SEQ ID NO: 86461 - protein, 164 aa, Zea mays
  Coding DNA Sequence Number=SeqID_43086
MPPRRARGSPQVPSGDSMSPAAMLATMQAMQQKLAILRQAIPVAPAGAAQGAGGGGVPGGVVPVGAAPGVKGKCALRPFLSILVIECQRKCFCVNLCKVVDKVQIMSKATEGKIRLPGMLSTAPSCLGAIKGTPRHMEEDIKHTQSIPKHQDFDSTHLFLRDSI

SEQ ID NO: 86462 - protein, 275 aa, Zea mays
  Coding DNA Sequence Number=SeqID_43087
  Pfam annotation: Domain name=zf-CCHC; Domain location=101-118; Score =10.5; E_value=0.04; Accession=PF00098.14; Description=Zinc knuckle
  Pfam annotation: Domain name=zf-CCHC; Domain location=206-223; Score =12.1; E_value=0.022; Accession=PF00098.14; Description=Zinc knuckle
  Pfam module annotation: Pfam domain module=zf-CCHC::zf-CCHC; Domain location=101-118::206-223
MSRKIGQQEEPTYSKPYAFACDEHKKMKGKKKAPSSSEEEDEEEDDDDEGDQPTTSSSEDEETVRHVENVMRIIRKINLMGVPLQVEDLLFNIDRKKQRKRGFLSCGKKGHLRDNCPNMVEPTKRRSKGKALISVKTWDDSSSEDDPPRTRNHRSASCSSWNEQLRQEVARLGKALYDKKGKAKQTQPLQDNTTTGVNKPGEGETVVCRLCHKEGHKSYHCKVDKKTATPYLIKKKKNGKVIAIKANKQDNKGKGAKRIWVPKEIISTMKSAKKV

SEQ ID NO: 86463 - protein, 77 aa, Zea mays
  Coding DNA Sequence Number=SeqID_43088
MCMNSPKVGVHVKCKVDQQNKETTDQAKDGGKKSFEVPSAREKVKETRNPKPGVKKKTCKVKVDRVKKSYGASSITT

SEQ ID NO: 86464 - protein, 263 aa, Zea mays
  Coding DNA Sequence Number=SeqID_43089
MTSHGSSDDGNALSHTDGLAREGFPRILWEVLQGAGYMTPPRYAVQQFEKHRVPRCRVRMTLEPHPLQPGWRSLDSESFGYRAEDTIEAIALHGLTTFCGFHPLELSTHPIGLFPAEKEDDPMWKDRVEHAKDIWAIYPGQTAHLTVQCMNALQQEELVVDLSQEMVEKDLQVEQLSDEIQELEELVGIRENTIEVLEDQLINTQQQLVEANEHLDMHHQEIQDVGANEDIDIEEGEESASSVDTAGSGRPPSPESSVASFAH

SEQ ID NO: 86465 - protein, 79 aa, Zea mays
  Coding DNA Sequence Number=SeqID_43090
MGKPVPSLLMLLLSRGGVPLDSPTRWQDGRPSHSRNHVLQRTCKIVPQARLCINRGLPSKDVAGRSSGAGSGAGSGATS

SEQ ID NO: 86466 - protein, 259 aa, Zea mays
  Coding DNA Sequence Number=SeqID_43091
MPPTPPQGIPATGGDPDGDGDDDDAGGSSSHDMELSEEPEPDGWIARPITRDAARGCHFHDALDTLLRRAFDRHTWSIEYCCVVYQHRCGLYPDQCEATCLVRRPDDDLQGAEAFSEHYSITERDTAEAAMQDAARRALSQYCSLFSGVADGLDLKYYPRRSTGSAGGVIVSPVGEGNPRLSSMVNLVAVLNTELDHALDKLGKVRAEVAELRAECAARHYLDGGSPAPIGIQHPYRSPPHGRFDYGTPDCRTRIDLDP

SEQ ID NO: 86467 - protein, 89 aa, Zea mays
  Coding DNA Sequence Number=SeqID_43092
MHDFLLELALLACSGWLLGQEDGLPGCSDDGIDFLLAGCSDGTATAEETASGREGVVHQLIMEGINQSSQEAVLSIGIRVDIDSRLEGG

SEQ ID NO: 86468 - protein, 96 aa, Zea mays
  Coding DNA Sequence Number=SeqID_43093
  Subcellular localization annotation: CTP_CleavageSite=63; ConfidenceScore=5.14e-01
MAHRSYSGPPETFSPPFSPLCSWIHGLFPAVEFVVAPSSPLPNSGDPGATLARACLNSGDLTVAERSGAARSRLFPPGGEAGNMDDFEEFQKYDEF

SEQ ID NO: 86469 - protein, 94 aa, Zea mays
  Coding DNA Sequence Number=SeqID_43094
MLVDYTTILDRPSVPVESPTQQGEGGLSNSTSFEARGKSPTAPGPAPGVSALAPRAGDDAVSLGDWTDLAPCNAADAPPGEKAKRGSQTYMQCT

SEQ ID NO: 86470 - protein, 83 aa, Zea mays
  Coding DNA Sequence Number=SeqID_43095
MSGVHRIQRSTAIDLNRVCVTAATMYWMERGPQRFSWKLDSGDNGERPKGSRSGAPFARGEGLWFSMELLDRGPWPSRGLPFA

SEQ ID NO: 86471 - protein, 95 aa, Zea mays
  Coding DNA Sequence Number=SeqID_43096
  Subcellular localization annotation: CTP_CleavageSite=75; ConfidenceScore=5.26e-01
MAGTPSACQGGGWAEPCAPTLSTSARLSKYKGCRCVASSGSSAAFACLHPRRCPYIIVNYVVVRLSHMVYPDCSRASSLSHSDAFSSRSFRLESA

SEQ ID NO: 86472 - protein, 66 aa, Zea mays
  Coding DNA Sequence Number=SeqID_43097
MSRPNSSLPTSSSACARGPADSDHPRRRPAHRRDPRDLPYNLDHLTGAASLSSLKLITEIDQTLVK

SEQ ID NO: 86473 - protein, 180 aa, Zea mays
  Coding DNA Sequence Number=SeqID_43098
  Subcellular localization annotation: CTP_CleavageSite=62; ConfidenceScore=5.09e-01
MAHRSFFGLLETFSMSFSLLFPWIHGLFPATEFATVPSPSLPNSGDPRATLARAYLNSGDLTAAERSGAASRTSGFPALEQKPSTFTLILDSNPNAPIDKNSAKLASLHTQTIKECPGKRSLNGIMAIISKIWSQSALEHYLSLRCLVLDAVPDAAHWRSPAHAPSACQSLPSAALPHAY

SEQ ID NO: 86474 - protein, 57 aa, Zea mays
  Coding DNA Sequence Number=SeqID_43099
MVEKLRLEVEECDPVKVKVMVQKWLKGNEVWAFVLLEQVVPKKEEVKGQLAALLTEF

SEQ ID NO: 86475 - protein, 259 aa, Zea mays
  Coding DNA Sequence Number=SeqID_43100
MPPAPPQGNPATGGDPDGDGDDEDAGGRSSHDIELSEEPEPEGWIARPITRDATRGCHFHDTLDTLLRRAFDRHTWSIEYRCVVYQHRCGLYLDQWEATCLVRRLDDDLRGAEAFSEHYSITERDIAEAAMQDAARRALSQYCSLFSGVADGLDLKYYPCRSTGSAGGVIVSPVSEGNPRLNSMVNLVAVLNTELDHALDELGKVRAEVMELRAECATSHYLDGGSSAPVGIQHPYRSPPHGRFDYGTLDCRTRIDLDP

SEQ ID NO: 86476 - protein, 325 aa, Zea mays
  Coding DNA Sequence Number=SeqID_43101
MVTFMMMINNGDYNPDLWYFLFEGVPLASPLYPNRTFAEYVEVYSPLLYKPSHPRLSPLFSAFRRWLVLGALHSVHCVAQCQGIPATGGDPDGDGDDDDAGGSSSHGTELSEELEPEGWIARPITRDAARGCHFHDALDTLLRRAFDRHTWSIDYHCVVYQHRRGLYPDQWEATCLVRRPDDDLRGAKAFSEHYSITERDTAEAAMQDAARRALSQYCSLFSGVADGLDLKYYPHRSTGSARGVIVSPVGEGNPRLNSMVNLVAMLNRELDHALDELGKVQAEVAELHVEYAAHHYLDGGSPAPVGIQHPYRSPPHGRFDYGTPD

SEQ ID NO: 86477 - protein, 75 aa, Zea mays
  Coding DNA Sequence Number=SeqID_43102
MYTCFRTPRIAPWELGDDNSDERRQRISRLEVGLGGGARNVEVPTPEDGDLEMLARGSRRGTLSRGRVVNSQVDP

SEQ ID NO: 86478 - protein, 100 aa, Zea mays
  Coding DNA Sequence Number=SeqID_43103
MGASNTVRCASHVTQPLEFGRGRPLELCLLVAPNNPVPHRTGIRCSRLLRWLVVAPLVHQTFRWHTGYPVNYSGVALEKPEGGQFGVVRSWGTGQSGAPD

SEQ ID NO: 86479 - protein, 57 aa, Zea mays
  Coding DNA Sequence Number=SeqID_43104
MGSSSLRVERESRLVGGYEIDGSGYDYGAGCQHCNHCSGEDEVVEGDLQEFQDYDEF

SEQ ID NO: 86480 - protein, 302 aa, Zea mays
  Coding DNA Sequence Number=SeqID_43105
  Homolog annotation: Hit_ID=Q8LMA6; Match level="QueryCoverage=82%, HitCoverage=13%, E-value=1e-07, Identity=26%"; Hit description =Putative retroelement
MKGTHPHHLGSGMIKDSLMEDSLAIRTSYCSEVEGFPHLLRSCALRMGIRKKPEYVWKEYLESGMEKCFMAVYLGESRNYPNHPSFQVTFTGYRFPDTCQNVARTALGQLCQNYNKMIFETPLRYFPTSNKNTPTWRKRLQALSGGDPIEDDPTIVYMAGYLHTLDNQYDDLTLHCTHLTSRVESLEQKVRELSREKASLQESLAIAEGEETNTREAYRTLKMDYDKKLKKLAPARKIRKKTKSQGCQTEQKEEAPPTLPPAGLRNSSDTEEMSLASLDDLLKEFGDTLEKEFGSTLDSTRM

SEQ ID NO: 86481 - protein, 98 aa, Zea mays
  Coding DNA Sequence Number=SeqID_43106
MSTDSTDDELNLDVVVEERRLEAHNEAEDARCLLLGPTTIDLDDAGCQSFTISQERVQTKRAKDNPKGTLVWRTGLSGVPPDSVRCTKALDAELATFG

SEQ ID NO: 86482 - protein, 206 aa, Zea mays
  Coding DNA Sequence Number=SeqID_43107
  Homolog annotation: Hit_ID=Q2QT97; Match level="QueryCoverage=47%, HitCoverage=12%, E-value=2e-07, Identity=35%"; Hit description =Transposon protein, putative, CACTA, En/Spm sub-class
  Subcellular localization annotation: CTP_CleavageSite=38; ConfidenceScore=5.10e-01
MVVVFAALCPSCFLLLNHSGSLPVCKFTIVPASYARIRCSQVALENAGQAQTAGNCMVLSTHTDQQTTVLPDAGISLRTEATTIMGSSDKIMEYRKEKIRKFMQLQQKEDDELFFVIVPAILQCLNDEKRPVHTSEYTGAKKMKEILEGHESWCKSEFRMEPEILRQHATILGNMQHESWCLQADGCRWCFIFGFFVSGLRHGRIL

SEQ ID NO: 86483 - protein, 595 aa, Zea mays
  Coding DNA Sequence Number=SeqID_43108
  Gene Ontology: Mol. function=protein binding; Cellular component =nucleus; Biological process=regulation of transcription
  Homolog annotation: Hit_ID=A2X817; Match level="QueryCoverage=99%, HitCoverage=81%, E-value=0.0, Identity=59%"; Hit description =Putative uncharacterized protein
  Pfam annotation: Domain name=GRAS; Domain location=214-510; Score =223.0; E_value=6.9e-64; Accession=PF03514.5; Description=GRAS family transcription factor
REEGQRCQYSEKTTAAAGQDQTFLNWIMDAPADMDPPPPPPPLLGNAAGFGFPAPDPLGFSLQHHPGGGGASAGALASDLSSPGARSLSGSSGSGSKATSTFGLLPTEAVLQPPPPPAATTMRFHDGADIKPPLLGVPSAGLLHQHQTLPAASFFMPLPSFPDHQHQPHLPPPPKRHHSMPDNLFLLQNQLQPPPSQGLPFPPLHTTTPFQLQPPLQPPRGAMKTTPAAQQHQQLLDELAAAAMAAEVGNSIGAREILARLNQQLPPIGKPLLRSASYLREALLLALTDGHQGSTRVTSPLDVALKLGAYKSFSDLSPVLQFANFTATQALLDEIASTTSSCIRIIDFDLGVGGQWASFLQELAYRRGTGNGPLPMLKLTAFVSSASHHPLELHLTRENLSQFAVDLGIPFEFTAINLDAFDPAELIAPSADEVVAVCLPVGCSARTPPLPMLLQLVKQLAPKIVVAIDHGSDRGDLPFSQHFMNCFQSCMFLLDSLDAAGTNADAASKIERFLIQPRVEDAVLGRRKAEKAMAWRAVFTSAGFAPVPLSNLAEAQADCLLKRVQVRGFHVEKCGMGLALYWQRGELVSVSAWRC
